United States Patent Application Publication US 2004/0214272 A1 - sequence listing, part 28

SEQ ID NO: 115279 - DNA, 296 bp, Zea mays
  unsure (1)..(296): unsure at all n locations
  Clone ID: MRT4577_36619C.1
ctcgttcagccaccttagggtttggttttgggacgaagcccccatactttcatacgccgaaactgnggttgtcgagagtgatacaatgacagggaaaccaccaaatgatcaaaaagggataatacctaaatcttttttgcaaaaattcaagacctttcaaaattttgaaacggccacatggacttatttcatgaacgcatcaatgccggttatatacgatgagaccattcttgatttgatatcaggtgggggctctcccagctttcaggctgtgaaacattgcactatccagcatg

SEQ ID NO: 115280 - DNA, 270 bp, Zea mays
  Clone ID: MRT4577_3661C.1
atatagccgggtcgacgagtactccagtcggcggccgcccccggtctcggggttcatcatttgagaacaacctgaacaagcgccacagtcgaggaaacgaaggacggttctggccggcagagctctcgcttactgaacacgaatgcactcccgagcgtatcagacgaccactggatgacaaacagctgcttcgactacacgagcgagctcttagtcattgcccttgcgggcctccacggtcattctctaaggggcagaggaccgctagac

SEQ ID NO: 115281 - DNA, 321 bp, Zea mays
  unsure (1)..(321): unsure at all n locations
  Clone ID: MRT4577_36620C.1
ggccccgcgggccgcgccagcaccaggagccgaacgaggaggagccacgaanccaaccaggccaggcgccgcccagaccaccccgcccacgagggcgcaccgcggcacccggaggaaaaaacccccgagaaagccccacgcgcccgccaccaaacccgccaagccggcgaggacccacgaacccacggcgcaggcacgaacagcacaacgacaccgcggcccacacacacaggagggcgacgacgccgcgcaacacggaccccaaggagccccacagcgaccaaacacaccccccgggagcacaccagagacgagaaagag

SEQ ID NO: 115282 - DNA, 323 bp, Zea mays
  Clone ID: MRT4577_36621C.1
aactagggctctatatgtatatgtatggacttgtctgggcatgctcggcttctccccgctacatgccgtggacagtgagtgctgatgcaagtcggaacactggccttccaacccagagacacgaagacaagaacagcagagatggtgcttcaagctcggatggaccaacgacgagccgtccagaacatccaaggaaagatttgcaaagcggtcagtccatcctgatgaagaggagacaagcagagcagtctggggcagctcgggcgcctgcgccgaggaggagatgaacgcgcacataatcgagaagtgggtgcaagctggag

SEQ ID NO: 115283 - DNA, 346 bp, Zea mays
  unsure (1)..(346): unsure at all n locations
  Clone ID: MRT4577_36622C.1
gggcaggaagatcgagaaagtatggcgcagccaagtttggcccctactacggcggcggcgctggagcagctaaacagcagcaagatggtggatggcttcaatctccgctcccgccctagagcgctaccctcggctgcgcactccacatgcccatctatttgnccgagcctttgccatngacaaactctctctccaccancannncatcatggtgggggggggctcataacaatttttttgctnaacaaacnaatcaanaacataattgtactaatcaaaccacttnangatgacagaagcaagcggntattcacagttcaggagctggaaaatagaatccactctc

SEQ ID NO: 115284 - DNA, 450 bp, Zea mays
  unsure (1)..(450): unsure at all n locations
  Clone ID: MRT4577_36623C.1
cggccgctcgaggcggccggngcgggagcgcgtctcttctccaacccatgtgggggaggtcagctaggtggcttttgccagagcaggagggggtcaaagcagaaaaagcgcgatgcagtgcttccggttcgcgagctgggagaaggagcgggaggaggagctgcaggggcctgcacggtctcagtcggcgcgttccaacagcagcatctccacggaccgtgacgcgcggcggtcgggctcagagtgctgctcgctcaccgtctcgtcggagatcagcgtcgagtccttcggccggtacaggcagctgtcgctgccgcagcggcccaacaatgacctccgcatcttcaccttccacgagctcaagagcgccacccggagcttcagccgtgcacttatgatcggtgagggcgcctttgcctgctactacctcggcaccatccgtcacaccct

SEQ ID NO: 115285 - DNA, 416 bp, Zea mays
  Clone ID: MRT4577_36624C.1
actatagaagagctctcacgtacgatgcgactcgtacttaagctcggaattcggctcgagtgaagatgcatcaacgagttacatgtcctgggtgaacattaacaccgagagctctgaccctaaaatatttgctgaggcttctgatggtttggaaggagtcaagagagtgaccgattgggtatatcagtgcaaggaatctcttgagagaagaacatgtcctgaagcaacaaaagcgttagaattgatctccaatgcattgcacatatgtccacattcagacagcgtcaaggagatgaaagcagaagcattgttgatgctaccaagatatgaagaagtgattcaactatgccaagagtctgtgaatctgactgaaagaaattcacttttattccaagacaatggagaaccaaagaatt

SEQ ID NO: 115286 - DNA, 243 bp, Zea mays
  Clone ID: MRT4577_36625C.1
ttgttgcgtgggtcttccttccgcggactaggggggtttgattaaactgtgattgcggtgactacccaatccgagaaggcgcgccagattctttgacagcctgggcaaccctacagtcgtggtcgacgagcttcgctcagatggaacccttgcaagggcagctgctcccagcggagcatcaactggcgtatatgacgcgtctggagtagagggatggtggcaccgactatcccgggaagggtg

SEQ ID NO: 115287 - DNA, 763 bp, Zea mays
  Clone ID: MRT4577_36626C.1
cccgtgtaaaatgagcgcagtcgccaagcgtgtatctaagaagaggaagttcgtagcagatggcgttttctatgctgaactcaacaagtttctcgtgaacgagctttctgctgatggctatgccggtgttgaagtccgaaccacaccccaaaagactgacattatcatccgtgctactcatactcaacgtgttctcggagagaagggtagacgtatcagagagcttacccaggctgtcagcaagcgttacggcttcaaggatggtgccattgaaatccttgctgagcgagttatgttccgtggcctgtgcgcttttgctcaggctgagtccttgagaatcaaactcatttttggtcttgccgtccgaagggcttgctacagtatccttcgcttcgtcatggagagcggtgctaagggttgcgaggttatcgtctccggtaaggtcagaggtcaaagagccaaagcaatgaagttctgcgatggatatatgaagaaatctggttatgctaccacagaatatgtaaacagagctgtccgaaacgtgctcttgaagactggtattctagggctgaaggtagccattatgttgcctcatgatccccttggcaagaagggtcccaagaagcctctccctgatgtcattgaagttcttcaacccaagaaggacaatgttgtttccaagtaaatattgcctttggccttggcggctggtcttgttgtgtgtgcagataaaaaagaaacaactaaacttgccttgtacttc

SEQ ID NO: 115288 - DNA, 358 bp, Zea mays
  Clone ID: MRT4577_36627C.1
ggcctgggcaacacttatttacttaataaacccccccttattggccatgaatcccgaaagccttgagggggaaggccaaaaaagcgccattgaggcgcttttttaagggggatcaaacctaacacaagaaagctgggaatgtgacgcaacttattgtttttcggattggggaacccctaacaccggggggggagcgcaaacagaatctagggggtaccggatatcagaggggatggctaagggaccgatttgcggtgtgcttaagaggacatctaggccggaaaggtccatgacgaaaggcattttggggggcgcgtggatctggaacgagaagggggggttcgtgggcccagggctg

SEQ ID NO: 115289 - DNA, 1970 bp, Zea mays
  Clone ID: MRT4577_36628C.1
gatggcaacaccaaggctcgccgcaatcttcttctccttgctctgctgccgcgcagcgtcctccttgcgccctccgaatctcatctccaacagcagcgacggcgtcatcacccatctccctggcttccaggggcccctccccttccacctccaaacagggtacgtggaagtggacgaggacaatggcgtccacctcttctactacttcgtccggtcggagcgggaggacagccccggcgacgaccccgtcgtgctctggctcacgggcggccctggatgctctgtcctcaccggcctcgcctacgagatcggccctctcagtttcgatcttaacggctacgttggtggcttacccaagttggtgtataaacaagattcatggaccaaggtgagcaatgtcatatttcttgattctccggttggcgctggattttcgtattctcacacggaggaaggctacaaatcgagtgataccagagctgtgaaccaaatcctcgtcttcctcaaaaagtggtttgataagtatccacagttcttttcaagtcttctctacatcgccggcgattcctactctggcatgatcgtgccaaccgttacatctgaaattgctagaggtaaagaagaggggagccaaccgaatctaaatctaaagggctacctcgttggtaatccagtcacagatttcaacttcgatggtccgtccagaatcccatttgctcacgggatgggtctcatatcggacgaaatatacgaggcatacgagaagagctgcagtgtgggtgacagtagacgccaaagcattgagtgcataaatagccttggcgccatagacgagtgcatcaaaggcataagcccgaaccacgttctggagcccctgtgcgctttcgcgagtcccaagccgaagctaataagttcaggtgcacgggagatgctccagctcccagtcccagtgcacactgaggaggaggaggaggagcttcgcttgtctgagatctcgctgcagtgcagaacggcaggatacatgatgtccagcatgtgggcgaacgatgcctcggtacgacaggctcttggtatccacaagggaacagttccttcgtggtcaaggtgcaactacgacataccttacacgaacgatattccgagtgcagtgaagtaccatctggatgtgaccaccaaaggctacaggagtctagtttacaacggtgaccatgatatggtcgtgccttttatcggcacgcaagcctggatcaggtctcttaatttctctaccgtggatgagtggaggccatggtttgtggacggccaagttgcaggatttacaaggtcatactcaaacaacctcacctttgcaaccgtcaagggtggtgggcatactgctccggagtacatgccaaggcaatgctttgctatgtttgtgaggtgggtttctggtgaccccctttgatggcgtacatagcagctccaagttccagtgatgcgttacattattacaagcgaaacgtattggttaggggctccggagaaggaaaagcagttgtggaagggcatcctgatatatacatgcaagttattcttaaatcttgtcagtttcaaacaaacgacctataagttggcttttaaaaaagctgtaaaattagcttcaacagaatggcccgctcgatttcctctatggtgactcacctagcaggatgtctgctcgaggttctctatagtgactcgcccagtaagattttattatggtgatgcggaagaatctggatgagtaatacatggatggaaaagagatgggaaattggaggttaatatacgatgtctacatataaaaagagtggtaagtaggggaggggaagacttatatgattcgtgcagaacaatgatcgaaactggtgctttatagaaatagagatttggctagaagttgccgacatgttcgtttggttttaatctatatcaactactgctacttctat

SEQ ID NO: 115290 - DNA, 538 bp, Zea mays
  Clone ID: MRT4577_36629C.1
ggtacacgcggccccttctcgagtttttttttttttttttttttttttttttttttttttttttttttttttttttttttttttttttttttgggacaaacaagggctcccgggacccgaatacggggcccgggggggcccacaaaaaagccgggtaatcccttgaacgaacgacgggacaacctttcttcagttctcgcccctggggaaggacaaaaaaaaagccatacccatttggccaacgaggttcgctccctggtcaaaaaggaacaaaacaacaatggggattatccccaggccacaggcctaaaataaagggccaaaagggggggcacccccctaaataaagcaacctaatcgggcaccctaccctttaccgattttggaccaaaaaaaacactattttaaggcttaaagggaaaaaaaaccctggccccccccccggaaaaaggacccaacaaaaatggcatttttggaaactatggggacattgtttctgccgggaaagcggggggaaatcttccattactctcaggga

SEQ ID NO: 115291 - DNA, 418 bp, Zea mays
  Clone ID: MRT4577_3662C.1
aaaagctctaaaactttaatttaaggtgggcttaatgtttaaaggtaacatgtaaatcatttgtttggagccttagctctaaaacttagagagatgaatcaccaaaaaagacacagggacaaatcaccctgaacccgatagcattggtcccagcacggatcaaaatttcttcaaacgagatgaagaacggaatggttcgtcgcttcacatatagcgcgggtgtgccaagattcaggacggagagttcagtttgtcaccgcccgctcgccgccagcccgttcgccgccaaacagcgccttccgttggtcgatgcagaactcgctgtcgcctctttccagcaccagcaagagagcagcatccttgttgcacccatcgcaagaggtcgagctcgaggtcgaggtcgagctctcgcgaacgc

SEQ ID NO: 115292 - DNA, 1530 bp, Zea mays
  Clone ID: MRT4577_36630C.1
ttgggtacctcgaggattggggggctcgaggccggccgggacggcacaacagcagctcgtgacccattagtaggggagctgctggagcacacgcacggccacgccccgatatcgccatggctatcctcgccgttgcctctccactcaaaaccctaaaccctagccccggggaccacagccgctgccgcctctcctcttccctcctccaccttccgctaccagtgccacgatggcgccgcctccggtgctccgctcagtacagtgaggcggcggcgcagcccacgtcgacaacgacggcgcgtccagcggacataccctggagcaaggagctctgcaactcggtgcggctcattgggactgtaggcaccgacgtagagctgcggcagctgcccagcggctccgccgttgcgaggggtcgcctcgccgtatggaagtcagccaccgagactacatgggtaactctacaattctgggacgatcttgctattgtggcctctgagcatgttaagaagggtgaccggatatttgtttctggacggcttgtgtcagatactgttgatgaggggcctgagaagcggcatgtttactacaagcttgcagttcaacagttgaatttcatcgagtcccagccagttcgattatatgaaccagaggcaagccaggatgcccctaggtggaaggcgtgctgattattttaactctatctctaattcaactgaggataagaatagggataatatgagctcatctcgatcaaccgaagagctgtggcaagtgttctttgccaatcctcttgactggtgggataacaggacaaataagaagaacccaaggtatccagacttcaagcataagcagactggcgaagcactatgggttgacgggaggaacaaccccaactgggttatatctcagctggcggttttggactcgagaatgagttcgctgcaagacaatgagaggaaaccagtctcctatatgtatgctgacgagttcatgacattggacggcaaccgatagtcgttatggaggagggaagcttcgctcgtgccgattggctggctgttatggcgagcgagatcatgctgtcgacctgtcttagtagctagctcatgcttgctgtctcagttttgttgagcggctctggagggttgcgtgttatgagcgtcgtccgtagtatggtttgtgacataaggtagctatgatgagcctagaacaaacataaacaaagtgcgggggaaacccttgcttttagtgactccattagtagtgctatgtggtttgtgacatggtttttaactatgatgttacgccgaatggtaatatattgaagaacgtgccgtggccctaaaaaaaaaaaaaaaaatttagactagatggagcacttaccaatgttggacttgttaaatctgggttttctgaatgtaaatgatactagtaattgtggttaagattaatctatggtaggcctggaataccaggactagggctttgaagggggaaggttgatgatgccttctaggccgagtt

SEQ ID NO: 115293 - DNA, 208 bp, Zea mays
  Clone ID: MRT4577_36631C.1
gttgggccacgaataggacagctacatataatgggcctcattagacaaaacaggcgttttgggctccatttgttacatccaaaagaaagctggctacaaacatcctgaaaggggggctttttagcaaaaatatttacatcgcaagggtcatacaaaagcatgttttcctatgcaactaaaccataattttgcatcccacccgatcatt

SEQ ID NO: 115294 - DNA, 310 bp, Zea mays
  Clone ID: MRT4577_36632C.1
gacgaagatcgggatgcccatcgctgcaagtggatttttgtgtccaaggcatttgtgaagaataaattcgtgagcaaggaggatcaactgcaggccttggtgttcgacatgtctttctttagtgcggaacttgcgacatctgttccagcactgcttcagaatacggagagtattgtggacactgatcctgttcaggtcgatgctgccactacttctagtgggtgttattagcattcttgttgtagaggacctgctcatcgtttgacacaattttgatgtatctgtatgctagtgtacacgaatatacttt

SEQ ID NO: 115295 - DNA, 403 bp, Zea mays
  unsure (1)..(403): unsure at all n locations
  Clone ID: MRT4577_36633C.1
gcgcatcctgctcgcctcctctgctgatanggaaagcgtatgtgtgatggtgacagtgattaaaaaaaaaaaaaaaaaggaaaaaaaaaaaaaaaaaaaaaaaaaaaaaaaaaaaaaaaaaaaaaaaaaaaaaaaaaaaaaaaaaaaaaaaaaaaaaaaaaaaaaaaaaaaaaaaaaaaaaaaaaaaaaaaaaaaaaaaaggggggggccctttaaaagatccaaaatttacaaccccggaaatgcaactaaaaaatttttcaaaggggaccccaaaataaaatacaggggccggatttaaaaaacgtagaaacgggaaaaacctgggataaaccaaactaaaaaaaatttacccttggaaaaaaatccccttttcccaaagtggcgtaaaaccaaaaaggcc

SEQ ID NO: 115296 - DNA, 840 bp, Zea mays
  unsure (1)..(840): unsure at all n locations
  Clone ID: MRT4577_36634C.1
attgggaccctcgaggccggcctggatttcatggatagtctagatttcggcccataatttaacaatctccaccgagtgaaattcccctttgataaaaatgatgggccctcattaaataaccatgtgcatccaaggtcacaggaataatccacacgtgagatcatctttgtcttgtccaaaaggtaagacgaaaccaaatcgaggaaacaatgggcaggtctggtaccaatttgagatattgaagtatttgaacaattcacaatgcaaacgaagcctcaatgtgtgctactgacttctaattgaagtgaaagcaaacgattcataaacgatggcatggggccaagatattcctgagtcaatagtgaacacccatacttagcctattggtggaactgaaggtctaaaactctaaattcgaaccagcatatgttgaaatccaatcttcggtttagaaaagcgatcaggttttcactccccttcttgttaccaattccaccaagaaaattgaagactgagttgtgatggaaagtagctgaacaaaccgacggctatatagtgaatataagctagcagaaaaggctaggttcacaattagggtcagccttgcaaggcacagagattgtgtgtttgtactgtttgtattanagaaacagtggcctgcattggtacaaatcaatccctgaaaaacttgtgtgtgtaaaaggaaagagtactcaagacgtanattggtaaactgcagcgtgacaaaaggacagtgggattggagtaagttgaactagagttaggatagatgatgatgatgatgatgcagctttttggggatatatatcactaactggc

SEQ ID NO: 115297 - DNA, 730 bp, Zea mays
  Clone ID: MRT4577_36635C.1
cattgggtacctcgaggccggccgggcatcagcgtcgctatcctcacccctgcaatctcagtcctctccgccgttggcggtctcaaagagaaggcgacttttctcaccacagacgagatagtctggatcaccgtggggattctggtggctctgttcgcgatccagaggttcgggacggacaaggtcggctacctgttcgcgccgatcatcctgctctggctgctcctgatcgcggccgtcggcttctacaacctggtgaagtacgacaccggcgctctcagggcgttcaacatgaagtacatcatcgactacttcagacggaacaagaagaaagggtgggcctcccttggaggcatactcctttgcttcacaggcacagaagccctttttgctgatctaggctacttcagcatcaggtcgatccagctgagctttggcttcggtttagtcccctcagtgctgctcgcttacatcgggcaagcagcgtacttgagagtgcacccggaggatgtagccaacactttctacagatccactccaatctccttgttctggccaacgttcattctcgcgctagcagcatcgatcattgggggccaagccatgatctcctgcgccttcgcgacaatctcgcattcccagacactcggttggctttcccgagggtaaagatactgcacacctcgaggcaatactcgggccaactatacatccctgaagtaaactacct

SEQ ID NO: 115298 - DNA, 2184 bp, Zea mays
  Clone ID: MRT4577_36636C.1
atggccgaccgggtgaccattatttcgccgcgcgacccgtggcctttctccaccgtcatagcggatgacctggaggcccttgttgctgatggtttgcttcgccctctctccggtgactcgcagccggagtggatggcccctccgagtggagctgccccgtccccgccgccggggtatgtggtgagcttcgtctcctttcacgagcgggggttcggagtgccggcaagccgttttatgcgggcgattctgcatgtctacggggtggagctgcacaacctcagtcccaactccatctcgcaagccgccatcttcgcggcggtttgtgaaggatacttggggattgccccccactgggacctacggacccatctcttctccgcggagctttttgcctcgccgacgggggaaagaagggttcgcatggtggaccccgcgcgacagacagaagaatctccaaccccttttgaaggccctggaggagctacgagaaggagggctcgccgccgcgggggtggttgccgccattcatcgctggagggtgctccccttgacggctgcgcctgggcagtccgtccctcgggtgcctcgggcgtccaaggcaaggacggtaccgaagccggcagcggggcagacctcggtggtaccttcggggatcgaggttcgagagacctccccacatgcacgattgatcatggcccggagtgggtaagtatctcaggacatcttcttcctggctcctcctccgtatgtgctgatcctgattttccctttctccttagcaagcggaggcacggttcgaccagtctggcttcccggaaggtcctcaagacggcgtcggcttctacagctagtgccgcgccgggcctcgctggccagctgaccccctcgcaagacgccccacagcggggggctcaggcggcaccagttgtcgtggggcgagctcccgaggctgactcctctgtcgaggcggtcgtcgcgctgggggaggctgttggcgcggctgtggcctcgggcccaccagacatgttgcaggcgctagcaccaactgctgccgaggccgttgccgttctggccgtggagtcacccgtcgccgccgatgctgagatggccgaggcgtcgctacttggtgcctcggaggaagaaggcacggaaccgcgacccatcccggggagcggcaaccttgtccccgcgcaacgcagtcccgacaggcggcaggagcaatcttgggacgggcttcgtgagtgtgccgaggcaacggtggggtcgcttcggtcgaccttggaggtcctttgcagggacgttcccaagatcctccaggatctgacggatctgagtgccgccaagtcatcgttcatccgccgcgaggccgacgtctggggttcgctgcggtccctgaggaccacgcttgccggggccaccgagcgcctctcccaatggagcgccgaggtggcggaccttcggttgctctgtgtcgatctgagagcagaggcagcagcggcacgcgcagaggcgcaacaacgagagttggagcttggccaggtcatcggcgagcgggaccaatctcggggtcgagctgccgaggctgaaagccgggctgaggctcttggagtccagttagccgaggcatccgctcgggccggggcctttgcggcagacctagccgtggcccaagccacatcctcggagcatcgcgtccgagctgaagagctcgagtctgcccttgataagtctgccaaggcgcttgctcaggcggccgagcagagggaggccgaccacgcggccatgtccgaggccatctcggccttctgccgggtctttggtttcgacgacgtcccctcgggaagctcccctcaaagtcgcctgcaggccttgggtgaccatgcgcgcggcagactccgcgaggcgctgcatcacggcgtcaggcgggccttcgccgtgctcgcttcccactatgatgtggatctggatcgggtcagcgaggggtattgcctccctgacgaggatgaagccgccctggccgaagtccagagacttgacgcagccgccgcgggcccaggcgcggtgctcgcgaccaccttcgaggcagagatcctcccgcttgcgccgtcgtccgaggccggggcgaacctcgccgagggtggagatgaagccgagggcgcggctccttctccgggcgacgcctga

SEQ ID NO: 115299 - DNA, 1569 bp, Zea mays
  Clone ID: MRT4577_36637C.1
atggcccctccgagcggagccgccccgtccccgccgccggggtatgtggtgagcttcgtctcctttcatgagcgggggtttggagtgccggcaagccgttttatgcgggcgattctgcatgtctatggggtggagctacacaacctcagtcccaactccatctcgcaagccgccatcttcgcggcggtttgtgaaggatatttggggattgccccccactgggacctgtggacccatctcttctccgcagagctttttgcctcgccgacgggggaaagaaaggttcgcatggcggtgcgggctggtggctgcatcctccagctgaggcgggcgcgggcgctgcagtacatccctgccatcctcgcgtcttcaaacaaagggtggcagcgctggtggttttatctccgaaatgacgacaggaggctcctgtcgttttctcagcgagtggtgaccgtcgccgccgataactggcgctatgggaccccgcgcgacagacagaagaatctccagccccttttgaaggccctggaggagctgcgagaaggggggctcattgcctcgggggtggttgccgccattcatcgccggagggtgctccccttgacggagcggcggctgccgctttgggagatgatgttggggtcgacttggagggagataggggctcacaagccttccctgccaccggtcccggaggacgcggtggaccgagctgcgcggagggtcgccgcggagaagaggaaggagaagaaggacgcgaagaaggcttgggcccgcgagcggacgtgggcacgggacgccttggaaaggtttcgtcgtcggcaggagagggatgggctcccgagggagccgtcgccggagacaccgcctgatgacgacgacgatgaagatgatgatgaagatgacaacatggcggcccacctcggcctcagcccggatttgaggctgggccaggggtcgtcgagccagcgctcgagcgggctggcaccgtcggtatccggggccgggacgtcggggtcccggtccgaagaacaggggcagaccgaggggcaagcggaggcacagttcgaccggtctggctccccggaagagctcgagtctgcccttgataagtccgccaaggcgcttgctcaggcggtcgagcagagggaggccgaccacgcggccatgtccgaggccatctcggccttctgccgggtctttggcttcgacgacgtcccctcgggaacctcccctcaaagtcgcctgcaggccttgggtgaccatgcgtgcggcagactccgcgaggcgctgcatcacggcgtcaggcgggccttcgccgtgctcgcttcccactatgatgtggatctggagcgggtcagcgaggggtattgccttcctaacgaagatgaagctgccctggccgaagtccagaggcttgacgtggctgtcgcgggcccaagcgtggtgctggcgaccacctttgaggcagagatcctcccgcttgcgccgtcgtccgaggccggggtggacctcgccgagggtggagacgaggccgagggtgcggctccttcaccgggcgacgcctga

SEQ ID NO: 115300 - DNA, 717 bp, Zea mays
  Clone ID: MRT4577_36638C.1
atggagggagggctcctccagggccttcaaaaggggctggagattcttctatctgtcgcgcagggtcccgtaacgccagttatcggcggcggcggtcaccactcgctaagaaaacgacgggagcctcacgtcgtcatttcggagatagaaccaccggcgctgccaccctttattcgaagacgcgaggacgacagggatgtactgcggcgcccgcgcctgcctcaactggaggatgcagccaccagcccgcactgccatgcggacccttctctcctccgtcggcgaggcaaaaagctccgcggagaagagatgggtccacaggtcccagtgagggtcaatccccaagtatccttcacaaaccgccgcgaagatggcggcttgcgagatggagttgggactgaggttgtgcagctccaccccgtagacatgcagaatcggccgcataaaacggcttgccggcactctgaacccccgctcgtgaaaggagacgaagctcacgacataccccggcggcggggacggggcagctccgctcggaggggccatccactccggctgcgagtcaccggagagagggcgaagcaaaccctcagcaacaagggcctccaggtcatccgccgtgacggtggagaaaggccacgggtcgtgcggcggaacaatggtcacccgatcggccatcaccaagcagaagaggtggcggcggaaaggactgggtga

SEQ ID NO: 115301 - DNA, 1362 bp, Zea mays
  Clone ID: MRT4577_36639C.1
atggcgcccgaggccggacttggccgctgtcaacctcactctgtcgagcggcacagcagtcggagcgacgcaggcggcgctgtcttcttgtcaggccgctgctcccttatgcgaactggtcgtagcccgggtgaacagtcgggtcctaagttcttgggctggttttcgcaacccgagggaatagccagagaaaggaaaccgcgcacccagttcctttgccgccacctcttccgcttggggatggccgaccgggtgaccattgtcccaccgcgcgactcgtggcctttgtccaccgtcacgacggatgacttggaggcccttgttgctgagggtttgcttcgccctctctccggtgactcgcagccggagtggatggcccctccgagcggagccgccccgtccccgccgccggggtatgtcgtgagctttgtctcctttcacgagcgggggttcggagtgccggcaagccgttttatgcgggcgattctgcatgtctacggggtggagctgcacaacctcagtcccaactccatctcacaagctgccatctttgcggcggtttgcgaaggatacttggggattgaccctcactgggacttgtggacccatctcttctctgcggagctttttgcctcgccgacgggggaaacgagggtccacatggcggtgcgggccggtggctgcatcctccagctgaggcaggcgcggacgctgcagtacatccccgccgtcctggcgtcttcgaacaaagggtggcagcgccggtggttctatctccgaaatgacgacgggaggctcccgtcgttttctcagcgagtggcagaagaatctccagccccttctaaaggccctggaggagccgcggaaaggagggcccccgaggcaaggatgaagccggcagcggggctgacctcggtggtaccttcggagatcgaggctcgagagacctccccacaggcacgactgatcatggcccggagtggcaaacggaggcatggttcgaccggtctggctccccaggaggccctcaaaacggcgccgacttctgcagccagtgccgcaccgggcctcgccgaccagctggccttctcacaagatgccccaaagcgaggggcccaggcggcaccagtcgtcgtggggcgagctcccgaggctgactcttctgtcggggcggccgtcgtgccgagggagactgctggcgcggctgcggcctcgagcccaccagacgtgttgtcggcgctgtcatcggctcctgccgaggccgctgccgttctggccgtggagccacccgtcgccgccgacgctgagatggccgaggcatcgctacttgatgcctcggaagaggggggcgcagaaccgtga

SEQ ID NO: 115302 - DNA, 1090 bp, Zea mays
  Clone ID: MRT4577_3663C.1
gactacttttttttttttttttttcgcttttttttgactgctcaaataacttcatattaaataaggttataaaggtaacaacgacaaatttagagcctcaggactaagttttagagttctaaaagcttcagtgcactttagctcgctttaaaagctctaaagctttaatttaaggtgggcttataatgtttagaggtaacatgtaaatcatttgtttggagcctgttcgtcgcaacacatatagcgcgggtgtattcggctcgagttttttttttttttttgtcttttttttttttggtcccagcacggatcaaaatttcttcaaacgagatgaagaacggaatggttcgtcgcttcacatatagcgcgggtgtgccaagattcaggacggagagttcagtttgtcaccgcccgctcgccgccagcccgttcgccgccaaacagcgccttccgttggtcgatgcagaactcgctctcgcctctttccagcagcagcaagagagcagcatccttgttgcacccatcgcaagaggtcgaggtcgagctcgagctcgagctctcgacgacgcggtcctcgaatatgtgcgtcatcttggggttgggcccgcgggcgatgacgcaggtgtagtcctcgccggccagctcctcctccacctcgctcctccgccttgccagccgcgccggcgaccgctgcacgggggagagcagcgccagctgggcctccctgttcttcacgccgaactcgatcggcggcggcggcggcagctgcacccggagccgcgccccgcggagcaccctgcgcccgttcctcaacaaggacccccgctcgtcggcctcctccgccaccagcacgcccgccaggcccggcggggccctggacagcagctcgggcgcggaggcggcggggctcgtcgtcatcgcggactccgcgaagaggctcgggagtgacctcgtggagaggagccgagaggccggcctaccggtgccgccctcggtgaccttggctgtgggactgggacgcgaggcgggcactgcgggatcgccgcgccccgtcgcggccgccgactagtagctcctcgacccaggaatt

SEQ ID NO: 115303 - DNA, 1908 bp, Zea mays
  Clone ID: MRT4577_36640C.1
atggcccacgcccgcgcctatataacgcccagtgaccttaaccgtacccttccgcgcacgctcaacctcaccggagctcaaactcaccggcgtttgcccgtgcacggtagcttttgccacttattttacaatatgcttaaggttaagaaaaatagaaaagactataaccttgctaacggagagtacgtcctcgtgccggagcaaggagctgctcaggaggtagccccggatccagcacccgagcctgcaccagaggatctgcctgccacagccttggaaggcaagccccgttccgccacaccctttgttcgaagacgcgaggacggcagggatgtactgcagcgcccgcgcctgcctcaactggaatatgcggccaccggcccgcaccgccatgcgaactcttctttcccccgtcgacgaggcaaaaagctccgcggagaagagatgggtccacaggtcccagtggggggcaatccccaaatatccttcgcaaaccgccgtgaagatggctgcttgcgagatggagttgggactgagattgtgcagctccaccccgtagacgtgcagaatcgcccgcataaaacgacttgccggcactccgaacccccgctcgtgaaaggaaacgaagctcagcacataccccgacggcggggacggggcggctccgctcggaggggccatccactccggctgcgagtcaccggagagagggcgaagcaaaccatcagcaacgagggcctccagatcatccaccgtgacggtggagaaaggccacgggtcgcgcggcgaaacaaccgtcacccggtcggccatcaccgagcagaagaggtggcggcggagaggacgaggcggcacctttggcaggcgaagcaggcgacgcttcacctctgccataatgaccgcgtcaaaaaagggaccgggaaaggggatactccgaaagggatccttctccgcgaaggaagcgggccccgagcccccctactgatcagaggttcgaaggctggccccttggaagggttcaacagccgcctcagagcactcgggctccgcgcccactactggtcagaggttcgaaggctggcccctcggaagggttcaatgaccgcctcaggccactcgagctccgcacccactactgatcaggggttcgtaggctggcccccgaagggtttgacagccgcctcagagcacgtagagcgagggatgaccctaggtacgttcgatacagaaccgaggctcgggctatgctcccgaggtaccctagaacatttccgagaccgacgggaacgatttcgtaacggaatcccaccagagggaggcatcgagccctcggaccccgtcaaaaggggaccgggtccggcgaatcacccgcaggaagctccacctcacgcgaccccagggctcggacatagcctcggcctcggaagacggtctccgcctcgcccgaccctagggctcgggctcaacctcgacgttggacgacggactccgcctcacccgaccccagggctcggacacggcctcggcctcggaagacggtctccgcctcgcccgaccccagagctcgggctcaacctcgacgttggacgacgaactctgcctcgcccgaccctagggctcagacacagccttggcctcgaaagatggtctctgcctcgcccgacccagggttcggactcgaactcgacctcggaagatggactccgccttgcccgaccccagggctcagactcagcctcgacctcggaagacggactcgacctcgacctcggaggagcctccgcctcgcccgacctagggctcggaccaaccacgtcactgggggccatcattaccctacccttagctagctcaggctacggggaacaagaccggcgtcccatctggctcgccccggcgaacaaataa

SEQ ID NO: 115304 - DNA, 682 bp, Zea mays
  Clone ID: MRT4577_36641C.1
gactagtgtagacctgtagacaaagacacaaaggaattgctggcataagtcttcatttgagaaagatcagttggcagcttacaatggctggaaatcagcagccggcttcagttgtgttggattatgcagcagtcctcgacgccaaacccttgcgcacactgacccccatgttccctgcaccgcttgggatgcacactttcacccctaaaagctcatcttcagttgtctgtgtcaccccatttggaccatatgctggaggtaccgaacagggaatgcctggtggtgttccgccaatgttaacatcactgtccgctcctgcagatcccaaccaggtgcagccatatacggctcatatgaatggaacttctaatgctaatggtactacaaacaacacagtggttacccctgtgttgcaaactcctccagcacccactatacaggaatctggtaagaagaagagggggagacccaggcgtgtgcaagataccactactgttccttcggttcctccagttcaaccggttccaacggttcctccagttcaaccggttccaacggttcctccagttcaaccggttccaacggttcctacagttcatttggttccttcagttccttcagctcctccagaagttaataatattgttctccagacacctccttcagccgtcacacaggaatc

SEQ ID NO: 115305 - DNA, 233 bp, Zea mays
  Clone ID: MRT4577_36642C.1
tttcaagagaaagggctatgacctcttctacgagctcaccctgaccttgactgaatctgtgaggggctttcagttggttgtgactgaatcgcattacaaccatatgataaacaaatcaaatcgcgtcgaggttgagtaacctgattatgtcaaggcgatcaagaacgaacgcatggccatgtaccagaggccggtcatgaggggcaagctgttcatccacttatcggaggagt

SEQ ID NO: 115306 - DNA, 451 bp, Zea mays
  Clone ID: MRT4577_36643C.1
agcatataacatttatagtatttgtttttttactgtaaaactcgtgtttaaaatttgccattatctttattagggtttcacattgccctgagtacaacaaaaatgaaagggggcaaaagtcacccccgggttttttaaggtaatatgaaaaaaccctaacaaaaagggacccttttaagaggggccaaggggtttaacccaaacccaaaaatcccaacccaacaagccctgggaaagggggggggggaaaaaaaaaagccgcccggcccccccaccaaattgaagggcaaaggtttacccccccccaaaaaaacccattttatttaaagggcaaaatcacatcccattagggggcccaaaaataactcaatttgggcccttggggggggggccccaccccaacgggaaagggggggtaaagggcccgcccccacctttagggggggggggg

SEQ ID NO: 115307 - DNA, 455 bp, Zea mays
  Clone ID: MRT4577_36644C.1
gctacttgtgcgagaagagagagcgcacggcgatcgatatggcgcatagctagcgctaaatccagcctaaaagggctcatacgaaggcgtgccgacgacaactagatgcgtcaggaccgggttcttttacagctcccctatcggaggtcggaaggatcgccagactaccaagctgtcagcctgttcttggctggccgccgcgtcgccgactccccgtactcatcgcagcgaggaagagactacactgacggaggaggacccaacatagaacgccagttatccggcggacgtcgccatgcccgtgcgacgctgctccgcgagacgtgcggaggcgtggacggagggtcaactcgtgcctggacccggagagagcaggacaggcccgcagtcggcagggcatggctcgagcccaccggcggtgggacgtcgcttggggattaggatcggcccggccc

SEQ ID NO: 115308 - DNA, 264 bp, Zea mays
  unsure (1)..(264): unsure at all n locations
  Clone ID: MRT4577_36645C.1
ctctgggaagcgactcatagtgagcgaatgattttgaaggctaagcttctcggcgagcagatccgtaaggaaaacggggtcgccaccgccattcaagcaatctatcgcgacctagaatacgcaacaaccctaacccgccaacgcgcttctctatccaccacaccacgtacagattcagaagattgcanaccagccgatgagggtgaagaagccgatgacatggaaggcgaagaatcatggacttttgtggacgactacgccgat

SEQ ID NO: 115309 - DNA, 350 bp, Zea mays
  Clone ID: MRT4577_36646C.1
gccgaacgtctggtaacaagattgtccgtgctgatgctaaggatcactatttggatgttgtcacaaatgttgtgggtttggctgctgctgtccttggtgatagattctactggtggattgacccaattggtgcaattgttcttgcagtgtacacgatttcaaactggtctggaacagtgtgggaaaatgcaggtttgtgttacttagggggtgtttgaatgcagctaatagttagttagctaaaaatatactattagaattagctagctaataaatagttagctaactagtagctaatttactaaaaatagctaatagctgaactattagcgagtgtttagatgtctcta

SEQ ID NO: 115310 - DNA, 490 bp, Zea mays
  Clone ID: MRT4577_36647C.1
gaacacaacaatttttccttgcacgattgaaccctggaacggtaagtaatttaaatcaggctcaaacatggaaccagtgcacgcttacgtgcatccgaacacatacatatacggaacggagaacggtgggcggggggtcctcaaccccatgacttaccgaacacaaaattagtggcataagcccatgcgttgttgattgacagggactgctaggtggacagaacaggttatatagcggccccttgcctggctactaatgcctggactaaaaaccttaacaggaaaaatgacgagacgggctttcttgatcttcttcaccttgagatcctccaacgcctgagagaaaactgcaaagccgaacttgacgaacctgaccccgggctagaacatgaccacgacctttcagagcgggccgtcgacaacccggtaccccttgatggtcgcccatgagcaccacctggcaggcccaaaaacacaggatgctcttcgc

SEQ ID NO: 115311 - DNA, 467 bp, Zea mays
  Clone ID: MRT4577_36648C.1
ggaaaaattcgaggaggcccaataacaaacaaaagcccaaattcacaagcgaaaaaacccaattttaccccagggggaacccccccccctttggaaagaattttgggccaaaaggtccccgggggggggggtgggggccattaaaaatttttttaaacaaaaaaaaaaaggccaaacttcccaaaggggggaagctacaatcactgggagctaaccaaaacggggttaattacaggcaggaccacccgggggcgggggccattggggggggcaatggaaggaagggccccctgggggcccagtgggttgaaaactggctaaaaaaaaggccgaacaaaaaccggaaccattgggtcgggggggttgatggccagggaaacattgggcatccatggaacctttggggaggtctaatgggaaaggcaaatggcaagctgctgaaaaaaggccagaaggacccccgggtt

SEQ ID NO: 115312 - DNA, 323 bp, Zea mays
  unsure (1)..(323): unsure at all n locations
  Clone ID: MRT4577_36649C.1
gcccaccacccntctgtaaggcgagttaggggctcagggggggggtaagctgtagcgcctgccctctcatgatgaatgaagactcctatagtgtactgcattgaggacattatatctgccgggggccttacacaaatccagtttgctattttactccaactgcactaaataaaccatactgatatcccttttggcggggggggggggggagtatacgatttcttttctagacacttataatatctaaaccaaagtgctgtcctggctctagctggcttcncatgacttatcctaccacgttcttgctaatataatatctataa

SEQ ID NO: 115313 - DNA, 389 bp, Zea mays
  Clone ID: MRT4577_3664C.1
tcttagcagtggtaacaacgcagagtacttttttttttttttttttttttttttttttggttttttttttttttttttttttttttttttttttttttttttttttttttctttgggggggacccccaggcaaacgggccccccgccaaaaggcttggggcgcaacttgggtcaaaaaacccgaggggccgggggattttgcaattcacaccaggaatcgcattttgctacgttcttcatcgaggcgagagccgaaaaatccggtgccgagaggcgggcccccgcgtccccggcggggtacccacgggtaaagggcgaaatttggaaaaaaccatgaccctggcgggcggtcgatcaagcatttaaagggcccaactcgccctaaaggg

SEQ ID NO: 115314 - DNA, 236 bp, Zea mays
  Clone ID: MRT4577_36650C.1
agctattatgcatcggtaagctcgaccgctccatccacggtgtgactcacgggaatggtacgtacacgatccatctcaacgacagccacgaggatgacatcatgccacgtggtctttgtggggagccctcgcaaggactgcgaccatgtgcacgcagacagggaccgcacctgcgtcgtgctcaccagcaacgtcgatatcagagacaatctgcgccccgccataccgctcagcta

SEQ ID NO: 115315 - DNA, 1692 bp, Zea mays
  Clone ID: MRT4577_36651C.1
aatcgattgaaaaaaggtaccccaagaacccaaagtcacaagacactttaggcacttcattcagcttcaagaaagcggagcaatggagatggtgccatggcttctcggcttcctcggcaggtacccggagctcatggtgtccctcgcttgcttcctcctgctgtttcgtaggctgaaccagcgggacgggctgccgacgaactggccggtggttggcgcgctcccggcgatcaccgtcaatgccgggcgcatgcacgagtgggtgacggagttcctgcgcgccgcggggctgtcgtacgtcatgaagggcccgtggggatcgccggtggacgtgatcatgacggccgacccggccaacgtggcgcacgtgttcacgtccaacttcggcaactaccccaagggccaggagttcgccgcgctgttcgacgtgctcggcgacggcatcttcaacgccgacggcgagtcgtgggcgttccagaggcgcaaggcgcacgcgctgctgtcggacgcgcggttccgcgcgggggtcgccgccagcaccgcgcgcaagctccgcgacgctctcgtgccgctcctcgacggcatcgccgcgtcgggcgcggtggtggacctgcaggacgtgttcgtgcgcctcaccttcgatctcaccgccatgttcgtgttcggcatcgaccccggctgcctcgcccctgacttcccctacgtcccgttcgccgccgccatggacaccgtcgaggaggtcctgttctaccggcacgtcgcgcccgtgccgtggctgatgctccagaagtacctcaggactgggcacagcaagaagatgtggaacgctcgacgggtgctcgacgcgtccatcgccgagttcatctcgctccggcgagagcgcgccgccgaggccgaggccgaggccgacctgctcacgtcgtacctggcgtgccacgacgagataggcaagtccggcgccgagctcgagcggttcttgcgcgacaccacgcttaacctcatggtcgccggccgggacacgacgagctcggccttgacgtggttcttctggcttctgaccaagcacccggacgtggaggccaaggtcctcgaggagctccgcgcgcacccgccgttgtccggcgcgggaggccatcgcaccgcggctgagctgaagcagctggtgtacctgcacgcggcgctgtcggagtcgctccggctgtacccgccggtgccgttcgagcacaaggcggcggctcggacggacacgctgccgagcggcgcgcgcgtggggccctcccggcgtgtgatcgtgtcgttctactcgatggggcgcatggaggcggtgtggggcaaggactgctcggagttccggccggagaggtggctgaccgcggcggggcggttccggcacgagccgtcgtacaagttcgtggcgttcaacgtggggccccggacgtgcctcggcagggacctggcgtactcccagatgaaggccgtggtcgccgccgtgctgccgcggttcagggtggaggtggacgccggccccgtggtgcggcccaagttgtccatcatactccacatgaaggacggcctcaaggtgagggtgcccaagagagaagaagatggcctatgttaagtgcaatactgcactaatctttgttgctaataataatgttggtcgacttgtacgtcgtcgtgtcccctattctc

SEQ ID NO: 115316 - DNA, 129 bp, Zea mays
  unsure (1)..(129): unsure at all n locations
  Clone ID: MRT4577_36652C.1
cgtttggcgagtgtagggtctcatccagatcttaanatctatcggagttgtatatctaattattncggtgtatagcagagtgtctcttaactgtgtgtttcggattcgtgagatcttctagttgtagat

SEQ ID NO: 115317 - DNA, 214 bp, Zea mays
  Clone ID: MRT4577_36653C.1
tttcaattaataatggcttttgaaggaatggccttttttccgggccgtcggattcccccttggtttccgtgaggggcaaaatttcaaacccggggaggcctttttaggagctgggggcgggcctccccaaaccgttggatttttttttattaggcaacttgttcaaggccccaccgttaaagaggagggttggccaaattgcaggggacccttg

SEQ ID NO: 115318 - DNA, 494 bp, Zea mays
  unsure (1)..(494): unsure at all n locations
  Clone ID: MRT4577_36654C.1
accccaccccagaccatcatggactccgccgactcgcgtccatcagaaccgtgctccgctgttgcacgaccctgccgcacgctctccgtcgcggacgagcccctggacagcccggtgggtgctggcagctcctgtgctcgataggaacaagaagaggtcgatgaccatcccgatgacccgcaccaagaacctgaatcgtgagctacagataccttggagacgaggtagaagacacctattattactccgaccacgacgagaaggctgaaaaacacgacgatgactaccggctacccatacaccccaaggaaaattagttgttctaccaagggcctgcgagcgtgaacattgaagatgtgggacgccagaacaaaggagaccaggcgcccaaaacaaatgatgctgaggaatctgttgcgatgcagcctgatgctacagctcttggggaccagaaatgccctgtgcggcctggagagagngcgccccgtatactg

SEQ ID NO: 115319 - DNA, 150 bp, Zea mays
  Clone ID: MRT4577_36655C.1
gtttcatgttggacctccggtgctcggggcacgccctagtcaaactcttaaagatgaaggacctgctgcataggtgcctcacgaccctggaatgaattataagcaagaacaagtatatgtaagacactacaaaagtttacacaaaccaaa

SEQ ID NO: 115320 - DNA, 514 bp, Zea mays
  Clone ID: MRT4577_36656C.1
agcagtggtaacaacgcagagtacttttttttttttttttttttttttttttttctttttttttttttttttttttttttttttttttttttttttttttttttttttttggcagaaaaacccccgtcccctcaaaggaaaaccgccagccaggaggggcgaaccaagaatcccaaggccccgggaacccccccccaactctaaacaggccggaagcttaaacattacggccccaggcccagaaaaacccaggcccccctggctggttaaagggaaaaaaaaaacccggggggaaaaaaaacaaagcccccgccccaacttcaattagcgggggcagtttcccccccccaaggggggggcccaaaaccaacccctccgccaggggtaccatccagaaatcaagcaggggcccccgacccaagttccagggctccagcaaaaccttctttgggggaagaaccccattgccaggtgggcaaggaaggcgggaagggaacccgcccccccaaagaaa

SEQ ID NO: 115321 - DNA, 512 bp, Zea mays
  Clone ID: MRT4577_36657C.1
gcgacgacgccgccgcggccgtagtcgttgtcgacgtagaccgccatgacctcccgccagccgtggtgcgcgacgacgtcggcgacagcggccatctggaagcggtcgtcgtgcgtggcgcggacgaagtaggggtactgcgaggaggcgagcgcctggtcggtggcggcgaaggacaacagcgggacgcgcagctggttggcgacgtgggagacgacgtgcgcgatgcccgaggactggggggccaccacggccaccacatgcctctccatcagctccagggctgcagggttcaggtttacgaaaggtcagtcagtcccatactcccatccatggccgcagtttggctttgggtagtagtagtgctaacactcaatgatgcagtcgttgaccgttgataccacaaggctggctggatgtctgacccatcttgtttgtttttagttttgaataaatctatgcaagctagcatgatttgctttgaagaaaaacgacagcaacggaattcgagc

SEQ ID NO: 115322 - DNA, 173 bp, Zea mays
  Clone ID: MRT4577_36658C.1
cattcttatttttttgtttttatgcattttcaaaactcatgaatttttatgcaccacttggagcaagattctgagttgtaacatgggatcacacactaaagccaaaccccccagatatctcacatcctgcggtgctcaacaaaaccaaactttttagtcctgtaaatcatctc

SEQ ID NO: 115323 - DNA, 159 bp, Zea mays
  Clone ID: MRT4577_36659C.1
caccaacagaggtacaagtagtgcagtgtgaagcttcgtcactcaacaaaaatgtatttggcacattcagcagccagggtcatgtttggtttgcaaaggacgcatgtgtatacaacgcaatgacctgttctttgtgctcttctgaaaacacaagtgcct

SEQ ID NO: 115324 - DNA, 473 bp, Zea mays
  Clone ID: MRT4577_3665C.1
caaattaagtgcgacgatggcgttgtccattaccagcaaccgatgtttactcgtgctacactactgatcgatgcatccagagggggcatattggccagctgcctgtgccatggagcccgcagctttgggttaggtatcggggggggcgctttggaccgtgaccgttcatcgtgcgtgggggtcggtgcatgcccagctcgtgggcgccccttttctatactaaaaccgggcccccgattcaactgtacggtacccacatcactgttgatctgcctcggatcacgcgcctttcctggaattggtctggctacgattgaaccatggaccgttcaccagcacaactgaatgctaatagcttctaactgtctcgtgtacctgtacagtcggggagctaatgtacgtacttatggtcaattaataaaactcgtattcaatgatgatggtgtagaaaaaaaaaaaaaaagggtggttct

SEQ ID NO: 115325 - DNA, 620 bp, Zea mays
  unsure (1)..(620): unsure at all n locations
  Clone ID: MRT4577_36660C.1
cgggngagcccttcccgggcgccaaggaatcgccccctacgttccttagggggagccccggctctcccagcgcccccaaccggccgcagcaggctgatggctccccaaatggctccacagcggaagagggtggtgggttcgcgtgggacgacgacttcccgctgatgacggccaaggcagccttcgccatggccctagacccggccgcacccgccccggctgcgcccacgcccacgcccgctcccttctcgcgcttcacggtgtcgcccgcgcccacgtcccgcttctccatcacgcacgtgtctgactcggacgccgagtccaagagaggacctgaagctggtgccgggggtgagagtaaagaggcttgagacctgngcagctcctgcccctcaaggctggcgtcaccggagcccctgccaggcagcagcgaggatggtgnaccgagaggtggggaccacgtcctggtggctgttggcagcagattcaggtgcctctgccccacgcggtgtcctggagaagcccgtgggatgagaggccctgnatggtagatcggccatgctncgnncccagagcagaaattcgtctgggcctttanggcttgctgctagcccctgggg

SEQ ID NO: 115326 - DNA, 2006 bp, Zea mays
  Clone ID: MRT4577_36661C.1
cgttgctgtagggaagggcatctaataaaaatccttagatcccttgcgagtaggcagcaaggaatcacccaacaatgttattgaaaaatcctctaatgaatggcaaggttttgcttctgtgtctggtcaaggaagagattttgtgacatctgtggaacgatcaacaagtgaccacagactaaatttggtgggaccagttggagatgaagagacaatgagcagcatctcacaccaacattcttcagaaattaatcctgttgatgtatggcatgtgggcaatgtgaaggctcaaaatactgcagaaatggttaaggaaaaaaatgattcttttgacgattggcaagattctactaccaccggtcaagtccaggacacttcgttgaatcaaactggggacatgatggaggtctcaaaagccagtcacaaagaaacagacatggactcatggttcattggacattctagggagccagcaaatacgggtaccatgaatgcaaataacatgttggacgattggcaaggtttcactggttcagatcaagcacagcaaaattcatctagcactggtgcagaaatgataagtgtgccatttgagcagcatggtggaactgtttctgccccatcatgggcaaatggcagcagtaatgatgccgcaaaaacatcctcaacaaatatagaaagcgacccatttgatgtttggcaaaattttactaaatcaggtcacctgcaagaaaatatgtctagtcttgggagagaaccgagtagtctgtcgcctgaaccagctaaaggaaatgattccttggatttgtggattaccagcaacttcaaggaatctaaaagcaatgatgttgggagaactaatgcctcatctgatggatggcaggattttgccagttttgatcaagctcagagaattactaaagttcatgtggaaggacatgttgtaaaagatccttcaggggctgaaactttggacttatgggcctcaagtcatgttaatgaaaagaaccttgaacagataagtgaacataatgatctattcgatgactggcaggatttccaaaactccaatccacagcaaacaaccttacaagtttcttcagatgcttcattatttgatataaccttggcatcaaggcctgatgcttttggagagcaggaatttgggagtgttttgcaggtagcttcatccgaaaactcaaaggataaaaaggagggttctaatgaatcaaaagcatttccatctgatgaccacttgaaaagcacaagtggaatgcagcagatgggtgatgttgattcgctgtcttcattatggccagctaataaaccagagcctgcaaatacaaatgtggaacagttgcttgctcagatgcacgatctgtcctttatgctcaaggatgaactttctgtccctgataaacccatcgatcattcaaaaccctgaagtgacaacatcaaaaattgtgctctgttactatcagccaaggaagattgttgttgcaagtccaaccttttgggtgctggacgaattgcaacgaatatcccttgagtggaaaatgcaagtcaagtcacagaaaaccctgttgttccaacagtgccttttatcagagtattggtcagcagaggattgtatttgttttctctgttgcttcgttgcattcaatcaatgaattccatttcatcagatcgtcagagactcagagtcgggttggttccttgactgtccctgagtgaggctgaaaaccacgttttatgtctgcctcttacatgtatgtaccattttgcggtctgtattttgtagagtcgaactgagctcaccaatcaatgaattccatttcatcagattatttaagctatataatataagttcgtccttggtactagactgcattgtttgtaacatcttattctggcctccataaggagtgcttgtacctgggtcattttggccctttattttccctctactttaatatatggatgcgcagtcctcctgcgctctttcg

SEQ ID NO: 115327 - DNA, 386 bp, Zea mays
  Clone ID: MRT4577_36662C.1
gggttgggtttttcttttaaaaaaagcccaaaccgtctttaacaaaataatttgggggcaaaaaaccgctccccataaaggaaatgatgcagctcaagggcattaaaagaccatagggggccgaatcccaacccacgaccttttttgccaacggggaaacacacttttggaagtcattaaaaaaaccaccccccaccttgggttgcggctgatagcaaattggtacttccaatacattcaaacccccttttcaacgttttgcacacccaagggaaaactcgtttttaagcctctcccgatcaaccagctttattcctttctatacctgaccgggctccgggaacttgaaccctttggggatggagaaaccctgggcgacaaagggg

SEQ ID NO: 115328 - DNA, 645 bp, Zea mays
  unsure (1)..(645): unsure at all n locations
  Clone ID: MRT4577_36663C.1
ngattttagcaactagctattagttttaagatttagaacaagactttatactatctaaaactttgattttttcctacacttaatactaaataatcattggatataaaaaggtgtataaaattgaggggaggccgtggcccacttaatgctttataattgctactgaagcctaggaaaacctccggacggagactacacggttcaggtcctcgcgcacagacacgaagaacagcatcgcctcggtcttctcctgcacgtccacgaagtggtgcctcgtgcacgtgtccgcgtcgaagtagctctcgctgctcagcacgcgcgctgcgccgcccttcgtcaccctggctacctcattgccctccgtcgccgtgaacgccacgccctcgcactggacgacgcgtgccgccggcgagacctcgctcttgtcgttgtccatctcgctcgtggtcgatatcgcctgacgctgtgcactttggcttggagatattgagacgatgaacaggaagttcagtccgtctccctctccctctttacttcgattgcatgctctgcagggtcttaggtgtgggtatttataccctttgctgtccgagcaaatctaaacaaactagtagatctatctaggcaatctcagattcctaactg

SEQ ID NO: 115329 - DNA, 598 bp, Zea mays
  Clone ID: MRT4577_36664C.1
cattgggtacctcgaggccggccggagagttcatttccctgcaaaactccagcaagcgttcacatacatctccttgcctccttgcatggagcgtggagatggtactacgccgggtctccagtacgattgctgatgcctcttgctggcgtacggcgcggcagagtgtgtggtctactagggcgaggcttttggccgactcaagaatgaagcgcgttgtctcctggatgccgagcctttctgctgccggaaggaccccgcctacccgaaccactctcccggatcatgcaggatccggcctgccctgcgatcatcgagacctcgcctaccacgccaaccacacccagggacggcggcatgtactacccgccttcgccatacatcgtaacttccccgatgacaccgacagatccaggaggcaacgtggtgaagcatgctcccccgctgccggccatggacacctctgcgacaatgtctgtagcaggctactacttactgcccttcgccatcatgtgacacctccccggcgacttctcctgttgctgaatgcgataaatacagtgatccatgcttatccgtgctagcgatacctccacatcga

SEQ ID NO: 115330 - DNA, 276 bp, Zea mays
  Clone ID: MRT4577_36665C.1
ccgacgcgtgggcggacccatcacctagccaccaggtaggacagtggcgtgtcccataatcaaccccatggacgagtgctgttcatacgggctggcataacatacggtagacgccgacctggacggtactgtgttcatgttcaggagctcgatgcaatactacctcctcttggctttcgagggcggcagtgtcctgcgagcacagctggtgctgctgatggtgccgatcccatacggtacctacgcctcactcttactaagggtggccagtaacac

SEQ ID NO: 115331 - DNA, 508 bp, Zea mays
  Clone ID: MRT4577_36666C.1
ccgacgcgtgggtgggcgcgggggaggttaaataatgaggcattggtatacccgacactatctgaaagctgctgataatctggtctagataccttgattaggatatcacttgatgtccaggatagcttgagcttaaggaaatacactagcgtcgataatcaatcttatctggactgcgctactcgagcgcgtatcataatgtgctgacaactgaagtgagaacagcactccaagctaactgaggagcagaaagtggggacaagcgagaacctggcaattaggggggtatatggtgctcggtgggcccaacaatacaagtgccaccaaatctctctaggtgagctaaccgcggctgagggagcaaagtaaccaaccatcctcaacggaggaggtggtcacacggcattaccaactctgatcagtcaggcgaacggatacaggcgactctaaagaacaaaaaggtacacactgccacacgccataactagctgaactggcttggtttatg

SEQ ID NO: 115332 - DNA, 117 bp, Zea mays
  Clone ID: MRT4577_36667C.1
aacattgaattcatcattactcaaccatactaataaatttgtctacaaaagaaactctcaccatcatattattctgtttaaatcgcacaaataacactcacctacgctctctataac

SEQ ID NO: 115333 - DNA, 378 bp, Zea mays
  Clone ID: MRT4577_36668C.1
gggccacaggcacaaaaacggttaattgggggaattaaacgggcaacaacacacaggggggggccccccccccggggcacagggaaaaaccaaaaaggggggggccagattcaaaacagggggggggttcacccaggggggggaggcccattacaccccacacggacgggacggaattttttggcccccccccccgggtgggggcccttaaccctcctttggggtccccgggggttttggtaaaccttttaaaccccgccggttttggggggggaggggtttgcccccctttcgctgagctggggggccggtttcttgccctgggccgaaaatccgggggggtttggggccctaagggaaaccattgggggggggggg

SEQ ID NO: 115334 - DNA, 572 bp, Zea mays
  unsure (1)..(572): unsure at all n locations
  Clone ID: MRT4577_36669C.1
tgaggtcgactgccaagaaccacgggccaacgcgttcaggctgagcggaaggagaggctggacaaggggaacgaggggaataaccccaacacgatatgcgggttgaagttccgcacccacttcggaggaagagagaccactggtgtgagtcattatctaccacaaccatgaggctggcaagaaaatggagccgtaataacgactgattatgaaatgttcttactactaaggtggacaagacagggaagacaagatgaccgagacactgaacaggaccaagaagatacgtggggcaaagacaaccaaagctgttgacgccaaaaataaataaacgtgcgtgtacatcagtattactgntctggtctctggatgaaacatctgcaatggcataattatggcaatgctaggtacaggcacaccttcatcagtggagtgatatgcccgtacatcctcggcactgaactgaaccatggtgagaatactggctggatacatagctgccgggtccctgctctagctgcggcatgacaagccttacatggatgctggacatctagctccagctataactg

SEQ ID NO: 115335 - DNA, 1255 bp, Zea mays
  Clone ID: MRT4577_3666C.1
cttttgttgtgctgcaagatgcgacaaatcactttgatgagcagatggtcattggagttggaggctttgggaaggtctacaaagcagtgatgcaggatggaagcaaacttgcagtaaagcggggcaaccagaagtcccaccaagggctgagggagttccgtacagagattgaattgctgtcagggctgcgacaccgtcatctcgtgtcgctcattggttactgtgatgaacacaacgagatgatcttggtgtatgaatacatggagaaaggaactctgaagagccatctttatggcggtgatatgccgcctctcagctggaagaaaagactggaaatctgcgtaggagcagcaagagggctccactaccttcacaccggttttgcccagtcaatcatacaccgtgacgtcaagtcagcaaacatactactcgatgaaaatctcttggccaaggtttctgattttggcctctcaaaggttgggcctgaattcgaccagacgcatgtgagcacagcagtgaaagggagcttcgggtaccttgatcctgagtacttccggagacagaagctgactgacaaatcagatgtgtactcttttggtgtggtgctgcttgaggtgatttgtgcgaggccggttatcgacccgactcttccaagggacatgatcaacctcgcggagtgggctatcaagtggcaaaagagaggagagcttgatcagattgtcgaccagcgcattgctgggacagtcaggcctgaagcactgaggaagtttggagagacggtggagaaatgccttgcagagtatggtgtcgagcgtcctactatgggggatgtgctgtggaacctggagtttgtgctgcagctgcaggaggcaggtccagacatgtccaacatcaacagtatgaatcagatctctgaactcccttcaaatccaaagagagttagctccctggatatcagcagtacagatcaaagccgcgtgcccatcgactactccgacatgtcaacgagtaacgccttctcgcagctaatcaatgcagaaggaaggtgaactggatagaattgttccagtcactgaaaaaaatgtttgttacaaaaactagagatgcctcttgtgtgactacccagcctatcccttctcacatatacaacaccaagttgtgaatcttattgaaattttgtttgccacttgtaactacttatgttctagaaaagggtgagtagctttattgcaatcgtcttttgctcggccaaccc

SEQ ID NO: 115336 - DNA, 744 bp, Zea mays
  Clone ID: MRT4577_36670C.1
aaaaaaaaaaaaaaaaaaaaaaaaaaaaaaaagtgttctcgactcgaccgccgccgtcccagttcgcttcgcgtcaccgagagctcgtcggcctccgtccccgcgagaagcgagagcatggacacccaggtgaagcttgctgttgtggtgaaggttatgggcaggaccgggtccaggggtcaggtgacccaggtcagagtgaagttcttggatgaccagaaccgtctcatcatgaggaacgtcaagggccctgttcgtgagggtgacatcctcaccctgctcgagtctgagcgggaggccaggaggctgcgctgaagccctggtggccttggatgtaattctgttaattttgttctatgtttgtcgaacttgccgtgtcccttgcaacatctgctttgagatttactgagcctggattgcagttttattttatgttcctgctggaaagtacacttgccgagacatagttatcattggttatctataatagctcaatcgacgcgtgcaatctgaaggctttgttatatgtggtaaggtcgtctatgtagttttgtcatagttgatgtcggttggctcaaatctgaaggttttgtatatgtggtaagttcgtctatgtggttttgtcatcgttttgtctgtatgatctctctgggcatgctaggtctgttgtattcagttcgatatcctcaaattctgtaagcgggcactgatcggatgtggacatgtggttatagaacgccaaat

SEQ ID NO: 115337 - DNA, 667 bp, Zea mays
  Clone ID: MRT4577_36671C.1
cggccgggagtgttctcgactcgaccgccgccgtcccagttcgcttcgcgtcacccagagctcgtcggcctccgtccccccgagaagcgagagcatggacacccaggtgaagcttgctgttgtggtaaaggtgatgggcaggaccggctccaggggtcaggtgacccaggtcagagtgaagttcttggatgaccagaaccgtctcatcatgaggaacgtcaagggccctgttcgtgagggtgacatcctcaccctgctcgagtctgagagggaggccaggaggctgcgctgaagccctggtggccttggatgtaattctgttaattttgttctatgtttgtcgaacttgccgtgtcccttgcaacatctgctttgagatttactgagcctggattgcagttttattttattttcctgctggaaagtgaacatgccgaggcatagttgtccttggttatctataatagctcaatcgatgcgtgcaatctgaaggctttgttatatgtggtaaggtcgtctatgtagttttgtcatacttgatgttggttagcttatatctgaagattttgtatatgtggtaaggttgtcaatgtggttttgtcatcgttgtctgtatgatctctctgggcatgctagttctgttgcaaaaaaaaaaaaaaaaaagcgg

SEQ ID NO: 115338 - DNA, 652 bp, Zea mays
  Clone ID: MRT4577_36672C.1
aaaaaaaaaataacaaaaaaaaaaaaaaaaaaaaaaagtgttctcgactcgaccgccgccgtcccagttcgcttcgcgtcacccagagctcgtcggcctccgtccccgcgagaagcgagagcatggacacccaggtgaagcttgctgcttgtggtgaaggtgatgggcaggaccggctccaggggtcaggtgacccaggtcagagtgaagttcttggatgaccagaaccgtctcatcatgaggaacgtcaagggccctgttcgtgagggtgacatcctcaccctgctcgagtctgagagggaggccaggaggctgcgctgaagccctggtggccttggatgtaattctgttaattttgttctatgtttgtcgaacttgccgtgtgaccttcacaacatctgctttgagatttactcagcctggattgcagttttattttatgttcctgctggaaagtgacttgccgagacatagttatcattggttatctataatagctcaatcgacgcgtgcaatctgaaggctttgttatatgtggtaaggtcgtctatgtagttttgtcatagttgatgtcggttggctcaaatctgaaggttttgtatatgtggtaagttcgtctatgtggttttgtcgtcgttttgtctgtatgatc

SEQ ID NO: 115339 - DNA, 804 bp, Zea mays
  Clone ID: MRT4577_36674C.1
aagacacgactctcggcaacggatatctcagggtctcgcatcaaagatagaacgtacgacaatgcgatacctgatcgcaagttgcagaatcgcgcgaaccatcgagtgtttgaacgcaagttgcgcccgaagccttctggcggagggcacatctgcctgggcgtcacggcagtgttctcgactcgaccgccgccgtcccagttcgcttcgcgtcacccagagctcgtcggcctccgtccccgcgagaagcgagagcatggacacccaggtgaagcttgctgttgtggtgaaagtgatgggcaggaccggctccaggggtcaggtgacccaggtcagagtgaagttcttggatgaccagaaccgtctcatcatgaggaacgtcaagggtcctgttcgtgagggtgacatcctcaccctgctcgagtctgagagggaggccaggaggctgcgctgaagccctggtggccttggatgtaattctgttaattttgttctatgtttgtcgaacttgccgtgtgacccttgcaacatctgctttgagatttactgagcctggattgcacttttattttatgttcctgccggaaagtgcacatgccgagacatagttgtccttggttatctataatagctcaatcgatgcgtgcaatctgaaggctttgttatatgtggtaaggtcgtctatgtagttttgtcatacttgatgttggttagcttatatctgaagattttgtatatgtggtaaggttgtcaatgtggttttgtcatcgttgtctgtacaaaaaaaaaaaaaaaaaagcggcc

SEQ ID NO: 115340 - DNA, 902 bp, Zea mays
  Clone ID: MRT4577_36675C.1
gccggccggttcgggctctcagctttaaaagcatcctctccgccgcggcgcaacggccacaccttccgtcccccggcctccgctcgcctcgccgcccgcctgtccctgtctgtctctctctctcctcgctgagtcgccgccagccatgaacaacctcctcacggattcctttgagctcccccggcgggactcctcaagagatgcagacattgaaatgggaatgcatcaagctgatgcttcagacaacttaaaagatttcttgaagaaggtcgatacaattgagagtttaattgcaaagctgacaaatctattgaataagctacagactgcaaatgaggaatccaaagcagttacaaaagcaagttccatgaaagcaattaagcagcggatggagaaagatattgatgaagtggggaaaattgctcgtcaggcgaagacaaaagttgatgaattggaaaaagacaacttatcaaataggcaaaaacctggatgtggaaaaggttctgccgtggaccgatcaagagagcaaactactggagcagtgaaaaagaaattgaaggagcggatggatgactttcagaccttgagagaagcaatcaggcaagagtatcgggaggttgttgaaagaagggtttttactgtaactggtaatcgtcctgatgaagagacaattgatgacttgatagagaccggaaaaagtgagcaaatattcaaagatgctatccaacatcagggaagaggccagatactagacactgttgctgaaatacaggagcgacatgatgctgtaagggatctagagaggaagcttctggagttgcaacagatattcatggacatggcagttcttgttgaggcgcaaggagacatgatcaaacacatcgagacccatgtctcgaacg

SEQ ID NO: 115341 - DNA, 1696 bp, Zea mays
  Clone ID: MRT4577_36676C.1
agtttaaaattgaagcttttgataaactttaatggatacgccttaaaaaatttcgtaaaatgaatattatgtgttgcatattgaaaacagtgcataaataataaaaaggtaataaataaatgaataaacttaatacatgaaccttgcattcatgttggaatatatttttgtgtgcaaattagaactttgtttgaatttaaatctaattggaatttgaaaataggaaataggaaaagaaaagaaaagaaaaagaaaaaagaatactcacatgtgtcatgggccaattaccacctcctagctcatcatcttcgtcacccagcgccgacccatgggcctattccttctctcccccgcgccatgcactcgcaggtggaccccacgcgtccgcgcggtctcgctttaaaagcatcctctccgccgcggcgcaacggccacaccttccgtcccccggcctccgctcgcctgtccctgtctctctctctcctcgctgagtcgccgccagccatgaacaacctcctcacggattcctttgagctcccccggcgggactcctcaagagatgcagacattgaaatgggaatgcatcaagctgatgcttcagacaacttaaaagatttcttgaagaaggtcgatgcaattgagagtttaattgcaaagctgacaaatctattgaataagctacagactgcaaatgaggaatccaaagcagttacaaaagcaagttccatgaaagcaattaagcagcggatggagaaagatattgatgaagtggggaaaattgctcgtcaggcgaagacaaaagttgatgaattggaaaaagacaacttatcaaataggcaaaaacctggatgtggaaaaggttctgccgtggaccgatcaagagagcaaactactggagcagtgaaaaagaaattgaaggagcggatggatgactttcagaccttgagagaagcaatcaggcaagagtatcgggaggttgttgaaagaagggtttttactgtaactggtaatcgtcctgatgaagagacaattgatgacttgatagagaccggaaaaagtgagcaaatattcaaagatgctatccaacatcagggaagaggccagatactagacactgttgctgaaatacaggagcgacatgatgctgtaagggatctagagaggaagcttctggagttgcaacagatattcatggacatggcagttcttgttgaggcgcaaggagacatgatcaacaacatcgagacccatgtctcgaacgccaccaaccacatacagcaaggtgtgagcgcgctccagaacgcgaagaaactgcagaggaattcgaggaagtggatgtgctacgccatcatcatactgctggtgatagtcgtggtcattgtcgtcgcagtcatccagccatggaagaagggcacctagcgtggtggtgccttttttcctgtttgtgtaatatgtgtgcagttttttttgtgggtgattcgtgatttgttgttgtacctatagtcgacgcaacaggagctctggcatttcgattcattctgtctagtgaaaggacactgccatcatatgccgataaaaataacgcttcgtatcaaaaaaaaaaaaaaaaaaaaaaaaaaaaaaaaaaaaaaaaaaaaaaaaaaaaaaaaaaaaaaaaaaaaaaaaacaaagatattaaaaaatggggggccttttt

SEQ ID NO: 115342 - DNA, 1330 bp, Zea mays
  Clone ID: MRT4577_36677C.1
cattgggacctcgagccggcggagctcaagatcctctgcggcgcaacggccacaccttccccggtcccgcctccgtctgccccgcggcctccgctctcctcgccgcccgcctgtccctctctctctccctccctccctccctcctcgccgccatgaacaacctcctcacggattcctttgagctccctcggcgggactcctcaagagacgcagatattgaaatgggaatgcatcaggctgatgcttcagacaacttgaaagatttcttgaagaaggtcgatgcaattgagagtataattgcaaagctgacaaatctattgaataagctccagactgcaaatgaggaatccaaagcagttacaaaagcaagttccatgaaagcaattaagcagcggatggagaaagatattgatgaagtggggaaaattgctcgtcaggcaaagacaaaagttgatgaactggaaagagataacctatcgaataggcaaaaacctggatgtggaaagggttctgccgtggaccgatcaagagagcaaactactggagcagtgaaaaagaaattgaaggaacggatggatgattttcagaccttgagagaagcaatcaggcaagagtatcgagaggttgtcgaaagaagggtttttactgtaactggtaatcgtcctgatgaagagacaattgatgacttgatagagaccggaaaaagtgagcaaatattcaaagatgctatccaacatcagggaagaggccagatactggacacagttgctgaaatacaggagcgacatgatgctgtaagggatctagagaggaagcttttggagttgcaacagatatttatggacatggcagttcttgtcgaggctcaaggagacatgatcaacaacatcgagacacatgtctcgaatgccaccaaccacatacaacaaggcgtgagcgcgctccagaacgcgaagaagctgcagaagaactcgaggaagtggatgtgctacgccatcatcctgctgctggtgatagtggcggtcattgtcgtcgcggtcatccagccatggaagaagtgagcctagggtggctctaaacagggaggagggcgtgggagatactttttttttggctgtctgtgtaatatctgtgcagttgttgtgggtggttctgtgatttatggttgtacttatggtcggcaccagagaagctttggtatttccattctttctgtttgggatagttcgtgcagtccattgaccatagctctcagaaatgttattgtggtgaccatatattcatatgtcggtcagctgatgaaaagaatggtgcttctgaatctttcccc

SEQ ID NO: 115343 - DNA, 510 bp, Zea mays
  Clone ID: MRT4577_36678C.1
aagctttctatttattttttttttttatctgtcgtcctggcaggtcttgtttaataagggggaacaagctgtgctcttgttatttcctttaatttgaaagagacccataaaaaaaaaaaacaagcccaatcctaattattaatagggggggggcgggcgagaaaaatccaacacaatggcggttgtttgaggggggttataaagggacccattccccctacgggggggcgggttaacatttattgggcggggcccttcccaaaattggggggaaaaaaaatgacccaccccccttttataaacaaggaacagatcaaaacttcggcgggcggaaaaaaaaaaaaaaggcccggaacccccccccttccccacgggtgggcaaaaaaaaaaaaaaaaggacccccccttttaataaatatttaacccggagggggggggggagacccccttcttgacccccccacctccccgcgcggggagggccccttcatggggagttttccctttttt

SEQ ID NO: 115344 - DNA, 190 bp, Zea mays
  Clone ID: MRT4577_36679C.1
tcttggactagtggaacccatcgcaggtgcagaccataatgggtgaaccccactgatccatgaggatcctagtaacagggggctctggactggtgggcagaggcatccagaaggtggtcgcagatagtgccgctggcctggagatgaatgggtgtttgactcctccaaagatgcagatctgacggatgca

SEQ ID NO: 115345 - DNA, 339 bp, Zea mays
  Clone ID: MRT4577_3667C.1
aaacgccaaacttaaaaacccaggagcaagagggggggaaaaaaggcttacaacggaggggggaaaccacacaacgcccggaggataaaaaccggcggaaaacaaaacacggggggggccccccgggggagaccaaaggaaagcagggggacaaaagcccgacgaccccgggccaggagagggtttagaactcggaaccctggggggcggccccacccttggaaaactaagcaccgaccccctgggagtccttctggggggcggccagaacctcacgagcctgggaaaacttgccctcctccatacccttaccgaggaaccaaggcacaaaggcgccct

SEQ ID NO: 115346 - DNA, 398 bp, Zea mays
  Clone ID: MRT4577_36680C.1
gcgccaacccttcggtgaaaatctcagtggttattcgaagcatcatgactcatctgattcagggtatatgcgttcaggaccccacgctactgtttgtattcaacgaagcgtgtgacatctgaatcttcaaccaatcgacagtgttcacagcctagacacttgtaccatgccaagagctaagtcaacaacacactgatcagatatcaacgaagatgatcgccactctgtcggaacttttgcatctagctccactaattttccagctgccttcgctgaacacacctatacaaatgcttctactcacactgtgcgagtgttatattctgcatggattctgacgtgagcagcaggcattctgaacccgctatctcaatctgaagattcggtagatcctgaac

SEQ ID NO: 115347 - DNA, 641 bp, Zea mays
  Clone ID: MRT4577_36681C.1
aggactgtgtctggtggtgacggagcaacttgagcagctggatctgggtgcagagtccacctcctcgcgggcgagctcggggtcgagctgtagggcgcaccggcgacctcctcacaggcgtgctcggggtcgagttgcagcgcgcgccggcgacctcctcgcggtcaagctcatgggcgcgtcggcgaccttctcacgggctcctgcaggcgtcgcggtggcggcctccagtggctgcagggaggagggagatggggagagacggaggtgggcgcctgcaggcgtcgcggcggcggcctccaggggtgaagaaaggagaggtggagaagaagagacctaagcgttttcgcacataaagcacgacgtatgaagacatgagtttacaaggttttcaagttccaaggaagtagcacatgtctctttacactcatttatgttacagaagagagagcgcaagcacagtcgacagtcttttatggtagtagtagcagcagatgtcgtttgttatacacagatatacataggatgtctgatcgttcagccaagaacccgaagcaacacgccatcgttgcctagcacaaatcctttgttgtcatcaaggaacctgtgacagcgtcataattacaaaaatgtttctaacg

SEQ ID NO: 115348 - DNA, 326 bp, Zea mays
  Clone ID: MRT4577_36682C.1
ggccttatagacagaggaaactgccactcataaacatgacagagcctgaatacaataaaaaggcaccagtctcctagcaaagcaccatatgcatacatgctcatagctagcgctaaaatcagccgattttttaaacccagaatccgcgccctacaactcacgaatatttttttgtacacacaaccacggtatcatgtgatgacataaatgcttgacactgatggttgactgacgaccgtacccatacaaggatcctgcggacctgcaagtccaagatcatgagctgggcacggtcgactgacgatgccatagccggtgatctacag

SEQ ID NO: 115349 - DNA, 370 bp, Zea mays
  unsure (1)..(370): unsure at all n locations
  Clone ID: MRT4577_36683C.1
aaaggcaggccggaggagaagaagcgcancacgccccaacgggccaccccagcccagcggcggccacgggacncaacngcaaggcaccccncgccccgagaacgganncnggcacaaggagcnacccaaccccaaccgcacancaccagcccagaaccaanccacacgagaaaggcgacgagccggccccccggcacgaagccanacaagggaacgccacacgccacacgccggccggggcgaaaaaagcacancngggagcccaacagcggggccgcacccacacaacccacccggcgccangcacgccgcagccagcgagcaacaacaanaaaggacgacgcgacgacgcgcgggccagcgacggacg

SEQ ID NO: 115350 - DNA, 259 bp, Zea mays
  Clone ID: MRT4577_36684C.1
ccacgcgtccgacagttttggacggagcggggctgcgggtggcgctgacggcgctgttgcacgctaggtcctagccggcgtgctacgtgtacaagctggccacgtccctgctgggacccatcttcctcgaggacgatctcggcgtggctgtactaatcaccgtcgcctgctgcgctatcgatgagcacctgtcctatgagtacgcgaagaggtgagcctacctgtcactggtggctaggagggacgcgagcctccgcga

SEQ ID NO: 115351 - DNA, 450 bp, Zea mays
  unsure (1)..(450): unsure at all n locations
  Clone ID: MRT4577_36685C.1
ccctgcgtccgnctagttctagtacgcgggcggccgctcgctgactagtactagtcggatacttctagatcgcgggcggtcgcgcttggtttctttctgtcgtcacgctttttggtacgaggagatggttgagtgcatggagaaggtgtccatgactgttgactcggaggagctcactgtggaggagggaagcctcttgtttgttgcatacaagaacgtgattggagcccgacgtgacttattgggcattatttacttcagtgagctagaagaggttggcctaggcaatgaggacctagtaatactcatcaaggattatcgtggttagattgagactgagttgactcaagactgtgatggcattctgaagctggttgagacctatattgtgtcggttttcacttttnncgagttcaagatttttatgttaagatgaagggtgattattac

SEQ ID NO: 115352 - DNA, 144 bp, Zea mays
  Clone ID: MRT4577_36686C.1
tttgcgttctaacctttttaactatattactgggtggggacataccagccagcgatggcgctcctttcgctgtacaacaagatccggatcatgaaggtccgcgacgtgccagctttcctgaagacggtcttgacctgtaacaac

SEQ ID NO: 115353 - DNA, 145 bp, Zea mays
  Clone ID: MRT4577_36687C.1
tctgttcgccggcgaggacttttattatatcctgcgttttctgaacaccaacgggggtggtaagcataaaatcattttctccattaccttaatcaagggtgtttttcctcctttctctaacatctgttgctatatcctctttttt

SEQ ID NO: 115354 - DNA, 194 bp, Zea mays
  unsure (1)..(194): unsure at all n locations
  Clone ID: MRT4577_36688C.1
tncggttggtattgttcatcccaccaacagggtatcgttgagtctgggttatagaaccgtacgtgacgacagagttatgttttaccactactgactgacctgcgcacgcggttatgtatattcaacactatgtactgatgaggagacacgttgtatttcacaacaaattgtctcactcgcggcgttgcgttgaa

SEQ ID NO: 115355 - DNA, 385 bp, Zea mays
  Clone ID: MRT4577_36689C.1
tttttttttttttttttttgaaagagcaatgaaccaaggatctttttgcttcagtcagaacactctaactgatccaaggactaacaaaccatcgtttcttggcatcaagaaattcagttcgtcgcagctgaacacgaatctgaacaaaagagcatgaacgcagctaagctcgatagtttccaagaaagcgaatggcagaaacaatgaaaaaatgtttcaataactaatctagactatcaggcgacacgcaccagcatactacccttgatcagttccaaaaatgcagtgacagaaacgtcgaaagaatccttcaacttcaagaacaagaactgatccagttccaaaggacgcgtcaactccgtcccatctcgtgccgaattccata

SEQ ID NO: 115356 - DNA, 326 bp, Zea mays
  Clone ID: MRT4577_3668C.1
gtttgaaatgccgaaagacagccgatccgtgttgccgaaagcgcgaaactagtcttctctcctgctggcggcgtgcggaaggtcatacgccgagtcgacaagaagacatgacatgagcggcggtgctgtgttacgctctgatcgcgctgggccctgcctgtttcctcttctccggcgtccacgtcaggaagaccttgctcaggctcaccctgctctctagcaccttatttcggcttataaatttgatagttctctcggtaatatggagaggatgtcattctataaagtcacgagctcggtgggcatatgagattatgatccttaca

SEQ ID NO: 115357 - DNA, 467 bp, Zea mays
  Clone ID: MRT4577_36690C.1
ggaaggaacgatccatccactccacacgtttggggtggtttaaacaggaagctacaagattttcactggtgacgaggggtactggtacatgggaataacaatcattaaaatagaaaacaggggccctaagagcagaggggaataatcccttgggagagtcacgacatgattacattgggggggaacgaaaccaaaccaaattttacgcacgcgcccaacgcaaaagttggtgaaacaaaataaggggacccgaaccaaccaccgggacccaagtcgatcgatgaatgatgggatttttcttggtcacgggcccccgcccgtaggtggcccgccattgttccacagccaagccccggttataacgcgttgttcctgaaggagcccagggcctttatggggccagccccgaaaatgtactgggggtaaaaggccccaaaggcaacccccacaagggggcccacccaaaa

SEQ ID NO: 115358 - DNA, 374 bp, Zea mays
  Clone ID: MRT4577_36691C.1
ctttggggtcctgcagacttgtggcgctccttatctgactggagatacaacaagagggggactgtagctgcacatctactaccccactaactcccaacatcaaccaatggtcatccttcacatgtgcctcactcttctggacactaagaaagctatagtcttcttctagactaacgctgatggcaacacatcatctcccaaggaaatgactatgctcttttgtatctctgaaattatacctgagatagagaactgcgattttgacttccaaccctgccattacttcatgaatgcaatccatggctctcctttctccaccatccatgtgacaccagatgatagtgtcagatacaccagtgatcaggatatggtct

SEQ ID NO: 115359 - DNA, 291 bp, Zea mays
  unsure (1)..(291): unsure at all n locations
  Clone ID: MRT4577_36692C.1
acctcgnagccggccgggaaaccaattccacaatccaaaccagactagcaaggattcccccgatggctcatcgtgttctcctcctcctctctctcgcgactgccgatgtgtgtgccgacgccgtggacgcggaggacccgctgatccggaaggtggatcccggtggatatgacaacgatctgcaggtcaacgcggagacccacttcctgagcttcgagcagcgattttgcaagtcctacaaggacgccgactatcatgcgtaccggctgttagtttgtaaaggccaacctg

SEQ ID NO: 115360 - DNA, 394 bp, Zea mays
  Clone ID: MRT4577_36693C.1
ctcactcgtccgtgcacgcgctcgcccacgcgcgggaggcctgccaccagcggccgggggggcgaggaatcttactaggcgacgcttgattcgggcatgaattgctagccaccccaatgagagattgctccgtacccacctaggtcccgtgcggtgagtcaatatactgggtctgctcctcgaggcggcgaccatagacaggcgctccgatgaccacactgcactgactgctgcgcatgctcatgccaccctggctggcttacttatcgacagtagccataccgatagcgctcaccaactggcaccacttgtggctggcgggcgcacggtgtggagctgctcaccaagaagctgtgctacaatgaacccgcagcagccccatgaagtactggga

SEQ ID NO: 115361 - DNA, 168 bp, Zea mays
  unsure (1)..(168): unsure at all n locations
  Clone ID: MRT4577_36694C.1
ctccctcactcncgntccatttccccatatacccanatccanttcgcgagttctacctgatctgcggactnggctctcgtggagcanacntcgtctgganggnagtanaaggtccaggatntctcgaaggngganttcggnccanagncnntgangtngccgaggtcg

SEQ ID NO: 115362 - DNA, 315 bp, Zea mays
  Clone ID: MRT4577_36695C.1
cctttcatgctttttttgggggctacttttaacagacgaggggggtgcaaaacaaggcggctctaatcatgctggctggtggcggcactaacgccatgctgagtttctctcatgcgcagctctctatgccaacagaacctgagtcgccagagaaagcccagagcgggtaggccagagcacgaaaacaaacacccactgacagtgacaaacggctgtcctcgcccaagaggcaagccccctgcgtgacgctgccgaccgggaacacatggggacaggcgctgaattggccgtcccagcaggaggcgccctacagcg

SEQ ID NO: 115363 - DNA, 244 bp, Zea mays
  Clone ID: MRT4577_36696C.1
gtcgccgccgccgcagccgccgcagccgcaacaatgccgtcgcacaagaccttccaggatcagagacgaacgtgcgcgaagaccgtgcgccagaagcgccgcatcacctactggatccgcatgcgcactgacaataccatcaggtactacgccaagcgctaacactggtgttgcaccaagctcggcttctgctcgtcgcgatgtgccatctgctgcgtcggaaggctagggtctaagagctatc

SEQ ID NO: 115364 - DNA, 357 bp, Zea mays
  Clone ID: MRT4577_36697C.1
attcggctcgagcggattcaccgacctggctttttttccatcagcctcccgatttattaatgcattgcattctaccggttatggtgcacctgcataactgattgagaattctacagaagctaggtggacagtgaactcttactttgactatacatagaggactacgggcgcaaaacaaaaatccagatgtgtgactcatgaggggggactagatgaaagctcatgtttgacccatgacctgtatggacgcttacacatctggcgcttaggatctgaccaacccttgacggataccctagtctgatcttaatcatcggctgtgaaaggcggtaagaacatcaagaacgtaattaagaa

SEQ ID NO: 115365 - DNA, 504 bp, Zea mays
  unsure (1)..(504): unsure at all n locations
  Clone ID: MRT4577_36698C.1
cccacgcgtccggnaaaaaaaacccctcaactcctgagacgggcagggcaggcaccattggcatcagccatgccgccggcgccgccaccgcaacaacctaagaatcgcatccgtgttcccgcgccgaccggagagaaccgtcggcctcagcgtcggatggagagccggaacgcgtcggagcgggccgcgttcttcgcgcggcgagaggcagcggcggtgctccggcgcgtgcttcgcggcgacgccaccaggcgcgccgncggctccataaaatcccttgtatactccccaaccgtccgcaacaagcgcgccaccttcgctctcgtctgccagaccctaaagtacctaccaattctttaagaggttttagcatcgagtgaaatactgagcagcaaatggaagaaacaagaagaattggtttatgtgactacctatgacattctctttggtcaggcaattgcggtttttgggtcagtccaacaaatattatgctacaaaaggatt

SEQ ID NO: 115366 - DNA, 1239 bp, Zea mays
  unsure (1)..(1239): unsure at all n locations
  Clone ID: MRT4577_36699C.1
gtcgacgacctgcctactacttacttactgtacctgtgcagctgtgcccctgtgccaaccatcaatcaatctgacgcaattccgatcggtttttgcagctgtgaacggcaagggcttcatcgcgcgggacctgacgttcgagaacacggcggggccggcgaagcaccaggccgtggcgctgcggtgcgactcggacctctccgtcttctaccgctgcgccttcgaggggtaccaggacacgctgtacgcgcactcgctgcgccagttctaccgcgactgccgcgtcgcgggcaccgtcgacttcgtcttcggcaacgccgccgccgtgttccaggactgcgcgctcctcgcgcgccgcccgctgcccggccagaagaactccgtcaccgcgcagggccgcctcgacgccaacatgaccacgggcttcgccttccagttctgcaacgtctccgcccaccccgacctcctcctcctcctgcagcagcagcagcaggcccaggccagcaacgggaccgcgcccccggccacgcagacgtacctcggccggccctggaagccctactcccgggtggtgttcatgcagtcgtacatcggcgacgtggtgcgccccgagggctggctcgcgtgggacggggacttcgcgctcgacacgctctactacggggagtacgccaacaccggccccggcgccgccgtcgccgcgcgggtcaagtggcccggcttccacgtcatgaccagccccaccgaggccggcaacttcaccgtcgcgcagttcatcgagggcaacatgtggttgccgcccaccggcgtcaagtacaccgccggactcacgtcctgatcctctcttcaaacccttgatggatgtaggctttagtacgttacgtagtatttgcaaccttatactcctagcactttatatatgcttgttggaacttgctctctgctgctaggagatccaacgggggagtagtgacgtaaacagggttctcgcgtaagatggcaacatctctgttaacctagcctctcacggcactgtgcgggggtatttataggtatctaagcgccctgcgtcctgtgttaaggacgcatgtgccctcagacacctaagttatcctcagaatattcccataaagcagggttacagactgttnaaaaaaaaaaaaaaaaaaaaaaaaaaaaaaaaaaaaaaaaaaaaaaataaaaaaaaaaatataaaaaaaaaatttaaaaaaaaaaaat

SEQ ID NO: 115367 - DNA, 109 bp, Zea mays
  unsure (1)..(109): unsure at all n locations
  Clone ID: MRT4577_3669C.1
tctaccatggcatcaactctctccttggcagaaggacaggaaatgtcatgttaccatgtgactaactcctataataccatgatatgaaaanccaccttgacaaggaagg

SEQ ID NO: 115368 - DNA, 471 bp, Zea mays
  Clone ID: MRT4577_366C.1
gccggaacggatcacgaggatgacgaataggctggcgctaggctgttcggcgtctcgatcgggcggaaacgaatgcgggacgagagcgaccaccacgccggcgtctgcgcagcggaggtgaaagccgagccggtggacgcgcgtcccgaccagcagcggcagcgcaacgccacggagccgcagtcgtggcccatttaccggcccaggcctgtgtaccacccgctccgggcctgcaacggctcgggcagcgctgggagcgaccacgacgggtccaacgactcgaggtgacgggagcaatcgtcgatctgccctcagtaaattagtattacacttactaatggtactaggtaactatattacaggttaaaataggatgtgagctctaaatctctaattatgtggggatttactgaccgatcctatgtaaaaatctccagtgtttatgtaaaaaaaaaaaaaaaaaaacaaacc

SEQ ID NO: 115369 - DNA, 712 bp, Zea mays
  unsure (1)..(712): unsure at all n locations
  Clone ID: MRT4577_36700C.1
tccttatagctttattcactgggatgcagccgctaaaggtnntggacctttatggtgacgatggacttttttntctctgacccggcttggnntttgagttgactttattgtctnntttggcgtnngtgtgcttnntgtgagtttnngtgttaatcatttagtgcnnaggttggtattctttttcanncttagttaccttnnttttttcacagcggatcaggncnnttgggcannactagtgtngnnctgttgttnnnttgtttatttnngttacctnnatccgaagnnagtagacccaacttgatnngtttacgtnncttcagaaagtttctttnncaaatgtgnngaatactgnntaattttgnnttgggttcgtctttgtacaaaggtgttcattcaatgnntgccgtggtggtattctaaagccgccaacaagatgnnatgagcccgttcctcacacagcnngcaccaagaagcaagttcgtcttttgcttagcccagnnccaaatcagcagcgaactctatttcagnngtttgtcctttagaaaaatttaggcttgcttcttaatttagattccaagcattatgttcataatgtcttgggttgaaattatctatcgaacttcagatacatcgcaccggaacaagttcctgtccaatttggaggcctcttcaagaggatgatcctgagttcaccacctctgacactgtc

SEQ ID NO: 115370 - DNA, 3051 bp, Zea mays
  Clone ID: MRT4577_36701C.1
tttttttttttgtactacagtagctactcatgcattccgctgtctacagacgcgatgcaattattgtcgcagtcttgctgacttctgaggtacaagtacaatggtactatacggacgctatacctattactaccactagtagtatatatattagaggctggcgtcatagccatcttaatgatcaagtagatgcgcatcgcaagacgccttaaaagctcactgaacaaaccaaacccgagtcagaaatcgaacgggtcgactgaatatacataacagttcaaatccgaggccaacgatcataaaccccgctccatcaaactcattgcaggttcttcgattgcacccggagttggccaatgatccttcgagtccttgtattgtatgcagccagtttagccaagcctcaattgcacgggcttagagcatgtggcttttagtccccctcagtagtagtagtagtaaaaaagggggggcaggctccaccgcatcatgcttcttcgctctcgtcctctctcatatccaggatttcttcttggcagtagagtacatttagctcttcttgcagctgaacatgttttagctttgccgcaattaattcgtcagtcaaagaaatcatcctagattgtaactcaaaaattttaacaagtaacgagtgttctctctcagcagtagcagcttcaaccactgtatcactcgtcgtgctctggactcttgatgactgagctgcatcgactctctcattttgttgcaagctacttagtaggttcgtaatcagatcctgtagcaaggaaatttgaaattgctggaatgcagtttgcttcacaaggttttgaagatgcggaatcagaattgatgtagatacagagctattgcagagttccttcctttgatgattagtagacgttgtcttatcattcgctgaccaatcaccaacactggctgattttctcagtgaaggcccctgaaaaaatggatatatctaaagcaaagtaacagttccttatgaacaagggaccaaggaaaattcttaccacttgcaatttacgtgaggcactgctccctggaatttcttgaacctttgcaagatccacattctcagatgtcactgagaagcggcctttaatttccaccatagtgcgcttaggtttatcacccaaagagcctacataacctgcagaagatcgaataggagcagaaagactatttgcagaagcacgagttggaagtgacagagggccactaagattattggctcttgaaagactatttgcagaagcacgagttggaagtgacaaaggaccactaagattattggctcttcttgtaccattcttttgtttatcagatacagattgaactcctgcatccctttcaataatgtggcccctttcagtcatcgaactattattcggaccagattgcagaactggacctgagtatgtcctctgtttttgtctgaaatcacttctataatctttcccatcagcatcatgcttcgacgtcgagggcaatgaatcattttctgattctgggtttttacgtccatcaggcttcctttcactataggcattcccattgttggaagacaatatttcatttatttcgggaccattttgaccaggatttgctggcacagaagaacgatcactgcagttatttccattcgatggtgctgtctttccaaaataatcgtcagaagatgtatccttatcaatgtcagttattctaccagtgtcatcgtcttcttttatttcaggtggatcatcatcacatatcagtgatgcctgagcctttagatcctcaatatcgaagttccatgcactgacacctcgttggtactcactcatagaaagtgcttcttgttctgaagaaggcattctcttcaaagctagttgtgctgcatcctttagctggagtgcctttacacggtcccaaagagggggcaaatcagttaaaatgttcttaacagttagctccggaggttttgcattcttgaaaaaagaatgcttaagtaatttttcagctgttggcctcttcgtttgatctttcaccaagcacatcgcaaccatttccttgaaggactttgaaaatcttttatcacggtcatagtcaagacctggaggagcattttggagcgtcatgagaagaaccttcatgggagggtacttcgaaaagggagcatgtccatgtgccagctctagtgcagttattccaaacgaccatatatcagctttgaaattatatccagttccaggctggagaacttctggtgccatccagcatggtgttccaacaaatgtattcctagccctttgtctatcgcctctatcaaacatgcaagcagagacaccaaagtccccgagcttgactacaccaggattatcaataaggatattacctgccttcacatcacgatgaatatgtccttgcctatggaggtagtctagagctttgagtgtttcctttagaatagaggcaataattggctcctcaaaaccatcgggatatgcaaccttcattaggtgcaagcatgaaccctctgacatgaatggcattaccacccaaagattatgacccacaacaaatgagcagtaagacctgatgacattagggtgatctatcaagctcatagtttgagtctcctttcttacatcatcgaggttactgttgacccgatcgagatccagacacttcacagcgaccgtccggccggtgggaatgaactccgcgcgatatacgacggcgttggcgccgtatcccacttcctccagcagcctgtagtcggcgggagacacggtaaacgccggcgccggcataggcgcgggcaccgcggaccgccgtatgctcccgctcctcaccatggttccgagcggagcgtgctcggaagcaccggcgccgagttccggcgatcgccggcggcggcggctgggtgattggcccgtgtcgtgtcgcgcgcgctggggactggagagggaagcaagggagagggaggggggagacgggggagattgagaggagaaaaaaggagtgcccggcccggccggcctcgag

SEQ ID NO: 115371 - DNA, 324 bp, Zea mays
  unsure (1)..(324): unsure at all n locations
  Clone ID: MRT4577_36702C.1
atttaaaaacacaccaatctaatcgctttagcaacnacctaacaccaattgctaccaggtattttccaacttgcgctgcttgcccttttactgaacgcaacaaatgctttcattattccacagtgctcactttctcctattgccagtatttcacagttcctcccactcatttctttaatgggcttctaacatccaaccgtgcaagcctacatgctacaactagcgcttgcgtctagctccttacaacaaccaattgcccaattgcaacaacaatccttggcacatctaacctttcaaaccatttcaacgcaccaactacaacaa

SEQ ID NO: 115372 - DNA, 486 bp, Zea mays
  unsure (1)..(486): unsure at all n locations
  Clone ID: MRT4577_36703C.1
ttcgccacttcccattcctgtgcgcctgcctcgcctcgcctcgcgtcgcactacccacccccaccagccaccaccaccaccaccaccaccaccaaccaaatggagcgcgcacgccgccacgccagccgcgcgctgctgcgccgcctgctcgcggcggccgcggcctcgcccgccgcgtccccggccacgtcgtcccgcggcatcntccatcccctgtacgctcgtccgcccgccaggcccgcggtggatagcatgcagtctgccgtctgtctgtccctttccatccccgctggtcgctgcatccatgcacgacgcagggcgcgggtcggcggccggtgtcggcgctgcagccgagcgacaccttcccgcggcggcacaactccgcgacgcccgccgagcaggaggccatggcgtccgcgtgcgcgaacgcggcgtcaacacgcccggtgacgccacggtcccgcccgtcatcgcgcgccgcgatgc

SEQ ID NO: 115373 - DNA, 183 bp, Zea mays
  Clone ID: MRT4577_36704C.1
tctttatgttcttgattactctcgttcttcgtctactactctcgtcgaccagcgtctaattaaccgactattaccagcacgagtatcaccattctctataataactacttttactacttcgacttctcattatcatcacaatttcctctttccatttattatcatcttcacattacacacaac

SEQ ID NO: 115374 - DNA, 146 bp, Zea mays
  unsure (1)..(146): unsure at all n locations
  Clone ID: MRT4577_36705C.1
cagagcgagggagcacacacagtgattacttatatctcttcgggccggaagcgtgcggnataatataaaagaggaatccactaccaacaattgagcaacaatggacaccaagatcttcgccctccttatgctccttagctctttgt

SEQ ID NO: 115375 - DNA, 632 bp, Zea mays
  Clone ID: MRT4577_36706C.1
cgaggccggccgggggcggactttccctgcgcgctccccacctcagctcagctcctcagcctcagcccgccgctctccaggtcgccagcgccatgacccctaaaggtgggcgcgtgggggacgtcggcagcaagaagccgactccgggaccgggagcacatccgcgctacgtccccaggagagggtcggtgctgaaggggatcgttcgcggcgtgctgggcctcgtcttcactctgatccgcgcgccggcgaactccggcggccaccgcgtgcgaccggcgccgccgcccgcgcccggagaagggggtggaagtgatgatggcgcggagcaggggaagtaggtggggtttgtctgcgcactcactctgcggtggcgatcggctctcgacggcccaaacttttatctgcgccgtccgttcactgcttgtttgatgtttgtgtcgtcgtagcatctttgcagcacgttttgttcttgcacttctacctacgcgtcgtgtctccttgtgtttacatcgagtctccaaccactgctagtgcttgtgctgtggtttttgtttttttgtttctgcagatggtttttgagcagctgagcagatatatctcaggtgctagtcacttcaattttcttctga

SEQ ID NO: 115376 - DNA, 272 bp, Zea mays
  unsure (1)..(272): unsure at all n locations
  Clone ID: MRT4577_36707C.1
ggaacaaaaagggggacaaggacaaaggaccnngcccggaagagagaagggagagagaggaagagagcgagccaacgaaagatcacccgggaggaggaggagggttcgaaatcgaggggcgcaagggccgctggacagaacaatggaggaagcacaagacacaacagagggagcaaagcaggagaacccgttacccacggggacccccggcgtcagatcaaccggcaacgggaaagggacgaaccaacaggagactcaattcgaggaagagc

SEQ ID NO: 115377 - DNA, 930 bp, Zea mays
  Clone ID: MRT4577_36708C.1
ctacggccgtgggcgtttgttgcggtcgccctggcccccggtcgtggccgcgaccactagagcagtggaccgtggcctctggtagccgcggtccttcttctttttcttcttttccgtcccgggggatggcacccaagccacccgactgggcagctccggtttgcggggctgagtgccatgcacggccctcagcggctctagcgcatttatcagccagagcgaaaagtgtggggacagtttccacgtcatgtgtggccaacttctccagcatcttctcatcacgtacccccgcatggaggtgggcctccacgcgtgctgctggtaagcactggcgaagttcgcaacgaaccgcacacagagctcttcccaggagtagactgaccctggggtgaggttcatgagccaggtccgggcaggtccaaacaaggccacatgaaagtatgttgccatcacagtggtgtttccacctgctgccgtgatggcggtaatgtacacctgccagaactccgacgggttcgacgttccgtcgtatttttccggcaggtgcgaccagaacttgggtggccacgacgctgcgcggagatgatccgcaagggcggcgtagcccactccggccaaggggacacccgtttgggactgggtgcccattggtgtctgcggcgcaactgcgccgaaatcttgatcgaggttgcgaccatcgatgttctggcggcgctcgcgcaccctttccaaagagacccgggcatcctctcccgcacgcctgcggtcaagttccgtccggaggtcgttggtctgggcgccccttactaagggcgagcgccccgacgccgacgcctcgtgttgacgtcgggatgaccgcgtcctcgacctggtcgcggtagaatgcgccataccgagcagtcggtcgacgtcgtcccaccattgcttcat

SEQ ID NO: 115378 - DNA, 754 bp, Zea mays
  Clone ID: MRT4577_36709C.1
gttggccggaagtacctctgcccttcgttttggtatcattcttggccttgcactgttggctctgggaatctcaagtttgagatcacaaagagatggcggccgtcggcctcgtcttctggtgaaagggcaagctgcaatagccagtgtcatcttcttcagggagttttcagttcttctccagaatggctggtttccaaaaatcttcatggttctcctcagtggagtagtggcaggcttttacttctatcgcattgcagctggtagccccaaagagctgagcagcaacagtgattcagtgaactaatgcacttggatgaatcagatgatcatgggggaacgcagacccagaaggctatggcctgtttgctttcgatttccttcatcatccttcaattcaggcaaagctcggttgtaaggtgtccgcatgatgaccacatggattcagaagaattgcttgtttactcggccctcttcccgcactcctttgttcctttgctcatgtagtatagatgatagacttgaacaacatcaataaacgacattcaaaggccatgcagttagctcttcagtttgtctgctgtttgtttttcatggggacagcccgaaaggtcggtgaagcgttcaatgtttcgtgaagtgtccgaaaacagtcagtgttattactctgtagattccagctcgctcaaaactattcaaggccgatgacaagttgataacaattagtggcaaaaaaaaaaaaaaaaaacccgcggcc

SEQ ID NO: 115379 - DNA, 331 bp, Zea mays
  Clone ID: MRT4577_3670C.1
ggcttggatggccatcggccgaatacccaacttcagtcctgatggcaccaaacacgacagcgacgtggacatggacaacaggactgccacagggcaatactgatgatgaaactcgcacatgggctcgcagatggagaattgttatgttagcaaaagcacacgctgtgggtgtggatgaaattgaccaccaatttgccgtattatcggcgtcaacagcatcagtttctgcaattggatccgatcctgatccaagggagatagtcgagagtcccccttcaaaagtgtgtaggaaaccatcaacatactaacgggaggaagcagcacaatgtta

SEQ ID NO: 115380 - DNA, 727 bp, Zea mays
  unsure (1)..(727): unsure at all n locations
  Clone ID: MRT4577_36710C.1
ccgggccgggnaaccctcatattatcggagcaccaacccgccaacatcgcaaaggggagaacagggggagccagagaccaacagtgcgcggcaaggatatttggcatccttatgctgggcgctctctctgcaggagatgttaacgcacaccatttttcctcaatactaacaagctcctataggtggccttgttcccccataccttacatcaaagaccgattaagggggggaaaacccagccctttaaccctacaggctccaacaagcaatcgaaacacgcaactaaccttaatcaccgcggggctgtcaacaatcaccaggcctatgtggggagcagccatcggacacaaaccagaagggcacaacaactgcaacagctcgagctaccagcgatcagacaaggatatgcgacaaacctttctgcctacactgagcaacaacaataatcttccattcaaccaactgtgtacactgaaccctgctgattattggcaggaacaacaactactaccaatcactcagctagctactgcctactctcaacagcaacaatagctttcattgaaccaatgcagcgaactgaacccctatgattatatccagcagcacatactactaccatgcgggcagctaactacaacaagccccgctatcttcttgacacaacaacaattgctttcgatgctaccaccagcgagtggctaaccccgcaacccttttacaactg

SEQ ID NO: 115381 - DNA, 386 bp, Zea mays
  Clone ID: MRT4577_36711C.1
atttatatgtacggggccggattattagttagatatgaacatttggacttggtttctgcataagtatttgcaatctaaaatggaccatgcatgcaaaaaaaaaaaaaaaaaaaagaaaaaaaaaaaaaaaaaaaaaaaaaaaaaaaaaaaaaaaaaaaaaataaacaaagcataagcgctcgggagctaatggccccgggcttctactggctctacaagaagggctacctcctaattattccccatattcacctggaaggcggcgaatatttcctcgttgagcccttcttaaagcttggactgataggcgccacattccctcaagtttataaacttagggctggccaacttctcaataacagaatgccggaaaaacaaaagtgagc

SEQ ID NO: 115382 - DNA, 306 bp, Zea mays
  Clone ID: MRT4577_36712C.1
acgcgccgcagtatcatccatggacgtgagcggagcaagcggtttagcgtataatggcgcggcggggcgcttggcctgctggccgaccaataaatctgtgtcgcggtcctccaaggccgggctgtatttccccgtcagccgcgtctggcggtacctcaaaaagggccggttcgcgcagcgtgtttgcacgggtgcccccgtctacctcgccgccgtcctggagtacctcgcggccgaagtgctcgatctcgtctgctacgcggctaggtgacaacatgaagacgcgcatcattccgcgccacgtgc

SEQ ID NO: 115383 - DNA, 530 bp, Zea mays
  Clone ID: MRT4577_36713C.1
tatatatcctgtgtgctctatggatgagatgaagaatcgctactctcacactcctgctagctcatacgccttattcacaaagcctaccatatttgatgatatcttgcaatttcagagataccattagccaccgccattagatgtcgcacccgcatggccacttcctcacgagcacatgaggcgccagcgaataaccctgacctcccgaccgaggacgacccctacaccacaggatacttcttgccaccgacgatgctacgtgagaaggacccacaagagagccttgactactactcgcgcgagaggggaatgtcactgctgcaccggctggattatgaagagatgaccttctgggttgtatcttacgaggttacgagtgtgcgatgctactgctcggatgatcatatcaagctgactgtgcggactataagggaaaaggctactcatgcgatcgcacactatcgtcgctagcattctgaccccgccctcaaaggatactataatgggaactcggatcctcgagaatctgg

SEQ ID NO: 115384 - DNA, 269 bp, Zea mays
  Clone ID: MRT4577_36714C.1
ctgaggactctgctccaggggttgtcatctccacctcgcatcaatggggatcagggctagcggagctcggactcctgctcctgtggttagtgtgtgtgttgtggcttctgctggcgtggctcttcttgtcgtcggtcgtcctctgctacgccttcttcacgcacgcgaggctcaacctgaggctgtcccggaagacacagtcagtcacctcaaaatctctgatggcgagtcctcaaggcatgagggctgttgccgactgcgaccacacc

SEQ ID NO: 115385 - DNA, 421 bp, Zea mays
  Clone ID: MRT4577_36715C.1
caccgagcacttccggtacaagttcgccaacgagaagctcaagcgcacggcgcgctactactcgtccaactggcggacgtgggccgccgtaaacatccagctcgcgtggcgcaggtacagggcccggacgtcggcgacggacctggcggcgatggctgccccgccgttggcgggcgggcccgacgacggggaccggcggctcagacactacgcggccatgttcatgtcgctccggccgcatgaccacctagagtgagcattagggagggaccatcctagctgtccgctggtcgcgtcatggtgactgtacattgtagtacactgtaatatatggttgtcatcttctttgtaagtgaattagtggctccgaattgtcatcatttaaagaagatcaataataatggagaaataatttcttagt

SEQ ID NO: 115386 - DNA, 285 bp, Zea mays
  Clone ID: MRT4577_36716C.1
aaacacgctgttttaggttgttaacgacaacgacccagcaacaagggcatgatttatcctatttgaaagaaggaaaaagctcggaaccccaaaacccctaaatattcattagaagaaagggggcgattccaaaggaaggacctggcacgccttgttaaatgggtgacataaaaaggaaaggtgcttagggaaacaaaatgaacaagaagtggggcacccgcgacttctaaaaagctaataagaaaagagcggttcatttggcccgaaaatcctataaaaagtggg

SEQ ID NO: 115387 - DNA, 227 bp, Zea mays
  unsure (1)..(227): unsure at all n locations
  Clone ID: MRT4577_36717C.1
agcgcgccggccgccaagcagccggccgcgcgcaagcccacggcgcggctgtcgctcgcgggcctcgtcgtctcgatcttcctcgtcgncaccttcctgtacaacgaggacgtggtgaaggcgagctccagctccntcagctcagcaacaacatgcgacgccgctgaggtangcgtctccgggcgggcgaggtcacccgacctaagggtgctgcangaggcggcgca

SEQ ID NO: 115388 - DNA, 369 bp, Zea mays
  Clone ID: MRT4577_36718C.1
cccacgcgtccgcccacgcgtccgcccacgcttccgcccacgcgtccgctcccagctgctcaaactgtaagtggtgggccaccatcatatatttgtcgactcagtggaaagagcgatgtggattggtctttctggttggaggcaaactcttctgaaagtctgagagtcgatgtcgcagtacttgatcagtaccttgttgatagtacaaagaaactcaagagcctcttcccaagttgggccgggctgtttgtataaatatggaatgcaaggtgccctttgttgggtctgccggaaattatccagaaaaaaaaaaaaaaaaaaaaaaactaatataaaaaaaaaaaaaaaaaagtaacaaaaataaataaa

SEQ ID NO: 115389 - DNA, 378 bp, Zea mays
  Clone ID: MRT4577_36719C.1
gggaaaaaccccgggccaaaaacggggcccccaaagggggggcccctaaagccgccggatttaaaacccagggtttacccgcgagcctggcccgggaccccccgggggggaaatcccaagggccgggggcccgcccctgggggacccgacctggggacccaaccgggggaaaaaagggggaaaaatgttgcccggggaaaattgctggccgaaaacatttccccccaacaaacccccccaaaacaaaagggggaaacccgggggggccaaaggggggggccaaccaaaataaatggggtagggttaaggggccggtttcaaggggggaaacccggggggcaaaccggtttaaggaaccggccaaccccccgggaaaag

SEQ ID NO: 115390 - DNA, 826 bp, Zea mays
  unsure (1)..(826): unsure at all n locations
  Clone ID: MRT4577_3671C.1
ttgggtacctcgaggccggccgggaagttccggcctcatccgctgctttcctcgcaactatcggatcttgcgaaggcatcatcctcctatcctataatcgcatttcgaatcgcaaacggagacttcgcccctcttcacagattctaatcgaatttgccaatctgcaagctaacgtagaacaatcaccaatcaccatccttaagaagatgatgcgatgcattgtaacgggcggcgggtgcgttgcttcgtggattggtgatcggaggtcgccggctgtcaaccccttcagcgtgcggatgtcgacgggcaacgttgaccctgaagatattccactggagaaggttcaagctaaatcctcaggacatgttatgccatatgttggtgttgcttgtttgggggctattctgtttggttatcatcttggtgtggtcaatggtgcgcttgaatatcttgcgaaggatcttgggattgctgaaaatgccgtcnttacagggatggggtggttagcacatccctagctggtgcaacactaggttcctttaccgggggatctttggcagataaatttgggcggacaagaacattcatcctggatgcagccccactggctgtaggtgcattcttgagcgcaacagctcaagatatccgcaccatganttattggtcggttgcttgctggaattgggtattgggatctcatctgcacttgtacccctttacatatctgagatatcaccaactgggaatcgtgggaacacttggttctggtaatcaactttttatctgcattggaantcttgcagctttgntagctggattgcctttg

SEQ ID NO: 115391 - DNA, 237 bp, Zea mays
  Clone ID: MRT4577_36720C.1
atcgaccacctgcgggccccggacaccctcaccactgtgttcttcccagcctcctggtggataatgaataacaactgagccagacctgcacacgccgagggccccgggaccctgcctgcctccctctggagccttctggactggccagcccagcgcaaagaccagggcttgtctcctcctggacttgggcctggtggaagggctctcagcccagggatcagggactgggctgcttgc

SEQ ID NO: 115392 - DNA, 120 bp, Zea mays
  Clone ID: MRT4577_36722C.1
accgcagcaggtggcgtggacgatcgtggccgccacgtcccgcatcgtcgcggccaagacgccgtttgttggccaggatcgcgccgccgccagtgccagccccctccgcaacgtcgccgc

SEQ ID NO: 115393 - DNA, 278 bp, Zea mays
  Clone ID: MRT4577_36723C.1
acgcgtccttccacacgttcgccgactctttatctaacccggacataatggcggggggttctatcatcagccaccgtcgcttcatcctcttagacagttcatcatctccgtgctagcggcatgccaccgccagggccgggaccttcttttttctggggaggaccatctacggataagtcgccttctccgacgacatcgacatgctcaaaggctcatgcggcaagtcgctcgcgccgttcccgcaaggctgcttctactacaacgccctcggagggctc

SEQ ID NO: 115394 - DNA, 334 bp, Zea mays
  Clone ID: MRT4577_36724C.1
attgttaactgttaacttttgtttttaaaggaagaaaagggcccccaaaaaggcacaccaaaaaaaacatccgaacaaagttgggtccaaaaaaaaccccaaccccttccccggggcggggcagcattcctttttgcccaaagccgaattgcgcatttacgaacccgtgctggcaacctaaaattttttttttagggccaccaaaattaaatccaccggccgcggtttataaaacgcggggacgggaaaaacccggggggtacccaaattaattgcatggaagaaaattcccctttctccagcatgggataaaagcaaaaaggcccccacccat

SEQ ID NO: 115395 - DNA, 394 bp, Zea mays
  Clone ID: MRT4577_36725C.1
taataacatgaagcaagtgatgcgacttatctctgtgcttcgtgaagctaatcaagcaattaatcccaagttgcttcagttggtcgaagacagacggttcaggtcgttccaggggtagaggaggcatgaaggatgaccgtcgggacagatactctgcgggcaaaaggggtggatttaatacctttagagacacggaaaattatgacagaggttactctagcctgcttaaaagagattttggggcaaaaactcagaatggtgtttacagtgctgcaaattacaccaatgggagctttggaagtaattttgtgtctgctggtatacagaccagttttaggactggtaatccaacagggacttaccagaatggttatgatagcactcagcaatacgg

SEQ ID NO: 115396 - DNA, 338 bp, Zea mays
  Clone ID: MRT4577_36726C.1
caagcaacatagaaagtggaatacagtagcaacaatagagcaacaatggcggccaagatattttccatccttatgctccttgctctttctgcatgtgttgctaacgcgaccatttttcctcaatactcacaagctcctatagctgcccttcttccccataccttccataatgaccgttcatatgtgaaacccacccttaaccctacaggctcacaagcaatgacaagcaatacttatacctgtcttaacatgcagctatttgtgagcatgtcaacataagaacagtgacactgtctcatatagcatagttgaactttctattagacacatttcataca

SEQ ID NO: 115397 - DNA, 699 bp, Zea mays
  Clone ID: MRT4577_36727C.1
cgctctcacacacagcacgagcagcagctagctcaagcgctcctcgcaagtcacaaaccgtgtggtgtgtagtagtgcgtgctagctgccagcagccagaccgcagagatgtcgcagaggccaggcaggcaccagaggcgggcgtcgcagagcgtgttcgtgctgccggagaacttcgcgctgggggacgtgccggcggccgtggccgagggcggcggcgtcgagcagcggaagcccgcggccgcagacgcccccgagctgcaggcggcgaggcaggcggggcgccaccgccgggccatgtccatggccgtcgcctcccgggacctggagatgatctcggaggacattgggattggggcctacaagtacggtgcgtagaggtcgtgtgtgcttcgccagcttgttggctgctacatgctcctcccatcctccggaccggcggtgcttctcgggccgtttagctaggagcagaagcgagtggctggctgtactccgatcggggtccggtgtcctctcttgtgctgtgctgtcgttgttttcgtcatgtatccatgctgctgctgcttctgtcaatgcgtattattcgccttcttgttcttgatctagaagtaaataaaaaaacataaacattatttttggatgtagatattggtctaattcagtgacatccaaacaataaaattagaactatatttcact

SEQ ID NO: 115398 - DNA, 335 bp, Zea mays
  Clone ID: MRT4577_36728C.1
agtgtttttgaggcacatgatggtgtgctcctcaggtaccagtacaagaccagataccggtattcaaacaaggttatgggccatttgggtgacagcatatcgattcgtggggatgagagccattcggggtcattctgctacatgcacatggatgttggattacattcagctatggaaggtgggtctggaacgtttgggctggctacagcttgtgccatcggtgctgcttcagctatgggtggtctgacggagttttcataccttggacgggggcactggcttacgctgaggcagctggagcttgctaccaattagttctcaatggacaacattat

SEQ ID NO: 115399 - DNA, 749 bp, Zea mays
  unsure (1)..(749): unsure at all n locations
  Clone ID: MRT4577_36729C.1
cgggggcggaaacaagaagaacctgctacccctcgacctccgccctaagaagacccgtgccatacgccgacgtctgaccaagcaccagggatacatgccatactgctacgactaccatcgctcctagctaggaccgtcagatcttctgtataactttaattcgatactaacatcataccatgtctagaatatggggctcagccttgagtatagtattccagatggcacttgcaatgtacccttgactatatattatgcagcgtcacttatatctgataatctgttgagtagccaatgtgcaatctgattatcttgtttataataagtggtttatagactatgacccatccatgatgggcagctttaagagcatttatttcaaattctaattgatagaaataaatattctgatgtgattctattggctcgtgtcaataagcggtatgtaagttatgttccttgatggatgaaccattaatagagcaacgaatgatatttttttgaaattcctcttatctttatgagccaatatattttgcgtacggttgcaactgtagaaagtgagtaatgtttgatgactgactatgtgatctgaataatgttacttctcattgttgtgcataatcaaggtgaagngttgggtgctaatgatcttacttcaagctgatcatataggagagtaagcatttgcaagatacctgataaccctctccatgcagagctcaagtctgaaagagccctaatatttg

SEQ ID NO: 115400 - DNA, 1533 bp, Zea mays
  Clone ID: MRT4577_3672C.1
cgaaattggttgagtggttacaaaaaaaccaaacactttccagcatatgcatgcaagggacgaaattagttaccagttaccaacactttcagcatatgcacgcaagggacgagattgattacccattaccaaaccaacagtttccagttcagcggtaggaacaggccgtcacggcgtcatccgccaaaggacaatccatttgctcacacaggcacaaacgctgagcgcctgagcctgctctcgcggtctaggagatggcgttgatcacgaatgtctctgactatgaggagcttgcaaagcagaagctgcctaagatggtttatgacttctatgccgggggtgcagaagaccagtggacactcaaggagaataaggaggcattctccaagattctgtttcgaccacgggtgctgattgatgtgtctcatattgacatgtctacaagtatattgggttacaaaatttccatgcctattatggtggctcccactgctttgcacaaactagcccaccaagaaggagaggttgcttctgcccaggcagcagctgctgcaggaactataatgacgttgtcttcatggtcatcttgcagcattgaggaagttagctcaattgcaccaggactccgtttcttccaactttcagtattcaaggatagggatatcgtgcaacagcttgtcagaagggctgaaaatgctggctataaggcaatcgccgtcactgtcgacgctccacgccttggtcgcagggaagccgatgtcaggaacagattcaggctgcctgaaaatgtggtgttgaagtgctttgaaggactggatctcagcaagatggacaagactaagggttcaggccttgctgcttacgccactagccagattgacagctctctttcttggaaggatatcaagtggctacagacgattaccgggctgcctatcttagtgaaaggagtcataacagcagaagatgctcgaattgctatcgaatgcggtgtcgccggcattatcgtgtccaaccacgggggccgccagctagactatcttcctgcaaccatcagctgcctggaagaggttgtgagagaagcgaagggccgccgtgtgcctgtgttcctcgacggcggcatccgccgtggcactgacgtgttcaaggccttggcgctgggagcctcaggagtgtttattggaaggcccgtactgttcgccctcgccgtggacggcagggcaggggtgaggaatgcgctgcggatgctgagggatgagctcgagatcaccatggcgctgagcggctgcgcgtcgctgaaagatatcacccgcgatcgcgttatcactgagcgcgacatgatccgtcgctctcggatataggcttcgattcgtttgctgttgtgttgtgcggggctgaaagtctgttgttgccctggcatgactgtcatattcgaaactgaccggaccatcagattggttttgacttttgacctattggctaacgatgtgctaggttttctcataaaaaaaaaaaaaaaaaaaaaaaaataaa

SEQ ID NO: 115401 - DNA, 330 bp, Zea mays
  Clone ID: MRT4577_36730C.1
gagaccccgaaagggtcattaattaattcaagggtctcccgaccacttaacacaggatgcaagaagtattggggaaacatttctcccatgatcaaaagatgtgctaggtggggcacaaccggggcacctggtcggcctgatgaagagattggctacatgttgagaccctccggaacaccttactttttgctgaaaattaccttctcctttgcctttttgaaatctgcatgggtcacctttattctgggttgtgttaagggaagccatccagcctgtgggcagattgacttaatatcaccacccgaaaactggactttggccataacaaac

SEQ ID NO: 115402 - DNA, 135 bp, Zea mays
  Clone ID: MRT4577_36731C.1
accaagcatacgtatgaacgactggcaccagtgcacacggtcagaagtatatttgtgagaatcattgtgacactctatagtgcaacagaagaggctacatcgaatatcgaagcgtgcaaggactggagagaaaag

SEQ ID NO: 115403 - DNA, 232 bp, Zea mays
  unsure (1)..(232): unsure at all n locations
  Clone ID: MRT4577_36732C.1
attacaggaaaacgcgcgtgcttatctcattntcatttggaaacagccaaaacgatcttaaaaggaaacaacacaaaagctttgtcagtcctgtagggcaattttgtttttttgcttacttaattctcctgcgtggggggggggcgcctttcattccttctctcgtctgcgcttcgtgctatcgttttattgtccactttggctttctgccctttttttgggccctttgtgt

SEQ ID NO: 115404 - DNA, 518 bp, Zea mays
  unsure (1)..(518): unsure at all n locations
  Clone ID: MRT4577_36733C.1
accaagctttttnnttttttttttatttgtacaagctttttttattttttttttttttttttgttttttctttttttttttttatttttttttttttttttttttttttttttttttttttttttttttttttttttttttttttttttttttttttttttttttttttttttttttttattttttttgcttttttcatttcatttttgctttttggttaaaatttttatctgggggccctttgtgtgcgaatttaattaactaaaaaaaatttgtggggacggggggatttaaagaaagggagccgggaaaacaggggggaaaaactaattaaaaaattcccgggcccacgcggtttggagaatgggaaattattgggtttgccgcttcctgaataaatgccccccgccaattgggggggccgggcggtttaagcttattaacacgcttcaatgcgggggtcccgggattcaggggattttgccccccccaacgggggaaaattggccaacaggggg

SEQ ID NO: 115405 - DNA, 584 bp, Zea mays
  unsure (1)..(584): unsure at all n locations
  Clone ID: MRT4577_36734C.1
ggccagcagnatggatttcaggatttccagcttcagatggacgtctgcagattataaagaacaatgaccttgaagagctccaagagcttggttctggaacttttggaactgtctatcatgcggtatgacttctggaatgaagcatctaaacttgctgatctgcaccacccaaatgttggcgcgttttatggtgttgttcttgatggacctgggggatccattgccacagttacagaatatatggtcaatggttcacttaggacagctttgctaaagaatgccaaaaccctcgatcgacgcaagagattaattattgccatggatacagcctttggaatggaatacttgcatagcaaaaacattgtgcactttgacttgaaaagtgacaatttgcttgttaatttaagggaccctcagcgtccaatatgcaaggttggtgatcttgggctttcaaaagtgaaatgtcagaccctcatctctggaggtgtccgaggaacacttccatggatggccccagaacttctgaatggtagcagcagcttggtctcagaaaagttgatgtattctcttttgggattgttctc

SEQ ID NO: 115406 - DNA, 150 bp, Zea mays
  Clone ID: MRT4577_36735C.1
acgcgagcaaatatcctaactatcaacataggcctagtatcgaacgcaacacagcgtactgggagacgaggacatcgcttgcagacaggggcattaacgtcgatcatggctgaatctattagaatcatcaaggtctggatttataggaga

SEQ ID NO: 115407 - DNA, 575 bp, Zea mays
  unsure (1)..(575): unsure at all n locations
  Clone ID: MRT4577_36736C.1
gtgatgcattagccacttgatgaacatactcggtgaaagcagctccagatcgactcgggctctttcttatctattacaccaaagcaagacctaggatataggaggacgaagcagaggaagaagccattggcaaagtccacctgatgcagagcgcgacgtgcaggtgggagtaaaacggcaaggactaccaccgacacagacagcaagggcaggtagggaacacgaggggtgcttgctcctgcgcccatatactgcccaacgatatgcggcagtgatggctactttactcttcctgctctggaccggagcaaaaaagatagggagaggctaccttattgacatcgtgtggttacgggacccgcgccgacgcccggtacgctggtgctggcgtactgctcatcccttggctaccaggtggtgtcagcttctggctgctttactggacccgcggaaagacggagggccagatgaaaccatggaccagcttgcngctcatgctggcgcgcaaggtggacatgcccataatgcacgatggacatcgttacgaactggctcgggacattgtgtggggtaac

SEQ ID NO: 115408 - DNA, 2821 bp, Zea mays
  Clone ID: MRT4577_36737C.1
cccaagatggaaggggttacaaactcagtattcattgatccaactggcttgcatcagcatgtgtatgtgcagcagcagcagcagcagcagcaaatgccgccacaacagttgccatctacctatgggtttagccatattcctgtgatttctagcgagaaggacagagtagtttctccaagttctgcccacaatgatgttgcaaactctcatcatcaatttatgcagcagtcgcagcagcagttaccttctggccattggatgcctcagtatccagtgaagcctactagtcccagtaacccgcttgctggtgaaggtagtgtaagtggcaattcaaggcataatgaggatggacaggtgtatcgtgacaatatgcctccggttgcacctgtggctgtgccaacatacatggcaaatgtggacaggatgatggattcactccgtatgagccccagcgaagtttctggctctactgaacaaaggaaacatgcaatgtctcctgacagtggcttaccccagaatgcagtgccagattactctcaggggcatccagagaatagtatcagtacctggccagatacacgagcaaatgatgttcatccaagcaacaccaatactttttttgatgttagtgaaccaaaggtattgcttcaaactgaatctgcgccaccaccttctgttgccagctcttatctgcataatgtccagcatgttaatatgagtcatatgccacatatggtgagcattgggggaccctattctagctatgttgttgctacagtcggacctggtggattgcctcaatcaacttatggtattgatatgatctatccaaatgccactgttaatccagtgactgagagaagagatgtcccgcctgaagtttatcacaaggaagctccacatgaagtcgtagctcctccaaacacagttcagttgccgacagcagcattggcaaaccatgctacaaatgtggatcaagcagctgcacatgcactgccaccaagacctaagagggtagcaagcagagagaacatcagcccaaaggatccccacccacacaactctttgttgaactgcaaagggccagatctgaatattccagctgaggatgtttctctccagaaacagtcagatcacaaaggtgatgacatctctaacccagatttactgagtatggatgatgggttagctacatctaaagctcagtcatctgagcctcaacctcctctggtaaatgaaggagttggggcaattaccaataaagtagaaggtgaagtccaccccaacgaggtttccaagagcaggccagcagattggatttcaggatttccagcttcagatggacgtctgcagattataaagaacaatgaccttgaagagctccaagagcttggttctggaacttttggaactgtctatcatggtaaatggagaggcactgatgttgcaataaaaagaatcaatgatagatgttttgctgggaaaccatctgagcaagaaaagatgcggtatgacttctggaatgaagcatctaaacttgctgatctgcaccacccaaatgttgtcgcgttttatggtgttgttcttgatggacctgggggatccattgccacagttacagaatatatggtcaatggttcacttaggacagctttgctaaagaatgccaaaaccctcgatcgacgcaagagattaattattgccatggatacagcctttggaatggaatacttgcatagcaaaaacattgtgcactttgacttgaaaagtgacaatttgcttgttaatttaagggaccctcagcgtccaatatgcaaggttggtgatcttgggctttcaaaagtgaagtgtcagaccctcatctctggaggtgtccgaggaacacttccatggatggccccagaacttctgaatggtagcagcagcttggtctcagaaaaggttgatgtattctcttttgggattgttctctgggaactgctaacaggagaagagccatatgcagatttacattatggtgttataataggtggcattgtgagcaacactctacggccgccagtgcccgactcctgcgaccccgagtggaggtcactgatggagcaatgctggtcaacagaaccatctgagcggccaaacttcacagaggttgcgaataggctgcgctccatggcggcatcccagaaggtacaacaacactaagggaccatcggcacgcagaagttgtaccagggcagcagtcagtcaaacttgcaggttacatccatgggccgccaattcacgccatccgccatatatgcctaggatctgttcataacccttcatttgttcgtatattgtaatcaaaagttacccgccgtgtgtctacaacgtgtcgtcgcaatggacgcagcaggtgcctgcctattcattcattcataccgttttggtcgtcgagaggtgcgttcaataagttactagtccagtgtccgttataggggagtccggtagtgtccgttataggggagtccggtattattattattattgtttcatcttcttcttcgccctttctctgggtaataattgggttacttggaaactgttgatcagtgggtcagttagaatgtgaactggttgttgctgggtaagtatgtggtttgttggtatattgagtctggggacagagagtgaggtcctgatctgcttgtaacagtacctgctttggttttgtgattgctatatactgaaacccaaatccctctgttgctattctaaattctgagttgtttggtgcaaaaaaaaaaaaaaaaaaaaaaaaaaaaaaaaaaaaaaaaaaaaa

SEQ ID NO: 115409 - DNA, 648 bp, Zea mays
  unsure (1)..(648): unsure at all n locations
  Clone ID: MRT4577_36738C.1
gtagcactcggtcccagcaacatccagggccacactaacgccttcgctttccacagaacatataacgggcgngnnnnaacggggcttcgaggtggtatatatgaccgagcccgtcgacgagtactgtgtgcagcagctcaaggaatttgatgggaagagcctggtctcagttaccaaggagggtctggagctgcctgaggatgaggaggagaagaagaagatggaagagagcaaggcaaagtttgagaacctctgcaagctcatgaaagaaatcttagataagaaggttgagaaggtgacaatctccaatagacttgtgtcttcaccttgctgcattgtgaccagcacctacggctggacagccaatatggagcggatcatgcaagcccaggcacttcgggacaactccaccatgggctatatgatggccacagagcacctggagatcaaccctgaccaccccattgtggggacgctgcggcagaaggctgaggccgacaagcatgataaggccgttaaggacctggtggtgctgctgtttgaaaccgccctgctatcttctggcttttccctgggggtccccagacccatccaccgcactctcgcatgtcagctaggtctagtttgatgagtgagtggcacagagaa

SEQ ID NO: 115410 - DNA, 351 bp, Zea mays
  Clone ID: MRT4577_36739C.1
gtgaagtgtaagttatccagcgaaacagcaacaatgatacagtgttcagtctgatgtccatccatttctggaatctcatgacatgcatctcagtacagacagccttattgaaccgcgcgacacaagcaggaaaccagaaagaaggggggggaacaagcagtatctgtagggttgggttccaagggtagaggagacaaaggagcagtacttttgggcttttgagcgaggttggtcaacatccagaaaggtttgaggttgagcagtaccctagttgccggaggagcgttccacgagctttttgtcgcggtgttccgggctgaggtcccacaccttgttcccgagggcgctcgg

SEQ ID NO: 115411 - DNA, 1239 bp, Zea mays
  unsure (1)..(1239): unsure at all n locations
  Clone ID: MRT4577_3673C.1
gggtggccgggaaaaaagtgggggaaggagagggttcgggaagttccggcctcatccgctgctttcctcgcaactatcggatcttgcgaaggcatcatcctcctatcctataatcgcatttcgaatcgcaaacggagacttcgcccctcttcacagattctaatcgaatttgccaatctgcaagctaacgtagaacaatcaccaatcaccatccttaagaagatgatgcgatgcactgtaacgggcggcgggtgcgttgcttcgtggattggtgatcggaggtcgccggctgtcaaccccttcagcgtgcggatgtcgacgggcaacggtgggtggtgcggcggcctgaggtcgcgggcggcggatctctccggcctcgagatggcccatctacgtggcggcatcggggggctcttccgcgcgagcccgcgctatgggcgcttgcaagccacggccgcagttgaccctgaagatattccactggagaaggttcaagctaaatcctcaggacatgttatgccatatgttggtgttgcttgtttgggggctattctgtttggttatcatcttggtgtggtcaatggtgcgcttgaatatcttgcgaaggatcttgggattgctgaaaatgccgtcttacagggatgggtggttagcacatccctagctggtgcaacactaggttcctttaccgggggatctttggcagataaatttgggcggacaagaacattcatcctggatgcagccccactggctgtaggtgcattcttgagcgcaacagctcaagatatccgcacaatgattattggtcgattgcttgctggaatcggtatcggggtctcatctgctcttgtacccctttacatatctgaggttgcgatacgttgaaatgacagttgctttgttcaaaacctaatgctgttgtgatatgtacttctgcctgtgttgatgaacatccccaacaaatgaatttcctgtactctgcagatctcaccaactgaaattcgtggaacacttggtaccgttaatcaactttttatctgcattggaattcttgcagctttgttagctggattgcctctggcaggaaatcctgcctggtaagttttccatttgcttgttcatttgttntcccgcttcattttaccttttgattaatggaagcaatatttggattttgacagtggaagaactacacatttttnntattcaacctttctaacctattaaatagattta

SEQ ID NO: 115412 - DNA, 201 bp, Zea mays
  Clone ID: MRT4577_36740C.1
tcttcagataatcgttcttggcacgggaaagaagaagatggaggaggaattaatggagctggaagtgaaatatccaaagattgctagaggcatagcgaaattgcaatgtgtccattgggcacatatgatgtttgctaggtctgacttcagtattgtcccaagtaggtttgaggcatgtggtctcattcagttgcaagggat

SEQ ID NO: 115413 - DNA, 446 bp, Zea mays
  Clone ID: MRT4577_36741C.1
tgctgttctggttgttttggggattgtttagcggagccacttccttgcgcttgtgcgagagaaactggcggagactttgcttatacgagagatggcctgcttaaagaaggatttctagatgcgtgtgtctcaatgctccgggaaccacttaaacaaccgcacttctactgtaagggtgtctgtcctattgagcaaataatgaagggagtcagctcagcgaaacctgatgcttgtaaagggcaccttattaagaagtttatcaaggaatgctggataaaatgcggctgcaccagaaattgtggaaaccgtgtggttcagcgaggcattactcgcaaactgcaagtgtttttagcttctcggaaaaagggatggggcttgcgttctgctgaaaatcttcctcgtggtgcttttgtatgcgagtatgttggtgaaatattaacaaacac

SEQ ID NO: 115414 - DNA, 263 bp, Zea mays
  Clone ID: MRT4577_36742C.1
ggacaccgcccacttgtctgcacctgactgaggcgggaacaggaggggtctgggaaatggtgctactgggcctgggtgccgcacagtctgctccctggggacagacacccacagggtcgagccctgcaggcctctccttccaggaagggccacaactagcagccgcctgcctcctcagccccagggagggcacacaggctgggtggcacccagtggccaggccccttcactcggccgcacgagcactgcgccgcctggaggtc

SEQ ID NO: 115415 - DNA, 820 bp, Zea mays
  Clone ID: MRT4577_36743C.1
ttctcagtgaaagggtgcctgcggcaaactcagagcggtctctgaaagtgaataggagcatagcggtatcatccaagccaaacacgtctcctcagtcaagggtcttctcgcgcaaagaagatcaaaaacataacaactgatttcgcttaatgcatgtcacccacccgctctcaatacagcaagtgactctctctcacaagacagagaaagattaccgattcacccaatttgatcagaagtgagttcattgttgttgtatagcgaaacctttccttgacaaaaccattctcagctaatagaagccgagctatctatcggttgaacgaagcgaatgttttagccaaagaaaacagaaatccattgcgattagaaacctgtgactctacagccagggctcgatggcgatgtaagatagaaagaatggggagttagggcttcggtttcctctgtggccagttccaattccaaatcatttgccgacatgcggactcacttctcttttatgggatgaaagcccttgtctatttacgtgggtgaatcaagtacaacaagtcaggtcagagcttgtggtagaagattgggctctgctacgcagatccactcaactaggaaagaagtacgcattgctgactgactgtttgaacgatcctagttactagtaagtagctaatcaagtcagagtagggtggccgagaagcttcttgccggtgccccccaagcaaagcacagactctactcaccacgcgttttccacctacggagggagaaatcatccaaatatcctcatcccctgaaaagggaacccgaaaacaggacgaga

SEQ ID NO: 115416 - DNA, 676 bp, Zea mays
  Clone ID: MRT4577_36744C.1
cattgggtacctcgaggccggccgctcgcctccagaagagaacccaagtcgccgagagcgactcccacacgacccacctaccccgccgccgccgccgccgcatccccctcgatcccgtctggcgatcgggggctcccagacacatcacagatacacaccacgctaagccaaatcgagcaacgcctatcatcatattataatttcccctcctccccgtcgccaaccaacctccaacccccagccgatcgcgtcggagatgctgggcgtcgcgcggaggcggctcggatccggatgcgtgctcgcccagctggcgcaggccctccgccccgccgccgctcccgccaggacctactccgccgcggccaaggagataactgtacgggaagcattgaataccgcattagatgaagaaatgtcggcagacccttctgttttcttgatgggagaagaggttggcgagtaccaaggtgcatacaagatatccaagggtttgcttgacaagtatggccccgatagggttctcgatactccgatcactgaggcgggcttcactgacattggtgttggtgccgcttaccatggtcttcgacctattgtagagttcatgacatttaacttttcgatgcaggcaattgatcacataattaattcagctgccacgtcgaactacatgtct

SEQ ID NO: 115417 - DNA, 1976 bp, Zea mays
  Clone ID: MRT4577_36745C.1
aaccccataaccattcccggctcccggcagagacggccgctcgcctccagaagagcaacccaagtcgccgagagtgacgcccacacgacccacctaccccgccgccgccgccgcatccccatcgattccgtctggcgatcgggggctcccagacacatcacagatacaccacgccacgccaagccaaatcgagcaacgcctatcatcatattataatttcccctcattcatctccgttccccaggcctcccctccctcctcccccgtcgccaaccaacctccaacccccaggccccagccgatcgcgtcggagatgctgggcgtcgcgcggaggcggctcggatccggatgcgtcagtgctctcccgccaccgggctccccgccctcgcctcgctctcaccgtgatccgtttccctccccgcaggtgctcgcccagctggcgcaggccctccgccccgccgccgttcccgccaggacctactccgccgcggccaaggagataactgtacgggaagcattgaataccgcattagatgaagaaatgtcggcagacccttctgttttcttgatgggagaagaggttggcgagtaccaaggtgcatacaagatatccaagggtttgcttgacaagtatggccccgatagggttctcgatactccgatcactgaggcgggcttcactgggcattggtgttggtgccgcttaccatggtcttcgacctattgtagagttcatgacatttaacttttcgatgcaggcaattgatcacataattaattcagctgccaagtcgaactacatgtctgctgggcagatatctgttcctattgtctttaggggtccaaatggtgctgctgctggagttggtgcccaacactcacagtgctatgcagcttggtatgcacatgttcccggattgaaagttctagctccatattctgcagaagatgctcgaggtttgctgaaagcagcaatcagggatccagatcctgttgtgttccttgaaaatgaacttctttatggtgaatcatttcctgtatctgctgaggtacttgattctagcttctgccttccgattggaaaggctaagatagagcgacaagggaaagatgtcactatcactgcattctccaaaatggtgggatatgcccttcaggccgctgatatactggccaaggaaggtatcagtgccgaggtaatcaatcttcgctcaattagaccgctggatagagctactattaatgcatctgtgaggaaaaccaatagattggtaaccgtagaagaaggcttccctcaacatgggattggtgcggaaatatgcatgtctgttgtagaggacagctttgagtatcttgatgcaccagtcgagaggattgctggagctgatgtgcccatgccgtacgctgccaaccttgagaggatggctgttccacaggtcgatgacatcgtccgggcagccaagcgtgcttgctacagggcagcagtaccgatggcagcaaccgcctagtccagcagaaccctgcatgttgcatttctttgtctaattttaatgtccgtgctccagaaagacgtgtcgcataatggtgtgacgagtacccactgccgctgcaactcaactatagcatgagctgagtttttgtagagccaccgagaggtgttcagtactccagttccagttccgctaaaaaaaaaaaaaaaaaaaggcccctagggccacagccggaagcccgcgcctgaccaactcaatgttttatggtgttgagtttttgtaaaatccccggcagcctttcaggactccagttccagttccggcgagattgttgccagtaacttgtattcagaagggggaactcggaagagtttatggatcccgaattattaaaaaaaaaaaagggcggcagaattttagttgtggcgagatgttgtgaattacttgtattcaggaggggaactctcaaaagatcctcaagtcgtg

SEQ ID NO: 115418 - DNA, 794 bp, Zea mays
  unsure (1)..(794): unsure at all n locations
  Clone ID: MRT4577_36746C.1
gtaccctncgagggccgtgccgggnggaccccaccacccctcactgctaaacatccctgggagtcttttgttgtgtataccaatacacatttaattctttcgtaaattcggaaaagggcttttcgagccaacagttctttcaccatggccatgcaggtcgatctttccaacgcgcaggtgatgaaagatgaggcgggcaggccgtttatcattgtccgagaccaaggcaagaagcagagacagcacggaaacgaagctgtcaagtcccacatcctagcggcaaagacggtcgccaacattgtcaagagctctctgggaccgcgaggactggacaagatcctcatctcccccgacggagacattaccgtcaccaacgatggcgccacgattctctcccagatggaaatctccaaccacgtcgcgaagctactagttgaactgtcaaagtcccaggacgacgaaattggtgacggaacaacgggtgtcgtagtattggccggagctctcctcgaacaagccgccgatttgattgacaagggcatccacccaattcggatagcagacggatacgaccaggcttgtgaggtcgccgtggccaagctggacgaagtcagcgacgagatcaacttctcgagggaaaacacagaagagctgttcaaggttgcaaagacctgtttgggcagcaagattgtctcaaaagcgcatgaccagttcgccaacattgccgtagacgctgtgctatcgttagcagatctggaacgaaaagatgtcgactttgagctcatcaaagtcga

SEQ ID NO: 115419 - DNA, 316 bp, Zea mays
  Clone ID: MRT4577_36747C.1
ggtgcgtgctgtggagccttgtcaagtctgctctgtcctgactcaccgctgttcgctcctgctgaggaacaagtcggtcaggaagctacgcctcagccatggcatttaaagataccgggaagactcccgtggagcccgaagtggcgattcaccggattcgaatcacgctcaccagccgcaacgtgaagtcgctggaaaaggtttgtgcggacttgatcagaggcgcaaaggagaagaatctgaaagtgaaaggaccagtgcgcatgcctaccaagacactgagaatcactaccagaaaaaccccttgcggtgaagg

SEQ ID NO: 115420 - DNA, 377 bp, Zea mays
  Clone ID: MRT4577_36748C.1
cccggcccaaatctaacttttttttaaaaccacactacgaaaatggggcaatggggcaaaacggggtttaacacaaccataggcccaatcgggtaaaggatggaaaccgaaaggggggggaggacttaaaaactaaataaaacgctggagcaaccacggacaggcttttaaaatccagggaaaaataccagcccacacggacttaaggccaactagggggaacaaaaagcaggggggaactaattcgaacactcccggcctactaatataaaaaaagaggggggggaacaggaaatcagctccaataatagcacgggacagtttaagcttcgacgggatagagcatttaaaaccggacccgggggcggacccgtggg

SEQ ID NO: 115421 - DNA, 388 bp, Zea mays
  Clone ID: MRT4577_36749C.1
ggaatcattcattcagaaggaaaaagggaatgagacctcatacatagttggttcaaagtcccgacataagacatgatcagaaatttataatgcagcagcctatgaccaggccctttttttgggtaaggcacccccactttcttgcgcaagcggggtgacaaatgttggaacactacccacacaggggctgggtgtttaacccaaacaccactcgaaagttcaaaaaaccccgatgcattgcaccctgccttttttatttggggatcgccccaccccgcaaaatttttattaggggccccgctaggagtttctttcgttcgttcaccaaggggggattttccagcgctggttgtgcccctcgcaccaatttcagagcacgatttcggta

SEQ ID NO: 115422 - DNA, 1699 bp, Zea mays
  Clone ID: MRT4577_3674C.1
catatgcatgcaagggacgaaattagttaccagttaccaacactttcagcatatgcacgcaagggacgagattgattacccattaccaaaccaacagtttcgagttcagcggtaggaacagaccgtcacggcgtcatccgccaaaggataatccatttgctcacacaggcgcaaacgctgagcgcctgagcctgctctcgcggtctaggagatggcgttgatcacgaatgtctctgactatgaggagcttgcaaagcagaagctgcctaagatggtttatgacttctatgccgggggtgcagaagaccagtggacactcaaggaaaataaggaggcattctccaagattctgtttcgaccacgggtgctgattgatgtgtctcatattgacatgtctacaagtatattgggttacaaaatttccatgcctattatggtggctcccactgctttgcacaaactagcccaccaagaaggagaggttgcttctgcccaggcagcagctgctgcaggaactataatgcattgaggaagttagctcaagtgcaccaggactccgtttcttccaactttcagtattcaaggatagggatatcgtgcaacagcttgtgagaagggctgaaaatgctggctacaaggcaatcgccgtcactgtcgacgctccacgccttggtcgcagggaagccgatgtcaggaacagattcacgctgcctgaaaatgtggtgttgaagtgctttggaggactggatctgagcaagatggacaatgtttatctgaaaaaactgagctgtggtccagctacacggcatcgaaactgagatgaatatatttcatttcatttttattttgttttgtttttttattttcacagcaactgttttgtgatatttgattttccagactaagggttcaggccttgctgcttacgccactagccagattgacagctctctttcttggaaggatatcaagtggctacagacgattaccgggctgcctatcttagtgaaaggagtcctaacagcagaagatgctcgaattgctatcgaatgcggtgtcgccggcattatcgtgtccaaccacgggggccgccagctagactatcttcctgcaaccatcagctgcctggaagaggttgtgagagaagcgaagggccgccgtgtgcctgtgttcctcgacggcggcatccgccgtggcactgacgtgttcaaggccttggcgctgggagcctcaggagtgtttattggaaggcccgtactgttcgccctcgccgtggacggcagggcaggggtgaggaatgcgctgcggatgctgagggatgagctcgagatcaccatggcgctgagcggctgcgcgtcgctgaaagatatcacccgcgatcgcgttatcaccgagagcgacatgatccgtcgctctcggatgtaggcttcgattcgtttgctgttgtgttgtgccctggcatgactgtcttattcgaaactgaccggaccatcggattggtttttgacctcttggctcggatgtgctaggttttctcatttgtctgcgtctcagcctaattttgcccagctgtgattgataatatatgcttcaataagtcataaggttgcatatccagcaggtcttccttaggtatgggttagttcatcaaataaaacgtaaataatcatgattcactcttgagaaaaaaaaaaaccag

SEQ ID NO: 115423 - DNA, 262 bp, Zea mays
  Clone ID: MRT4577_36750C.1
aacaaatacgtttcttaagaggagatgctatgtacaaagatgtccctctcaacgctaaacgcacgcaaatgccatcgctatcgctatcgctgtcgatcagaacataggtcgcgaaatagatattccagatattgctaatgctttttccgtccaaacatagatgacaaccggcgccatttctttgcctttgctttggagtcttcttcttcgcccgtgtggtcggccggttccacagaaagatggtcctcgtgccccatcgctc

SEQ ID NO: 115424 - DNA, 576 bp, Zea mays
  Clone ID: MRT4577_36751C.1
cccgggtcgacccagcgttcggcgagcggtcgccctttttttgtgggggttggggtggttttttaaaaaattttttttttttttttttttttttttttttttttttttttttttttttaaacaggcagaagcacatgctggcccccatttttattgaaagcattgaagggtgataccggaaattatattactgaagaggggggggggggataactgagggggggaattttttttttttacaggggcaaaaaaaaaaaaaaaaaggtaaacaaacttagggtcgggggtgctaaactacccggcaggggaagggaggaaacatccatgggggcatgcaaattaaaaaaaaaacttggtcgggggccctgccccaacctgtttttttgagctggaaaagctgcccatggccctggcctgctcccggggggcgaacttttgaaccttccccgggggtgttttgggcagttaggacaaaaacaccaccggccggggggccttgtaccgggggaggcccccctgggaaaaccccaccaccttcttggggggcaccctggcggccggcccctccctgaacgt

SEQ ID NO: 115425 - DNA, 388 bp, Zea mays
  Clone ID: MRT4577_36752C.1
gctgacatgcatgctaatagtgcacatcatggcaccaataaccgtctttgctttccacaatgctccacaggacaaatagtaaaacaatgctatgacaaccccacttataatgcattgaaatgtggggacaccattaactgttctaacctcaaaggagcatttcagattttattttgtctaatagccctttaacataagatcgctatagcaaaaatattatagcttatagcttatgattacaccttttgcttctgtaccgacgatctcagagacagctttcaactttggacagattgccctcattttaagaaggatatcaatactcccaatatcacttgaattacttctctgcctaaagatgtatctttgaaagactctgcatagccac

SEQ ID NO: 115426 - DNA, 282 bp, Zea mays
  Clone ID: MRT4577_36753C.1
aataccccattgtcacccatgacctctcccaagaaaatgttccggtggcgccccaaacgctgcctcgacaaaacaggatggtcaggatggccaacggcgccactgagccgccggtaagcggcgtcctcaagtgcacgtgtttccgcctgcccagccgcaccaagaagcttctgccgccgtctccggcgccgaagctcagcagcagagccagccgcaggagcgcagtggctccggacttgtcggcaacgacgacggcgtcccagtcccagcgggtctctttcc

SEQ ID NO: 115427 - DNA, 411 bp, Zea mays
  Clone ID: MRT4577_36754C.1
cattacactttttgtcttttctagtggatcccatctttttaccaaaccccgcccaggcagggccccaaaaggggacagtcaaaaaactgagccccccacaattgcacaccccagcccaggcccaaagcagaaagaaaaagccaaaggggcctaaccagggaaaaaaatgacatccaaaacaattgccccaaaaaaccgcgtcccaaaaaaaaaacctaaacccccaggggcctaaaagaagcccccaacccccaaaaagaggggggccccaaatccccctctcctacaggaaaaccctcaccgccccggtgaaaaaaaaaacctcacccgccccggaggaagaagcagcttactaaaaggccgccataccgctttcccccgaaacaggggatagcgcaggaaaaaacaggg

SEQ ID NO: 115428 - DNA, 445 bp, Zea mays
  Clone ID: MRT4577_36755C.1
aaacaaaatttatttgggcccataggttaaaaagggggcaaattttgaataataaaaccccattttttttaggacaaatttccaaaggcaaatcaaaattcaaagtttcaaacaattttttttgcaaaacattggggccccttttcaaatttaaaggcattttccataaaaacccctccttttcccaaccaaaagggcgggccatgaaacaaatccagcccaggggcctcaccccaatcaaattcacagggatcccagtttccgagtcatccccagcccctttaggataaacccataagaaaaccccccctcctgtaatttctcaaaccttcccgatttggaaaagggtccacctcccagctcgcacttaaacagcacaaaattgccattttttttaagctccctaagtttccccaagtttttcgcaggctcaaagaacatcccc

SEQ ID NO: 115429 - DNA, 462 bp, Zea mays
  Clone ID: MRT4577_36756C.1
agatcggttaaatcacccccaaaacgcacccaccaccacaactccggcggcggcgaccagacgaacacgagcaccaaggcgatggcgactgctctcaaccgcggcctccgctccgggatccgcctcctcgccaccggcgccgaggcctccaagccagcttcacgtggattccatgctaccggcgtgaagaggatgtcagggcacggccatgatgagccatactacctccacgccaagcacatgtacaacttgcacaggatgaagcatcagaagctgactgcatggacttcggtgctgggagccgtaagcattggtatcggtgtcccggtcttcgcggtcgtcttccagcaaaagaagacctcctccggatgagctcacataccctcccagggcctacttattggacctattttgaatttagcattttgtgaaagccaaagctgtcacttcacttgactattg

SEQ ID NO: 115430 - DNA, 332 bp, Zea mays
  Clone ID: MRT4577_36757C.1
cttcccttttaataaccacaaaatttatcctcaacacccttattaaccttatcaccgcggtttctcaaacattcctttgtcccaataacaaatataaacgatacatttacacccctcaaaacatttgaccactaacaacaccacaactttgtcctaacaaacctctactaatactttcactcacaacctgtccattcattccaccaaccctccaaaaatccactctcctaactatttttaccatcccttcccattcatcctccataatactagctacccccaacaattttttccattcacaccaactagaccctctctcctccgccataaat

SEQ ID NO: 115431 - DNA, 663 bp, Zea mays
  Clone ID: MRT4577_36758C.1
taaccctttttttttttttttttttgaaacaaaatgggacttaatccacggcaatttattactggagaattcatctttgcgcaagaaccgctagggcaggaagggaaagtgtttgtgagatgctagagttggacttggacccctagtattacatgggcagataaattgctcctatactaatatattgcaggtatagaaagcttgcaacgaatataaataaatattggaaagtagcaacatgttcattcataagaagcacaaagcaggccgcacagcagctagcatatccgcccgttgccctgtcgatcacatcacatgggcacgggcgtgttgatggcgtcgaacgtccacatgtccatcccggcagcgccctgcggttgctgcggcggcggctggtggtgcacgtacgcgaccgtgggcacctgctcctgctgcgccacggcgtcgggcacgtacgcgtggtgctggaagaagccgcccatgcccatgacgtcgacgacgtcgtagtcgactaggtggtcgtccctgcctccgccggcggacatggcgagcatcccctgcgccgcggcggcgtgggcgtgggcgtggccgtcgtcgtcgtcgtcgtactcgggcggcgggtcctcgttggggaagttgaccttggccttggccccgcggatg

SEQ ID NO: 115432 - DNA, 254 bp, Zea mays
  Clone ID: MRT4577_36759C.1
gtcatctaatgtagcacactaaacaacaccttggagacgtcaagaaaatatcgaaacttgaggctgacttccaaagactacggggcctttaacaaagaccgtacctgaacctgcagcactaactgaaaggatcatgttgctggacatattggttcaagagtattgacaccacaaagctctactaacacctgcaaagaattctactttacatccacccataagttctataacatctgtaactgattacgcaattg

SEQ ID NO: 115433 - DNA, 358 bp, Zea mays
  Clone ID: MRT4577_3675C.1
cgcacgcgtgggtgcctctcctcctacagaattaatcctctcctaccttctcttccaggggtcacctcttctgctgagattaggatactatgataaggttcactgaacttaacgctgcgctcaagttcttgtacaacactttgaatattactacgagattatctattttctttcctgcatcaagggttattataaattttcactcggtccttcaaggctttaccttcatcccagcgtgtctgtactgttcggtgcacgactcatattaaattgatagagaacctctccagtctctaggttatcttcttcaatcgccacaactgtcttgtttaaaaaagcgtatgaactcttcgttctc

SEQ ID NO: 115434 - DNA, 162 bp, Zea mays
  Clone ID: MRT4577_36760C.1
tcggcatgctgtgcctgttccgaagtctgagtgcaccaagactacccaggtgggtattagctccgctggtggatgcctatgctatccctcgcagcctcctccgtggcccggcgcccgctcctgccgccgcctaggcttctggcggtgagggctatggcgtat

SEQ ID NO: 115435 - DNA, 193 bp, Zea mays
  Clone ID: MRT4577_36761C.1
cagccagaccatacgacttgcatctcaatccataggacgtgctctactctacggcttccttaggcttcagttgcaagaaacaaggaagtcagatcttaacaccatgacgacgatattgctgactcactcagatcgagtctcggaaccctcgatcccgagcatagttaatccacgcatcaaccggcgaacgcat

SEQ ID NO: 115436 - DNA, 514 bp, Zea mays
  unsure (1)..(514): unsure at all n locations
  Clone ID: MRT4577_36762C.1
gggcccaatttaaagggggttttccggggaccccccccccttgaaaaaaaaaaagccccgtttgccccaaaaattaacccaaccccccaaagggcctgggccgtttttccgttttttttttttttaaccccccccccaacccaagggcccccggccccggaggggtttttttttcatttttaccccccttcccatttaaaaacttccaagggggaacaattttcccggggggtttaattttggaaaaaagggcccatcccggggcccccaacttaggggggaaaaaattgggacctttttaaggggcccccccccccccgcggtgtttttttaggtttaattcccccctgaacaaatnggggggggtctttttggtttagggtttcccccccccccctttggagggattcttgggggttttccccgttttaagccctttaaccccggggggggtttttttagggaatttcaaggccccccggggtccgggggggggccgcccggtttttttagg

SEQ ID NO: 115437 - DNA, 650 bp, Zea mays
  Clone ID: MRT4577_36763C.1
aatcccaccgactcctagagaagaagcgaatctctccgaaggataccgcagggtgagaggactaataccagacgaggcaggactattcccgagctccaaatcctggctaggggcctctccacccctctatctacgcttcctgtcccgtctcactggatgcgtagacttgctctgcgtcgcttttgacacgaatcccttgtctgagcctctgaagaacaagcagagcgttcctatgatcctcttcctgaggaacaaatttgtacatggtctcacctaccaggacaagcagctcatcattatgcgccagattatcatgaatgatgcttatgtgcccacctgacaatacctaccctgctgcgatcctgcacattatttccattaccccgactggggagaactacaggattctgtatgaacctactgcgcgcttccggcttctgtctgtcacgcatgaggatgctaagaatgaactctgcaaggatacgtttgactccgacgagcagaaggttatccactacctgatcacctatgatgagcgcatcatccgattcccagagcttctcatgacggtcactgacactatcagaggtcgacctgcacaccaactaaattgctgacttcatcgatctcgacgttggtaacgtggacat

SEQ ID NO: 115438 - DNA, 714 bp, Zea mays
  unsure (1)..(714): unsure at all n locations
  Clone ID: MRT4577_36764C.1
gcgattgggttcctcgaggccggccggagctaccgctgagcttattgtgttttaatacgactcatttacgttgataacctcaactaccctcttttatgaaacgcaactattgcatttggacctgtcgcttttgatcatcgcgggatatttttggccgttcaactcctactctcccaagctagaacaacctcttagcgatcaaccgttgttatcacaatcgagatggatactgttataatcatgcccgatgaccggactacgcgctggatcttgctcggatccggttccagctaattcgactcgaggacaccatcaccttccatttgattgaaagagtgcagttcgccttgaacaggacaatttatgctcctggagctgacgagctgccagaatctaacctgagcttcctcgactggtacttccgagagcaagaaaagctgcagtcccttatccgacgtttcgaatctcctgacgaataccccttctttcctgacgctctacagaagccaattctcaagcctctaaactaccccagaatcctgtacgagaacgacgtctatgtgaacgacaagatcaaggcattctacaccgaacagttccttcccgcagtgtgccccgacttcgggcgggagtagcggagcgagtcccaagatactacgggtcaccgcaacttgcgatattgcttgcctancagccttatcacgacgtatccat

SEQ ID NO: 115439 - DNA, 484 bp, Zea mays
  Clone ID: MRT4577_36765C.1
ccagcccgaaaaaggggcagcccagcggcaaataaataagctatagcaggggaaaaacgggtaaaaggggtaatatcaaaacgacaaatccccacaccctggaaaccccaggggggcccaaaacccaaaggcggtttcttgggcaacaaaaaagcgggggatccccgggggggcgaaagcccccccacaaaaatccaccaagcaaaagggggcccccccccctgggccccctacttaaaaggcaggacctggaggacggaaaaaaccccgagggggggcagggccacaacggatggaccggggtggcaaacccccatcgttttcgcattttaaagggaaaaaccaaaagcttcggaaggggcttcgtggaaaaaggcctgggcggggggggcccccaacatggggaggacccccccaaaaaggggggggggcctggccggacccttgtaactggaggcccaggaaaacaagtttgttttaagct

SEQ ID NO: 115440 - DNA, 163 bp, Zea mays
  Clone ID: MRT4577_36766C.1
cctatttctcctcgacgccggcctaggtgatgagcacacctttgggggggagcacccagtttatttggtgacatacatagtggtctcaaaaacctcagatgcgacttgcatgctccgaagcccaattggacgatgcttccaacggtgaaaggacaaatccttc

SEQ ID NO: 115441 - DNA, 461 bp, Zea mays
  Clone ID: MRT4577_36767C.1
ggacaagacatgcatgttttctcattctcaactcggctggcaagaaagcaagggtaaccccttatgataatcgatcgagtccccggtatgtgtttagtacaacaggaggccgcataaaataaaaaacacagggaaagcttatactacccaacaatgtccaactgcccaatgcatgccgaaaccaaagaatcgtccaccttaaaacatcccccttacggggggggccaacggcaacatggcgagggccaccagggggcttcccccccccgcggaagaaccgccccccccggtgcttgtcaaagaccgcggcaaggcggtcggcaattttcctgggaactgtgggccctccccggagggagaaatgcctgacatgggccaaggaaaccctgacatgggcccccaaactgggcccaccccgaccttatatcccagggctttgcaagtggaaaccggcggtgtgg

SEQ ID NO: 115442 - DNA, 428 bp, Zea mays
  Clone ID: MRT4577_36768C.1
aggcggacgcctagtttctagagaacaagaagggggggggggcgaggagaagctgaagagagagagaattaatgatagacacggagatgtctaaatatatgatatctttgaactgtctgatgaatacatgaggagtaaagataacactctggtgaaatgaatcattttattagacatacgacaggaaagcgggggggggtccagaagtaaagaggagcgatagggcatcaggctagaccgtgaaaacggagtggtgggagagaaatacaagcgttggggtattatgctaagaatggaagtgctggactttagatggatcaagggcagatgtcagaaagcattactaggagaagtgatgtatgggagtatacatcaagcatcgttgacatcagggttaaatagaatggacctggttgccagtctcaata

SEQ ID NO: 115443 - DNA, 2023 bp, Zea mays
  Clone ID: MRT4577_36769C.1
ttttttttttttttttgcacggaggaagtaaataatattaattaatcaataattacttatacaatatttatcatgaaattataaactatataatgcggtactgtagagtccgaaacgattatttcaacaaatggctgcacagcagcacaggcataccttaaggcctgctctctctatagaggtatatcaaaatcaaaaggtgcccaattttccaagaatttacaggggtctcgtttctttcagaacgggtagttgatggggtcgcgctgcagggccttttgcaccagctccgtctgctcctgcacgtgcaccgagtagaagcccgtagcagtagcagccgacggggccctgccgacgtacttgatgtcctcgatgccaccacggcccagagccttcattgccgtcagcagccgggggttgatgtagctgtacgctcccatgttcatcggctcctcctggcaccacacgatctcagcatttggatatctcttcaactcgcgctggatgaggtcataggggaatgggcagagctgctcaactctacatatagcaacatcagtgcgctccgtcttccttctttcttcatccagttcgtagtacacctttccagagcaaagaactagacggttaattccctcctcgaggtccttgtgattattctggtctttaatgagccgcttgaagcgtgtcccttgcttgtcgaatccagggtggcccgcaagatcatcaaattcagataagttcgacttgcagtccttgtggcgaaggaggttctttggggacatcacaatcaaaggtttcctaaagtcccggtgtatctggcgacgcagaacatggaaataatttgcaggagttgttacattaacgacttgccaattgcactgctggatttgcttccgcagtgttggatccatctcaggtataacataagggttgtcatcactcatctgaagaaagcgctccaatcttgcactagaatgttcaggcccctggccatcatatccatgaggaagacaaaccacaaggccagtctggcggagccattttgactccccgctactcaggaactgatcaaatatcacttgagctccattggaaaaatcaccaaactgagcttcccatatgaccaatgagtttgggttctccatagagtaacccaattcaaagcccaaaacagcaaattctgacagggaactgttgctcacagtaaaaagctcctcatcttggttcataacaagatgatccagtgggcagtactggtctccagtttcttggtcatggaggacagaatgacggtggctaaatgtacccctctcaacatcctgaccacttaacctgacatggttcccctcaatgataagagtagcaaaagcaagtgcttcaccaactgcccaatcaatgccttctccagtcttgatcatctgacgcctctgatcaaaaatcttcttcacagccctgtgaggattgaaattttctggcagagtagtcatggcttccccaacgcgttttagaatctctggcttgactccagtgtttcggatacgcgaaatctgctctggtgacttgaacccagtccagtaagctgaaagccagtccctcttgttgggaacatagtccttgctgttctgaaattcctcattaagtatagtgctgaccttcttgtttaacttatcaatatctacctttgagatctttccagactctaacaactttctttgataaatctcaagcgcacttggatggttcctaatcaccttgtacatcttaggttgggtgaaggacggctcatcaatttcattatggccaaatcgccggtagcatacaatgtccaccactacatctgaatgaaatgtctgtcgccattctgcagcgagctcacagacatgaaccacggcctccaaatcatcaccattaacatgaaaaatcggcgcatccaatgctttcgctacatctgtgcaatactgagaggatctccctgaccttggatcagtagtgaaagcaacctggttgttgaccacagata

SEQ ID NO: 115444 - DNA, 1738 bp, Zea mays
  unsure (1)..(1738): unsure at all n locations
  Clone ID: MRT4577_3676C.1
ataggaataaaagaatggtaccaagccgggtgcaattgagcccccatcgtcacttgatttcaaccatctccttccatcatcagtaggtgctgaaacttaatcgagacagctantaatatggcggtttaacaccacttagcaatagttgcgtccgggattttcgtgcgcagaaacagcaaatgaaggtaatccgtgaatcggatgaatccaacactcctggttgccaaaggtaatccgtatatcggatgaatccaatgacatctttgacacttattcctatccaacgcatgccggaaggtgtcaagacacgtcgtttcgatcatgcagcacgacctgcagacaatcgatattaggagccgcaaggctcgctaatttgacacactatattatatagaggacgagcccttgcgggccacgtgtagtatacacacgtgggtcattccagagaccaaccacctggaatcaagttccaggaactgcgatgggaaaaacataaaaaccatccagtcggcgggctgtaacgctgcctgcggtcacactttattatatatctcctgtgacaagagaaaccacgtcaatacatggtctgtgttaacacacagggctcccactattgtgagtacaaccatgaacgtctgtgactgtgggtccatgagaacttattgggtacgagcttaccgctacgtgcactgctagcgctaggcatggtcagtggagttttacgcgttattactcgatccagcctcgttctcttataggaagcactatttcactcagttccagtttagccttaaacagactaggattaatcctccctagttgagggataccctataacccgagtaccttgggaaccgtgtccatacacggtctgtccatattggacagggctctgactaaggccagtacaaccattaatgtctgtgactgtggattcatgaggacgtattgggtacaaatttaccgatacggacaccgctagcgcgaagcatggtcagtggcgatttacacgttattatctgatccaatcttgtcctcttatagaaggcactgtttcactcaatctggtttagcctgtttgctatagttttcagtccttagcaggacacgttttatcgcaaacgttaaacgggcatgttttcagactatgccaagtcacgttgtatcgccaacgttaagcgccactggaagttctaaacttctaatggtatactggccactggcttagctcgtgccagcaattcgcgcaaatcatggcacttgccagtaaaaaggtccttatatttggcgtgcaaatcaatattccctcgcgaggccttagacacgagggctatatacgatggttggccaattgcatcgtctgtcatatttgcccaccatcttgcctggcattcctgatagctgatatctggacgttcaagcatgactctatccagtgcactatttaagcgtccagacaggtcattgaaatactcttcaccccagatactagcttcatgcaacgcactctcgatattttgatagagcgcctcaattggagtttcacactctctgatccagtttaagcgctcttcaatgcttaccttgtcaagaggcgccttccatatgtaaccactattttccaccttcatgaaccctcgtttgagaaagttgacgtttgttatgtcctcatagggaacgctcaggtggatcggattctggcntccatctggtacccggccgagacctcgagggtacc

SEQ ID NO: 115445 - DNA, 314 bp, Zea mays
  Clone ID: MRT4577_36770C.1
tcctcctcacatttaatttttacacctcccccatcacttacccgatatggtttaatttaacactcgttaggaaccctttaattacacatcctctttccaaaatattcctacctttatctaaatgatactctcatccatttcctataaatcttattcttcacaccctatccatcatctttatatatatactattactccaaccatattcaacatcttcattcatatacctatttacatcaattttaaatatcaacttttctatataactctacttatcaatgtttactctcttctttattcttcatttttttacc

SEQ ID NO: 115446 - DNA, 3993 bp, Zea mays
  Clone ID: MRT4577_36771C.1
ttttgtttttaactcctttttttttaggagagaacgcaataattgcttttttttacaggccccccaaaccctttttaattacggttgaggtaagggggggaaaaaaaaatgggcatgtgggcttctttcccaaaaaaaaaaaaaaaaggggggccgcccctttttttttttttttttttttttgttttttttttttttttttttttttttttttttttttttttttttttttttttttttttaggaacacaaaatcaacgctgcgagatggagtttttccaaacttacaacggtttgtttcatgcggtactgcagagtcgaaacaattatttcaccaaatggctgcacagataaaatttaaggcatgttctctctatattggtattatatcaaattcaaaaggtccccaattccaagaatctacaggggcctcgtttctttcagaaagggtagttgagggggtcgcgctgcagcgccttctgcaccagctccgtctgctcctgcacgtgcaccgagtagaagcccgtcgcggtagcagccgacggggccctgccgacgtacttgatgtcctcgatgccaccccggcccagaaccttcatcgccgtcagcaaccgcgggttgatgtagctgtatgctcccatgttcatcggctcctcttggcaccacacgatctcggcatttggatatctcttcaactcgcgctggatgaggtcataggggaacgggcagagctgctcaactctacatatagcaacatcagtgcgctccgacttccttctttgctctggaaaggtgtactatgaactggatgaagaaagaactaggcggttgattccctcctcgaggtccttgtgattattctggtccttaatgagacgcttgaagcgtgtcccctgtttgtcgaatccagggtggcccgcaagatcatcaaattcagataggttcgacttgcagtccttgtggcgaaggaggttctttggggacatcacaatcaaaggcttcctgaagtcccggtgtatctggcgacgcagaacatggaaataatttgcaggagttgttacattaacgacctgccaattgcactgctggatttgcttccgcagtgttggatccatctcgggtataacataagggttgtcatcactcatctgaagaaagcgttccaatcttgcactagaatgttcaggcccctgaccatcatatccatgaggaaggcaaacgacaaggccagtctggcggagccattttgactccccactactcaggaactgatcaaatatcacttgagctccatttgaaaaatcaccaaactgagcttcccataagaccaatgagtttgggttctccatggagtaacccaattcaaagcccaaaacagcaaattctgacagggaactgttgctcacagtaaaaagctccgcatcttggttcataacaagatgatccagcgggcagtactgctctccagtttcttggtcatggatgacagagtgtcgatggctaaatgtacccctctcaacatcctgaccacttaacctgacatggttcccctcaattataagagtagcaaaagcaagtgcttcaccaactgcccaatcaatgccttctccagtctcgatcatctgacgccgtagatcaaaaatcttcttcacagccctgtgaggcttgaaattttctggcagagtagtcatggcttctccaacacgttttagaatctctggcttgacaccggtgtttcggatacgcgaaatctgctctggtgacttgaacccagtccagtaagctgaaagccagtccctcttgttgggaacatagtctttgctgttctgaaattcctcattaagtatagtgctgacctttttgtttaacctatcaatatcttcctttgagatcttcccagactctaacaacttcctttgataaatctctagcgcacttggatggttcctaatcaccttgtacatcttaggttgggtgaaggacggctcatcaatttcattatggccaaatcgccggtagcatacaatgtccaccactacatctgaatgaaatgtctgacgccattctgcggcgagctcacagacatgaacaacagcctccaaatcatcaccgttaacatggaaaataggagcatccaatgcttttgctacatctgtgcaatattgtgaggatctccctgaccttggatcagtagtgaaagcaacctgattattgaccacgatatgtattgtcccaccagtggtgtagttttcaagggcactgagatgcagcgtctcatacacaacgccctgccctgagaaactaccatcaccatgcagcaacactcccaaattcttggtcctgtcacggtcattagaatagtactgcttcgctcttgttttcccagcaacaacaggatcaactgcttccaaatgactcgggtttgcaaccagtgacagatggatttgtttcccacccctggtaggcctatcatatgaagttccaagatggtatttgacatcaccagtacctgtatacaacccctcgccttcattgacaggcttggtgccaccactgaactcactaaatatctgtcgcaagggcttcctcacaacatttcccaagacatttaacctgcctctgtgtggcatcccaatgacaatactctctacaccaagatcagctgccctgtcaaacatctccttcatgccagggatcagagtctcagcgccttcaagaccgaaccgttttgcagttgtccacttggtcgccaagaaactctcaaactgtgtgctccagataagcctatcaagcatgacctgacgacgatcataagtgtaatccattgggttaactgtctcaatcctatccctgagccagttgcacttctccctgtcaggtatgtgcatgtactcatacccaatggtaccgcagtaagcctgctcgagccgctccagcacggaacgcagcgtctgcactggccggttctcggacaagaacccagccatcatccacaccccaaggaagaattcacggtctaagtccgcctcagagaacccatagaaccccgggtccagcacatccgggactgggcgctcctcaagccccagtgggtcgagcttggctttcaggtggccgctcacctggtacgcccttacgagcagcagcagcctcatgctctcctggatggtctgcccggagaggccaggcgaggtggtggcagcctggccaacgaagttgcggaaaaagttgtcccaggactcatcgacggagttggggtcggcctcccatgctcgctgcagctcctcgaggtagacgctgctggtcccgtcgaggaagctgtcggtgaggcgcgagagcggcaccgcacggggcgcgggcgcggcgaacctgcgcgggcgtgtggagtggaagtagcgcgccggcattgcacccgggacggcgccaccgctgccggcaaaggggcttgccgcggcgcgcgagaggttccgccgcagcgccaaacgggccagaccggacgccgcccggaacagccccattttcagatcaaggtcgcttcaccaaagtcaaccgcaaaatgtatgtgtctagtctgtgggattgcggaatctagccccccatcagccgccgatcgatcccacgtcccccagtgagtgggctactcgtcagccggtgcggaggatcggaggagtagaagccgggaagggtctcgcgccgcgccgccgcgctccggtggttcggaaaaggaggatggggacgggtacgcttcgagggccgtctcccccgcccgtggtgatgttgatgatgataagagggcaaaggtgcgcggcgttggcctgggtcccccccttgctccctcccactaccggtggcgatgccgattgccgatggcgagggcgatagatccggagatgggatggggtgagaggaaaaggtggatggggacgggtacgcttcgagggccgtctcccccgcccgtggtgatgttgatgatgataagcctcgtgccgaatt

SEQ ID NO: 115447 - DNA, 2809 bp, Zea mays
  Clone ID: MRT4577_36772C.1
ctcgaggccggccgggccaacactgtcggaagcaaatccagcagtgcaattggcaggtcgttaatgtaacaactcctgcaaattatttccatgttctgcgtcgccagatacaccgggacttcaggaagcctttgattgtgatgtccccaaagaacctccttcgccacaaggactgcaagtcgaacctatctgaatttgatgatcttgcgggccaccctggatttgacaagcaggggacacgcttcaagcgtctcattaaggaccagaataatcacaaggacctagaggagggaatcaaccgcctagttctttgctctggaaaggtgtactatgaactggatgaagaaagaaggaagtcggagcgcactgatgttgctatttgtagagttgagcagctctgcccgttcccctatgacctcatccagcgcgagttgaagagatatccaaatgccgagatcgtgtggtgccaagaggagccgatgaacatgggagcatacagctacatcaacccgcggttgctgacggcgatgaaggttctgggccggggtggcatcgaggacatcaagtacgtcggcagggccccgtcggctgctacggcgacgggcttctactcggtgcacgtgcaggagcagacggagctggtgcagaaggcgctgcagcgcgaccccctcaactacccgttctgaaagaaacgaggcccctgtagattcttggaattggggggccttttgaatttgatataataccaatatagagagaacaggccttaaattttatctgtgcagccatttggtgaaataatcgtttcgactctgcagtaccgcatgaaacaaaccgttgtaagtttggaaaaactccatctcgcaaaaaaaaaaaaaaaaaaaaaaaagggcggcccgccctttttttttttttttttttttttcatgtttttaagaagatacatttactttggtcaaacataccaagctctataggcttgaactctcaattctcacggctagtaattcgacatttacatgtatcgaaaataagacaacaaaaagaaaatcatagcacattgataattaatgaacattacatcatatatttactgctgcagaaaactcgccacagtgacttagccacactgtcacgatcatagtacaacatgcacctctggtgagatgccggctccatatgaacaactcaacttctttaatatcctctagacccggtttcttgtactcttgccaaattaaggtgctgacggcgaaggcgaggatggtggcttgaaatctggataattagggtatggtgactgaggtctgggcctagtagtggcaggagatgatcccgtgctagcgtctgctataggtgcagaattgaccactgctggtccttcagtcacggtgctgccagccttcgtctcgacttcagactccactgacggtggtgtaggggttgatggcggcttgagatctgggtaatttgtataaggtgaaagaggtgttggcgttgcaggatctgattccgtggtggcttctgcagtagcgtcctctgctagtgcagctgtttgtgtggcagcaacttgagtcgctgttgctagtgctggtttgcttttagcatcgccaggtaaaggtagtagagcctgcccgatttcctttatttcgtcaataagctccttcggagcaaccttcttgttaaagaactcatcaatctgtttaagtgtcttttgtcgatcctcggcatacaagagtttggttaccactagctgaacaacagcagctgaccccaaaaactgtagcaaagtttcaatctctgtgtaggcaagtactcccaaaccagtagctgcagcgagaccaattgtcacaggcaaaccatctgaaccatccccaaataattcgcccaagtcaaagctgaatccttttggcggagccttccagggaaggttactgctcttccatcctcggcttccttctgcaccatccttcactgcaaaagcagctttgtaaccattggctgtcacaagctcagcagctagttcggagttcccatcaaatttgtcaaggatgatcagcgtggtgttctccgggtccttgaactttagtgtcaactttttcaagaatccgtttttgtcctccccgttgtaaggtacggcagcagccttcttcttagcctccttgagatcaggcgtgccggcctctcgtgcatccttgagcggcctgatgtcgacgagctgcgcgtcgggctcctcgagcagccgctggtaggccgccttggcggacaggacggagtagggcttggagctgccgccgccgccgagaagctgcgcgaggagaagcggcactgcgatggccgcgacgcctgccgcgacgacgagagggttctcgttgacgaagtcgacgagcccgtcgaggccgagctccgggagcgcgaacccgccaacatcaccgccggagtcggacgagaggcgcagcatctcctcgtaggagagcggcgcggcgagtgcggcgccggcgccggcgcccgcgtgcgcgaggccgagcgcagctgagaggcgcgcgaggcccccgcggaggccgctcctcggctgcctccgagggcgcgtgggacgagtcagtatcgttggcgccgcggaggagaggatgacggccatggcataacggtggcggcagcctccggcgagtggcggggaggcggaggcgcggggtctacggagcgacgagacagtggcactggggaggggccggggggggcaccgcaccgctggggatgaggaggtcgacaggtggtggtgagctcccggccggcctcgaggtacccaatg

SEQ ID NO: 115448 - DNA, 206 bp, Zea mays
  unsure (1)..(206): unsure at all n locations
  Clone ID: MRT4577_36773C.1
gaaaggacggggcgggccgacccatacgtagaccacaaggcattataaaaaggttttttccatngccaccaaagaagcaacaggggggaccaaaaaatttgcggtcctaatgctctttgttctttttacatgtgtggctaacgcgccaattttccttaaatgctcacacgctcctttagctcccatttttccccaataccttccat

SEQ ID NO: 115449 - DNA, 361 bp, Zea mays
  Clone ID: MRT4577_36774C.1
tcccactcctcctaatacaataaatattaaaacaacaccaaacaaaaacataaaaaattggcaaattaaaaaaataagactgaaatctaaaatattaaaacctctaactaactactccacaaatccatttcgagaactacatcactatctccctcactgacaaccactgcccctccatgcacacaccaccacatctcgccctcgccatctactccacactttctgacatcaccatcaccataatcatgctcaccaacgctcgttccacctttagctcaatttctctcacttcgcgtccactacttccttgacgacaactccttcgttcttcaatccctagttccaccagatcctaaccttc

SEQ ID NO: 115450 - DNA, 314 bp, Zea mays
  Clone ID: MRT4577_36775C.1
tccttcactaccaggccagcgcgcaggcaggggggttttttttcaatgctgtggggatccttacacacgaccagacattgatcatggcgacattcattgagggccccaagctgacactcatgactgtggtcaactccagatgtggtagaaggcaaacaccaactcagccaaggcctaccacaatggaaactaaaaccactagccagggccccaagcactctcttaacaaaactgtgtgcgccaacaaactaggcctcgcctgcgccgtagaaacccaaacacccaacaagccgagctgaagtatactcggaaca

SEQ ID NO: 115451 - DNA, 366 bp, Zea mays
  unsure (1)..(366): unsure at all n locations
  Clone ID: MRT4577_36776C.1
tggggggggggggggggttttttttttttttttttttttttttttttttttttcctgggccccttttccatgttaagctcgatcgtttttttttcccttccttttcaaaagaaaaaaggtggcgcccaaaaaaaggcaacctattctttttggggttcagcacggggctacttccctccccccccanacaaggcttttttttggggttttccttctgggaaattggggaagaaaaaccctaaaacctcttttcattgggggaaatttttcagctttcccttgggccctcccccccccttgctgctcccgcttttcccctcccctcgctgtgggtttgctcggcttgcgcttttttttttgttcggt

SEQ ID NO: 115452 - DNA, 415 bp, Zea mays
  Clone ID: MRT4577_36777C.1
gatgcggccaatacataggacgcggggccgcctgcgcgcgcgtgcgcgcggccaaggcgccaagccgagagcgggcggacgcgctgagctcgctgggcgtggccatggcggaaataaattctacaggatacagggaaaatggcgacggccatggcgatgagctgagtcaagcgcgcgcgagcgggaagatggcgatgggcgagcgccgagggacgcgggaagagtgcaacgatttccgcgcgaagatggtagtgggtaggtacgcacgagttagaactcctgtttcttgcacgatgtagcagcaagcaaaaaaaaaaaaaaaaaacaaaacggaagaaatcgaagagagccagcgggcgggcggattggattcggaacatcatgtggttgcggatcgccagagcgacaggggaac

SEQ ID NO: 115453 - DNA, 412 bp, Zea mays
  Clone ID: MRT4577_36778C.1
cccctcgagttttttttttttttttttttttttttttttttttttttttttttttttttggaacaaacggaaggtcacaatgggctttttttaaaacacgcacaacaggctggatctagggctacataaaccagcattttccccgtcaagccacaccttgggaattgcaaaaacaaaaaccgcagcgacaacagggaggcgcgagcgcaaccgggatagcctacccgccgaacccgtaaagggggcggccctggcgcttgagcgcgtaaacaacgtccatggctgtgacggtcttgcggggcgcgtgctcggggtaggggacggcgtcccggatcacgttctccaagaaaaacttgaggaccccgggggtctcctcggaaaagaacccggagaagggctttaagccgcccct

SEQ ID NO: 115454 - DNA, 320 bp, Zea mays
  Clone ID: MRT4577_36779C.1
ttggggcggccgccgcgggtggtgatggcggcgtagcaggggcagacgtcgtggttcccggcggtgcccggcggcacgcagttgcagcgggcgcagcaggacccgcacgccctcgggcacaggttccaccgggacgacagcgcgcaccgcgccccgcacgcgctcccgcagtctatgaagctcacgggggacggtgcgggggcatcaacgacgacggcggcggcggcggcggcacccacaacgaggaggaggaagaggaggagcgcgcaagcagacggagcccgtccggacgccgccgccatggcagttggcagagcccg

SEQ ID NO: 115455 - DNA, 260 bp, Zea mays
  Clone ID: MRT4577_3677C.1
ggaaaaaccgggccgacccacgcgttcgttaggtgaaggatgagtacttccgtcttttctccaacaagttctcggaacaccagcccgaccgttcttattaaacatggcacctaccacaaggactacaatgagccccctcctgcaccactctttaagccctatgagctaaagttcttatcctactaccattccatcattttttatttctttgcctctttactctaactctacatttccattctcaccttaattatcatttt

SEQ ID NO: 115456 - DNA, 478 bp, Zea mays
  Clone ID: MRT4577_36780C.1
gggtacctcgaggccggccgggattgaccgtacctctggcatcgagagagctcgccagcgtccagttgtcacgctcggctcgatcgggctctgccaactgccatggcggcggcgtccggacgggctccgtctgcttgcgcgctcctcctcttcctcctcctcgttgtgggtgccgccgccgccgccgccgtcgtcgttgatgccaaccggggggagcaggagcaggacagggactgggagcagctaagcgcggcgtcgccctcgccgtggagtcctgcgcctgcccccgcaccgtcccccgtgagcttcatagactgcgggagcgcgtgcggggcgcggtgcgcgctgtcgtcgcggtggaacctgtgccggagggcgtgcgggtcctgctgcgcccgctgcaactgcgtgccgccgggcaccgccgggaaccacgacgtctgcccctgctacgccgccatcaccacccgcggcggcc

SEQ ID NO: 115457 - DNA, 463 bp, Zea mays
  Clone ID: MRT4577_36781C.1
accgtacctctggcatcgagagagctcgccagcgtccagttgtcacgctcggctcgatcgggctctgccagctgccatggcggcggcgtccggacgggctccgtctgcttgcgcgctcctcctcctcttcctcctcctcgttgtgggtgccgccgccgccgccgtcatcgtcgttgatgccaaccggggggagcaggagcaggagcaggactgggactgggagcagctaagcgcggcgtcgccctcgccgtggagtcctgcgcctgcccccgcaccgtcccccgtgagcttcatagactgcgggagcgcgtgcggggcgcggtgcgcgctgtcgtcgcggtggaacctgtgccggagggcgtgcgggtcctgctgcgcccgctgcaactgcgtgccgccgggcaccgccgggaaccacgacgtctgcccctgctacgccgccatcaccacccgcggcggccgc

SEQ ID NO: 115458 - DNA, 492 bp, Zea mays
  Clone ID: MRT4577_36782C.1
atagaggttgtctgttgataagaaagctatttacatcagatgttaataagcgggttgatacatgctgagctggactacaccaccatatacatacacgctcaagatctggaaaacatattcaaactggtgatacctacgtataataggtatatatgacacgctgacctagaggccacatggggcataacaaataattatcaggaaagagctgcgtgagcaaacggtgttcataccatgagactcacacactggcggttcagacgactggaacctgggggacgaatgagcttaccggcccagaccctgtcttcacgttgagcattgacaaggcgacactcttggggtttcagaccaacgtgtgggtttaccacaacgatgacagggttcacggacgggcagcatctgctgaacatggacagcgatttcctccgcggatggaatcctaggagagacgctaacacagacaacacggacagttccaggtgggaagtt

SEQ ID NO: 115459 - DNA, 573 bp, Zea mays
  Clone ID: MRT4577_36783C.1
atggccggatatctccacacccttgacacccactttgatgaccttttctcccattgcacccacctaaactctcaggtagaaagcctagagcagcggatcaaggaattgaaggaagaaaatgcagccctccaaaacaatctcgagttgctagaaggcaaggaagccaacactcgtgaggcatacaggaccctgaagatggactatgctaggaaactgaagaggttcgccccagtcaagaagacctggaagcgtttcaaaagccaaggatgccagactgacccgaaggaggagtccctgcaatcattgccttccctagggctagataacctttccgatgtcgaggaagtgtccttagatagccttgatgagcttctcagggagtttggggacactttgtttcgtgataaagccatcgataaggtcatccacgccgaccggttgctcatgaagaaacctgacatggtcattcttgaggacattgttactgacatgttgtctgctcctagcgtggaggttgggattcctccaagtgattctaggtcggcatccactgctaggaacgaagttgcttga

SEQ ID NO: 115460 - DNA, 746 bp, Zea mays
  unsure (1)..(746): unsure at all n locations
  Clone ID: MRT4577_36784C.1
attttgactcccacccctcaaaaatttcagccgccacagcctccctgtcttcttctccccacgccaaccctcttcctccttggcgtgcatgccctctgctctctgccttccatggccgacggcctccacagcacagcagccatggcgcgacaccctcctgcttctcttggcgagcggctggaatagggggccttcttccccaatgccacctctgcttcagccggcctcctctgcccaacgacccctcccttggctccatagcgcgtaggatcctttctctaggtccgagctcgagcaggtggctcgccgtcgcccatggccgacctccatctcccttttcccatggtgcccagtggtcgcccccttcttccccatggaggccgcgcccctctcccttcttctcccctgctcgttctcccttgcgtagcagcagccgggtcttcgtcctccctctgctgtccgcggcatgcagcaagcagggagctccctctcctcccatggcgtcctccccttctttccagcgcgcaagagcagggcgccccttcttcctcccgcttcacgccagcaagcacctgccatggccggatctgccccctccatggacgcccccttgctgttccatgcgcccagctctctctatctagcgcngcccctttttctcccatggaaaccagcaggagctccatttcctccatggccggcggcccgcgcagcgcctctgcgcgacttcccctcccaatagcaag

SEQ ID NO: 115461 - DNA, 304 bp, Zea mays
  Clone ID: MRT4577_36785C.1
attttctggaggtcgtctttggacatgtacaaacaatctcaacctatgttgaaagtttttattcaattagtgctatccctatcctataacatatgtcatcattctggactcgatcccatcttgtatggacataaatccaacgcaagatacacaattttgcaacacttatatattgaacatgttgtcttttttgtaggccaacattttgcaccatacaacatagcaagctaatcgctatcctataaaattcgtcttttagtttatgtggtatcctcttgtcatatagaatgtcaggtacttgacg

SEQ ID NO: 115462 - DNA, 484 bp, Zea mays
  unsure (1)..(484): unsure at all n locations
  Clone ID: MRT4577_36786C.1
gttttccaaataaaaggagaacttatactccgggggtcctgacgcctatgcacaacgtggngatgggtagtgaacattctgttggtgctgttgaagatggcctctgtctataagcacaccccacaggtggaaactattattcatcataatatatggcatgatcagggctcataaaggttagggaatgtctgacacctgtacctaagtgcacaaattggactagagtatctatgtgctcgaattcatcgacaaatccttcttcaccatgagtcatccaactaagtgcctatacacacatgaacgctgtaaaggctctgatgaacgtggcgaggacctaaatctgcaagatcaagagacatgtcccaaaagtgacatatttgacagcggtcatgtaactactcctgacgaggaggagcgtctcaaactctcatggttaatatatagggatctcatatgtacacaaacaatggatgaatactgagag

SEQ ID NO: 115463 - DNA, 355 bp, Zea mays
  Clone ID: MRT4577_36787C.1
ctttttcagagtaaagccttgccttggtgctgaactttacatatttgattcaaatcattggaatggaaaaggaatgtctatagagcctggttttctattgtctctaaccctctgcatgaagtggaagtgtgcgttagaaagaagcaccattcgcatcgtgaaattgtactgcattttggccgcaagcttagagacctgcttggatacagcacgaacaagaagcaagcagcttgatcagcacaggaccgctgaaatggtcgaattgaactccaagctgctacagtacataaagaatgatctgaggaaggctaggaatgagaagaagaattcccatagtgtcatggagatggtgact

SEQ ID NO: 115464 - DNA, 1134 bp, Zea mays
  Clone ID: MRT4577_36788C.1
cctcgaggccggccggggaataaactcccgctactacgtcgctctcgcacccgcctccgttcccaccacgacggcccttcgtcaacatcaacgccggccgcagctataataggctatagcatggtggcagcgacgctagcactactactagtgacgctggcggcgctgcacggcgcggcgccagtactggccgtggccggggacccgccgttctcgtgcggcccgtcgtccgcggaggcgtcggagggcctcgcgttctgcgacgtgacgctggccccggcgcagcgcgcggcggacctggtgtcccggctgacggtcgcggagaagatcgcgcagctgggcgaccaggcgccgggggtcccgcggcttggcgtccccgggtacaagtggtggaacgaggcgctgcatggtctggccacctcgggcaaggggctccacttcgacgccgccgtccgcgccgccaccagcttcccgcaggtgttgctcacggccgccgccttcgacgacgacctctggttccgcatcggtcaggcgatcggtcgggaggcccgtgcgctgttcaacgtcgggcaggcggagggtctcacgatctggtccccgaacgtgaacatcttccgggacccgcgctggggccgcggccaggagacacccggcgaggacccggccgtggcgagccgctacgccgtcgccttcgtccggggcatccagggaaacagctcgtcctcgctcctgcagacatccgcgtgctgcaagcacgccacggcctacgacctggaggactggaacggcgtggcgcgctacagcttcgtggcccgcgtgacggagcaggacctggaggacaccttcaacccgcccttccgtagctgcgtcgtggaagcaaaggccagctgcgtcatgtgcgcctatacggccatcaacggcgtgccggcgtgcgccaactctgatctgctcaccgggaccgtcaggggggactggggcctcgatgggtacgtcgcctcggactgcgacgccgtggcgatcatgcgcgacgcgcagcggtacgcgcccacgccggaggacgccgtcgccgtctcgctcaaggctggactggacatagactgcggctcctacgtccagcagcacgccgcggccctc

SEQ ID NO: 115465 - DNA, 5389 bp, Zea mays
  Clone ID: MRT4577_36789C.1
catttcaggaccagagcagaattcctcgtttctttcaaaccgcaagaaaactaagcagcacataattaccatttctgccctccgtcccctctcaactccgtcgtcgcgacctgccgcgccgtcatcgccggcggacccagcgcgtgcagtggaccagtcgccgaaggaaccgcgcagaagagaagggtaaaaacaggactggtggaagtcgagtcgagaagtaacagcaagcagcagcttggggggtaggtggggcaacgcagcagagatagtccaattcgccgccttgccggccactgacctcgccggcggcggggtcccctctgttggagccgacggatccgttgccccctcctatccgaacctgatccacccatgggaactccagttggtatcatcgttggttctcatgtttgggtggaagacccaaatctagcttggatagatggagaagttattagcataaaaaacaatgaagtacatgtgcagacatcgaatgggaaaaaggttaccacagacaggtcaaaagtatttcccaaggatatggaagctccaccaggaggagttgatgatatgacaagactttcatacttacatgaacctggtgttctacagaatcttgctacccgctatgaactgaatgaaatatatacttacacaggcagcattttgattgctgtaaatccatttcaaagattgccacatctttatgatacccacatgatggaacagtacaagggtgcagattttggggaattgagtccccatgactttgctatcgcagatgttgcttacagggcaatggataatgaagggaaaagcaactctatattggtcagtggtgaaagtggtgctgggaagactgagacaacgaagatgcttatgagatatttagcacatttaggtgggcgatctggagtagaaggacgtacagtggaacaacaagttttagagtccaacccagttcttgaagcttttggtaatgctaaaactgtgcgaaataacaactcaagtcgctttggcaagtttgttgagatccaatttgacaagactggacggatctcaggagctgctatcagaacttacttgctggaaagatcacgtgtgtgccaaattaattctccagaaagaaattaccattgcttttattttctttgtgccgcaccacctgagtacactcagaggtacaagctgtctgatcctagatctttccattacctcaatcagtcgagctgtattgaggtggatggaatcaatgatgctgaagagtatttagcaacacgaagagctatggatatagttggaatcaatgaggaagagcaggaaggtatattccgggttgtagctgctgtacttcatcttggaaatataaattttgccaagggaacagaaatcgattcttctgtaatcaaggatgataaatccaggttccaccttaatatcgcagcagaacttttgaaatgtgattgccagaatttagagaaggcgctgataacacgagttatagtcacgcctgaagaagttatcactagaacacttgatcctgcttctgcagttgctagcagagacgcattagctaaaataatatactcccgattgtttgattggattgtggaaaaaattaatgtctcaattggacaggacccaaactcaaaacagttaattggagttcttgatatctatggttttgagagcttcaaagttaacagttttgaacagctatgtatcaattatacaaatgaaaagctgcaacaacattttaaccagcacgtgttcaaaatggaacaagaagagtataccagagaagagataaactggagttacatcgagtttgttgataatcaagatgtgctagacttgatagagaagaaaggtggattgattgcacttctggatgaagcatgtatgtttcctagatctacacatgagacgtttgcgcagaagctatatacaacatttaagaataacaagcggtttgccaagccaaagctttcacgcactgattttacagtagtccattatgctggcgatgtgacataccaggctgattatttcttagacaagaacaaagattatgtagtggctgaacatcaggatctgctgaatgcttcttcatgcctattcgtagctggtttattccctcctctcccacaggagacagcaaagtcttcaaaattttcatccattggatcacgttttaagcttcaacttcaatccctcatggaaactttgagctctaccgaaccccactatattagatgtgtgaagccaaataatctccttaagccagctatttttgagaatacaaatgttatacaacaactaagatgtggaggtgttctcgaagctatcaggatcagctgtgctggatatcccacaagaaaaacattttatgaatttgtcaatcgttttggtgtccttgctcctgaagttttagaagggagcaatgatgataagattgcgtgccaaaagattttggaaaaaatgggtctggagaattaccagattggaaaaacaaaggtgtttctaagagctggacagatggctgatttggatgctcgtagagctgaagtattaggaagagcagcaagaatcatacagaggcaaatacgtacatatattgcaaggaaacagtttgctgagcttaaaagatcagcaacacagctgcaatcttttgtcagaggaaccttggctcgtaagttgtatgagtgcatgaggcaggaagcagcagcagtgaaaatacaaaagaatatgcgacgccacaaagcacgggaatcttatttacaattgcaagcagctgcaatcacattgcagacaggtttaagggcaatgtctgctcgcaaagaattcaggttcagaaaggaaacaaaagctgctgtccacatccaagctcaatggcgccgccacagagactactcacattacaagaatctgcaaggagcagctcttacttaccagtgtgcctggaggcaaaggcttgccagaagggagctcaggaagctcaagatggcggcaagagaaacaggagccctaaaagaggccaaggataaacttgagaagcgtgttgaagaactcacctggcgcttaggattggagaagcgattaaggactgaccttgaggaagcaaaagcccaggaaattgctaagctgcaagagacgttgcatgatatgcagcttcaagttgaagagtcaaaggccatggtagttaaggagagggaagctgctagaaaggcaattgaagaagcacctccagtaattaaagagactcctgtgctagtcgaagacacagaaaagattaactcactgacgaccgaagttgaacaactgaaggctttgctgctaactgaaagacaagcaacagaagctgcaaaaagagaacacgctgaatctgaactgagaaatgaagaactaattaagaaatttgagagcgcagagaaaaagattgagcaacttcaggaaactgtccataggctggaggagaaagcaaccaacatggagtctgagaacaaagtgctccgtcaacaagctgttgcaatttctcctacgtcaaaatcattagctgcatatcctaagtctcctttccagctgaaaactccggagaatgggaatgctctaaatggagaagtgaagtcatcaccagatatcacccctatcttaccaaaccccaaggagcttgaggctgaagagaagccacaaaaatcacttaatgaaaagcagcaggaaaatcaagacctactgatcaagtgtgtatcacaagatctgggattctccagtggcaaacctattgcagcttgccttatctacaggtgtcttctacactggagatcattcgaagttgaaagaactggtgtttttgaccgtattattcaaacaattggctctgctattgagtcccaggacaacaatgacaagttggcatattggctctcgaattcatccacactgctgctgctgctgcaacgaacactgaaaacaactggagcagctggattcactcctcaaaggcgcaggtcatctgctgcatcttttgggagggtgttttcggggatgcgagcctcaccacaaagtgctgggcgtgcttttatgggaagtcgcttgattggaggtctaggtgaccttcgtcaagttgaagccaagtaccctgccctgcttttcaagcaacagctcacagctttccttgagaagatctatggaatgataagagacaatttgaaaaaggagatatctcctttgcttggcctttgcatccaggcaccaagaacatcccgtgcaagcctaattaaagggtcacgttcccaagcaaatgccttagctcagcaaactctgattgcacattggcagagcattgtgaaaatattgacaaattacttgaatgttttaaaagcaaattatgtcccttcagtcttaatcagcaaagtgttcactcaaatcttttcatttattaatgttcagttatttaatagtcttcttcttcgacgggagtgctgttcatttagcaacggagaatatgtgaaagctggattggcagaattagagcagtggtgcatttatgcaacagaagagtatgcaggttcttcctgggaagaattaaaacatattaggcaggctgttggattccttgtgattcatcaaaagccaaagaaaacattgaaagaaattaccaacgatctgtgccctgtccttagcatacaacagctatatcgaatcagtacaatgtactgggatgataagtacggtacccacactgtttcatcagatgtcatctcaagtatgagagtaatgatgacagaagattctaataacgcggtcagcagttcgttcctgttggatgatgattccagcattccgttttcggtggacgacatctcgaagtcgatgacagaaatcgaggtaacagatgtcgacatgccacctctgatccgggagaattctggcttcaccttcctacaccaaagaaaggactaacagggtggtccttccagctgcatgtccctttttgcacattctttttctccgctcaacctgtgcataactcatgtacatacgctcgtgccttttgctctctggtcagggcttgttagatgtattgtctttggtttgattggttggttggttctttcatcaatcctctcccaattttgttgggcgaagggtccacaatctatgtttctccatactgtagtgaaaaggggccggatgcccctggtctccccgagctgcttttggaaaagctcgtggtcattaaacagttaagcttgtggaaaaggttctccacatctaccgagtcgttcgttgtgtcgccttcttcatatggatcatcgccatattgtaaattgcaaagacgattatagttgaaaaaatagatattacagtgatattacatatggat

SEQ ID NO: 115466 - DNA, 485 bp, Zea mays
  Clone ID: MRT4577_3678C.1
tgtctgcccttcttctccacgggcaggagaggttgccccatccatggcgccgcaaatctccagccggcttccccctgcgtcttcctccctgcgctcctgcaggcctccctggcgcacctcgccagcagcagggatctttccctctccccatggcgcgcaagccctgagctcccccacgcgtgttcccttcccaggagcgtgagctccctccggcgtcggccaacaggcaagtttgagcaccgagctcatccatggcgcctcccctcccctcggctccagcccctcggagctccatttctgcgtccgagctcgagcagcttgcctccctgccggatctcgtcctggtggtcgtggtgagctattttctccaagcacccggcctgtagtgacctcccctggcccgagcttgaacaaccggtcatctttcccaatgccggcacccagtcaagcttccgctgtggtctgccagtgccgcgcgcgagcac

SEQ ID NO: 115467 - DNA, 340 bp, Zea mays
  unsure (1)..(340): unsure at all n locations
  Clone ID: MRT4577_36790C.1
cggaattcggnctcgagcanagaaccaggaaggnaaacanccgccttttcgntttgtcnncttccattcnncagtactcgcgggagggaaaggaactaccatgccatgcgccgatggtcaccgctcgacgaccccgccgccgttcgttgctgttccccgcccgtcccgtggcccgggctttcgcctaggcgcccgtctccccgnggcgccgcgtggccgttctcgcgcggcgtcgggccgcggctggtcccgtggtcggcgccgcgccggagcctgagaccccgtctgctggtcgatacagccttgagcacgggccgctgttgcttcttcanctgggccg

SEQ ID NO: 115468 - DNA, 360 bp, Zea mays
  Clone ID: MRT4577_36791C.1
gagcaggatggcacacttacgcgctggagatggccgattgcgcgagcttgctgaacactctgatcgacaaaagcctactgacgccttccatgacgctgggctagactctgattcagggcatttcggtccaagtagcataggtgtagatttataccgaaaaaaaaaacaaagtggtgggcctgaacttgaagctgaagattaacctcaggctcatggcgaactactgctgttggatcgtgccatctaacttccagtgattgtgatatatatggcgacgtattatatatgaacacgcatgcaatgcatatcgtagtccatcagaagtagatgctgctgtgggcagctgggatgataccgtat

SEQ ID NO: 115469 - DNA, 346 bp, Zea mays
  Clone ID: MRT4577_36792C.1
ctctagttgcgcatacaggtaaataaaaatatggtgtgaaccatgaactgctgaaatgaagagaaattatttctatagtaccctttaatgaatttttgcgtaattgaattaaacattagttcctggatcaaatcatttacactcctaataacacatataacacatatattaatggtttgcttattcaacaagagggagttataaataacccaaattgagagtctcatgtgtggaattaatgacgattctaacctaacataaaacatcttatctgaatctgatctctacgtttagagttggtattataccatatcgccatataaagggtaccaatacagcgttttta

SEQ ID NO: 115470 - DNA, 353 bp, Zea mays
  unsure (1)..(353): unsure at all n locations
  Clone ID: MRT4577_36793C.1
gaatgatcccgtagagaaggcgtnttngtattcgtttatntccgcgagtcaaagctttccccaattcccccccttctcctatttctcatcaccgccgccgntccccctgttcaaaaacagcacgagggagtgtatttggattgtaatcgtggaggttggtcatcaggtggcaaacgtgtggtgggagctgtattgtcttgagtatggtatttaggttgattggtagatgttcggtgagtagattatttgggggaggtgagtgatcgctttcatgttttcttcagcgagagtggtgttgggaagtntgttttctgtgctgtttttgctgcctctgaccccttgccattcatgtg

SEQ ID NO: 115471 - DNA, 447 bp, Zea mays
  unsure (1)..(447): unsure at all n locations
  Clone ID: MRT4577_36794C.1
agaagggtgagggcanncagcnaccancgaacagaccacaggagcagaaacnccaaaaaaaaaacagggcgnaannnacaaaacttatgacacatcatcagtcgccgaagcttaaaacgagggggggggggggcgattttttcgncgncnaanctccacagcggcatggcgctggtccgccgcggcggcggcgtcgctctgcacggcgtgggcgctgaacaggctgaccagcgactcgtacgcgccggcgtcgaagaaggcgaactggtcgccgaagaggagcgaggggaacagcgcgtgcgactcgttgtcggaggcccggggcgacgcctggggcgcggcactctccgggcggacgctagaaaggaagagccggacacagagcgggggcctgagggggcggggggaggcacgcgctggcgcggggagagcaaggggcacaagaga

SEQ ID NO: 115472 - DNA, 173 bp, Zea mays
  Clone ID: MRT4577_36795C.1
gttctcctagttttctttggcagctatttagaatagtggaaaacatttagccatttaggtgattgtacgtgatcaagaagtcacgccattcagaattgatctgttgtcagcctgattgtttccttgtcaatgtggccgagtgttgtatgaacaagaacaataaggtttgcttg

SEQ ID NO: 115473 - DNA, 411 bp, Zea mays
  Clone ID: MRT4577_36796C.1
aagaaagttaacaaggcaaccacattccgcgccacaagattcaagggagacccgatcgcccccaacacaaacactaaaagcagccgcccccgggaaaaccggccaccagcgacacaagaaaaaacaagccaaaggtgcccccgaaaaaaccgagaaaaaggtgcacaacaaaaaaacaaaaaaaaaaccagccataaaacaacgaaaaaaaaaagcagaagactaacagaacaccgaaggccggagggcgggcggaacttaaattgatggaaaaacggggcgggggacgggattgaaatcgaaaggaaccacccaaggccgtccggcaggcaacccagccccctaccttggggggggggcgggaacccctggcttgggcaaggagggggggggcccggcggaaaaaggggg

SEQ ID NO: 115474 - DNA, 378 bp, Zea mays
  Clone ID: MRT4577_36797C.1
acacccttccgcgaccccttggcttcaacaccggtggcttttgtttcccgccgttccggtccggggaaggcggagaagtagaaggcgttgccgtcaccatttcgtccgggggtttcatccttttgggggccgtcctgttcctggattacttaagggggtcctaggggacccttcaaaccggcccacggaggaccggtagtggctacaactccggcctggcccaccattaaattcctttttttttttttttaacacacattttgggtttgtggttgggaagaaaactgtgctctcttttttccacaaccttttgttgcataaatgttctgggttcttttggcgtaatctctttttttgttacaaaaaaaattatttttt

SEQ ID NO: 115475 - DNA, 804 bp, Zea mays
  Clone ID: MRT4577_36798C.1
ggaagtcgccaccacggtcacgggttgtccctcctgtgctgtgggctcgggctgcggctcctcccgtggctcctcctggaacgcccaccatatagcttcctcctgagctccctaccaatctgcttcacgtgcatgaagttgcagtagccaccacggttgcagctgttctcctcaaactgcctgcaggtagcctcacggaagtccgtgacaggggagtactccacgatgatcgggcgaccagagtagaagcggccttggagggcgttgtgagcagccactgcctgctcttcctccctgaactggacatagacattcccgatcatgtggtcagcaaggttgtcacacacgttcagggtctcaacctcaccaaacttgctcagctcctcgtagatatcctcatagaagtcctcaaagtgctcctgcatcttctctggagcaatagccacaccttgggcatcgactccaggggtgatcatatcaggtcgctggtacatgttagcaagcacaatagttggcgatgtggttggcctgttgtgcagacgggagcaacgatccccatgacggcaagctccaatcttgaagtaaaaggggcagttgaccctatccttctccgtgccaaaaattgaagccaagtgctccgccattgttttgggagcacttcagatgatgctgaagctcgggagcgggaggacggcggctatcctctcgatcgatccggcggcttcgctgccgcggccgctggttgacggaggaggcgcacctgacctggctgtggcggcgcggcggaggaggcagagaggggtc

SEQ ID NO: 115476 - DNA, 387 bp, Zea mays
  Clone ID: MRT4577_36799C.1
acctggcatcggagatgtcttccgactagatcgagatcttagcctggtagcctgccatcacagctctccccttagaagcctgcagatcacagcgcgtccatggacggcgtcagcacgaacctcagcgacaactgctacaaactaggcaaggtcgcttcatccgacgaagacgcatgaggataccaaggaggcgccaaacaacactccgttcacaccaatgatcaccgcggccaccacatccatcttccaagacggtaagggatgcggcacctggtaccagttgaagtgtacctgatcagaggcgagctccggcagccctgtgacagcggccatcacagacctgcgaccaaacactacgagccccgaggactcgggccactttaacct

SEQ ID NO: 115477 - DNA, 200 bp, Zea mays
  unsure (1)..(200): unsure at all n locations
  Clone ID: MRT4577_3679C.1
cccacgcgtccgcccacgcgtccgctcttttagattgcttatgagttatagttcaataatgaagtttttgtgatgatangaaccgcggggagaactgcaaaaaccccttcaaagagggcgcgctctatgccacgacaaactacaacctgtcgaagcacccccagatcgacgtgcccaacctccacgtgatcaaactcata

SEQ ID NO: 115478 - DNA, 204 bp, Zea mays
  unsure (1)..(204): unsure at all n locations
  Clone ID: MRT4577_367C.1
gattccctttttttgtcacggggggggggggggggggggggtaagatatattaaatatggancggccaaaaaaaagtgcggataatatggttacaagctatatgctagagnaaaatanaaggtnntgaactggcatannagtaacgcctttaatgnnctgctagntactgggacagccttccgnngaggatgcccataccattt

SEQ ID NO: 115479 - DNA, 123 bp, Zea mays
  Clone ID: MRT4577_36800C.1
cgcacaagtaaggtgtatcgctctccccgcccgcaagccagtggcgtccgagccgcgtcgctcgtgctccctacgaccctctacaactcagcggatccgccgactcgcctatcgatggcgtca

SEQ ID NO: 115480 - DNA, 165 bp, Zea mays
  Clone ID: MRT4577_36801C.1
gttccttacagggacagtatctttacaagatggccgccagtggcaatttcatgaccggggggaactagaattggacttccgacaccgccattaccttagacactcatcatatcttaacgctgccttccttgttcgttcttgaatatgtcaagaacgggacctaat

SEQ ID NO: 115481 - DNA, 377 bp, Zea mays
  Clone ID: MRT4577_36802C.1
atgagaacgacactaaccatcacacaaatgggtagatgaacatgattgctcttggaatgaactgaagcaaagctgattagaaagatctcttctacccatctgtagaaggccattcacatgagtggactccttgcttttgacatagtgctctgtttggccacctccatcatcagagctgcctgcagattcctgcaaatcatgttcatctaaccattatgagaacgacactaaccatcacacaaatgggttcgacatgaagcatgatgtaaagattgccaagtacaaagcacggaaaatggcacagttaaagagggctatccatccatctcttgacttcgacaatgcaaatggagtaaataggatgaagccttcactga

SEQ ID NO: 115482 - DNA, 609 bp, Zea mays
  Clone ID: MRT4577_36803C.1
cctcgaggccggccgggacccattcacaacaggagatgagatcttcgtctgactctgacgggcaagacgatcacgctcggggtcgagtcctcggacacgatcgacaacgtcaaggccaagatccaggacaaggagggcattcctccggaccagcagcgcctcatcttcgccggcaagcagctcgaggacggccgcacgctcagcgactacaacatccagaaggagtccacgctccacctggtgctccgcctgcgcggtggccgcattgagccgtcgctcaaggtgctcgcgtcgaagtacaactgcgacaagcagatctgccgcaagtgctacgcccgcctgccgccgcgtgccaccaactgccgcaagaagaagtgcggccacacctcgcagctccgcccgaagaagaagctgaagtagtggtctcgcacccatgtgcggcgcgcggagcgtcgctgtcctgcgccgggtggcctagacgtcgcctgcgtgggccgggcggcgatccgagcgctgcgcctgcggcagctcgcgtctccggcctcgtcattctcacatcgctgtacactcccacccacctcgccatgacatgcgcacgcttctcttgag

SEQ ID NO: 115483 - DNA, 612 bp, Zea mays
  Clone ID: MRT4577_36804C.1
gcacgcttttttttttttttttttctttttttttttttttttttttttttttttttttttttttaaaaaacttcgattctaattggattttccttaaaaacctccatggccactagctacaactacaagcacacacaaaaaaccttggcctccctaaggggccaaaaaacacaggatctaaaactgggggcatacctaccatcattcgggagttacaagcaaaaggggcattggtttttttagcatcccagttccctccgcctccctttttacgtacaggacacctagggggaccccaacaggtaacacgggccatacggacaaaaaacgagggttctggctcacgggggggccccaccgggggcggtggccaaaggggaggagcgagtcaacgccccttttttggggcgggtacttgatgggccgggcggggcggctcgggaacaggagcacgggggggaagctttgcagttgcagctgggccggagcaaacggtttttgctcgccgtggggggggaaccgggcccccttcacgccggcggaccccgccagcctttgggccagttccacggaggaggcctccatggccggggagaacgggccccagggggg

SEQ ID NO: 115484 - DNA, 302 bp, Zea mays
  Clone ID: MRT4577_36805C.1
ttcggctcgaggaaggggcgacttttccgacccttcggggtggcggccggttacaggagggactatggggttgaccgccgtgtgcaggggggccctgatcgccatcaactattcaacagtcaccacagtgttctggattactgcgcaagcacaattccactcaatgcgccccatggtcatggatacatacatcaggtgaccactagtgcgtatgagtactaagcgagagacatatgctgtaccttcagtgcctatatggacctgttacacctatgagggagggctggcctacctcaaaggca

SEQ ID NO: 115485 - DNA, 471 bp, Zea mays
  Clone ID: MRT4577_36806C.1
gggacgcatgggatttaaaactgttagctttcataaacagagtatcagaagtactggcctgcacattttggttgtgcaggcgtggctatattacctgaacctaccctgtctctaagattagtgcacgatagatcagtagtacctattgacataactgtgaaactgcccgatgctccatgcacaattggggagcttctcatgcgacaactcccaaatcatactcattatgctactgcttcagtgggaacaaccggagagatacctgaattttgaaggttggaagatggcccattaaatgttgtggcccgtgtccagcaaagataggggtcaaagaggcattgaatggatgttgatcggctggtgttgagtgagcgtgcaaattatacgggaagatactccattgaaaactcctagagatgcatttggtctggtagctagatgcactaccttcaattgccatgctacctcatc

SEQ ID NO: 115486 - DNA, 1274 bp, Zea mays
  Clone ID: MRT4577_36807C.1
ggccgcttttttttttttttttttatatagaactcctgttatatataatgatgtgacattcgatcctgtgccactatacatcatatgtgtgagacttggtcccggcacacctggtgattgttcgcgcccgggtcttggtgccccgaaatccgggtgtgacagtaatgatggcgccccgcacgctctatgacgatggcggctcttagcccccttacggaagcaagaggacgtcagcaaggactcgacagccccaacagctgtccttccgccaggcttcaacgctcctccgacggccacgacaccacacgaaccgggtgccaaaacctctccggctgccacgatggcatgtacttagggcgctagctctcctccgctagacacgttagcactctgctacacccccattgtacacctggaccctctccttacgcctataaaaggaaggaccagggccctcttacagagggttggccgcgcggggaaggacgggacggcgctcgcgtgagcccgctcgctccctcccgcgtggacgcttgtaaccccctactgcaagcgcacccgacctgggcgcgggacaaacacgaaggccgcgagttccacctctcacgcccgtctccctccggctgcctccccccttcgtgctccgtctcgcgccgacccatctgggctggggcacgcggcgacaatttactcgtcggtccagggaccccgggttcgaaacgccgacacctcccttgcaccgacaaatatctctgtccctgatctcctctctgcggctgcacgcgatagatctctgctcgctagcgcacaatctgctcgatctgcacggttcgagctagatctggtcggttcaaatccgcgtcgttgtcgactggacgcaccggtggtaaagaaagcagacaaaaaggaatggggctcgcgtttgggaagctcttcagccgctcttcgccaataaggatatgcagatccttatggtcggcctcgacaccactggtaaaaccaccatcctctataagctcaagcttggtgagatcatcacaaccatccccgccatcggtcacattcagaggaacacattggacaaggttctagacactgttgcaaaaggaggacagacctcaagtaaaataggattgtcgtatgcttgagacgataacgatggagatcttttcaaataatggctggtctttttatcatagattgagtgcttgaatttgtgaaactttgtcgaatgtgagaatttcatttccaaaaaaaaaaaaaaaattgcggcc

SEQ ID NO: 115487 - DNA, 627 bp, Zea mays
  Clone ID: MRT4577_36808C.1
aattcggcacgaggcaccacggagcgccgcacggccgtagccctagccgccaggcaccagcggccagccagaggcccggacgactggactgccaaagccgtcgtcgccacagggaagcgccggtacgccgctcggcccttctacaggatttggtagcaccatggtccatgtatgtaaatcacatcactgagatggaggatggtttaaatgatgatggaatggaatatccatttgagggtgatgctaataccagtaacaatgatcagatagtagaggaccatgctgatgatgcccctattgctagtggtgataatgccatcgtccaacagcaagttggtctgagaaagaagaaatacatgtatgtgaattaccatcgtgttgagcaacctgatggttccagtgttaagcaaaagtgggcaaaatgtcttcgatgttcacataaagctaagtctgatgcttcaaatggtacaaaggcttttagtaaccacttaaaattgaaacattgtcttgtgaagggtcaacaacagctaattcagagtggaaatgacatagcaacatataaatatgatgagaaagctagtgtgagacttctatattatgccatcattatgcatgaatatccattca

SEQ ID NO: 115488 - DNA, 326 bp, Zea mays
  Clone ID: MRT4577_36809C.1
agctcatgagacgagcctggtcaggatagggaagcccatcccgagcctatcgcggtgtctattccctccgcaaccgaggtacagcgattgcgggcgtaagctccgcgctgcagtgggtatacctgtccgtctacaaaagggtcgtcttctttggatgggcgcaggtgcatgactacgcgctcctgacgctgagaatgagcgggcacaagggcgcctatgacgccgacaagagggcgttgttgttcgcgcagacagccgccaatattgagatcgatgatgggctcgtaaggaaggagagggctccgatctgtgcaactcttacacag

SEQ ID NO: 115489 - DNA, 636 bp, Zea mays
  Clone ID: MRT4577_3680C.1
actctccaatcttcatggagacatacaggagtagcaagagcaccgaaaggatggaagcgtcaggctccctgcgacttcgccaggccactgccttcactgcgggcaagagccacatcgatgatggtgcgtacatccgcacgcctagcgacacgatcactgctggtcatgagcgcctcggctgctgaggccaccaacatggatgcctcgctgaagggcttccgcaagaacaaggctctcaatcataattgacggcctgcacaactgtgacgggagcatcgatgaatctgttgtcgcaattgtatataaggaaagcgtcaaacatgataacatagaatgtgacaatgacttagaagagctcgacatggaacttaccaaccttgcgatctgtgtctcatatgtaaatactgcagcggtccattctgacgaacaaacaagcactcaaatgcacgataacgtaaactatgactcttcttatgacatggacatcgaggtctcctctgaccagagactggatgtaaccaagaaaacaacgaacatgcttccacacatcaccatataactaacagctcctcacacgcttagctagcccgatctcatcagactaacagagctactcgaagatgaaggagctgatat

SEQ ID NO: 115490 - DNA, 301 bp, Zea mays
  Clone ID: MRT4577_36810C.1
acaaacgtttctctaaaccgaggaggcaaagcctcggaaggggaaattagtagggagccgggactccacaagaacaccgcacacgggcagaaacccaaagccgaggccagcccagccataccaaggcaggggacaaacggaagaccgttcaacgcagacgggagcaggaacatctgcgggggcagggccacaaggggcacccgagacgaagaaaacgggggagaatgaaccggatccgatgggcccggccaggaaccagagcagcgacaatagaccaaaccggacggagacaaccaataga

SEQ ID NO: 115491 - DNA, 695 bp, Zea mays
  Clone ID: MRT4577_36811C.1
tcttccttagcgacgaggccacccagagctccacaggaaagaagcgcgaccggaggaggaagaaggagagcaagatgtcgtcggtgttcagcggcgatgagacggcgcccttcttcggcttcctcggcgccgccgccgccctcgtcttctcatgcatgggggcggcctacgggacggccaagagcggggtcggggtggcgtccatgggggtcatgcggccggagctcgtcatgaagtccatcgtgcccgtcgtcatggcgggtgtgctcggaatctacggcctcatcatcgccgtcatcatcagcaccgggatcaaccccaaggccaagccctacttcctcttcgacggctacgctcacctctcctccgggctcgcctgtggcctcgcggggctcgccgccggcatggccattggcattgtcggtgatgctggagtcagggctaatgcgcaacaaccaaagctgttcgtgggcatgatccttatcctcattttcgcagaagcacttgccctttatggtctcatcgtgggcatcatcctctcgtcccgtgccggccagtcccgtgcggattaggcgcctcgctctaccattctgcaattgccacacaggctacattcttgagaagctgaagcattgaaaagttctaattttgatgtattaaggagatatttgtagatttttaaggaaggtgacact

SEQ ID NO: 115492 - DNA, 754 bp, Zea mays
  Clone ID: MRT4577_36812C.1
tttttttattctttttttttttttttttttttttttttttttttttttttttttttttttttttttttttttttttttttaaaaaaaaaaccccctttttttttgggggggggttaatttctttttccccgggacccggaaaccccccaaaaagggggggccctcccttaaaaaaaccccctttaaatggcccctttccccgggggggaaaaaaaaaaaaggggggggggccccaaaaggaattttgccccccccaaaaaaaaagggaaaaaaaaaccggggaaaagaaaaacccccttttattttttcccacaagccccttaaaaaaaaaaaaaaaccccggggggggggggccggggttttttgggggggaacccaaaaaaggttgggggggtttttttttaaccctttgggaggttttgggaaaaaaaaaaaacccggggggggggtttttggaaagggtttaatagggccccggggggggggccctttccacgggggcccccgagggcaaggggggatcccgggggctaccctggggagaggttatacgggcctttcggcccgggggggaaaccccccggggggaaagtttttttaaccgggccagggggtttagggtcttggaacccctttagaggggacccccgttgggggggggcctttttggaactttatttccttggggggtttttggcaccgggggacttttggcaaaaaaaaaattttccctccggcggtaaaagggcttggg

SEQ ID NO: 115493 - DNA, 423 bp, Zea mays
  Clone ID: MRT4577_36813C.1
cccacacatacacccacacgttccatcttattcttttccaaacacaaccatcacctccttgtggcgtaccataccacactccccaccatcaccttctctaaccccacacaacctacatcgctcaccatctacgagcacaccaacttacgatggatcgaaccctcctacaacaccagtcatcctgacaatactaacacactctttttcaacttccgaacatcaactaactactcctatcaactcttttcccatctcggaatgtcacgaccaataccaacaaccgccttacattatcgaccccaacgatctataccactgcgactatgatcacctcacacattacaagctcatccttcccgaccacctacgttacaccctacaaaagcacagaactacccacctttttcccatacaaagggctac

SEQ ID NO: 115494 - DNA, 431 bp, Zea mays
  unsure (1)..(431): unsure at all n locations
  Clone ID: MRT4577_36814C.1
cgaaaacaaggagccagcgctttagacgcgcgcgcgaccggggctggcggctgcgccgcgacggagcgggggaaggtcctccgctcccggggccaagacgcggaccgcggcaccgcgcgcgaccctggcgcgagcaagaaggcccgagccaaggcgccggaaggagccgaagaaagcgcgcagcgacccaaggcggaagggagggacaacaacttttttttttcagcagaagccggctgtgagggngtcttccatgaaatcagtcctgacctcccccaccgaccctggaaccgtgaggtggaggtcatagcgcccgctggcctaggtacaacaaaagagctaaacgcttgctatgaggcaaaagctaggcgagctgtggtggtgccttcatgcggagctgtgtatgctaatcctatgtatccgaagggtaa

SEQ ID NO: 115495 - DNA, 574 bp, Zea mays
  Clone ID: MRT4577_36815C.1
gcctccccccacgcgtccgtgcctctgaagaaagtcaacaggtgcctgttttcctgtttgtgaaggatgttgagaaaatatgtggaaataattacacctaccatggtctaaagaataagcttgaaagtttcccagctggagttttattgttgggtcccagattcagacagatgctcggaaagataagtcaaacaatgggtctccttggctcaagttctcatacagccaagcagcaatacttgaccttgcatttcagcttaatcgaaggtgtattacaacgtaattaattaaccaggagctttctgaggccacgggaaccagaagaccatatcgtccaagttaatattgctgccagcaatttatgaagcgcatccgagggacttgtatttattttatgtaaagtttaatggaatacttgttcctctatttattttgtgtacttagtacactggcatgcccgtattttttttctcccacgtgaaaaagatgtttgtaattttctctcgaaacactggcctacttgagttccttgacaagttttacaccagggtgactaccttgggttcattacctt

SEQ ID NO: 115496 - DNA, 3020 bp, Zea mays
  Clone ID: MRT4577_36816C.1
cccacgcgtccgccgccctttttttttttttttttttttttttttttttttggtttgaagtagtagagatatatatatatattctgcaagaaacaagatgcttagctggaacgcaatagaatatggaaaagtgaaacggaagaagaatgcatgcaaatgcaaggtcagagctgctatacgggcccctggggcctctgatcctggtggcagttgtccgcttgatcttagtgaaaataccaaaaatgttcttttgtcatcatcgtatgtaaatctatgctgcaaggaatccactaagtggacaaaggatatatcttctctttgtaaaagggtactattatctggcccaccagggtccgagatctaccaagaattactggttaaggcacttaccaaatcctttggtgctaagctgcttgtcatagattattcactgctgtctggtgggcagccttcaaagtcaaaggaatcaaaaccatacaaaaaaggtgatagggtgaggtacattggtcctattcaatcatcagggtttatgtttgagggacagagagctcctgattatggttcacagggtgaagtgaggcttacttttgcggaaaatggatcctcaaaagttggagtcagatttgataaacagatccccgggggcattgatcttggaggcagttgtgagcttgatcatggcctattctgttcagttgattctctatgcctcgatggtccaggatgggaagatagagccaaacattcatttgatgttgtgtttgagtttgcctctgaagaaagtcaacaggtgcctgtaatcctatttctgaaggatgttgagaaaatatgtggaaataattacacctaccatggtctaaagaataagcttgaaagtttcccagctggagtttttattgttgggtcccagattcagacagatgctcggaaagataagtcaaacaatgggtctccttggctcaagttctcatacagccaagcagcaatacttgaccttgcatttcaggatagctttggtcgggtgggtgaaaaaaataaagaagcactcaagatgtcaaagcatataactaaacttttcccaaataaagtgacaattgaatcacctgaggatgaaacggaactctcccagtggaaacagctattgggtcgtgacattgaaattcttaaggcaaaggctaattttttgaaaatacaatcttttctaacccgccatggtatggaatgtactgatttagaatcagtggtttgtgtcaaagatcgtaatctgacaagcgaatgtgtcgataaaatagttggttatgctttgagttatcaactcaaggatcaccctattcaaactcctggaaaggatgcgagagttgtcctttccggtgtaagccttaagtatggaattgatttgttggaaagtatccaaagtggccctaagaagaagagcacaaagaagtcactcaaggatgttgtcacagagaatgaatttgaaaaacgtcttcttccagatgtcatccctccagatgagattggtgttacctttgaggatattggagcattagaaaatgtcaaggaaactttgcaggagttagttatgcttcctttgcaaaggcctgagttgttctccaaaggacaacttatgaagccatgtaaagggatattgctttttggtccacctggcaccggtaagaccatgcttgccaaagctgttgcaacagaggctggtgctaattttatcaacatatcaatgtcaagcattgcttcaaagtggtttggagagggagaaaaatatgtgaaagctgttttttcacttgcaagcaaaatttctcctagtgttattttcgtggatgaggttgatggcatgctgggtagacgtgagaatccaggggaacatgaggccatgcgcaagatgaaaaatgagtttatggtgaactgggatggtcttaggacaaaagacaaagaacgtgttctggtacttgctgccactaataggccatttgatcttgacgaggctgttgtcaggaggctccccaggaggttgatggttaacttgccagatgcacccaacagaaagaagattcttagcgtgatactagcaaaagaagatttggcagatgatgtagatctggaggcgctagcaaacctgacagatgggtattcaggcagtgatctgaagaacctgtgtataactgcagcacatcgtcccataagggaaattcttgaaagagagaagaaggagagaaccttagctgaagcagaaaataggccagccccacctcagtgctgtagcggcgacgttcgctccctaaagtttagtgatttcaagcacgcacatgagcaggtttgtgcgagtatatcatcggattcaaaaaatatgaatgagctcgtccaatggaacgacctctacggagaaggcgggtcgaggcacaagacaccgttgagctactttatgtagcctaacgtttttttagatgatttgtacatacagaagcagcctttgtataggtgtgtttccagttaaatttgctggaaacatttattcatgtcgggtttcgtttctataatcaactcagcttgtgtctgcatctagtgtagcctgagcttctgattagttattaatttatttcagtccgttggatcttgcgtcctggtatagtctgtgaaaggtttcgacggagattcatttggatttatttaatagtctggatgatatggttcgaaggtgtattacaacgtaattaattaaccaggagctttctgaggccacgggaaccagaagaccatatcgtccaagttaatattgctgccagcaatttatgaagcgcatccgagggacttgtatttattttatgtaaagtttaatggaacacttgttcctctatttattttgtgtacttagaacactggcatgcccgtattttttttctcccacgtgaaaaagatgtttgtaattttctctcgaaacactggcctactgaagttccttgacaagttttacaacaaggctgacctaccttgggttcatttaacct

SEQ ID NO: 115497 - DNA, 243 bp, Zea mays
  unsure (1)..(243): unsure at all n locations
  Clone ID: MRT4577_36817C.1
gcctaagtttccngagnatncggcgnaggntnggncgcnnccaactnattggaanctncgtncgaagccccgggnaatttanattcccgngagccggtaagntngcaaggggnagnaaaggttnnnccctaattaggtgaattgctaattacgaggtttgggcgtganatgcatgggtgcataaggctgtttgcnctgttggnaaanattgggtatcccngtgcagnaaattcccagccagca

SEQ ID NO: 115498 - DNA, 365 bp, Zea mays
  Clone ID: MRT4577_36818C.1
cagggggattttattctttatgttttattttatttgaccaaccacaataaagagtgcacaacggtaaaaggagcacggtacgaggaccatcttttgaagacgaacaaatccaaaggcccaacggaacatgcaactcaaaactcgaaatagaaagcacgaggaaaaagcatcttcggaaaataaaacttgtacaaccctaagggaccaaacaacggctgccatacgaggactgatacaagaggcttcatatagggtgctcccaacaggagggtaacggccagctgctttcttccttgtggatacatggccacccgccggacggcaccctcaccatggtggaggcacaagctcgggaggtgatgcac

SEQ ID NO: 115499 - DNA, 259 bp, Zea mays
  Clone ID: MRT4577_36819C.1
tcggttctagatcgcgagcggccggccttttttttttttttttttttttttgtgggggttaaacaaaaatttgacgggctttaatggccaaattttcacgaaattaccattaccatttgtttaaatccaggaaggggaaccgaaaaaaaaaccctcctcatgataatgtttctgggttttagtttggaaaatgtcaaaacctaaaccctttgggtttgaaaatacactaaaacaattggttaagttattttccttcctt

SEQ ID NO: 115500 - DNA, 370 bp, Zea mays
  Clone ID: MRT4577_3681C.1
gatcaaataattattatggttgttacctaatttaaattgacttaataaagcatatgtttgtataacaattttatgtttttattaattattgaaaccacaaaagaatcgcaagctttaaaaaaaatagtgtttcacccccctataaaaaattggggtattatataaaaaaatacacctaacaaaaaaaggtttctctaataaaaaaaatcctgtaatttgggaataaaatttgcggagttataattcaactggaaggactttaaaataaaaaaactttgaaaatggccacgcaaataaacaggactaatcctggacagggacctccatccacaattactcaagggaaataccttttggcgggtcaaacttt

SEQ ID NO: 115501 - DNA, 899 bp, Zea mays
  unsure (1)..(899): unsure at all n locations
  Clone ID: MRT4577_36820C.1
ccctactccgctagcagtctctgncattccttttttttgttcctttgcacgccgggggggttttttttcagagatcctgcccccttttttttttttttttttttttggggaaaagaacccttctttttgtccccccccaaaaaatttccccgggggaaaaaaattttttcaaaccccccctttttgtttaattcccaaattttccccccccccccggggggggggtttcagggggtttaaacccaagggattaaaaccttttttttgggtgttgttcccccgggccgggggtaaaccccccgggaaatttggggtggcaaaccccctccgtgtgaacaacctttttttgggcctttccgacccgtggggcccccccgaatttttcggccggtcccttggggggaccccctttttccttttgggggggcttttaaagttgggggaaaaaaggggcaaaagggtttttctgggggaaaaatttttttttcccctcacaatttccccccacacaatttttcggggcgcgggggcctttaaagttgtaaaacccggggggggccccaatgggggggggccccccccccccttttattgggggtgggccgccccaccgccccctcttttccagggggggaaaaccctttgtggccccctttttttttaaaaaaaacccccaccccccgggggaagaggggtttttttttttggccccccggggtttttttttttcccgggggcgcggcaactttttttccttccccccgccccaaaagattanaagggcccccctttttcccccaggaaaaactttttttgggggcacgggggaaaaacaagtctttttttttttttgtctcccccccccccccccggattatttccccccccaccccccctcc

SEQ ID NO: 115502 - DNA, 390 bp, Zea mays
  Clone ID: MRT4577_36821C.1
tatacgcgcccagcgtcgactcagtggctacgatggggcttgcgaggtagttgttctccccatccaggctgggtgttagtccatacgaaaaactggcacacgatggcgcgcctgatcatccccctccgctccgccgatgtgactgggtcagaattccagctgggccaaacggtctaggtgtactgcagaaacgccggcgcttttagattttgatatggggactgggtgattgatgggaagacaactgtgcaaattggtgtggctgcaattgtaaaatttatggaggatatatatttgcaagagggtcgatgttgtcaaacaattatgagagctgtcataggaggactgtgttgatcatggcatacgcagacgtgaggttttgagagcttt

SEQ ID NO: 115503 - DNA, 236 bp, Zea mays
  Clone ID: MRT4577_36822C.1
ggctgtcttaatagaaattaaaatccttaactgtatgtgacatatgtggaggagaataaaagccaaagtcatcagaaatgcagtctgggtcacatccagaaccgctgtgttgggctggcaccagaatgcattgatgctttactattgtgacatctcaaggatgctgtagcattttctaagaacatggttgtactgttcctaaaccagacctcctcataagaagagaatgaatgaca

SEQ ID NO: 115504 - DNA, 395 bp, Zea mays
  Clone ID: MRT4577_36823C.1
cctctcaaaccctacccgcctcctgcaagtctcagacctgaggtaatccgcgccatggcgagtgagacggagaccttcgcatctcaggctgagataaccagctgctctcactcatcatcaacaccttctactccaaccaggagatcttcctccgcgagcttatcgccaactctttcgacgcgctggacaagatcaggctcgagagtctcactgacaagagcaagctcgatgcgcagcctgagcttttcatgcaccttgtccgagacaaggccacgaacacgctctgcatcatggacagcgggatcgggatgaccaagtgcgacctttggaacaacctcggagccatcgcccgctccgggaccaaccgagtcatggaagcccttgatgtcgtcgct

SEQ ID NO: 115505 - DNA, 427 bp, Zea mays
  Clone ID: MRT4577_36824C.1
cctcctcgccggggcgccgctggcgtcggacccgtcgctggacgcgccgcggcgcgcgtagctggagcgggcgatcggggcgaccaccaccatgctcttcagctgcctctgcaccggtggcgggtcgtcccggcggcggcagcaacccgacggctgcgataccgggccgcagctgaagattgcctcgtctcgtcctgcgctgggtcgttgccaaagccactcggcggacgcggtcctgacttccgttggcggcgattgcctcggcggacggctgtcgggggctgctcctctgcccgtcactgttgcactggatagcggcgccgcgacactacgcactcgacggaactggaaccggccgtttcttctaaagcgcgcgcccgcttgcctcctctagaatcaattgtgaggcggtgaacagcagacctct

SEQ ID NO: 115506 - DNA, 708 bp, Zea mays
  Clone ID: MRT4577_36825C.1
gtaaaagaactgcatgggtgtcgctaagaaatggtctgtacatgctacctttgggtttatttgcatacaactggggcctcacatctgagtggtttagttttgaagcttcactcctaacattaggccttaccattggatctctatcatttgtgctgaaaccaagtccaaagactgcgaggagaatgttctatggtagcctgctgtatctccctgccttcatggctgggcttctgttgcatcggctgccaaatgaacaaaaggcgcacaacttggctgagaaaagtgaactggacggagttctgtacggggccgatctgcaggacaaagaaagagccacacagaaacgccaagacaggaatccttccagcatgcaatcacgccctccggttgcatatgcttctgtggctccattccctttcctaccggtgcccatatatgactcatgagtcatgactcatgaaaagtttccctggttcttcctgcagcagtgggacagtcagagcaatgtattcatgcacttttggcttacatgaatttctgccaccaagagttctttggtgggtctgttgttaaaattataggatagtttttttaatggattgagctttttgcggctcacctaaatgtaaaaaagtgctgtggacactcgttctgatgcctcgggtaacacggatatgctgatgtgaaaaaaaaaaaaaaaaagcggcc

SEQ ID NO: 115507 - DNA, 326 bp, Zea mays
  Clone ID: MRT4577_36826C.1
attaaccccttatcccttttaattacaaaaatttaccttttacatttcccaccaaaaatggggtgccctggaataaaaaaattttttcaagaatcacaaggttgaacaaattgggccctgggcttaaatggttggtccttaatctggtccccggttcctccgggggacttttctttcttgttggcgggggggttttggttgacccccacagcgaccttgccatgggagagggtccattggttacccgggcatggtcccggggtggtctgtgcacctttaacttgtggccaaaaaacaagggtggatttttatttttgggtcccccc

SEQ ID NO: 115508 - DNA, 255 bp, Zea mays
  Clone ID: MRT4577_36827C.1
atggctcgagaaaatataaggaaaagtgaaaaaggtattcacgatgctagagaagtagcaaaggccgctgagaaaagtgcggatcttgagaggcgaatagctgcactatctcctcccccagagcccaccgagccattggcggaccccagagcaaaggaagatgatgaaattagaaaaatgaccgaagctattatggataaagttgttgatcaactactaaacgaagctgcagaagtagttttgagagaagactag

SEQ ID NO: 115509 - DNA, 457 bp, Zea mays
  Clone ID: MRT4577_36828C.1
gggggtggggggttttttttttatatttttttttgggtttttttttttttttttttttttggaaaataactttttatttttaggggggcccatacattagccaaaaaacttcattattgaattacaacttattacccaaccaaaattttggtggtcgcggggggggcccttcccaaaaggctcctgggtttgtaaaaacaagttggacaaagggcccccaccggcgccattttaaaagggttgcggggttaaccacaaaccgctggtagaaccgaagcccttgttcttgttccaaaaaggaaacggggctttttttagctagcttgcccaatggaagtatttttttctggtcgaaataaacaaaggggttcaatgccgcccattggttaaatggaaaaaatttttgcttgtgagaataggcaataacttcctggctcaatgggtaaactttcttttc

SEQ ID NO: 115510 - DNA, 727 bp, Zea mays
  Clone ID: MRT4577_36829C.1
aggttcctttcaccaccgctactccgctaggttcagcagcggcaccagtcggctgagcggatctccggtgaggttgagggatcagggatggcgaacggcggcggctacgtgtgggcccttgcggcgggcttcaacgccgcgctcgccgccatctccgccaaattcatcgccactctgccgctcaaatatggcacggtgatacttttcaacgtgacaatgtgggggtgctacgtcaacagcctcaaagctttgtcgtccctccaggcaacagtcacaaacttcgccgccaacttcctctcgtctgggcttgcagggtatttcctgttcgaggagccgctgccttctaagtggtttgcaggtgccagcctcatcattcttggcgtcttcatcctcagcaagtccagcatcgaggagaaacagaacacggattaggtggaaaagttttgaccgttagtgttagctgtaacatatacgtactccgtataagctgagcctgcttttttccccctccccatgggatgttttgtccgtccatgtagccgaatcagagcatggctgtcattcggctaatacaatgtagtgtagcaaacatgttgtgcgagttgtcacgccaggacatttgacatttcccatggtgctactggtacatcgagaatcatcgctgtaattgtatgtatgtggtgaattgatttcatttattttattatatttttattcaagctgtggc

SEQ ID NO: 115511 - DNA, 275 bp, Zea mays
  Clone ID: MRT4577_3682C.1
acacaaaaagaggggtttggataagattatagatggatggtgacggatcacagcaaggcacatggcttgcctgcttgcgtgcggcacccacactacacattacactgctcgccagatgcgccctaagatgccaggagaggtcactactctctcattagccatcatcattatctcttactcataacatgccttggcacgcaactgactgactgacttgaaacacacacagcttcgccattatactttatttaacttaattattaactatcttactc

SEQ ID NO: 115512 - DNA, 602 bp, Zea mays
  Clone ID: MRT4577_36830C.1
cggaattcccggctcgacccacgcgtccggcggaggttgcggcgggcaaggtgatcctcttatcgacgagatgcacatgctgctcggcgccggcgcgtgcaagggcgtcagcatggacggcgccaacctgctcaagccggcgctggcccgtggccgcatccgctgcgtcggcgccaccaccttcgacgagtaccgcaagcacatcgagagggacgccgcgttcgagcgcctgttccatgaaggtgatcgtcgaggagccgaccacgcaggcgaccattgctattctgcaggggctgaagcagaggtacgaagagcaccatggcttgaagattcaggatgctgccattgtcgctgctgcacagcttgcggaccgctacattaccggtcgtcaatttcctgacaaggcgattgatctgattgatgaggcttgctccaccgtaaggctgaagattgatagtcaaaaaagggtgaacaccacaggaatgcaaaataacaatggaaatacgtcagtgaatggagtgaacgaagcaattgttggcccagatcatgttgctcaagttgtgagccgatggactggcatcccggtcactacacttgatcaa

SEQ ID NO: 115513 - DNA, 267 bp, Zea mays
  unsure (1)..(267): unsure at all n locations
  Clone ID: MRT4577_36831C.1
acaacaaacannnatcaaacgagtgggcaaaactgaaaacggcaaattggaaaacccaaatttccgggtccaacacaaggaccaggctaacacatttcaggatccccacaattacagtggcttcaacaactctggagaccaagcacgcttcaacacaagtaaagaatcacttccgatgcaattcttccacaggcaatccaattttaaagtttgagcaacatctccctactaccaagtgtcccctccccctgagcacagtttgtcccc

SEQ ID NO: 115514 - DNA, 286 bp, Zea mays
  Clone ID: MRT4577_36832C.1
tctttggcacatggatcagaccatactatgcagggggtattttgaagccaatgaccgctcaactgccacaaccagccaaggggattgatctcgcgtgtaggaaacaacctcaacgcaagccacaaggttgactaagcgtacaacttcattggcccccaacaagccatcaagggaaaacaggagaagatcaagtccatattattaccatctacagcgaagtcttgatgcccgctgcctaaacccttgctagtgaaggttggacctggtgctagtccaaagaggaaag

SEQ ID NO: 115515 - DNA, 368 bp, Zea mays
  Clone ID: MRT4577_36833C.1
ggggggggcccccccaaaattttttaaggggcccggggggccccaaagggaccaacgggcaggatttccccaaaggcggggcgggggggaggaaaaaatattgaaacaccgggaagggggggagccccgggcaacccccaaggccttttttggggaagggggcaagaaaccccgggaccggaaattttttgaaaagggcccttcccggcccggtttttttccccggggggaaaaacccccggggggggccaaaaacccccggggatccccgaaaggccccgtgggaaaaacaccccccggaaactttggggggggccctggtgggggaaaccaccaccggggggcccacgcttttaaaccccccgtgg

SEQ ID NO: 115516 - DNA, 295 bp, Zea mays
  Clone ID: MRT4577_36834C.1
cttctcctcccaagctgccgccatcctcagcaccctccttgctgctgaggtcatccccaccactgtccggggccgtggcctgggcctgatcatggctctaggggcgcttggaggactgagcggcgcggcccagcgcctccacatgggccatggagccttcctgcagcacgtggtgctggcggcctgcgccctcctctgcattctcagcattatgctgctgccggagaccaagcgcaactcctgcccgaggtgctccgggacggggagctgtgtcgccggccttccctgctgcggc

SEQ ID NO: 115517 - DNA, 760 bp, Zea mays
  unsure (1)..(760): unsure at all n locations
  Clone ID: MRT4577_36835C.1
cggccgctcaggcggcgggcgggttctcgtacgcggccaggtctgaaactttgaagagaaggacggcgttaagctgccgagttacaggggcgacaacgtcaacggcgacgccttcgacctcaagagccgcacgcctgaccccgacaggatgatcagggcgtacgcccagtcggtggccacgctgaacttgttccgcgctttcgcgaccggaggctacgcagctatgcagcgggtcatccagtggaacctggatttcatggatcacaacgagcagggagacaggtaccgggagttggcacacagggtggacgaggctcttggcttcatgacagcagctgggctggggatggaccatccgataatgacgactactgacttctggacatcccacgagtgtctcctcttgccatatgagcaggctcttacccgtgaggactccacaagcggccttttctacgactgctcggcccatatggtgtgggttggtgagcgaactcgtcaactcgacggggctcatgttgaattcctccgtggtattgccaaccctcttggcattaaggtgagcgacaagatgaaccctgctgaattggtgaagctgattgacattttgaacccttcaaacaagccgggaaggatcaccataattacaaggatgnnggctgagaacatgagggtgaaagtgcctcatctcatccgtgctgtccgcaattctggnacagatgtcacatggattacccgacccatgcacgnaacaccatca

SEQ ID NO: 115518 - DNA, 449 bp, Zea mays
  Clone ID: MRT4577_36836C.1
gggaaaaaaagggccttggaaaaacgggcattccaaaaattccaaaagggggaacccaaatctaaaggaaaaatcccagcccgctttacccaggtggggaaaaccaacaacagggggtaaaaaaaaacccaacccgggggggggggggcccaacttaaaaacacaaacctttggaaaaaaatcgcaaaaaaatcagggataaaaacgggggggggggccccctttaccggaagaaaatggaccccagggggagggccacgtctttgggggggggggccccaaaggccaaaaaaacggccaaaagggggggggaggaaggcccccccaactgggcccccccccgggccaaaaaaaccacctttttggccaacccctccttggggttggggaacaagggggtggaccacatcgggggcccccaagaaaagggggacccattaaagcccttt

SEQ ID NO: 115519 - DNA, 395 bp, Zea mays
  Clone ID: MRT4577_36837C.1
aaaaaagggaaaagtttgattttccatagccaataaactaattccctggggtcaccagctgtttagttttataggggttcaaaccctttaacccccaattggtgcccctctaatttggaaaaaaactattgtcgggggtgagtttttttacttgggtcccccggatattacacaagtttaaaacaaaccattgtcccccttttttgtttctaaactctttaacaaaagcccgggttgggttgctggaacctttttttttcggtaaccattttaaaatttgttccaggagaagggggagcaccggtagattttctggcgggttttaacaatgttttaaagctataatttgttttcggtgggaattgcagggtttttttccccttttcccttttttt

SEQ ID NO: 115520 - DNA, 858 bp, Zea mays
  Clone ID: MRT4577_36838C.1
ccggccgggaaaaaaaaaaaaaaaaaaaaaaaaaaaaaaaaaaaaaaaaaaaaaaactttaccctaagcaggaggaggctgaggctcctctcgtctgcggtctgcctctgcccttaccgctacgctttcctcccggattccagcagcgaaacacgcgcggggcaaggacggagctggtaagccgatcgagccggcgagggtggacaagatgatgatggccgaggtggtggccaaccacagcaaaaggagccacaccgacggctacttcagtgccaaagccgccgtcgccgccgccgccgccgcgagcccgccagaggagttgggaagcatgcccatgtcctcgaagaagccgaggccgaggaatagcaacagcccgagaaccgcgcccgtatcgcccaaggagaagaaggacaggatcggcgagagagtcgcggcgctccagcagctagtgtcgccgttcgggaagacagacacggcttccgttctgcaggaggcctcggggtacatcaggttcctgcaccagcagctccaggtcctcagctccccttacatgcgtgctcctccggctgccggcgccgcgcctgaggataccgagcactacagcctccggagccgcgggctgtgcctggtgccggtggaccagacactgcagctgacccagagcaacggggccgacctgtgggcgccggcgaacacgaccaggcgcaggtgaggaggagcctgctgccggcctgtgccctggtggtggtctgcccggaggaaaccgcgcaagtactactgctgtgtctgcatggtgcgcgtgtagtacagtttccaaagcgctgacccaattcgatctcctaacaggagctaagcatt

SEQ ID NO: 115521 - DNA, 1415 bp, Zea mays
  unsure (1)..(1415): unsure at all n locations
  Clone ID: MRT4577_36839C.1
cattgggaccctcgaggccggccgggcttcattcttccccacgcaggctcttcccccgcacagcagcatctttcttctcctcttcgcggcgcgtcctccgggttaaggaaaaaaaagcggggaaaagggagaagaatcgcacgtcccgccgccgcccgctctgctagtgctagctgctgctggtttggtcgtttcccggccgccgcgccggtgacgcagatcgacagctcctgcccatctcagagtccatcgccgctgatcctgcctgtgcctgcagcgaaacacgcgcggggcaaggacggagctggtaagccgatcgagccggcgagggtggacaagatgatgatggccgaggtggtggccaaccacagcaaaaggagccacaccgacggctacttcagtgccaaagccgccgtcgccgccgccgccgccgcgagcccgccagaggagttgggaagcatgcccatgtcctcgaagaagccgaggccgaggaatagcaacagcccgagaaccgcgcccgtatcgcccaaggagaagaaggacaggatcggcgagagagtcgcggcgctccagcagctagtgtcgccgttcgggaagacagacacggcttccgttctgcaggaggcctcggggtacatcaggttcctgcaccagcagctccaggtcggtgttccaccagtgaccgcgcgcatggtggccggcactacgtcctcagctccccttacatgcgtgctcctccggctgccggcgccgcgcctgaggatcccgagcactacagcctccggagccgcgggctgtgcctggtgccggtggaccagacactgcagctgacccagagcaacggggccgacctgtgggcgccggcgaacacganccaggcgcaggtgaggaggggcctgtgcctggtggtggtctgcccggaggaaaccgccgcaagtactactgctgtgtctgcatggtgcgcgtgtagtacagtttccaagcgcctgacccaattcgatctcctaacaagaagctaagcattaagcaagcgtgtccgtatcagccgccttgtattataccagtgacctgtctggtctctctccttgtcggcgccgtatacgtgtgtgatctgcttgctagctgatccacacagatggaagcggcccgtctccatgtgctgctgaaactgaaactgcacattcaggcaaggcagagcctaatgactgccgatgcgctcgtctccgaagttatgaacttatgaccgtgcaaatctttcatgctgccacacgtcttgagtgtaaagctggccggtggttgagattgtggcaagatagaaaaactcctcaacatgtacagaagcaacattgggcacagaataaatagtgtctccctgtcctccaagttttaacaaaaaaaaaaaaaaaaaagcggcc

SEQ ID NO: 115522 - DNA, 287 bp, Zea mays
  Clone ID: MRT4577_3683C.1
gctgcattttgttggcttcgattctcagaaacaagaggatgtgatagttgcagtggatggggaagggaagacttgtaggatcatcgactggcatggtaaggatgtgagattaatccattttattggtcaatcccaagaccgtctgcactgcatcggtgtcaatacgaaagcaggtcaagaccatatacacatcacgcggatgtcaatctgggttcttgaggactatgatacaaaagcatggatcctgaagcacagtgtgggctctttgcagttttttggattactgg

SEQ ID NO: 115523 - DNA, 144 bp, Zea mays
  Clone ID: MRT4577_36840C.1
tcctccttcagtggtgtaccgcccttccctcccttcctctccgcgtcgctcaccgtcccatctttggcctggacacccggactgcccccccttcgcggacacaccggatcaccggacgaatccggcctcccaccgatgacaacg

SEQ ID NO: 115524 - DNA, 393 bp, Zea mays
  Clone ID: MRT4577_36841C.1
attaagcatgcgagaatttagggccaatatcagggttatttaacagttttacacacgaactgctgctgcaaatacagagtcaactcctgtcactaaactaccattgacatttcaatagcccctataaagctattggagatggatattcaaataaaaagacttaccacatatcgtatagttgaagaagtgcatgctctttatgtttccaaaaagacaaaaaaataactttgtaagtgtttaatggatttcaacatagcttttggtatctttttttccgatggaagcttttggtatcatctcttggatgggaagcatatgtcagttcaactaaatacaattctatggaatgtgctgcataaatttagcttggcactacatggggaaagggtttgt

SEQ ID NO: 115525 - DNA, 277 bp, Zea mays
  Clone ID: MRT4577_36842C.1
cgagctgtcaactttaaggagcacaggggcggtaacagagtgacagtgcaggtgcacccatgccgggggatctaaaggtgtagggtaagagagcgagtaggagagacatggccgccatccataagaccggagatggcctttccccgtggccttgcagttaaactcgatctcccgaatggagcaaactgtcagtcactgtgtgccctgcatagggctacgcctgtctgtgaaagtaaaacatctgggaaaagagtcaccttttcaaccacttgtataa

SEQ ID NO: 115526 - DNA, 1230 bp, Zea mays
  Clone ID: MRT4577_36843C.1
cattggttgcctcgaggccggccgggccttcattcttccccaacgcaggctcttcccccgcacagcagcatctttcttctcctcttcgcggcgcgtcctccgggttaaggaaaaaaaagcggggaaaagggagaagaatcgcacgtcccgccgccgcccgctctgctagtgctagctgctgctggtttggtcgtttcccggccgccgcgccggtgacgcagatcgacagctcctgcccatctcagagtccatcgccgctgatcctgcctgtgcctgcagcgaaacacgcgcggggcaaggacggagctggtaattaagccgatcgagccggcgagggtggacaagatgatgatggccgaggtggtggccaaccacagcaaaaggagccacaccgacggctacttcagtgccaaagccgccgtcgccgccgccgccgccgcgagcccagaggagttgggaagcatgcccatgtcctcgaagaagccgaggccgaggaatagcaacagcccgagaaccgcgcccgtatcgcccaaggagaagaaggacaggatcggcgagagagtcgcggcgctccagcagctagtgtcgccgttcgggaagacagacacggcttccgtcctgcaggaggcgtcggggtacatcaagttcctgcaccagcagctggactgagctccccttacatgcgcgctcctccggccgctggcgctgcgcctgaggacccccagcgctacagcctccggagccgcgggctgtgcctggtgccggtggacctgacgctgcagctgacccagagcaacggggccgacctgtgggcgccggcgcacacggccaggcgaaggtgaggactgaggaggagccggtctgtctgtccggagggaaccgcgcaagtgctgccgcgtctgcgtgcgcgccgtggagttgagtttccaggcgcctgactgacccgattcgacctcctagcaagaaactaaagcaagcgtgcgtgtccgtatcagccgccttgtattatactcctagtagtactctcgtgacctgcctggtcaggtctctctctcctagcttgttgtccgccgtttatgtgttgagcggcatgtggattagaagcctgtgtggctggctgtcagcaagcagagcggcagtttgatgcctgttccttgagatggatagtgttatcgagttcagaagaataccatgcgcgtgtgcctgacgtaaaaaaaaaaaaaaaaaaaa

SEQ ID NO: 115527 - DNA, 1432 bp, Zea mays
  Clone ID: MRT4577_36844C.1
gacccacgcgttcgccttgcgtgcctcgaggcgggccggctagtttgggtaagcggctttgttgcattgcatcacaagttcacagctcgcccggacccagagggagcttgtacttccaaagttccacagttccactgcacagatcgtcggcggcggcgcaggcaaggccacaatgtctccggcgcccagcagcggcaagcgcgggagggttcccgacccggaggaggacgtctacgtcgacaacctccactcccacaagcgctacctcaccgagataatggcatccagcatgaatggcttgtccgttggagattcagttcctgacaatatcatggggtccccaatgagagtggagaatgcttcttgcattagggatgagatgagtatgcagtactcacctatgtcagaagagtcagatgattataggtactatgacactcaagtaaacaccaatgggaatcaaacagatgtactgggtaatccctcaactagtctaatctcatctgcacaccgttttcagaggccacacacttggttctcttctgcaagtccataccctctcccaagctgctccctcccagcagtgatctgctcccctgctcgccgtggttgtggcactgaacaggaaggctggatcccatcctcacctaatgacatgtgctatggtggagatctgagacgaaccgcacttctgaggtcagttcaaatgaaggtgcagagcccccatccatgtgatgtgcatgaacgagaacaagggcgttctaatgtacatgctgacgagcttcaacaggatcagaaagaagctgtgggtgtacagctggaccaaaggcctctctcttgtccaaagtcaacccaggatgctaagtgccagagctctatacactgatgacgcggattttgttgaggatcagattacggtgtgaccagtcaaagtttgtcgaggatcatcacatatctggtaattttttgcgtagatttggatgaccataaataatactccctgtttcccaatatattgttcgtcctggcggatctattgacaccctaaaacgaatactattttgggttggagggagggagcatgttgcatggcccgttcgtaatttagtaaccattaacagtattctagtggtggcctgccccgttcgatgaacttatgtgacactaggttgtaagaagatgggacactaattaatcttgatcttagaaatgcaatgtgatgtagatgatatcagtgcttttattatgattagattaagaagttaagcagtctctgtcacttgcactttcaaggttcagatattgtttggatttgtttatcgttcggtgtctattttcattgttgaagctatgcatttgatgagggaaagagacaaaggggtgtgtatgattgtataattgtatatttgtatatcacatttgaatgattgcc

SEQ ID NO: 115528 - DNA, 580 bp, Zea mays
  Clone ID: MRT4577_36845C.1
gttctcagtcctcaccgtcgtaaccgtcttcggacctcccacgccaacgcgctcgtcgtagccagtagccccaccaacacgtgcgggtgcggcacaccacgtaggagcttcctttaaaacctcgtcggatggctgggctcccgccgcaaccccagcacgtccacgccctccccctcctcctcctcgtcgtcctcccctgcctcatcccctgtctccgcgcgacgaccgagatggcgccaaccgccgccaccgccggcgcatccgacgagggcgccagcgcgctgctcgggctcctgcagcgggtgcagtcggaggcgctgcgcacgctggggcctcacgacttcgaccccaagttctacgtcgacctgccgctggcgaccgacgagcgcgccgcggcggccgcccttgcggcgctgccgcgcccgtcgccgtcgcgggcggagctagacgacttcctgtcccgctacttcggggaccccgggtccgatctcgtggcggacgtcccaccggatttcgagcccgagccgcgcgggttcctgccccacgtccacagtcccgaggcgcgggcgtgagcgctgga

SEQ ID NO: 115529 - DNA, 469 bp, Zea mays
  Clone ID: MRT4577_36846C.1
gggggccgggcgggataaatttttttttgaagcccaaaaaggcataaaacattaaattcgaaaaaataggaaccctttacaaaaaagggttgattggggggagcacccccccaacgcaacccaaggcaacaccaggggtgaggggtaggatcttaaccccttaacttttcaaaagaacccccgggcccgcccttgaaacccatctggcccaaggggaacacaaaaaaaaggcccaggggccacgttactaaccaaaaccaaaaatgggaggggaccggcgggggcctgggaaaaagggccaactcctggcccatgctggaaaaaaaaaacccccggagggttttgccctttaaggccggaacccttgaagggcccatccaaccgaagaaccccaaacccaaaacccttaaggcccccccaaaccaatcccggggaaaaactcatgcaggggaaacccgccattcccttc

SEQ ID NO: 115530 - DNA, 326 bp, Zea mays
  unsure (1)..(326): unsure at all n locations
  Clone ID: MRT4577_36847C.1
cccgggctctaattcaaagcaagttgctatgntcctttgaaccagcaactgaagcgggctcgtctcatcatcgagaccagtaagcggcatggcggctaatctcaagtgggctcctgttctagccctcgtcgtcgtcgttgctgccatggttggcaccacgagcgccggcaacatcgcattgtactgttgccagaacgggttgagggcancctnncngacncctgcaactccaaactctacccctacntcaacatcncnttcctcacaaccttcnncaacccacanaccccantcctcaacctcnccnnacactncnaccccnnctc

SEQ ID NO: 115531 - DNA, 465 bp, Zea mays
  Clone ID: MRT4577_36848C.1
atggggggtgcttgccttacgttgcaagtgatggcaacttcttcgatcgtcgtggcctccctgcctgttgacacaatggtcgaccctcctatggcgggagtgccgacctctccaacagctcaagagttggttggcgcgactgtcctcgaggtggtcctccttgatgctcctgccgtagcatccaacctagagagagtctcgttgccggggttgacggctcagggtggaggtgacgttcatcaccctgtcaccgacatcctagggcatcttgcccctgagtgctgtggtggcggtcggtcaattcgggttggcgtcatcgtccatggaggttattgggtcccaggtgtgtcctccaccgaccgtcgtcgcttcaacttctgcgagggttgtgtcgtatgttgtgcacgaggggagtcgcgagggccttccactgcccctcgaaggcttggaggcaagggagactaa

SEQ ID NO: 115532 - DNA, 204 bp, Zea mays
  Clone ID: MRT4577_36849C.1
gggtagctgaggtgcttgtcgagggtctccacagggccttaaccggtgacctatgcctggatgaaaaacgcgaacatggagaacatgggcagacgggcgatcttgatctgcttcaccttgcggatggcggcctggtcgaggacgatgaccacggccacggggtggaagggcccaccgaggtgcactttgtcctcatggtccagt

SEQ ID NO: 115533 - DNA, 562 bp, Zea mays
  unsure (1)..(562): unsure at all n locations
  Clone ID: MRT4577_3684C.1
atgtttctccaaacagataggaaagttaaaatttgtatttgttttggcaaattctgtttggaatgtgtaactgatagatcatataattcagtatcattgttgaaagcaccgatcgttcctatatttgtggatgctctagtagctcaatatcattgtgcttttggtactgaactactgatataatgacactatttcctgaacatctcttttgatccatcgcacatgcagttctatgtgtaatcattttggtccatagtttcttctttttttttaaaaaaaaagggccaaactaggaggaactaggtggctttctgttaagaaactaggcacccaaaattgcctcatcgagacttgaaccaactgaactaggtttagattcttttttggtctatagtttccttaagttacttcattagctttccatgcttccagccaaacatgatgtttttaccggtcttttatattcttgnttttacaaatttgaacatctcttgtaacagaatatagatttgagaaagttaccctttccaatgtgcgcagcttctgttctcggtttgttgag

SEQ ID NO: 115534 - DNA, 191 bp, Zea mays
  Clone ID: MRT4577_36850C.1
ctgcggatgcgatggctgggaagggagggaaatgcttgctcgccgcgatgactactgcggtcaagtccgccgagaatgacaatgggaagaaggccccaatctcacgctcgtcacgcgctgggctccagttccttgttggaggtatccaccggtcagctgatgcagaggactcaggcaaatggtcttgttgg

SEQ ID NO: 115535 - DNA, 500 bp, Zea mays
  Clone ID: MRT4577_36851C.1
gtcgcttgggggaaggcacctacaagaatactgaagatgcacccagtggaccatcccacccgttcctacggttgcacgatgctagggatgactggccagacatccaagctctttccgaagatgctggggctctgctgccttacaacactctctgaggtgccagggaccggatcattacttgtagaaataatttactacatgtgagaccagaagggtagccattcacaatattcgccaaggttgaagccgtctgtccaagcaaaaggagagttacaagccatttaaaaatgttgtggataactgatacatgacttatgcaatcactctagcttccaacattatggcccaatgcaccgagatattgcatggagaattgatacacgtaccctttgagactaatttcaataaacaactttttaaacccctcccttttttataattgctaccaaattttgcaccggcatttggtttaccgggaggggtccgagtataatgtgcac

SEQ ID NO: 115536 - DNA, 608 bp, Zea mays
  Clone ID: MRT4577_36852C.1
ccggccgggacatctttctcgaccttttggttaagataagtgtaatgtttattcttattagtttaatatctgttatgtggactatatgttcatattaatattaaatttatttatgggtatttttgtggggatgtccacttactaggcccttgtgtgttgctcaaatgttgtaccgttgatcaggcttgggccaaaggcatgtgcagacagatcgcccgaacagggcccataaaattatggggccccacaaaattttttctctagtagactatctagtatatatccgcctgctggttgcgttcaagcttgtgacaactaacaacgtgactgtgtgaccctcactccctcccaaatcctgtcgttcccaattcgctctggtcccctgctgggctgctcctcctaattctcaatcacaattctcctgacatcaagcctgcaagatcgccgggcggctgctgcttgtcggcccctgtccaagtgcccctacgacctaatttgcactacacagcaccaaaaagtacaacactaagacactcatcaaggcgagagaagcaggtttttctggcccggccctgctggtgatgatctgatctacctcaacaaataat

SEQ ID NO: 115537 - DNA, 436 bp, Zea mays
  Clone ID: MRT4577_36853C.1
accgagcggccgcttattctttatgggttaaattattctggaaacaaggacctacaggcaggccccaaccggaaaaggaaaaaggccccttccccgaaaaggaaaaaggcagctgcttaaggcttaaggccgaccggggaggttccccttgattttggccaaaaaaccctttttttcgggagggccttaaaggggcggcgccccaaacggggggggggggggtcccccaaaaccaccccccccaccggttgccccgggggggggctaaagctggcccaaacccttggggccccccgggaacttttccttgaacttttccaccaaacccttttttttgggggggcccccgggcgtgggcccaaccacgaaccctgtcccccccaacccaccgggggccggcccctggccctggccttccctggggccccccggcatt

SEQ ID NO: 115538 - DNA, 310 bp, Zea mays
  unsure (1)..(310): unsure at all n locations
  Clone ID: MRT4577_36854C.1
aacggcagcaccatttgttaccatggtgggggttaccgcggatttacaataaaggctgangggggtaacagcatccattgatccgcagtccatgctgtttgatgcatgggtctgttgaagccgaggatgaacacagcactaacaactgacacagagcgaccttgcaatcaaaaacacagatgggcaacatcatacacgacacgaacgaagataaaccctgtggactagggcacacaacacggtagtgaacaggataacttggccgggcgggccccaccgtttaggttctccagttaccatttggagttgc

SEQ ID NO: 115539 - DNA, 809 bp, Zea mays
  Clone ID: MRT4577_36855C.1
aaacagttcccctctttctcagctccgaccgccgctgctccctgccggcctgtccgcattcggtcctgtagtgcatggtataactgaggttgacagcttgacgtggaccgagtcctggtctaactagtccgtcacagcttctcgtggaccgagtccacagcacaccggccgccatggatcgcgaggcgctccgcatgctgtactcgccgcagttctggcggatggcactcttctgggccctctccctcctccactcctacctcctcgtgttcctctgcggccgggcggacgcccctcgccgccgccggccgcggccagccgaaggactctgcctcatctgcgtcgtcaccggggcgacatcggggctgggcagggcggcggcggcggcgctcgcgcgggagggctaccacgtcgtgcttgctggacgttccacacagttattatatgagacagttcaagaaattcagaggcaacagccagatgctcatctcaaagagttccaggtcgacttggcatccttcaagtcgattaagaaatttggaagttcactgaagcaatgggttcatgagaaaaatgtggagccttctattcagcttttggtaaataatgctggaatattagcgaagtcgcatcgaattactgaagatggccttgatgagatgatacagacaaactacattggtccatttatgctgaccaacattcttttaccattgctgaagaacagttcggtaccttctcgagtggttaatctaacttctttcacacacaggtgtgtgtcaggtcctgatgtatgtgaggatgcgctg

SEQ ID NO: 115540 - DNA, 673 bp, Zea mays
  Clone ID: MRT4577_36856C.1
attgggtacctcgaggccggccgggaaaaaaatattcccaccgccgccaaaccagtgcccctctttctcagctccggccgccgctgctccctgcccgcattcggtcctgcagtgcatggtataactgaggttgacagcttgatgtggaccgagtcctggtccaagtaagccctgagaacatcctacccgcccgtcacagcttctcgtggaccgagtccacagcacaccgaccgccatggatcgcgaggcgctccgcatgctgtgctcgccgcagttctggcggatggcagtcctctgggccctctccctcctccactcctacctcctcgtgttccactgcggccgggcggatgcccctcgccgccgccggccgcggccagccgaaggacgttgccccatctgcgttgtcaccggggcgacatcggggctgggcagggcggcggcggcggcgctcgcgcgggagggctaccacgtcgtgcttgctggacgttccacacagttattatatgaggtattgtatatagatcttttactatatttggttgtgttaccgtttactcttgtcatcattgtcacaccctatgaagcagacagtttaagaaattcagaggcaacagccagatgccccatctcaaagaagtttcagtcggacttggcatccttcaagtcaatt

SEQ ID NO: 115541 - DNA, 639 bp, Zea mays
  unsure (1)..(639): unsure at all n locations
  Clone ID: MRT4577_36857C.1
cccgggcctgcaggacattcggcaccgacgccacccatcttcgctttcgcccgcacttccggggtttcctccgcgcccggtacttgccctccgcctctcacttctctctctctcctcttgccacgaaaagcgcaaactctaaccttcgcttcaaagttttaaccgttgtttcttggagaaggactccactttcctctctggttgagttgtgtgccggtcgttttcttagtacttatttacttagtaggacttgtttgccctgtgcttcgataggcatgaagcttaaggtcttgtgcttgaagggttggtttccttttgtgaccccccattgaatgagttttagagcaaaacttcgcaaattgtagcagttgctgtgacttgtgagttttccgtggaaatttggtaaacttatgtctctgtataatattagtatgcttatcttctctacagttagaaaaaccaagctcatgctgtgatttgcaatattcatcattccttgtcaatttctgccttccaaatcaaggaagtttggttttctaatagcacctaagcaattgtcttagccgtaaggtagacacgaccttttttttgcgtatctgtttgacngtctctacgttttctaacttatatcatgagctc

SEQ ID NO: 115542 - DNA, 479 bp, Zea mays
  Clone ID: MRT4577_36858C.1
ttttttttttttttttttttttttttttttttttttttttttttttttttttttttttttttttttttttttttttttttttttttttttttttttggaccaaggggcccgatggatttgttttttaaaacgggaccccaatttggggccggggaacatttaacaggaaaacaggggcaaaataaccccacttaaaaaaggggggagttaaagactttggctccaaaaggaaatccgaaaaaaagcactggtcattttggcccagggaaaaaaaaattcaaatggatccccttgttttttgacgggtgctttaaaaattttttttgccgaataaaaaaaaatttttggaggggaaaaaggcattccactttccttaaaaaacccctttcctggggctaaatgggggcgctccaaccgaacaaaacgggaactttcagggcaacctgggggggaagataaaaaaattccacttggtatac

SEQ ID NO: 115543 - DNA, 420 bp, Zea mays
  Clone ID: MRT4577_36859C.1
ttttccacgcgtgggttggctgcttatggcgctgatcatgctatcagagctggagcggtagacgatgacctgaagggcaaagcattgagctcgtctacatacttgaagctgtgcggttgcttaaagggtcctatgatgccaatataaggctcaacccatcctgagcttagaaaatgctgtgtgcatttgctcttttaccttactatccattgttgtcaacatcttgcatgaatctggataggtccatgtgaccaacgagcactcaccaaagaaggcattgtaatgcataaaaggataaaatgggatgcacgtgaattatggtgttgtaatacaaaaaatggaacttagacgagcaactaagagctacatccatgcgactattctctaagcaaggataccagaagtacttgggctaactgt

SEQ ID NO: 115544 - DNA, 691 bp, Zea mays
  Clone ID: MRT4577_3685C.1
cggccgtccgcgcggacgtcatacatggtcgatatctatcgtcgagtcccttcgcgttcgtcgaagctcgctggctcgactctgctagtttgcgtccaactcgccgatcacatcttggtcggtcacatcttggccggccgccaatttcctattcgccatggtacaacaccgctgctaaatccggtctccaacccgccatggcgttcatcgtccttttgccccagttcgacccattcgcgcgtgcgctcttcattcattgggtttcgcgcgtgctcgcgtttgccgtcaagtcgtcgaacccatcattccttgatcgaccccacctcaccagctcgctccaaaaacgatctcgtcgtcgatccgtgcgtcatcaaggaatcccaaggatcggatgaagataaagctaacagcgtaatattccccaagtatttgattcaggagctgcatcagaatccttgccgagttcgcggatagcgcgtcagatttagaatgatacgataattaatcgtgtgatgcggaagacgagccaagtcgaccccaagcgcggactaatccgcgtggtggtgcagatgaacaaacatgaagaggggcagactgagcaagtatcggaacaaaggctgatcgtcaggtggacgtcgtctaaaaacactaacgtagtgtttcttccaggtttagttttgtgctgctgatg

SEQ ID NO: 115545 - DNA, 666 bp, Zea mays
  Clone ID: MRT4577_36860C.1
gccggccgcgctgcagaaaggcataagatattaccaactgttacgcacacaccctccgacagcgacatttctcactccatctcacactatagtatctgcctgatccagcaccccaaacctacgtgcaaatacctcgcccatcaaaaccatcaactctctgctcgccgtggccctgctgctgatgctgctactcctcccccgcccacgccgtgcacgtccgcgagcaccactcgcagcacggcaactcctactacaacgaactcatggacaaaacccaacatgacctcctacatgcccccaccagtctaaaaatcgacatcaactctccaaacagctcttctacactccccctctgcatgcctaccatcgccaaactcaaccttctcggactgactgtgatcaccatcaggatgcatggaatacaccataaccacctcacactgccgactcacacttgccacctcgtacttcatctactacgtgacgctaaatgcatcgcctctgccgtaggtccagattgttccttagagatgttctgctctaaccgatctataaagccctactccatttccagggagttaagacctgcttaataaatccacactactagctgatgcttgtgctaaacaactaatgatacctggactgcccttcactcttttgttt

SEQ ID NO: 115546 - DNA, 214 bp, Zea mays
  Clone ID: MRT4577_36861C.1
cccgggccgactcaaacgtcaactgctctctccctccgcatctctgctctgctctcggagcgttaccgctccagctccccctcgctccgttcccttacgctcagttcgctgggaacaccaccgccttcttcaagatcggcgggcgggcactcgccggcgatcacatcgatcgtcaccataaccctccgggtgcggggggctccccgtccgcccg

SEQ ID NO: 115547 - DNA, 446 bp, Zea mays
  Clone ID: MRT4577_36862C.1
agaaatataaacacctatggtacgcctccggcaagcctctggcaatgtgttgcctctgtgtgctcttcctgctcttctcctgatcctcaggcaatcggaaaggggtcgggaaggggaggagaacgagacgcaccacgaccaccaccatgaccaccgtctagggggagtctatcgtaacccaagaccagtgaaacacgcgcgaaagagccggtgaccaaccggagttcgaggagacgctgccgatgggctgtcggtgccgcgtgcgtgccgtgcgactcctttcccaggtcttcgccagctcaccggccgctgatccgccgctgctgcggcgagtacgtcgtgactaactcgcggccgatcgacgccggatccaacccggggttgacgtacgcttgcgatacggctgtgaccatgacttccggatgaccgccggaggactgctccag

SEQ ID NO: 115548 - DNA, 295 bp, Zea mays
  Clone ID: MRT4577_36863C.1
ttgcattgaggtcatgtgagcggccgaatgttttcatgaaattgcgacgtgctgagtaccgggtgttatgccaactgacatcgtggggtaatatgttaagccataagactggaatgacatgataagtgatccaaaaactggaatcatagatgtgcgtaacatgtatgacatactcataggatagcttaatgaaagctgtcgatccacgtacaaactcattcatagagattactacttgggttgaccatcaatttcaattggtgtaatcatgcaccctacggtcatggcgagatga

SEQ ID NO: 115549 - DNA, 231 bp, Zea mays
  Clone ID: MRT4577_36864C.1
cccaggcgcagccgcacggcagggctccggtttctgctcggcgctcgcccgggggtggtgctgcgtcgcctcccccgtcgcgacaccggccgatctctctagcgcacggcggccggtgaagaggaggagggggggacgatctcattcatcggaccggcgtgcctgtgtcggcctgctgctgcggttttttctttactctttgtttttgggggcggcgtttgcttgtccatt

SEQ ID NO: 115550 - DNA, 2058 bp, Zea mays
  Clone ID: MRT4577_36865C.1
ccggccggaagtcgcagaaggtaacgtcacccgttacgagagtgagtgcccgcggccggcagccgccgccgccgtgcctgtgcgtgcggttgcgctcggccattgagaaagcgaagggcgaacgaaggcgcggggcagctccgcaggccgcagctgagggggaggggatccgcgacgtggacatgctgctcgggcctcggtggtcactcgaactggatcgctgtgtccacctctgatctcttcatcctcgggtcgggactcctctgtctccttgccctgtccccaaacaacctctgaataaagggaggcgggcagaggcacaggaaggcactcacttctccaggagcccggagtcggcagcaagagagaatggccgccgacgccgccgccgccgccacccttcgtactgctctctcccaagcaacagggcaagagcagagagcttcactgctgtgcacaccgaagcaccgagttgctgccagcaggagaagcttgagattcaccactagggccagctcgaatgcgggcgccagtgtgagcatcccgaagcaatggtacaacctcatcgccgacctgccggtgaagccaccgccaccgctgcacccgcagacacaccagcctctgaatcccagcgacctctcccctctgttccccgacgagctgatcaggcaggaggtcaccgacgagcggttcgtcgacatacccgaggaggtcatcgacgtgtacaagctctggcgcccgacgccccctgatcagggccaggaggctggagaagctgctcggcacgccggcgaagatctactacaagtacgagggaaccagcccggcggggtcgcacaagcccaacaccgccgtgccgcaggcgtggtacaacgccgcggcgggggtgaagaacgtggtcaccgagaccggcgccggccagtggggcagcgcgctgtccttcgccagcagcctcttcggcctcaactgcgaggtatggcaggtgcgcgcgtcgttcgaccagaagccgtaccggaggctgatgatggagacgtggggcgccaaggtgcacccgtcgccgtcgacggcgacggaggccggcaagaggatcctggaggcggacccgtccagcccgggcagcctcgggatcgccatctccgaggcggtggaggtggcggccaccagcgccgacaccaagtactgcctgggcagcgtgctcaaccacgtcctgctccaccagaccgtcatcggggaggagtgcctggagcagctggcggcgctcggcgagacgcccgacgtcgtcatcggctgcaccggcggcgggtccaacttcggcgggctcgcgttcccgttcttgcgcgagaagctgcgcggcaggatgagccccgcgttcagggccgtggagcccgccgcgtgccccacgctcaccaagggcgtctacgcgtacgacttcggcgacacggccgggctcacgccgctgatgaagatgcacaccctcggccacggcttcgtccccgacccgatccatgcaggtgggcttcggtaccatggaatggcacctctgatctcgcacgtgtacgagctgggcttcatggatgccgttgctatacagcagactgaatgcttccaatctgccttgcaattcgccaggacggagggcatcatcccggcgccggagccgacgcacgcaatcgcggcggcgatcagggaggcgctggagtgcaagcggaccggggaggagaaggtcatcctgatggccatgtgcgggcacggacatttcgacctcgccgcgtacgagaagtacctgaggggagacatggtcgatctctcgcacccggcggagaagctggaggcctccctcgctgccgtgcccaaagtctgacggcgttggagccaacagcacatgcgactggaatgggacgaataatccattgatatcaggttcatgaatcttgtggtgatccatcgcccatcggcagtgggatacttgtgttccttatgaaatgaatgaataaaatttcaataaaagcatttattttatcaaaaaaaaaaaaaaaaaaaaaaaaaaaaaaagcgcgg

SEQ ID NO: 115551 - DNA, 595 bp, Zea mays
  Clone ID: MRT4577_36866C.1
actttgctttctttctcccccctccctctccagatccggtgggcggtcgccgccgccggcaagatgcggaagcgcgacctcggcgtcctcctcctcgccgccttcgccgtcttcttctccctccagcacgagggcgacttctcgttccgggaggcgtggtaccacctgtcggacgacgggttccccatcaagcacgacgcggaccgcctcccgccgccgctcgtcgccgacctcaacggcgacggccgccgcgaggtgctcctccccacccacgacgccaagatccaggtcctccagctccccacccaccccaggctcgccaccaccaccctcgacggcttccacgaggcgcgcgtcatggccgagatctccctgctcccggccaacgtgcgcgtcgccgccggccgccgccccgtcgccatggacgtcggcggcgtcgaccgatcttataagcacggcgagggcggcgagcactgtgctcgcgctcgtagcctacgcatgggaagggatgcgctaacacctgcgactcctgaaagtctaggctcctcgacaccttcagcttctgctccctcgcgatgcaagaacggaaggacct

SEQ ID NO: 115552 - DNA, 675 bp, Zea mays
  unsure (1)..(675): unsure at all n locations
  Clone ID: MRT4577_36867C.1
cctcgaggccggccggngatcacctttctagctgcacctacctatgctgccagagatctcgtgcaagagaatgataaaggagtacgtgttgacgaaactgaggataccatgcatgatcacaatacaagcataccatcagtgcttcctctcctgcaagaagtgactgaaaagtctcggaacacctctgccccattgcatgttccacccccctcgatgagaattcatatatggctcataagtactacctaccatcagagaccttccagtaaacggagtcatctatcgtggctttacatcaatccgctgctactgttgattctggcagccggtacgacatgctactcgccacaatagaacactatgacacctgcaacaagactagcacgagcatattcactcaccgccttagactgtcagcatcgtgaaaagagtgctcggaattgcaggccatgactgcatgcttgctctgcaaccacgacgttgcaatgtgatcattgtattaccacacggaacatagacccccacttgtattcaaatctacagaagaaccatcattatttgatgccccttaatgacaagaactgattgatgacatccatgagcaaatgctcatgaaagctcctacggtcctccagaccctacccaatgtgccgaattacgacactaacatattac

SEQ ID NO: 115553 - DNA, 1111 bp, Zea mays
  Clone ID: MRT4577_36868C.1
aattcggcacgagggccagccgccaatgccccaatcccgtaatcgcagcctcgccccgctcgcatcttcctctccctctcagcactggtgctcaatctacaggttgtcccgctccctacacacccgccctccggtgtgaacctccatgacgtccacaaccactctccggtatgaatcccgcgtgcgcttacacgaagattggtaatagtggcgacccagtcgcagccgtggaccttctcctcctcatcgcttgctcgttgtcgtcttttgcctacgtctgcacccgacgctgctacccttcgctcacctgttcatcatcctttcagatctgctgtcgtgacctcatccagccgtgctgtggcagtggatcgaagttcgctccagctctgattgggggaaaatgactagggtatcaagtggaaaaacataatggtccaggttctactgcggcacctctttcaggctaagcatctaaacaacaatatgtaaattatcctttcgtcttaaaatacatgctttaaatcgtgcaaatgatcttcctgaaggactactatattcctagatgaggtggattcttttgctattgctcgagacagtgaaattcatgaagctacacgaagaatcttgtcagtaattctgcgacagatcgatgggtttgagcaggatagacgggtggtagtcattgctgcaacaaatagaaaggaggaccttgatccagctctcatcaaccgttttgattcaatcatctgttttggcttaccagatcagcaaactcgtgtggaaatagctgcacagtatgccaagcatttgactagatcagaattggttcaattttcattggccactcaagagatgtcaggaagagatatcagggatgtgtgccaacaagctgaaagacactgggcgtcaaagttaataagggggcaggttccaaaagatgagaagggggagccgagtcttcctccaattgacgaatacctttcctgtgctgaacagagacgtaagtccttgcctggtagaacgagcccagacatccaggtcccctgcccttaagttagcatgaggaacgcacctaccagcttacccttacatgtttatatatcacatatag

SEQ ID NO: 115554 - DNA, 255 bp, Zea mays
  Clone ID: MRT4577_36869C.1
aacaagtaaagcaaatatgcatcaagtatgacattccatatcgcatttattatggttagaaagaaacgggaaaagggtctcgcaggggggttaaagtttatgcactaatgactagttaaattatgcactctagtttcaataggttcctaacaaaagaattctgttatatgcactagtgggaacctaatcattttaagttgatcaacatcgcacgagataaacaattaactacatgaatcaattagcataacggaa

SEQ ID NO: 115555 - DNA, 337 bp, Zea mays
  Clone ID: MRT4577_3686C.1
gcgtgacggtccgggccaaggacgaaggcgaggacgtgaagccggcgcccaagcatcgccgccgtggcgccagcggcggcggagagcgcaaggaatccgagcggtcactcgccaaggtcatggggcagacggaggagcagttggtgccggaggcaggcccggcctcgggccccgcccccagctcctccaagcaaggggacgccgacacgccggccggcctcgacgccgacctggaggcgctcctgcagccgcacggggcgttgctcggccgccgagccggccggcagtggaggcccgcgctgcaaagcatcgccgaaggcaaagggtaaaggggggc

SEQ ID NO: 115556 - DNA, 369 bp, Zea mays
  Clone ID: MRT4577_36870C.1
aggggcagggctgacattacattcattacgcgctggcaaaacatgcctttggggaaaaaaagtacagttcttcacataccaactggggactcacttctttttactagggggggcgggccatatttcactcactccataacatagggcaaattaaacgggggggacccccgcggaacaaggacaacaattcacaaacacaagtttttttatagggatgactagctataaaaaagcatgcgggcgttttagataaccacaagggccagcaaacatgggcttttcactggccatccattttgcccgatctagcggggggtgctcctgggctcgtcgctgtaaagccagtcctaaaccgggggggagttgggc

SEQ ID NO: 115557 - DNA, 306 bp, Zea mays
  Clone ID: MRT4577_36871C.1
acgcgtccgaagccacctacgagcataccctcacatccgctctggtgaggacgagcggccgcatgaaggtgacgcccgggtccgcaccaccgcagatgcgcaggaaaccgtagtgctccgcgtggacaaagccgccgggttaccacggtcatggggcatcaacatcgagaaatcggacgtgtccgctatacacctgacgctcaggccgtcccacaaggcgatcatgttcgacacggccactactgggccgtcgctgacgccgctgcccaatgtgaactgtcgcctcgatctccgaaacaagcatgt

SEQ ID NO: 115558 - DNA, 918 bp, Zea mays
  unsure (1)..(918): unsure at all n locations
  Clone ID: MRT4577_36872C.1
ttttttttttttttttttgagagagagagagagagactttatacaagatgcaatactagtgagtactaggcaaccatgacattacagagaacatgccagcagcttcatcaacatccaataagaatgggaatgggaatgggacatgtcaaataaactgaagctcagctgtcagacactgtctcttcggatgacgcgccggtgtcgcttggtactggggcgcctgcagcccccccgttgagatcgccggacaggaacagcctcctgctgaacgacccccagtccgcactcctccttatcgcgcgcttcagggtagcatcagggaggaggacatggggcttcacgtcgtcgtccctcggtggatctgccgttggcggtggcaccaccatgatgctcggccacatctcagggcccattcggccgccgggttgctggggcaccctgtccgatggtggctcctggaaccaagccgacttgttctcgtagtagtacgacttggacgcccttctgcgcctgccgccacttcttccatacgatgaagaagccccagggaagccgcccacgcccaggcttgttggtaaatgatgctggtggcctctctctggagcacggccactgcgaaggtagacgtcgcccaatgaaaggtccgtctgggccccgagaaatgaagacttggagcatccagagcacgaagctctaccaaggtaatattcgcccaatgaaaggtccgtttgggcttgggccccgacagatgcagactttgagcatccagagcacgaacctctaccaagataaccaacagcttgcgcaggacccacaagtttcttctgctccttgtcccattgcttagcaaggtcctcgggcatccttgagattgaaaaccgcagccgactgtccctcagcattgcatcncagttattc

SEQ ID NO: 115559 - DNA, 1083 bp, Zea mays
  Clone ID: MRT4577_36873C.1
catcgcctcatcttcctcttctcgcacctgcgaagtccccccgctttctatccccccgcctggccgcctctaagacaacagagacagcaatggccgtgcgcgccatcgatacgccgctcctcctgtgcaccatggtggtggtgctgaccggcctcgtgtccccgtccaccgccgggctcagcctggacacggtgagggacttcctgacgcgggaggaggacaccattgtgttcagcctcatcgagagggccaagtacccgctcaaccggccggcctacgaccccctccactccgccgccggccgccgcctcaacgcctctttcgtcgagctcttcatccgcgagtccgaggccgttcagtccaaggccggaaggtaccaaagcctacaggagattccattcttcgcttacagagttccttccgctctggcgcctccatacaacttcacaagcgatctgtatcccgctgccgcgtcagtcaacgttaacgacgccatatggagcatgtacttcgacgagctgctccctcggctggctaagaatggcgatgatggcaactacgccgtagctgctgatgcagatcttgcgtgtcttcaggtgctttcaaggaggatcaactacggcaggtacgtagctgaagtgaagttcagaggagaccagcagacctataccagcttaatccaggcgaaggacagagacgctctggtgaagctactgacgtctgaagcccaagaggacgtggtgaagagaagggtagagaagaaggcggccgtgttcgggcaaagcgtaacgttggacggaccagtccaaacggatgccaacagccaggctaactctagcttattcaaagtcgacccttcggtcgtttacgagctgtatggccagcgggtgattccgttgacgaaacaggtggaggtcgagtaccttctccatcgcctcgactgagactgatcactgatcgatcgcgtcaaatgtgtatatatccggctgacggatttgtatacccgtaacgtatttacatacatacatacgcaataagaaatatacaggactgttgtcctcagttttaaaaaaaaaaaaaaaa

SEQ ID NO: 115560 - DNA, 444 bp, Zea mays
  Clone ID: MRT4577_36874C.1
agagtgcacactgaaatccgaaaattctttgaagaagatagaaaaataaaaagcgacaagccacggaccttaataatcgtgatcctttgaggcagcctgcacccagatcccattttggttccacttaacactagcattctttgaattcagccacgaatttaggagaaattgcagcaggataagcagggttcgtacgggtaggcagtaacgtgggtatgggataccttttttgggtggggtaaccagggtgcctatgctatgcctggccggaacattggccaccactgttctcagatgaagagaaaaggggtccacgtgcagtgtgggtctcttgggcgaggagaagagggtcctcgggcgggtctgggtcccacactgtccccgtaaatgaccattcaaggcgggaattccagggcatgcaaacaccggttctttctcttgcgt

SEQ ID NO: 115561 - DNA, 973 bp, Zea mays
  Clone ID: MRT4577_36875C.1
gacagaccatgagtccctcccggccaccatctatttgaacagggagcacccccaccactccccaaacacaccactccaaacaaatccagacattggagattctacctgcgtgctatggaaactggcagatgagcagagtttgaacgtgagcagagccttggaggtgagggcgagcttggctgtggagggtgccggcgttgggcagaggacaggagcgagctcgccacctgggggcaaagaaagggcggccatggagaaaactgggaagcaagggcgcgacggccatgggcgagctgagcttggaggagcagagggaggaagcttgggcgcgacgcagtgagctccggcaaggagaacaaaggagctggacgcgccgagggaaagacgccatggggggctcgcggcagccatttttggagcagagaaaactccagcgcgcacagggaggagctctggagagggagtccgcggctggggaaaggggcatcccggcgagctgcgcgcaggggcaagctcgcgcgcgctagggagagagcagaggaactcggcgagctgcggcagaagagggaggccgaggagcaaggcaggggcgcttggttgagagcagaatatggacaccgatgggatttttatccagggtggccgagtggatgggaacgaggcaacgacggtgagaaaaatcttgagcagagcgtcggctgcgaggataagcacggccaccggcggacagatttttgttcccagcaaccggagcggatgaggacgaccgggtgaaggaagcagaggtgagcgctcgggaagaacagctgtagagatttttttttttattttcttttctcctttttttacagaaaatcatagatatttttgcgtctggatttttagcaatgcacactggatcgatacactattcaactacgcatcccatttcccgaatcttgaaatggaaatccgaggactaacgacttgattt

SEQ ID NO: 115562 - DNA, 277 bp, Zea mays
  Clone ID: MRT4577_36876C.1
ctatgacttcgcatgcacgcgctacgctgtagctaggactcctctacgcatgcggacggcccgcccttttttttttttttttttattcttttctgggctcgtggggtttatttctgaaagcgagtgcctcccaacctcccgtggcaatgtttggaccggcacggttgtcacaagttctggtttgaacgggtcccgttcagatagatgtttatcgggggcggaaatatcatccgaggacgtttgaattccccctgagagcggacacaggcgacctgtg

SEQ ID NO: 115563 - DNA, 285 bp, Zea mays
  Clone ID: MRT4577_36877C.1
tttcctcttacacaccaacagacgcgaccagggagcatataattgcaaaactcaccggaacctactaggaggagtttatggacaaggggctcttgctactacagaatcacaagatgtgacgcgagcttcgctagcagtgcacgctgaccaactattcaagtgcctgctgcactgcacacgacatgacatcccggacgctgcaagatcgcttcatagcggcaatggtccgagggcacggttaggggcactacaggggatgcctctgcagaaccaagttgctagagg

SEQ ID NO: 115564 - DNA, 525 bp, Zea mays
  Clone ID: MRT4577_36878C.1
atctccccagcgcggagccccagcgccgccttctctcggtttcttctccgtcctccgagcgatgccccagccgaatactcgcatcatagatcgttgctcactagggcatgatcgactctgctctggtcttcccctcctgagacatttgactctacaggacacgtgagtatttgtagaagagtgtgaatctagaggctgggcgaaggaacccgctggagatgaacaagactgcctttcaagtacgctctggggacttgaaccgctaccagcctagcgctagatctctatcaccatctgaaattggcctgaggaagattatgaccacctggtactagctgccccggcagtgacgtccgtgttcaccgagatgatgtacggaacgtggctactggctgctccgcaggtgattgagttgtgcagcatccttgggtctatcacgcgggtgttcgtggccactatatccagggatgtccagacaccggagcatgcccacagagctgtatgtcttgatctgcagctgatgat

SEQ ID NO: 115565 - DNA, 497 bp, Zea mays
  Clone ID: MRT4577_36879C.1
gcagtccatacctagagagtcaagatactgacaattctgggtctggctcccttccacattggatttgaccataatctacccatcggaaccgtctgaataagccgcagaaacagagacaaaagtcactaacaagtcttctctaaaaaacctgagcctaaacctaaaaaactcctattacagacaaagcatggaccaaaccagggcaacctgtctgtagcaaatacatggttacccttagatatatctgctgggcgtgtatcccagcatcaaataatgctcctgggcccttctcttatggcaaatggggcatgacgacgagggtctttggaccaggaacctcccttttcttctgtccatctctctatcttggtttctggagaggcggtcgtttctgcctagagttgcactattcccgtgcaccatatacttcctcacgagcacgtcatcaaaacctacactaacaccattgtgctctacacacctctcctgtgacttgc

SEQ ID NO: 115566 - DNA, 636 bp, Zea mays
  Clone ID: MRT4577_3687C.1
cgtgtcgtcgtccccttgcttggaggagctgggggcggggcccgaggccgggcctgcctccggcaccaactgctcctccgtctgccccatgacctggattgatgggaaccggagtgaatgcgcggcttatcaaacgcggtacgtggggggacgtgatcagatcagtggttggagactgcggacggaagtccatgaagaagcgggggggcccggcgtaccttggcgagtgaccgctcggattccttgcgctctccgccgccgctggcgcgacggcggcgatgcttgggcgccggcttcacgtcctcgccttcgtccttggcccggaccgtcacgcggctcagcttcacgtgccgcttcgacgcgaactcccgaagcacctctgcccgaacacacacacacacacacccacagttcactcacgttcgttagttggaccggcagcaaaaagcgacatgagaaaatgaaggcgcaaagagctgttcgagaacgacggtgaaacagtggcattctggtctgaaccagatacggacacgcgaagtgacgggcggcctaacacgaccaagaacgtaagctcgttcggagccagtgccgtgcaggacgcgcgctgcacgcgcactagtaccttcgaagctgacg

SEQ ID NO: 115567 - DNA, 812 bp, Zea mays
  unsure (1)..(812): unsure at all n locations
  Clone ID: MRT4577_36880C.1
cattgggtacctcgaggccggccgggattccttctctcaacactccactgctcccctcctttttccttcaaatcctcccaacaccacccaggccagggagacaaccacccccgccggccgccgcaatggacaagattgagacaacgacgaggaggaggaggaaagggagaagcagcagcagccgccgccgccagggggcacggggaccggcgggcctcgtagccacggccttggccctcctctgcgcctgcgccttctccacgcctgccgccacggctctcaccccggacggcgaggcgttgctggagctcaagctggccttcaacgccaccgtgcatcatcggctcaccagctggcggcgcagcgaccccaacccctgtgtctgggagggcatctcctgctccgtccccgacctcagggtacaatccataaatctcccatacatgcagcttgggggcatcatttcgcccagcatcgggaggctggacaagctgcagagactagctctgcaccagaacagcttgcacggcccaatccccgcagagatcaagaactgcaccgagctcagagcaatttacctgagagccaactacctgcaaggaggtatcccttcggagattggcgatctcgtgcacctcaccatcttggacctgtcaagcaatctgttgaggggaacaataccagcctccatcggaagcctcactcaccttcgcttcctgaaactgtctactaatttctttctccgagagatcccaaatgtcggtgtcctcggagccttcaaagcagntcgttcgttggaaatctggagctct

SEQ ID NO: 115568 - DNA, 617 bp, Zea mays
  Clone ID: MRT4577_36881C.1
ccggccagggacgttccctccccagcggttgccactcgttgatctcttaaaccctaaatcctgctctcgcgccagccgccgcgcccgaccgctatgtctatgccacagcccggtgcctcgagagactgcgcggtcagctgctcgactgcctgccctgcacgatgtgagatgaataagcggacagagaacactcgaccatgcctactcgcatacaagtggaaagaactcgtgaaactgcagttctctctccgctgaataacgttattgtccagcgacagatcgcagctcctcacagattctaatgcggctatgagactgaacttggacatgccatgcctgagctcagacgacgatgcaagtcactagtaataataccgcctactatgtgctgcaaacaagaaagtacttctattgccatcatactactatggagcaatagctttatcatcgtgtccgaattgctctacctgatcctacgagtggctgcagcgcatctgcatgagactgctatctgcctcttgcatcattcgatagcgctgttgtgaccatgtctgacgttacgcactcgtgaaattgactataagactgcaagaatcattgcataggagcttgtttca

SEQ ID NO: 115569 - DNA, 546 bp, Zea mays
  Clone ID: MRT4577_36882C.1
cttcaggcagccacgcgctgtccccgtcgcttgctgatgagccgctgacccaccgtttcttgctcgcaggcgaggcgttgctggagctcaagctggccttcaacgccaccgtgcatcatcggctcaccagctggcggcgcagcgaccccaacccctgtgtctgggagggcatctcctgctccgtccccgacctcagggtacaatccatgtgcgttcctcctcgcctctctctctctgtctctgtgttatttggatcagatgcccccaacccaatgcgtgcttatggctcggctactgacgacgccatctgctttgctctcctttaacactgcccactgccactgcccactgaacccgtaacaataacaaatgcgccatgcgcgcgcgtgcttttcttctgtgcagaaatctcccatacatgcagcttgggggcatcatttcgcccagcatcgggaggctggacaagctgcagagactgtaagatcgaccacctgttcgaacgaaatgttttccctcgctgttttttttgttttgcccacgcgtccg

SEQ ID NO: 115570 - DNA, 451 bp, Zea mays
  Clone ID: MRT4577_36883C.1
agggaagaaaaagaaacttggaacaatactgggggtcaaaacaaaagccctgcctaggggccccccccaccccccgaaaaggcttcagccctttgcccccattttcataattacctcggtccacccataaataggcccaggcaagcccccgggggggcaggcattttggactttggctggcccccccttttcggaagggggggatgctctataaggccctggatgaccatcaggcctggggagagagagcccaaatgttttgagcagttttaaacgggcccccccgataggcccccggttgggaaacttttttttttcaatcccccacaaactattggcccattctttggcaccggccccccctggtttgaaaggggcccccctgttgcaagtccccccgctgaaccactcgccgttttcaaaaggcgagggagccccccttttgtaaaaa

SEQ ID NO: 115571 - DNA, 488 bp, Zea mays
  Clone ID: MRT4577_36884C.1
cccaccccaaacaaccaaagggggttttttggcggggatgggcccgaggggggggggttttccccccacaagaaactaacccaagggccccagggggcggttaagggggaaaccccgggcaaaaccccaataaaagaggcggggaccccgggggatggggcgaacccaaaacccaagggcccctggcgaaggggcccccaaccaaaaaaaagccggggcaaaaaaaaaggccttggaaacccctcccagggggccaaaacgggggtccataccttccaggggggggaaaacaaggggggggtttttttttcggaaaaaaaaccctaagtttttccgcctccggggccaaaaccaaaaaaaccttttccatggcctgaacccgggaaagaagctttggcttcccctttttttaaaacaaaagggtcgccctagccgggagaagttttggacacagggcataaggttaagttaccaaaggaggctttttt

SEQ ID NO: 115572 - DNA, 544 bp, Zea mays
  Clone ID: MRT4577_36885C.1
gttattgctctctctttcattttttgcctcatggtcaaggccttaacttgcagggcacgcaacgtggccagcgcgaccagaaacacagaactggtggggcgggggccgggcaactcagtggaacttggggagaccaaaccggatcacatggggggtagcctatggttcattgaagcgaactctcgagggaaaataggcggcctgacactagtcgaatggaacagcagcagagcagctaaattaagaatttgaaagatccggggcatgaggctgggcgaaaccaacagatctcgggatgctacacctccagtgccctttctgggtagggggagccttccttccagcagaactgacaaggacaaaaatgccccgcatgggtaccactgaagtcctcgggacggaagagagggcagtcgtaatcagaggccatgggatgtaaatattctccgcttccggtagatacttgatcacaattgcctgtacatactctggtaaatggtgccaccaggcaaaaactgtatcggtatcatgtgaaccagggtac

SEQ ID NO: 115573 - DNA, 179 bp, Zea mays
  Clone ID: MRT4577_36886C.1
gggggggggtttatattaaactggtgttgttgacacggggaaaaaaaccggggacaagttgctacacggcgataccaggctcaaagacaacctaaccagacggggggaaaaaacagccccaacaaaacctcagggggtttccgctctagagaagcccatctgcgggggctcagacagga

SEQ ID NO: 115574 - DNA, 673 bp, Zea mays
  Clone ID: MRT4577_36887C.1
atagacctgcaccatcatctaaattctaccggcatacttattctcccacctaaacccctcctcaaccctcactctctcgctccctgtgcgcgcggcacacaccactcttctccttgttagcagagggctagctagctcatcccccacagtccttatgctgaatctagcaccatttgagacgccgcctcttggaaggcaggagagaccaactaataccatcgtcaccgcaacagcggccatcaccaggggaaacgaagaaagctccagcaacacttgcctccagcacggacatctggacctcagccttggcatctccttgtctcatggcggcggcggcggcggcggcagctgcgacgcgtccagctgtggcggaaacaagcaggatagctatggcggtgggcagggcagccgtgacgacaaggacaacaacgtccgtcgcatgaccagctgcatcggcggcaccgccactgccaacgtgattaccgcagggcacagcagccttgctggtgatttgacagcagcaccaggaggaggagggtggtggcggcttggccagccgcgttcatgccgagcccgaccgggttcatgcatccatggagcctcgccgcacggcagcagaaggctgctgccgagcaagaccggacgcctcctgccacttacctgtcaagtgatg

SEQ ID NO: 115575 - DNA, 433 bp, Zea mays
  Clone ID: MRT4577_36888C.1
aagcaattaaaaagcccgggaaacccggggggaaaaaaagaataaaattgggccaccaggtttaagttcgccggcggctgtacacggggggctccaaaggaattaataatttgtttttttaaaaaacaaaaaaaaggttgggggcccgaccggttatcttatttgcaaaacgggtaagggcgtcttttaccctgaaaaagaacttccacctcggttgcccgggaaattaaattccaaacccaccaaaggaaactttaagaaaacatattttttgggccctcggcagcggaaaaaaggctccaccttgattaatcccgaataacctttttgtacaaatgtacaatgacatgccaaagggctgggattacggaacaccttttgatagcctgcccttttgtttttacggtggacccctggcatattgacatggggg

SEQ ID NO: 115576 - DNA, 376 bp, Zea mays
  Clone ID: MRT4577_36889C.1
atgcggacggaatgagcaagaaggaggattgacaccctccagtagggacgagagctggcttgagaccggccacagacacgaccagtataccatactgacgaccgcggcgcgtattgactaacctaccaagaggaaccgtacgtcacacatacaccaggggctcgtacgaaaaggcagcggagcgcacctaccggatgccgggttatgactgcacgctcatagagaagattcccagacagcactgcggcgcgtctattcgtcgctcggctggactgaggtgaggccgttaacgcccaaaggtcccgggccattgaataataagataaacccttgatataagtgttcctaccctttgttattttacagggacagggac

SEQ ID NO: 115577 - DNA, 313 bp, Zea mays
  Clone ID: MRT4577_3688C.1
aattcggtcgaccacgcgtcgccaccgtcgttgttatgcttctggggctggtgcttatcaacctgctacacaacaatctgtgttgggcagtttaatggacacatggacaacataagacgaatttggctctcaagcaactcagatttgattcacaatgagccgattcctagacatcagtggagatgtataagtgcatctttacactctgattgatggacaccctagtggtccaattttggaacggattatcttatatggttttgaccagattctctaattcagcttttcagattgacaagatttagcaaagcgc

SEQ ID NO: 115578 - DNA, 232 bp, Zea mays
  unsure (1)..(232): unsure at all n locations
  Clone ID: MRT4577_36890C.1
ggcacgaggctccagctctccttcccagatcccgcactcctcgctcgcgttctccctccaccgcccccaactcctcgccgtcccaccgncccgaaccacccacacccaccactcacctccatcccccacctctgcactgccgcaattcgcgtcgccgacaacccgccccgctcggcggcggagactaagagcgcgccgagcgcgcggnggnggncgnagccatgctncacaa

SEQ ID NO: 115579 - DNA, 209 bp, Zea mays
  Clone ID: MRT4577_36891C.1
gaatttccgggtcgacccacgcgttcgtccactcgttcgtccacgcgttcggccaacgaggtgtagtaatcagccaatctagcatcagcgcgcggggtctgagagcatagcggctggtctccatggcggtatctgtggcgctgagcagcgggcaccggatgccggcggcggcgctagtcgtttggcggatggataaagcggacatcctt

SEQ ID NO: 115580 - DNA, 387 bp, Zea mays
  Clone ID: MRT4577_36892C.1
gtatgacgggccaactctctaaactaagtcgtagtacttcatggagcatggagcacttgtaccgcatgggaaagcgatctggggatgaggctcatctcatgactacctcctgcaatagcctctctgcaatggtccatctcatagttaaggcgcagcctcgagggcctccggcgttctgcaaagcactctgcacgcgcttacgctttagctgctcattgtcgtgcttcactgagaatgtctgatgaggatgcacccggggagtgtcatacattagcagtcttcttgacacagctgcagagaggcttgcatatgttttcagacggtactgtactgaagggacatgtgacagcagaactaaactacgtcactgacggcggaactgcccaa

SEQ ID NO: 115581 - DNA, 467 bp, Zea mays
  Clone ID: MRT4577_36893C.1
gccggttattgttttccaccacgacgaggtgtgggagctgcccgccggcgccgaggtgctgactctgacggtccagacccacgtctagatgatccgtctgagggaccgcgccatgatcctgcacaggcaccggatgtacagcaaggacatgctgatgagcatcgctgaccggctgctccgggataaccacatactggactgctacgagaacgtggacgaggcgagcttccacgtgcgtctgcgcgtacaaggagctgtggaagaaggtgtgcaggggcttcctcaggggaggctgcagtcgcagcagcaatttcactaaccgctgcacaagaggaaattgggatgtcttacgttgatggttaattcacccttgatttgattgtgctttatagctgaagagttgtacatgaactactattggtccgagcattaataaagagagagggggcaaatggctcgttgttttt

SEQ ID NO: 115582 - DNA, 3730 bp, Zea mays
  Clone ID: MRT4577_36894C.1
cgccgcgggccggggattggcgggtgcttgcgattttcatctcgtttcgccgccttttacttatcccatcttccctcgactgcgctctctctcccccttctctcgcgcggcaactgggccatcgccgccacccctaccaaggtcttcgtcggtcgcttcgccagccgccaggtcttcgtcggcccatcccccggtcttcgtccttcaatcctccggcgacgagcacccaccagaggctgggaactccaaagaggaacagggtccatggctggaggcgcaggaaatggttcgaacgaggcggtgcaggcaaaggggagtgggggtgatggctccgccgccaagccgctgcccccttgctgcgtcaaggcgagatctgcggcgcccgagtctgaggccaagtgccatgccaccgtggtttcgggatggttcaccgagccacgatcacactgcggtaaagccaccaaggttcagtattacaataacccaatgtggccaggagaggcccattccttgaaagtggagaacatattgtaccaagggaaatcaccataccaggaagtcctggtctttgagtcgtcaacctatgggaaagtccttgtgcttgatggtattgttcaattgactgataaggatgaatgtgcgtaccaggaaatgattactcacctcccactctgttcaattccatcccctaaaaaggttttggttattggtggtggtgatggaggtgtacttcgagagatttccagacacagttcagtggagtctattgacatatgtgaaattgatcagctggttattgatatctgcaaggaattcttcccacatttgtctgttggatttgaagatcctcgtgttcaacttcatgttggtgacgctgtggagttcttgagaaatgctcctgaagggacatatgatgctatcattgttgattcatctgacccaatagggcctgctcaggaacttgtggagaagcctttttttgagaccatcgctagagctttgaggcctggtggtgttctttgtaatcaagctgagagtatgtggttgcatacacatttgattcaggacatgctttcaatttgccgtgagactttcaagggttctgtccgctatgcatgggctagtgtcccaacatacccgagtgaactggtggcagcgctggttcatttgccagtcataggatatttcaggctttagctcaactcatgcgaggaaccagtcatagcctgacaaaccattaaatgtttgctcgaaattttgcagtggggtgattgggtttctgttatgcgcccaggatggcccacccccgggctttctgactcctgtaaatccaattgaagaagtggaaggagctactaaagcgggaagggagatcaggttttataattcagaggtcagttttcttcaacgcgcggcaactgggccatcgccgcatacccttttcaggtcttcgtcggtcgcttcgcccctagccagcagttctttatcccaacgcccggtttaacagcttctatgctccggtcccgagtaaccaattcggcacgaggatgattgggttcatcatgacgacttatgatgctctaatctagccacgtccttgccagcagcagcagcagcagcagagataaagttggctggtagttggctgcccacaccgtctggttcccgttcccatgtcagagggccacgtttcccatgctcctcggtttgtgcctgcaatcgcttgctgcttagcctccgtgctgctgctttgatccagaggctgggaactccaaagaggaacagcgtccatggaggctggaggcgcaggaagtggtttgaatggggcggtgcaggcaaaggggactggggctgatgatggctctgccaagcggctgccgccttgctgcgtcaaggccagagccgccgcgccggagtccgaggccaggtgccacgccaccgtcgtttcaggatggttcactgaaccgcgatcgcgctgtggcaaagccagcaaagttcagtattacaataacccgatgtggccaggagaggccaattctttgaaagtggagaagatcttataccaggggaaatcgctataccaagaagtcttagtcttcgagtcgtcgacctatggtaaagtccttgtgcttgatggtattgttcagttgactgacaaggatgaatgtgcataccaggaaatgattactcacctgccactttgctcaattccatcccctaaaaaagttttggttattggtggtggggaggtgttgaggaatggtgtacgttcgggtgttttccatggcatagttcagtgatgtctatattcatgtgttcgacattttgtcgccggagctgtgggtttgtttagaattcctccgaattctacatatgatggtatctttgttgtttcgtcagacccaatagggcctgctcaggaacttgtagagaagcctttttttgatacgattgctagagctttgaggcctggaggcgttctttgtaatcaagctgagagtatgtggttacatacacatttgattcaggatatgctttcaatttgccgtgaaactttcaagggttctgtacgctatgcatggacaagtgtcccaacatacccgagtggggtgattggatttttactatgtgccaaagaaggtccattggtgaactttctgactcctataaatccaattgaaaagctggaaggagctacaaaagctggaagggagatcagattttataactcagagatgcatagggcagcatttgttctcccgacctttgcaaggagagagctagaagcatattgcgtttccactgaaacagagcaagcggaggaaacaccggcggcaccactgaagttgactcttgcatccaggagtgaaattttcgctacatcctagctagaccaggactcgcgatgtaccacaagatatcaagaaaccattccttccttcctggtgccgtacctccagtatcgccattggttcatagtcttactatcacatgctatgagacgcataatgaggcatcatgtcagtaattcagtatccaaacaatgagatgagattggcatgctaagaaaggacgagctgatattacaatgtactcccttcaccatgtcagtaatttattgtccaaacaattagatacattgcgttatatgaaggagtttcttaggtgtatctagtgctcggagaaccgaaacgtagtatctaggttgtacatgttcacccttgtacttctacttattaagtgatgtaataaatgcagagatagtcttgctcaatacaaaaaaaaaagttggatacacacatagccatgtactattattatcacgcacgtaatctaagcatcgaagtcgagtgcgtgcgtgttgggtgggggtacgcgcatcgcggtttgacgcgcgatgtattgataataattcgtgccccgaggtaccaataagcaacgatgagagaagcattccaccttgcatttacactccccttttaggcttattgagcccaatccacatgtgttgaggtggattgagggtgtttaacgaggctttagggcttttgaggtggattggaggtgtttaatgaggctttagggttttttggtttgaaagggattagagtggattaaatttccttttatacaaatttgtgtaggagatttaattcttcttaatccatccctaaccgaataaacccttattggatcagtcagatgatgctatgctatgaaatatatatac

SEQ ID NO: 115583 - DNA, 307 bp, Zea mays
  Clone ID: MRT4577_36895C.1
ctcatgtctactcttacgcgtacgagaacccgggggcgttttaagaaattttgggggggaaatcaagcctgacaaacgtaatgttgtgcgatcgccttcgaggagagcctgtgcctaattaccaaggttgacatgcctctgtatgcactccgtactagaaggaggacactttcatggcttacatttggacatccaaagattcgaggccttgagttatggtcttaatgaagctcacccaggtcatgacggccttggccatgaccgccacaagtactactgcttatgctgaggccatgactggtaagac

SEQ ID NO: 115584 - DNA, 195 bp, Zea mays
  Clone ID: MRT4577_36896C.1
tcgcgcgagcgttcgccctaaatttttcattttagaagcgaggcaaattgcccaggacactgattaaagaaatggggctgttccattccatgactgaatatgtcatgtacataacaccctattgccatacggtaacaaatgatagcaatctgttgcagacatagattattcgatgatgcttttaaagatatgcat

SEQ ID NO: 115585 - DNA, 483 bp, Zea mays
  Clone ID: MRT4577_36897C.1
attgggtacctcgaggccggccgggatggaggcactactcacagacagtcacagacacatccaacgagcacgaccgccagagatcgacggcggcctcagaacacaatgcatcatgtttatggtgctgacgatggtgttggcttatatttgggtggatacgccgaagatctaaggcctgcacaccggatgcgactagcagatatcggaagacacgcccacatcttcgcgtggtctgcctactgttccaacgatatcgacaggagacacactgatggcggcggttcgccgatcttcgccatctatatcagaggtgcattgcaatgccgcaaaaacacgcacagacccgacatggatcaacgatgacgacgtcccgacgtcaccatggatctcttcacccagagtcgtggattagaatatgcatgacacccccgaatcctgacggggggccagacaagccatctgaatgtccgctatgggattacg

SEQ ID NO: 115586 - DNA, 393 bp, Zea mays
  Clone ID: MRT4577_36898C.1
tttttggggtttttttagcgaatgattgttttttccacaaggatgggtgtttttagacagtaaggaaaaaggcatgggaaacaagaaaaaaaaaaatgccggcgtttgatttctaaagggggcctgaacaagattttccaaatatatgcagaaaaaaaaatatttgcgtaaggaataggaggctgttctccaagcgattcacgctccagacaaaggacggaaccaacccccaaaaaaaaagaaactgaactaaagcgggttatccgaactgaatattcccagcccaacaattggcatcttggggcgcggacaaggaccgctcaagcaaatagggggggtaggagggttggtgattggttgcattattacggaaaacgaagtggggaccgggaa

SEQ ID NO: 115587 - DNA, 757 bp, Zea mays
  Clone ID: MRT4577_36899C.1
cctcgaggccggacgggaaggatctaggcattggtttctctctctagcttggacgagtgaattagattcatcatcaagatgtcgtctctgatagcagaagatgtgaagagcagatcagaggtgtaccacggggacgaaatgtgccaagtgaagtccaaggagcttctcaaggaaatcgccctccccaacggccttcttcccctcaaggacatggaggagtgcggctacgacagacaaaccggcttcgtctggctcaaacaaaagaagagttacacccacaagttcgacaagatcggaaagcttgtctcctacgcgcccgaggtaactgctcatgtccaacaaggtaaaattaccaaactcaccggggttaagaccaaggagctcttgctctggatcacgctcagtgatatctatgttgatgaccctcccactggcaaaatcaccttcaagacccctgccggcctatttaggtcttttcctgtctccgctttcgagattcaggaggagcctgaggctaaggacactactaagcgcgtgccggataccgctgagcctgtgcaagtcaaggaactctgattttattctcaaacaaggtcgccgtggtggttagcgtgcaaaatatatttatatatatgtttattaataagtttatttatgttaccttttatgttaagctttcagatattgtgcggctttattgctaattaaccatcatctccttgttctggcttcgaaaaaaaaaaaaaaaaaagcggcc

SEQ ID NO: 115588 - DNA, 350 bp, Zea mays
  Clone ID: MRT4577_3689C.1
ggacgcaagcccacaagttatgttgcaactgcgacagttacaaatccacgaccacatacaacatgaggatgacaaaggacactggggatacaatacataacagactctgggcagactgcactccaacacggcggagcaatcaggaaccgagggacctcacaatggattacacgatacgtttcttaaggtcgcgacggactgaccacacccaaccaacatgactggggctccagatatgaaaaccatggaaagcgctgctacaaccttgtccggtatggtgtcaaacttggtgagcgggataccatcgaccaatctatcagtgggaacagcaaataggactggtatatttc

SEQ ID NO: 115589 - DNA, 296 bp, Zea mays
  Clone ID: MRT4577_368C.1
ctccaccagggaggctactgcggtggcattgtggcctggggtagaggagctgttgcagcggttgcgctacttcaacctgactgtggcaatctgctatgcaaagggcatgccaactaatgaggtgctctactcatctacattattattacatgcctctaaaggtgtatcttcagaagttcacatcgaccgtatttgcttactctagccatacttacccatcatggtccatggggcgtgtatattatcatgccatcttcaaagaatggcatcaatgctacaaaaatgaatgagaaatc

SEQ ID NO: 115590 - DNA, 426 bp, Zea mays
  Clone ID: MRT4577_36900C.1
aaccctccaaggcggtaggccggagcagagcgcgctccaagctgaatcccccccatctcctatcgccgtcgaaagtcgcagccgatgacatacgcgacgctaggagtagcgtcgattgaagaaaagtttattcaacaccggttgggatggtttgggcatgtccaacggagatcctgaggcaccggtgcatagagacatcataagacaggacactaatgtgaagagagaggtagaagttgaccaaacttgacatgagatgagacaatcaaaagggacttgaaagaatggaatatctcaatggaattgtatttggatagaaatgcttggaaaaaaactatccacgaacccgaaccatgatttaaggcttttttcttttaatggttttaaaatcttttcttcctccctttttctttttttcttcctttg

SEQ ID NO: 115591 - DNA, 1450 bp, Zea mays
  Clone ID: MRT4577_36901C.1
acctggactcctccgtcaatccccgctccactgcctctgcttctccgccgcgtcagggtgtaaaactactcgaaccgatcaccgacgcgacgaaccccgaacccgaaccctccaaggcggcaggccggagcagagcgcgctccaagctgaatccccccatctcctatcgccgtcgaaagccgcaggtccattataactttttatgaccttgtctgggatggctgttgctttcaaagcaagtacaagttctgtcacacagcaacattggtcaagtccaacaaaggaccagtgtcaatatggtttcactcatttaagcaggcaaaagtgcagaaaaagagcactgtgtgtgacagctatatcagggaagctagacctagatttcactgatccttcttggaaccaaaagtaccaggaagactggaacaggcgttttagtttgccacacattaatgatatatatgatttggaaccaagaagaactacattctctttgaagaaaaacagaattcccctgggtgatggtgatggctcatcaactgatatgtggaacggttatgtaaataagaatgatagagcccttttgaaggtgataaagtatgcatctcctacttctgctggagctgagtgcattgatcctgattgtagctgggtggaacactgggttcatcgtgcaggtcctcgtaaggagatatattacgaacctgaagaagtaaaggctgccattgttacctgtggagggctctgtcctggtctaaatgatgtcattagacagatagtatttactctggagacttatggggtgaagaatattgtcggaatcccatttggttatcgtggtttttttgagaaaggcttaaaagaaatgccgctctcgcgtgacgtggtggaaaacataaatctttctggaggaagtttcctaggagtctctcgtggaggagctaaaactagtgagattgtagatagtatacaagccagaagaattgacatgctatttgtaattggtggaaatggtagccatgcaggagctaatgctattcatgaggagtgtcgaaagagactgaaagtttcagttagcagttccgatgacctacccgacgctaggagtagcgtctgattgaagaaaagtttattcaacaccggttgggatggtttgggcatgtccaacggagatcctgatgcaccggtgcatagagacatcataagacaggacactaatgtgaagagagaggtagaagttgaccaaacttgacatgagatgagacaatcaaaagggacttgaaagaatggaatatttcaatggaattatatttggatagaagtgctcggaaaaaagctatccacgagcccgaaccatgatttaggccctttttcttttaatgctctcaaatgcttttatacctccctttatctctttttctactattggggaccattttgtttggtttcaact

SEQ ID NO: 115592 - DNA, 682 bp, Zea mays
  Clone ID: MRT4577_36902C.1
ggtacacgcccccaccctcgagttttttttttttttttttttttttttttttttttttttttttttttttttttttttttttttttttttaaaaaaaaaaaaagggggtttttgatcattatgggagggcctttttttgatccccacatatacaaaagccctaacatataaaaacccggcccacccttgaaagccgtttataggcccaaaatttttttttgccccaaaacaaaacgaagagggggaccgaattaaaggactaatcgaccatgaggtaacaggtaccctgcataaagtaaagccaaaccataatcctacagttggaaaaacaagcgagctgagtcaaaaaaacggggctagctcggtggttaaccgaggcctgcctggccccacgggacgtatgaaaaccccgatagggtcaacaagcctggttcccccccccccaaaaaaccccgcaatgcttttgccgttgggccccgaaaagaaaaaacgcgtcccgtttttaatcccccaggggccccaggttttgttggtggggacaaccctgagcgaggtcagcgaaagggccccttaaaaggcgccgtatgttcccgaaacttttttaacatcctcggggtccccaagggcaatcgttcaaacattgccgccaagcccaccccaccgcccaaaagggcccctttgc

SEQ ID NO: 115593 - DNA, 644 bp, Zea mays
  unsure (1)..(644): unsure at all n locations
  Clone ID: MRT4577_36903C.1
agaccacgctaaaactcgcccaaacatccccgccccagcaatggcgacctccttcggtttcggcagctccgcgaccgcgggctccacggcctcctcccccttctcctccaccccatcagccttctccttctcccagccggcgtctgcctcctcccctgcccccgcctttggctcctccctgttcagggcctcgtccgccgccgccgcacccgcctcctctcccgctttcggattcggatccaccttctcgttcggtcagtccatggcggcggcctcatcggccgcgtccgcgccatcccttttcggtgcaacgcccgcatcctccgctggaacaacccttagcttattcggcgctgctacctccgccgcaagcagccctgggttcttcggcgccacctccactgccgcaagcagccccggcctcttcggtgcgtccgccactggctctgcggcaacctccccgagtctgttcggtggcacctcgggcctattcggcgggacttcctccgcagcgaccaccccgagcccattcggngccacctcttccacggcggcgacagttagtccgttcggcgccgcctcttctgctgcgtccactccaagcctcttctctggaggggccacgggatttagctttggctcgt

SEQ ID NO: 115594 - DNA, 292 bp, Zea mays
  Clone ID: MRT4577_36904C.1
gatgtatctgcagtacggtcggaattccgggtctacccttatcgtacatgtcctctgacgctgtgtgtggcttgtggtaggatccagttggagagtgctgttttgaatggtggtacaccttagcgattttttgcatcttgagtatgttccaaagtacattgttttttattgttatgagtgtatggtagtataaatttcttagtgcactttgatttcccatggttatcaaaatctaagagaattgcataactttcccttttattatttgctttgcttgactcaccggttcgtg

SEQ ID NO: 115595 - DNA, 365 bp, Zea mays
  Clone ID: MRT4577_36905C.1
gtagccatgtcgtctgcctcctcccctgcccccgcctttggctcctccctcttctcctcgtcctccgccgccgcttcttctgctccaacttttgggtcctccctgttcagggcctcatcggccgcgtccgcgccatcccttttcggtgcaacgcccgcatcctccgctggaacaacccttagcttattcggcgctgctacctccgccgcaagcagccctgggttcttcggcgccaccttcactgccgcaagcagccccggcctcttcggtgcgtccgccactggctctgcggcaacctccccgagtctgttcggtggcacctcgggcctattcggcgggacttcctccgcagcgaccaccccgag

SEQ ID NO: 115596 - DNA, 430 bp, Zea mays
  Clone ID: MRT4577_36906C.1
gccggccgtcccggaacagaaacctgcgactgcaacgtaggcagagagggtactccccaggtagagctcctccctcttccgtttctcattccctggcatgcgtcaccaccttctgtagctgcgccattgtgcctacagcagagattacgacgaggccgacgggctgtacctggagcaggcataaggctgcatcaccaccactctctcccataaagcggagccagaggactgtctctgccagacaccaaactgcctgctctaggtggcttagaacccccacgttatcatcgcgatgattgcggacgataaaccgctccctcctctgctaccacgacgtccttgcctagctcgagttcaacgagacggcggattcctcattagcgtgcaatattgcacgagtggagctcctgagttatagcatgtcctctcc

SEQ ID NO: 115597 - DNA, 2639 bp, Zea mays
  Clone ID: MRT4577_36907C.1
aattcggaaccaggctaaaatctcgcccaaatcatccccgccccagcaatggcgacctccttcggtttcggcagctccgcgaccgcgggctccacggcctcctcccccttctcctccaccccatcagccttctccttctcccagccggcgtctgcctcctcccctgcccccgcctttggctcctccctcttctcctcatcctccgccgccgcttcttctgctccaacttttgggtcctccctgttcagggcctcgtccgccgccgccgcacccgcctcctctcccgctttcggattcggatccaccttctcgttcggtcagtccatggcggcggcctcatcggccgcgtccgcgccatcccttttcggtgcaacgcccgcatcctccgctggaacaacccttagcttattcggcgctgctacctccgccgcaagcagccctgggttcttcggcgccacctccactgccgcaagcagccccggcctcttcggtgcgtccgccactggctctgcggcaacctccccgagtctgttcggtggcacctcgggcctattcggcgggacttcctccgcagcgaccaccccgagcccattcggggccacctcttccacggcggcgacagttagtccgttcggcgccgcctcttctgctgcgtccactccaagcctcttctctggaggggccacgggatttagctttggctcgtcggcgtccggttccaccactaccacggccgccgccccggcaccatcatttggcttctcgttcaactcggggccggccgcgtcaagcactgcatccacgccgacatcagcaccggctttagggtttggcggcgccactggctcgtcgctgttcgggtccaccacctctgcgcccctcttcagtaccaccaccgcttcttctccagcgtctgctgcgaccaccacgccatcctttgggttctcttcttcgccagcaacaaccgcttccgccccatcgtttggctttacaccatcatcaggaagcgcgacgaccgcgaacacggctccttctttgttttcatcatccgccaccacactaaccacaccggcgtcctcgtcctccactggcttctccttggccacttcgcaggctgcacctgctccctcattgttctctaccagtgcaataggtagctcgtctgtcactacgcctggtttttcctttggttcatcttcggcagcttctacaccaactttagcctctgtgtttgcaactggttcctccactgtgccatcagcggctgcagcttctgcagcatctgggtcgtcgttcccagctgtttctaccagtggttttagttttgcagttgcgccatcatcatcagcagctgcagctactgccactaccaccactgtcacaagtgcttctacatctgcaggcatgacaaccacggctcctttgactggaacaacggggtttccaaattttaatcttcaaacaactaccccagcttctacctcatctcccacactggcatttggtgtttctactactgctgctagctcatcagccaccagcaccacaactcaagcaacttcctcagctgttcaagtcagcagcacaggtccgactactactacatctatcactccagcagcatcccaagcacctaagctaccatcagaaattgttggcaaaaatgttgaggagattattagggactggaacaatgagcttcaagaccgtactgcaaaattcaggaaacatgccaccgcaatagctgaatgggataagagaattctgcaaaacagaaatgttcttattaggcttgaggctgaggtggctaaagttgttgaaacacaaacaggcttggagcgtcaacttgaattgatagaaactcatcaacgagaggtagacaaggctctacagagtatggaggaggaagctgaacgcgtattccaggatgaacgagtgttacttcatgaagatggagctgcttcagcaagagatactatgtatgaacaagcagaagttgtggagcatgaactgcaacatatgacagaacaagtaaaatccatcattcagactatgaatgctactcagggtggtgagctcgagtccgctgatagtatgacaccatttgatgttgctgtccgaatactggataatcaactgcgttccctgatgtggattgatgagaaggttaatgagttctctggcagaatacagaggctgcctaacaacagcgtttcagccgaacgtgactctggaattcccaggttttggttaagctgattaattcgccgcattttcttgcggccctaatcgaggttcagtaaacattcttcgcttggttattctgctgctccaccggccaaggtttcgcgttattttctccccgttcaagcactttggtgccatgtagctctagccggttcactctggattggtaccattcagtgtcacttgtgcacacttcagcatagtttctatttgtttaacgttggacgtgattacggcatgtttggatctatttgtgttaactgttttagaagctaaaattagcactatttacgctattgtgttcaatatggagcacaagtctgcagaactaatctcaactcactttcatcccttaaaaaaaaaaaaaaaggcggccgcaaacaagagagctc

SEQ ID NO: 115598 - DNA, 344 bp, Zea mays
  unsure (1)..(344): unsure at all n locations
  Clone ID: MRT4577_36908C.1
ctagggaaaaaattgaaacttcataaggattcaagccatactggtgcacaagagatttgggtcccacacagaggacacaacagggccattaaaccaacgaagccacaaccacgattcatggcacacaaaccacagatgtttattagaccacgacatccatattgaggttcaccagagggcaccagacgacgcatatacccaggtacagcaggagcttaaatgaaccatgggttactgaccaccggggaggcggagcacccggtgggagagggcctctctctggatgantgaaccccggaagttggcgcccgtacttgagctggttgccggcaaaaattagccgc

SEQ ID NO: 115599 - DNA, 329 bp, Zea mays
  Clone ID: MRT4577_36909C.1
aattccctctcgacactaatcacacctcatactctctaatcttcgctcccttttcttgactgccaacaacttcttagggctgatttatctttaccacatcacattcatcaataattctatcttcaatgactctagttcattctctacatacgctttctctatcagcacaccaccattctactcctaaactactactcgataatcatctcgatcaaatatctatatttactccatcaagcaaatcaccactatgcctctacatctcataatagattatctgcaaaactcctcatgctacttcaacattcgtcctgttaaacatcttagca

SEQ ID NO: 115600 - DNA, 889 bp, Zea mays
  unsure (1)..(889): unsure at all n locations
  Clone ID: MRT4577_3690C.1
aaaaaaaaaccgtcaagcctccatcccgtggatttatatagcctcaccaaatcaatatgtccatattaattaatcaagctaaaccaactactacttcgccttcccaacaacacaaaccaaccaaagcacagctgcgacacccctactacaagcgtgatccaacacccaacccaactacgcgtctaatatctatctctcccacaaacagcaagcacaggcagagatgcccacccacacaagccagtaaatgctgcctagtataagcactctagactccactaataaggccatgcacctcttgggccaacaaaaccaactggggacgaagacgagcccagagcaccagaaacgcaaaaaggccagtcgaactattagccgccactgtgcagtgcaggtgtcacaaccgcaaatggtcagcttagcctctggttctggtgatcgtgatgctccccttgcccccctcggtgtggatcttcgtcttgtggaccacaggcttccccgagatggccgaggcctggagcgagctgggctcctcctcgctcttgtgccggatcttgtacggcgggggcgcgtggagcttctcgtttatgtcgctcagggtgacgtcgccgcggatgctgctcggcttgatgagctcgaaagggaaggccacggatgtccttgccttctttgccccgatgatgctcttgccagctgttggaacagatgaaagcagcgtgtttttttttagttcaatccgnagntgcgttgcatgaccaatattggcagtctatactgttcttcaaaggggngaataaaaaccatatgattccttaagcaagcgcggagggnacacctttcagcggtgtaggctagnctgtgcacgattgttgttgactacgaaagactg

SEQ ID NO: 115601 - DNA, 519 bp, Zea mays
  Clone ID: MRT4577_36910C.1
gacaactggcatactacgttgagaccttgcctactcgactgctatctgtgagtcgaccagtgcatctgatgttatcaggcatatatcgcaccgttcacatcggtggaaaacgctcatacactcgatgtgatggcatccagcatagcatgtgctgctatcaggcttggttagcaacttgctctcgacacgtgctattgttgacccgcatgacaggtgaaacaatgaataatatgctcatgatatccacatcaccagaaaatgcgagaggaagggggatgggcaaagaatgaatctgaggctaaaatcaaccgcacgcctgtgctgaaatgaacaacaagagtgctactacacatggactgataatactggtgcaacataatattattggatcaattggccatgcactactgagacctatgacatatagctccatgtaagagcaagagcagctacagcttgcaatacagagaaataggaagtgacatcactaaggaggaagtctttcacatgatggtggca

SEQ ID NO: 115602 - DNA, 352 bp, Zea mays
  Clone ID: MRT4577_36911C.1
aggcccgcctgctggccggccggaattaatagctgctcggcagctttttttagtggccggcgcctttctactttaggtggtggccacaccccggtctgcaggccgctcgcaggtgtgtttgaccacaataccacaaaccgcccacctgttacggctcataccatttaagatccaacgctgtaagaacccctactggactgcagaagtcagactggactgaacacacaagctgggcgcatattcaggcggaggggggacactgctcgaccgcaagggaaggctatcacttgcctatgttattaacgcaaggcacagcccaaagcacctactagacagggaggtcgaggtctcc

SEQ ID NO: 115603 - DNA, 179 bp, Zea mays
  Clone ID: MRT4577_36912C.1
ataaaaaacaaaaatattggggtacgttatttaaaagggtgttgtaacacacaagtctaattattgctagattaccgatcccccatggcataaaatttcaatatcctttctcattcaaccagcttgcttgttaacctaattaggggttatatttaaatcttatttccaagaaaaaatac

SEQ ID NO: 115604 - DNA, 1264 bp, Zea mays
  Clone ID: MRT4577_36913C.1
tcccgagataaacagacctcggtcctcgttttcactcgcttgacctgttgctgttggccatacctcctctctcgcctccggtcagatcagattagcctccatggccgccgatcgcggcttcaagatctttgcagccgccgatggcttcggccagccactcaaggacgccgtcgtcgcttatctccgcgcccaccccgccgtcgccgaggtcgttgacctcggcgtcgacaagtactacgccgccgccgcagccgtcgcccgacacgtctcctctcccgactcggagcccgacgcccccgaggtccgcggcgtcgtagtctgcggcaccggcgccggcgtctgcatcttcgccaacaagtacccgcgcgtctacgccacccactgcgcttcccccgccgacgccgtcaacacacgctccatcaacgcctgcaacgtcctcgctctctccggaatcgccacgcagcccgacgccgcggccgccatagccgattcctggctcgccacgcccttccgcgccccttgccccgcctccggcgacgcgccctggccggaggacatccaggggttcttcgacaccgcgccagacgagatggccgccatcccggaggcggagggtgccccggactcggtctgcgccatctgctgtctcaggaacgggatggagttcgagccggtggggattatgcccggcggcgagatgcggatcgtgcgggagagccccacctcggcgtacgtccgcttcaaggctggcagtgtggagccagcgcaccatcacacctttggccacgacctggtggtcatcaagggcaagaagaaggtttggaacctcaccaagaaggaaagctacgacctggtggacggagattttctcttcacacctgccggggatgtgcacagggtcaagtactttgaggacacagagttcttcatccgttgggatggccactgggacatctttctcgacgaggatctcgacactgcacgcagtgccattgacgcggagcttgcagctgccagcaagtgagatcatgccatctatgtgcagtgatggcaacgcttctgaaggtgctatgctcacatatcctcatttgggattgtgattgatggtcttgcttccataatgtttgttattcgaactctgtgtatgatcctcatcgtcctgtcttgttattttgtggaattatggttattgacaacgatgatggtacaatttggttactgaatcaagttgcaaaaaaaaaaaaaaaaaaacccgggagcccgg

SEQ ID NO: 115605 - DNA, 728 bp, Zea mays
  Clone ID: MRT4577_36914C.1
ccggccggggctcttttcctgctcttccttctttcgcagatcgcccatcatggaccacgagaaggtcgctcccatcgacgagaaggcgcctcatggcgtctctcagccaactgtctcctcccaggaggagtacactggtgactggcgtgagcaggaggacttcatgacccgcaatggtctcaacctgaagtctttccagcgccgtcccaagggtggagaacttgtcgtgctcgacaaatccatgaagactcgtcaccttcacatgatcgccatcggtggttccatcggtgccggtttcttcgtcggttctggtgcagctcttgcaaagggtggacctgcttctcttctcctggatttctccattatgggtgtgatgatcttcaacgtcgtctacgctcttggtgaactcgctgtcatgtacccggtctctggtggtttctacacctactctactcgctttatcgatccttcctggggtttcgccatgggctggaactacgtctttcagtgggccatcgttctacctctcgagatcaacgtcgctgctatcactctcgaatattggccaggcgcaaggaatgtccatgttgccgtttggatgttgatcttctggctcttcattgtcatcatcaacgtcttcggaaccttgggatacgctgaggaaaaattctggtcttccctgctgaaactttccgcgaccgtcatcttcatgatcatcgcactagtcc

SEQ ID NO: 115606 - DNA, 390 bp, Zea mays
  Clone ID: MRT4577_36915C.1
cagacgcttttgctgacgctttctaaaaaattcaccaattcgataatataccagtcaatggtggaagcgataaagggcacccatgcgctatagatatatatcgatcgatgtggacagccatgcctatagagatctcgtatgccagtgcagcacagctggatgagctcatgttatgtgcattctccggatgcaacaaattgctctgaagtacgaaaaggtaaatccttacgtgcctgttgcttataatcttggtaccgggaataaagtaattgcacctgatccgtgataatctaactaccaaatctgcgtatcaaatgaaaatgttagaactaaatgatcggatcgaataagcgtcttattaacactttctggctgacaaattaaccagat

SEQ ID NO: 115607 - DNA, 795 bp, Zea mays
  Clone ID: MRT4577_36916C.1
cccacgcgtccgctcgggcctcgccgctgccgccgtgtcaacctggcccgctccctccagccggtgggtgaggagcggctgtagccctgcatgaacccccggcaaggacatggacaagccaccgccccaattcgccttctatcacctcatccctgccctcaccttctcatgcctctccatgtgagtccccaaatcaatgagtgtcgttcccagcctgtcccttacacgtctatccctcgacaacatgttcctttgtggcatcctggatgacatgaacaggttcccaccaatcataggaaccacaacactcggttggtggccttctaggagctgttttgtgctttcttcaggatcttcgctactccaagagctgatttgcggatcagacaccacctcccctctctcagtcttagatcatgcgtatgtgcacacccatgtccttcactgtatctgcgcatgtgcacacccatgtcttttacagggcctgcacctgcaattgtgtgtgctttgcactgaaagttttccaatcaagaaaatttgcttacgtgctgatttcagagtttgtgttggaggcttgtcctcgtctggagagctctcgccatcctctagcggcagctgtagctcttttggccctctctgatgcttctccgcggtcagtacacattattagaaacaatcagatttttcacaggacaagagttcatagacatacagtaagtagattgcgtgttttagatgttagtatattacatatgagtaactaaggtgcttcggacaaaatatgtcttttctcgt

SEQ ID NO: 115608 - DNA, 302 bp, Zea mays
  Clone ID: MRT4577_36917C.1
tcgagagagcaccacgccaccccatgctctctctctgatcctgcgcatacgcatgtgcgcccgagccgttcaccgtactccattccaaactctctgcctatccagcactgtattcacgctcgtgctcgcatatcggtctgccgtgcagagcagacaattacatgctaggctgctgcttctgtacaaaaagagcttaatcactcgttctttcggcgcgtcagcagacagcgaaggcagatatgcgcggacttgccctctaatagacacaatcctaccaacacctgcatgctacgcccaaactg

SEQ ID NO: 115609 - DNA, 497 bp, Zea mays
  Clone ID: MRT4577_36918C.1
gttttgcatagccttgtatgttgtcttcttttatactgagggagctcggtggggaagacctaaagtgaagatataaaatatgtccgcataggttcccttgccacaaagaaactccatgttcagttcaagaccaaagtacaaaaagaaatcctcaacctacaatactactactccatttcattccttacaagcggaaaaactcagggagaagctgaggcaggagttcctgcggaaggggacggaactggcgcatggggtggctgacgccctcttcgctgtaccacccaccgaggacctcgacggccctatcgtacacctcccatcgcccgctgtccgactcccgcgcgagaagcatcttggtgctgggacctcactgccaggattagtagctgcaaaggttggggcagatgtaacactaacagacattacgcagaatgcagaagattagtagcttttaccaagtcttttggatcatgtggtggatatattgtcgcatc

SEQ ID NO: 115610 - DNA, 394 bp, Zea mays
  Clone ID: MRT4577_36919C.1
gggaaaaaaaattaaagggggggcccttttatttgggggccaaaaaagggtcaatttttattgggggggcaaaaaaaaccgaaattggaaaaaaaagccccccttagggaaggctaaaaaaacgaaaattactttgggttggaaattaaaccacaatggggggaaaaattgtttccggcccccttagggaaaaaggggtttgaaaagggaatcccagcttttaaaggaccaggggagccttaaatggatttggggaacgagcacggggggggggcgaaaaaaaccccctgtcacaagaagcccggaaaaacggagagtttgggcaaacactggtattgcataaagagcaaaagggggcccaggtttttctttttccaagggggccttttggggg

SEQ ID NO: 115611 - DNA, 443 bp, Zea mays
  Clone ID: MRT4577_3691C.1
ctcctcctgatttcagtgtagttgaaatgcaaaatgtcatgcagcatgaagcttcgggttgaagtcaagttcccctagctggttttgagggtgaattaacatcagctggggacagtgtccaggctgttggagaacatcagcttgttgcatcagaagagtctctagacgaacacaaaagagatgaagtcaaaagaagcatacatgatgcagtaaaatcagatgggggctatgctttggatagcagagaatttcagcttgctgcatcagaagtctctccagaaaacagcatggctgaagtgcaaggagctgcacaagaagaatcgttacctttagatggagttgaggaaaggtcagacaagggtgactttgtttccacagagcaggctcagctctgtgtcacaaatgaatctttggctgcacagctgcaaggtaatgttgaattc

SEQ ID NO: 115612 - DNA, 241 bp, Zea mays
  Clone ID: MRT4577_36920C.1
cggacgcgtgggcggacgcataggattgatgtgtggaataccccatagatggtgcatgatcttaatatacgcttggctctaacgaaaaacaaaaaaaatgggacggacactctatacacttcaaggttacgtacaggttcattcgacgttatatctcttctatcgaccaaccaaaatcgaattcactggtctcccatacacaacgtacctactgctataacattgcagtgccccaacttaa

SEQ ID NO: 115613 - DNA, 143 bp, Zea mays
  Clone ID: MRT4577_36921C.1
ggccattggacctgatgagcgcgcggcggccatctacggcttgaactctagtagctcaccgccaccgattcatattgttcctgcgcgtcaccattgcactgcgggcgagccccccatctcaaatggtaggaggcgctactccc

SEQ ID NO: 115614 - DNA, 408 bp, Zea mays
  Clone ID: MRT4577_36922C.1
aaaaaaaaacccgggggtttaatccccccccccccaccgggggggggggccttggttttaaaccccaggggggctccaggtaaaagaggggtccttacaaaaaaggcggcaccgaatgggggggagggaccccaaccggaccccttttgtcccaatttcgggccccgggggggccaaagggggcccccccccccttcacccaaagggggggggcccgggcccagcccccccagggggggggggggtttttttggggccccccagcccaaaaaagacccacccggggggggggggggccaaaaatttggcccccaaaggggcccaccccttggggccatgggtcaaaccccggttgggggtcccggaccaaaactggggggggccctcaaacgggttgagggttttttt

SEQ ID NO: 115615 - DNA, 108 bp, Zea mays
  Clone ID: MRT4577_36923C.1
cccgctttcactactatagaacttccctgcgtaccgccatcccggcacactccactgctcgagctcaatcatcaccatactctctctcacctactgttcgagagccga

SEQ ID NO: 115616 - DNA, 425 bp, Zea mays
  unsure (1)..(425): unsure at all n locations
  Clone ID: MRT4577_36924C.1
acagcggcgacaagggcagcgcggacgggagccgccaggaccgccngcgccaggaangcacggncgggcccncccaggggaagcnggacacccggcaggagncggagcggcacaccgacgngancgacgccagggggggggggcncggcancgggacgaaccgcgaggggnccgaggacaagcggcaggagcggccgcagncggagcngcgaggcaagcgcccgcagcngcccccggaccnaccccagaccgaggagaacgccgacgncancggcgcgnaccacgaccacgcggagcncccgcccgacagcngcggccccaacaacaacgccanggcgacggcccccncggacgngcncgccgnggagcaccagcagcgcgagngcggagagcgccagccgcngcccgaggggcccangaacaaa

SEQ ID NO: 115617 - DNA, 279 bp, Zea mays
  Clone ID: MRT4577_36925C.1
atgaagggttcattattacactaggtcagttgaaaaaccacaacgagcctggcagtgtggctcccattgaggaaatggccagtgacaaaggatagggagcgccacaacaaatgtggacaacagcacacacccaccctcttaatagaaaatttagaacatagatgcagaacaaacttaacccctccagaaggtccaaatatatagcctttgaacaacgagccattcaccaaactcgaggaaaaaaaaaaaaggagacgtccggcacttgacggcccaaaa

SEQ ID NO: 115618 - DNA, 353 bp, Zea mays
  Clone ID: MRT4577_36926C.1
tcatcctctcctttaccactcatttttcgagctttactgccgaccaattctccccggcgacatgtccgagttaaacaggcgaggcccacctccaaaaaactcccacacatcgaaaggtacccctctaaatacagacgcaacatacatctcttaccggaggccatatggcccgcgcccaacacctattggctcttgcgcacaaacttaatgaggtctttgtccttttgctccttcggttcacgttcttcaaccatcaactacacaacgcctccctttaaccactccagcgccgctacgagacaccctactaagacggccaataaggccacctagattatgagggcttgttccgg

SEQ ID NO: 115619 - DNA, 278 bp, Zea mays
  Clone ID: MRT4577_36927C.1
cgtcccactcctctcaaatttatgctgtcatatttccctccttgatgcaattacatgatagtatcaatgaaggggtgggtggaaaacagaatgcgttatgtctagagaggcacagatgtctggatgaggatccgaatactgtggtttcagagactgatgataatatataggaggaatgtgacatatgcatggatataaatgtcataggtgttctttcaacctgtagtcatgctatgtgcattaaaagctttcttgaattggtgtctaggtcccagtcc

SEQ ID NO: 115620 - DNA, 256 bp, Zea mays
  Clone ID: MRT4577_36928C.1
aattcggcacgaggctcgccgcacacacagacacacgcaaaaacatttctcccccctcccgactgctactgccgctgcctcctccccctttccgcccgccttcgctccctcccaacccccttcctcctccgtctagggtttcccgccgccgcctgatccgagtcagatgccgtccgcagcagccatggcgccgccgttccttcccgcgggtaactgaggggatccggtgtgcccggagctctggcgcgcctgcccc

SEQ ID NO: 115621 - DNA, 194 bp, Zea mays
  Clone ID: MRT4577_36929C.1
aacactcgtgctctaaagcatgatacttatatcattacgtagaccgttcgggtgctggggtcgcttaatatgccgtttgcacttgcagactacccacgaaatgcccacaacagtttggataattagttgaaccgctaatcgcacaatctgatcttaatataaacgcacactctcatatgctcaactacatacag

SEQ ID NO: 115622 - DNA, 506 bp, Zea mays
  Clone ID: MRT4577_3692C.1
ggccaggctaaataaaaaaggcgcgcggcgaggtgatgaggtcactctctaacggcactaacaaatttagggagtatcataagcttccacattgatcaggcccgtatccatgtcgttaactcctgctgacagctctactgcctcgggggcgggggggggcactatagcaccatgcccatttattcctaaggagcagttacacatgattccttcaccacgttgttaagctagacttgctcccgcaagtatgtacccagggccatcttcggcgaccttgttcccactgtcatcgtcataggtttgcactggcttgtaccgtcagctttttctctctgagcaggtcatattggggaaggaggacgcagctaacaactttgcccgtggccacttcacgagatggagaaggacgattgcacgatctatacctgtaccgggtgcgcaagcttgcataccactgcactgtactgcaatgcttcttggtgttcaatgctggtgggggaggtact

SEQ ID NO: 115623 - DNA, 198 bp, Zea mays
  Clone ID: MRT4577_36930C.1
gccacgcgtgcgcccacgcgtccgtccacacgtgcgcacacgcgttggtgcacgcgtgcgtagagaacaactaaggtcatgggcgtcttccccgatttggctaaataaaatgccctgtttgatagcaaggacatcgacatcaacccgtggcagcttaagagctgcaccaacttcaacttgtccttcatggagctctac

SEQ ID NO: 115624 - DNA, 381 bp, Zea mays
  Clone ID: MRT4577_36931C.1
cggacgcgtgggcggacgcgtgggcggacgcgtgggctcactacccagtacccaccagtccaccacccacccagcaccactgttacatcgtgtgctccgaatgcgacgatggcggcgagctccaccagcgcgcccacgatgccggcgacggtcacgcctctgccgggctacggctaccagggctctgccgcgggcgcgggcgcgggcggcgagcctctgtacagctcctcggggtcgtcgtccatgggcaccttcttcggggtgctcgtcgcggtcgtggtgctcaccctgctgtcctgcgtcttcggccgggtgtgcgcgggccacgccgaggggcccgacgagcggtacgactgcacgaggctggccccgcggtggtgg

SEQ ID NO: 115625 - DNA, 497 bp, Zea mays
  Clone ID: MRT4577_36932C.1
acaagctttttttttttttttttttttttttttttgttttttttttttttttttttttttttttttttttttttttttttttttattaaaaccaaaacattaaaaccacacccctcctttgaccccccccccccaacggcaaccccccaaacactaattcccccaccccggggaccccaactaaaaaccccaaccccgaacccaacgaaaaaaaacccccccaaaaaaatacccatccgcaaacaattacccacaaaaaactacccccaacaaaaaaaccgaaagcccaaagtgccaaaacagggggcccacacaaattaactaacccacactaaatacccggctcccaatccccaaaactcaatcgccaaacccattaaaaaaaccgccaaaaccaaaagaccaaccccccgcaaaaagggcactttttcattggccccataacccaccccctgcccataaaccttagggcccggaaagccggttaaacccaccca

SEQ ID NO: 115626 - DNA, 582 bp, Zea mays
  Clone ID: MRT4577_36933C.1
aaaaacgcgggtaaaccttgtgataaaattcaggatgttgaagaaaccgaccctgaggtgaaaacatttttggcccggggtttatgcaaaaaaaaaaaaaaaaaaaaaaaaaaaaaaaaaaaaaaaaacaaaaaaaaaaaaaaaaaaaaaaaaaaaaaaaaaaaaaaaaaaaaaaaaaaaaaaaaaaaaaaaaaaaaaaaaaaaaaaaaaaaaaaaaaaaaaaaaaaaaaaaaaaaaaaaaatccccaaccggggggccctttaaaaagggaaatttaattaaaatcccaaaaaaaagggggccgttaaactaaaattaaaaaggcccaaaatcccataaaaggggggaaaaaaaaaacgtaagggaacgggtttgaaaaaaacgaggtaagcaaaacacggggtggggaaaaccaaaaaaggttcgctaaaaaaaaatttcccctttttcccaaaaaatggaaaaagcccaaaaaggcccctcctcccaaagtgacccctaccctaaggagcactaaatccccaaatgattcccccttaaacgctcgggttgtcggggggggtgggggggtttccccccag

SEQ ID NO: 115627 - DNA, 633 bp, Zea mays
  unsure (1)..(633): unsure at all n locations
  Clone ID: MRT4577_36934C.1
gcgttcgcgcaatcgctccagggactcgctgagcttctccaanacctcgaccgtgtccgtcaagagcgtcgaaaggccaaaaccaaccgcaacaagtatacgggtaccggtaacgatggaatgagcttcacaaccgcgactggaagccggtacggtggctttggtaatgatcaatacggtggaggtgatagtggctatggtggtggttacgaccgagactacggagggagctcttctcgccaaggaggattctcagactctactgggcgccaggggttcgacgaatatgatgcaggagacgatgaggaccgggtttcagctccagccaagagtagtgctgccgctgcacatcaacgcaaggattctgcgctctcccgcaccagtttgggatccgtctctataccacgaaaaaacggagagccagcaaagaccgccgcctctacctcggctgccccaactaaagctccagctaaggtcatggacctgcttgggtttgacgacgaggagccagcaccggtagcacagcctatttctggaggagctaatccaacagcaattgcctctcttgatgatgatttcgatgatttccaaagcgccccaccagcaacgacgaccaccactcttccgactatc

SEQ ID NO: 115628 - DNA, 206 bp, Zea mays
  Clone ID: MRT4577_36935C.1
cttctcgcagcgccggtgctccatcttcccctcccttccgtactcgcgctcggcacgcgggcaacggcaggggcgctcaagcctctcaagcgaacggcgtacagcggctttccccatcccggacttcttggccaggacggccctaggcgccccctaagccctcgcggaatccttgcggcaacacccgggcgcggggggacccccag

SEQ ID NO: 115629 - DNA, 1468 bp, Zea mays
  Clone ID: MRT4577_36936C.1
cattgggtacctcgaggccggccggacttgacttgagccagccagcgagctgttctcccgtgaaggccccaacaccaccaccagcagccaaggccaagctatgggcgctgccgcggcagaggtcgtggcactgaggccgccgtcggccaagaggaagtcgaccacgctcaagttcctgttcgagctcgagaagccggacggtggcctgctccccggcacggccaagctgccgccgccgtcgccggagcccgaggcggacagcctgatcgacaagatcgcgtcgtgcaaccgcgcgttcacgttcgtcgacgcggcggagcgcgaggaggagcgggacgcgaagcgggaccggctcgtggaggtgctgggcgccgtgcggtcgagcgggggcaagcggcagccgctggaccaccgcgtgatggtggcgctggtggagatggtcggcgccaacctgttccgcgcaatgccgccgccggcgtacccggcgctgccccccgacggcgccgacgaggaggcgccggcggtggctctggccccgtcgtggccgcacctgcaggtggtctacgacatcctcctctccgtggtggccgcgtcggacgccaggacgctgcgcaaccacgtggaccgcgccttcctctccgccctcctggcgctgttcgcctccgaggacccccgcgagcgcgaccggctcaagaccgtgtaccaccagctctactccaagctcacctgcgagcgcgccttcatgcggcgctccatggccgccgcgttcctgcggctcgcctacgaggcgcccgccgccgagcgccactgcggcgccgccgagcttctggagatctgcggcagcatcgtcaacggcttcgccgttccgctcaaggaggagcaccgtatgttcctggcgcgcgtgctgctgccgctgcaccgcacgcgctgggcgcacacgtaccaccgccagctcgcctactgcgtgctccagttcgtgcgcaaggagccggggctcgccgacgcggtggtcacggacatcctgcgccactggcccgtcaccaactgccagaaggaggtgctcctcattgaggagctcgaggagtattgtcgagctgctcgagccggtgcagttccagaggctcgccgtgcccatctgctcccggatcgcccgctgtgtcagtagctacagctctcaggtggcggagagggcgctgtacgtgtggaacaacgagcgcttcctggagctggcgacggcatcgccggacgtggcggagaggatcctgccggcgttcgtggccagcgtggagagcaacctggagcggcactggagcaagtgcgtgcagcaggtgacggccagcgtgaagtccctgctggagcaggtcgcgcccgacctgtacgcgcggtgcgccgccgacctcgccacgcggcggtccgaggccgaggccgccgccgccgtgcgcgacgcccggtggcgtaggctcgaggc

SEQ ID NO: 115630 - DNA, 1661 bp, Zea mays
  Clone ID: MRT4577_36937C.1
aattataattgtttcattcaagacgcccgtctccacgtagcctggaaggctcacgagggtcattgagccgttgagcgtggaactgccgtgaaggttcccgaagcatctggaacacgtgggcacgccactgggcgtgtgcgctgacccttacggcagaaagagatcgaggccggccgggccggggagaagcggtgagaattggagtgcactcgacgcgtcgagcattcccatcccgttcccgccgcgcctcgccttgagatctgtggcgtcgtcggcaccagtccgtccgtccgtccttccgtcgtcggcgccggagaacgagtagagatggaggagacggcggcggtagcggggacggctgagaaggcgtcgtcgtacaggtactgggtgcgggaggccaccggcgacgccgcgccgctccccgtcccgcgcaagctcgacaccgctgccaacgggaacgggaacccgccgcccgtcggctccgtctggaatcaggctggaacatgggaggaaaagaacctcaactcatgggccaatagtagaataaaggatttgatgggctctttaggttcattggccttccctacagggaaggcatctattgacgaagtgtccaagtgctcaggcgacgcatttcaggtcattgtccgcaacaagaagagagtaggatataactatgaactaagcttgaggtttagcggtgaatggttaatcaaagaagaaaacaagaagatcaaagggcatctagacattcccgagttttcattcggcgagatcgatgacttggaggtacaagtaaggttcggcgatgacaagggcctcgcgtctgatgatagaacacggatctgcaaggatctcaagtcctttttggcgccgatccaggagaaaatgcgcatgtttgaagaagaactcaaaggtagatagcgagtattagcaagagttcgcagtgctaggcaagtgacttggcagttggcaccgccgtgctagctgtgatgtgtgtgtcgcaacgctctcaaagctgagactgtatgtgtactggtgtaatacacttgtcaagatgagcacgtacgaactgttctcttggtatccctcattttcagcatgtgatagtaaaaggaattcaagatgtttttgcaaaaaaaaaaaaaaaaaattttcctttggccctctcctcatctcgtctcatcccatcatctccacctttccgtctattcccgctgcattggagaaggaaccgtgtaagtagtcgactagcggcattgcaacaagcttgacgactaaaagggccacgaatttgtgatgccccttgcctcctcagtgaccgtccgcgcgcggagtctgactgaggagccgacgaatgccacacctggcccgcatttcaaccttcctccgcgaccacttattagtacgcgctagcggccaccagatatgatacctcggcacacaggcaactgtacagtttagagccaccatttgggcgcaattacccccatctaacgcctcatcaccgaaaaagcctccaatccacggagcctattttccctgaacttggtgcctggttgccccaatagccgcacgacttattgattttcaccacgcccccgggccaatgtcccggtccccccccttctggggcaacccggggggcctcccccccgcct

SEQ ID NO: 115631 - DNA, 946 bp, Zea mays
  Clone ID: MRT4577_36938C.1
ggccgcttttttttttttttttttccgctatgtaattccattcttctcagcgttggatgatacgttggctgatctcttctcgagtggtgcatcttgtgcaaaaaagtactcattctgctcagttggattatccgtaactctcaatccgttcttcacttcagctctttcagcttctgcagcaactcatccatgctggacgcatacaaatcaaacttgccaaacacctcggtacacgggtcatgttcctcgaatgtaaggtaggctgtcttgaaccccgccttcctcgcggcaatcagatcccacgcgtgcgctgcaacaaaccacctctccctttcccctcgcccttgcaatctcttggatatatgttcatttgcgttctcgtaaactcggacatcaggctttgcaacttggatcgcatcacagctcagtagatggtcagcgtcgagctcaataccagcgctgtggtagtaattcagcgacgtttctgatccgccgttggtcacaccatagatttcccatgcagcttccctcaacccatcaaaacatttcttgaggccttctcttggccccatgctccggaatgccttcatgatctcctcgagatcttcatctgtgacagcatcggtgggtagatctactacggcacatgcgcgtcggaaagtcgattttagaatttgcgcaattggcacgtatgattgggtcatggagacgtatgtaaagtcgcgctgcgcagcatagaaccaggaaaagaagagcgtttttgggtccacatcggcggtcttgagtttcgggcccagacgggagtgaatggcttggattggtgcagagaacccgaaacaagtacctatcacgtcaaaggatgccgacctcgtcattttggagatttacaactgtgatctggttgccgttgtcgagcgttggagactttgtgttggacgttcccggc

SEQ ID NO: 115632 - DNA, 891 bp, Zea mays
  Clone ID: MRT4577_36939C.1
cgtatagactccggcggctggggcccgcgcggccggccgggactggccacttcccctcctggggtccgttcccaaatcccgtcccctccacccgcactccattggcgccgctcccctcccctcgccgccgccggagatctgatccgatccgatccgatccgtttgtgcttgtgctgcagcaggagtgagaagtaaaaaaatatggctgccctgccactggccaccgccgaagtatgcgacgctaaccctcacctgatcatgaacggcgagctccgcgcgctccagccaatcttccagatctacggacggcgccaggtcttcgccggccccatcgtcacgctcaaggtctacgaggacaacgtcctggtccgcgagttcctcgaggagaaaggccacggtagggtcctcgtggtcgacggcggcggcagcatgcgctgcgccatccttggcggcaaccccgtccagcaggcgcagaacaacgggtgggctggtatcctggtcaacggctgcatcagggacgtggatgagatcaacggctgcgacatcggtgtccgggctctcagctcgcaccctatgaaggccaacaagaaggggatgggcgagaagcacgtccccgtcaacatcgctggaaccaggatttgcgacggcgagtggctctacgccgatcccgatggcattcttgtctccaggacggaactcaccgtgtagacagacacctggttgtatgtgtgtgtgtataaggaatcgggcgctcttgctgttaagcccgagcttgcaataatggattcttgctggatcacacatttatacttagaataatcgaatgcttgcttccttggttaaaaaaaaaaaaaaaaaaagccggcctttaggtcgcttcgagttttcttt

SEQ ID NO: 115633 - DNA, 268 bp, Zea mays
  Clone ID: MRT4577_3693C.1
attattattgttctggtgttcctgaaccttgttgtatgctccaacagaccacatttttacttggccatgccaacagacacaggtcaatagttactcgaaaaccccaaaccgccgggggaagaggggcccaaccggccggtcgtaaaaagacggggaaaaaaaacccatgaaccgcgcaggtatggacaataaacaaggctgcggggggcaccccgagggaccccaattttccaccccaggggcagtgtgaaaaaaccgcccccccaaa

SEQ ID NO: 115634 - DNA, 355 bp, Zea mays
  Clone ID: MRT4577_36940C.1
gccatgggcccgggatacatgacctcattggggcccagctggtggactgtgtctccaccacttctggaaccctcctccgcctgccagagacctgaggactctgttcatcattgcacacctccccagggtggggattgaggggcccagaagggctgcctgccctggctcaggcagggtcaccttgggaaggctcggaagcacaaatgagtgctgggcttgctgctgtgccaagggtcatatgtgactgccgctgttgacctgcgctgcgtcacagtggaggggtttgggcctgtgcttctctgccctttcacgaaagtggagccagaaaccttgccaaggccatggctgctgtctt

SEQ ID NO: 115635 - DNA, 194 bp, Zea mays
  Clone ID: MRT4577_36941C.1
acacgtacgcccgcgtccattttaaacgacatcatcacttacctttacttcaaccacacctactacaagatcctgtctaacctcctctgcgctttcccctatctattcctccatatcatactacacttccaccattgctcttctcccaacactacgtctccaacatctaccaccttctcatactactactacct

SEQ ID NO: 115636 - DNA, 1125 bp, Zea mays
  Clone ID: MRT4577_36942C.1
cactccaaaatcttatagatagacaacaacgaaatctcgacccagagcgcgaaaggaaaggaaaggtaggtaggtagatgcataagtaagtgctagcccgtattgcgccggtgactgcaccacaatcacatgttcctctgggccaagaatcgaatgcacaaccctgactgagtgacggggaaccgatctccttgtgttcagtgtttgatttccctgtcttctcatgacagcagcaggagtgagaagtaaaaaaataataaaaaaagaagatatggctgccctgccactggccaccgccgaagtatgcgacgctaaccctcacctgatcatgaacggcgagctccgcgcgctccagccaatcttccagatctacggacggcgccaggtcttcgccggccccatcgtcacgctcaaggtctacgaggacaacgtcctggtccgcgagttcctcgaggagaaaggccacggtagggtcctcgtggtcgacggcggcggcagcatgcgctgcgccatccttggcggcaaccccgtccagcaggcgcagaacaacgggtgggctggtatcctggtcaacggctgcatcagggacgtggatgagaattgagatcaacggctgcgacatcggtgtccgggctctcagctcgcaccctatgaaggccaacaagaaggggatgggcgagaagcacgtccccgtcaacatcgctggaaccaggatttgcgacggcgagtggctctacgccgatcccgatggcattcttgtctccaggacggaactcaccgtgtagacagacacctggttgtatgtgtgtgtgtataaggaatcgggcgctcttgctgttaagcccgactgcccgagcttgcaataatggattcttgctggatcacacatttatacttagaataatcgaatgcttgcttccttggttacaagatgttcttggacaattcttttttttgttccttgtcaattttctattccggcgacgaagttgattaaactatagatccccttgttggtgtagttctgaagctgagtgttctgtgtcttggccctgtgcctttgttcaagtctgtatttcatcttttgaaaagaagcttagacgcatactattaattaatctgatt

SEQ ID NO: 115637 - DNA, 270 bp, Zea mays
  Clone ID: MRT4577_36943C.1
ttgttaacgagcgcggggcggaccacgctggcggggctctttaggtggaagcgggtaacaaaccacgtctggcggccaaggacgcggacaaaccggctgggcgccaacacgtcctccgagcgtcagaccaatcacatcggacccccaggcgcacagaggacaaggactacgaggaggcgatggccgccggagccacggagcgggaggggctcaaggacaaggtgtgggaggaggccggactcgccgagtacgaccgcgagtacctctacc

SEQ ID NO: 115638 - DNA, 240 bp, Zea mays
  Clone ID: MRT4577_36944C.1
cactcttttgttctcgattgagtggctcaccttctttcccaggcagcacgagcttgcaagcaagcgagttcctgagatttcagctcgattatacttcagaggtcgagctgaccagacttctctcgccgaaactctaccacttcctaagaggatgtccaggaactgcttgggcggagatccaaacaaatcttttgtgttggatatggtccttggttctgggaaaaaattttgatgattatc

SEQ ID NO: 115639 - DNA, 234 bp, Zea mays
  Clone ID: MRT4577_36945C.1
ccaagcaccaagaccaagaaggactactgcacagattataaccttcaccgctactataagaaacactacctcttcctctcttcactttggccttttacctatcctaccttaccacggtgctttttcttgacaatatgaaacccttttaaaatgttcacatacttttccaacccaaatacttcgttgaattaatcactcatcagaaacaaacttccctatacttttgtcaacata

SEQ ID NO: 115640 - DNA, 595 bp, Zea mays
  Clone ID: MRT4577_36946C.1
tgtatattgagggagaaaaggtggagctccaatgtacctgcctccactattgcctccgccacagtgtgaatcgaagctaataaccagagcagatgatactgaagaagtggtaaagaaccggctacgtgtgtaccatgatctgactgaaccagtggagggattctacaaagcgcgtcaaaagctcttggagttcaatatacctggtggaatacccgaatcatggcgaaagttattggaagccttgaacatagaagactccaacaatatgagatctgcagtagcatgatttttttttaggaatgcacattaaattaaacatctgtagcttatgtcaaagttagtcaatttttctgaacattccttatatctttagaaagcacggtcgaatttggattgatatttgattatttggcgtagcactctaactgtacagtagattagtcatcgatgggcaagatgaacgaaagcggtctgtaaaaggaaagaaatagttgttcgatgaccagacattcatttgtagcctgtaccatatatgaacttgttgaaagaggtgcataccagaagcaatttgaatcgttgtggatatgattgaagc

SEQ ID NO: 115641 - DNA, 155 bp, Zea mays
  Clone ID: MRT4577_36947C.1
acgcggacgcttgggtgactggacatactggatacttgataaaggaggagttggtgataatggggacatcagtggtgaatcgatgcgtgatgaggagcatgctcatattgatacattgagaggacgtatacttgatacaatcctcaggcttagat

SEQ ID NO: 115642 - DNA, 241 bp, Zea mays
  unsure (1)..(241): unsure at all n locations
  Clone ID: MRT4577_36949C.1
ttcggggccttgttgcctgcgcctcggtcggggggttgcgttgggttctcactggcgcttttcctggcctcgtgggtcgtttgcttgttggccttgtctcccgttgtggtgagctcgctgttttcctcccgcttggtgctgtcgttgttcttgtctttccatgtggcggctctctgctggtttggggggtttggcnctcttctccgtttcctggcctcggtcctgctggtggtttttgtct

SEQ ID NO: 115643 - DNA, 549 bp, Zea mays
  Clone ID: MRT4577_3694C.1
gccccctctcgagttttttttttttttttttttttttttttttttttttttttttttttttttttttttttttttttttttttttttgggaattttgggaatatggagcacatgttagggtggggcactttttgaatatgcttggttcaaaaactgaaaacccgggccgaggggataccccaccaccaactgggcccaaaatggcgtcagtttggcccaaatcacccccaagggaaaaaaagccgcgagctgaatgcaaatgccacccttaatgcctgctgaaagcctgaaaccgtttaggggggtcatggcggggtgcttttgctatctggggggtcatggcgggctggttttgaaaagggcaaactttgtttttggggggagcaagcaaaaatcgatttttgggggtacaaaaaaactgaaactgggccaaagggcaaaccctttttggagagaaaactcctaacttccctgggggggtggccacataaatcctcctgtacccctggaaggggagcccgcatttttatttactttgcccattcaccc

SEQ ID NO: 115644 - DNA, 287 bp, Zea mays
  Clone ID: MRT4577_36950C.1
taattatcctttcgacccactcttacacttagtctaaaaccctatctacatcctaaacttactcactatgccaactccttctatgagagaatgtttaaaactcacagtgagacacacctcatatctactctaatcaatcataatctcaactataatcccaaaatatctccattaatcaaacattctttaccaacctctattaacatacatctatctttaaccaatctcctatcacacactaaaccacactttcacaaatataaatccattctccatactactatcac

SEQ ID NO: 115645 - DNA, 1000 bp, Zea mays
  Clone ID: MRT4577_36951C.1
cattgggaccctcgaggccggccgggatcgatcggctctctgcaagtgggccctctcccttttttcctctacgcggacgctggggcggctgcgaagtctcagaagcgctacaagaagttggagctgctcgcctgctgcccctttcctcccccgggccccctctccgctgcgacggcgagcccaagaaaactttcctctaggagcgcatggaggtgtccgctgggctccggccgccgcccgtcgctgcggcagcgtcgctccgaggccgtcggtttgcgtcggtgccgccgctcgcggcttcccattcggtgcggtccgtgtcccgcgcggttaagaataaagcaagtgcaatctatgacctccaaaggaatagaagtaaccttgaatcgctattctgctacgacaaatctgtcccagaggagaatattggaaaaccgtccggtctagatctggaaaagaaggatgtcggggacaaccctccctgctcaagctgtgaagctaaaggcgctgtgctgtgcgcaacatgcgctggttcaggcttgtacgtcgactcgatactagagagccaagggatcatcgtgaaagtcagatgcctaggctgtggaggaactgggaacatcatgtgctccaagtgtggaggccgtgggcatacctgaatgataaaaagcttggacattgcagtgtctccgcagcaagacagtacaatcctgctagcatccttcccgagttacgttggtgggtatatttggtctcatggtgtcatcgtcaatcaaaagagttacgattcttccggagaattttccttgtgctgatctagctgctgtaactgcatcgaaacatgctttagaagctattgaaccccatcccccccttttgctttttattcccctcgtttcatgcctaaaagtttaaaggacgatgcgtcaaaggattcgatgttatgttgtaatcataaaggttaatgaaatgtgaaagatacacttcgtttttgggagggatt

SEQ ID NO: 115646 - DNA, 511 bp, Zea mays
  Clone ID: MRT4577_36952C.1
ccgtgccggaaacacctagcgccgcgaagccgctctgctaggggggcatacccagtggatcgagagccttttgacccgagcacggtcgtgatgctctacctgcttgctgtccttggtgggaatgccaggccctccgtttgtgatttgacatggcctttaagggacagatggctgagaaggtgacatttaaatggtgtgaaggaggggtatgccaactgtacggttaggaccagacccacaataattgccgtgggcggagagaagcttaaaatgagacccatgtggcgggggtgggagattgtgaagaagcaagtgcaccttcttgtgggggatgtggtcctggagttgtcgcaaataaaaaacataaggtggtgaataaggaagaaatcgaggaagatatgtgctccttgctgttgctctaaggagcacagtcataacagtattgggctcgggcaatggaaacaaagggaaaccacaggtaagcttatatactaaccttattttatagcgg

SEQ ID NO: 115647 - DNA, 309 bp, Zea mays
  unsure (1)..(309): unsure at all n locations
  Clone ID: MRT4577_36953C.1
ggctcgagcaattgcgtttttacacgggtagcctctaggggcagctaaaaatggggggggtgggggaattcatcatgancattaatcacattgtaccattctatgaattaatagagaattgacttacatatgtaattgatttgatccctactggagaatgtttgtgcacgttctggaaaattatcttcttagggatcccaatgatcatcattgctattggagattcccttttttagtatcattctgtaaagcagtagttgtcaacctttgcaataaatggattctaaaaaaatacaccataatttctta

SEQ ID NO: 115648 - DNA, 451 bp, Zea mays
  Clone ID: MRT4577_36954C.1
cacaacaaaatgtctaaaagaggacgtggtggttccgcgggagcgaagttccgcatctccctgggtctccctgttggagccgttatcaactgcgcagacaacacaggagccaagaacctgtatgtgatcgccgtgcagggtatcaagggtcgcctgaacaggcttcccgctgctggatctggagacatgatcgttgctaccgtcaagaaaggcaaacctgaactaaggaaaaaggtaatgccagcagtggtgatcagacaacggaaaccgttcagaaggcgggacggtgtgttcatatacttcgaagataacgcaggcgtcatagtgaacaacaagggcgagatgaaaggctcggccatcaccggccccgtggctaaggagtgcgcggatctgtggccccgtatcgcgtctaacgccagctctatcgcttgaataatatacggttaagatt

SEQ ID NO: 115649 - DNA, 216 bp, Zea mays
  Clone ID: MRT4577_36955C.1
ggggggggggggcacattcgtacatcttaccccgatcacgtgcaaccaccccgctgtccacgaacttgccaggttttgccacccggacgctttttctcgctcccccagagttggacaactgcccaaaaccaactacactaccaagcataagctccggcaacacttcccctgagggacctgcagggaaccacgccccaccctggcccttaacccacg

SEQ ID NO: 115650 - DNA, 262 bp, Zea mays
  Clone ID: MRT4577_36956C.1
gtaatttaacttaatctcatctaatgtaaatattagattatgatgttcagtaacatcttccataggtataaactgctgtcattatggatttcagagtaactctgagtaatcaaataggtaaaagcatgttttgagtaaaatagctagatttatactttacttgtatacagacttaacaacaaccggtattgactggattgacagctaaagtatcagaatgaaagcaaggtttttttgatgttacctgactgtcataaagatg

SEQ ID NO: 115651 - DNA, 188 bp, Zea mays
  unsure (1)..(188): unsure at all n locations
  Clone ID: MRT4577_36957C.1
ctgcattttttaactggctcgggatgcacaacgccggccccgtctgtcggttgcggatccccacacacgacaacccccaccagaccgcacccncaaagaaggacccgacgcccacgcggatcaccatgcggttcagcaccaccacacgccgtcgcgtccgcataggcagcgatgcgccactggcgtat

SEQ ID NO: 115652 - DNA, 269 bp, Zea mays
  Clone ID: MRT4577_36958C.1
gccggccgggttccgaagatcgccttgacgcgtgccctgccgtgccgtgtgagactcgacgcggtgtgtgtgtggttgtggtcgcgctactcgactcggcctcgccttgtgttgttgttgttcgatgtgaatgcggtggtgatgcggtggaagggtgacctgtgagatttgtcatggaagtgtgtccatgtaaaaaagatgaaaatgattttgacggagattatgacactactggactactagaaaaaaaaaaaaaaaaaaggccccta

SEQ ID NO: 115653 - DNA, 154 bp, Zea mays
  Clone ID: MRT4577_36959C.1
cggcagaggagatgacagacgtggcgacgccggggttcgcgcttgcttcccccgggaggtggagggcggacgcaggccccttcgcgcacgggggtgggcgcatcggccggatgcgatcatggcgggaatatgaccgggcaccctcgacccgagg

SEQ ID NO: 115654 - DNA, 497 bp, Zea mays
  Clone ID: MRT4577_3695C.1
attcggctcgagcttagggactatcaaacgctacttcgtaactgggtagttataaagttagttttgggtttgttaggaagcatgctgtgaggcatggtcaagcaagatggaatttgtccctctcttcttgagagagatatctctaggcccctcgaatgattggatcaagaaatgcatggctgtgctagggttaagtgttaatcaataaaaggattcaaattcatagtatcgagaaagagagatcagcttagagccagaccaaatattgtgagacaaagggaccaacatgtacgtaatgttgcactagttcgtctgatatgatctttatgtgcgcataggagttgacatatcttactagaggccactatcaattattgggcgaagtaagagtacttggccatgtctatatgcacgtgaacctatagggtcacacacttaaggggaatgaagcctaaatcggattagatccgaaatagacagggctttagattactgat

SEQ ID NO: 115655 - DNA, 292 bp, Zea mays
  Clone ID: MRT4577_36960C.1
atggaaatcaggcatattccggtgatgtccgaatcttcagagcagctcttctctgtggatagcattgctgtccctgagccgattcagcaactccttcacaaatatgaagcactgtttcagcctcctactacattgcctccaagccgattctgtgaccactctattcctctcatcgaaggagcaagacctgtcaatatcagaccatacagattttcgccagacatgaaggatgagatagaatcccaggttaatgagatgttacaaagtgggctgattcaacactgctccagtg

SEQ ID NO: 115656 - DNA, 562 bp, Zea mays
  Clone ID: MRT4577_36962C.1
gggggcggggattcattaaaaaaaaaagacccggcccggaacaaaaaaaccaaaggccaaacccagaaaaaaaaataacatttgttctggggcggcccaacctgaccccgaaaggggaaggggaatgcaaaaaaaaaaaacaaaaattcgagctcaggggggggggctggggtgggcagtccccgggacatgggctagggaaaaccgggaaaaaaaaacctggaaaaaaaaaccccagggccaaagacatcccgggacaaaaggcccttcccaaagggaaaccccaactccaccccagggtagaaaaaaaatgtaaccttgccctggaccggacgggggggccgacacggaaataccggaccggacccggcaggcgaaccacctttccttaaagggagtcgaaaaaaagcgggggcaaaccaaggccatagccctgtgcggagggaaaaaggtatccggttccaatccaacacaaaatacaaaccgaaaaactaaagggcaaagccgggggggccaaaggaggaacccaacccaaattgagtggccgcccccccccgccccc

SEQ ID NO: 115657 - DNA, 119 bp, Zea mays
  Clone ID: MRT4577_36963C.1
aggaggaagcaagtatacattaggtacttgatattacacaaaataacaaagctggtacaaagtgcatacaagccaacgctaacacttgattgggaaatattattttacagcttctttca

SEQ ID NO: 115658 - DNA, 314 bp, Zea mays
  Clone ID: MRT4577_36964C.1
gagctatttttcggcggccgccctatcgtcgtcacgtgggcgcttcatagaggaggtgctcgcgcacccggacgaacgcggctttcttacccacagccgtaggaactacaccgtcgacgccatctgggagggcgtgcccatggtctgctgcccgctggaccgggaccagctaaggcacatgaggcacctgcgcgacgtgtgtcacgtgggcacggagctcgaggcggaacagctggagagaggccatggcaaggccgtcatcaacaggctctttgacaccaaggaaggggtggagaccaaagtgaggctgaagg

SEQ ID NO: 115659 - DNA, 1008 bp, Zea mays
  Clone ID: MRT4577_36965C.1
aaaaaccgggctgtgcaattaatttaggtggccccataaaagaaattttttttcaatgcccgcgttattaaacttgggtcctttaaaacggcccccccttattatatatgagattttatgacgtcgcgcgcaccctttttttttttttttttttttttttttttttttttttttttttttttttttttttttttttttttttgactcaaagcagctcgatgtcattatctcagaagacagtagctgtggcaacgcaatgcgaggcgcagacaccggacagacactgctgctacgactacgagtaggaagaaagcgagaagaagaaaagcgagcgaggaaagggatggcgggggcaccactgcccggccggcagcgggcagcctttggatcagaactacagtggcaggcgacctcctctctcctctctctttctttctgaaaaaaaaataatgcagatcttccgcaggttcccaggacgactggcgacaatgacccaccatgagcacagcagagcatttcaccgttttcttccttctcggctcctccatcacgtagtacagtttgctgaaccaaaagcaacagactggtgacgacgacgacggcgatgcgcactgaaccgtgaacgagatcggctaggatcgcctgtcccactgtcgtacttggaggagggatggaaaaaacgcctgcggcggcgaaacggcgcggtggtgggccggtgggtggaggtcacgtcgcgaccaccatgccggccatgaagatgtcgtcgttggaggacgaggaggaggaggaggaggacccaggggaaccgctgctcgtgttgttctcggcttcctcctccagctggatctcctggtcccggcaattggcgctgcagaacgccttctccccgcggtagatgtaaatgtcgttgccttcaagcttcttcttgcacgcgaagcaggagctgaggaagtcaccggcgcccggggcggcgcgcttgaccacgaagtagcacccggccctcgtgcc

SEQ ID NO: 115660 - DNA, 204 bp, Zea mays
  Clone ID: MRT4577_36966C.1
tccgaggacaagtatgggatagtgctgctgcgctgtgtagctcttgcttcctacaactggtagtggaggcggacggaaaagacctacattggaatgcacgaccaggccaacgatgcataccccgcacattgtttacgaaaacaagcgaagcaacccaaaaatgcttatgcatggctagattctccccctgcgaaaaacatgact

SEQ ID NO: 115661 - DNA, 411 bp, Zea mays
  Clone ID: MRT4577_36967C.1
ggggggactaaaggggaaaaacatgttctgaacaaataacacccccctgttctttcaggggggaaaaaaaaagggataggaatcgggggaaaaaaaaaaaggggaaaggatgggtgtccctaaaaaaaaaacaaactttttttaccccgctttcagaaccctaattaccagggggggtctaaacaggagttttgaaaaaagcaacaacccagcagggggaactggaaccctacactggggggggggtttctttttttctcaccactggaaaactgcactgggttcttcctttaaagagggggagcaacttcaggaggggctgttcaccccgcccggaactaaaaaaggggcgagggacttcccagggagggcgacccccccccctcggaaagaaaccgaggggcttttgcc

SEQ ID NO: 115662 - DNA, 1000 bp, Zea mays
  Clone ID: MRT4577_36968C.1
ccggccggagcccggcgatccatcgtcgtcggttaatcggatgagatgggtgacgaagccaaatgctccgtcgatgtcgccgagggcgcctacatcatggccagcatcatggccgtctccggcatcatggtcactgtcctcgtgctctcggccctcttccattttgtgcttcgacgtctcggacagcccagcgttatcttccacatcctgatcaaagattctgggatatcttgatggatccaatgtcgtccctatgaagaagatcgccacatcaacgattgtgtgtaccgctgaagtccccaatatgacgtatgctagctggtatctgttggggccatgcttcgttgcgccgaaggtcttgcgcgaagaagcagcttcggttgaaatcgtccccaggaaatggccgaaggttcctttttatagagcttcggcgttacaaaccgacataaagatagaatgacctttttatccatagaggtctaagataatgttgtaaacttttgtaaagggcataattgtaattcgtcacaggctgcgtcctgtgtctataaatagatgaacagtacccccgtactgttcacacaaacctgtcatttgccttcacatcacacttgtattcttcaagaccgaaggtacatttgtgatttggagtcatttactttcgtttataataataaaaatagagatgattttatgataacatttaagtattttcatatctcatgatttatatgaatgcttcgttcctcattgtcacgcttacgaagctacgtccttcgtaaccttcgtccgagatgctttatattccaaagggatataatgttatggaggacgaaggacttttacacttaacattttctatgttgccttgttcttaattcttagcatttgagaacaagtccccaacattggcgcccaccgtggggctcgaacccacgaccaagcccactttgttctcaaatgcttcgaattaagaacaaggcaacacagaaaatgttaa

SEQ ID NO: 115663 - DNA, 370 bp, Zea mays
  Clone ID: MRT4577_36969C.1
tcgagcggccgcccgggcaggtactttcttatttctgggaagccacaaacatcagacaaaaaacttattattgaactataactcataagaaatctaaaagagggcaccaccaatgatgggttgttggtagaatggaagaaactgctgcagctgaaagtaggcagcagggtttgctagcacaagttgttgtaggtggcgagccctgatgtcatgggccaataaatgcaccaacagctactgctgtaataagactgatgattgtctgacgaacaatggcgataaaagtgagatgccatctgccattgcctgatggatcctgtagagcatgaacaattgggttttcacataccaaagacacctgtggtgagag

SEQ ID NO: 115664 - DNA, 148 bp, Zea mays
  Clone ID: MRT4577_3696C.1
cgtggctgctcgaagagtctgttaaagctaccaaatcacgacgcgccccttccaactccctatcgacgacattgcttcacccgcactgccctgtcgagacgagcgtatcctaagggacaagcgagttactgctcatcacacatgaatt

SEQ ID NO: 115665 - DNA, 245 bp, Zea mays
  unsure (1)..(245): unsure at all n locations
  Clone ID: MRT4577_36970C.1
gtgtttggtttttttaacactcaaaatttgtgatagggagaaaccaaacagccaaaacgacatgaccatgattcaacctataaaccctttctgtatataattcaatctaaaagtacaacacctcacaaacacatacatttacgactaagggaggtgggataacatccacatnaaaatttacgtccaaacacaaaaaaaatgtatatataaccacatantattatacaaattatcattcatcatca

SEQ ID NO: 115666 - DNA, 183 bp, Zea mays
  Clone ID: MRT4577_36971C.1
ctcggcttcggagaggtagtgctgttcctctcggtgctccctcggcttcggcttcctccgcttccgcagggaccgcggaccctggtatatgccctacctctgaccctgctaaagccatgtcgacccctgcccggcgccgcctcatgagggacttcaagaggttacaagaggatcctccggctg

SEQ ID NO: 115667 - DNA, 422 bp, Zea mays
  Clone ID: MRT4577_36972C.1
gcgcccacgcgtccgcccacgcgtccgctttcgtgcagcgtacgtgcgtcctcccagaatccctgcgccagtcgtttcggcggttcagcttccgttcctgctggttccttccttgttgcatcggcggcggcggcgcgcggcggcgatggacgctacctttggctgctgggccggcgccggccaccatgttgacgagtacttgtcgcgccaggctgctggatgcggtcggctcgacatggtggacgaggccttcctcggggcgtgctttggccagctccagtgcgacggggcccttactactgccgccggtggcgtcgacgccggggcgtgccagctggtgagctcgaatgcgggtgccgtccaaggcggcgccggtttggacggtgacccggtcgcgttcttgagcgcggggaacggggacg

SEQ ID NO: 115668 - DNA, 283 bp, Zea mays
  Clone ID: MRT4577_36973C.1
cctccttttttttttttttttttttttttttgggggttttttttttaccttggaggacccaaaccgttccccggagaattcccaatttcccctttagggggtcctattttagcttggggaaagaatggccaaagctggtccctgtgaaaaatagtaatcctttcacaattcaaaaaaacaaccgacccaaaagcataaagcttaaaacctggggggcctaaggggtaagctagctaaaattaattgggtggcgctcacaacccaatggccagtcggaaaactt

SEQ ID NO: 115669 - DNA, 934 bp, Zea mays
  unsure (1)..(934): unsure at all n locations
  Clone ID: MRT4577_36974C.1
aaaagaatccctagttctctaccagcagcacacacacatggcagccaccactactagcacgaggaagcagagaggtcagttcgaataacactgtaaaccccgtgaccgcactacgctgacggctggtcgatcaaaacccatcatcacttcatcaggtacgcgccctgctacggcaacggcaacaaggtggccgcctgctcctacatctgcaacagctactaccagagccgtagcgccacgggcgccacctgcggcgctgaacggcgtcgcggtgcccatgcccgtgcctgtccccggtgccaacgccttgtcccggcgccggtgccagcgccagcgcccatgccaccgccggtacccgcgccagcgcccatgccaccgccggtgcctgcgctgctggggccggaggcgaacttgcaggtgccggagctggggtcggtgccggtgagcgtggcgacgccgttgaagtcgcaggtggcgcccgtggcgctgcggctctggtagtagctgttgcagatgtaggagcagacggccnaccttgttgccgttgccgtagcagggcgcgcccttggaggcggaggcgcagtcggcccccttggcgcaggcgtagtcgatcgccgcctgcatcgcctggtcgggcacgcccgtcttgcacacgcagaacgccgcgtctgacaaacattaagcgccgcagggagcagcatgcagatccggagagctcgctcacctgagcctgtgaacatagccagcagcaggaggaggaggaacaggggagccgccatggctgctcgagctctctggactggaccgcaaacgctgggactgggagggagagaccgagagagtgtgcgcgcgatggggacagctgggtgtggtgtggccgtgtggggactgtgagaggtgtaagtgtcgtccccgccggatccggatggtaccc

SEQ ID NO: 115670 - DNA, 461 bp, Zea mays
  Clone ID: MRT4577_36975C.1
tcgataagcttaagaaaatcggctatggtggttcgctagactaaagtatttttgatattattctttgagattcatgtatgttttaagttgtaagtgaaaatctacctagccatggttcaaattttgttaattgaaggagatgatattcggccatgaatgttacattcttggttggtattttgatgtctttggcgatgaggtatgaagatggttgattttgagtgttaaataaaaaggatgcatgaattattgttaaataatggtcgaatgtagcatgattaaagatgtgaataaattgaagttaacgaggttgtcaatgaaaaatatgagttggatgaggcttaaagaataaaaatctatgtgactagaggtcaaggacattcggtcatatgcttgtatgctagcaaaatcggccaagtgattatgtggtggaaattaagtgttaaatggaatgaaaatga

SEQ ID NO: 115671 - DNA, 2267 bp, Zea mays
  Clone ID: MRT4577_36976C.1
cacacctctcaccagtccccacacggccacaccacacccagctgtccccatcgcgcgcacactctctcggtctctccctcccagtcccagcgtttgcggtccagtccagagagctcgagcagccatggcggctcccctgttcctcctcctcctgctgctggctatgttcacaggctcaggtgagcgagctctccggatctgcatgctgctccctgcggcgcttaacgtttgtgtgagaagatgaggtttctgtctagctctcttctgcctgcctgcctttctttgtatcccccttgtcagcttcgaaacttctctgctcatgagctatggccagtcctgctgccactgtagatttttttaagtgcggaggaaatctcttccccccccccctccctccctggttattgtgcatacatagctatcctgctgaacgaagcacaaataaatacaaaccaagaaacgccagtgctttctcgatcacgtactggcacgagctagcgagcagactcactcgaacacacactgaccaaccgctcctctctccttccgttccgtcattccgtgtgcagcagacgcggcgttctgcgtgtgcaagacgggcgtgcccgaccaggcgatgcaggcggcgatcgactacgcctgcgccaagggggccgactgcgcctccgcctccaagggcgcgccctgctacggcaacggcaacaaggtggccgtctgctcctacatctgcaacagctactaccagagccgcagcgccacgggcgccacctgcgacttcaacggcgtcgccacgctcaccggcaccgaccccagctccggcacctgcaagttttccgcctccggccccagcgcaggcaccggcggtggcatgggcgctggcgcgggtaccggcggtggcatgggcgctggcgctggcaccggcgccgggacaggcgttggcacgccgcaggaccgttcctgccccatcgcgcacacacacacacacacacacactctctctcccaccgttcacggtccagtccagagagctcaagagctcctgcagccatggcggttcccctgctcaccctactgcacacctctcaccagtccccacacggccacaccacacccagctgtccccatcgcgcgcacactctctcggtctctccctcccagtcccagcgtttgcggtccagtccagagagctcgagcagccatggcggctcccctgttcctcctcctcctgctgctggctatgttcacaggctcagcagacgcggcgttctgcgtgtgcaagacgggcgtgcccgaccaggcgatgcaggcggcgatcgactacgcctgcgccaagggggccgactgcgcctccgcctccaagggcgcgccctgctacggcaacggcaacaaggtggccgtctgctcctacatctgcaacagctactaccagagccgcagcgccacgggcgccacctgcgacttcaacggcgtcgccacgctcaccggcaccgaccccagctccggcacctgcaagttcgcctccggccccagcagcgcaggcaccggcggtggcatgggcgctggcgcgggtaccggcggtggcatgggcgctggcgctggcaccggcgccgggacaggcgttggcaccggagcaggcacgggcatgggcaccgggacggggaccagcaccggcaccggcgccgggcgcaggggtcgcgacccccgggagcgccctgagcccaccgttcggcggcactggcgcgtacggcccgtcaggggcaggcagcacggactacaacgacgccgtcgccccgcgcgccgccgggctgcacgtggtggctgccctcgctctcgccgtcgccgtcgccgcacctctccaccgctaggggcggtgccatggcaactgggagctggcgggcacgacactcgcagacgggatcccgcctcggcggcccgccagcgcgggctctggtcgatgtccggcgttagtgcgtgcgcgtacctgatgaagtgatgatgggttttgatcgaccagccgtcagcgtagtgcggtcacggggtttacagtgttattcgaactgacctctctgcttcctcgtgctagtagtggtggctgccatgtgtgtgtgctgctggtagagaactagggattctttttttttcttctgtcgcttccttgcttatatgtcccgtcgtgttaggctgtgtttactatgcagtgtttggtggtggccgctttccatgagaatatttggtgtgcgcgctcatgttgccctgcacgtttggcc

SEQ ID NO: 115672 - DNA, 306 bp, Zea mays
  unsure (1)..(306): unsure at all n locations
  Clone ID: MRT4577_36977C.1
cctncccccggccgggcgnccccgtggtgtggggacgnacnaacgggaacacgatcccgtccccgccatggcaatcctctcggcactcgccaccgaggcgctcatacctgtcgccgccgacatcgccatcaacaaaggcagagtgcaccgggtggtctagtcacgcgacaagatatacccggccccaaccgacagtgactgaggcaaggccatctacaccgactccctcatctaggaggaggaggggctcaacaaccacaaatgtttgataaagtgcgccaaaatccaaaacgccatgtttgaatg

SEQ ID NO: 115673 - DNA, 766 bp, Zea mays
  Clone ID: MRT4577_36978C.1
gcgcccgcgggggcaggaggaggaggaggaggagcaggagggtcgatcctctgcatggcgagcgtcagcggcatcctcggcgggctgggcacgtacccgtactcggtgtccaagttcgccatcgcggggatcgtcaaggccgcggcggccgagctgtcgcgcctcggcgtccgcgtcaactgcatctcgccgtacgcggtgcccacgccgatggtgctgggccagttctccgcgatgctgggcggggcagccgacgaggcgcaggtggcggccatcgtcaggggcctcggggagctcaggggcgccacctgcgaggccgtcgacatcgccagggccgccgtgtacctggcctccgacgacgccaagtacgtgtctggccacaaccttgtggtcgacggtggcttcacgagctacaagcacatgaacctgcccttccctaccaagccacatgagtgacttaattgccagaagcttgtgattcaggtgtcattctgctactgtttgatttgtacaaaactgcacctaaccgcgaggaagaagagagtgggagttgttgtcatcttggttgtaagtgactttaattttcagcccatgcaactacgcaatgatccgcatggattcagtagaaaagaaagtggctacgcagttgctgctttcttccttaaatattctggtttggaaaaagcccaaattactaccttcaaatgttgattatgtgtccagataactctaaactaatgtttggttcagtttactactgttaact

SEQ ID NO: 115674 - DNA, 353 bp, Zea mays
  Clone ID: MRT4577_36979C.1
tgaagataactataggctgatggctgcatgtagggatgcaaattggtctaaacaacatggtcccaagtgacctgagccatgccacatgtagctcatgtcctaagctgcccataaattccattatgtttctagtcgtccacctcctagtcggacgactaatcgtcatcagtcaatgattaatcggatggccataaactaatcaacttattgagttgtagctcccctgcgaacagcccctggtctaactggttaggtgatgtagtagcaaactctcatgttctgagttcaattcctagtggaagcgaattttcatacctgggttaaaaaatccccttgctggttctcacccgctc

SEQ ID NO: 115675 - DNA, 577 bp, Zea mays
  unsure (1)..(577): unsure at all n locations
  Clone ID: MRT4577_3697C.1
attacttttgtgtcaattatccctggacctcattgatcttttggtcttgtcatcatttcccacctggccatgtgcgacttgtgtttttgcccagccccttgcccgaaaaagtttgctcttatagagtccatcttactgtgtgtcccatcaacctgtagaagcccatggtataagttgggataccccttaaacaagtattggtaagaattaggttcccttgattttactcttcgatggtcctaacttttgctcattttactgaaaattttctgtagatgacgataagggcaagtgcacatctgataagatatatttttgttctccgtataagggctttcaactgtttccttgtcattaacaaaacctattgagtgagaactgcagtaccttgaatattccatgttctaagtgaaaacaccaataggctgttgcactgttgttcgtcatactcttgccaagattagagtgtangggaagggatgctgcatgttgcatttaagggtggtaatggatccacgatccaaatatttcttaaaataagtttagggtctttaattatttttagattaaaaatgaa

SEQ ID NO: 115676 - DNA, 722 bp, Zea mays
  Clone ID: MRT4577_36980C.1
accgagagttcttcttcttcctcttcgtctccttctagtagtggacagagagagatcgagtgctagggaagaagcaaagcaagccagccaggcagcagcaaccgcgcctggtttcctcctcctcctcctcgtgggctcacacaaggcttccttcggttcgggggtgtgcgaagcggcgcaacggcggaggcggcgctagcatcaccggccgacggtcctcctccttctcacgaaaggcactagaggagcggcggcggcggcggcgcatcaagcaccgcaccgatgggcccactggagccgcgctaccgtccaggcggcgcccccgaggacacgactaagagaagggcctccaagagcaagagtttcaaagacgccgagaacttcgaagtcctcgtccttgagaagagctgcggttgcaagttcaagtctttgaggatcttgctcatagccatcatctccgcgacagtccttacccttgtaaccccgaccttatacgagcgccagttgcagtcagcctcccggtacgtggatgtcgggtggatgtgggacagagcgagttccgatccgcggtacgcatcttctgccgatgttgggtgggaggatgtgtacaaagcactgggaaacctaagaagcggctcgagcacgccaaggacagcgtcacctggcagacgctgtaccctgagtggatcgacgaggaggaagagacggagataccctcttgc

SEQ ID NO: 115677 - DNA, 1096 bp, Zea mays
  Clone ID: MRT4577_36981C.1
tacttcgggctcggcacggccctgtccatctacggctgcagcaggtctcgccgaggagaacgtcgccgcggcggcggcggcggcagacatggaggacggcgcgggatacgtcgtcgcccgtggcctggggcctgctgctgctaagccggccttggatgaacgagacggtgccggagaggtcgctgggttctggggctacctgctccagatcatctaccaggcaaatgcaggcgcggtgatgctcacggactgcgtgttctggttcatcatcttcccgttcctcaccgagaaggactacagcctcaacttcctgttgatcgggatgcattcggtgaacgcagtcttcctgctgggcgaggccgccctgaatagcttgaggttcccgtggttccgggtcgcctacttcttcctctggaccgcgctctacgtcgtcttccagtggatcgtccacgcagctacgccgatgtggtggccttacccgttcctcgacctgacatcgaacctggcacctctgtggtacctcgcggtggcggcgctgcagctgccgtgctacgtggtgttctggctgctgatcaaggtgaagcaccacctgctggccaggtgcttcccggtctcgtacgtacgctagctaggggctagggcacaagcaggcaggcccgtcttctccgccgccaacggtgagagcaacgcaagctagctagagaataatatatggcgggtccgggctgtttataatttggtggtggtggtggtggactggtgatggggagtgaggggacgagcgtttcgtgtgcaggtgccctccccgatcaagcgaagaacagaggggagtggcgcgtggtggaagggaaggagatgcgtgcagtttttttacagggggtataaaaactataaaatagtttggtgtacattggaaggaagctaagcatggtggtagtctttatttgagaatttttttgtattttttttgccgtggtggagtggaagtgaacaggagagaggttcagggcagcagggaatggctgtgtatagctttgactgattggatgagattgaaatgaaatgaaatggagaagatactgttccttgacatctt

SEQ ID NO: 115678 - DNA, 343 bp, Zea mays
  Clone ID: MRT4577_36982C.1
atcttcgcctggggggttataccaacaaaaaaccatcgggggggcccaatgcaacaaaaaaaaacaggttggtttttttttctgcccgagcttgctgggaaaaaaaaaaaaggggggaaaaaaaaaggaaaggagttcccacatccccctaacttggataaaaaaccctggtgggcttggacacaaaaatggcccacccccttcctttaaaagggggtcataacccttttgaacggggggacaccctttggatgaacatggaccccccgggcccgaaaggtttgggggttcccaaaatcgccactttccttggaaagggcccaaaaatttagccccccctttt

SEQ ID NO: 115679 - DNA, 715 bp, Zea mays
  Clone ID: MRT4577_36983C.1
gggacaccgagttcttcttcttaatcttcctcttcgtctccttctagtagtgggcagagagagatcgagtgctaggggagaagcaagcaagcctggtttcctcctcctcctcctcgtgggctcacacaaggcttccttcggttcgggggtgcgaagcggcgcaacggcggaggcggctctagcatcaccggccgacggtcctcctccttctcacgaaaggtactagagcggcggcggcggcggcgcatcaagcaccgcaccgatgggcccactggagccgcgctaccgtccaggcggcgcccccgaggacacgactaagagaagggcctccaagagcaagagtttcaaagacgccgagaacttcgaagtcctcgtccttgagaagagctgcggttgcaagttcaagtctttgaggatcttgctcatagccatcatctccgcgacagtccttacccttgtaaccccgaccttatacgagcgccagttgcagtcagcctcccggtacgtggatgtcgggtggatgtgggacagagcgagttccgatccgcggtacgcatcttctgccgatgttaggtgggaggatgtgtacaaagcactggggaaacctaagaagcggtaaccgccagagtcatctcagagttgggctcttgaatttcaacagcaccgagtacggctcctggacacagttgctcccagctgacagccacgttatctc

SEQ ID NO: 115680 - DNA, 597 bp, Zea mays
  Clone ID: MRT4577_36984C.1
acaccgagttcttcttcttaatcttcctcttcgtctaattcggctcgtgggcagagagagatcgagtgctaggggagaagcaagcaagccaggcagcagcaaccgcgcctggtttcctcctcctcctcctcgtgggctcacacaaggcttccttcggttcgggggtgtgcgaagcggcgcaacggcggaggcggctctagcatcaccggccgacggtcctcctccttctcacgaaaggcactagaggagcggcggcggcggcggcgcatcaagcaccgcaccgatgggcccactggagccgcgctaccgtccaggcggcgcccccgaggacacgactaagagaagggcctccaagagcaagagtttcaaagacgccgagactttccgaagtcctcgtccttgagaagagctgcggttgcaagttcaagtctttgaggatcttgctcatagccatcatctccgcgacagtccttacccttgtaaccccgaccttatacgagcgccagttgcagtcagcctcccggtacgtggatgtcgggtgggatgtgggacagagcgagttccgatccgcggtacgcatcttctgccgatgttggt

SEQ ID NO: 115681 - DNA, 610 bp, Zea mays
  unsure (1)..(610): unsure at all n locations
  Clone ID: MRT4577_36985C.1
ggggggggggggggcggggggggggaacataatactacaaaagagtaagataggccatgacactgtaagtctggggacaaaatacccgatgaagtaccatgcaaaatagcctagaatctgtgcaatggcacatcatgaatttggaaaaccctatgtagtaccatatattggggtccctaacatgagttagcaaaagctgtgagctgatactctgtggctttggcggttgtgcgactggtggtagcnacaatgtaactgtgggatttgtaaccagccgtttagtactgtccttatatgccttaccctccccaaacaaaagcctaagcctttttactaatttctgttaatgccttaaaggctgttgtaagcgctcccgtaacccgatcgtttgttggctctggtgtaactggttgtcncatagccngctgtgggggtcgggttgtactgctgcttgtaattgtggcctttgtactaggagttggtgggctactaccccggggtggtggttgattaaacgtaatgttagacccacccanccattatgctggcaagcccctactagtaatggctataaacctatgtggnataaccccccccccttttataactg

SEQ ID NO: 115682 - DNA, 1235 bp, Zea mays
  Clone ID: MRT4577_36986C.1
gtctccccgcgtcggcgtactcttgtagtatcggcagtcacatatatagagcttcggcccctcccgagctcgcacaccgagagttcttcttcttcctcttcgtctccttctagtagtggacggccaggcaggcagcagcaaccgcgcctggtttcctcctcctcctcctcctcctgggctcacacaaggcttccttcggttcgggggtgtgcgaagcggcgcaacggcggaggcggcgctagcatcaccggccgacggtcctcgtccttctcacgaaaggtactagaggagcgtgagcggcggcggcggcggcggcgcatcaagcaccgcaccgatgggcccactggagccgcgctaccgtccaggcggcgcccccgaggacacgactaagagaagggcctccaagagcaagagtttcaaagacgccgagaacttcgaagtcctcgtccttgagaagagctgcggttgcaagttcaagtctttgaggatcttgctcatagccatcatctccgcgacagtccttaccctggtaaccccgaccttatacgagcgccagttgcagtcagcctcccggtacgtggatgtcgggtggatgtgggacagagcgagttccgatccgcggtacgcatcttctgccgatgttgggtgggaggatgtgtacaaagcactgggaaacctaaggagcggtaaccgccagagtcatctcagagttgggctcttgaatttcaacagcaccgagtatggctcctggacgcagttgctcccagctgacagccacgttatctccactgtaaggctcgagcacgccaaggacagcgtcacctggcagacgctgtaccctgagtggatcgacgaggaggaagagacggagataccctcttgcccgtcgctgccggagcctaacgtgccaagaggtgcgcgctttgacgtcgtcgccgtgaagcttccctgcacccgtgtggcgggctggtcgagagacgtcgcgcggctccatctgcagctctcggcagccaaactggctgtggcgtcctcgaagcgcaaccacgacgacgtccatgttctcttcgtcactgactgcttcccgatcccgaacctcttcccttgcaagaaccttgtgacacgtgaaggcagcgcctggttgtacagtcctgactccaaagcgttgagggaaaagctcaggcttccaggcggctcctgggagcttgccgttccactcaaagccaaatcgaggcttt

SEQ ID NO: 115683 - DNA, 408 bp, Zea mays
  Clone ID: MRT4577_36987C.1
aactcatcttgaactgctgttaaacaggaacgtcacagacatttataggcctaatataaacaagaacattccacctataaaaagattacacagggttcctaagcacctattccttggggcgtacaatatatattacgatatccctaccgggccttaaaaatccaccaaaagattcttcatgcaggagctaccataccatgcaaaccttagcatacacatcgggactaacatagcaatgttaagtggacaggcacagcaagcattgaaacagaggattaaccttgcacaaaatgaaaatctaatgtgctagtgaagctttgtaacatgaatgggcgcactcccaggaggaaggccaagctaattgctaaaatggggctaagtctgtttgaatggaaacacattggacac

SEQ ID NO: 115684 - DNA, 625 bp, Zea mays
  unsure (1)..(625): unsure at all n locations
  Clone ID: MRT4577_36988C.1
ccggccgggatgctggctctgtgtgtccccccattcacttcacactctagactctagttcgccccaggagtctggcaggtcaaagaaggaaaaaagacaaccgaaggatcaacggatcaagcgaggaggcgtgacatccatggacccattcctggagaaattcttcccggtagtgttccaccggaagaactccggcggaaagaacaactactgtaagtacgacaaccagggactagcggcattcacatcgtcactctacctcgccggcctcgttgcctccctcgtcgcgtcccccgtgacgaggaactacggccgcaaagctagcattgtctgcggcggcgtgagcttcctcatcggcgcggccctcaacgtggccgccgtgaatctggctatgctcatcctcgggcgcatcatgctcggcgtcggcatcggttttggcaaccaggctgtgccgctatacttggtcggagatggcgccggcgcacctccgcggcggcctgaacatgatgttccagctcgcgacgacgctgggaatcttcacggcgaacctgatcaactatggcacgcagaacatcaagccgtgggnggtggcggctgtcgctgggcctcgcggcggtgccggcgc

SEQ ID NO: 115685 - DNA, 661 bp, Zea mays
  unsure (1)..(661): unsure at all n locations
  Clone ID: MRT4577_36989C.1
tccccattcacttcacactctagnatctagttcgccccatgagtctggcaggtcaaagaagggaagagacaaccgaaggatcaacggatcaagcgaggtagacgactccgcgtctaattaaacctgtggtctgcggacgggcggtcgtcggttagagcattgcttccgtgtggtgcggttgatagctcggatcttctgctggcggagttcatcagcggcgggatccagatgatcgtctgccaggtgatcgtggcggtgatcctgggcgtgaagttcggggcggagaagcaactggcgcggagctactcggtcgcggtggtggtggtgatctgcctgttcgttctggcgttcgggtggtcgtggggcccgctgggatggacggtgccgagcgagatcttcccgctggagacgcggtcggcggggcagagcatcacggtggccgtgaacctgctcttcaccttcgccatcgcgcaggcgttcctgtcgctgctgtgcgccttcaagttcggcatcttcctctttttcgcggngtggatcaccgtcatgaccgtgttcgtctacgtcttcctgccggagaaccaaggcgtgcccatcgaagagatggtgctgctatggcggaagcactggttctggaagaaggtcatgccngacatgccgctcg

SEQ ID NO: 115686 - DNA, 137 bp, Zea mays
  Clone ID: MRT4577_3698C.1
gggaacctcaaaggtataatgtgttgatttaatgacaaaaccacataaaagtggacactcagatgaccaattatggatgaagcacaaaagttatatgaggcaaaatatggaaagccttttgctttggtgcgttggtc

SEQ ID NO: 115687 - DNA, 2220 bp, Zea mays
  Clone ID: MRT4577_36990C.1
gccggccgggtccgagtagatacgtattcctatctgtatctcaacggcccgatgcatgagttagcttagctgtcgtcctgctcgccgcttatgtaagcaaccgtagacccatccccaacatgctggctctgtgtgtcccccattcacttcacactctagagtctagactctagttcgccccatgagtctggcaggtcaaagaagggaagagacaaccgaaggatcaacggatcaagcgaggtagacgactccgcgtctaattaaacctgtggtctgcggacgggcggtcgtcggttagagcattgcttccgtgtggtgcggttgatagctcggatcttctgctggccgagttcgtcttggaggagaagagagagagagagagagagagagagagagagagcgccgggatcggagccaggaagcatccagcagcgatggcgggcggcggggtggcggcgctgggcgtgaagacggagcgcgcggcgcagtacaaggggcgcatgacgctcgccgtcgccacgacctgcctcgtggccgccgtcgggggcgccatcttcggctacgacatcggcatctccggaggcgtgacatccatggacccattcctggagaaattcttcccggtagtgttccaccggaagaactccggcgggaagaacaactactgtaagtacgacaaccagggactagcggcgttcacatcgtcactctacctcgccggcctcgttgcctccctcgtcgcgtcccccgtgacgaggaactacggccgcaaagctagcattgtctgcggcggcgtgagcttcctcatcggcgcggccctcaacgtggccgccgtgaatctggctatgctcatcctcgggcgcatcatgctcggcgtcggcatcggttttggcaaccaggctgtgccgctgtacctgtcggagatggcgccggcgcacctccgcggcggcctgaacatgatgttccagctcgcgacgacgctgggcatcttcacggcgaacctgatcaactatggcacgcagaacatcaagccgtgggggtggcggctgtcgctgggcctcgcggcggtgccggcgctgctgatgacgttgggcgggctctttcttccggagactcccaacagcctcattgagcgcgggcgcgtggaggagggtcggcgcgtgctggagcgcatccggggcacggccgacgtggacgccgagttcacggacatggtggaggcgagcgagctggccaacaccgtcgagcacccgttccggaacatcctgcagccgcgcaaccggccgcagctggtgatggccgtgtgcatgccggcgttccagatcctgacgggcatcaactccatcctcttctacgcgccggtcctgttccagagcatgggtttcggcgggaacgcgtccctctactcctccgtgctcaccggcgccgtgctcttctcctcgacgctcatctccatcggcatcgtcgaccgcctcggccgccggaagctcctcatcagcggcgggatccagatgatcgtctgccaggtgatcgtggcggtgatcctgggcgtgaagttcggggcggagaagcaactggcgcggagctactcggtcgcggtggtggtggtgatctgcctgttcgttctggcgttcgggtggtcgtggggcccgctgggatggacggtgccgagcgagatcttcccgctggagacgcggtcggcggggcagagcatcacggtggccgtgaacctgctcttcaccttcgccatcgcgcaggcgttcctgtcgctgctgtgcgccttcaagttcggcatcttcctctttttcgcggggtggatcaccgtcatgaccgtgttcgtctacgtcttcctgccggagaccaagggcgtgcccatcgaagagatggtgctgctatggcggaagcactggttctggaagaaggtcatgccggacatgccgctcgaggatggctggggcgcggctgagggtcatgcggcacctgccagcaacaatcacaagggatgactggagtgaagcatgcatggttgcctggttggtttcgtggacactttatataataactgaagaaaacaagacacacactaacatgtaggcggctgcttattcttattgtattttgtataaagcaggctgtgtgatatgcagggataaaaacgaacgagatcgttccaaataaaaaaaaaaaaaaaaaaaaaaaaaaaaaaaaaaaaaaaaaaaa

SEQ ID NO: 115688 - DNA, 221 bp, Zea mays
  Clone ID: MRT4577_36991C.1
gcatcagttaagcaatcaactaatggtgtataagtgtatcaactaacatggacacctaaaaagacattactgaaaaatggaggttgcaaagttaaggaaggtattaagagtgcccagggaactagatttcagataacctctccatgtacgatgcaagcttgcaggtgcttgtcactacagctgacggcggactcctttagatgttcatactgctgcatcga

SEQ ID NO: 115689 - DNA, 387 bp, Zea mays
  unsure (1)..(387): unsure at all n locations
  Clone ID: MRT4577_36992C.1
tcttccccccacactcactactacttctatatctttcttggaatacacacatcacagagaagggatccattcaattttgtcagtaaancccaccccannnacacacaaacattaacctaataccaagagcactaaacgaaaaataccaccattcctttttagatcctacacacacattgttcatcaaaaccacacccaacacctgcaataagattactactgtatcatatcattaactccaactacactaatctatccagcatactacacaccaccttgctcatcgcaccaatacaaaatcaatccctacaaccccaatcaatcactccacaatgtatcaccaacataccaacaatacatgattgaaataccacactcataacacca

SEQ ID NO: 115690 - DNA, 673 bp, Zea mays
  Clone ID: MRT4577_36993C.1
cctcgaggccggccgggacgccagtctctatctaagcatcgttcgtgtcgcgaagacacgacttcgacttcacatctccctcggcgctcgggaggctcgttctacaatgtcgagacacaaggccacctgcccgggtaccctcagcaccgcagcagtcatgaccaacagactcctgacccgcaagtaaaacgagcttgaagagatccacgcacaccgcgacaacgactccgatgaggagatgaaagataggcttgccaaggagcaataggggaagcacccaaacacactttgtccgcgggtccgcacacacttcagacgaagaaagtccactggtttcttcatcatctacaagaagctctagggtgcgatgaatctccagccgaaataccctctcatgaggaatggtcttgctacaatcgtcgagaagacccgcaagcaaatgatagattgtcagaacgggatcaagaagatccgcgctgtcaagaacgaaccaagctgctgacgacaaaaataggtaaacgttcgattacatttgtattactgttctggactatgagtgagataactgcactgtcatagatatagacgtggtaggctctgttacacacttgtaactgaagtgacattctgcagttcctcgcaacagaagtgtacttgtgtcacaatattgcct

SEQ ID NO: 115691 - DNA, 473 bp, Zea mays
  Clone ID: MRT4577_36994C.1
ccaaaagccacgggtaaaaaaacatttaacgggggagtaatccccgagaggggccttgcagccccattatagtacaggcatacaacatcaacatcacaacatggccggggggctccccttaaagccgattgattgttctgagattgccactttaaaaatgcgtattgcatatgggcccggggaccatggtttattaatccccccagcacttcccgactgaaggaaaaagaggacccccccccccaaagaacatacttttaatcccgaaaagctaggctcggcccaaaaaaaaaaaagggggacgggggggcaaaaaactgggcggagcttttccttgactgggtaccatggccttgacctcatgaccaaaaaggggggcatgctcctgccctgtttgcaaaccaacttgcagcctggcaggggaccccccatggggcatcacttatcacattgcaaaagcttgaagaaatgca

SEQ ID NO: 115692 - DNA, 208 bp, Zea mays
  Clone ID: MRT4577_36995C.1
ttccttctttcttttttgtttttttgtgtcccaaccgaggggggccacctgacttgcacgctcggtgagaaccaattcaaaaaactggcggaagaagccccccttgaatttttttcctttaaagggattcctctttcggcgttttcctgggagaaaccggacaggtggtcaatcttatttggcttcgttgttttttcctacaaattaa

SEQ ID NO: 115693 - DNA, 481 bp, Zea mays
  unsure (1)..(481): unsure at all n locations
  Clone ID: MRT4577_36996C.1
ctggacccatcctccatggacaatggtggtctctctcgctctacccgacgtgcngnncaccatcnnctcctcnntccatccanngagcctnngcttggtagagctcgtaacaatcgacctnncgccgcttcaaccatctctaggcnggctagcngctttctgggctgaatccatggaatgtagtttatggatagtaatggtggtagaataatcttacatagctccgctcgtgtatgaggtaggactgacagtcgctctggctgaatgactgctgggcttcttcatagcaccctgatttcgctctggatctgactcgacatagagtattattattctggcatggttttgggtctcccagttctggctgctgtcagcaggacaggaatatcttgggtacgcctagagccctggcgacttctgtaatctgtcctgagttctaaaatgtttcagatattcatttttccatgaaatcgttttcgtc

SEQ ID NO: 115694 - DNA, 438 bp, Zea mays
  Clone ID: MRT4577_36997C.1
taagctcttattctatataacagcgcaccagaacctgatcgacaccatgaggtgtgttgttcgggggcctcgctctactggctctcgcttgctagcgctacttatacgcatacaatcggaatatgcggttgccaaccaccgataactgattatttaccttcaacggggcatgtgccaccttcggttcacctgccacctgcggtgcatctcccaccgcctgtccacctgccttcgccagtacacctgccaccgacggtccatgtgccgccgacggttcatatgccgtcggcaccatgccaataccctacttaaccgtcccggcctcagtctcatacccagccacacttatgcgcgtgccaacagtcgcatccaagcccgtgccatctgtagggtaacctgcggcgtcggcagcaccccgatcctgggccaatgcgtcta

SEQ ID NO: 115695 - DNA, 284 bp, Zea mays
  Clone ID: MRT4577_36998C.1
gacaacaactggatgtttttattaaagggatccccgcttataactttgacggagaagactgttggtgcaaggaaacgcatactatacccgcggcgctggacacagatgctcacacacagtccactatacatgcaagcgcatgagagaatctcacccatctctcaacagctgagggggagatctctatactctcggcggtgaggtgaactgtgcacccccctaaaagccctttacgaatttgagtaaaacctagaggcactttctttgagcatgtgggagatcaa

SEQ ID NO: 115696 - DNA, 295 bp, Zea mays
  Clone ID: MRT4577_36999C.1
tatatatagccaagacacacactaatactttgcattccatttcatctcagaggatagagtgatgggcggaatctccactcatgcttatcgcggtcctcctcctgctcgtttgttacaccgggactcatggcggtccggtgactatggtgtcagccaagacttgcaactcgaatagctttcgctttaatgtaccttgctacagggacgccaactgtgcagacctttgtctgaccgaaggtttcaccgacggcgtgtgcaacggcctacacgaccgctgcttctgcaccaatgactg

SEQ ID NO: 115697 - DNA, 691 bp, Zea mays
  Clone ID: MRT4577_3699C.1
cccctctcgagtttttttttttttttttttttttttttttgtcggccttgctgcgaggcttaattataaataaaaggaacacacgtaacactattcacatatccaaaacacagttacaacgtatataattgacctgcatctcgctaatggcgatgcatctacattgatttacagaaaaacgaaggctatcaacactggggctactatcagtctcacagataagctgagtaaagaccaacagacaaatagcaaaacgatggctatattgctcatctttcaacctccatgaccgttagtgttgaatcattgttggttttgttgaatctgctgagtgaagttgggattctgggtctggttctgaaggcccgccatactttgcacgttctgtgcacctgcctgcatgttcccgtataccccttgctgctgctgctgctgcattcccatcgtgctgctatttgtggctcccataccgaacactgttggtgaagagtagcccgatgcacaagttgcccatgcaaaggaggaagatccatttctaggagatggggcctgtccctggtagcaccaaatcatctgctgatcctcctcccactcccaatctgagatgccctggttgaatacccgtgcgttgcaacaaataaatagtgcaacaataccatatgtatgaccatgtgttgtattggtaatcaaa

SEQ ID NO: 115698 - DNA, 4205 bp, Zea mays
  Clone ID: MRT4577_369C.1
gccgaaagggtttctccaaaaccctctccaacaaaatcgcaaccgccggcgaggatcggcgccgccatgtcccagatcctccgccaccgcctgtcggctcactaccacggagtctgcggccactgctgccgccgcctcagctcctccgtctacggcggcggcgggagtcgccgcgccgtcgccgcgccgccgcaggacggcgagggcagccgagcggtgagggtgtctgtgtggtgggacttcgagaactgccacatccccaacggcgtcaacgtccaccgcgtcgccccgcgcgtttccgccgccctccgcgccgccggcatccgcgggccgctctccatcaccgccttcggggacgtgctgcagctcgcgcgctcctcccaggaggcgctcgccgccacgggcgtctccatctcccacgtcccaagcagtgggaagaatagttctgaccgctcttttatggctgatcttgtctactggattgctcagaatccgccaccagttcattttttccttatatctggcgatagagattttgcaaacatcttgcatcggttgagaatgagcaactacaatgtactgcttgcttgtcctagtagtgctaccagtgtactgtgcagtgcagcaacaatcatgtggccttgggaaggcttagttagaggagaggatttgtcaccaaaacgttttaacaacccgccggatggtttacatggatcttggtatggtcactaccgaggagcccttgacgacccccccctggagaaggaatcagaggaacccatcaaggtagcatctgttccgaagcagttttcagtaccatctaataccaagcactgcccagttcccaaacatgtaaaaaatgcaattctggaggtactacgttcatatcctgaaggggtgaacatctcactcctccgaaatcagcttgtaaagaacaaaattgatctgggtacaaatttctttggccacaagaaattctcttcctttcttgaatcaatgccacatgttgttaaattattaggttctcgattaggtgaaaacgaactatatgcaattgctgccaacaaaaaatttatgcagcctggtgatggggctcttgatgaccccttcctggagaagggagcagaggaacccatcaaggtatcatctgattcccagcattgttcagtaccatctgataccaagtctagttcaatccctaaatatgtaacagatgcaattctggaggcgctatgttcatatcctgaagggatcaacctttcactactccaggaagagcttgcgaagaaaaaaatttgtcttggtccagatttttttggccacaaggatttctcttgccttatacaatcaataccagatattgttgaattagtatgtcctcaaactggtggacaactatatgcaattgctgtcaacagaagatcactgcagcctggtgacggaagtactaagacccttagctcagctcaaggtaatgccagggagaataacccaactggaacagctcacagtaataagaagaatacactaagttctcttcgaagcatttacaagagcagaagcttcacagagacactaagtgaacatccacctacattttctgtcttaccttccccgtcaaatgggctatctgaggaccaaattgagtgcccagtggtggatgtgaatgggtcgacagagtcaccagcaaagcacagggaagttggtgaaatgactacccctggaactccctcttcctcaggggtggaaaatgctgctaatgaatatggcttctttaaaaggatctggacaatgtggaatggtcccaagaatgttaagtctgaggtttctcaaaattgtgaaagcacttctgctgaagtgattgatgatttgcaggtttctcaaaattgtgaaagcacttttgctaaagtgattgatgatttgcgaactcctttggaagagtataatggtgatcaccgtataaagcttttgaggaggatacatgaaacctcttccaaaaatgatcgctcagatggtactgagggcatgttagcagtaagtgataatttatcgatttcattaggtgatgatcattctgaaaaaataaagagagatccatcaattcctgaaaacccagaaccatgcagaaaacctgctgctgtttccatgattaaatctggaaaaaaggatgatatttctgaaatgaataggggcatgtttaactgggcttcaaggtggtggccatttgggaaatcagatgcagatagtagtacaaccaacataaatgccactgatgaaccgaggactgactctattgaagaatttgaatcttcaaacgctccaactaatggaagtgcacaacaggtggttcatgaaatatttacaaagcctgacttgtggtctgttttggagcaacagttatcagaacctcttgggtctgaggttgttttgaaagcaaagacaaggaagagaagaatacaaatgaggtccatatattgatttcattatgtgttgtgtagtaaactcagcatcgcctcacattttgaaaattatgatcaaccattgcttgcttgagcatccatcatataataattcttctatatgtttccttctgcaagtaaaaaggatttatgagaaatgcaaaatcatgttttggatagagcagttattatatgattgcttttcttggccaggcaggaattggcacacagattgcagaagttaaattgctggcctttgaaaggcctccttgataaagacctgcatcacctggtacatctgttaatttctgaaaagaaatggattgaagaaacttcttccagaattttccctttccgtcttaccctccctcgcaagagaagatgtgtcccatcaagttccagcaaatccaacggcctcagttacattttttcaagtgggaagccacaaaagggcagatacgttgacaataacagtaggaaaagcaggtccctcactagagaggagatactatcagattgtcacaagctggtgaaggagcttctttctgagcatgaatatggattcaacatcggaattttcaaacgccgtttttcccaggagtatggatacgagcttgaacaccggaagctcgggtatctggaccttgaaacgctgctgcatattatgcctgatgtaagggtgaaattcccaagggtcatgcgctcagaacacgggaacgggcaggctggcagcaagggagacggaaaccgaagcagcggcgatgacttgatctgggaggagcttggtcctgtatctgccacaactgaaaccgccgccgccgccgctgatgcaggggccgacaaggaaacatgctatcgtcctcccactccttcagacgacgagttctcggacagcgacagcataaaagaccggcagcctagaaggaacgccgagcagcagagctcgcttctccagatcattggagcttggaacagcagcaagggtggcgacgtctctaacaacaagcctcaggacatcgacgggttggtggactgttcgagaagcagcccgggcagtgctggcaccagcgcagcttcaggaaaggtgcagacgtcgtctccgaagctaccgcacaagcagtactccttcgtgtcggactccggagaggagagcgatccggataagctggtggagagcgtcttggacagcctgcagaaagcacggggcggctcgaagctgcacaactgagcgtctgctgccatcgaattattgtttttgcaacctaacgagtcgtgcttatggtggtggccatggctgactgtcaaggacagcggcgcctgcaagcatcagccggagagactggtgaataaagctcgtcttttacttggactaggccgtagtacaatgggaacagtccttggtaattggtatgttaacattggctagagaccgcctcccatttctgtttcttgtttctttcttttcatgcaggatggttgtccgcccaatctacacgctcattttcttaacaaattggttaacacggcggggcttagacggtcgttcgtcaccagtgttggtattccaagcccaatcttttttttgcttgtagtatagtaaacataaaatgacatggcacatgctggtgtctagagtattgctgtttctggagtcccaagcattcatgtgatggcacattggaatgccagttgtactgcaatagtgccaatgaatcctatctaacactaaaaaaaaaaaaaaaaatc

SEQ ID NO: 115699 - DNA, 3414 bp, Zea mays
  Clone ID: MRT4577_36C.1
cctcgaggccggccgggaaccttccttccgctcacgacctgagtcccctctcccaggcccaggcagccgccgcccgtctctctctctcctccgagtcccttctcccaccgccgcaagcgctcgcccgagccacctccctctctccctgtggcctgaccgtgatttgggcgtggcatcctaaggcggtcaagattcgagaggctggaggaaccaagcgtagggcctccgccaccacgtcgtcgtccgcgcgcgccgcccgccggcgcaaggaggcgccacagcctccgacgcctagggagatgggggccgattactacaaggtcctcggcgtcgaccgcggcgccggcgacgacgacctcaagaaggcctaccggaagctcgccatgcgatggcaccccgacaagaacaccaccaacaagaaggaggcagaaaccaagttcaaggatatctctgttgcatatgaggtccttagcgatcccaagaaacgtgcaatctatgatcagctaggagaagaagggctcaaggggcagccgcccccaggagcaggaggttctggcgcattccccttcttccctggcggggctcattccaccgctccccattttaatcacaggagtgcggatgatatatttaaggagttctttggatcccctggcatgggtggcatgagagcggaaccaggattccagaggtcaatgtttggcaacgatatcttctcttcacgctttggcgctgagggttccaccagtatgcagcagccaccacgcaaggcagctgcaattgagaacccacttccagtcagccctttgcagatctgtacaagggcgtcacgaaaacgatgaaaatctcaagagaggctatagatgccagcgggagaatctcaaacgcagaggatattctgacaatagaagtaaggcctggttggaagaagggaacaaagattacatttcccgacaaggggaatgaagctccaaacatgaaagctgctgatattgttttcatcctcgatgagaagccccatgatgttttcactcgggatgggaatgatcttgtggtgactgagaaaatctcgctggtggaagcgctgattggatatactgcacgtgtcactacgcttgatgggcggagcctatcattgcccatcaactcgataatccatccgagctacgaagaggtagttcctagagagggcatgccaatacccaaggacccctctaagaagggaaatctgcggattaagttcaacataatgttcccttctaggctgacgtctgatcagaaggctggtctcaaaaggatattgggttcttaggccgcctcaaatgacattttatagtgaaaggcgaagccatttttgcgggctccggctcctcctgtgaaaatgtgaaaagggcttcggctcctcctggaggattatgcacgacaggagctcaggattatgctgtaggcaaacttcggtgtttactggcacaaatcaagtgggattaaaacttatgatagaatgcttatttcttctttggccatgctataaagatatagggcatggatgtgcagtttaaaagtctaatgatgagtgataatgtacacttataaaatctagtaatttattgaagcacaaaaaaaattgaaaataaatccaacttaaagagtttaaaatagatgagttgataatactgcagcaggagtccgactctgtcctgtttacaaagaagatatatagataggtccatgtccaatgagtatagtcgatctaaactgctgagctgagagagagggagagagagagagttacaggcgtatatgaaggtcactcgacgatcatctgttctgcaatgtgctgctgttcaacaccagataatagattggtaataaacaaagcgactcaagacgaatactacaaaacaaggcataatcttgattgtcgacgatgttgttgttgtgtcccagacgcagaaggtaaaatattcacagcagtcagctcatcatgcgctctttttccttttctcctcttcaatcttagccttaatgtaagagtacatagcaacaccagctatggcaatggacgtgccaattccagtttgtgtgctaattttgttgccaaaaacaacgattgagaagccaatgacaaacacacgcttcaacacattgcccacagcatgtgtcagaggagccactcgctccaaggtgttcgtagcaatctggttgtacagatggtagaacagtccaaccaagaataggtcactaacaaactttgtcaagcctacttttgcaatggcatcactgaatccatgctgcattagccggggcccttcaaagatcactgcaggcggaatgcaaacaatgagagcaattattgaaatgtaagcatacacgttggtgctatccatgtcagtcatggctttcttggaataaatgctcctgtaggtgaatgagatgtttgatatcatggcattgatgaagccagtccagttgaatgagagctcagtaagggatgccattgaaacaccgatgacaacaggggcaagagaaagccacagagagaagggaacttgctgtccaaggataaactgagtagcagctgcgctgaagaagggctccagagctttgatagtgtgggcaaatgagactgcaacagcagcgaaggacacattgctagtgatgtgaccaataccatggcacagggcgactggaaagagaagcttcaggagcgtgccattgataggcgctcgcttggggagaccgacactccagctgatgaggcagtatacgacacccactactagatggatcaaggacacaaagtatggataggggaagtagttgtagatcttcttgttgaggatgttgaatatgacgttgaggaagtaccacatgaagaagaagaagccagtgaccagggccgggtacttctccaggaaacccacagacttggcctccctgcctgcggctgcggcgggccgccgtggcgtgtgcctcctggcgccctgcgacgacgacgggagcagtgtggcggggaggaggagcgacgggcggagctggcgtccccagacgagcggggcggcatcgggcaaggcggcgcagttcaacgtcccagcggcgtggtgcgacggcgccgcgagcgcgggggcgacccgacggcggaggcggaggaggccggagacaccggcggccccgccggagagcgtcccgagcgccgacattgcagttgcaggagcctgcaggcagggggtagtctgggggggcagaggcagaggcagatgctggcgcgggccgggactgtggatggtatcaataagaagggtttgtgggtggtggtctggtggaggggggaggcgccggggagttggttggcggagaagcgcgcggggcggatagatagagcacacgccccggccggcctcgaggtacccaatg

SEQ ID NO: 115700 - DNA, 461 bp, Zea mays
  Clone ID: MRT4577_37000C.1
gttgacccacgcgtgcgcgggaggagaggacatgggcagagactgcaagtaacaactgagaggacatatgaagggatggattatggatagagggtacgtgtgagtgagcagaccataccttgtgttgcatccaagaagatgctctgctgggccgccgccgccgcctcctcctctactgctgctgatgctgctgcgttggagtcggagtcggaggactccatctccaggtccaggagtaggagcaggagtgcagtcgtgtagatggagattgagatgcagcctactgcctactgcctgctgactgcctagatgggagggaaatgggattgatggttgggtctccatggattgctttgcttcctttatacatagcactaggaggggggaggggcaggggcaggggcaggaggaagagctcaccagcagagcagagtcatcagtgggcactatttaccaaacaa

SEQ ID NO: 115701 - DNA, 404 bp, Zea mays
  unsure (1)..(404): unsure at all n locations
  Clone ID: MRT4577_37001C.1
ctgccgagatgaagaaaggaaagagcttgtgatgcggattatcgactantcttcggcaatacacttggggacaaacaactagagacttgggtgaaggcgacaggatttcttggtggctccaaggatgttctgccgaccattatatctcctgaccagtacaagaagaggttcaggaaggccatgtccaagtacttcttggctctacctgaccaatggtcaccgtaacgccaacaatgcatccaggccattccaagcgcggcgacaggcaggatgaactctgtggaagattgtggcgattgttgtccagccaagcagaggttaggcgtcaatacgtgtacataccctacactgtaacatgaaaatgcaaaggaaatgaaaatacgcgaactcgcgagttccttacc

SEQ ID NO: 115702 - DNA, 2647 bp, Zea mays
  Clone ID: MRT4577_37002C.1
aattcggcacgaggcttttgggaagtttctggaacttagtttttcaaatcacacaacagccaatcgaattgcctgctgtggacactccctccaaagggactgccttcgtttctatgggcttgggagcatggttgctgtcttccgttattcaccagtagacattctttctgtcaacttgccatcctcagtactggactttgcttgtccaaaagctcaagattgggtcatcaaagaagctgttgatgtatgcgctaggaaggaacatctgtatagggaaatcgttgctaaacttgactgcatcgaaaagatagttaaagaccagaacattggtatgaagtcaggcttgcataaacatattgctgatcttaaggagttgcttaaagttgagtggaagaagtatgacgttgtatcagcgttttctatcgtagatgacttgcagacatttgaaccgtatataggtgttctagagctcaatctcctgaggagagagcttgtacgtgatattcacgtatgggatcgcagactgtacatgatgcactccctcacgaaagaaaactgtcgtactatgccaaatgatgcacaattttctgagaagcttactgaaagctcattagaacaatcaaaggatgtgacatctggtaaacatttgaatgctgagagttctctagaacagaatcaaccaagtatgttggaagtatgagcagtttcagtgaaatcatcccctatgacagaacaaaccaacactagcatttcacatttggtattggaaaccaacattatgggtgatgcatccatgcattctgtctcaactgttatcagctttgccccaggctcatatgaaatgcagagtgaaggagtgctggctgaactagaagctggaaagactttgcagaaatcacaatcttctgcctccaatctttctgatagaattgacttagcatggactggttctggtcagcttgttaacgattcatcaagtagcatggaggcagtttcattcatacctgctagtctgaaggataatcctgcataccagaaggttatagcacccattagaatcaaatcgtttgattctgctataagttccagaaatgttgatgattcaaatgctagtataagaagatcttattctcaaaggcccccaaaggctattgagagaactggtaagggtctgtcaccaacattcttgaacaagctctcacttcctggtatgattcatggcgagagtcggttgctgctgtcacaaaatgattcaggtgttattgttccaatttatgatgatgaaccatctagcatgatagcccatgccatgactgttccagaatatcacagcttcttgttgccacttctgtatcagaataatgaatctaatttattgaattatggttctgatcagcctcaacctataactagaaatgattctaagtataaccatttcactatttcttttgaggatgaagactcaaattccgttgataaagcaaaattttctgtgacatgttattttgcaaagcagtttgatgcaatcaggagaaagtgctgtccagatgaactagactatatccgctccttaagtcgctgcaagcgatggagtgctcaaggtggcaagagtaatgtctactttgccaaaacactagatgacagatttgtgataaagcaagtgacccggacagaattagattcatttgaggattatgctgctgattatttcaaatatttgatagactctgtatcatctggaagcccaacttgcctcactaaagtccttggtctttatcagatcactgccaagaatttgagagatgggaaagagctgaagatggatgtaatggtcatggaaaacctatttttcaagagaaaggtatcaagaatatatgacctaaagggttctttgcgttcccgctacaaccctgatacttcagggaacaacaaggttctcttggatcttaatctgttagagacacttcacacaaagcccatttttcttggaagcaaagcaaaaagaaggctagaacgagctgtctggaatgatacttcttttctggcatcggtggatgtgatggactactctctcctagtcggcattgatgaagaaaggaaagagcttgtgatggggattatcgactatcttcggcaatacacttgggacaaacaactagagacttgggtgaaggcgacaggatttcttggtggctccaaggatgttctgccgaccattatatctcctgaccagtacaagaagaggttcaggaaggccatgtccaagtacttcttggctctacctgaccaatggtcaccgtaacgccaacaatgcatccaggccattccaagcgcggcgacagggaagaccactccggttttctttttctttttctctcccttctgtttcttttaggacaatctatccatctgtgcctattgtatgctgtttttgttcacaacaggcaggatgaactctgtggaagattgtggcgattgttgtccagccaagcagaggttaggcgtcaatacgtgtacataccctacactgtaacatgaaaatgcaaaggaaatgaaaatacgcgaactcgcgagttccttaccagtaaaaaaaaaaaaaaaaaaaaaaaaaaaaaaaaaaaaaaaaaaaaaaaaaaaaaaaactcga

SEQ ID NO: 115703 - DNA, 1126 bp, Zea mays
  unsure (1)..(1126): unsure at all n locations
  Clone ID: MRT4577_37003C.1
ggccgcttttttttttttttttttcctccgtgtcaaaattccattgatgagcttttgcagcccgcttgcttgcagcgcatctctacctgacctgatagctcatgaactttttgacaaaggcctgtccaattcgacaagcgcccaatcaaccaccggaacgccattgcatgcatgcagccatatcgattcgtatcgtccgcatctttcacgtccgaaaacccatacattacaagtttgcttgcgcagcctcacgcgcagcctcgcgctcaacctcgtacatgaagtcgaagtatggcttgtcaaagtggtgcacacgtacgtatccgtcctctcctccactgcagtaactcgtgccctttggatgtacagcaacatagttcaggggtccgaagtggccacgtacgcgaccaatctcctccatgaagatcttgtggtagaaacgggcctcgaactttccttggcgtgccgaagtggtggtaacatccatagcggcctgtcctcctccaagaataacgtagtcctttactggtgtgattgctgcagagttcagcggagtgtctgcaacgtatgacttcagaacgctaaggtcctcgacatcgatgagctttgccgtcttgtccttgcttgcggtgatgaagtacgacctgtcaggtgcccattggatgtcggtgatttgcatgtctggctcatgtgcgtcgtagtttgagctaaggagttctccggtcttgccgtcccactgggtgattgagccatcttcgtgtccactgatgatgtacttggcgaggtatgagaagcccgcaacggtcgccttggattcgtcgcacacaatcctgagcaactgttcgtctgattgttgcgcctcagggtcggggttgatttcgtagacgcagatggtcgagaggtgtccggatcgcttctcggtaacaccaagcaactgccttccgtcgggagagaattcgcagcgtttgatactggtgttgaactcccaggtgtgcagaagcttgccggtcgggacatgccataatcgcatggtgttgtcggcgccaccagtggccagcagctcggtggatgggtttacgtcgacggtccatagcgctccctgtgtccgggccgnccagcccgaggg

SEQ ID NO: 115704 - DNA, 269 bp, Zea mays
  Clone ID: MRT4577_37004C.1
ggctgctatcctccactgcggccgccctcctttttttttttttggaacaacttttttttttgattggggggttttttataatacagaggggatactctatcaacacgaacagcacacacccgcagactacaaacacttacgtacggacagacacaccaaacacttaccacctaagctctacaacaacacaccctgaacaatttcttaccaccactacaactgatgtacaagtccttatttatctacccccggtgactatgccttgccct

SEQ ID NO: 115705 - DNA, 400 bp, Zea mays
  unsure (1)..(400): unsure at all n locations
  Clone ID: MRT4577_37005C.1
aaaaaaataaaaaaaggggnnacgggcgggggttaaaaggggaacgggaaaaaaaaaaaaaacccccccaagaaaccctgggcaagggcggaggctaccaccacggccttttttttgcgggttcttaaaccagaaatccccccctttggggtccttaagggaccgcgggaagaaccccaaaaaaacaaaaaaaaaaaaaaggggggggcccccaaaagaaaccaagcttaaggacccgggcaggcgacaaaaaaacttttctaaaaggggacccaaaacaaaaccaccggccggggtttgacaaaccccggagggggaaaacccgggggaacccaaaaaaaccccttggagaagatcaccttttgcaagtggggacacaaaaaaaagccccccaaacccc

SEQ ID NO: 115706 - DNA, 1121 bp, Zea mays
  unsure (1)..(1121): unsure at all n locations
  Clone ID: MRT4577_37006C.1
gtctcactcgggcggggagcgcagacctgacaaccggtgtgtgtattacattatccccgttcgtgtcatctttccttttttcagttaactaccagtagtcgtttcatcctgctttacgatctgcacctttgtttcgtgcttttttgcttgtttagtcgtctgctgtttttcggtagtatgtctcattcggctcgcgtccgttcgttcggttttgtgtgttcgttgtggtcgttgtgttggttggttctagttgtactcttttattctcgtttctcggttggttctacctgtttactctttgttacttttattatactagtatgtaggatattttattgagttgtgttattgttggtaggtatttatttctatatgttgcccttatttttttttttattttttattatggatatggtatgaagatacctcttaatgttttatttgttatcaggttttgtatgtttggttttttttgatctattatgtagtgnatattttatttattttttttgtgtttttgttattatattttttttttttatggttttttatattattttatttgtttttgtttttttattgttattttttttttttataatattgtttttattatatatttttttttgtttttttttattacttttatttttttttttaatttttttttttttttttttttttatttttttatttttttttattttatcttttttttttttttttttttttttttttttttttttttttttttttttttttttttttttttttttttttttttttttttttttttttttctttattttttttttttttttttttttttttttttttttacattttttttttttgttattttttttttttttatttttttcttttttttttttcatttttttttgttttctttttttatttttatgttttttttatttttttctttttttgtttttttttttttttttttttntttgttttttttgtttttattttttttttttttcgtttttacttttttttcattttattttctttttttttttttttttaatttttttttgtttttttgttttctttttatttttagttttatttttttttttaattttttttttttt

SEQ ID NO: 115707 - DNA, 343 bp, Zea mays
  Clone ID: MRT4577_37007C.1
gacagccacactgaattttgacgactcattttctaatagcacggaaaacatgcatcagcataaacctgcgtgcatgagcatgactctgaccttgtaccgcatgcacacacttctggatataggctgatcatatagtaaactggccatctatcattacacaccgcattatagaatccttatggagcaccatccgtgtctgcataaaaaggtaactgccataaggagtgtgactgcgcctatcattagagcctttgatccagagaacctcataggcaactgtgctaatatgtttatcatacagcctcttccatgtctggagggactagactgcttgtcattgacc

SEQ ID NO: 115708 - DNA, 440 bp, Zea mays
  Clone ID: MRT4577_37008C.1
ccgctcccaacccaccctttttttattaaacaaacccccccctccgggaaaacacccccggggacggggcggattcccacatgtttgtcccccccccaacagtccccactaagcgtgggtccggtttaggcccccccccagttggaataataaaccaagccggggccacccccacgctttccattccgtccaggggggcggggggggggcccccccccatttacacctgttttgttatccccccatcgttagtggctgaagttgacaaccgagcggtccggggccccgggcgtccaccccggggggatcacgtggttgggaacaaccgtcctgccggacccggacgtgagggggacggaaaagggcccctgcagggcggccccggatttgtacctccacaccgggccccacgattgttggatgggggcccacgccgaacc

SEQ ID NO: 115709 - DNA, 348 bp, Zea mays
  Clone ID: MRT4577_37009C.1
tgccaatgagcaatagcgatgactgcacgcgcacgcgtgcttgagattgggatcggaggtctggtgtagatggacaatgacagatgcataagggaggcggccatgagcagatcttggctgaaaaaacaaattcataaactattgtatggtggtaaaaagtcattgattgaagaagtgctgtgccttgataaaaagggaccacattgatagatatttgatcaagatttggtcaagtacaaaattagtctaattaaagaaaccagactgcaacggcttgctaaagcagaggatgctgcatgtcattctggcgagcttgcaacagatcttttgtatggtcttatagccgaa

SEQ ID NO: 115710 - DNA, 567 bp, Zea mays
  unsure (1)..(567): unsure at all n locations
  Clone ID: MRT4577_3700C.1
gcctagttctagatcgcgagcggcccctcgcgatctagaactaggaaatatggtttggcattgttacttctcttactcctgtttcatgtcccaatctgaggtgactcgtgttggtaatcatggcatctcagattgggagtgggaggaggatgaggagatgatttggtgctaccagggacaggccccatctcctagaaatggatcttcctcctttgcatgggcaacttgtgcatcgggctactcttcaccaacagaaaaccatcactgagaaagagcagttagcaactggtgttgtcgtgttgcgactcaaaagggcttgcctatgggcatccacataggagccatccccaaatgctgactgaccaaatgttcggtatgggagccacaaatagcagcacgatgggaatgcagcagcagcagcagcaaggggtatacgggaacatgcaggcaggtgcacagaacgtgcaaagtatggcgggccttcagaaccagacccagaatcccaacttcactcagcagattcaacaaaaccaacaatgattcaacactaacggtncatggaggttg

SEQ ID NO: 115711 - DNA, 637 bp, Zea mays
  Clone ID: MRT4577_37010C.1
tcgcacgcacccagccaacgcacacagagacaccagcaggggatctgaggccggccggcgccggacggggcacatacccgtacacgcatgcagcttgccatgtctccgtcgtcgtctctacgccgcaccgcggcggccttcgtcttcgtcgcgctcctcggcctggcgtcgtcgtctctgctgcagctgcaagcggccaggacgacgccgagcgatcgccgcggtcgggtagacccgcggcagaagcaggaggaggaagaagtgcgcgcggcggcgatgacgacgagtagcaggtccggatctacacctgcgtcagcgtcggtgcaagaaagtccgccgccgactaccatcactgttgaggaggcatcgtcgccaccccgcagccgcatgctcggctcggtgcccagccccggcgtcggccactagctacctctccttctccacctgcacctccacctccacctccacgccccgcccgcccatgttccaccatcgatcgccacacctcgacctcgtgccaagtactggtagcgcaaccatgcgagcgcgcgcgtactattaatattgattataccctctgtaatctcaaaaaaaaaaaaaaaaaaaaaaaaaaaaaaaaaaaaaaaaaggggggggg

SEQ ID NO: 115712 - DNA, 698 bp, Zea mays
  unsure (1)..(698): unsure at all n locations
  Clone ID: MRT4577_37011C.1
ccggccgggtctatttaatcacccaagatacccaatacccaatacccacagtacagaccgttcaactacttcaagatgaagtccttctccctgatcactctcttttgcaccctggtcactgctgcagtcatccctcgagatactgtctttgacggccactgctgcttcactctacatgacgtagccaacgatgcagcagtgcaagaaaacagcaatggaaacttgctcctcaatgctggcagcaccagtggcttcttctgcattgacctgtccaactcgcaaaacattctgcgagaccgctctttcaatgcctgcttcctgaaccctagcggcgaggttaaatgcgtcgacccaacacccggctttgagtcttggaccttgaagaagagcggcagcaacactcttctccaccgcgacggtgcaaccgctttcaactcatgctccaagacttcaacaagttcaaagggaacggtgctatttggcgacaagcacactggtgcttcgacgtgcaagaagactacactcaaggtgaagaatttgaaggggacatgcaagaacttttgaggtggtgaccaattggttggatgtttttcggtattcaaattctcgactatcaagtcctactttagcagtttattcttaatagttaaaattcaagcatagaagctcacanaaaaaaaaaaaaaaaacccgcggcc

SEQ ID NO: 115713 - DNA, 259 bp, Zea mays
  Clone ID: MRT4577_37012C.1
aaaaccaaccgggggattatagttccttattgggggacaagctttggctccacacaaatcattttctgccacaagacctagcgcggaaagcctttttgtgtgccaacgaataacaacttatctgaaactgaacgcttcgacataaaacattcctgggcctggcaatataattttccccgcgcatttttttttgaaaaaccaactaatccaaacacgctggctgggggaatattacttgggcccaaaggttcccttgagg

SEQ ID NO: 115714 - DNA, 1405 bp, Zea mays
  Clone ID: MRT4577_37013C.1
gtaaggaagaattcgtcgcgctgaacctggcgagctcggtgaggcagcccatggagtccgggcaacccgggcatgtgcccgcccatggacgtcttgttgggtttggagctcgccaggttgttggacatgccgccgcggatgaggagaagcgcatggagcagaaagaacagctggggagcagcatgtccatggacaccctgccacatctcaccacgcctcttggcaacatcactaccctggatctctccaacaacaacctacagagcattccggagtccataatcgcgaggctcctgaacgtggtggtgctggacgtgcgctccaaccagctcaagtcgctgcccaactccatcggctgcctctcaaagctcaaggtcctcaacgtctccggcaacctgctccaagaactgccggccaccatcgaggaatgccgtgcgctggaggagctgaacgccaacttcaaccagctgacgaggctgccggacacgctgggcttcgagctccacggcctccggcggctgtccgacaactccaacaagctcgcgtacctgccgtcgtccacctcccacatgacggcgctgcggtcgctggacgcgcgcctcaactgcctccgcgcgctgcccgacgggctggagaacctcggcggcctcgaggcgcattcggctcgacagaacttccagtacctgcgggagctgccctacggcatcggcctcctcgtctcgctccgggagctggacgtcagctacaactccatcgccgcgctcccggactccatgggctgcctcaccaagctcgccaggttcagcgccgcgggcaacccgctggtgtgcccgcccatggacgtcgtcgagcagagcctcgacgccatgcgcgcctacctcagcgcgcggatgaacggcaccgccaaggccaagaagaagagctgggtgcccaagctggtcaagtacagcaccttctcggcggggatgatgacgcccggccgcaccaaggtgcacgggaacaacaccgacggcctccacatgtcggattaccggtcgctcgacggcggcggcgttgcgtcgtcggcgtttctcagcatgctgtcgccccggcgtctcttctcgccgcggagaaattcgaccaaacactagtagcttagcagtggccactggttcggcaggctatacatgtgtgctacctccttattgctggctgtttgcttgctgcttcgatgttcatatgacatgctcgtactgtagcgcaagctgaagctaatgatcttgctactacagttgtatatgctttgaagagaggtatatatgaagtgtgtatagtagcacgtagtgcaatagggcattgatgtacataagaattaagggtgtctttctttccattgtccaaaaaaaaaaaaaaaaaaggggcggcc

SEQ ID NO: 115715 - DNA, 140 bp, Zea mays
  Clone ID: MRT4577_37014C.1
tctacaactatcttttttttttttttttttacgccgtaatttcaattctcatggcactggggggatccccaaaagataataagtgagacactaatcgaacagacgcgccatgtggttcatagctccacacctaaaacgct

SEQ ID NO: 115716 - DNA, 450 bp, Zea mays
  Clone ID: MRT4577_37015C.1
catatgctcaaatactgagctcactgatccagtatggatatggcaaaggcaggcgcgccgagggtctgggagccccagcagatggtgactctagggctagcgctactctgcgctgtcgacggcccggccgccgcgcagaactgcgggtgccagccaaacgtttgatgaagcaggttcggctactgcggcacgaccaacgagtactgtggtgacggttgccagctaggcccgtgccgatcgggcggcacaaggcggtgagaagtggtggccgtggtgcgaacgtggctagcgtggacaccgggttgttcttcaacggcatcaagaaccaggccggaagccggtgcgaggtcaagaacttgtacactcagagcgcgtgcctgagcgccgtcaaggtcgaaccaggctttgaccatggtgggttcgcaagtgcagggcaagcgcgagatcgcc

SEQ ID NO: 115717 - DNA, 616 bp, Zea mays
  Clone ID: MRT4577_37016C.1
cggatggattgtgggcggaccgggctcttctgtgtccgatgagtgagagtgccttatggataagttacatgcccctacaaggaagctgcaccaagcctcgccctagattatgctgctgcttgcagaggagaggggaaaactggaagccattttgaaccaaagacgattcagaaataagactgtctgggagattaatccacttaaactggacttcacaaaagcacttgttatcggaaagttttgtattggattatcttaaagttggccaaacctgctacctacaacaaggctctttcggtgaaattctgaaagcaaattggcgaggaacacccattgctgtcaaaacattcttccatccttatctgatgacaggctggtgatgagcaggccaatgcagaaagtgttcactctgaagacgccccaacttgttcatacagtagtgcactttcagttattttgtttttgttattggtttgtatgaatgctgtagttggtttcatgtttggatatgcttgtatgattattaatctggaaatggtacaaacaattcagatgaacatttttagtgacgaaaatatggtctaatttgtctaaaaaaaaaaaaaaaaaagcggcc

SEQ ID NO: 115718 - DNA, 2497 bp, Zea mays
  Clone ID: MRT4577_37017C.1
cctcgaggccggccgagatggtgatatcccactccatttccgttaccactttatgtaatgaaccaaacaccaccttaattttatctctgttatataaaacactatgttttagttataccgcgtgtgagaatcctacaaaaacccttctcaattttcctttcacaaacctgcgggtcctctccccagtcccgactcccacctgttctccacctcgcccccacttcgtccttctccatctagggttctctctgtttcctcctcatcggaattggagcttcgcatagagtgtccctcgtcgtcgccgccggcaccgacgccggcagccatgtccatgctccttatacagaaacaacccctccctctctccgttcgtccccgcacgactctccgccagtgccgtctccccacgactcgattctccgccgccgccgccgccgccgactcggctagccgcgctgcccccttcgccgtcgaggactacctcgtcgccgcatgccacctaaccccggcgcaggcgctcaaggcctccaaggtgctctcgcacctcaagtcaccctcccgacccgacgcggtgctagccttcctctcggacctcggtctctccgacgccgacatcgccgccgccgtcgcctacgaccccaagcttctctgctccgaggtcgagcgcacgctggccccgcgtctcgcggagctccgggatctcggcctctctccgtctcagatcgcccgcctcgcactcgtcgaccccgcgcgcttccgccgccccaccgtcgtctccaagctgcagtattacgtccctctcttcggttccttcgagaacctgctccaggctctcaggaacaacgcctaccttctcagctcggacctcgagcgcgttgtgaagcccaacgtcgcgttcctggtggagtgcgggctagatgcttgtgatattgccaagctgtccatacccgtccctaggctgatcaccaccaacccagaacgcgtccgggcaatggtggagcgagctgaagctgtcggtgtgcctcgtggcactgggatgtttaggcacgcactgctggctgttgcattcctcagcgaggaaaagatcaaagctaaggcagagtttttgaagacaacatttcggtggtcggatgctgaggtgggcgttgcggtttccaagctgccattggtgctcaagcactccaaggacaggctgcgccgcatgtcagagttcctgatcaccaaggttgggttggagccagagtacattgctcacaggcctgctctgcttacatatagcttggaacgccgcctcatgccccgacactatgttgtgaattacctgaaggaaaatggattgttggagcaggaccggagctactatactgctgtccagatgagtgagagtgccttcatggataagttcatatgcccctacaaggaagctgcaccaagcctcgccctagattatgctgctgcttgcagaggagaggtgcccactaccttcttggcaaatgtttaacccttcagtgtaaagcaatgttttgacacttagcagtgagctggtaattttgtttctttccttgcctaactgctacatcccgcagctgtgtctttagaattggctctggtacataagatgtgagccatggttattaccagggctagatttatctttgctctctgttattcaagctgatcaagtattccaatttcacctgtcactgtatggtatggatttagttggtgagtaccctgtatattgctctgcaactgttatcgatgcaatgtttctaaataaatatgcaggatgcacggttccaaatatttttatcggaagcagagctgtgctttctttctttggcaaagcattaggtggggagggcttggtgattaatcatgctactggactagtttctaaactggcggttgtaaatatgatatgattttgtaggttgatgcatcatatgaccattcccatctccttggattttattccccctttttaccgtgtaggggaaaactggaagccattttgaaccaaagacgattcagaaataagactgtctgggagattaatccactctggacttcacaaaagcacttgttatcggaaagttttgtattggattatcttaaagttggccaaacctgctacctacaacaaggctctttcggtgaaattctgaaagcaaattggcgaggaacacccattgctgtcaaacgcattcttccatccttatctgatgacaggctggtgatgcgcaggccaatgcagaaagtgttcactctgaagacgccccaacttgttcatacagtagtgtactttcagttattttgtttttgttattggtttgtatgaatgctgtagttggtttcatgtttggatatgcttgtatgattattaatctggaaatggtacaaacaattcagatgaacatttttagtgtacgaaaatatggtttaatttgtttatatgcctatataaaaaaaaaaaaaaaaaaaaaaaaacaaaaag

SEQ ID NO: 115719 - DNA, 663 bp, Zea mays
  Clone ID: MRT4577_37018C.1
cggagacggagcggatgcagagctgtcagcggttctggcctggcctcaggagaagggcacttgcggcaagtgtcattcttgaccagccggcccgccgccctccctgtcctgcggcctcgcatttacaccgcgcctccctaggccagctgcgagcggcgagttctttaaggaggcgggcgacaggccggtaccggcgcggtgcctttgccttgcctgtcttggcgtggagtggcctgcattctcttctcggagaagacaagcaaagcaaagcaaggcaaccattcccgttcttgtcccgttgtctttgtctctcttgttgtcccttgctgctcgctcgccgccgtttctcggagcgctagctgctgtgctgctgctgctgggagtgtgagagtgaggcgaagggccgacctgagccggggagaagaagggggcctgccggccggggctgggagacatgagcgtgaccaagttcatcaagtgcgtcacggtgggcgacggcgcggtgggcaagacctgcatgctcatctgctacaccagcaacaagttccccacggactacatccccacggtgttcgacaacttcagcgccaacgtctccgtgggcggcagcatcgtcaacctgggcctctgggacaccgcggggcaagaggactacagcaggct

SEQ ID NO: 115720 - DNA, 752 bp, Zea mays
  unsure (1)..(752): unsure at all n locations
  Clone ID: MRT4577_37019C.1
acgcctgcaggatccggtccggaattcccgggtcgacccacgcgtccggcaggcaatggagcttgctctctctttggtttccgttcctgacccatgtgagttaccggcgacagcgatgaactctatcaaagctacgaagggccttctggctttgagccagcaggatgatctaatggatttgacaagcaactaccccttgagtgccagtgaagatgagggggacagtgatggagaaagaaagcatcaaaaacttctggaagcaattggttcccttagtggaaaaaataggtggaaattgcctgagagatctgaggctggtctaaaagtgtctgagtttaatgttagttctgaaggatctggagaaaaattggccctttctgatctgcttggacctcttaaaccttcatcatcattggctgctgtcaaaaagcaactgagtagagtcaaatcgaagaagactctggaattacctcttcacaaaagagaggttgaacagatccacagagaagtggcattcagtaaaacttcacaaaccctctccaaatgggattctgttgttcagaagaaccgggaagcagagcagctggtttttcctctagagaaggagccatcttcttttgctcccatggaacatgtgtttcgtgagtggaaggcgagaactccactcggaacagaagntnttaacctcctccataagaacanacagccagtgacagaccctttactgactcctgtgggaaaggcctccctca

SEQ ID NO: 115721 - DNA, 1509 bp, Zea mays
  unsure (1)..(1509): unsure at all n locations
  Clone ID: MRT4577_3701C.1
ccggggcacttgctgcctctgctccatctgttcagcaaagaacttcagataagtctgatactgagcatttgaagtaccttgaagtgcttgagaagttaccagataagaaaggagtattgtctgaaactacctgatagcaagagacttatcaccaaggcttgcatcatatgtattcagtgtcatattttattgaagcaaattattgtgggctatatcagacagtttgtcatcaagcctttgtttggatttctttttggcactcttatggagtactaagccacactaaagaatttgggcttaagggtgaggttttgaaggtgactcttgcaacttacgtcgtgaactgagtgtgaatatctactgcatgggcaagcaagtttccaaccccttgccctcccatcgattctgctgcctgccctacttgatccggctagagtttattgggactcgcagctacctcggagttcactgctgtaaatatgggtaacaccctgccagtgcacgatatgtcggaatccacagcagccataagatctcccaacaaggaggaccttgcaacaacgacattgatcaagaattggatgttggaaattctggtttggcattgttacttctcttactcctgtttcatgtcccactctgaggtgaccggtgctggtaatcatgtannnnnnccttcgtgcttctattcttcctatacgctttaggcatggcatgttgtgtactaacattttgattaacaatacaacacatggccatacatatggtattgttgcgcaannnnnnnnctgttgcaacgcagggtattcaaccaggcacctcagattgggacaaggaggaggacgaggaaatgatttggtgctaccaggttcaggccccatgtcctagaaatggaccttcctccttttcctaggcagcttgtgcatcgggctactcttcaccaacagtttactttatacaccagaaccaaagaaattgtgcgatcagattctacaacgcacaactgatgtctgccaccgattcatgtggagcatattgtttgatgcgaggacatggcatacacctcatgagacacattaactttagattggtgattgacaaagagactggcaagccaaaaggttatggcttttgcgagtacaaggatgaggaaactgttttaagtgcatgtcgagaccttcatggttacgagattaatggtcgtcaattatgtgttgattttgctgaaaatgggaggaatacttatagcaatagagaaaaggtcgacaatcctcaaaattattatagaagagccattactaccactttggagttctttattaatacgagtagttgtatagtcttcattcatgtgaatgataatagttgtgcctcctccgactaccatgtgtctcctgttgcaatttcttacaagcatgtttatatatgtacaactgcttgactgtacatacacacacctgttgtactgtccaattcctttattgaattatattgttatggtcttgtgcc

SEQ ID NO: 115722 - DNA, 305 bp, Zea mays
  Clone ID: MRT4577_37020C.1
tctcttatttctgggaactcactgacatccgacaaaaaactttattattgactctattacttatactaaatctaacagaggacaccactcaatgatggggtgtaggcagaacactgctgggtttgtcaaagcacgttgattgacaggcagccattgatgcacttgctacagggagccagcgctaggcgcaacgtgctggcaaaacggcaacaactgccgctgtgtctaaatgtagcagggctcacaccaactatctggctgaatggctgtagctgatggtgctgtcttaatcacgaaagatcaat

SEQ ID NO: 115723 - DNA, 1475 bp, Zea mays
  Clone ID: MRT4577_37021C.1
gctagtgtcattcttgaccagccggcccgccgccctccctgtcctgcggcctcgcatttacaccgcgcctccctaggccagctgcgagcggcgagttctttaaggaggcgggcgacaggccggtaccggcgcggtgcctttgccttgcctgtcttggcgtggagtggcctgcattctcttctcggagaagacaagcaaagctaagcaaagcaaggcaacccattcccgttcttgtcccgttgtctttgtctctcttgtcccttgctgctcgctcgccgccgtttctcggagcgctagctgctgctgctgctgctgggagtgtgagagtgaggcgaagggccgacctgagccggggagaagaagggggcctgccggccggggctggaagacatgagcgtgaccaagttcatcaagtgcgtcacggtgggcgacggcgcggtgggcaagacctgcatgctcatctgctacaccagcaacaagttccccacggactacatccccacggtgttcgacaacttcagcgccaacgtctccgtggacggcagcatcgtcaacctgggcctctgggacaccgcggggcaagaggactacagcaggctgcggccgctgagctacaggggcgcggacgtgttcgtgctggccttctccctgatcagcagggcgagctacgagaacgttcttaagaagtgggtgccagagcttcgcagattcgcgcccaacgtcccggtcgttcttgttgggaccaagttagatctccgcgaccacagagcctacctcgccgaccatcctggagcttcagcagtcaccacggcgcaggtctgctctcttctacctacttcctcccaacgccggtagtattcagaagcgtgcagttcgaagacacagtacttggcttcctttgtcggtaacatgtagaatgtcaaagctgtgttcgatgctgccatcaaggttgtaatccagcctccaactaaactaagagaaaagaagaaaaagaaatcacgcaagggatgttcgatggtgaacatcttatctggaagaaaaatgctatgcttcaagtcctgaatgatcgaagggggtcttacctgaactaataccatgagtgtgaccccaagttcgcgaagcttgaaatcttgatgcgctcgttgcgcatgtatatttgcacctttggttattaatcactagaggtagatgattgaaactaatctgcttaaccaatgtgcactgctgggcgctggcgtggttagctatatcagttaggcagttcgacagaggtcaaagagattgagattttgttctttcttggcaatgtcacagcttttgtgaatctggtctcatcatactgtccgctagtttatccaatgattccatggtggaatcaatccatagcaacattgtgttgaatgatcctttgcttttgcgctaagcatataacattccagttttggtgaaagctggaagtgaaactctcttctttc

SEQ ID NO: 115724 - DNA, 407 bp, Zea mays
  Clone ID: MRT4577_37022C.1
aggaaccatacctggcactacacttcctcctcctatcacagctagcgcctgatctagggcgtgtgtgatcatgtctggcatcatctgcaagtgcaactgcggctacagctgctgctgcagcagctcatgcaactgcatgtgcaatgacgtggagaccgacgtcgacagcagcatcaagaccatggtcctcactgtgccgaccactaaggccagcaccagcggcttcgacgcgggcaccgagggcggcagctgcgactgcaacagctactgctgcagctccagctgcggctgctgctgctgcagctgcagctgaaccggcccgtcaggcctggcgatcgggcacgagagtcgagaggacaacgacgacgacgcgtataactatgcttaatagcatcgtctatatcaga

SEQ ID NO: 115725 - DNA, 118 bp, Zea mays
  Clone ID: MRT4577_37023C.1
tgcagatctgtctgcagagccagcactgtgatacatcatagtcggtgctcagtgaatgtctgtgaagtgagttactatctagacaaggatgacgctggtatgactctccatagcgttc

SEQ ID NO: 115726 - DNA, 582 bp, Zea mays
  Clone ID: MRT4577_37024C.1
tgccgtcctcctgagcatcggcttctccgatgcagcgagggtagttaggcttggtagccatgcgtctgcgggaggtggaggtggcggcgggggaggcggctccgggtcgactgggggtggctttggcggtgggtcgggcggtggcggtggttacggcataggtaagggtggcggggactggtggaacaatttcgtctctagtatagcaggtggtggaggaggaggacaaggcggaggcggtggcaccaatggtgggtccgggtccggcggatcccaaggcggctctggtggcggtggaggctctgggtccggatccggcagcggtggaatccactgagcttgcacttcagtagctagagcctagagccccgcattagtgtcagtccattctgtggttttttgctgtctttgttacgagaattaatcaggaataaagcgtaatgggcttcgtgattgtagttcgagtaggtagcaaagcatgcaactgatatgaatgcatgtaatggctatctacgagtgtgtgcccctagctgtaatctgtttctcatcgatcgttaaggtcgttgcatccggttttattta

SEQ ID NO: 115727 - DNA, 1114 bp, Zea mays
  Clone ID: MRT4577_37025C.1
ctcactgcaccgctccactcactgcaccgagctcactggcaatggctaccagcaccaagctcgtggcccttggctttgccgtcctcctgagcatcggcttctccgatgcagcgagggtagttaggcttggtagccatgcgtctgcgggaggtggaggtggcggtgggggaggcggctccgggtcgactgggggtggctttggcggtgggtctggcggtggcggtggttacggcataggtaagggtggcggggactggtggaacaatttcgtctctagtatagcaggtggtggaggaggaggacaaggcggaggcggtggcaccaatggtgggtccgggtccggcggtgggtccggttatggttctggcagcagctcgactgcagcctctggccccagcagtggcaactacgccgacgctgagggcaagggcgccggtggaggcatgggcggtggtgccaatggtgcatatggttctggtgctggtggaggcgttggcaagggcgagggtgtgagtggtgtggcactcgcaccatcgtccaacggctactacaatggcggtgccgccgatgctaccggtggcggttccggcgccggcggtggacatggtggtggcgcagccggagctccaagctatggaaccggaggcggcctcggcggaggcaagggtgaggccggcagcgatggatcgtgggggtcaggttatgctcagggaatcggtgctggcacaggcggcggtggcggcggcggatcccaaggcggctctggtggcggtggaggctctgggtccggatccggcagcggtggaatccactgagcttgcacttcagtagctagagcctagagccccgcattagtgtcagtccattctgtggttttttgctgtctttgttacgagaattaatcaggaataaagcgtaatgggcttcgtgattgtagttcgagtaggtagcaaagcatgcaactgatatgaatgcatgtaatggctatctacgagtgtgtgcccctagctgtaatctgtttctcatcgatcgttaaggtcgttgcatccggttttatttatcttctgaaaccaaaatacattggaactcttatagtctaatgaaacaaaacact

SEQ ID NO: 115728 - DNA, 616 bp, Zea mays
  Clone ID: MRT4577_37026C.1
gccggccgggccgggattcttccgtccatccatccgccatggacgaccgctacgctactgagctcctccttcgtcatgatcgtcgtcgcccgcatggactcctcccgttcctccgcctcattgagcttcgccacgtcgcaggtcgccggcctctccctctccgccggcgatgcaactccaaccgccgacgacctcctccccaagaggtagcagatccagtccattggcgagcggcgagagtgcccgttcacgtacaagaagacgaacctggtagaacaaagtgtcgctttccaaccacaagacgaagaagcaccacctcgtgaacctgcagtacaagaagctgtgctgggaggccggaaagcgcttcgacaagctgcgcctttacaccaaggaccgtcaagaccatcgagaagcactacctctacggcgtcgcgcgcaaggacgatatcgacctcaactagaagtgagcaagaagtgagcccatccgatgagcagtcaaactactgtgagacgaaactatattaccattcacgttcgcagggtcatctcgtctgtctgtctgcctgcctgcctcctgatgatctttcgcagtcaaaccactatcattatatttcct

SEQ ID NO: 115729 - DNA, 447 bp, Zea mays
  unsure (1)..(447): unsure at all n locations
  Clone ID: MRT4577_37027C.1
tttgttgttttttttttttttttttttttttttttttttttttttttttttttttttttttttttttttttttttttttttttttttttttaaaggaggcccctttaaaggggggtgtttttaaaaggggttaaaaaatttttttggggggggggcagcttagtcaaacaacaacaacaaaaaatttccaaaaaggggaaaagttccccccagccacattattcaagggaaaaattttgaaacaaaggcaaggggttaattttccaaaaaattgccttttttgggtttattaccctccaaaaaaatattatttttatttcctnaaaattaatgggcaacctcattggtgaagttcttcaaagggattagggcaaaaatttttttttttgatttctgccaccttattttggacaccaaaaaaaaaaattttggggctttttttccccc

SEQ ID NO: 115730 - DNA, 879 bp, Zea mays
  unsure (1)..(879): unsure at all n locations
  Clone ID: MRT4577_37028C.1
ccggccgggattgttgctgacccagctcagcctgtgcctcctttttaccacttctttttttcctttgccgcccgctcttttcctcgttgggaacgccttgcttcctacgtatctgttgatacctacccctcaccaacctccccgccagctgaacgcgcccgataggcacccccaaagcctcaccttccgccccaaaacacgcccgtcgcagtcgtataactgcacaccggcttgcccgtcatgatgaccaacatgctcaacaagctgcacggccagcccgacagctatgatcgcaaatcacgataccgcttcggaaagacactgggcgccggaacatacggtattgtcagggaggctgactgtcccgagggcaaggttgccgtcaagatcatcctgaagaagaatgtccgcggaaacgagcagatggtctacgacgagctggagatgctgcagcgcatgaagcacccgcacattgtcaagtttcacgactggttcgagtcaagggacaaatactacattgtaacccaattggcaactggtggagagctcttcgaccgcatctgtgaaaagggaaagtttacagaaaaggacgctgccgagacgattcgacaggtgcttgatgcagtcaactaccttcaccagaacaatgttgtacacagagatctcaagccagagaacctcctctatctcacacgcgacgaanactcatccctcgtacttgctgatttcggtatcgccaagatgctcgactccnagaccgaagtcctaaccaccatggctggctcatttggatacngctgctcctgaggtgatgctcaagaaggccacggaaagccgtcgacatgtggtctatgggagcatcacatacacactgctctg

SEQ ID NO: 115731 - DNA, 1771 bp, Zea mays
  Clone ID: MRT4577_37029C.1
gcactccaaggtctgcggcacgcgcgagtaccgctgcgactgcggcacgctcttctcgcggagggatagcttcatcacccacagggctttctgcgacgccctcgcgcaggagagcgcccggctgccgcccccaggcctcaccgccagccacctctacggcgccaccaacgcggccaacatggggctcagcctctcgcaggtcggttctcacctcgcatccacactcggtgcggacgctcacggccaccatcaggacctcctccggctcggtggcagcaacgccgcgagccgctttgagcatcttctggggccgtccaatgcctccgcgttccgccccctgccgcctccaccatcgtcggcattcctcatgggcgctccgcaggagtttggcgcaggcgacggcagcgggtcccacgggttcttgcagggcaagccgttccacagtctcatgcatctgccggatctccaaggcaacggcgccgggggtgcctcggcgtcgtcggctacgggtctcttcaaccttggctacatcgcaaacagtgcaaacagctcaggtacttccagccatggccatgcaagccagggacacctgacaagtgatcagttcagcgaaggaggtggcggcggcggctccgagtcatcggccgcgatgcttttcagcggcggcgggaacttcgccggtggtgaccaccaagttgctcctggcgggatgtacaacaatgatccggccgtgatgctgccgcagatgtccgcgacggcgcttctgcagaaggcgtcccagatgggctccagcgcgagcgcgcacggcggcgtgtcgtccgtgtttggggggctcgtgggctcgtcggcgccctccgctaggcacgcccgggcacccatgctcgaccagagccagatgcacctacagagcttgatgagctcgctggctgccggcggcatgttcggcggcgccaacagcggcagcatgattgacccgaggatgtatgacatgaaccaagatgtgaagtttagccagggccgtggtggcgctgagatgacgcgcgacttccttggcgtcggcggcgatggtgtcatgagaggcatgacagtggcgagagcggggcaccaagacggtgccgatgacatgaactccttggaagccgagatgaagtcggcctcgtcgcccttcactggagacaggatgcaataagagttcccaataagagaaccttgtgtgctcgcatagtgagcgagtcctgtgcagcctgccatgcatgcacccatgggtgtactgaatccattacagcaggttgttatagcgtacactgcacaaggcatgggagtagtataaggttgctgcattccatgcaatgatgcaataaagggtaaagacaggtttgcacctaatccgaagacttgcatggtgagcaatgagtatcattcttgatttgctactaatccaagaggctagatcaagtagaatcatgtgatctattatctattgctccatgcttggtggtttcgttcctgtgtcaaacatttgtttttctgaactatatgtaattggattagttatacctgaggagagatagtattaagcagtaatgctgtagctactagctgggttagtagtactgggctactggctatattaggggacgatataagagttcatgcccctaaaacatcttctgtttatttgttgtttttccttctattgtgcttaccgtgtactctttaatttggagaaaaccatttttgttgcttattacaatgcatttaataccacacc

SEQ ID NO: 115732 - DNA, 490 bp, Zea mays
  unsure (1)..(490): unsure at all n locations
  Clone ID: MRT4577_3702C.1
gcgctcctctccgcttccaagatgtcttatcgaggacgtggaggttctgctggtaacgagttccgtatgtcactggttctaccaatcccaaccactgtnaactgngctgataacacatgagccaagaacctttacatcatttctgtgatgggaatcaaggggcgctctatacagtcttatttttgtctttgtttgttacattgttatagtatcttttataatatgtaattttttctcttttttatatagttacttctctctttcttattttttttatcatactataatttttttctactcttttataattttattactatttattgttgtttgttgtattatttctatactatttttatttatttcttcttattcataataattattatttattttattattcatttttatactattttattcatcttcatctttatttctttataataatttttattgttatatatattctttaattatattatattat

SEQ ID NO: 115733 - DNA, 206 bp, Zea mays
  Clone ID: MRT4577_37030C.1
ctatcaaaccttgttgcctactttcagcaacagcagattcttccattcaaccaactaggttcattgaactctgcttcttatttgcaacatcaacatctaccatttaatcagttacctgctatctacctccaataatatcttactattcaccaactatcaatcattgaactatactttatcatataccgcatctacaactactacca

SEQ ID NO: 115734 - DNA, 272 bp, Zea mays
  Clone ID: MRT4577_37031C.1
gtttatgttgattctgaatggtttttgcccccaaagaattttatagaagctgactgaaaaactgagcgtttggcagttcacaacaacttttggtggccagaaactgacggaagctgaaacaaacaggccctgtcaatcctagctaggcgcctccacaagagggggtgcgctttgtttctcctcctgcctgcaagggtaagtgcacaagaggatagtgctccacaagtagtagtagtatgtgtgtgcattttcaacatgctgtatgcaaccat

SEQ ID NO: 115735 - DNA, 610 bp, Zea mays
  unsure (1)..(610): unsure at all n locations
  Clone ID: MRT4577_37032C.1
tttttnnnnnnnnnnnnnnnnnnnnnnnnnnnnnnagagacgcagggttgtgcaccttgaacttgaaaaggttcagcaggagattccacaattcaaagaagactgggaaaccgctgaggtggctaagtcagacgtcattgaggagctagagagaactaatagacttgtcgacgagctgaagcataagctggagagggcacagcttgaagtggaccaagcaaagcaagattctgagcttgccctgcttagggcacaagagatggagcaggggattgatgatgacgctagtgtaatagcccaaacacagttggcagttgccaaagaaagacatgaaaaggctgttgaggagctcgaattgctgaaagaggagctaagatcaacgcatgaacagtatgctgtattagccactgaaagggatgcagccgttaaacgggccgaggaagttgttcgtgctgccaaggatactgagaagcaagtagaggagctcactttagaactgatcgcatccaaagagtctctcgagtcagcccacgcttcacaccatgaggctgaagagcacaggctcggggcagctttggcgaaagagcaggatttcctggcttgggagaaa

SEQ ID NO: 115736 - DNA, 407 bp, Zea mays
  Clone ID: MRT4577_37033C.1
gggcccaaaaaagtaactttttcctcgggacaatcatgggccattgataaacacacttaaaaagcctttgatgcttgcgcatatttttgatttgaatgctagctgtatacatctatttctattattttccaatcacgagctcttttacataaaaaatcccattcgctttactaaacaaaggggttgggctgaaaaatcgccaagatcaaggccaaacgaaaaaaatttaactgcgcattgcatattttgctttccaaaaatcaaaggaaaaagaaactgtttccagcgaggaggaattcttggctagccattttttcttgtatagattatttcgagataccataaccttgcggggccctattcactctgcttgctttcttttttagttgtaaaagatcgttagtact

SEQ ID NO: 115737 - DNA, 174 bp, Zea mays
  Clone ID: MRT4577_37034C.1
ccacgtgttcgagggcgctttgggttttacccacggaattctggacccgtgcggggaggcctggaatttttgactgtaacctggcgggttaccacttgttcgttataatgggtataattggagcttgggggaaaatagggatatgtgttagcaatctcgagacgaaaatactta

SEQ ID NO: 115738 - DNA, 935 bp, Zea mays
  Clone ID: MRT4577_37035C.1
gaaacagtggctacatatgccacagaatatcctgcgattctttgtacgtggcaaagaccattctgataaccactttcctgacgtcaagcagaactaacacaacaaaaaaaaaaagacaacaaaaacgaggaaacctctaaaacattgccataatacagtgtgtaactcacatagtgaaaaaacaaactgaaaacataacaacaatatatagcgatcatgccaaataggcccggggggggggggggggggagcacaaatggatccgttggcataactgatatctgaaccttcaagtcactgcagcagtgcatgtgtggccgtgtgggtggcagctcccgtccattaatgtcaaaatctcaaattttcttatttgcatgtttccttagcatcatctgtgcctgagtccgagtcactggcattgtaccctggacgtttattgctaactttccagactgtagaccgatatcttgatgctttctccatccaaactcttgccttgtgctcgttcttgttgacaccgtatccgctgcggtacatctggccgacgagcacctgcatggtgatgtcgccggcgcgcgcctccttgagtgcgtcctggaaccaccgcctcgtgcagtccgacaccacctccgcgagcggaaccctctcgtccgcctctagcccgcacgccgccgccaaatcccgcacctcggcccgcccggagctggccgcggcagcggcggcagcggatttcctgggcgtatccagcggggcagacggcgtcttagctgccctcccggcggatgcggcggtatcggatgggacgcgaaggctgcgggcgtacgagcgaaccgcggcggcggcggcggcggtggcggcggcaggtaggtgcttgcccatgcaaatgtggggtttcttcggaggggaacagtgcggccggtcgcgagggacccaat

SEQ ID NO: 115739 - DNA, 270 bp, Zea mays
  Clone ID: MRT4577_37036C.1
atgggtcgagcaacccatccttccaactcctggtcggcggaaaggtcagcgctgtggctcgagctgtcgtcaccgcctccgttgtctgggtctcctccagcagctactctagcggctagggcgctcagtggtggtgcagggggcgcctccagcgggagcacaggggagcagctcctcacagactatctcctgctgaagcgagaaagaggagtcctgctgctccagctcctgtcgtcgacactcctgctcctcgtgcaggcggtggtgtag

SEQ ID NO: 115740 - DNA, 485 bp, Zea mays
  Clone ID: MRT4577_37037C.1
ataattcttaatggtcggaagatcatactctgatccaagacaattcatacaacgctgcaccttaacaaagcatgggactctgatcgcactgacaccgggcccaaccagcttaaaacatccggagtaaactctattcggggcaagcaactacagggcggcacaaaatcacatatcttcaaaccatactgatctatatcaacggatctacctacagtggacagacaaccatagaggaggagccgaactacactttgccagaatcaagattgaaaatcagggtcatagtgtcttgaactggcgcgatagattacccgctgaactgctcacgcctaatatctgagggctgctccatactcacccaatctgaatcgggtccagctaatttgctgcgattttagagaatttcaatagaacgaaaatttcactatggtcacgaatagcaagctaccttcttgacacagtaacaaaacttttctggctggatc

SEQ ID NO: 115741 - DNA, 455 bp, Zea mays
  Clone ID: MRT4577_37038C.1
tttcctttccctcctgcaaacatgtaaaaaagtcgagagaggactccaccagctgaagaaactgggaatcgagtctcacctgtgggaggccccgagcagagctctggatgatgatttgagcaaccacgggagtccaactggatctgaagcatagcagatgcataatgtggagcgaggctctattgccgattttgtgccgtcagaggccctagagccagccagccctcctagtcctttcctttcgcttgcttggtatcttcatgtaacatattgaacctttccttcttttttcttcttcttcttttgggttatctatttttatgctagtttatccgtgaaagcaaaaggggtttaaatcatggagtcgtcgtgatgctctgctctctccatctacagcaacaaaaatattatgcattgcttgattttgcctatacaagttcttatgaattaaaagt

SEQ ID NO: 115742 - DNA, 721 bp, Zea mays
  unsure (1)..(721): unsure at all n locations
  Clone ID: MRT4577_37039C.1
ccggccgggatctcatctcacacatctcacatcaaccatgttctccaaagccctcactgcccttgcccttgtggcacctcttgtctcagcacagacctttaccagctgcaatcctctcacaaccacatgtcctcctgatcctgctttcggcaaagatactgtccactgtgacttcaccaagggagcttgcccagatttcaaggaagacgccggtacatcaattactcacaacgccaacggtgccgtctttaccattggtggacccaaccaagcccctacaattgccacgggcaagtacatcatgtttggccgtgtcgatatcgaagtccaagcctctaccggtgttggtatcgttaccagcgctgttttgcagtctgactgtctcgacgagattgattgggatgggctaggaggtgacaatgctcaggtccagtccaactactttagcaagggcgatgtgagcacatacgaccgaggagctttccaccctgtccaaaaccccgncggnnaattccacgtctactccatcgagtggacacctgcactcattaactggacnatcgaccgacgntgtggnccgnacactcacatacgaggatgcncaagggtggatctgctttcccccaaacacccatgnagatcaagcttggnacttgngtgtgctggatctcccgatgctgctgaaggnactattcnatggnntggtggnntgactgacttc

SEQ ID NO: 115743 - DNA, 235 bp, Zea mays
  Clone ID: MRT4577_3703C.1
ggattcccgctcgaccacgcgtccggacggtgctctaatccgtcatacttggtggttgtgaggtcgaaagcggggagggaatataagatgctggtacaagctgtgggacgacgtggggccatacctcgcccggagacgggcctgagaagcttcgcagtgccaccaccgcccgtccactcgcatcaacaaagactcggacggggcagctacatgcggcgcagtccatgcctctacc

SEQ ID NO: 115744 - DNA, 362 bp, Zea mays
  Clone ID: MRT4577_37040C.1
aagtggacacaccgtaccgaccgacgactattactcgcgaggggcgaaagaaacagccagcacactgaagcacgctcaagactgacaacaaaccgattaggccacctcctcgatcttggggccagggccgccggtgacagcgggggcgacctcgtccatgccgccagcgccgaccatgaattcacccgcgccctggaacatcttggcgatgaggggggggcagaggctctccagctgcgggatcttgtcctagaactcgagcgcctcggagagctggaccggcgccaggcagctgatggcacgagaggatggtcgaacaggatcttcttcttgtcatcggccggcagcaaaggacgcaatct

SEQ ID NO: 115745 - DNA, 433 bp, Zea mays
  unsure (1)..(433): unsure at all n locations
  Clone ID: MRT4577_37041C.1
ggcttgngacctttgggctgatttatgtgcttgtttatgtgcttgtttatgtgcttggaagtccacaatagaagtcgacggacattagtgctatccaacagtcttagaataaggacactgatgttccacagaactccgctccaccagcactagaggcttcgttgaggtagtcgccgacgtggcatacgtaacctcgaaggattctgcttgtaaggtcactaacgaaatatacgagtcgaagtagccctttatttcctgcgcggaagcaggtaacgtagtccccgagctaccggacagaacgagggacgaaagtaagaaaaacataccaaagtcagccgatacggaacgtagtcatccgatagcagaccctcctaggaagtccttttaggacgccgagaggggcggaaacttaaattatctccaccccgacaga

SEQ ID NO: 115746 - DNA, 579 bp, Zea mays
  Clone ID: MRT4577_37042C.1
gcaaggaagctgcctgcttttcaccatacagaatcaagagggcggaccccggctgctaggcctgatctcctgctttgcggaggggccactcctgacatgcacattgcccacgacgcctaatcggcacaagcgaaggatttccagaacctgaacaccaggtgggcgctccacctgacgctgcaccacccgcacaggccttgctgctcactaaccggtgcccgccggccttgccttgtgcccgtgctacccacgaccgaccgcgcttacgagatctagaacctcggccggtcacgacgcctcgctgtcttccacctttgctcgccgagactgcggcgtgaacgtgcagccctactcgggctccccagccaacttctccggctacaccgggctgctcaacccgcacgaccggatcatggggctcgaccttccctccggcggacacctcactcacgggtactacacggtccggcggtaagaagatctccgccacctcgatctactttgagagcctgccggacaaggtgagcgccgaatcgggggacattgactacgagaagctggaggagaaagcacttgact

SEQ ID NO: 115747 - DNA, 445 bp, Zea mays
  unsure (1)..(445): unsure at all n locations
  Clone ID: MRT4577_37043C.1
gcccggcgcggcccggaaatttttttgaaatgaggggccccccccctaaaaaaagtggagccagaggccccccccccacatttggggaacataaaacaaaatccctggcttaaaaaaaaaaaaattttttttttggaaaatagggggggatactgtgggccggaaaaacctttcaccaaaatatccttagggggaaaacctttttggcttaaacacccttttgggaaggggggttttccccctttggcccaaaattaaatttttgggcttggaagtttttaaaaaactttttaatcccaccctgggaaacctggctcaaagggattttaacggggggaagggaaaagggcttagcaaccccggggtttttgatggaaaaaacttaccccgggggtttcccctcccccctttaaanagcaggggacaaggcccctttgggggaccc

SEQ ID NO: 115748 - DNA, 464 bp, Zea mays
  unsure (1)..(464): unsure at all n locations
  Clone ID: MRT4577_37044C.1
ccgggccgacccagcgnccgaaaganacgcgnnnccgggacgccaggggcggcgcgcgcncggancgacagcagggcggccagccngcgcgaccacaacggcgnccccgccgncgncncggccgccgnccggcgcgccgcngccgccacgaccaccgcggacgaggcgcgcaagcagaacaccaaccacccgggggggggggggaagncccngccgcccgccaagccggaggcgaaggcggcggcggagcacggcggcccgacggggcnggcggagcngacacgggcgcaggcggcgcaggngggcacggagacggnggcacgcgacaagggccngaagaacacaccggggggcacgccgccggggcgccggaacaagcgnaggagccagnaccagggggcgcnggccgaccggaagcggagcaaggcgggggaacaggaaggccaagggccaggacgccacga

SEQ ID NO: 115749 - DNA, 698 bp, Zea mays
  Clone ID: MRT4577_37045C.1
cccctctctcgagttttttttttttttttttttttttttttttgttttttttttttttttttttttttttttttttttttttttttttttttttttttttttttttttttttttgggcaaccaaaaaaacccaattttaaacatgggcccaggccccccctaggtttggttaaaaaggttggcccccggggggggcaggaccctttgggagggggcccggggaccggaaaaccaaaacctcgggggccccaaaaaagggggaacagggccccccccccaaaaaaaaacccccccgaggggaaaaaaagaaaaaatccttgccccccctttttggggatttttaaaaaatttggggccaaaaccccccccggggaaaaatcccagggggcccgggccttttcccaggagggggggccaaaactgggggccatcggggggcccatttttttttgggggcccaattcttttgaaaggagaaaaaaccccccgggggttttccccaccagttgggcccctggaaaaataagtttttccagggcttttttttccaagggggaacccggagttgggcccccttttttaaaaaagaacaaaagggccttttaactttccgggggagccccttaaggcttttggaaacccaaaaaggttttaaaactcaaaaaagccaaagaatcccccaccctcttgggggtttg

SEQ ID NO: 115750 - DNA, 354 bp, Zea mays
  Clone ID: MRT4577_37046C.1
cttccgacttcgccatctcatcgcgtcgctgcaacgcgcctggtgtcgagacgccatggcctggcacaagcatgagtagaaactatggaggaggaatgaggcggacgtgatgcccttcgagaagcatgtgtgctgctgggatgacaggcaacaggagtccatcgacctgctcaccaagacctaccaccgagacgaaggacatcatcaccaatactgcgaagaacggggatatgccgtctaacatggccgcgcggatcgcggaggaacaaagaatcctgcgtgcaaagagattgactatgagaaagacactcacgcatcgtactagccaatgcaagtggcagaggagatagagga

SEQ ID NO: 115751 - DNA, 111 bp, Zea mays
  Clone ID: MRT4577_37047C.1
ttttaatcaaatcttatggtattatcatccttcacctcatattattgtctgcgtagagcatgactgaaaataagacccttcatggtacattcttctaattaggccaaagcc

SEQ ID NO: 115752 - DNA, 319 bp, Zea mays
  Clone ID: MRT4577_37048C.1
acggacgatcacgactgcaaccttcaagcggcactaatcatgacttaggttgcagacagatgcggtgtctattcgatggcggtgctcgccaacccatttacgcactatatgatctgctgactgcacgatgactcctatgttacggccaagtagcagatgattaactactacggcatcttgacttacactctcctttcagcgtactacatgtaaaacagctaccctcacttccataaacggacagagtaccactatcatgacatcctgaacattgaattgccatattgatctaatggctagattgtgacgaatgaccacc

SEQ ID NO: 115753 - DNA, 307 bp, Zea mays
  Clone ID: MRT4577_37049C.1
tgcggacttatgtgacataactttcatttataagtaccacaagagaatcagcaggcacggttactcaagtaacgggccctagtacgatccatctagcaatacattgcagaaactagagcctaaaagaaccaacacaaaaaactgcgctttcaccacggcatcctacgagctgcacgaacacgacagaagccatatacacacaactctctgtgatcacataatcgctagactcaactcgtactacgtaatgaaaggaataactagtggcctacaaaacaggccacttactatcaagactcaccaaact

SEQ ID NO: 115754 - DNA, 2302 bp, Zea mays
  Clone ID: MRT4577_3704C.1
gtgccaatgacaatcacgttatctgacttttatcaggacaaaattagaagagttaaaggaggcacatcttgttaatagcttttcttgtcagtatgtgggtggcaactatagttcagtgtgctaccggttccgatgtactaaggtggagatcattgtatgcatcatttcatattaaggggagggttcactaccatgaggtgtttgatcatggaatctgtgacgtcttatgttgcttagggtgtgttcaatattcgtgtatgatatatacagagtaccaagaaggtcgtgctcgacgacaagctcgccgagtttgcgctcctcgaccccaagccatcaataggtgagcaagtgctatccgcgaacagctttcgtgcgctgtgacttgtgccggctccggcggtaaacaagacagacaaggagcaaaggaggcgttcaatttctcaggcacttgctgcctctgctccatctgttcaggtaacctgtctttatcttcttctatttctattttttgaccaatcaaatctttttacctgctagcgggactaggtgtgatctcactagcatggtctatgaagagagatttcagctctgaacatctcctttttcccttaatttcaaatatgtgaatgggatagacttcttttatacatacatatttagtgttgactagcagaattttgtggggaggtggttataattttgtgcaaattcttagatcctcgattactcattctttgtaaatgtgccatcatttcccattattagttgaatctttttgttatgtatattctcatgttcacatttttaccgttaaccattagcagcaaagaacttcagataagtctgatactgagcatttgaagtaccttgaagtgcttgaggggttacccacgcgtccgaaagggatgacgagggacagttgcaagttgtggtggagaagggcgacgaccccatgacaacatggggtgaatttctatatcagttgccaatcataagaaacaaatcttattattgcactccagcaataaaagggccagatgctattattgttggctatatcagacagtttgtcatcaagcctttgtctggattcctttttggcactcttatggagtactaagccacactgaagaatttgggcttaagagtgaggttttgaaggtgactcttgcaactgacgtcgtgaactgagtgtgaatatctactggatgggcaagcaagtttccaaccccatgccctcccatcgattctgctgcctgatccggctagagtttattaggactcgcaactacctcggagttcactgctgtaaatatgggtaacaccctaccagtgcatgatatgtcggaatccacagcagccataggatctcccaacaaggaggatcttgcaacaatgacattgatcaagaattggatgttggaaattatggtttggcattgttacttctcttactcctgtttcatgtcccaatctgaggtgactcgtgttggtaatcatgtaatttttccttcgtgcttctattcttcctatacgctttaggcatggcatgttgtgcactaacattttgattaacaatacaacacatggtcatacatatggtattgttgcactatttttttgttgcaacgcacgggtattcaaccagggcatctcagattgggagtgggaggaggatgaggagatgatttggtgctaccagggacaggccccatctcctagaaatggatcttcctcctttgcatgggcaacttgtgcatcgggctactcttcaccaacagaaaaccatcactgagaaagagcagttagcaactggtgttgtcgtgttgcgactcaaaagggcttgcctatgggcatccaaataggagccatccccaaatgctgactgaccaaatgttcggtatgggagccacaaatagcagcacgatgggaatgcagcagcagcagcagcaaggggtatacgggaacatgcaggcaggtgcacagaacgtgcaaagtatggcgggccttcagaaccagacccagaatcccaacttcactcagcagattcaacaaaaccaacaatgattcaacactaacggtcatggaggttgaaagatgagcaatatagccatcgttttgctatttgtctgttggtctttactcagcttatctgtgagactgatagtagccccaggttgatagccttcgtttttctgtaaatcaatgtagatgcatcgccattagcgagatgcaggtcaattatatacgttgtaactgtgttttggatatgtgaatagtgttacgtgtgttccttttattt

SEQ ID NO: 115755 - DNA, 229 bp, Zea mays
  Clone ID: MRT4577_37050C.1
gggccgggcccgaaacccttggcgttccacacgcgcgaataaaagccgccgataaagaagaaaagaaggtttgcatttacagactgaacgagggctatcaacacgcccaaggaggaagagagaccagaaaaggggaggaggcagggaccaactcaaaagagaaggaaagcatcccaggtatccctatgggaacaattcgtcaaccacgtaagtggaaggcgggcgaaag

SEQ ID NO: 115756 - DNA, 200 bp, Zea mays
  Clone ID: MRT4577_37051C.1
aaaacacttaaccatccacactttttttttattccttaccacagctcatggcacgcggacatcaacaagcccgcggtgcatcaatttgctcttatttttttcttctctctcaaccatctccctacttcgacaccccttgcctttcctcttcccacagtcctattaccaatcttgctctaattataataagacctttcatc

SEQ ID NO: 115757 - DNA, 774 bp, Zea mays
  Clone ID: MRT4577_37052C.1
gtactgttgggtagtaataatgtactaggttgtctgactgaaaaaacaaaaaaaaaataccctagacctgaaagaaaaaaagaacaaaagggcggccgatcgcgatgtgcaactatcccctggcagtgtgataaatgtgttgctgttctatctgccggccgggacagctccttcctgtttctggagataccaagcacgagtgcagcaatggcgcatcccatgcctcccctctcagcatcacagagcacaatcaccaccgttctgaagatccttccaaaacctcctgctgctccggagagcagaagcaataattgtgcttttggggccaaattcgacagtaggagggcacttctatgcggcttggtcgctgctgctgctgctgctggcaccatgctgggcgctgacatcgctggtgctgcttcgaagaggcggcctccaccgccagcgccggcagaggcgaagaaagacccgaacgtcagcggagtgcaggctaaagtgcttgctagcaggaagaggaaggaggccatgaaggaagctgtggccaagctgagggagaaaggtaagccggttgataagtgaaggccagaacccagtgacccttgatcaagaaatgtaacttattgttaaataatatactccctttattcttctaaagtaataagtcattaatttgaatagtctactcactttatgtgtacagatgagaataaaaatacaactattttgcttgtaaaaaaaaaaaaaaaaaaggccccaaaaaaggcccctagggcc

SEQ ID NO: 115758 - DNA, 314 bp, Zea mays
  Clone ID: MRT4577_37053C.1
acccaagaccaatccccccccattttttaacacataatttaagcaatcaataattttttaatgcatcgcaggcaagtccttaataaagggcctacggaaaaacaaaaaaattccaggggtttgactgacataacaaaatgttttcaccctaaaaattaaaaatgttccccaatgttaaacactgttttttccttttaatacccccccatgataccggcatgatatgatgaacatcggtcacggggcgaaattcccacccgaacaaattacaagggaaaaaaattgctgggcttagcaagcccccccgcaagggg

SEQ ID NO: 115759 - DNA, 506 bp, Zea mays
  unsure (1)..(506): unsure at all n locations
  Clone ID: MRT4577_37054C.1
cttggtgatagatgcaagtttgcacatggcgttgaagaccttcgacaaaaaccaatagatacccgatcaagaaatagcgggaattcacattcaaatcgatctcatggtaattatggaaatcagaatacctcaatgatacctgctccgcactccggctataatcaatatttcagtaatcagccttaccctgctccaactttctcctatcctatgccatcaatacctatgtcgcagggtttccagactccaccaatgatgggaggttatttcatgcaagggccaggacagaattatcctggatatcagaatcaataatgtacaagtgatagtttctaaaaagttttttacaaacatgattagaatgatactttggagttgtctttggttttaaatatactgattactatggtgcatatattggttttatcattatcaacttgtccttcaaacaaactacaaaaattcattaaaaagtaaaagtattttgattcaacttttatanatag

SEQ ID NO: 115760 - DNA, 1711 bp, Zea mays
  Clone ID: MRT4577_37055C.1
gtaaatttgaaagaggttaatcatatgtgccctttcaatacagccgcttttccagacagtcttgcaattgctaaagagggtgagctttcaattggaactattgatgatatccagaagcttcatatccgcacaatcccccttaatgaacaagcacgccgcatttgccaccaggagcaatcaaagacactagcattttgcagtttcaagtacaaccagagtgtggaggaaagtgagactcacttaatacgtctgctagatcatcagacttttgagtccctgtgtgtgtatcctctagaccagtatgaatgtggctgctccatcattagctgttcgtttgtggatgacaataatgtctattactgtgtgggaactgcatatgttatacctgaagaaaatgaaccaaccaagggccgaagccttgtatttgcagttgaagatggaagtttgcaattaattgtggagaaagaaaccaaaggagcagtttattcgttgaatgcattcaatgggaaattgttggctgctatcaaccagaagattcaattatacaagtggatgtcgcgcgaggatggttcacatgagctgcaatctgagtgtggccaccatgggcacatacttgccttgtacactcaaacacgtggtgacttcattgtggttggcgatctgatgaagtcaatttccttgctggtgtataagcatgaggaaagcgcgatcgaagagcgtgctagggattacaatgcaaactggatgactgcagttgagatgcttgatgatgaagtctatgttggggcggagaatggctataacttattcaccgtgcgcaagaacagtgatgctgccacagatgacgaaagggccaagcttgaggtcgttggggagtaccatctcggggagtttgtgaacagattccgccatggttcactcgtgatgcgccttccagactcagagatagggaagattcctacggtcatctttggcacaataaacggggtcattggcattatcgcctccctcccgcatgaccattacaccttcctggagaagttccagtccactcttgtcaagtacataaagggagttggaaacatgagccatgagcaatggcggtcgttccataacgacaagaagacagcggaggcaaggaacttccttgatggtgacctgatcgagtcgttccttgaccttagccggagcaagatggaggtggtgtccaaggctatgggcgtttcggtggaggatctgtccaagattgtggaagagctgacgaggcttcactagtacatggatacgcaaaagctttgcttgtaacttgatgcatgtacatcctctttttgccatctatttttgtgctgtagcagttccatgagctgcctcagcagttgccgcgggccgtgttggcccgaagctgtagcctgccctgctttattggttgactcggaatactttttgggttgtgccagtttgttgagattgttttttttcttttattctatgttgaatggaaagattagcggtgaatcctgtcatggtcctatctgaatatattggggtactaggagccagagagatgaccgaatgactgtcttgtaggacctggttcattccaggcccaattcaatcgggcagggtcagcaacccagccctttgtttaaaaaatgtatccggtgttcaaaaaaaaaaaaaaaaaaaaaaaaaaaaaaaaaaaaaaaaaaaa

SEQ ID NO: 115761 - DNA, 308 bp, Zea mays
  Clone ID: MRT4577_37057C.1
agacgctcacacacctggaccatggaccctggggaatgcacgtgtatgtctggagggatctgcgtccgcggagacaattgcaaatgcacaacctgcagctgtaaaacctgtcgtaaaagctgctgcccctgctgtctcccaggctgtgccaagtgcgcccgatgctgcatctgcaaacggggctcatacaagtgcagctgctgcgcctgaaactcacccatggcactaggatatatcctgggataggaccacgctgtacctgagacaatcgattcgactcgtataataggtcgcgcatgatatatgtg

SEQ ID NO: 115762 - DNA, 280 bp, Zea mays
  unsure (1)..(280): unsure at all n locations
  Clone ID: MRT4577_37058C.1
ccgggatggggtcgacgctgacccgcgccggcctcctgatctgcagccccgggacggcgctgacctggagcgcagcgtgaggccggcggcgtccgagtgcggcgacaggcccagcaccctgcccctgccgtgcgggcacgccgggtagtagttggcgcgcccggccacgttcggggactcgctagcgcgctactctgccgaggtgcagcgcgtggcgcgccgcctgctggcgtccatggccgcgaacctgggcgtggcngacgccgcgaggctggccagg

SEQ ID NO: 115763 - DNA, 320 bp, Zea mays
  Clone ID: MRT4577_37059C.1
ctcggtgccttaacgactgccgggaacgaccttactaacacggctcccaatgactcccacaaaataatctactactacaacacccacctcttctcaaggcgaatcatctcacatcaacaaagacacaactcccttactatgatcactctcttccttttccaagccaaacacgatagtatacaatccatagactctaagataacccgctcactccccatccaattgtaactctccacctcaccctgtaatgaaccttcaacacctacgcctactaacgcgactgccaaatactctggaacaacaaactatcctcctaccac

SEQ ID NO: 115764 - DNA, 176 bp, Zea mays
  Clone ID: MRT4577_3705C.1
gggggaacaaaggggccaattcccatgatctttaacaccgaccacatgttaaaagggggtgctccacccagggtctgcgccacgggattgcccacgaaaatagacacgtgaatccccaaagaaaaaactttggcattcaacccacacattttggtgatacagggtagtgctttccc

SEQ ID NO: 115765 - DNA, 390 bp, Zea mays
  unsure (1)..(390): unsure at all n locations
  Clone ID: MRT4577_37060C.1
gttcatgtgccacctgtgcgtttgttaattggtctctgcccccaggggggccgtgcncggggggcgggggaaaaggggggggaaaggggggaaataaaaaaaaagcctgcggctccccccatcaacggaaaacaaaagggctggacgggaccacacgggccccgcttgaaaaaaaggaaaactggcgcagggggggggaggacacgcccacctccgggggcggaaacagctagagggccccggctgggctttattccccccccccctggagcgtagtcgggagcccccaaaacaggggggccggccccccgggatttgcgccagcttcagggggggggccgcctttttccgcccggggggggcggggggggcaatccaaggggggagtcc

SEQ ID NO: 115766 - DNA, 691 bp, Zea mays
  Clone ID: MRT4577_37061C.1
cattgggtacctcgaggccggccgggggacggtatttgcatcgcgcattcgcgccggtctggccaatctctagttctctactgcacggtgaccgatcaacgacagtcgacagttgcagtgcagccgagttcaagagttcagtttagagagagagagggggagagtgatttgccgacttgccagttgccgcacaaagctcctctagcacctctgtgtggccgacttgtccccggtatcaccaagtctgcaggcctccccagtcgtcgccggcgagggaacgcgccgcccgtgacgccgcgggttgttggcgccggcgttgaggccgcaagcgcgccagcatcaggacctcacaggtgattcaatcctgaaggcatcaactatgttcaattttcaagaaatgtcttgctgttttacgtgtgcgacgggcatggaacgaaataatgaaaacgaaggtgaccagttttgaggaagcaaggtgaggattttttcctacagtgagatgaggaaagctacgcatgattttagtggagcaaacaagattggcgagggcggtttcggctccgttttcagggggaagcttaaagatggaacggatcgtcgcggtgaaagtcctttctgctaattcaaggcaggggtgttcgagagttcgtaaccgaacttacagcaatttcagatatcgtgcatgaaaacc

SEQ ID NO: 115767 - DNA, 1851 bp, Zea mays
  Clone ID: MRT4577_37062C.1
aaaaaaaaaatttgcatcgcgcattcgcgccggtctggccaatctctagttctctactgcacggtgaccgatcaacgacagtcgacagttgcagtgcagccggtgagcttagatgacgcgcgtcccctaaaagcaggatctggcataaggctacgtgctggtttacagttacagctcaggcttaccatttctttatccgattcgcttcttgttctttaaaagttcagagttcaagagttcagtttagagagagagagggggagagtgatttgccgacttgccagttgccgcacaaagctcctctagcacctctgtgtggccgacttgtccccggtatcaccaagtctgcaggcctccccagtcgtcgccggcgagggaacgcgccgcccgtgacgccgcgggttgttggcgccggcgttgaggccacaagcgcgccagcatcaggacctcacaggtgattcaatcctgaaggcatcaactatgttcaattttcaagaaatgtcttgctgttttacgtgtgcgacgggcatggaacgaaataatgaaaacgaaggaggaagcaaggtgaggattttttcctacagtgagatgaggaaagctacgcatgattttagtggagcaaacaagattggcgagggcggtttcggctccgttttcagggggaagcttaaagatggaacgatcgtcgcggtgaaagtcctttctgctaattcaaggcagggtgttcgagagttcgtaaccgaacttacagcaatttcagatatcgtgcatgaaaacctaattacattggttggttgctgtgccgaagggtcccagaggattcttgtgtacaattatctcgagaacaatagtctttcatatacacttctaggttcgggccggagcaacattcggttcaactggagagcccgtgtcaagattgctgtaggcgttgctcgtgggcttgcttatcttcacgatggaattcggccccctataattcatcgagatataaaggcgagcaacattctccttgacaaggacctcaccccaaagatctctgatttcgggctggcaaggctcctccccccaaacgcaactcatgtgagcactagggttgcaggaacaataggatacctggctcctgaatacgctgtgagggggcaagtgacgaagaaatcggatatctatagtttcggcgttttgctactggaaattgttgctggtagatgtaactacaacagtagattgcctcagggagaccagtttctgcttgagaagacatgggcatactacgtgcagggaaagctagagaaggtcatagacgccgaagcaggggaggacctgaacgtcgaggaggcatgccgtttcttgaaggttggcctactatgcgcccaagacgcgatgaagctgcgtccgaacatggccagcgtcgtcctgatgctgataggagagaagggaatctccgtggacaggatcaccaagccagccgtgatcggtgacccgtacctcgaccggaggccaagcaacgcagactctaccacgatgaagtccttcgccacgaccgaagctttaacgtcatcagaggcaaacacggagtggtctctgtgatggggggaaaaaacgtcatcatcgatggagatttgtttttgtggatgctgcagttgccaaacaaataccgcatcgcttctgttgattatgtttgtttgttatttttgtgtgtgtgtatatatacttgaaatggaaccacgggagtgaaacgaggattgaatatgctttacccatctttggtacaagtagaatcgtttgtgtttctatcatattcactctcttttttttttcttctggaacatgtatgtatcttttcagtct

SEQ ID NO: 115768 - DNA, 1559 bp, Zea mays
  unsure (1)..(1559): unsure at all n locations
  Clone ID: MRT4577_37063C.1
gtgagcagtcacctcctgaaagcacatcgaatgctcttcaactagcaactgcagctcttgtcaagaaagagctgctgggccatgctgattcaaatattagacttgccgtggcatcatgcatatctgagatcacacggatcacagcgccagatgctccatatgatgacgatgcaatgaaggtatagtctgccctgaataaaaagatctctgctgttctgtacttacacgtgtttttacttggttttaggatgtattctctttaattgtggaggccttcaagcatctggatgacatagagagccccttctttggaaggagaacttcaattcttgatacagtcgcaaaagttcggtcctgtgtggtgatgctagatcttgaatgtgacgatttgataaatgatatgttccatcacttcttgaggactgttaattctgggcattcagaagccgtcatatgctgcatggaaacaataatgagattggtaattgaggagagtgaggatgtccaaccacagattgcttcatgtctactccaaaatgttagaaaagaagaaaaggaatcttcttcagcttcctttgagcttgctgaaaaagtgataggcacatgccgtgagaaacttaagccagtctttctgcaatcactaaaaggcacttccttgagcgaatacagccaaatcgtcgcatcgtgttgtgaagatgtttcagatgacagggaagataacaatgctgatccttctgggaaggacacggtggatgatggcaagctctctgaaaggactatggctgatgaattgccccaggaatcttcaaaggcggagcaagatgttagccgtcctgaacaagacggtacttgtatgaatggtaatacaggtactgctattagcagtggtgctaccctaccagatactagcgaatctgatcaaggaccaccaaaagagaagaccgaacaaccttgctatgctgatgacataacagatactgatcagttgaaatctgaccacaatgaaggtgcggagttcgatactgcaaagcccgaaaagaaagctgccgttgattcagacaaaattgctaagcttaaaccgtccgataaatgtgaagcacctgtgcattctgatgctgacactaaaaaggaagcataacgagagggtaccgggggagccgctgatgatacatcaacgcctgctgattgtacacctaaaccaaagcgaggccgtcctcctggcccaaagtcatcacagaagaaggctgctggaaaggatcaatcttcaggttcagatttgaaaaaggtcaatgaggctggtgatttagccggaaagttggcgaaacgaccagcgaaggatgagaagtccacaaagaaggctggtgaaggggaatcatctaagaagacccaaaagtacaattcaaaacaacagaaggatgaaaacctatctgaggatcctgccaaggatctgagcttaaaggaaatgataacgccaaaatcttcgactaaggtcccaggtagaaccaaaaaaaannnnnnnnnnnnnaannnnnnnnnnnctctgcgttgttaccactgct

SEQ ID NO: 115769 - DNA, 376 bp, Zea mays
  Clone ID: MRT4577_37064C.1
cccgggttctcgtttgtgacctcggctcttatgaactctataatgggggcgccgctgccggacccgacaccgatcgtggccgcgagacgcatgatctcgcctccgtcagtgccgttgtcatttacatgaaccagcagctggtcaatatcgagcgcagatagccggctgtggctcgcattaaccgtgtttgccggtccatgggggctggataaggccggcttgtccgagctgtaggatagcaggcacaggaacccgtctgtgatggactctaaccgacctcctggactagcttgcaccaactccagcttgctgaaagcgcaagctcggttatgcacaaactccacacagacactctcaatatgctaggaacaggcca

SEQ ID NO: 115770 - DNA, 304 bp, Zea mays
  Clone ID: MRT4577_37065C.1
gccgggaatgcacctatatatagttttgtagcattccataaacacaccaagcgaagcacattagcatcatcctaacaacaatggctaccaagatattatccctccttgcgcttcttgctctatttgcgagcgcaacacatgcgctcattattccacaatgctcacttgctccaagctccattattacacagatcctcccaccagttactacaatgggcttcgaacacccagctgcgcaagcctataggctacaacacgcatattgcggagagcgcttaacaacaacccatttcccagttgccac

SEQ ID NO: 115771 - DNA, 624 bp, Zea mays
  Clone ID: MRT4577_37066C.1
aattcggcacgaggcaccaacttacttttctcacccacaacgtcgacgatgtcggcgacctacccgtcctcgtccgaggcgactcgcctcaaatccatgctccagcgtagtctcggatccagatgcaccctgtgacaatctcgggctgcgcccgcacgcgccgcgccacggtcgaggcagtggtcggcctggatgtcgcgcgtgccacaactgtgtaggacctggtgcgcggcgctgtcgccgctaacggtcggctccggcgcctcgacggcttcgcgaaagcaaaggtgaggacggttcgccctccatcccctgtcccaacgtctacgtgacccagcacaccaatgccgcgaaatcccaagatgaggcgccgtgatgacttgcccacactccctcaaactccattgtgccaccgcgagccaccaggcccaccaccaggagccccctgcccctcccccctgaaacgtcgtcaccgtgatggtgcaggtcggatcgttatccccttacctcgctcaaatgccttcgcggtgcctgcgcgtgttgtcgccatgcctgcttcccctttcccagaaacaccttggcagtcaaaacaatattgagcagatcatgggcatcaaggacact

SEQ ID NO: 115772 - DNA, 594 bp, Zea mays
  Clone ID: MRT4577_37067C.1
ccggccgggaccctcgatcctctcacgggccaccggctcttcgttatcctacccgctgtcgtccctctaacgcaccaccaacatccccatccgttgcctcctctcctacctttgggcttcccttccaccaccaccgccgccacagtgcaactggagcatcttgaagttagagatgctctggtcatcgtcatagtcgagtagcagcagcgtgtcgtagagtgcgaagaggtggcgaaggacccgacctcgcgctggagccagaggacagcttctgcacaacaagggattcgcgttccgacgcactaggcgagctcgaagcagacggcgccaagggacacgagcagcgggtcgacgatggcgaggagcgccagccaattgtggagcagcgcgagcgagcacatgaggtcctcccatcttggaggatggacagaggcgtgtcggaaggtaagctgatattggggtaacagagagagcgatagctaagataaatacctgcaggagggagatgagatgcatatattttttactagtaataataaaatgaataataactcacattttttaagcaaaaaaaaaaaaaaaaaaggggcggcc

SEQ ID NO: 115773 - DNA, 352 bp, Zea mays
  unsure (1)..(352): unsure at all n locations
  Clone ID: MRT4577_37068C.1
tttatantttttttttttttatttttctttttgggttttttgaaatttttagggggttataacaaataacaacactacattttcgccactaggacacacacaaaaacgaaaggggcccggaacagggcaaggcccggaagccagacccttgggaacaaaggcgacaaaaaaccggaccaagaagaacaagaaaaaaagggcaaaaaggcaaacccaaaaaaaaacctgccgcacaccgaacacgaacatggaccaggtaccgaagaaaagaaaacaccgaggaacatagccaaggcaatcgggcaaaaccgaaaagccggggaaatcgagccaaaggggggacacagggcag

SEQ ID NO: 115774 - DNA, 378 bp, Zea mays
  Clone ID: MRT4577_37069C.1
aagaaacacggtattttttattttatttggaatgacataaagcaacttgcgcgacacacatacacagccaatacattgcctgatttctacctacacatgacaacataggatccaactacaaaccctatgccttgttgggggactcggcggacttattggaagagttgacctccttgctaccgccgatggactccttcagcaacgggttcttgggcagcctgaccggcattgaggagtgccaccaacccccttaggccatgtgcacgcctgtcagcaagtgcccccgctgctcgtaggtgcggatcatcagctgcacgtggcgcgggacgatgctcgacctctcgccgggcttgacagggctgccggcgagcttcagga

SEQ ID NO: 115775 - DNA, 539 bp, Zea mays
  Clone ID: MRT4577_3706C.1
gttttgtgggtttttttttttttttttttttttttttttttttttttttttttttttttttttacaaacaacaggggctttttacccgcatatttccactcttatgggcggccagctccaagggcaggggacacctttttttttttcccccgggggaaaatctgcctcaaaaaaaagcatgggcaagcccccccggggacccgttgggttttaaagcccactaggccctcatgggtgggggaaaaacccttgggttaacggggaaaaatcgaaatctttgccaaattgggaggggagaggggaaaaggcatttgatgcagggccgttgttgttaacacctgctgccggggccccatttgctgggacggctggagtaatgttgggcatcccaggggggccaaaaccaaaggtcccaaaaaaaaggtcttgattgttgttcaaaaccttgggggccccattctgggcgggggctaaagccaacccaggattttgatagccaaaatttgcccagttttggaaaggcaagcggacccgtgggt

SEQ ID NO: 115776 - DNA, 190 bp, Zea mays
  Clone ID: MRT4577_37070C.1
gagctcactagttggtggccgccctttcttttttttttttcacagcagctacacgttatactgctcggaacaactttgctaccactttacagtatggtgaaggcgggaacagcgtacattggccaacaatccaggcagggaggagatagccaaactagatcctttgggcagctgcatccaagacagggct

SEQ ID NO: 115777 - DNA, 211 bp, Zea mays
  Clone ID: MRT4577_37071C.1
ccgtttcttccgcctacctgcacgtggacagaaggacccaatttagctttactgttccctgggattggctctaggatgtccctgcccagttgatgttgaacgcgaagaaagcccgctgcatccatctcccgacacatcactattatcccacgtggaaagagctgctgatcttaaccttgtggaaacccgagcgccaagggacatacttagg

SEQ ID NO: 115778 - DNA, 442 bp, Zea mays
  Clone ID: MRT4577_37072C.1
ccagctcacagtcggcggccgccctcttcctttttttttttttttttttttttttttaccttttcaaacttttttatttggttttgtttaattaaaaagaacccttcatctacattaaaccacaaaaccaacaaaaaccaacaagaaccccgggaaaaccaaaacctccctccaagagcacctctgcaaatcaaacccctactgggctataactatctaatagctacaaacattattaactttttaaccaccacctcttgaggtaaatatccagacccccaaaaataattcatggacacccaaaccccgtcaacataacaaaacatgcgacgggcccctccccaataaaggctgcaaaaaaaaacaccccccctgattatgccatggcaatgcccccccccaataaactccctaacaacgttggaaacctaaccggcaaagg

SEQ ID NO: 115779 - DNA, 279 bp, Zea mays
  Clone ID: MRT4577_37073C.1
ccacgcttccgggtctgtttgctcaacccggattttgcaggactagagagctctaatctggcacattctggggtcgaggatccatctcatcctcggcgggcatagagtgattgttccgtttcacttgaggcattgccatactctcattgcaacagctggcctttctttgctgcctgggaatcctagttgctgacgttgatacttagctgtggcagaacttaaggcatctcttcgactgcccatgccgctagaaggactccatatccgctatcataagct

SEQ ID NO: 115780 - DNA, 567 bp, Zea mays
  Clone ID: MRT4577_37074C.1
agctcactacttcgcgcggctcgtcctttttttttttttcaatcttagcagctgctcatttttctcatctgcatattaaaaaaatatattgatcctaaaacaaatacagcaacaaaatatatccttgaccaaaatctttaattataagatcaagctaacaagtataactacagaagagaaaatcagagatcccaccaaggaatcatcgtcctcttgaaattgcttcttccatctcaccgtgtgatgaaggaaataactctatgtagcgactgccaagtgtcatcctatcctttatcattgctgcttttgaatcttcagcactttcgaattctgcataagcctccccagaaggtcttccctctgaattcattataatatgaatagaatcctctggcagcccaaaatccttgaagaattccattatgtcatccttactttgcagaaaatggcaatccccttagtcgcaacaccccggggtgcccagctgattcttttccttcatcatatgatttagcccgggaagcacttcgacgaggtgaaccacctcgagcttttgaaaccttattt

SEQ ID NO: 115781 - DNA, 472 bp, Zea mays
  Clone ID: MRT4577_37075C.1
tcggatcagctggataagtctagccgattactagtgtactcagccttgcttgtggcataatttttgtaggtacctccttgttttgattgatggtgtgacttggccaagaggtgtagtgtggccaggcttcgcaatgttactcagttttctccattagttatttccgctgcactaaaaactattgttactgcttttgaaacttcgataatgtaatcgctactgatacttcttaaatttgtgatattatgctttattgtaaaaaaaaaaaaaaaaaaaaaaaaaaaaaaaaaaaaaaaaaaaaaaaaaaaaaaaaaaaaaaaaaaaaaaaaaaaaaaaaaaaaaaaaaaaaaaaaaaaaaacaaaaaaaaaaaaaaaaaaaaacaaaaaaaaacaaaactaaacaacaaacccaccaaaaaaaaaactattctgtccctagggggcgcgggtttttttaaaaaaaagccccccc

SEQ ID NO: 115782 - DNA, 444 bp, Zea mays
  Clone ID: MRT4577_37076C.1
aaacccccgccaggaaagggaggggggattagcccgggtgggtgaggggttaattccaaacagggcaaaactaaaagccgccgcccccgccgccggcgacgaccacaaccacgagcaaaacaggaaagggggggggaaaaaaaaaaaaaagggggaaaaaggcagcggtttactactagcccgtacaaaacaaaacacagtcctttgggacaggcccaacagcagtactagtttaacagggggacatgtacaaaaacaaccccggcgggcagggggcggaaaaagaaacaaggaccccccccgcgggccaagagggaaaggcaggggcaaaaacaacagcgctttacttaaccttacttggggccccaaagcagcgggggcataaccttggccctcttgcccgggccgcgggggggggcctttttttcccgcccgggccacccc

SEQ ID NO: 115783 - DNA, 339 bp, Zea mays
  Clone ID: MRT4577_37077C.1
cctcgagccggcgggatacattcacacgagagagtgcggagcctgcctttcccgcaccactcagggaggattgtggagatctacgggatcctaccgcgccgagcgctgcgaccactaacccttgctcctcatcgacctgtccaagacgcgtcgattactagcggaggccccgaggagctagcccccaataccgactgggtcgtgagcgagtaccgcctccccgacgcacgcaataaccatagtgacaacaatactgcccgccacttcgactcatccacatcgatggccgctacgagcaacatcacctgcacctcaagaaaggaggacatggtgctgagc

SEQ ID NO: 115784 - DNA, 479 bp, Zea mays
  unsure (1)..(479): unsure at all n locations
  Clone ID: MRT4577_37078C.1
gngttgtgggggatccttttgactccccttttcgtatctgtctgtgttttttttttgttttctatctcccttctctcacccgaggcttagataccgaaatgccggtccacccttattctatttcgggcctagggggaaatccccatgtgtatttcctttaaaaccagacatcagttagggccaaccgtattttggggggctgaacctccggtgagaaaaagggaaatcgaaaacaaaaacaaacaccacccgttccggccgggggagacaaaatgttccatcttatcacggtcgggcccaatttcgagttttcgtgcccctggatggaaattcatagcttttttttagggcgccctaaattttattctctgggcgggattttacaaggtgggagctggaaaaaccctgccggtccccaatttaaaggccttgaaggacatcccttttttaccgggtgggtgtaaaaaagaaaaggccca

SEQ ID NO: 115785 - DNA, 1390 bp, Zea mays
  unsure (1)..(1390): unsure at all n locations
  Clone ID: MRT4577_37079C.1
atagaagagcatcaaagcaaaacaaccggccaattacatgnacaaaacctcaatcaaaaacctcgtcagtttgggaacagcggaaaaccggccccccgcccgcctgctaggtgctagcaacagcagtcgccgccgatgggggtggactactacaaggtgctgggcgtcggccgcggcgccaccgacgacgagctcaagaaggcctaccgccgcctagccatgaagtaccatcccgataagaaccctacgccgcaggccgacaccctcttcaagcaggtctccgaggcctacgacgtgctcagcgacccgcagaagcgagccatctacgaccagtacggcgaggaaggcctcaaggccggcgcgcctccgcccgccgcctccacgcacggcgccggcgccggcgtccacaggttccgcttcaacacgaggagcgccgaggagatcttctccgagatattcggcggcgggtttgctggggcaggcccccgtacccccggcggcggcgtcccctccgggttcccgatgttcggcggcgctgctggggcaggggaggcgtcgagcgcggcgtcgcagaggaaggcgccgccgatcgagcggccgctggcttgcaccttggaggacctgtacaaaggggccactaagaagatgaagatctctagggatgtccttgacgccaccgggagaccaacaaaccgtgaggagatcctttcgatcgacatcaagccaggatggaagaagggcacaaagataacctttcccgagaaaggcaacgaggcacgcaacgttgtgccatcggatctggtgttcatagtagaagaacgggcgcaccccaggttcaggagagacgggaacgacctcatctacactcataagatctctctggtggaggcattgacaggctgcacagtccaagtgacgactctggacgggcggaccctgaccgttccggtgaagtcggtcgtcagccctacatacgaagaagtcgtgccgggcgaaggcatgccgatcacgagggagccgtctaggaaggggagcctgaggatcaagttccagatcaagttccccactagcctaacaggcgaccagaaggcggccatccaacagcttctgtcttgaagctctctctctctctctctctgtgtgtgtgtgtgtgtgtacaatgcgaggagtgttttcgtttgtgcaatgcgaggagtgttttcgtttgtggagtagttgtagtagtgacattagctgaatgcaccgtcacgnnnnnnnnncatgctagtgttggcctattcttttctagctttggtggagctgcagctgtttgcgacatggtcatgacgctattcagtattcagatagattatcagttgctatgtctttgttggatcgggcctgtttgttt

SEQ ID NO: 115786 - DNA, 278 bp, Zea mays
  unsure (1)..(278): unsure at all n locations
  Clone ID: MRT4577_3707C.1
ctagcgccgccgccgccctaactcgccttgcgngactgaaagctcgggggctgccgnccacgcgagaagcgagagcagggacacccaggngaagcnngcnngcgnggngaaggngangggcaggaccggccccaggggncaggggacccaggncagagggaagcgcngggangaccagaaccggcncancangaggaggggggaggggcccgnccgcgagggcgacanccgcaccccgcccgagnccgagagggaggccacgaggcngcgccgaagcc

SEQ ID NO: 115787 - DNA, 560 bp, Zea mays
  unsure (1)..(560): unsure at all n locations
  Clone ID: MRT4577_37080C.1
tttttnnnnccccctttcttctttcttctttcccctttttttttttttttttttttagcgggatttgggggtaatttaaccccgattttaaagaaaccaagcctggggcgggcgatggccaaactaccacaattttaacaagagtaaacccccccctttgggggccgggtgcttgtttatgcaatttctgcccctaacaagctaaaaggcgtagggggttatggggaccacctcctcgggcctccccgggggaaggggcttggtcctcatccccagctgcatggacccgttgaacacaaaccctttgtaccgcccccgttccccgatcttggccgggaaccccggcagggggtcgatccacttggccccggggatgttgaaaaaaaacaccaacgagtgcctgggcccgggcttcctcaccacccggggcggcgcgctcttgaacttgttgttacccaccccctgtatgacctcccctaagttgaccaagaagctgccctcaaagggctccgccgggacccaatccccgttgttgttgaggaccttgaggccccccaccc

SEQ ID NO: 115788 - DNA, 646 bp, Zea mays
  Clone ID: MRT4577_37081C.1
ttcttccacatacagtgatcaaattgacaagctcacccttcatgttgagattgcaggaaaactcaataacataatcaaagaacaccaccttaaagatgttggacagctagagcaagatcttgtgtttggtgatgctgggacaaaagaactaatcagtttcttacgaacccgcatgagaaagggttcgaaagtgagaaaggtgcaaagctgatgcagcttgcaggattatctgctgatgatatgattgtagtaaataatatgcgctgcttacgtggagctgattctaagaagtcttcagttggggcttttactttgaaatttgatcttcagaagaaaaagcctggtatcaggaaggagcggactggagaagagtcaacatggatgctatctcgattttatcccatcctggaggacttgattgagaaacttagtaagggtgagctaccaaaagatgagtaccactgcatgaatgatcctagtcctagtttccgtggaattccagggagcacatctgctcgaacgagcccagctcatcagccagcccaatccatgagatctagacgaataggtggcacatgggctagacctcggaactccgatgatggttattcgagtgactctgtactgaagcatgcatcaagtgact

SEQ ID NO: 115789 - DNA, 1538 bp, Zea mays
  Clone ID: MRT4577_37082C.1
gttgtaaattcattgctcttatattattatcattattgctactggtattattactatttttgttcttactctagctcttctttttgttgttattattacacgaattaatctcaccggtttgaggaaaaaatatacactttccccacaaaatagcagcaatctgaggacaaatagaagtcctcggaacattgaacttcactgatccaccaatctaataaagacgccacctatattacagtctctggtcgctgccatgtgtgtacactcgattgtaactgacattggctaccgaatgaatatcatgcccctctagcctgtgtaagagcacctgtggttcggttaagggagtaaaactaaacccgttgtagagatgcaaataaataaataattacagtgtagaatgccacggacaatcgtccttggaattgttatatttgcaaatcatcaagcgacagttcctcggttgataacatcttcagtttagtgatgaactgcggtgggtcatcaagactagaggagccaaggataatttctctcttcagtttgcctgacagcttatgggcaacacgcaactcagaccgagtagcacctccaattacaaagataaataggcgctggcccaactttctgaagtcacttgatgcatgcttcagtacagagtcactcgaataaccatcatcggagttccgaggtctagcccatgtgccacctattcgtctagatctcatggattgggctggctgatgagctgggctcgttcgagcagatgtgctccctggaattccacggaaactaggactaggatcattcatgcagtggtactcatcttttggtagctcacccttactaagtttctcaatcaagtcctccaggatgggataaaatcgagatagcatccatgttgactcttctccagtccgctccttcctgataccaggctttttcttctgaagatcaaatttcaaagtaaaagccccaactgaagacttcttagaatcagctccacgtaagcagcgcatattatttactacaatcatatcatcagcagataatcctgcaagctgcatcagctttgcacctttctcactttcgaaaaatttctctgggtttatggaagcataaatcatcagcaaacgcagcttattttcacgacttacatccatgcgggttcgtaagaaactgattagttcttttgtcccagcatcaccaaacacaagatcttgctctagctgtccaacatctttaaggtggtgttctttgattatgttattgagttttcctgcaatctcaacatgaagggtgagcttgtcaatttgatcactgtattgtggaagagcttgaaccattttctgcaactgcttggtagataactctccaccagatcttgcctgctgtagttgagctgctttgttctttgatacaaaactggtcatcttttcatgtagcgtttcattaacatgagctatatgtgcatgccgcagctcaagccatactggatcatgatcctccaaccaaaacctcctcccgacccggccggc

SEQ ID NO: 115790 - DNA, 1476 bp, Zea mays
  Clone ID: MRT4577_37083C.1
atgaaagagtccgaccagctcgcgacttctttcatcacacctttcggcatgtactgctacgttactatgccatttggtttgaggaatgcgggtgcgacgtaccaaaggtgcatgaaccacgtgttcggcgaacacattggtcgaacggtcgaggcttacatcgatgacatcgtagtcaagacgaagaaagcctctgacctcctttccgaccttgaaacgacattccggtgtctcaaggcaaaaggcgtgaaactcaatcccgagaagtgtgtcttcggagtccctcgaggcatgctcttaggtttcatcgtctccgagcggggcatcgaggccaacccggagaaaatcgcggccatcaccaacatggggcccatcaaggacttgaaaggcgtacagagggtcatgggatgccttgcggctctgagtcgcttcatctcgcgcctcggcaaaagaggtctacccctgtaccgcctcttaagaaaggccgagtgcttcacttggacccctgaggccgaggaagcccttgggaacctgaaggcgctcctcatgaatgcgcccatcttggtgccccccgctgccggagaagccctcttggtctacgtcgccgctaccactcaggtgaggccggtctacttcatcagtgaggtactgtccgagaccaagatccgctacccacaaattcagaagctattgtacgcggtgattctaacgcggcggaagttgcgacactacttcgagtctcatccggtgactgtggtgtcatccttccccctgggggagatcatccagtgccgagaggcctcgggtaggattgcaaagtgggcggtggaaatcatgggcgagacaatctcgtttgcccctcggaaggccatcaagtcccaagtcttggcggactttgtggctgaatgggtcgacacccagcttccagcggctccgatccaaccggaactctggaccatgtttttcgacgggtcgctgatgaaaacaggagcgggcgcgggcctgctcttcatctcacccctcgggaaacacctctgctacgtgctgcgcatccatttcccggcgtccaacaacgtggccgagtacgaggctctggttaatgggttgcgcatcgccatcgagctagggcttgtcatcgaccaagtcatgaagaactcccactgccgcgatccgaagatggaagcctactgcgacgaggttcggtgcctagaagacaagttctacgggctcgagctcaaccacgtcgcccgacgatacaacgagactgcggacgagctggctaagatagcctcagggcgaacaacggttcccccggacgtcttctcccgatacctacatcaaccctcagtcaagaccgatgacacgcccgagcccgagaaggcctcggcccagcccgaggcaccctcggcacccgagggtgaggcactgcgcgtcaaggaagagcggagcggggtcacgcctaatcgaaactggtag

SEQ ID NO: 115791 - DNA, 274 bp, Zea mays
  Clone ID: MRT4577_37084C.1
gttaaaacgacaaagggtctctgccccggaagcggcattcagcaaatgcaacctcagaatatgctgcctgctgagcatttgcacattaacgcatcgaaacaattgtgttcaaccacgactggcccaccacctacgagcaacatacgggacttcggctatgccggtttccaccaatctcacctcccagcccgaaaagtataccaactgccatgaatttgcggtcccgattcacgaagataccaaagtgctttcttgcgaccccgggtttttttaa

SEQ ID NO: 115792 - DNA, 3054 bp, Zea mays
  Clone ID: MRT4577_37085C.1
atgggcagtctccagcaacctctccggcccgggacggtgcttcgtttcgggactcttgagttcatgtccttcgacggcagctacgacatgatacttcttccaccgccgcgcgactacgacaatggcggccgacaacccgcccgccggcggcggaatcgacgacgtcttccccgcgtggtggaagagcaacattcgggctcgctccgttccctcccccgccaacggaggaggaggcggggccgtcaaggccagacgggaggccgcgcttcgtcggccgtcgagcgaatcgacgcccccgacgccccgacggaaggcacgccggacgtcgacctcgcgttcaagacggaggcaagcgccgtccccccgcgccacgctgaccccgagcaagaagatgacgccggcgcgctcgcggaaagcctgcaggacgtcgccctcgaaccggagatgacggcacaaccagtccccgatgtgactacatcgctcctcgtcgaccaaaaggtaacgactaactcccatcttgcgtcatttcgactcggcctcaacccgccaaacgacctcgttttggcgggcgctctcattgaggcgagtgcaaccccactgaggttccgtatgcggtcgccttgggaccgactgacggacgtctcaacctacgggccctctgggtccgaggaagatgacgatcccggcatcggttgggatttctccggacttggcaaccccagtgccgtgcgagacttcatgaccgcatgtgactactgcctatccgactgttccgatggaagccgcagccttgacgacgagagctgtggcccaagccgcgaatgtttccacatcgagctaggggatcccaccgaaggcaaccatcttggcatgccggaggatggtgatctccctaggccggtgcctcgcgccgacatcccacgggagctagctgtggtccccgctccggcggggggttacgacccacaactcgagcaagtccgcgaggcgcaggccaggctcaacgagggaacaggagcgcttgagccgatccgtcgggacgtcggacaggcatgggtgggccaacccctggccggagaaatacgtcagccgccccaaggtctccagcaccgcgtcgccaacgatgtgaggatcaggccgccgcccgcatccagcggggtcgcctcggtctacaccgggcgcacgcgcaacaccgcgcctgcggccccgggccacctcggcaacgagcaccatcgacgcgaccgtcgggctcacctcgacgaaagggtgcgccgaggctaccaccccaggcgtggggggcgctacgacagcggggaggatcggagtccctcgcccgagccacccggtccgcaggccttcagtcgggccatccgacgggcgccattcccgacccggttccgacccccgactactatcacgaagtactcgggggaaacgagaccggaactgtggctcgcggactaccgccttgcctgccaactgggtggaacggacgacgacaacctcatcatccgtaacctccccctgttcctctccgacactgctcgcgcctggttggagcacctgcctccggggcagatttccaactgggacgacttggtccaagccttcgctggcaatttccagggcacatacgtgcgccccgggaattcctgggaccttcgaagctgccggcaacagccgggggagtcgctccgggactacatccggcgattctcgaagcagcgcaccgagctgcccaacatcaccgactcggatgtcatcggcgcgttcctcgccggcaccacttgccgcgacctggtgagcaagctgggtcgcaaaacccccaccagggcgagcgagctgatggacatcgccaccaagttcgcctctggccaagaggcggtcgaggctatcttccgaaaggacaagcagccccagggccgcccatcggaagaagctcccgaggcgtctgctccgcgcggcgccaagaagaaaggcaagaagaggtcgcaatcgaaacgcgacgccgccgacgcagaccttgtcgccgccgccgagtataagaaccctcggaagccccccggaggtgcaaacctcttcgacaagatgctcaaggagccatgcccctaccatcaggggcccgtcaagcacaccctcgaggagtgcgttatgcttcggcgtcatttccacagggccgggccacccgccgagggtggcagggcccacgacgacgacaagaacgaagatcgcccagcaggagagttccccgaggtccgcgactgcttcatgatctatggagggcatgcggcgaatacctcggctcggcaccgcaagcaggagcgccgggaggtctgctcggtgaaggtggcggcgccagtctacctagactggtccgacaagcccatcactttcgaccgggccgaccaccccgaccatgtgccgagccccgggaaatacccgctcgtcgtcgaccccgttgtcggcgatgtcaggctcaccaaggtcctgatggacgggggcagctgcctcaacatcatctacgccgagaccctcaagctcctgcgcgtcgatccgtcctccgtccgagcaggcgctgcgcccttccacgggatcatccctgggaagcgcgtccagcccctcgggcgacttgacctcccagtctgcttcgggacaccctccaacttccgaagggagaccctgacgttcgaagtggtcgggttccgaggaacctaccacgccgtgctagggaggccatgctacgcgaagttcatggccgtccccaactacacctacctgaagctcaagatgccgggccccaacggggtcatcaccgtcggccccacgtacaaacacgcgttcgaatgcgacgtggagtgcgtggagtacgccgaggccctcgccgagtccgaggccctcatcgccgacctggagaacctctccaaggaggtgccagacgtgaagcgccatgccggcaactttgagccagcggagacggtcaaggccgtccccctcgaccccagtggcgacaccaccaagcagatccggatcggttccgggctcgaccccgaatag

SEQ ID NO: 115793 - DNA, 115 bp, Zea mays
  Clone ID: MRT4577_37086C.1
ggcctgcctgatcgatgaagagacgcgccgtgcttcactgcattaagcgctcgacttatggcgggcacccacacagtgacccctacatttgtgagggccatatggcccgcctgtt

SEQ ID NO: 115794 - DNA, 2565 bp, Zea mays
  Clone ID: MRT4577_37087C.1
atggcggatgttccctaccctctgcctcatatcgatcaaatcgtggattccactgctgggtgcgaaaccctgtcattcctcgacgcctactcagggtatcaccaaatcaagatgaaagagtctgaccagctcgcgacttctttcatcacaccttttggcatgtactgctacgttactatgccatttggtttgaggaatgcgggtgcgacatatcaaaggtgcatgaaccacgtgtttggcgaacacattggtcggaccgtcgaggcttacgtcgatgacatcgtagtcaagacgaggaaagcctccgaccacctctccgaccttgaaacgacattcaagtgtcttaaggcgaaaggcgtaaaactcaatcccgagaagtgcgtcttcggagtcccccgaggcatgctcttggggttcatcgtctccgagcggggcatcgaggccaacccagagaaaatcgcggccatcaccaacatggggcccatcaaggacttgaaaggcgtaaagagggtcatgggatgccttgcggctctgagtcgcttcatctcgcgcctcggcgaaagaggcctacctctgtaccgcctcttaagaaagaccgagtgcttcacttggacccccgaggccgaggaagccctcgggaacctgaaggcgctccttacgaacgcacccatcctggtgcctcccgataccgtagaagccctcttaatctacgtcgccgctaccactcaggtggtcagcgccacgatcgtggtcgaaagacgagaagaagggcatgcattgcccgtccagaggccagtctacttcatcagtgaggtactgtccgagaccaagatccgctacccacaaattcagaagctgctgtacgcgcttctggcagcttcgatccaaccggaactctggaccatgtttttcgacgggtcgctgatgaaaacaggggcaggcgcgagcctgctcttcatctcgcccctcgggaagcacctccgctacgtgctgcgcctccatttcccggcgtccaacaacgtggctgagtacgaggctctggtcaacggcttgcgcatcgccatcgagctaggggtccgatgccttgacgctcgcggtgactcgcagcttgtcatcgaccaaatcatgaagaactcccactgccgcgacccgaagatggaagcctactgcgacgaggttcggcgcctggaggacaagttctacgggctcgaggtcaaccacgtcgcccggcggtacaacgagactgtggacgagctggcgaagatagcttcggcacgaacaacggttcccccgaacgtcttctcccgggacctacatcaaccctcagtcaagacaaacgacacacccgagcccgagaaggcctcggcccggcccgaggcaccctcggccccgcccgaggcaccctcggctaccgagggtgaggctctacgcatcgaggaagagcggaatggggtcacgcctaatcgaaactggcagaccccgtacctgcaatatctccaccgaggagagctacccctcgacagagccgaagctcggcgactggcgcggcgcgccaagtcattcgtcttgctgggtgacgggaaggagctctaccaccgcagcccctccggcatcctccagcgatgcacatccatcgccgaaggccaggagctcttacaagaaatacactcgggggcttgcggtcatcacgcagcgcctcgagcccttgttggaaacgctttccgacaaggcttctactggccgaccatgaaggcacccgggggctacacgcacctactggtcgccatcgacaaattctccaagtggatcgaggtccgacccctaaacagcatcaggtccgaacaggcggtggcattcttcaccaacatcatccatcgcttcggggtcccgaactccatcatcaccgacaacggcacccagttcactggcagaaagttcctggacttctgcgaagaccaccacatccgggtggactgggctgccgtggcacaccccatgacgaatgggcaggcagaacgtgccaacggcatgattctgcaaggactcaagccgaggatctacaacgacctccacaagttcggcaggcgatggatgaaggaactccccttggtggtctggagcctgaggacgacgccaagtcgagccacgggtttcacgccgttctttctagtctatggagccgaggccatcttgcccacagacttagaatacggttccccaaggacgagggcctacgacgaccgacgcaaccagaccaaccgagaagactcactggaccagctggaagaggctcgggacgtggccttactacactcggcgcggtatcagcagtccctgcgacgctaccacgcccgaggggttcggtcccgagacctccaggtgggcgacttggtgcttcgactacgacaagacgcccgagggcggcacaagctcatgccttcctgggaagggccgttcgtcatcgccaaggttttgaagcccgagacgtacaagctggccaacagtcaaggcgaggtctacagcaatgcttggaacatccgacagctacgtcgcttctacccttaa

SEQ ID NO: 115795 - DNA, 390 bp, Zea mays
  Clone ID: MRT4577_37088C.1
tcgtttactcgttcggaacaccaggctctgcgacgcggatgttgtttgggacatgcacctgggcgcacgtgcacatcgctcctgtgtgcatcgctacgtgctctacgtgcatccacgggagcatcagctcaagatatccgcacattgattattggtctgttgctagcttgaatcgaattacttgattaacatgttgttgctctcgtctacatatttgtggacatgatccatgtaaatggctgttgcattgtactaaatctaaagcgtgagagagatgtacaccatactgtgtggttaaaaatgctcagcgaatgaactggctctgctgctcagaaattactgactgaaattggtcgatcacttggttcccttattcaactttttatctgc

SEQ ID NO: 115796 - DNA, 1026 bp, Zea mays
  Clone ID: MRT4577_37089C.1
atggcggccgacagcccgccctccggcggcggaatcgatgacgtcttccccgcgtggaggaggcggggcaaccaaggccaagcaggaggccgcgcctcatcggctgtcgagcgagtcgacgtccctagcgccccaacggggggcgcgtcgggcgtcaacctcgcgtttgagacgaaggcgagcgccgtctccccgcgacacgccaaacccgagcaagtggacgacgctagcgcgcttgcgaaaagcttgcaggacgtcgccctcgtacctgaggcgacggtgcagtcagtcctcgacgtgacttcatcgccgcttgacgaccaaaaggtaccgaccgattcccatcctacgtcatttggactcagcctcaacccgcctagcgaccttgctttggcgggcgctctcgtagaggcgagttcaaaccctttggggtttcgcatgcggtcgccttgggaccggttgacggacgtctcgaccttcgggccctctgggtccgaggaagacgacgatcccaacatctgttgggatttctctggatttggcaaccccagtgccatgcgggacttcatgaccgcatgcgactactgcctctccgactgttccgacggtagccgcagcctcgacgacgaggactgcggcccaagccgcgaatgtttccacgtcgagctagggggtccctccgaaggcaatcatttcggcatgccggaggacggcgatctccctaggccggtgcctcgcgctgacatcccgcgggagctagctgtggtcctcgttccggcggggggttacgacccacagctcgagcaagtccgcggggcgcaggccaggctcgacgagggagcaggagcgcttgagccgatccgccaggacgtcgggcaggtatgggcgggccaacccccggccggagagatacgtcacctgccccagggtctccagcaccgcgtcgccgatgacatcagggtcaggccaccacccgcatccagtggggtcggtgtaaggaaaatggaccccgggccatttggctaa

SEQ ID NO: 115797 - DNA, 728 bp, Zea mays
  Clone ID: MRT4577_3708C.1
tttttttttttttttttacataagcgaattatttcctttgatatagtttacaagtttgggtattacagtctggttcagtcgctctttttgttcgccggattgggggtgataagatgatgacatttgtaactaaacttcggcaagacgaaacagttccttccaaagcgaactggggaatattctgtcccaatcagaaacaattgaggaaggcatcccatggagacgatacacatgcagcaagaataacttggcaatgctggtagcagtgaacggatggggaagaggaatgaagtgaccatactttgtgaaaaaatcaataacaaccaagatgccttgtatgaagaagaggtcggcaagccttccacaaagtccaccgaaataatctgccaagctgatgagggcattggtaacggctgtagcagacctggtaaacgggttctgtccggtttagcttgctggcataccagacatgtttgcacaaattgcttcaccgcaacacacatgtcggtccaagcaaacagcttcttcatcctcatatatgttaccgggaatctagaatggccacctaatgcactggcgtaacaagctgatagcagttttctgttgtagtggcacattatggaaaatccaaactttggacttgtagcgcagtaatccctccaccaatgcgaaagtgggcaccaatgtgggatcaacagccaattgagctcgtaggtttgttgcatggg

SEQ ID NO: 115798 - DNA, 154 bp, Zea mays
  unsure (1)..(154): unsure at all n locations
  Clone ID: MRT4577_37090C.1
canagctacctatcattcatgcgccatgacgaggaccacgatcaacatcacgctgggctcantcgcggggcacgaccacatgtgggcgctgcaccgcggagccagctgcgataatgcagctcgacatccgcatcttgagaagcttgttcgccag

SEQ ID NO: 115799 - DNA, 2850 bp, Zea mays
  Clone ID: MRT4577_37091C.1
atgggcagtctccagcaacctctccaacccgagacggtgctccgtttcgggagtcttgagttcatgtccctcgacgacagctacgacatgatgctccttccaccgccgcgcgacaacggcaatggcggccgacagcccgcccgccgacggcggaatcgacgacgtcttccccgcgtggcggaagaacaatcttcgagctcgtcccgccttcttccccgtcggcggaggggaaggcagggcaaccaaggccaagcaggaggcagcgcctcatcggcagtcgagcgagtcgacaacgtcggcaccccaacgaggggtgcaccgggtatcgacttcgcgcctgagacgaagacgagcgccgtctccccgcgacacgccaatcccgagcgagcggacgacgccagcgcgctcgcggagggcttgctggacgtcaccctcgtacctgagacgacggtgcagtcagtccccgacgtgacttcgtcgccgctcgtcgaccaagaggtaccgaccgattcccatcctacgtcatttggattcagcctcaacccgcctagcgacctcgctttggcggacgctctcgtagaggcgagtccaaactctctggggtttcgcatgcggtcgccttgggaccggttgacggacgtctcgacctacgggccctctgggtccgaggaagacgacgaccccaacatctgttgggatttctctggacttggcaaccccagcgccatgcgggacttcatgaccgcatgtgactactgcctctccgactgttccgacggtagccgcagcctcgacgacgaggactgcggcccaagccgcgaatgtttccacgtcgatctagggggtccctccgaaggcaatcatctcggcatgccggaggacggtgatctccctaggccggtgcctcgcgctgacatcccacgggagctagctgtggtccccgttcaggcggggggccatgacccacagctcgagcaaatccgcggggcgcaggccaggttcgacgagggagcaggagcgcttgagtcggtccaccgggacgtcgggcaggcatgggcgggccaacccctggccggagaaatacgtcacctgctccagggcttccagcactgcatcgccgatgacaccaggaacctggctgcagcagcgatgctcctccgcgcgatgccggagccatccaccaccgagggtcggcgaatccagggggagctcaagaatctcctggaaggcgccgtggtccgacgggccgagagctctgcctcccgaaggcagggatacccctcggaacctcacgccgcgacttcccgattcatgcgggaagcctcggtctacaccgggcgcacgcgcaacaccgcgcctgcggccccgggccgcctcggcaacgagcaccattatcgcgaccgtcgggcccacctcgacgagagggtgcgccgaggctaccaccccaggcgtgggggacgctataacagcggggaggatcggagtccctcgcccgagccacccggtccgcaggccttcagccgggccatccgacgggcaccgttcccgacccggttccgacccccgactactatcacaaagtactcgggggagacgagaccgaaactgtggctcgcggactaccgtctggcctgccaactgggtggaacggacgacgacaacctcatcatccgcaacctccccctattcctctccgacaccgctcgcgcctgctgccggcagcagccgggagagtctctccgggactacatccggcgattttcgaagcagcgcaccgagctgcccaacatcaccgactcggatgtcatcggcgcgttccttgccggcaccacttgccacgacctggacaagcagccccagggccgcccatcggaagatgctcccgaggcgtctactcagcgcggcgccaagaagaaaggcaagaagaagtcgcaagcgaaacgcgacgccgccgacgcggaccttgtcgccgccgccgagtacaagaaccctcggaagcccaccggaggtgccaacctctttgacaagatgctcaaggagccgtgcccctatcatcaggggcccgtcaagcacacccttgaggagtgcgtcatgcttcggcgccacttccatagggccgggccacccgcggagggtggcagggcccgcgacgacgacaagaaggaagatcaccaagcaggagagtttcccgaggtccgcgactgcttcatgatctacggtgggcaagcggcgaatgcctcagctcggcaccgcaaacaagagcgccgggaggctcaccaaggtccttatggatggggcagcagcctcaacatcatctacgccgagacccttgggctcctgcgcgtcgatctgtcctccgtccgagcaggcgctgcgcccttccacgggatcattcccgggaagcgcgtccagcccctcggacgactcaaccttcccgtctgcttcggaacgccctccaacttccgaagggagactctgacgttcgaggtggtcgggtttcgagggacctaccacgcggtactgggaaggccatgctacgcgaagttcatggccgtccccaactacacctacctgaagctcaagatgccgggccccaacggggtcatcaccgtcggccccacgtacaaacacgcgttcgaatgcgacgtggagtgcgtggagtacgccgaggccctcgccgagtccgaggccctcatcaccgacttggaaaacctctctaaggaggtgccggacgtgaaacgtcatcccggcaacttcgagccagtggagacggttaagaccgtccccctcgaccccagtggcgacgcctccaagcaggtccggatcggctccgggctcgaccccaaatag

SEQ ID NO: 115800 - DNA, 3093 bp, Zea mays
  Clone ID: MRT4577_37092C.1
atgggcagtctccagcaacctctccggcccgggacggtgctccgtttcgggagtcttgagttcatgtccttcgacggcagctacgacatgatactccttccaccgccgcgcgacaacgacaatggcggccgacaacccgcccgccgtcggcgaaatcgacgacatcttccccgcatggtgggagaacaacattcgagctcgccccgtcctctcccccgccaacggaggaggacgcggggcaaccaaggccaagcgggaggccgcgcttcatcggctgtcgagcgaatcgacgtccccagcgccccaacggagggcacaccgggcgtcgacctcgcgttcgagacgaaggcgagcgccgtccccccgcgacacgccaatcctgagcaagtggacgacgccagcgcactcgcggagagcttgcaggacgtcgcccacgtacctgagacgacggtgcaaccagtccccgacgtgactatgtcgctcctcgtcgaccaaaaggtaccgactaattcccatcttacatcatttcgactcggccacaacccgcctagcgaccttgctttggcgggcgctctcgttgaggcgagtgcaaccccactggggtttcgtatacggtcgccttgggaccggttgacggacgtcttgacctacgggccctctgggtccgaggaagacgacgatcccagcatctgttgggatttctccggatttggcaacgtcagtgccatgcgggactttatgaccgcatgtgactactgcctctccgactgttccgacggtagccgcagccttgacgacgaggactgcggcccaagccgcgaatgtttccacgtcgagctaggggatccctccgaaggcaaccatctcggcatgccggaggacggtgatcttcctaggccggtgcctcgcgccgacatcccgcgggagctagctgtggtccccgttccggcggggggtcacgacccacagctcgagcaagtccgcggggcgcaggccaggctcgacgagggagcaggagcgcttgagccgatccgtcgggacgtcgggcgggtatgggcgggccaacccccggccggagaaatgcgtcacctgccccaagatttccagcaccgcgtcgccaacaacgtcagggtcaggccgctgcccgcatccagcggggtcggtcagaacctggcagccgcagcgatgctcctccgcgcgatgccggagccatcaaccaccgagggtcggcgaatccagggagagctcaagaatctcctgaaaggcgctgcggcccgacgggccgagagctctgcctcccgaaggcaggggtacccctcggaacctcatgccgcgacttcccgattcatgcgggaagcctcggtctacaccgggcgcacgcgcaacaccgcgcctgcggccccgggccacctcggcaacgagcaccatcgtcgcgaccgtcgggcccacctcgacgaaaggtactcgggggaaacgagaccggaactgtggctcgcggactaccgcctggcctgccaactgggtggaacgaacgacgacaacctcatcatccgtaacctccccctgttcctctccgacaccgctcgcgcctggttggagcacctgcctccggggcagatctccaactgggatgacttggtccaagccttcgccggcaatttccagggcacgtacgtgcgccccgggaattcctgggacctccggagctgccggcaacagctgggagagtcactccgggactacatccgacgattctcgaagcagcgcaccgagctgcccaacatcaccgactcggatgtcatcggcgcgttccttgccggcaccacctgccgtgacctggtgagtaagttgggtcgcaagacccccaccagggcgagcgagctgatggacatcgccaccaagttcgcctctggccaggaggcggtcgaggctatcttccgaaaggacaagcagccccagggccgcccatcggaagaggctcccgaggcatctactcagcgcggcgccaagaagaaaggcaagaagaagtcgcaatcgaaacgcgacgccgccgacgcggaccttgtcgccgccgccgagtacaagaaccctcggaagccccccggaggtgctaacctcttcgacaagatgctcaaggagccgtgcccctatcatcaggggcccgtcaagcacgccctcaaggagtgcgtcatgcttcggcgccacttccacagggccgggccacccgcagagggtggcagggcccacgacgacgacaaaaaggaagatcaccaagcaggagagtaccccgaggtccgcgactgcttcatgatctacggtgggcatgtggcgaatgcctcggctcggcatcgcaagcaagagcgccgggaggtctgctcggtgaaggtggcggcgccagtctacctagactggtccgacaagcccatcaccttcgaccaagctgaccaccccgaccacgtgccgagcccggggaaatacccgctcgtcgtcgaccccatcgtcggcgacgtcaggctcaccaaggtcctgatggacgggggcagctgcctcaacatcatctacgccgagaccctcaggctcctgcgcgtcgatttgtcctccgtccgagcaggcgctgcgcccttccacgggatcatccctgggaagcgcgtccagcccctcggacgactcgaccttcccgtctgcttcggaacgccctccaacttccgaagggagaccttgacgttcgaggtggtcgggttccgaggaacctaccacgcggtactgggaaggccatgctacgcgaagttcatggccgtccccaactacacctacctgaagctcaagatgccgggccccaatggggtcatcaccgtcggccccacgtacaaacacgcgttcgaatgcgacgtggagtgcgtggagtacgccgaggccctcgccgagtccgaggccctcatcgccgacctggagaacctctccaaagaggtgccagacgtgaagcgtcatgccggcaacttcgagccagcggagacggttaaggccgtccccctcgaccccagtggcgacacctccaagcagatccggatcggttccgggctcgaccccaaatag

SEQ ID NO: 115801 - DNA, 2613 bp, Zea mays
  Clone ID: MRT4577_37093C.1
atggtcagtctccagcaacctctccggcccgggacggtgctccgtttcgggagtcttgagttcatgtccttcgacggcagctacgacatgatactccttccaccgccgcgcgacaacgacaatggcggccgacaacccgcccgccggcggcggaatcgacgacatcttacccgcgtggtggaagaacaacattcgagctcgccccgtcctctcccccaccaacggaggaggaggcggggcaaccaaggccaagcgggaggccgcgcttcgtcggctgtcgagcgaatcgacgtccccagcgccccaacggggggcgcgtcgggcgtcgacctcgcgtttgagacgaaggcgagcgccgtccccccgcgacacaccaatcccgagcaagtggacgacgccagcgcgctcgcggagggcttgcaggacgtcgccctcgtacataagacgacggtgcaatcagtccccgatgtgactatatcgctcctcgtcgaccaaaaggtactgactgattcccatcctacgtcatttcgactcggcctcaacccgcctagcgacctcgctttggcgggcgctcttgttgaggcgagtgcaacccctctggggtttcatatgcggtcgccttgggaccgattgacggacgtctcgacctacgggccctctagccgcagccttgatgacgaggactgcggcccaagccgcgaatgtttccatgtcgagctaggggatccctccgagggcaaccatctcggcatgccggaggacggtgatctccctaggccggtgcctcgcgctgacatcccgcgggagctagctgtggtccccgttccggcggggggtcacgacccacagctcgagcaagtccgcggggcgcaggccaggctcgacgagggagcaggagcgcttgagtcgatccgccggggcgtcgggcaggtatgggcgggccaacccccggccggagaaatacgtcacctgccccagggtttccagcaccgcgtcgccaacaacgtcagggtcaggccgccacccgcatccagcggggtcggtcagaacctggcagccgcagcgatgctcctccgcgcgatgccggagctatcaaccaccgagggtcgacgaatccagggagagctcaagaatctcctggaaggcgctgtggcccgacgggccgagagctctgcctcccgaaggcagggatacccctcggaacctcatgccgcgacttcccgattcatgcgggaagcctcggtctacaccgggcgcacgcgcaacaccgcgcctgcggcctcgggccacctcggcaacgagcaccatcgtcgcgaccgtcgggcccaccccgacgaaagggtgcgccgaggctaccaccccaggcgtgggggacgctacgacagcggggaggatcggagtccctcgcccgaaccacccggtccgcaggccttcagtcgggccatccgacgggcgccgttcccgacccggttccgacccccgactactatcacaaagtactcgggggaaacgagaccggaactgtggctcgcagactaccgcctggcctgccaactaggtggaacggacgacgacaacctcatcatccgcaacctccccctgttcctctccgacactgctcgcgcctggttggagcacctgcctccggggcagatctccaactgggatgatttggtccaagccttcgccggcaatttccagggcatgtaccgcaccgagctgcccaacatcaccgactcggatgtcatcggcgcgttccttgccggcaccacctgccgtgacctggtgagtaagttgggtcgcaagacccccaccagggcgagcgagctgatggacatcgccaccaagttcgcctctggccaggaggcggtcgaggctatcttccgaaaggacaagcagccccagggccgcccatcggaagaggctcccaaggcgtctactccgcgcgacgccaagaagaaaggcaagaagaagtcgcaagcgaaacgcgacgccgccgacgcggaccttgtcgctgccgccgagtacaagaaccctcgaaagccccccggaggtgctaacctcttcgacaagatgctcaaggagccgtgcccctatcatcaggggcccgtcaagcacaccctcgaggagtgcgtcatgcttcggcaccacttccacagggccgggccacccgcagagggtggcagggcccgcgacgacgacaaaaaggaaaatcaccaagcaggagagttccccgaggtccgcgactgcttcatggtctacggtgggcatgcggcgaatgcctcggctcggcatcgcaagcaagagcgccgggaggtctgctcggtgaaggtggcggcgccagtctacctagactggtccgacaagcccatcaccttcgaccaagctgaccaccccgaccacgcgccgagcccggggaaatacccgctcgtcgtcgaccccatcgtcggcgacgtcaggctcaccaaggtcctgatggacgggggcagctgcctcaacatcatctacgccgagaccctcaggctactgcgcgtcgatctgtcctccgtccgagcaggcgctgcgcccttccacgggattattcctgggaagcgcgtccagcccctcggatga

SEQ ID NO: 115802 - DNA, 2700 bp, Zea mays
  Clone ID: MRT4577_37094C.1
atggcggccgacagcccacccgccggcggaggaatcgacgacgtcttccccgcgtggtggaagaacaaccttcgagctcatcccgccctcttccccgccgacggaggggaaggcggggcaaccaaggccaagcaggaggcagcgcctcgtcggctgtcgagcaagtcgatagcgccagcaccccaacggcgggcgcaccggtcagtccctgacatgactttatcgccgctcatcgaccaagaggtaccgaccgatccccatcccacgtcatttggattcagcctcaacccgcctagcgacttcgctttggcgggcgctctcgtagaggcaagtccaaaccctctggggtttcgtatgcggtcaccttgggaccggctgacggacgtctcgacctacgggccctctgggtccgaggaagacgacgagcccagcatctgttgggatttctctggacttggcaaccccagtgccatgcgggacttcatgaccgcatgcgactactgcctttccgactgttctgacggtagccgtagcctcggcgacaaggactgcggcccaagccgcgaatgtttccacgtcgatctagggggtccctccgaaggcaaccatctcggcatgccggaggatggtgatctccctaggccggtgcctcgcgttgacatcccacgggagctagctgtggtccccgttcaggcgggggaccatgacccacagctcgagcaaatccgcggggtgcaggccaggctcgacgagggagcaggagcgcttgagccgatccgccgggacgtcgggcaggcatgggcgggccaacccccggccggagaaatacgtcatctaccccagggcttccagcaccgcatcgccgacgacgtcagggtcaggccaccacccgcatctagtggggtcggccggaacctggctacagcagcgatgcttctccgcgcgatgccggagccatcaaccaccgagggcggcgaatccagggggagctcaagaatctcctggaaggcgccgcggtccgacgggccgagagctctgcctcccgaaggcaggggccttcagccgggccatacgacgggcgccgttcctgacccggttccgacccccgactactatcacaaagtactcgggggggagatgagaccggaactgtggctcacggactaccgtctggcctgccaactgggtggaacggacgacgacaacctcatcatccgcaacctccccctgttcctctctgacaccgctcgcgcctggttggagcacctgcctccggggcagatctccaactgggacgacctagtccaagctttcgccggcaatttccagggcacttacgtgcgccccgggaattcctgggacctccgaagctgccggcagcagccgggagagtctctccgggactacatccggcgattctcgaagcagcgcaccgagctgcccaacatcaccgactcggatgtcatcggcgcgttcctcgccggcaccacctgccgcaacctggtgagcaagctgggtcgcaagacccccaccagggcgagcgagctgatggacatcgccaccaagttcgcctccggccaggaggcggtcgaggctatcttccgaaaggacaagcagccccagggccgcccatcggaagatgctcccgaggcgtcaactcagcgcggcgtcaagaagaagggcaagaagaagtcgcaagcgaaacgcgacgccgccgatgcggaccttgtcgccgtcgccgagtacaagaaccctcggaaaccccccggaggtgccaacctcttcgacaagatgctcaaagagccatgcccctatcaccaggggcccgtcaagcacacccttgaggaggccccgcgacgacataagaaggaagatcaccaagcaggagagttccccgaggtccgcgactgtttcatgatctacggtgggcaagcggcgaatgcctcggctcggcaccgcaagcaagagcgccgggaggtctgcacggtgaaggtggcgacgccagtctacctagactggtccgacaagcccatcaccttcaaccgagccgaccaccccgaccatgtgtcgagcccggggaaatacccgctcgtcgtcgaccccatcatcggcgacgtcaggctcaccaaggtcctcatggacggaggcagcagcctcaacatcatctacgccgagaccctcgggctcctgcgtgtcgatctgtcctccgtccgagcaggcgctgcgcccttccatgggatcattcccgggaagcgcgtccagcccctcggacaactcgaccttcccgtctgcttcggaacaccctccaacttccgaagggagaccctgacgttcgaggtggtcaggttccgaggaacctaccacgcggtactgggaagaccatgctacgcgaagttcatgtccgtccccaactacacctacctgaaggtcaagatgccggtacccaacggggtcatcgccgtcggccccacgtacaaacacgcgttcgaatgcgacgtggagtgcgtggaatacgccgaggccctcgccgagtccgaagccctcatcgccgacctggagagcctctcgaaggaggtgccagacgtgaagcgtcatgccggcaactttgagccagcggagacggttaagtccgtccccctcgaccccagcgacgacgcctccaagcagatccggatcggctccgggctcgatcccaaatag

SEQ ID NO: 115803 - DNA, 214 bp, Zea mays
  Clone ID: MRT4577_37095C.1
ggggacaaaaaaaagtaattttggggctggcctgccaaaaaattttgaaacaggcccccatgggcagagagattttttggggggggggctgatgaggggtccaacccaaacagtttttgatgcagtcgggaagttccattttagtaacaaacaacctggtcccgaaaggttaaaatgaaagagaagcttccaaaatcctcctaggggggcgggg

SEQ ID NO: 115804 - DNA, 3081 bp, Zea mays
  Clone ID: MRT4577_37096C.1
atgggcagtctccagcaacctttccagcccgggacggtgctccgtttcgggagtcttgagttcatgtccctcgacggcagctacgacatgatactccttcccctgccgtgcgacagcgacaatggcggccgacagcccgcccgccggcggcggaatcgacgacgtcttccccgcgtggtggaagaacaacattcgagctcaccccgccctctcccccgccgacggaggaggcggcggggcaaccaaggccaagcaggaggcggcacctcgtcggctgtcgagcgagtcgacggcgccggcgccccaactgggggcacgtcgggcatcgacctcgcgtttgagacgaagacgagcgccgtctccccgcaacatgccaattccaagcaaacggacgacgccagcacgctcgcgaaaggcttgctaggcgtcaccctcatacctgagacgacggtgcagtcagtccctgacgtgacttcgtcaccgcccgtcgaccaagaggtacccaccgattcccatctcacgccctttggattcagcctcgacccgccaagcgacttcgctttggcggacgccctcgtagaggcgagtccaaaccctctggggtttcgtatgcggtcaccctgggaccggctgatggacgtctcgacctacgggccctcagggtccgaggaagatgacgtgtccgacttctgttgggatttctccggacttgataaccccagtgccatgcgggacttcatgaccgcatgcgactactacctttacgactgttccgacggtagccgcagcctcgacgacgaggactgcggcccaagtcgtgaatgtttccacgtcgatctagggggtccctccgaaggcaaccatcttggtatgccggagaacggtgatctccctaggcctgtgcctcgcgttgacatcctacgggagctagctgtggtccccgttcaggcggggggtcatgacccacagctcgagcaaatccgcggggtgcaggccaggctcgacgagggagcaggaacacttgagccgatccgccgggacatcgggcaggaatgggcgggccaacctccggccggagaagtgcgccatctaccccagggtatccagcaccgcatcaccgacgatgtcagggtgaggccgccacccgcttccagtggagtcggccagaacctggctgcagcggcaatgcttctccgcgctatgccggagccatcaaccaccgaggggcggcgaatccagggagagctcaagaatctcctggagggcgccgcggaagcctcggtccacaccgggcgcacgcgcgacacagcgcctgcggccccgggtcgcctcggcaacgagcaccatcaccgcaaccgtcgggcccacctcgacgaaagggtgcgccgaggctaccaccccaggcgtgggggacactacgacagcggggaggatcggagtccctcgcccgaaccacccggtccgcaggctttcagccgcgccatacgacgggcgccgttcccgacccagttccgaaccccgactactatcacaaagtactcgggggagacgagaccggaactgtggctcgcagactaccggctggcctgccaactgggtggaacagacgatgacaacctcatcatccgcaacctccccctgttcctctccgacgccgctcgcgcctggttggagcacctgcctccggggcagatctccaactgggacgacctggtccaagccttcgctggcaatttccagggcacgtatcaacgcaccgagctgcccaacatcaccgattcagatgtcatcggcgcgttcctcgccggcaccacctgctgtgacctggtcagcaagctgggtcgaaagacccccactagggcgagcgagctgatggacatcgccaccaagttcgcctttggccaggaggcggttgaggctatcttccggaaggacaagaagccccagggccgcccaccggaagatgcccccgaggcgtcaactcagcgcggtgccaagaagaaaggcaagaagaagtcgcaagcgaaacacgatgtcgccgacgcggaccttgtcgccgccgccgagcacaagaaccctcagaaaccccccggaggtgccatcctcttcgacaagatgctcaaggagtcgtgcccctatcatcaggggcccgtcaagcacacccttgaggagtgcgctatgcttcggcgccacttccacagggccgggccacccgcggagggtggcagggctcgcgacgatgacaagaaggaagatcaccaggcaggagagttccccgaggtccgtgactgcttcatgatctacggtgggcaagcggcgaacgcctcggctcggcaccgcaagcaagagcgttgggaggtctgtttggtaaaggtggcgacaccagtttacctagactggtccgacaagcccatcaccttcgaccaagccgaccaccccgaccgcgtgccgagcccggggaaatacccgctcgttgtcgaccccatcatcggcgacgtcaggctcaccaaggtcctcatggacggaggcagcagcctcaacatcatctatgccgagaccgtcgggctcctgcgtgttgatctgtcctcgatccgggcaggcgctgcgcctttccacgggatcatccccgggaagcgcgtccagcccctcggacaactcgaccttcccgtctgcttcggaacaccctccaacttccgaagggagaccctcacattcgaggtggtcgagttccgaggaacctaccacgcagtattggggaggccatgctacgcgaagttcatgaccgtccccaactacacctacctcaagctcaagatgtcgggccccaacggggtcatcaccgtcagccccacgtaccgacacgcgttcgaatgcgacgtcgagtgcgtggagtacgccgaggccctcaccgagtacgaggccctcatcgccgacctggagagcctctctaaggaggtgccagacgtgaagcgccacgccggcaacttcgagccagcggagacggttaagtatgtccccctcgaccccagcagcgacgcttccaagcagatccggatcggctccgagctcgatcccaaatag

SEQ ID NO: 115805 - DNA, 5637 bp, Zea mays
  Clone ID: MRT4577_37097C.1
atgggcagtctccagcaacctctccggcccgggacggtgctccgtttcgggagtcttgagttcatgtccttcgacggcagctacgacatgatactccttccaccgccgcgcgacaacgacaatggcggccgacatcccgcccgccggcggcggaaccgacgacatcttccccacgcggtggaagaacaacattcgagctcgccccgtcctctcccccgccaacggaggaggaagcggggcaaccaaggccaagcgggaggccgcgcttcgtcggctgtcgagcgaatcaacatccccagcgccccgacggaaggcacgccgggcgtcgacctcgcgttcgagacggaggcgagcgccgtccccccgcgacacgctgatcccgagcaagaggacgacgccagcgcgctcgcggaaagcctgcaggacgtcgccctcgtacctgagacgacggtgcaaccagtccccgatgtgactacgtcgctcctcgtcgaccaaaaggtactgactaactcccatcttacgtcatttcgactcggcctcaacccgcctagcaaccttgctttggcgggcgctctcattgaggcgagtgcaaccccactggggtttcgtatgcggtcgccttgggaccgattggcggacgtctcgacctacgggccctctgggtccgaggaagatgacgattccggcatctgttgggatttctccggatttggcaaccccagtgccatgcgggacttcatgaccgcatgtgactactgcctctccgactgttccgacggaagccgcagccttgacaacgaggactgcggcccaagctgcgaatgtttccacgtcgagctaggggatccctccgaaggcaaccatcttggcatgccggaggacggtgatcttcctaggccggtgcctcgcgctgacatcccgcgggagctagctgtggtccccgttccggcggggggtcacgacccacagctcgagcaagtccgcggggcgcaggccaggctcgacgagggagcaggagtgcttgagccgatccgtcgggacgtcgggcaggtatgggcgggccaacccccggccggagaaatacaacacctgccccaaggtctccagcaccgcgtcgccaacgatgtcagggtcaggccgccgcccgcatccagcggggttgcctcggtctacaccgggcgcacgcgcaacaccgcgcctgcggccccgggccacctcggcaacgagcaccatcgtcgcgaccgtcgggcccacctcgacgatagggtgcgccgaggctaccaccccaggcgtgggggacgctatgacagcggggaggatcggagtccctcgcccgaaccacccggtccgcaggccttcagtcgggccatccgacgggcgccattcccgacctggttccgacccccgactactatcacgaagtactcgggggaaacgagaccggaactgtggctcgcggactaccgcctggcctgccaactgggtggaacggacgacgacaacctcatcatccgtaaccttcccctgttcctctccgacaccgctcgcgcctggttggagcacctgcctccggggcagatctccaactgggacgacttggtccaagccttcgccggcaatttccagggcacgtacgtgcgccccggaaattcctgggaccttcggagctgccggcaactgccgggagagtcgctccgggactacatccggcgattctcgaagcagcgcaccgagctgcccaacatcaccgactcggatgtcatcggcgcgttccttgctggcaccacctgccgcgacctggtgagtaagttgggtcgcaagacccccaccagggcgagcgagctgatggacatcgccaccaagttcgcctctggccaggaggcggttgaggctatcttccgaaaggacaagcagccccacggccgcccatcggaagaggctcccgaggcgtctactccgcgcggcgccaagaagaagggcaagaagaagtcgcaatcaaaacgtgacgccgctgacgcggaccttgtcgccaccgccgagtacaagaaccctcggaagccccccggaggtgctaacctcttcgacaagatgctcaaggagccgtgcccctatcatcaggggcccgttaaacacaccctcgaggagtgcgtcatgcttcggcgccacttccacagggccgggccacccgcagagggtggcagggcccacgacgacgacaagaaggaagatcaccgagcaggagagtacctcgaggtccgcgactgcttcatgatctacggtgggcatgcggcgaatgcctcggctcggcatagcaagcaagagcgccgggaggtctgctcggtgaaggtggcggcgccagtctacctagactggaccgacaagcccatcaccttcgaccaggccgaccaccccgaccacgtgccgagcccggggaaatacccgctcgtcgtcgaccccatcatcggcgacgtcaggctcaccaaggtcctgatggatgggggcagctgcctcaacatcatctacgccgagaccctcaggctcctgcgcgtcgatctgtccttcgtccgggcaggcgctgcgcccttccacgggatcatccctgggaagcgtgtccagcccctcggacgactcgacctccctgtctgcttcggaacgccctccaacttccgaagggagaccttgacgttcgaggtggtcgggttccgaggaacctaccacgcggtactggggaggccatgctacgcgaagttcatggccgtccccaactacacctacctgaagctcaagatgtcgggccccaatggggtcatcaccgtcggccccacgtacaaacacgcgttcgaatgcgacgtggagtgcgtggagtacgccgaggccctcgccgagtccgaggccctcatcgccgacctggagagcctctctaaggaggtgccagacataaagtgtcatgccggcaacttcgagcccacggagacggttaagtccgtccccctcgaccccagcggcgacgcctccaagcagatccggatcggctctgagctcgggtatcaccaaatcaggatgaaggagtccgaccagctcgcgacttctttcatcacgccctttggcatgtactgctatgtcaccatgtcgttcggcttgaggaatgcgggtgcgacgtaccagcggtgcatgaaccatgtgttcgaccaacacattggccggacgatcgaggcctacgtcgatgacatcgtagtcaagacgaggaaagcctccgacctcctttccgaccttgaagtgacattccgatgtctcaaggcgaaaggcgtcaagctgaatcccgaaaagtgtgtcttcggggtgccccgagacatgctcttggggtttatcgtctccgagcgaggcatcgaagccaacccggagaagatcgcagccatcaccagcatggggcccatcaaggacttgaaaggcgtacagagggtcatgggatgtcttgcggctctgagccgcttcatctcacgcctcggtgaaagaggcctgcctctgtaccgcctcttaaggaaagccgagtgcttcacttggacccctgaggccgaggaagccctcgagaacctgaaggcgctcctcacgaaggcgcctatcttgaggccagtctacttcgtcagcgaggtactgtctgaaaccaagatccgctacccacatgttcagaagctcatgtatgcggtgatcctgacacggcggaagttgcgacactacttcgagtctcatccgctcccaacagctccgatccagccggagctctggaccatgttcttcgatgggtcgctgatgaagacaggagccggcgcaggcctactctccatctcgcccctcgggaagcacctacgctatgtgctacgcctccatttcccggcgtccaacaatgtggccgagtatgaggctctggtcaacgggttgcggatcgccatcgagctaggggtccgacgcctcgacgctcgcggtgactcgcagctcgtcatcgaccaagtcatgaagaactcccactgtcgcgacccgaagatggaggcctattgtgatgaggttcgacgcctggaagacaagttctacgggctcgagctcaaccacatcgcccggcgctacaacgagactgaggatgagctgactaaaatagcctcggggcggacaacagttcccccggacgtcttctcccgagacctgcatcaaccctccgtcaagatcgacgacacgcccgagcctgaggcaccctcggtccagcccgaggtaccctcggctcagtccgaggcaccctcggctcggcccgaggcgccctcggttcagcccgaggtaccctcggcccccgagggcgagacgctgcacgtcgaggggaagcaaagcggggtcgcgcctgatcaaaactggcaggccccgtacctgcaatatctccaccaaggagaactacccgtcgaccgagccgaagcccggtggttggcgcggcgcgccaagtcgttcgtcttgctgagagatgggaaggagctctaccaccgcagcccctcaggcatcctccagcgatgcatctccatcaccgaagttcaggaactcctccgagagatacactcgggggcttgcggccatcacgcagcacctcgagcccttgtcggaaatgctttccgacaaggtttctactggccgacggcggtggccgacgccactagaattgtccgcacctgcgaagggtgtcagttctacgcaaggcagacccacctgcccgctcaggctctgcagacgatacccatcacctggccttttgctgtgtggggtctggacctcgtcggccccttgcagaaggcacccaggggctacacgcacctgttggtcgccatcgacaaattctccaagtggatcgaggtccgacccctaaacagcatcaggtccgagcaggcggtggcgttcttcaccaacatcatccatcgtttcggggtcccgaactccatcatcaccgacaacgacacccagttcaccggcagaaagttcctggacttctgcgaggatcaccacatccgggtggactgggccgccgtggctcatcccatgacgaatgggcaagtagagcgtgccaacggcatgattctacaaggactcaagcctcggatctacgacgacctcaacaagttcggcaagcgatggatgaaggaagtctcctcggtggtctggagcctgaggacaacaccgagccgagccacgggcttcacgccgttctttctagtctatggggccgaggccatcatgcccacagacctggaatacggttccctgaggacaagggcctatgccgaccaaagcaaccaagctagtcgagaagactcgctggcccagctggaagaggctcgggacagggccttactacactcggcgcggtaccagcagtccatgcgatgctaccacgcccgaggggtccggtcccgagacctccaggtgggcgaactggtgcttcggctgcgacaagacgcccgagggcagcacaagctcacgcccccctgggaggggccgttcgtcatagccaaagttctgaagcccggaacgtacaagctggccaacagtcaaggcgaggtctacaacaacgcttggaacatccaacagctacgtcgcttctacccttaa

SEQ ID NO: 115806 - DNA, 140 bp, Zea mays
  Clone ID: MRT4577_37098C.1
caatggaaaggtcgctgatgagtggacatgcagagtgacgccctacgtcatgctgacgatcaccatccctgggatcagaaaccattcatggtattccttctccataataacctcatgagcaatgtattccagaattccca

SEQ ID NO: 115807 - DNA, 489 bp, Zea mays
  Clone ID: MRT4577_37099C.1
catagaaatgtattttttatcttgttattggtcttttaggttatttgttaactgctgtatcccacaagtttttcactgttacactggcttaacgtgatgataggataaacatggaattaaatttgctaagaggtttcaagggcttcaacatgtccgtaggagttattctatgtaaagatgcatagcagcattgttcctacattaagggactgtttgaatgagctagggctagttacttgttgagctaaaagtttagctcaaaatagccaaaattggctagctagttggctaacagctagttgaagcacttcatgtttggatgcactagagctaatttttagctagccagttgagctttttgagattggggagaaaaccttaacctgttgagcttttgagaagaggctttcaaacatccgttggtagatctctagttcctctggcatcattctcttcaaaagaaaagcagcagaatagtatatgctaccc

SEQ ID NO: 115808 - DNA, 225 bp, Zea mays
  Clone ID: MRT4577_3709C.1
ggcaccggcccggaacccccggggcgacccacgcgcccgctcgcagcgcagcgaacagaaaaagaaccagggagaaacttgaaaggaaagcggggcaaaacccccacagaggagaaaggaaccgcgcagaagaccggggaacaggaaggacagacccagccgcggagaaccaaggggccacaggcacgcccgaaggccgaggccggcaggacacaccaagcacag

SEQ ID NO: 115809 - DNA, 365 bp, Zea mays
  Clone ID: MRT4577_370C.1
gccgaagcgcttcagttcggtgcgcaggaacgcgtcgtccgacagctggccgtcggtgtactgcggcgcgtacttctggatcgcctgcgtgatcgtcaggcgatggaacggcttcgcgaggtcgagttcacggccttgatattgaatcgtcgcggtgccgagcgcgtcgatcgccgcctggcggatcagctgctcggtgaagtccatcagccagcggtagtcggtgtacgcggcgtagaactccatcatcgtgaattccgggttgtgacgcggcgacacgccttcgttccggaagttgcggttgatctcgaacacgcgctcgaagccgccgacgatcaggcgcttcaagtacagctccggcgcgg

SEQ ID NO: 115810 - DNA, 473 bp, Zea mays
  unsure (1)..(473): unsure at all n locations
  Clone ID: MRT4577_37100C.1
tanntttgtgttgtacccgaataatgagttgacatgccatcgcgtgtggctcattattaacaataaaacaagtttcctcttattatcttttaaaaaaaaaaaaaaaaaaaaaaaaaaaaaaaaaaaaaaaaaaaaaaaaaaaaaaaaaaaaaaaaataaaaaaaaaaaaaaaaaaaaaaaccaaaaaaaaaaaaaaaaaaaaaaaaaaaaagggtttgcccctggcccgggcggccccttaaaaaggggcaaatttttggaaaatttccatcaaacttgggggcggtctcaagcttccttttaaagggccccaattccccctaaagggggcctattaaaaaaaaatgggccgtggtaaaacaccggggtaacggaaaaaacctgggtttaaccaaattaaattcctttgaaaaaaatccccttttaacaggctgggtaaaaaccaaaaagcccccaaccgaccccctttccaa

SEQ ID NO: 115811 - DNA, 386 bp, Zea mays
  Clone ID: MRT4577_37101C.1
ggggccgcaaagatcttaaatttaattgccgcggtgaatcatttaaattggggggcaacaaacattctgcaagggggccccccccccttggtgaccctcaatttgggggctgcccaaaccaattacagggctcaaaacccaatcctaggtgaaaattacaaaaccggggctatttggcacttgcccccctaccccacgaataatttacatgactattggccactggcgacattcttcactaaaaaaaacaaccccttggcatcattccctgggggagctggtgccacaagccctgccaaaaaccctggggtggtatctaaaggcgattggatttgctctacgggccaataccggacaggtccaacatatatataggcatggggact

SEQ ID NO: 115812 - DNA, 727 bp, Zea mays
  unsure (1)..(727): unsure at all n locations
  Clone ID: MRT4577_37102C.1
ctcgaggcgcgcgggtatgtttgtcacaaatgacattcaaccagcacagtatncattggctcactgcaatgactgctataggtctttcgactgaggttgcttggtggctaccatcattctactcgcatcgcttttgtggaatttgtgatggttagctagcataccttcttcatatttgtgcatttattttgggggaaatactttgcgcaaaaattgcctgcgatgcgcggtttaaatatgtttttagcgttatttgatgggtgaggacacattatattatctccagattctaaattgctaagaatacgaatctatatataaactggattcatatgttacttaataaatatatgattagtttaaaatgaatcatattttagaacagagaaagtatgtattatagacgttaatatctgatgcttatctgccaagtgcatacgtgccctctgctttcggctcatcaagttgctaaataaaaactactcctatactactacaagtattcatgtgtatgagtgaagccacctaaaagtatgcttgagctgtccctgctgattatttggatggatgcatgtctcttttttatttatttagatagagagaaaaaactagagtgattttctctctatgaaactgtatactactactatgcattttgcacatggacaaacgcttgtctagatacatagctaatatacagtagtatctattttgctatagagggact

SEQ ID NO: 115813 - DNA, 217 bp, Zea mays
  Clone ID: MRT4577_37103C.1
ctccaacgccaggcttgatgcgagcgccaacaagggacgaaatgctgattcgtgcgcatatcaactcgtcaactgcatctttacatgtgcgtcgcacattagatcaattcttctatccgaacattgacacggagactcgcgacagtgaccaggttgtttacagatatcagacgcgctggactgaacacaaggccaaagatcccaaaatcttcatggt

SEQ ID NO: 115814 - DNA, 1756 bp, Zea mays
  Clone ID: MRT4577_37104C.1
gccggccgggctgggaaaccctaatccccatcccccagccgacagccgccgagcaaaccggctcctccggtcggtcatccactcatcctcatcccctggcccctgcccatccgatccgatcggtcatcccctacccctacctgatcggatcccctgctcttccgccgagcaccaccaggcagcaggctgcagccgtcgagcaccagcaggagcacggccaggaggacgacgcccgcatcctgcctcttctctgctgctggagcttctgctgccaggagcacggccagaaggacgacgcccctgctgctgccgcggcggaccggcagctccccgctcggcttgtattgggcggctgtcgcgctgcagcagcaggggcatcgtcgcgctcgcaccaaccgaagacggcgtcggcctccacgcggcaccgacgaccgacccacagtcccaagtccaacgaggaggccggagcgctgaacagccgtctacatcctcctcccgaagcgggatttaagtcttgactcatcttggcggcaaaaaactagtaaaacgctcaaaccggcaaaccctaatccccacccgccagccgacagccgccgagcaaaccggctcctccggtcggtcatccactcatcctcatcccctggcccctgcccatccgatccgatcggtcatcccctacccctacctgatcggatcccctgctcttccgccgagcaccaccaggcagcaggctgcagccgtcgagcaccagcaggagcacggccaggaggacgacgcccgcatcctgcctcttctctgctgctggagcttctgctgccaggagcacggccagaaggacgacgcccctgctgctgccggtgggatcccatccttctcctccctctcggcctgtgctcttctatggagacttccaaagaacaggcttccaaggactatgctggtttcgagaagaaagttaagaggacaatatatattgaccacctttctcctcaagtaaaggaatcggccatcaaagctgctcttgcacaatgtgcaaatgttgtccatgtggagttcatcgtcaattacacgatcccatataaagatattgcttctgctgcattggtggaattggatgatgacgtgcaggctaaggctgctgtagaattgatgaatgatttcccgttcataattgggggaatgccaaggcctgtaaaagctatccatgccaaggctgagatgtttcgtgatcgccctccttgccctggccttcgaaaagatttctgctgggtaaaacaaggagataaggactatgaagcgatgcagaaattgaaaaaccttgcaaagaggcaggaatctgagaacatggccctcatacagaaaatcttgaaagatgagaaggaactggcgactcggcagcaggaggtgcttgatggaaactgcaagaagtacgacatgctggaagctctagtgcagaagggagacatcactaaccttgctcaacaatacggagtgaacttgaacgactgatgagtcattcgtgtctttttcccccttccccttggagcgatggcgcaactggtgtgatgatgatggaataggatagcatgccatagttttggtccggtatctggaccctccctctggtgtaaagactatcccaacttaggcttgggcttttcagccttctttggctctccaaaaaaatctaaattagctggctctgagcctctggctttctgatcgaaaaaaaaaaaaaaaaaaaggggcggcccct

SEQ ID NO: 115815 - DNA, 475 bp, Zea mays
  Clone ID: MRT4577_37105C.1
tcgtagcaacaaaagaagcccattattgtacgaacagtggcagaccaaaatattaagacttcttatgcgacctgtaccttatgaaagagctgatacaggcaccatcaagatggggcgtcggagcaacacatggttggcctgctaaaccaggacctctgaccagcagcgattgctgcatgtgaaaaacggagccttcaaccgtaccagagccatcaggcaacggcaactgctgtggtagctttatgaacgttgatgcttcaacaccaattagctgtatgacaacaggtacctgtggcgcatgtatatgacacagaacatcaagggacaacaactacaacaactggagctaacaaaccttgctggctactctcagcaacagtcaatggcttccattcaaccaactaagtacattgaactctgcttgttatttgcagcaacaacggctaccactgcagtcagctacctgctgcctacc

SEQ ID NO: 115816 - DNA, 964 bp, Zea mays
  Clone ID: MRT4577_37106C.1
gggaaaacgctcaaaccgggaaaccctaatccccatcccccagccgacagccgccgagcaaaccggctcctccggtcggtcatccactcatcctcatcccctggcccctgcccatccgatccgatcggtcatcccctacccctacctgatcggatcccctgctcttccgccgagcaccaccaggcagcaggctgcagccgtcgagcaccagcaggagcacggccaggaggacgacgcccgcatcctgcctcttctctgctgctggagcttctgctgccaggagcacggccagaaggacgacgcccctgctgctgccggtgagcggtgatctgctgcgcccccatcctgcctcttctcctccctctcggcctcgcctcgatctgctgctggtaatgtcctttatgaggtactacaagattagaaaatagaaaggtgtcgactgtgactcttgataattgcaccaccaatgatagtattatgagttctatgcaagataagttgcccctcttatccctcatgctagatggtaaattgttacacatgcgttgtgtggcacacatcattaatcttattgtgaaagatggaatgaccgttatggataaaggtattaaaaaggtacgcaatagtgttgcattttggtgtgccacgccaaaaagacatgagcgttcgcacaactgctcaaatgaatgttaaatatgataaaaggatagctctagattgtaaaacaagatggaattcaacttatcttattgttgaattgggaagaaatttgattaattatgttattcaattgctgaaaattgttctttgttatatccgatggatatccaatggatatccgaaacccgatgggcatggatatggatatgaatttctaaccgcgggtatagtcgcgggcagatattatctatgaccatggatatgactgcgggcggatattttcaatatccgatctgaatccgac

SEQ ID NO: 115817 - DNA, 1070 bp, Zea mays
  unsure (1)..(1070): unsure at all n locations
  Clone ID: MRT4577_37107C.1
ccggccgggtcatcctcatcccctggcccctgcccatccgatccgatcggtcatcccctacccctacctgatcggatcccctgctcttccgccgagcaccaccaggcagcaggctgcagccgtcgagcaccagcaggagcacggccaggaggacgacgcccgcatcctgcctcttctctgctgctggagcttctgctgccaggagcacggccagaaggacgacgcccctgctgctgccgcggcggaccggcagctccccgctcggcttgtattgggcggctgtcgcgctgcagcagcaggggcatcgtcgcgctcgcaccaaccgaagacggcgtcggcctccacgcggcaccgacgaccgacccacagtcccaagtccaacgaggaggccggagcgctgaacagccgtctacatcctcctcccgaaggttgctcttctatggagacttccaaagaacaggcttccaaggactatgctggtttcgagaagaaagttaagaggacaatatatattgaccacctttctcctcaagtaaaggaatcggccatcaaagctgctcttgcacaatgtgcaaatgttgtccatgtggagttcatcgtcaattacacgatcccatataaagatattgcttctgctgcattggtggaattggatgatgacgtgcaggctaaggctgctgtagaattgatgaatgatttcccgttcataattgggggaatgccaaggcctgtaaaagctatccatgccaaggctgagatgtttcgtgatcgccctccttgccctggccttcgaaaagatttctgctgggtaaaacaaggagataaggactatgaagcgatgcagaaattgaaaaaccttgcaaagaggcaggaatctgagaacatggccctcatacagaaaatcttgaaagatgaggaaggaactggcgactcggcagcaggaggtgcttgatggaaactgncagaagtacgacatgctggaagctctagtgcagaagggagacatcactaacttgctccacaatacggagtgaacttgaacgactgatgagtcattcgtgtcttttccc

SEQ ID NO: 115818 - DNA, 1654 bp, Zea mays
  Clone ID: MRT4577_37108C.1
cattgggtacctcgaggccggccggaggaaaacgctcaaaccggcaaaccctaatccccatcccccagccgacagccgccgagcaaaccggctcctccggtcggtcatccactcatcctcatcccctggcccctgcccatccgatccgatcggtcatcccctacccctacctgatcggatcccctgctcttccgccgagcaccaccaggcagcaggctgcagccgtcgagcaccagcaggagcacggccaggaggacgacgcccgcatcctgcctcttctctgctgctggagcttctgctgccaggagcacggccagaaggacgacgcccctgctgctgccggttgctcttctatggagacttccaaagaacaggcttccaaggactatgctggtttcgagaagaaagttaagaggacaatatatattgaccacctttctcctcaagtaaaggaatcggccatcaaagctgctcttgcacaatgtgcaaatgttgtccatgtggagttcatcgtcaattacacgatcccatataaagatattgcttctgctgcattggtggaattggatgatgacgtgcaggctaaggctgctgtagaattgatgaatgatttcccgttcataattgggggaatgccaaggcctgtaaaagctatccatgccaaggctgagatgtttcgtgatcgccctccttgccctggccttcgaaaaggtttctgctgggtaaaacaaggagataaggactatgaagcgatgcagaaattgaaaaaccttgcaaagaggcaggaatctgagaacatggccctcatacagaaaatcttgaaagatgagaaggaactggcgactcggcagcaggaggtgcttgatggaaactgcaagaagtacgacatgctggaagctctagtgcagaagggagacatcactaaccttgctcaacaatacggagtgaacttgaacgactgatgagtcattcgtgtcttttccccccttccccttggagcgatggcgcaactggtgtgatgatgatggaataggatagcatgccatagttttggtccggtatctggaccctccctctggtgtaaagactatcccaacttaggcttgggcttttcagccttctttggctctccaaaaaatctaaattagctggctctgagcctctgactttctgatcgatccaagctagctggctagctacaggttgtgtatatgaatcttgcaggggtgctgacgacgttgcaggaagggtgtagtggcccaaggaagaagagcagcggcagaggaggaggccgaccacgacgacaaggagcatgagtcggtggtggggtcggtgggattcttctccaacctggaagaactgctggtgttcaaccccagggccattctgtcctgctttgttgtcgtccacaaggcctagcttgagctgaactagtagtagtgtatggctacatgtaaggatgtaatatggtttgaaaaatattcgtccggatccggattcgaagatggtgaacaatgatttggatggaatttttggatatccgaatttttttggataatgaatcacacgagaaatcactttaagtatacaagttaaaaaaaaaagaatactttattttatttgagctcgtttacccgggatttaattccggacc

SEQ ID NO: 115819 - DNA, 599 bp, Zea mays
  Clone ID: MRT4577_37109C.1
gcggggggggttttttttttttttttttttttttttttttttttttttttttcttcgttcgggcctttccaagcttgttgtttggcaaactacaggcgttccatgaaaataattgtcccaacggtgtctttttttctgctttgcaccagactttgggcccgagggggcgttttcccggcgctttcccgacattcaagtcccccttttttttgaaaccttccctttggcaaatcccacaaccggaagttaaaaggtccccacctttagcctgggtggctttttttatgttgccgcaaaaaggatccattccccgtttgcgagggcgtttcagcttcctttttcccagctcggcgccgggaaaaccagagatcactcccatgctttaagggcaccacccctcccaattgccttggtgatagtctgcttactgttgcgcgccctggactctttgggctccggccggcttttgatcttcctcctcatacccctcctgggcagcgtgagctttctttcttgacatcttttcctcgttgttgtcacatcaggcatagcgaggtccctggcttgatttttccccatacttcaactttggataaagg

SEQ ID NO: 115820 - DNA, 770 bp, Zea mays
  unsure (1)..(770): unsure at all n locations
  Clone ID: MRT4577_3710C.1
aggagaatctcaccagccgccgccgccgagggttagggtttgtggccggagatccctcgattggattggagcggccggcgcggcgtggtcgaatcgaatcgaagagaagcgatagagatggacgcgcagcgtgctctgctggacgcgctgatggggtcgtcgcgggacctgacggaggaggagaagaaggagcaccgggaggtggcgtgggacgaccccgacgtgtgcgccccctacatggcccgcttctgcccccacgacctcttcatcaacaccaagagcaacctcggagtatgcccaaagatccacgacccggccctaaagcaaagcttcgagtcctccccccgctacgccgccgtcctccccaaattcgaggctgacctcgcccaccgctgcgagaggctggtccaggacctggataagaagatcaggcgcggccgcgacaggcttgcgcaggacgtcgtggaggtgccgccccccgccgcccatgccgagaaggtcgagcagctcgccattctcgaagacaagatcaagaagctgctcgagcagattgagcagctcggcgacaccggcaagatcgacgaggccactgcgctcatgaggaaggtggacattctcaacctcgagaagtcggctctgacccaccagatagagaccaagctctccatggtcccgcaangagaagaagatggagctctgcgagcagtgcggctcctttctcgtcaccaacgacgtccttgaagaggacgcagtcccatgtcaccggcaac

SEQ ID NO: 115821 - DNA, 270 bp, Zea mays
  unsure (1)..(270): unsure at all n locations
  Clone ID: MRT4577_37110C.1
cgtcgcangcacgcgtacgtaagcttcggaaattcggctcgaggtactaagttcttagattcggcgagcgggccgcccggacttagtggagcttcgttcggacccccggggaaattaaattccccgggaacccggtaacctggcaggacgtaaacncagctttcccctattagtggagtccgtcattgagaggcttggtcgtaatcatggtcatagtctgtttcctgtgtgaaattgttgataccggcttcancaattccacaacaacat

SEQ ID NO: 115822 - DNA, 185 bp, Zea mays
  unsure (1)..(185): unsure at all n locations
  Clone ID: MRT4577_37111C.1
cggccgagnaaagnttacgggcagcggacaacgcaggatggtgtgcttcctccgggccttcgccgccgcttccgctgtgcccgcagcagctgccgcagcctatactctctttccctcctctgccccttcctccctcaagctccgcttccctcttcctgactcccttctctcccgcgcggggctct

SEQ ID NO: 115823 - DNA, 116 bp, Zea mays
  Clone ID: MRT4577_37112C.1
ccggccggggcaaaagccgatggcgcatcctattgacctcgctcatcctgcagcgccgttgcagcgagtcaacgacctgccgtcatctgaggtagacaccaagccaccggcatggg

SEQ ID NO: 115824 - DNA, 1200 bp, Zea mays
  Clone ID: MRT4577_37113C.1
aattcggcacgaggcaagactacgtcgatcgttttagtgaattggttgatctgttagtaacctatgaacataccacagatcccctttactataccatgcgatttatcgatggcttacgcgacgacattaaatctgtaattttagtccaacgtcctagtactttggatactgcctgtgcgctggccttgttgcaggaggaggcggaggcgtctcgccctcgtgaggtccgtcgcggtgatgcccacttgtcttacaagactccaacgaagacatcatcatatcaggattgggacaaacattctccacaagcttctgacagacctacttcaatggtttcagatccttcgtcgtctgacagtaaggttgcgtccctccgcgcttaccgtcgggcacgaggtctctgtcaatactgtgctgacaaatgggttaaaggccacaagtgctctcccactatccagttgcatgtgatgcaggaactttgggatctactcactccagagtcccaggaaccagaggctgaatttcaagatacatcagaacagttcatgatactgctttctactgaagctgtgtcctccaagtcctctcggtccaccttccggttatcgggttcgctgttcggccaggaattgtcgatgttactagattctggcagctctcattgttttcttaacacgtcactggcaagctctctcacaggggtgaatcaattggctcaaccattgtcagtaacagtggctaatggcaacaagttgcagtgtacggctgaattaacaaatgcagagtggacttgtcaggggctctcgtttacttcatcatttaagcttcttcctataccttgttatgatgccatcatcggcatggactggcttgaaagctgtagcccaatgtatgtggactggaaacacaagtggatatccctctcacatctgggcaaatctgcgcttcttcaaggagtccagccaacaacaccgtctgcatccctgttggagttacgacacacagctccggaccagtctgaaatattccagctgcagatagcccatgattcatcagttccagaggcaattcaacacctcctacatgaatttgacttcctgttcgctgaacctaagtctctgccgcctagccgattttgtgatcaccatattccacttctcgcaggcgctcgcccagttaatttccggccttaccggttct

SEQ ID NO: 115825 - DNA, 369 bp, Zea mays
  Clone ID: MRT4577_37114C.1
gcagcccccggggaaaaccgggcccaaaacccctttggccaagggcccaaggtcccccgttcttcgaaaaaaaaaaaggggacccaaggggccaattaaccccccctttaaaaccccgaaaagggccatggggggggccccccccgggtctgaaaacccttttttaaccttagcccctcaacgggggccccagtcccgggggcccccgggggtttcaaaccaggaaccccgggggggggaggaatttttccccaccccccggggcccccgttcaatctttttgaaaaggcccaatttcccttactggcccccccatagggggcctttttaaaacccgacccccgggggggggccccagcccccctggca

SEQ ID NO: 115826 - DNA, 241 bp, Zea mays
  Clone ID: MRT4577_37115C.1
gtgacacatacagggtatttatattatatataactaaaattcttttcccccgaggcgatatatatacccgagaggcgccacacatgtttataaaaggggcgtatagtatactgctgcaaaataagaagtaatgctgctgttgttattaaaatacttctgttgacccccccgcgggacgaccgacggctgctcccccctcgttgttattaccgccgcactactcagcatcgtggatgatgac

SEQ ID NO: 115827 - DNA, 437 bp, Zea mays
  unsure (1)..(437): unsure at all n locations
  Clone ID: MRT4577_37116C.1
ccatccctccaacgcaccatcacgcggttgagccataacaacagtgtcctgtccacccactccctgcttgatcacactgatgtggatatcactgctgaacaatgaagtcatctatgacaagtgccgccgcacccttgttattgagcgcgcaacctaaacaaacctaaacaggctggggtcctaggccatgtcatccctgactggctcactaacgctggacggcgctcttacacgtggatgagaatgagacccacaccagattgataccctacccaaagatgcacttcatgctatcctcctatgcttcagncatgctctgcttgagaaggcctaccaagagctagatgtctgtaggacgataacaccaacagacggctttgagccatcctccatgaaggccaagcgcgatccgcgacatggcaagtacgcgaggtcgg

SEQ ID NO: 115828 - DNA, 524 bp, Zea mays
  Clone ID: MRT4577_37117C.1
attcccatacagagacggttcgcgcagctgcttcctatccgtcgagacgaaccctcatcctcaaatagacagcccaaacataccacaccactctactgacggaaggacgaatcactgcaacattttccttgacgcatgcgaatcgaaaacactcacatcaacttatgaaacattgcgcatgcctactctgccgagcgcaccaccactggacatctgacctacaaaataggaagaatcgacgagagatggagtgagaggatcaagaaatactgtgccaagacgtacaagagatcattaagtataggagggtgcttggaaacctcagaataagtcatagacaagaattacaattgatactgccctgtgcaaatgcgagatcaccaaataatactgcactgtcatagacgcaccagacacaccgatgcacttcatcctatagatgtaccactgccagctacccaagcgtgactgctactgatcctaacatctgactccaccactggccatgttgaaactcatatctc

SEQ ID NO: 115829 - DNA, 5955 bp, Zea mays
  Clone ID: MRT4577_37118C.1
atgggaaactccgctccgcccgaccccagggctcggactcgggcaaagacccggaagacgacgaactccgctccgcccgaccccagggctcggactcgggctaagacccggaagacgacgaactccgctccgcccgaccccagggctcagactcgggctaagacccggaagacgacgaactccgctccgcccgaccccagggctcggactcgggctaagacccggaagacgacgaactccgctccgcccgaccccagggctcggactcgggctaagacccggaagacgacgaactccgctccgcccgaccctagggctcggactcgggctaagacccggaagacgacgaaactccgcctcgcccgaccccagggctcggactccgccctggcctcggccgaacgatctccgcctcgcccgacccgggggctcgggctcggcctcggcaacggaagacagactcgacctcggcttcggaggagcccccacatcgccctacctagggcacaggcccgccacgtcaacaggaagcgccatcatcatcctaccccgagccgactcgggtcacggagaacaagaccggcgtcccatctggccagctccaccggatgggcaatgatggcgctccacaagctctgtgacgacggcggctctcagctctcttacggcagcagggcgacgaggaggcggggccatcaaggccaagcgggaggccgcgcttcgtcggccgtcgagcgaatcgacgcccccgacgccccgacggaaggcacgccgggcgtcgacctcgcgatcgagacgaaggcgagcgccgtccccccgcgacacgctgatcccgagcaagaagacgacgccagcgcgctcgcggaaagcctgcaggacgtcgccctcgtacctgggacgacggtgcaaccagtccccgatgtgactacgtcgctcctcgtcgaccaaaaggtaccgactaactcccatattacgtcatttcgactcggcctcaacccgccaagcgacctcgctttggcgggcgctctcatcgaggcgagtgcaaccccactggggtttcgtatgcggtcgccttgggaccggttgacggacgtctcaacctacgggccctctgggtccgaggaagatgacgatcccagcatctgttgggatttctccggacttggcaaccccagtgccatgcgggacttcatgaccgcatgtgactactgcctctccgactgttccgacggaagccgcagccttgacgacgagggctgcggcccaagccgcgaatgtttccacatcgagctaggggatccctccgaaggcaaccatctcggcatgccggaggacggtgatcttcctaggccggtgcctcgcgccgacatcccacgggagctagctgtggtccccgctccggtggggggttacgacccacaactcgagcaagtccgcgaggcgcaggccaggctcaacgagggaacaggagcgcttgagccgatccgtcgggacgtcgggcaggtatgggcgggccaacccccggccggagaaatacgtcacctgccccaaggtctccagcaccgcgtcgccaacgatgtcagggtcaggccgccgcccgcatccagcggggttggccagaacctggcagccgcagcgatgctcctccgcgcgatgccggagccatcaaccaccgagggtcggcgaatccagggagagatcaagaatctcctggaaggcgctgcggcccgacgggccgagagcactgcctcccgaaggcagggatacccctcggaacctcatgccgcgacttcccgattcatgcgggaagcctcggtctacaccgggcgcacgcgcaacaccgcgcctgcggccccgggccacctcggcaacgaacaccatcgacgcgaccgtcgggcccacctcgacgaaagggtgcgccgaggctaccaccccaggcgtggggggcgctacgacagcggggaggattggagtccctcgcccgaaccacccggtccgcaggccttcagtcgggccatccgacgggcgccattcccgacccggttccgacccccgactactatcgcgaagtactcgggggaaacgagaccggaactgtggctcgcggactaccgccttgcctgccaactgggtgggacggacgacgacaacctcatcatccgtaacctccccctgttcctctccgacactgctcgcgcctggttggagcacctgcctccggggcagatctccaactgggacgacttggtccaagccttcgccggcaatttccagggcacatacgtgcgccccgggaattcctgggaccttcgaagctgccggcaacagccgggggagtcgctccgggactacatccggcgattctcgaagcagcgcaccgagctgcccaacatcaccgactcggatgtcatcggcgcgttcctcgctggcaccaccttccgcgacctggtgagcaagctgggtcgcaagacccccaccagggcgagcgagctgatggacatcgccaccaagttcgcctctggccaggaggcggctcccgaggcgtctactccgcgcagcgccaagaagaaaggcaagaagaagtcgcaatcgaaacgcgacgccgctgacgcggaccttgtcgccgccgccgagtacaagaaccctcggaagccccccagaggtgcaaacctcttcgacaagatgctcaaggagtcgtgcccctaccatcaggggcccgtcaagcacaccctcgaggagtgcgttatgcttcggcgtcacttccacagggccgggccacccgccgagggtggcagggcccgcgacgacgacaagaacgaagatcacctagcaggagagttccccgaggtccgcggctgcttcatgatctatggagggcatgcggcgaatacctcggctcggcaccgcaagcaagaacgccgggaggtttgctcggtgaaggtggcggcgccagtctacctagactggtccgacaagcccatcactttcgaccaggccgaccaccccgaccatgtgccgagcccggggaaatacccgctcgtcgtcgaccccgttgtcggcgatgtcaggctcaccaaggtcctgatggatgggggcagctgcctcaacatcatctacgccgagaccctcaagctcctgcgcgtcgatctggagaccctgacgttcgaagtggtcgggttccgaggaacctaccacgcggtgctagggaggccatgctacgcgaagttcatggccgtccccaactacacctacctgaagctcaagatgccgggccccaacggggtcatcaccgtcggccccacgtacaaacacgcgttcgaatgcgacgtggagtgcgtggagtacgccaaggccctcgccgagtccgaggccctcatcgccgacctggagaacctctccaaggaggtgccagacgtgaagcgccacgccggcaacttcgagccagcggagacggtcaaggccgtccctctcgaccccagtggcgacaccaccaagcaggttccctaccctctgcctcgcatcgaccaaatcgtggattccaccgctgggtgcgaaaccctgtccttcctcgatgcctactcagggtatcaccagatccggatgaaagagtccgaccagctcgcgacttctttcatcacgccgttcggcatgtactgctatgtcaccatgtcgttcggtttgaggaatgcgggcgcgacgtaccagcggtgcatgaaccatgtgttcggcgaacacatcggtcgcacagtcgaggcctacgtcgatgacatcgtagtcaagacaaggaaggcttccgacctcctctccgaccttgaagtgacattccggtgtctcaaggcgaagggagtcaagcttaatcctgagaagtgtgtcttcggggtgccccgaggcatgctcctagggttcatcgtctccgagcgaggcatcgaagccaacccggagaagatcgcggccatcaccagcatgggacccatcaaggacttaaaaggggtacagagggtcatgggatgcctcgcggccctgagccgcttcatctcatgcctcggcgaaagaggtctgcctctgtaccgcctcttaaggaaggccgagtgtttcacttggacccctgaggccgaggaagccctcggcaacctgaaggcgctccttacaaaggcgcctgtcttggtgcccccggcggacgtagaagccctcttggtctacgtcgccgcgaccactcaggtggttagcgccgcgattgtggtcgaaaggcaagaggaagggcatgcattgcccgttcagaggccggtctacttcatcagcgaagtgctgtccgagactaagatccgctacccacaagttcaaaagctactgtatgctgtgatcctgacaaggcggaagctgcgacactacttcgagtctcatccggtaactgtggtgtcatccttccccctgggggagatcatccagtgccgagaggcctcgggcaggatcgccaagtgggcggtggaaatcatgggcgaaacgatctcgttcgcccctcggaaggccatcaagtcccaggtgttggcggatttcgtggccgaatgggtcgacacccagctgccaacgactccgatccaaccggagctctggaccatgtttttcgacgggtcgctgatgaagacgggggccggcgcgggcctgctcttcatctcgcccctcggaaagcacttacgctacgtgttgcgcctccatttcccggcgtccaacaatgtggccgagtacgaagctctggtcaacggattgcggatcgccatcgagctaggggtcagacgcctcgacgcccgtggtgattcgcagctcgtcatcgaccaagtcatgaagaactcccactgccgcgacccgaagatggaggcctactgcgacgaggttcggcgcctggaagacaagttcttcgggctcgagctcaaccacatcgctcggcgctacaacgaaaccgcagacgagctggctaagatagcctcggggcgaacgacagtccccccggaagtcttctcccgggatctgcatcaaccctccgtcaagctcgacgacgcgcccgagcccgaggtaccctcggcacagcccgaggtaccctcggcccccgagggcggggcactgaacgtcgaggaagggcagagcggggccacgccagatcaagattggcgggccccgtacctgcaatatctccgccgaggagagctacccctcgaccaagtcgaggctcggcgggtagcgcgacgcgccaagtcattcgtcttactgggcgacgaagaggagctctaccatcgcagcccctcgggcatcctccagcgatgcatctccatcgccgaaggtcgggaactgctccaagaaatacactcgggggcttgcggccaccacgcagcgccccgagcccttgttggaaatgctttccggcaaggcttctactggccaacggcggtggttgacgccactagaatcgtccgcacctgcgaagggtgccaattctatgcgaagcggacgcacctgcccgctcaggctctgcagacaatacccatcacctggcccttcgctgtatggggtctggacctcgtcggtcccttgcagaaggcgcccgggggctacacgcacctgctggtcgccatcgacaaattctccaagtggatcgaggtccgacctctgaacagcatcaggtccgagcaggcggtggcgttcttcaccaacatcatccatcgcttcggggtcccgaactccatcatcaccgacaacggcacccagttcaccggcaaaaaattcttggatttttgtgaggatcaccatatccgggtggactgggccgccgtggctcatcccatgtcgaatgggcaagtagagcgtgccaacggaatgattctacaagggctcaagcctcggatctacaacgacctcaacaaattcggcaagcgatggatgaaggaactcccctcggtggtctag

SEQ ID NO: 115830 - DNA, 2682 bp, Zea mays
  Clone ID: MRT4577_37119C.1
atgggcagtctccagcaacctctccaacccgggacggtgctccgtttcgggagtcttgagttcatgtccctcgacggcagctacgacatgatactccttccaccgccgcgcgacaacgacaatggcggccgacagcccgcccgccgacggtggaatcgacgacgtcttccccgcgtggtggaagaacaaccttcgagctcatcctgccctttcccccgccgacggagggggaggcagggcgaccaaggccaagcaggaggcagcgcctcgttggctgttgagcgagccgacagcaccggcaccccaacgaggggcacaccgggtatcgacttcgcgcatgagacgaagacgagcgtcgtctccctgcgacacgccagtcccgagcaagcagacgacgccagcgcgctcgcggagagcttgctggacgtcaccctcgtacctgagacgacggtgcagtcagtccccggcgtgactttgtcgccgctcgtcgaccaagaggtaccgaccgattcgcatcccacgtcattcggattcagcctcaacccgcctagcgaccttgctttggcgggcgctctcgtagaggcgagtccaaaccctctggggtttcgcatgcggtcgccttgggaccggctgacggacgtctcgacctacgggccctctgggtccgaggaagacgacgaccccagcatctattgggatttctctggacttggcaaccccagtgccatgcgggacttcgtgactgcatgtgactactgcctctccgaccgttccgacggtagccgcaacctcgacgacgaggactgtggcccaagccgcaaatgtttccacgtcgatctagggggtccctccgaaggcaatcatctcggcatgccggaggacggtgatctccctaggccggtgccccgcattgacatcccacgggagctagctgtggtccccgttcaggcggggggccatgacccacagctcgagcaaatccgcggggtgcaggccaggctcgacgagggagcaggagcgcttgagccgatccgccgggacgtcgggcaggcatgggcgggcctacccccggccggagaaatacgtcacctgccccagggcttccagaactgcgtcgcagacgatgtccggttcaggccgccacccgcatctagtggggtcggccagaacctggctgcagcagcgatgcttctccgcgcgatgccagagccatcaaccaccgagggccggcgaatccagggggagctcaagaatctcctggaaggcgccgcagtctggcgggccgagagctctgcctccagaaggcagggatacccctcggaacctcatgccgcgacttcccgattcatgcgggaagcctcggtctacaccgggcgcacgcgcaacaccgcgcctgtggccccgggccgcctcggcaacgagcaccatcatcgcgaccgtcgggcccacctcgacgagaggggcacgtacgtgcgccctgggaattcctgggacctccgaagctgccggcagcagccgggagagtcccttcgggactacatccggcgattctcgaagcagcgcaccgagctgcccaacatcaccgactcggatgtcatcagcgcgttcctcgccggcaccacctgccgcgacctggtgagcaagttgggtcgcaagacccccaccagggcgagcgagctgatggacatcgccaccaagttcgcctccggccaggaggcggtcgaggccatcttccaaaaggacaagcagccccagggccgcccatcggaagatgctcctgaggcgtcaactcagcgcggcgccaagaagaaaggcaagaagaagtcacaagtgaaacgcgacgccgccgacgcggaccttgtcgccaccgccgagtacaagaaccctcggaaaccccccggaggtgccaacctcttcgacaagatgctcaagtccgggccacccgcggagggtggcagggcctgcgacgacgacaagaaggaagatcaccaagcaggagagttccccaaggtccgcgactgcttcatgatctacggtgggcaagcggcgaatgcctcggctcggcaccgcaagcaagagcgtcgggaggtctgctcggtgaaggtggcggcaccagtctacctagactggtccgacaagcccatcaccttcgaccaagctgaccacccggaccacgtgccgagcccggggaaatacccactcgtcgtcgaccccgtcatcggcgacgtcaggctcaccaaggtccttatggatggaggcagcagcctcaacatcatctacgccgagaccctcgggctcctggagaccctgatgttcgaggtggtcgggttccgaggaacctaccacgcggtactgggaaggacatgctacgcgaagttcatggtcgtccccaactacacctacctgaagctcaagatgtcgggccccaacggggtcatcaccgtcggccccacgtacaaacacgcgttcgaatgcgacgtggagtgtgtggagtacgccgaggccttcgccgagtccgaggccctcatcgccgacctggaaagcctctctaaggaggtgccagacgtgaaacgtcatgccggcaacttcgagccagtggagacggttaaggccgtccccctcgaccccagcggcgacacctccaagcagatccggatcggctccgggctcgaccccaaatag

SEQ ID NO: 115831 - DNA, 323 bp, Zea mays
  Clone ID: MRT4577_3711C.1
cccgttctgtcgcttcgatccaccaagcttagctgagaccggtcaccttcggctgctgccgcttagcgcgcatctccttgtatcgctccagcctgcagcacacgtgctccatgccctcgcggtgctgatccggccatagccatgcatcaccgctcgccggaggcggcttccgcatccgtctccccgacggcgcgggcggtggaggccatggcgccggtcgttgtgggcgttgagccggccgtgacgctcgaccaggtgccgggctcgagcgacccggaccagctcattttactgatgtacccgaccgacggcgggtacgcgac

SEQ ID NO: 115832 - DNA, 221 bp, Zea mays
  unsure (1)..(221): unsure at all n locations
  Clone ID: MRT4577_37120C.1
gttagccagcacgtttttttcaacctgtatggccgtcttcaatagtatttccagaaattatcatttatcaacaagacggcaatacaggttgaaaaatgataatttctggaaatactattgaagacggccaaatttcttcaggcttctanaacatgtgaaacgaactttgaggataaatctttccatctattgtcaatatgtatatttattgactatgatgt

SEQ ID NO: 115833 - DNA, 2463 bp, Zea mays
  Clone ID: MRT4577_37121C.1
atgggatgtctcgcggcactgagccgcttcatctcacgcctcggcgaaagaggtctgcctctgtaccgcctcttaaggaaggccgagtgcttcacttggacccctgaggcagaggaagccctcaggaacctgaaggtgctcctcacgaatgcgcctatcttggtgcccccatctgccggagaagccctcttgatctacgtcgccgcgaccactcaggtggttagcgccgcgattgtggtcgagaggcaagaagaggggcatgcattgcccgttcagaggccagtctacttcatcagcgaggtactgtccgaaaccaagatccgctacccacaagttcagaagttgctgtacgcggtgatcctgacgcggcggaagctgcgacactacttcgagtctcatccggcaactgtggtgtcatccttccccctgggggagatcatccagtgccgagaggcctcgggtaggatcgcaaagtgggcggtggaaatcatgggcgaaacaatatcgttcgcccctcggaaggccatcaagtcccaggtcttggcggacttcatggctgaatgggtcgacacccagctcccaacagctccgatccaaccggagctctggaccatgttcttcgacgggtcgctgatgaagacaggagccggcgcagacctactcttcatctcacccctcgggaagcacctacgctacgtgctacgcctccatttcccggcgtccaacaatgtggctgagtacgaggctctggtcaacgggttgcggatcgccatcgagctaggggtccgacgcctcgacactcgtggtgactcgcagctcgtcatcgaccaagtcatgaagaactctcactgccgcgacccgaagatggaggcctactgcgatgaggttcggcgcctggaagacaaggtctacgggctcgagctcaaccacatcgcccggcgctacaacgagactacggatgagctggctaaaatagcctcggagcgaacaacggttcccccggacgtcttctcccgagacctgcatcaaccctccatcaagatcgacgacacggccgagccccaggcaccctcgacccagcccgaggtaccctcggctcagtccgaggcatcctcggcacggcccgaggcaccgtcagctcggcccgaggcaccctcgacacccgagggtgaggcactgcgcgtcgaggaggagcgaagcggggtcacgcctaatcaagactggcagaccccatacctgaaatatctccaccgaggagagctacccctcgaccgagccgaggctcggcggttggcgcgacgcgccaagtcgttcgtcttgctgggagatgagaaggagctctaccaccgcagcccctcgggcatcctccagcgatgcatctccgtcaccgagggtcaggaactcctgcgagagatacactcgggggcttgcggccatcacacagtgtctcgagcccttgttgggaatgctttccgacaaggcttctactggccgacggcggtggccgacgccactagaattgtccgcacctgcgaagggtgtcaattctatgcgaagcagacccacctgcccactcaggctctgcagacgatacccatcacctggccctttgctgtgtggggtctggacctcgtcggccccttgcaaaaggcgcccgggggctacacgcacctgccggtcgccatcgacaaattctccaagtggatcgaggtccgacctctgaacagcatcaggtccgagcaggcggtggcgttcttcaccaacatcatccatcgcttcagggtcccgaattccatcatcaccgacaacggcacccagttcaccggcagaaagttcttggacttctgcgaggatcaccacatccgggtggactgggccgccgtggctcatcccatgtcaaatgggcaagtagagcatgccaacgacatgattctacaagggctcaagcctcggatttacaacgacctcaacaagttcggcaagcgatggatgaaggaactcccctcggtggtctggagcctgaggacaacgccgagccgagccacgggtttcacgccgttcttcctagtctacgaggctgtggctgtcttgcccacagacctggaatatggctccccgaggacgagggtctacagcgatcaaagcaaccaagctagccgagaagactcgctggaccagctagaagaggctcgggacaaggccttactacactcggcgcggtaccagcggtccctgcgacgctaccacgcccgaggggtccggtcccgagacctccaggtgggcgacctggcgcttcggctgcgacaagacgcccgagggaggcacaagctcacgcccccctgggagggaccattcgtcgtcgccaaggttctgaagcccggaacgtacaagctggccaacagtcaaggcgaggtctacggcaacgcttggaacatcaaacagctacgtcgcttctacccttaa

SEQ ID NO: 115834 - DNA, 2937 bp, Zea mays
  Clone ID: MRT4577_37122C.1
atgggcagtctccagcaacctctccgtcccgggacggtgcttcgtttcgggactcttgagttcatgtccttcgacggcagctacgacatgatacttcttccaccgccgcgcgacaacgacaatggcggccgacaacccgcccgccggcggcggaatcgacgacatcttccccgcgtggtggaagagcaacattcgagctcgctccgttctctcccccgccaacggaggaggaggcggggccatcaaggccaagcgggaggccacgcttcgttggccgtcgagcgaatcgacgcccccgacgccccgacggaaggcacgccggacgtcgacctcgcgttcaagacgaaggcaagcgccgtccccccgcgacacgctgaccccgagcaagaagacgacgccggcgcgctcgcggaaagcctgcaggacgtcgccctcgtacctgagatgacggtgcaaccagtccccgatgtgactacgtcgctcctcgtcgaccaaaaggtaccgactaattcccatcttgcgtcatttcgactcggcctcaacccgccaaacgacctcgttttggcgggcgctctcattgaggcgggtgcaaccccactggggtttcgtatgcggtcgccttggaaccggctgacggacgtctcgacctacgggccctctgggtccgaggaagatgacgatcccagcatctgttgggatttctccggacttggcaaccccagtgccgtgcgggacttcatgaccgcatgcgactactgcctctccgactgttccgacggaagccgcagccttggcaacgagagctgcggcccaagccgcgaatgtttccacatcgagctaggggatccctccgaaggcaaccatctcggcatgccggaggacggtgatcttcctaggccggggcctcgcgtcgacatcccacgggagctagctgtggtccccgctccggcggggggttacgacccacaactcgagcaagtccgcgaggcgcaggccaggctcaacgagggaacaggagcgcttgagccgatccgtcgggacgtcgggcaggtatgggcgggccaacccttggccggagaaatacgtcacctgccccaaggtctccagcgccgcgtcgccaacgatgccagggtcaggccgccgcccacatccagcggggttggtcagaacctggcagccgcagcgatgctcctccgcgcgatgccggagccatcaaccaccgagggtcggcgaatccagggagagctcaagaatctcctggaaggcgctgcggcccgacgggccgagagcactgcctcccgaaggcaaggatatccctcggaacctcatgccgcgacttcccgattcatgcgggaagcctcggtctacaccgggcgcacgcgcaacaccgcgcctgcggccccgggccacctcggcaacgagcaccatcgacgcgaccgttgggcccacctcgacgaaaggatctccaactgggacgacttggtccaagccttcgctggcaatttccagggcacatacgtgcgccccgggaattcctgggaccttcgaagctgccggcaacagccgggggagtcgctccgggactacatccggcgattctcgaagcagcgcaccgagctgcccaacatcaccgactcggatgtcatcggcgcgttcctcgccggcaccacttgccgcgacctggtgagcaagctgggtcgcaagacccccaccagggcgagcgagctgatggacatcgccaccaagttcgcctctggccaggaggcggtcgaggctatcttccgaaaggacaagcagccccagggccgcccatcggaagaggctcccgaggcgtctgctccgcgcggcgccaagaagaaaggcaagaggaagtcgcaatcgaaacgcgacgccgctgacgcggaccttgtcgccgccgccgagcacaagaaccctcggaagccccccggaggtgcaaacctcttcgacaagatgctcaaggagtcgtgcccctaccatcaggggcccgtcaagcacaccctcaaggagtgcgttatgctttggcgtcacttccacagggccgggccacccgccgagggtggcagggcccgcgacgacgacaagaacgaagatcaccaagcaggagagttccccgaggtccgcgactgcttcatgatctatggagggcatgcggcgaatgcctcggctcggcatcgcaagcaagagcgccgggaggtctgctcggtgaaggtggcggcgccagtctacctagactggtccgacaagcccatcaccttcgaccaggccgaccaccccgaccatgtgccgagcccggggaaatacccgctcgtcgtcgaccccgttgtcggcaatgtcaggctcaccaaggtcctgatggatgggggcagctgcctcaacatcatctacgccgagaccctcaagctcctgcgcgtcgatctgtcctccgtccgagcaggcgctgcgcccttccacgggatcatccctgggaagcgcgtccagcccctcgggcgactcgacctccccgtctgcttcgggacgccctccaacttccgaagggagaccctgacgttcgaggtggtcgggttccgaggaacctaccacgccgtactagggaggccatgctacgcgaagttcatggtcgtccccaactacacctacctgaagctcaagatgtcgggccccaacggggtcatcaccgtcggccccacgtacaaacacgcgttcgaatgcgacgtggagtgcgtggagtacaccgaggccctcgccgagtccgaggccctcatcgccgacctggagaacctctccaaggaggtgccagacgtgaagcgccatgccggcaacttcgagccagcagagacggttaaggccgtccctcttgaccccagtggcgacaccaccaagcagatccggatcggttccgggctcgaccccaaatag

SEQ ID NO: 115835 - DNA, 2769 bp, Zea mays
  Clone ID: MRT4577_37123C.1
atggtccccgacaaaaaggtaccgaccgattcccatcttacgtcttttgggttcagcctcaacccgcctagcaatctcgctttggcggacgctttcgtggaggcgagtccaaaccctctagggttccgcctgcggtcgccttgggaccggttgacggacgtctcgacctacgggccctctaggtccgaggaagatgacgaccccaacatctgttgggatttctctggatttggcaaccccagtgccatgcgggacttcatgaccgcatgtgactactgcctctccgactgttccgacggtagccgcagcctcgacgacgaggactgcggcccaggctgcgaatgtttccacgtcgatctagggggtccctccgaaggcaatcatctcggcatgccggaggacggtgatctccctaggccgatgcctcgcgctgacatcccacgggagctagctgtggtccccgttccggcggggggtcacgacccacagctcgagcaagtccgcggggcgcaggccaggctcgacgagggagcaggagcgcttgaaccgatccgtcgggatgtcgggcaggcatgggcgggccaacccccggccagagaaatacgtcacctgccccagggtctccagcaccgtgtcgccgacgacgtcagggtcaggccgccgcccacatccagtggggtcggtcagaacctggctgcggcagcgatgcttctccgcgcgatgccggagccatcaaccaccgagggtcggcgaatccagggggagctcaagaatctcctggaaggcgctgcggtccgacgggccgagagctctgcctcccgaaggcagggatacccctcggaacctcatgccgcgacttcccgattcatgcgggaagcctcggtctacaccgggcgcacgcgcaacaccgcgcctgtggccccgggccacctcggcaacgagcaccatcatcgcgaccgtcgggcccgcctcgacgagagggtgcgccgaggctatcaccccaggcgtgggggacgctacgacagcggggaggatcggagtccctcgcccgaaccaccgggtccgcaggccttcagccgggccatccgacgggcaccgttcccgacccggttccgacccccgactactatcacaaagtactcgggggaaacgagaccggaactgtggctcgcggactaccgcctggcctgccagctgggtggaacggacgacgacaacctcatcatccgcaacctccccctgttcctctccgacaccgctcgcgcctggttggagcacctgcctccggggcagatctccaactgggatgacctggtccaagccttcgccggcaatttccagggcacatacgtgcgccccgggaattcctgggacctccgaagctgccggcagcagccgggagagtctctccgggactacatccgacgattctcgaagcagcgcaccgagctgcccaacatcactgactcggatgtcatcggcgcgttccttgccggcaccacctgccgcgacctggtgagcaagttgggtcgcaagacccccaccagggcgagcgagctgatggacatcgccaccaagttcgcctctggccaggaggcggtcgaggctatctttcgaaaggacaagcagccccagggccgcccaccggaagatgctcccgaggcgtctactcagcgcggcgccaagaagaaaggcaagaagaagtcgcaagcgaaacgcgacgccgccgacgcggaccttgtcgctgccgccgagtacaagaaccctcggaagccccccagaggtgccaacctcttcgacaagatgctcaaggaatcgtgcccctatcatcaggggcccgtcaagcacacccttgaggagtgtgtcatgcttcggcgccacttccacagggccgggccgcccgcggagggcggcagggcccgcgacgacgacaagaaggaagatcaccaagcaggagagttccccgaggtctgcgactgcttcatgatctacggtgggcaagcggcgaatgcctcggctcggcaccgcaagcaagagcgccgggaggtctgctcgatcaaggtggcggtgccggtctatctagactggtccaacaagcccatcaccttcaaccaagacgaccaccccgaccacgtgccgagcccggggaaatacccgctcgtcgtcgaccccgtcgtcggcgacgtcaggctcaccaaggtccttatggacgggggcagcagcctcaacatcatctacgccgagaccctcaggctcctgcgcgtcgatctgtcctccgtccgagcaggcgctgcgcccttccacgggatcattcccgggaagcgcgtccagcccctcggacgactcgaccttcccgtctgcttcggaatgccctccaacttccgaagggagactctgacgttcgaggtggtcgggttccgaggaacctaccacgtggtactggggaggccatgctacgcgaagttcatggccgtccccaactacacctacctgaagctcaagatgtcgggccccaacggggtcatcaccgtcggccccacgtacaaacacgcgttcgaatgcgacgtggagtgcgtggagtacgccgaggccctcgccgagtccgaggccctcattgccgacctggaaagcctctccaaagaggtgtcagacgtgaagcgtcatgccggcaacatcgagccagtggagacggttaaggccgtccccctcgaacccagtggcgacgcctccaagcagatccggatcagttccgggctcgaccccaaatag

SEQ ID NO: 115836 - DNA, 2736 bp, Zea mays
  Clone ID: MRT4577_37124C.1
atgccgttcggtttgaggaatgcgggcgcgacgtaccagcggtgcatgaaccatgtgttcggcgaacacatcggtcgcacagtcgaggcctacgtcgatgacatcgtagtcaagacaaggaaggcttccgacctcctctccgaccttgaagtgacattccgatgtctcaaggcgaaaggagtcaagctcaatcccgagaagtgtgtcttcggggtgccccgaggcatgctcctagggttcatcgtctccgagcgaggcatcgaagccaacccggagaagatcgcggccatcaccagcatgggacccatcaaggacttaaaaggtgtacagagggtcatgggatgcctcgcggccctgagccgcttcatctcacgcctcggcgaaagaggtctgcctctgtaccgcctcttaaggaaggccgagtgtttcgcttggacccctgaggccgaggaagccctcggcaacctgaaggcgctccttacgaaggcgcctgtcttggtgcccccggcggatggagaagccctcttggtctacgtcgccgcgaccacgcaggtggttagcgccgcgattgtggtcgagaggcaagaggaagggcatgcattgcccgttcagaggccggtctacttcgtcagcgaagtgctgttcgagaccaagatccgctacccacaagttcaaaagctgctgtatgctgtgatcctgacaaggcggaagctgcgacactacttcgagtctcatccggtaactgtggtgtcatccttccccctgggggagatcatccagtgccgagaggcctcgggcaggatcgcaaggtgggcggtggaaatcatgggcgaaacaatctcgttcgcccctcggaaggccatcaagtcccaggtgttggcagacttcgtggccgaatgggtcgacacccagctgccgacggctccgatccgaccggagctctggaccatgtttttcgacgggtcgctgatgaagacgggagccggcgcgggcctgctcttcatctcgcccctcggaaagcacttgcgctacgtgctgcgcctccatttcccggcgtccaacaatgtggtcgagtacgaagctctggtcaacgggttgcggatcgccatcgagctaggggtcagacgcctcgacgcccgcggtgattcgcagctcgtcatcgaccaagtcatgaagaactcccactgccgcgacccgaagatggaggcctactgcgacgaggttcggcgcctggaagacaagttctttgggctcgagctcaaccacgtcgctcggcgctacaacgaaaccgcagacgagctggctaaaatagcctcggggcgaacgacggtccccccggacgtcttctcccgggatctgcatcaaccctccgtcaagctcgacgacgcgcccgagcccgaggtaccctcggctcagcccgaggtaccctcggcccccgagggcgagacactggacgtcgaggaagagcagagcgaggccacgccagatcgagattggcaggccccgtacctgcaatatctccgtcgaggagagctacccctcgaccaagtcgaggctcggcgggtagcgcgacgcgccaagtcattcgtcttgctgggcgacgaagaggagctctaccatcgcagcccctcgggcatcctccagcgatgcatctccatcgccgaaggtcgggaactgctgcaagaaatacactcgggggcttgcggccaccacgcagcgccccgagcccttgtcgggaatgctttccgacaaggcttctactggccaacggcggtggctgacgccactagaattgtccgcacctgcgaagggtgccaattctatgcgaagcagactcacctgcccgctcaggctctgcagacgatacccatcacctggcccttcgctgtatggggtctggacctcgtcggtcccttgcagaaggcgcccgggggctacacgcacctgctggtcgccatcgacaaattctccaagtggatcgaggtccgacctctgaacaacatcaggtccgagcaggcggtggcgttcttcaccaacatcatccatcgcttcggggtcccgaactccatcatcaccgacaacggcacccagttcaccggcaaaaaattcctgaatttttgcgaggatcaccatatccgggtggactgggccgtcgtggctcatcccatgtcgaatgggcaagtagagcgtgccaacggcatgattctacaagggctcaagcctcggatctacaacgacctcaacaagttcggcaagcgatggatgaaggaactcccctcggtggtctggagcctaaggacgacgccgagtcgtgccacaggcttcacgccgtttttcctggtctacggggctgaagctatcttgcccactgacctggaatacggctccccgaggacgagggcctacaccgatcaaagcaaccaagctagccgagaggaatcgctggaccagctggaggaggctcgggacagggccttactacactcggcgcggtaccagcagtccctgcgacgctaccacgcccgaggggtccggtcccgagacctccaggtgggcgatctggtgcttcggctgcggcaagacgcccgagggaggcacaagctcacgcccccctgggaagggccattcgtcatcgccaaagttctgaagcccgaaacatacaagctggccaacaatcaaggcgagatctacggcaacgcttggaacatcaaacagctacgtcgcttctacccttaa

SEQ ID NO: 115837 - DNA, 581 bp, Zea mays
  Clone ID: MRT4577_37125C.1
ccgggttgtaccacgcttcgcccagcgtccgcccagcgtccgcacgcatactgcatacacaacacatatcttatcaggagctgtcatcttatcggcatggcttgtcgcctccatggtttattacctaccatgcactcataggacagctcggcggatgggacaagtggacgtattatgggaaggcccattcaccatgcggaagaccgtcgccaatcccagtccaacggccaacggcagctattggtactgcacaacacgcgcttttttaactggcccacatgtgcacatgaggccatgctatctgaccgaagatttcccccgagactacttggtgtgacatcgtggtgctagcaccttactcacctaccttgcaaactatctgatagattgatgttatccactaatgctgggtaatgctttgtgcattgagaacaggtaatccctattatgatcagccggagccattgtgatgtagcaattagcattgtcatatactgcaaaggagcaggatcctaaatagaacttgtttccaatagcttctggagtggaaactaacactaacacacctgttacagctggtt

SEQ ID NO: 115838 - DNA, 2247 bp, Zea mays
  Clone ID: MRT4577_37126C.1
atgccgttcggcttgaggaatgcgggcgcgacgtaccagcggtgcatgaaccatgtgttcggcgaacacatcggtcgcacagtcgaggcctacgtcgatgacatcgtagtcaagacacggaaggcttccgacctcctctccgaccttgaagtgacattccggtgtctcaaggcgaaaggagtcaagcttaaccctgagaagtgtgtcttcggggtgccccgaggcatgctcctagggttcatcgtctccaagcgaggcatcgaagccaacccggagaagattgcggccatcaccagcatgggacccatcaaggacttaaaaggggtacagagggtcatgggatgcctcgcggccctgagccgcttcatctcacgcctcggcgaaagaggtctgcctctgtaccgcctcttaaggaaggccgaatgtttcgcttggacccctgaggccgaggaagccctcggcaacctgaaggcgctccttacaaaggcgccagtcttggtgccgccggtggacggagaaaccctcttggtctacgtcgccgcgaccactcaggtggttagcgccgcgattgtggtcgaaaggcaggaggaagggcatacattgcccgttcagaggccggcctacttcatcagcgaagtgctgtccgagactaagatccgctacccacaagttcaaaagctgctgtatgttgtgattctgacaaggcggaagctacgacactacttcgagtcccatccggtaactgtggtgtcatccttccccctgggggagatcatccagtgccgagaggcctcgggcaggatcgcaaagtgggtggtggagatcatgggcgaaacgatctcgttcgcccctcggaaggccatcaagtcccaagtgttggcggatttcgtggccgaatgggtcgacacccaactgccgacgactccgatccaaccggagctctggaccatgtttttcgacgggtcgctgatgaagacgggggccggcgcggacctgctcttcatctcgcccctcggaaagcacttgcgctacgtgctgcgcctccacttcccggcgtccaacaatgtggccgagtacgaagctctggtcaacggattacggatcgccatcgagctaggggtcagacgcctcgacgcccgcggtgattcgcagctcgtcatcgaccaagtcatgaagaactcccactgccgcgacccgaagatggaggcctactgcgatgaggttcggcgcctggaagacaagttctacgggctcgagcttaaccacatcgctcggcgctacaacaagactgcgaacgagctggcaaaaatagcctcggggcgaacaacggttcccccggacgtcttctcccgagatctgcatcaaccctccgtcaagatcgacgacgcgcccaagcctgaggcgccctcggtccagcccgaggtgccctcggcacagcccgaggcaccctcagctcggcccgaggcggcctcggttcaacccgaggtaccctcggcctccgagggtgaggcactgcgcatcaaggaggagcggagcggggccacgcctgatcgaaattggcagaccccgtacctgcaatatctccgccaaggagagctatccctcgaccgagccgaggctcggcggaaggcgcccgggggctacacgcacctgctggtcgccatcgacaaattctccaagtgggccgaggtccgacctctgaacagcatcaggtccgagcaggcggtgacgttcttcaccaacatcatccatcgcttcagggtcccgaactccatcatcaccgacaacggtatccagttcaccggcagaaaattcttggacttctgcgaggatcaccacatccgggtggactgggccgccgtggctcatcccatgtcaaatgggcaagtggaatgtgccaacggcatgattctacaagggctcaaacctcggatttacaacgacctcaacaagttcggcaagcgatggatgaaggaactcccctcggtggtctggagcctgaggacaacgccgagccgagccacgggcttcacgccgttcttcctggtctacggggccgaggccatcttgcccactgacctggaatacggctccccgaggatgagggcctacagcgatcaaagcaaccaagctagccgagaagactcgttggaccagctggaagaggctcgggacaaggccttactacactcggcgcggtaccagcagtccctgcgacgctaccacgcccgaggggtccggccttga

SEQ ID NO: 115839 - DNA, 530 bp, Zea mays
  Clone ID: MRT4577_37127C.1
gatgatttccaaatcctgctgagctctacccggtgcaccacacttgtcagtgggtacaactgtgtctcctcgtactcacctatgggtcacagctacaaattctgagtgccgtgcagtggcaggacactgcgccgtgtagttgcagggagtgctattccaagccgacgaccatacattattatcgtcggctcatacccaggcagaatcttcggcagagactgcgacgtgccactgcgacagatctgcttctgacatagaacaacctgcgaacactacgcccattctggtacagatgtgaactgaatcaatggcggttgtcatcagtatgaaatgcaatgagagattgtttactcagtcgccatgagattaccttgccgacctgagaggatacatccatgaacatcatgaatgcgcatgacgtgctcctagactgaggactctgactacgttgtagatactgtatagtgagaggtaggtgtctgctgacaacaggtggaacctgcgaccaatagttagccgctgacattcca

SEQ ID NO: 115840 - DNA, 1707 bp, Zea mays
  Clone ID: MRT4577_37128C.1
atggcggccgtcagcccgcccggcggcggcggactcgcgacgtcttcccccatggcggaagagcagcatccggctttgtcccgtcgccttcctcgccacaggagaaggaagcagggcaaccatggccaagcaggaggcggcacctcatcggctgtcgagcgagtcgacgacgccggcgccccagcgggggacatgtcgggcgttgacctcgcgcctgagatgacgacgagcgccgtttccccgcaacacgccaaccccaagcggacagatgatgccagcacgctcgcgacgggcctgctgggcgttagcctcgtacctgagataacggtgcaatccgtccccgacgcgactttgtcaccatccatcgatcgagagatctccaactgggacgacctggtcaaagccttcgctggaaacttccagggcacatacgtgcgccctaggaactcttgggatctccgaagatgccgccagcagccaggggaatccctacgagactacatctggtggttttcgaagcagcgcaccgagctgcccaacatcaccgactcggacgtcatcgacgcgttcctcgccggcaccacttgtcgcgacctggtgagcaaactgggtcacaagactcctaccagggcgagcgagttgatggatatcgccaccaagttcgcctctggtcaggaggcggtcgaggccatcttccggaaggacaagcagcctcagggacgccagcaggaagacgtccccgaggcgtccgcccagcgtggcacgaagaagaaggcgaaaaagaagtcgcaagcgaagcgcgacgccgccgacgcagatcttgtcgccgctgttgatcacaggaaccctcgaaagcctctcggaggggccaacctgttcgacaagatgctcaaggagtcgtgcccctatcaccagggccccgtcaagcacacccttgaggaatgcgtcatgcttcggcgctacttccataaggtcgggcccccggcggaaggtggcaaaggccaagacaacgacaagaaggagggcgacaaggcagaggagttccccgaggtccacggctgtttcatgatctacggtgggcgagtggcgaacgcctcggctcggcaccgcaagcaggagcgtcgggaggtctgctcggtaaaggtggcgacgccagtctacctagactggtccgacaagcccatcaccttcgaccaaggcgaccaccccaactgcgtgccgagcccaggaaagtacccgctcgtcgtcgaccccgtcattggcaacaccaggctcaccaaggtcctcatggacggaggcagcagcctcaacatcatctacgctaagacactcgggctcttggacatcaatctgtccacgatccgggccagaaaccctcacgttcgtggtggctacgccaagttcatggtcgtccccaactacacctaccttaagctcaagatgtcgggccccaacggggtcatcaccgtcggatccacgtaccgacacgcgtacgaatgcgacgtggagtgcgtggagtacgctaaggccctcgccaagttcgaggccctcatcgccgacctggagtgcctctccaaggaggtgcccgatgcgaagcgccacgctggcaacttcgagccagcagaggcggttaagtccgtccctctcgaccccagcaacgacacctgcaagcaagtccagatctgctccgagctcgaccccaaatag

SEQ ID NO: 115841 - DNA, 4975 bp, Zea mays
  Clone ID: MRT4577_37129C.1
atggtggccgcacgggagaacgggctgacggacatgctctctctctctccctcgcgaacgcttgtaaccccctactgcaagcgcatctgccctaggcgcaggacaacacgagccgcggttcccttttttgctcccccttgtgttctgtctcgcgccgacccatctgggctgggacacgcagcgacaatttactcgtcggtccagggaccccccggggtcgaaacgccgacagttggcgcaccaggtaggggcctgctacgtgttgacggacatcttcccgtcaagctccagatgggtagtctccagcaacctctccagcccgggacgctgctccgtttcgggagtctcgagttcatgtccctcgacggcagctacgacatggtactccttcctccgtcgcgcgacaacgacaatggcagccgtcagcccgcccgctggcggctgaatcgacgacgtcttccccgcgtggcgaaagagcagcatccagcgggggacacggcggacgttgacctcgcgtctgagacgaagatgagcgtcgtttccccgcaacacgccaaccccaagcagacggacgacgccagcatgctcgcgaaggacttgctgggcattagcctcgtacctgagataacggtgcagtccgtccccgacgcgacttcgtcaccatccgtcgatcaagaggtactgtccgttttccatcctgtgccttttagattcagcttcgacccaccaagcgaccccgcttcagtggacgctttcgtaaaggcatatcctaaccttccggggtaccatacatggtcaacctgggaccgactgacgaccgtctcgacctacgggcccccgggttccaaggaagatgatgagcccgactctggttgggatttctccaggctcgataaccccagtgccatgcgagacttcatggccgcatgtgactactgcctctccgatagctccgatggtggccacagccttggcgacgaggactgtggcccaagtcgcgaatgtttccacgtcgatctaggggtctcgacgaaggcaaccatcttgcgcaccgagctgcccaacatcacagactcagatgtcattggcgcgttcctcgccggcaccacttgccgcgacctggtgagcaagctgggtcgcaagactcccaccagggcgagcgagctgatggacatcgccaccaagttcgcctctggtcaggaggcggtcgaggccatcttccggaaggacaagcagcctcaggggcgccagccggaagacgtccccgaggcgtccgctcagcgcggcaccaagaagaagggcaagaagaagtcgcaagcgaaacgcgacgccgccgatgcagaccttgtcgccgccgccgagcacaggaaccctcggaagcctcccggaggcaccaacctgttcgacaagatgctcaaggagtcgtgcccctatattcagggtcccgtcaagcacacccttggggagtgcgtcatgcttcagcgctacttccacaaggctgggcccccggtggaaggtggcagagcccacgacaacgacaagaaggagggccacaaggcagaagagttccccgaggtccacgactgcttcatgatctacggtgggaaagtggcgaacgcctcggctcggcaccgcaagcaagagcgccgggaggtctactcggtgaaggtggcggcgccagtctacctagactggtccgacaagcccatcaccttcgaccaaggcgacaaccccgaccacgtgccgagcccggggaagtacccgctcgttgtcgatcccgtcaacggcaatgtcaggcttaccaagatcgatctgtccacgatccgggcaggcacgacgtcctttcacgagatcatccccgggaagcgcgtccaaccccttgggcaactcgatctgcccgtctgctttgggactccctccaacttccgaaaggaaaccctcacgttcgaggtggtcgggttccgaggaacctaccacgcagtgctggggagaccatgctacgccaagttcatggccatccccaactacacctacctcaagcccaagatgccgggccccaacggggtcatcaccgtcggatccacgtaccgacacgcgtacgaatgcgacatggagtgcgtggagtacgctgaggccctcgtcgaatccgaggccctcatcaccgacctggagagcctctccaaggaagtgccagatgcgaagcgccacaccggcaacttcgagccagctgaggcggtttttgcgtggagtccctcggacatgcctggcatacctagggatgtcgccgagcactcgctggatatccgagctggagcccgacccgtgaagcagcctctgcgccgattcgatgaagaaaagcgcatagccataggcgaggagatccacaagctgatggctgcagggttcatcaaagaggtattccatcctgaatggctagccaaccctgtgcttgtgaaaaagaaaggtgggaaatggaggatgtgtgtagactacactggtctaaacaaagcatgtccgaaagttccctaccctctgcctcgcatcgatcaaatcgtggattccattgctgggtgcgaaaccctgtcgttcctcgatgcctactcagggtatcaccaaatcaggatgaaagagtccgaccagctcgcgacttctttcatcacaccttttggcatgtactgctatattactatgccattcggtttgaggaacgcatgcgcgacataccaaaggtgcatgaaccacgtgttcggagagcacattggccgaacggtcgaggcttacgtcgatgacatcgtagtcaagacgaggaaagcctccgacctcctcactgaccttgaaacgacattcaagtgtctcaaggcgaaaggcataaaactcaatcccgagaaaggcatgcctctgtatcgcctcttaaggaaggccaagcgcttcacttggacccctaaggccgaggaagccctcgggaacttaaaggcactccttacaagcgcgcccatcctggtgccccccgctgccggagaagccctcttgatatacgtagccgcaaccactcaggtggtcagcgccgcgatcgtagtcgagagacgagaagaagggcatgcattgctcgtccagaggccggtctacttcatcagtgagttgcgacactacttcgagtctcatctggtgactgtggtgtcatccttccccctgggggagatcatccagtgccgagaggcctcgggtaggatcacaaaagtgggcagtggagatcatgggcgagaaaatctcgttcgctccttggaaggccatcaagtcccaagtcttggcggactttgtggctgaatgggtcgacacccaacttccattagctccgatccaaccggaactctggaccatgtttttcgacgggtcactgatgaaaacaggagcgggcgcgggcctgctcttcatctcacccctcgggaagcacctccgctacgtgctgcgcctccatttcccggcgtcaaacaacgtggccgagtacgaggctctcgttaacgggttgcgcatcaccatcgagctaggggttcggcgcctcgatgctcgtggcgactcgcagcttgtcatcgaccaagtcatgaagaactcccatcgccgcgacccaaagatggaagcctactgcgatgaggttcggcgcctggaagacaagttctacgggctcgagctcaaccatgtcgctcgacgatacaacgagactgtggacgagctggctaaaatagcctcgggacggacaacggttaccctggacgtcttctcccgagacctacatcaaccctccgtcaagaccgacgacacgcccgagcccgaggaggcctcggcccagcccgaggcatcctcggctcagcccgaggcaccctcagccgccgagggtgaggcaatgcacatcgtggaagagcggaatggggtcacgcataatcgaaactggcagaccccgtacctgcaatatctccaccaaggagagctacccctcgacagagccgaagctcggcaactggcgcggcgcgccaagtcgttcgtcttgctgggtgacggaaaggagctctaccgctgcagcccctcaagcatcctccagcgatgcatatccatcgccgaaggtttctactggccaaccgtggtggccgatgccactaggattgtacacacctaccgagggtgccaattctacgcaaggcagacacacctgcccgctcaggccctgcaaacaatacccatcacccggccgtttgctgtgtggggtctggacctcgtcggtcccatgcagaaggcacccgggggctttacgcacctgctggtcgctatcgacaaattctccaagtggattgagatccgacccctaaacagcatcagaaagttcctggtggactgggccgccgtagctcaccccatgacgaatgggcaggtagagcgtaccaacggcatgattctgcagggactcaagccgaggatctacaacaacctcaacaagttcggcaggcgatggatgaaggaactcccctcggtggtctggagtctgaggacgacgccaagccgagccacgggcttcatgccattctttctagtctatggggccgaggctatcttgcccacagacttagaatacggctccccgaggacaagggcgtacaacgaagaaagcaaccaggccagccgagaagactcactggaccagctggaagaggctcgggacatggccttactacactcggcaaggtatcagcagtctctgcgacgctaccacgctcgaggggttcggtcccaagacctccaggtgggggacttggtgcttcggctacgacaagacgatcgagggcgccacaagctcacgcctccctgggaagggccgttcatcatcgccaagattttgaagcccggaacatacaagctagccaacagtcaaggcgaggtctacaacaacgctaggaacatccgacaactacgtcgcttttacccttaa

SEQ ID NO: 115842 - DNA, 818 bp, Zea mays
  Clone ID: MRT4577_3712C.1
actcctatgggcgattgggttcctcgaggccggccggggacgacctgctgcgccgccagacactccgtactctgtaccccaagcaccggcgcgacgacggcggctaccatggcagtcgggaacaccaacaggatctcctcgggaacgaagggcgacaagaaagagaccggcgatcccttctctaagaaggactgctatgacatcgaggccccatcgctcttcagtgtgcgcaacattgggaagactctcgtgcccaggacacagggtaccaggattgcctctgatggtctgaagctcagatgctgtgaggattgtctaacttgatcttacagggtgacgaggatcaggacttactggaaaatcaggttccgtgctgaagatgtgacaaggcaagaatgggctcacaaacttctggagcatgaattttaccaccgataaggtcagatctctagtatagaagcggaagacattgattgtcgcccatgttgatgtcaagacaacctgacgactacctgctgcgtttgttctgcattgtttttaccaagaggcgcccaaaccaggtcaagagaacctgctatgctcacgcatcccagattcggcagattcgccgcaagatggctgagattatgatcaaccaggcttctacatgtgaccttaaagaacttgtttctaagatcattccggaagttattggcaaacagattgagaattctacctccagcaatctgccacttcagaacgtcttcatccgcaaggagcagatactcaagggcccccaagtttgatctcgggaaattgatgtacgttcatggcgacta

SEQ ID NO: 115843 - DNA, 309 bp, Zea mays
  Clone ID: MRT4577_37130C.1
ctccccggcatcaacgctctccatgggagtcgtgtccgcgatgctcgggtcgaccctaaaccccggcccgactctctccgcgtacgcgacaacccgatttccagcgtgctgcaccccgaatcgccggcacgtctctgtgcatggaatgcgcgtgtgggacatgacgcgatctacgtggaaggcgcagacttctccacacatcgcctgcccgtgtctctccacgcccgtgacaacctgctctctatggaaggtgagtctgagatgctcacttggattgggaaccctggccccgctctttccatggaaggc

SEQ ID NO: 115844 - DNA, 2747 bp, Zea mays
  Clone ID: MRT4577_37131C.1
atgacggtgcagtcagtccccgacgtgacttcatcgccgttcgtcgaccaaaaggtacccaccgattcccatcctacgtcatttggatttagcctcaacccgcctagcgaccttgctttggtgggcactctcgtagaggcgagttcaaaccctctggggtttcgcatgcggtcgccttgggaccagctgacgaacgtctcgacctatgggccctccgggtccgaggaagacgacgaccccagcatctgttgggatttctctggatttggcaaccccagtgccatgcgggacttcatgaccgcatgtgactactgcctctccgactgttccgacggtatccgcagcctcgacgacgagggctgcggcccaagccgcgaatgtttccacgtcgatctagggggtccctccgaaggcaatcatctcggcatgtcggaggacggtgatctccctaggccggtgcctcgcgctgacatcccgtgggagctagttgtggtccccgttccggcggggggtcacgacccacagctcgagcaagtccgcggggcgcaggccaggctcgacgagggagcaggagcgcttgagccaatcccgccgggacgtcgggcaggcatgggcgggccaacccccggccggagaaatacgtcacctgccccagggtctccagctccgcgtcgccaacgacgtcagggtcaggccgccacccgcatccagtggggtcggtcagaacctggccgcagcagcgatgcttctccgcgcgatgccggagccatcaaccaccgagggtcggcgaatccagggggagctcaagaatctcctggaaggcgctgcggtccgacgggccgagagctctgcctcccgaaggcagggatacccctcggaacctcatgccgcgacttcccgattcatgcgggaagcctcggtctacaccgggcgcacgcgcaacaccacgcctgcggccccgggccacctcggcaacgagcaccatcatcgcgaccgtcgggcccacctcgacgagagggtgcgccgaggctatcaccccaggcgtgggggacgctacgacaacggggaggatcggagtccctcgcccgaaccacccggtccgtaggccttcagccgggccatccggcgggcaccgttctcgacccggttccgacccccgactactatcacaaaatgggtggaacggacgacgacaacctcatcatccgcaacctccccctgttcctctccgacaccgctcgcgcctggttggagcacctgcctccggggcagatctccaactgggatgacctggtccaagccttcgccggcaatttccagggcacgtacgtgcgccccgggaattcctgggacctccgaagctgccggcagcagccgggagagtctctccgggactacatccggcgattctcgaagcagcgcaccgagctgcccaacatcaccgactcggatgtcatcggcgcgttccttgccggcaccacctgccgcgacctagtgagcaagttgggtcgcaagacccccaccagggcgagcgagctgatggacatcgccaccaagttcgcctctggccaggaggcggtcgaggctatcttccgaaaggacaagcagccccaggaccgcccaccggaagatgctcccgaggcgtctactcagcgcggcgccaagaagaaaggcaagaagaagtcgcaagtcaaacgtgacaccgccgacgcggaccttgtcgccgccgccgagtacaagaaccctcggaagccccctggaggtgccaacctcttcgacaagatgctcaaggagccgtgcccctatcatcaggggcccgtcaagcacacccttgaggagtgcgtcatgcttcggcgccacttccacagggccgggccacccgcggagggtggcagggcccgcgacgacgacaagaaggaagatcaccaagcaggagagttccccgaggtccgcgactgcttcatgatctacggtgggcaggcggcgaatgcctcggctcggcaccgcaagcaagagcgccgggaggtctgctcggtgaaggtggcggcgccagtctacctagactggtccgacaagcccatcaccttcgaccaagccgaccaccccgaccacgtgccgagcccggggaaatacccgctcgtcgtcgaccccgtcatcggcgacgtcaggctcaccaaggtcctcatggacggaggcagcagcctcaacatcatctacgccgagaccctcgggctcctgcgtgtcgatctgtcctccgtccgagcaggcgctgcgcccttccacgggatcattcccgggaagcgcgtccagcccctcggacaactcgaccttcccgtctgcttcggaacaccctccaacttccgaagggagaccctgacgttcgaggtggtcaggttccgaggaacctaccacgcggtactggggaggccatgctacgcgaagttcatggccgtccccaactacacctacctgaagctcaagatgccgggccccaacggggtcatcaccgtcggccccacgtacaaacacgcgttcgaatgcgacgtggagtgcgtggagtacgccgaggccctcgccgagtccgaggccctcatcgccgacctggaaagcctctctaaggggtgccagacgtgaagcgccatgccggcaacttcgagccagcggagacggttaaggccgtccccctcgaccccagcggcgacgcctccaagcagatccggatcggctccgggctcgatcccaaatag

SEQ ID NO: 115845 - DNA, 222 bp, Zea mays
  Clone ID: MRT4577_37132C.1
cctgactttggtgttggggataataaacatctcagcgagcaccatgcccgaaagggccacagcggcattacggggcagctcaggctcctagatcaggtggacacattgccgcccaagaggatacagggcctcagtgataaccagaaccatcgccaggagggcgtcgcaagtgtatactccgacctacgtactggggcagaagcgcctttaaggcaggaacta

SEQ ID NO: 115846 - DNA, 1400 bp, Zea mays
  Clone ID: MRT4577_37133C.1
acgcgtccgggtttttaccaaaacaattcttatagaagcggactgaaaagctggggcgtttggcagtccgcaacagattttggtggccggaagttgaaaaaagcccaaacaaacagggccacagtatggaaatcagtagctctgtggactgtggtcaggaaaaagaacagccaacaaataaacgtccaaggtcagaaagtactacagaatcaagcacaaaagcatccagggagaaaattagaagggacaagctgaacgagagattcttggaattgggtgccattttggagccagggaaaactcctaaaatggacaaaacagctatattgagtgatgctattcgtgtagtaggtgaattgcgtagtgaagcaaaaaagctcaaggattcaaatgagaatctccaagagaagattaaagagctgaaggtctatactatttcatgtggccaagttataaatggtgctgttcagatgggaggtggcacgtgatgtgttgtttaggcacttcatactattccattttcttgatttatgatccccttttccatttggtcattttttttcttatctagatttaattcatccagtcaaataacatgggaataattattagtacacctgtcattctccctccagtttgtggtttagtttattttgggttgcttgcattagcaactttatatccacataatgcgtttttttttcttaaatggttaaaccctgcagctgtataacaatatggacatttgtcaattcttttctctactgtatacacttctttgctacgtgttccataaaatatatagaggtttatgattcagcatctcatgtgctgcaaaaggctttggccttcgattttgctggttgttcatcagaaaaacaatctcaccctgaaatactttccttttgcaggccgagaagaatgagctgcgagacgagaagcaaaggctgaaggccgagaaggagagcctggagcagcagatcaagttcctgaatgcccggccaagcctcgtaccacaccacccagtgatcccagcctctgcgttccctgctccccaggggccagcagccgccgccaggcacaagctgatggtgcctgtgattggctaccctggattcccgatgtggcagttcatgccgccttcagatgttgacacctctgatgaccctaggtcttgtcctcctgtggcgtagaagcgtgcgaaatcctgttggaaagaggcgatgctgccctccattgattcaaatcttgatcggtccgcagtgttgctggtgtagttgattccagaactgaaggggatgttacatgtgtcggacggtgacatggggtgatctgatgacccctttgtatattatatatggtatggtataaataaattccgtgaccagaagctaatgtct

SEQ ID NO: 115847 - DNA, 201 bp, Zea mays
  Clone ID: MRT4577_37134C.1
gggggggccccctcagggaatcccaacgaaaaggggcttccttttccccaataaatactggcccccagaaattagttgttcccccccctaccccccatgggaccacaaaccttgtaatccctcccctttaaaaaatctggggcccccagacggcacattttttggtggatataaaaaagggcccccctctccttccaaatt

SEQ ID NO: 115848 - DNA, 856 bp, Zea mays
  Clone ID: MRT4577_37135C.1
gcggccgcggagagcgcgagcgtgagctcgcgggcgttcgccgcgaccagcaggcgccggccctcggcggggtcccgccgcacgccgtagccgtcctggaggaagtgcccgagctcgcggagcgcgtcgacgtggcccagcgaggccgcgcgcgcgcacagcgcagcccccgcgcgcaggtcgcggtccgacttggccccgccgctgccgttgaactggatgaccgccagcgagtagagcgccgccgcgtgcccgccgacggccgcccgagccagcagcgccgcgccgccgctgcggctgcccaggcagtagaagcggatcatgcccaggttgtagcaggcctcgaggttgccggcgtcggcgcagcgcttgaggaacctctgcgccggctcggaccacgccgccgccttgacggccagcgacgccggcgaggccttggcgaacaccatgtcatggctgccgagctcgttcagcctcttgcacgtgaggtggaccgagagcaggtcggacggcgccgaggaggcggcggcgagcttggacaggatggagaggacaaggtcatcgggaagcgcgtccaggtagtccggctcgccggcaggccgcttcctgcgcccgccgcagtcgcactctccggcgacggccgacggcgacctcttcctcttctgacccaccaaggcaaccacctcgccgccgttggaataccgggacccgctcctcgtcctcatctctctgtacctccgcaggagtcgtcgctgccggggggaaagcgggacggggcgagcggtgggagaaaaaaggttaaacgaccgcgcgcgcgggcgggcgagacgacagggagaagtgcggagcgcgaatt

SEQ ID NO: 115849 - DNA, 113 bp, Zea mays
  Clone ID: MRT4577_37136C.1
tttatcttccctagtttaatgtcttttggttgcctatctgtgttttccagtggacggattatctatgtgacctgttcgtgctgtgtttatacttggttttcagcttacacatg

SEQ ID NO: 115850 - DNA, 345 bp, Zea mays
  Clone ID: MRT4577_37137C.1
tcgtgagcagtggtaacaacgcagagtacttttttttttttttttttttttttttttattttttttttttttttttttttttttttttttttttttttttttttttaagggcagaaggtagcatattattaacatagaaggcaaaaggaccccatcctcagggcgcaccaaaatggggggggggcatcaaattttttactgctcactctgagaaacccagagggtattaaaaggaggccgcaaaaaggggttgccctactaaacaaaccggttacaccaattacgattcaccggaggcatggtaaccctttcgacgggacaatctatgggtcccctatctttcta

SEQ ID NO: 115851 - DNA, 153 bp, Zea mays
  Clone ID: MRT4577_37138C.1
cgaagtagacgcgtgggcccgcagacgccatggggcgggcctgggacgagctcggggccggcacgccccggaacagggaccgccgcccgcagggcagcccgcagacggcggacggccgggagcacgccgcggcgtgcaggaagcgccagctgc

SEQ ID NO: 115852 - DNA, 304 bp, Zea mays
  unsure (1)..(304): unsure at all n locations
  Clone ID: MRT4577_37139C.1
ggcggaattggcgggcttaaatccatatggacttcaagggggaagaaatggaaaattggatttttaacaattggcaatacttcccggcttttgaaccctttaattaatttaacaaacacactgggttggaaactttttggtttgaatggcttgggatttaaaattccaaggcaaaaaacttgaaaggccttctcttttggcgggggaacacctaccatttttcttaaaatgggccaagacttgcctggaaaatgggggnnnaattccagggcaggattttccaaagacttttaacctggggaaa

SEQ ID NO: 115853 - DNA, 1077 bp, Zea mays
  Clone ID: MRT4577_3713C.1
gccggaaaaaaggcagcacaccaactcaccaagaaagtgtggagctgctcctgcctgcagcctcctgctcatcgaccctttcgccccacaagctcgattcctcgctcggccatggctgcacccgcggaggagacgcttgccgccgaggatacggcgtcgccaccgccgccggcgaggtctgcggggttctggttccttggcgaggataagtctgtccacaaggctctcggcgggggtaaaaacaagaagacctctgctgcggtagttggtggtgcaactgtcctatgggttctgttcgaaattgtagaataccatctcctgaccctggtttctcatgtgctgatcgctgcactgaccatcttgttcctgtggtccaatgcgactgtctttatcaaaaagagtcctcctgatgttcctgaagtgcagatatctgaagacgttgctgtaaacattgcgctagcattgcgtgctgacatcaacaaggcacttgccctgcttcgggagattgctctgggccataacctgatgaagttcctaggcgtggtcgttgccctttggattctttcagagatcggggagctatgtgatctcctgagattgatgtacattgtggtcttgatcctccacacagtgccgatactgtaccacaagtatcaggaccacgtggacgatttcgccgcaaaggcacacagggagctctgcaagcaatacgcggtcctggatgccaaagttctgagcaagatcccaagagctccaccaaaagataagaaacagaactagaacgtggaggatgacaagcgccttgttttcggcttgggcgacgagagtttgtagccaatggtctgatgtggttcgtgggctttgtgtaggtgcacagttttacgtatatgttctggtcgtgtaatctatatgtttatataaacctgtaggggtgttgatgaccatcgaaagtgtcgtaaatattcagtagtatatgtagcttagggcttaagcggttgtgtttataaggtcattgccgttgtcgatgggaaaaaaaaaaaaaaaaaagcggccaaaaaaaaaaaaaaaaaagcggcc

SEQ ID NO: 115854 - DNA, 588 bp, Zea mays
  unsure (1)..(588): unsure at all n locations
  Clone ID: MRT4577_37140C.1
agacttagtgcttgtgtccttgagtattgcaaactcttgtgctcttcatttgggttttcattctctctctcaccccattctcaaaagttgaaaagttaagcaagagactccatttctttgtgtggagatccttgtgagacggtgtccctgagaagaaaagaaaactcaaccagtcttcgtgactgattgagagagggccatttgtagttgttttggtgattaaatgcccaacacaccactttgaactaattgcattggtaagagcatgagcacagtgggggcctgaggcgaaggttggagagatgctatctcgatcaccccttggcggatgatcttctggtggcgatccagcgtgaattgtgataagtacttctccttttccttcttacgtcattcacgagttggtgcaacgcttctttctcattttgcttcatgatatcctcaaagcgttgttgatcattaacaaatagttcctctagggtcggcttgatgatgttgctgggggagacctcggtgtgatccttaganccggccatttggaggttgatttttggttgatctagncagcttcgtccccagcggagtcgt

SEQ ID NO: 115855 - DNA, 282 bp, Zea mays
  Clone ID: MRT4577_37141C.1
ttcgatattagcctggcagcaggagagcctgttattgtccatctggatgctgagggacagatccgagcacaaaccggcgccactggtgaccacggcaacgaaccggatatggagacacggggcctacctggcgggacaccgttcgacggggcacatggagctcataacctaagccgaggtacccctcagcctgaggggcgcggcaccggacggcctcgttctcactaggaaccgatacctctgctggacacccaacatgctgggcaagatgaatgcgcccgc

SEQ ID NO: 115856 - DNA, 1282 bp, Zea mays
  Clone ID: MRT4577_37142C.1
ttgggtacccccctggagggtacctcggggaatgggaacctccggacaggacgggaattaggcccgcaaacaacaccgctagccatgtggcgccgcgcctcccacctcctcatccgcaccgccgccgccgccgccgccccgacccgccgcctcccacttcctcacccgccgctacccatcgccccaagagtggcctccgcatcctcatcctatgccacagcggtcgcggcgagggcaccgcggacggtagggaccctgctgcggctcaacgacctgtgtgacaacccgggcgcgcggaagcagaagacgcgcaagggacgcgggatcggctccggcaaggggaagacggcgggacgcggccacaaggggcagaaagcgcgaggcaccgctaggttcggcttcgagggtggccagaccccgctccgccgccgcctgccccgccgtggattcaagaaccccttctcactcacatttcagccctgtggactggggaaaattgcaaaactcataaatgctgggaaaattgattcctctgaattgattaccatgaagacactaaaggaaacaggtgccattgggaagcaaataaaagatggaattcgtttaatgggccgtggagcagaagaaatcaaatggcctattcaccttgaggtgtcaagggcaactgcaagggccaaagctgccgtggaagctgctggtgggacagtaaggctggtgtactacaacaaacttggattccgggcactcctgaaacctgagtggtttgagaagaagggccgcctgttaccaaaagcagcaaggcctccacccaagcagcgagataaggtcgatagcattggccgcctgcccgcgccgacaaagccactccccttcacggtagaggagctggagtttgcagcccagcgtgaggctgcccgcgtgactgcataagatgggagcacgttggcagcacctttttttctgaaagcatgcgccactggatgtgtatcacattagctttagcaggacatgcataagaatggaccgttttgtcttttttttttcttttccctcaaggaatggactgttataaattaaatatccattcatttgaatcagatgttgctgtaatttctgaacttaccttgggttttgattgataaatgccattttttctgaataggctcaaaaaaaaaaaaaaaaaaaaagcaaccttttgatcctgtaatgacaattgagaaatgccgtttatttctgtgaaataggtgaaaagcctgtgacttacgtaaaattcgcccacgtg

SEQ ID NO: 115857 - DNA, 710 bp, Zea mays
  Clone ID: MRT4577_37143C.1
agcagtggtaacaacgcagagtactttttttttttttttttttttttttttgcacccttttcctttctgaagggggagaaaggtttttaatggggccatcacatgtaatttccttttttagctctataagagcaaaatcccccaaagatgtaaatgtaaaagctgagaacgcaccatcgagtgccggaaagaaacagggaagaagctccaaagacgttcctaagggaatgcagagcttacagcgaaaagtcaacgctgattccgccgaaagtaaaaggcgaagaagctccaaagacgttcctaagagaatgcagagcttatagcgaaaagtcaacgctgattccgctgaagtaaaaggcgaagaagctcctaagggaggcttacagcgaaaagtcagcgctgatatgtgattgtttctaaggaaataacggttgtgattatggcttcggatatgtgtttggacattcatttgcacatcacattacatcataacatttgcattcataaacattcatccaggcatatgtaggataaccatcatcatggcataagtggttacttcggcaaaaaggaaaaaactgtcttttgtacttcgtcgtgtacgaaaagaagagcttcggaaaaaaggaaagttgtttttttatgcttcgctgtgtacgaaaagaagggaagggtgttttttcgccttccgctcaaaaagataatttcgt

SEQ ID NO: 115858 - DNA, 181 bp, Zea mays
  Clone ID: MRT4577_37144C.1
ttaaaaccctaaaccctcgctacccggcgggggctacaagctctacgggggggcagcaacataaggtcaccggctagaggaggacgtggtgggaggggtggcaggttcgactgcaccggacatgggggcggtggctcgcagacgtgggtttggcagcgtgagatgccgtagaagggacagg

SEQ ID NO: 115859 - DNA, 710 bp, Zea mays
  Clone ID: MRT4577_37145C.1
agtcaatacttgcaataatgtgatatttgtaaactaatttttcctcaaaaattgtaacctgcatcagccaaatatgagaaactagcatttgttgatgtttgaagtatatttatgtggatttgtgacttccttacatctcctctttcaaacaattggttcattattattattggtatggtggtgttatcgccccatttgcattaagctgctcactaagtcaaagtagtaaaaagccatggctgttgttacctagaagatgttgtgtatattcaaatcatagtgcttgtgttttgggctggagatagcacaaaataactactaaaactatctattatcaagtgatccatttgcagttttttcaatctgacactcacagactcactggttatatttcagagctgggaagaagctaacgatataccatacttagactcactggttaaggttatgagtgcattggtttgtaaaaaaaatatttcatggtcaccacagtaggagcaacatatccctgtttagcatattgggtaataactgtgctgatagtgtcacttaaacttggtaaacctgcaactgtaaatactgatacgtggactataagttttggccgtgcagttgctgtgtgataactattttgagttttcctaaacagtttcttacctagattgtcgtgaacttgcggtgtagtagcattgtaccctattttaacttgg

SEQ ID NO: 115860 - DNA, 393 bp, Zea mays
  Clone ID: MRT4577_37146C.1
gaagctcggaacccggagagcggccgcccacgagcgggcatgctcctgaggagcacaaaaacgaggggaagcccgggcatccagccgacgggaagcagaggccagaccacaacgacaaccacccacacaacgccaacggaccgagcaacggaagagccgcactgagtactgccggcatgaacccacttgctgagaggagccacacgcatagcggagggccggggatcctcaccgtagacaacgaccctgcagggcagatgcagaaacggcagcacctctggctgaccatcctgagaagtggacccacacaacctggagccgacatgcatgtatgttcagagcccctaatggaggataataaactccagcgcgcgacacgccaaaatgaacaaa

SEQ ID NO: 115861 - DNA, 118 bp, Zea mays
  Clone ID: MRT4577_37147C.1
atgagatcataccatctaccaatctctttatcctcccaaaaatcaacatctcggaaacggcaccatataacaaggctcagatacacaccgaacacacctactcgcaatcacacgatca

SEQ ID NO: 115862 - DNA, 466 bp, Zea mays
  Clone ID: MRT4577_37148C.1
tttttaccaagataggccaggtcgtctcgttggttgttgcattggagcgagcaggtgccatggcagccgctgagatcaagataggccaggtcgacgatgtccaggagctgcaccggacgggcctgcagacggtgccggaccggtacatcagggacggcgacgaccggccggacggcgacaacgtctgcgctgtcgcgcacatcccggtgatcgacgtcaccgagctccagcacgacgacgtcgggctggacaagctcaggctcgcctgcgaggagtggggcttcttccaggttgtgaaccatggcatcgcgcacgagctgctggacgagatggagaggctggcgagggagttcttcatgctgccgctggaggagaaggagaagtaccctctcgcccggacctggtcatggggctcagcgcgcactcggacggcagcgccgtcaccgtgcttcagcaagacgtgggc

SEQ ID NO: 115863 - DNA, 1450 bp, Zea mays
  Clone ID: MRT4577_37149C.1
aaccaagataggccaggtcgtctcgttggttgttgcattggaggagcgagcaggtgccatggcagccgctgagatcaagataggccaggtcgacgacgtccaggagctgcaccggacgggcctgcagacggtgccggaccggtacatcagggacggcgacgaccggccggacggcgacaacgtctgcgctgtcgcgcacatcccggtgatcgacgtcgccgagctccagcgcgacgacgtcgggcttgacaagctcaggctcgcctgcgaggagtggggcttcttccaggtggacagccgggttgttgcttgattcatcgcgcgcgcggcgtcatgctgagatatatatatgtgtaggttgtgaaccatggcatcgcgcacgagctgctggacgagatggagaggctggcgagggagttcttcatgctcccgctggaggagaaggagaagtaccccatggcgccgggcgggatccaggggtacggccacgcgttcgtcttctccgaggaccagaagctggactggtgcaacatgctggcgctgggcgtggagccggcgtccatccggcagccgaggctgtggccgacggccccggccgggttcggggagaccctggagacctactccgcggaggtcggggagctctgccggaggctgctcgcgcgcatcgccgagacgctgggcctggcgccggccacgttcgccgacatgttcggcgaggcggtgcaggcggtgcggatgaacttctacccgccgtgcccgcgcccggacctggtcatggggctcagcgcgcactcggacggcagcgccgtaacggtgctccagcaggacgcgggctgcgccggcctgcaggtgcgcggcaagggcggcgcctgggtacccgtgcaccccgtcccgcacgccctcgtcgtcaacatcggcgacaccctagaggttctgacgaacggcaggtacaagagcgtggagcaccgtgcggtggccaacggcgagcaggaccggctgtcggtggtgacgttctacgcgccggcctacgacgtcgagctgggaccgctgccggagttcgtcaccgacgaggcgccgtgccggtaccggaggttcaaccacggcgagtacagccgccactacgtcaccagcaggctcgagggcaagaagacgctcgagttcgccaagattgatccgctggccggagagcacgacggcacagctcccgaggaaacctctacctagtactactgtctagctgcatagaatacggtttggtcgatgaagcacaagctgcctctctacctacctgggctttgcaaatttgcaaaaggaaactactgtgctaccgaagcatgcagtgccgtatcaatcacctttcttatctgaaaacaagacgtattgacgtattgtatacattatttgctgtgtgtgtagtgcatcaacctgtgcctcgttctctctcgtc

SEQ ID NO: 115864 - DNA, 1273 bp, Zea mays
  Clone ID: MRT4577_3714C.1
ctggccgggatgtcagagaattgaaacccacgagtgcgtcacgcggccgccacgactgcaaagagaaaggaaaggctctctcccagccccaaagaaaaaggcagcacaccaactcaccaagaaagtgtggagctgctcctgcctgcagcctcctgctcatcgaccctttcgccccacaagctcgattcctcgctcggccatggctgcacccgcggaggagacgcttgccgccgaggatacggcgtcgccaccgccgccggcgaggtctgcggggttctggttccttggcgaggataagtctgtccacaaggctctcggcgggggtaaaagaattctgcgttcctcaactgctgatgtacttttgtggaaagacaagaagacctctgctgcggtagttggtggtgcaactgtcctatgggttctgttcgaaattgtagaataccatctcctgaccctggtttctcatgtgctgatcgctgcactgaccatcttgttcctgtggtccaatgcgactgtctttatcaaaaagagtcctcctgatgttcctgaagtgcagatatctgaagacgttgctgtaaacattgcgctagcattgcgtgctgacatcaacaaggcacttgccctgcttcgggagattgctctgggccataacctgatgaagttcctaggcgtggtcgttgccctttggattctttcagagatcggggagctatgtgatctcctgagattgatgtacattgtggtcttgatcctccacacagtgccgatactgtaccacaagtatcaggaccaggtggacgatttcgccgcaaaggcacacagggagctctgcaagcagtacaaggtcctggacgccaaagttctgagcaagattccgagagctacaccaaaagataagaaacagaactagaacgtggaggatgacaagcgccttgttttcggcttgggcgacgagagtttgtagccaatggtctgatgtggttcgtgggctttgtgtaggtgcacagtttcacgtatatgttctggtcgtgtaatctatatgtttatataaacctgtaggggtgttgatgaccatcgaaagtgtcgtaaatattcagtagtatatgtagcttagggcttaacggttgtgtttataaggtcattgtcgttgtcgatgggaagtattatcatgttattttcaggactcaggagtataaaatgaaataaaatgtgaattcatctgaagctgaaaaaaaaaaaaaaaaaaaaaaaaaaaaaaaaaaaaaaaaaaaaa

SEQ ID NO: 115865 - DNA, 4752 bp, Zea mays
  Clone ID: MRT4577_37150C.1
atggcggaagagcagcatccgggcctgtcccgtcaccttcctcgtcgcgagagaaggaggcggggcaaccatggccaaacaggaggcgacacctcgttggctgtcgaccgagtcgacgacgccggcgccccagcgggggacacgtcgggcgttgacctcgcgtctgagacgaagacgagcatcatttccccgcaacacgccaaccccaagcggatggatgacgccagcacgctcgcgaaggacttgctggacgttagcctcgtacctgagataacggtgcagtccatccccgacgcgacttcgtcaccatccgtcgatcaagaggtaccgtccgttttccaccctgtgccttttagatttagcttcaacccaccaagcgatcccgcttcggtggacgctttcataaaggcatatcctaaccttccggggtaccatatgtggtcaaactgggaccgactgacgaccgtctcgacctacgggcccccggtttccgaggaagatgacgagcccgactctggttgggatttctctgggctcgataaccccagtgccatgcgagacttcatgaccgcatgtgactactgcctctccgattactctgagggcggccacaaccttgacgacgaggactgtggcccaagtagcgaatgtttccacgtcgatctagggggtctcgacgaaggcaaccaccttggtcgagcgctagctgaagaagcgcgtcatctggcccaggacatccagcatcgcgtcgctaatgatgccagggcaaggctgtccccggcttccagtggggtcggccaaaacctggcagcagcagcaatactactccgagcgatgccagagccatccaccatcgaggggcggcatatccagggagagctcaagaatctcctagaggatgccatggtccgacgggccgaaagctctgcctcccgaaggcaggggtaccccagagcatcgcgtcgcgacttcccgattcatgcgggaggcctcggtccacaccgggtgcacgcgggacgcaacgcctgcagccccgggtcgcctcggcaacgagcaccaccaccgcgactgtcgagcccacctcgacgagaaggtgtgccgaggctaccaccccagcagaccgagctgcccaacatcaccgactcggatgtcatcgacgcgttcatcaccggcaccacttgccgcgacctggtgagcaagctgggtcgcaagactcccatcagggcgagcgagctgaaggacatcgccaccaagttcgcctctggtcaggaggcggttgaggccatcttccggaaggacaagcagcctcagggacgccagcaggaaggcatccccgaggcgtccgctcagcgcggcacgaagaagaagggcaagaagaagtcgcaagcgaaacacgacgccaccgatgcagatcttgtcgccgccgccgggcacaagaaccctcggaagcctcccggaggggccaacctgttcgacaagatgctcaaggagtcgtgcccctatcatcagggtcccgtcaagcacacccttgaggagtgtgtcatgcttcggcgccacttccataaggtcgggcccccggcggaaggtggcaaaggccatgacaacgacaagaaggagggccacaaagcagaggagttctcggaggtccacgactgcttcatgatctatggtgggcaagtggcaaacgcctcgactcggcaccgcaagcaggagcaccgggaggtctgctcggtgaaggtggcagcgccagtctacctagactggtccgacaagcccatcaccttcgaccaaggcgaccaccccgaccgcgtgccgagcccagggaagtacccgctcgttgtcgatcccgtcatcggcaacgtcaggcttaccaaggtcctcatggatggaggcagcagcctcaacatcatctacgccgagaccctcgggctcttgcagatcgatctgtccacgatccgggctgtgctggggagaccgtgctacgccaagttcatggccgtccctaactacacctaccttaagctcaagatgtcgggccccaacggggtcatcaccgtcggatccacgtaccgacacgtgtatgaatgtgacgtggagtgcgtggagtacactgaggccctcgctgaatccgaggccctcatcgccgacctggagagcctgtccaaggaggtgccagatgcgaagcgccatgccggcaacttcgatccagcagaggcggaagcagtgctcgtcgactttctctgcgcgaacgccgaggtttttgcatggagtccctcggacatgcctagcataccgagggatgtcgccgagcactcgctggatatccgagctggagcccgacccgtgaagcagcctctacaccgattcgacgaagaaaagtgcagagccataggcgaggagatccacaagctgatggctgcagggttcatcaaagaggtattccatcccgaatggctctccaaccctgtgcttgtgaaaaagaaaggtgggaaatggaggatgtgtgtagactacacgggtctaaacaaagcatgtccgaaggttccctaccctctgcctcgcatcgatcaaatcgtggattccactgctgggtgcgaaaccctgtcattcctcgatgcctactcagggtatcaccaaatcaggatgaaagagtccgaccaactcgcgacctctttcatcacaccctttggcatgtactgctatattactatgccatttggtttgaggaatgcaggcacgacataccaaaggtgcatgaaccacgtgttcggagagcacattagccgaacggtcgaggcttacgtcgatgacatcgtagtcaagacgaggaaagcctccaacctcctcactgaccttgaaacgacattcaagtgtctgagagcgaagggcgtgaaactcaatcccgagaagtgtatcttcggagtcccccgaggcatgctcctggggttcattgtctccgagcggggcatcgaggccaacccggagaaaatcgcggccatcaccaacatggggcctatcaaggacttgagaggagtacagagggtcatgggatgccttacggctctgagccgcttcatctcgcgcctcagcgaaagaggcctacccctgtatcgcctcttaaggaagaccgagcgcttcacttggacccccgaggccgaggaagccctcgggaacataaaggtgctccttacaagcgcgcccatcttggtgccccccgctgccggagaaaccctcttgatctacgtagccgcaaccactcaggtggtcagcgtcgtgatcgtagtcgagagacgagaacaagggcatgcattgcccatccagaggccggtctacttcatcagtgaagtactgtccgagaccaaaatccgctacacgcaaattcagaagctactgtacatgtacttcgagtctcatccggtgactgtggtgtcatccttccccctgggggagatcatccaatgccgagaggcctcgggtaggattgcaaagtgggtagtggagatcatgggcgagacaatctcgttcgcccctcggaaggccatcaagtcccaagtcttggcggactttgtggttgaatgggtcgacacccagcttccagtagctccgatccaaccggaactctggaccatgttttttgacgggtcgctgatgaaaacaggagcgagcacgggcctgctcttcatctcacccctcgtgaagcacctccgctacgtgctacgcctccatttcccggagtcaaacaacgtggccgagtatgaggctctggttaacgggttgcgcatagccatcgagctaggggttcggcgcctcgacgctcgtggcgactcacaactcgtcatcgaccaagtcatgaagaactcccattgtcgtgacccaaagatggaagcctactgcgacgaggttcgatgcctggaagacaagttctacgggctcgagctcaaccacgtcgctagacgatacaacgagactgcggacgagttggctaaaatagcctcggggcggacaacggttcccccggacgtcttctctcgagacctacatcaaccctccgtcaagaccgacgacacgcccgagcccgagggtgaggcactaccccgtacctgcaatatctccaccgaggagagctacccctcgacagagccgaagctcggcgactggcgcggcgcgccaagtcgttcgtcttgctgggtgacaaaaaggagctctaccaccgcagcccctcaggcatcctccagcgatgcatatccatcgccgaagaaggcacccaggggctacacgcacctgctggtcgctatcgacaaattctccaagtggattgaggtccgacccctaaacagcatcaggtccgagcaggcggtggcgttcttcaccaacatcatccatcgctttggggtcccgaactccatcatcaccgacaacggcacccagttcactggcaagaagttcctggacttctgcgaggaccaccacatccgggtggactgggccgccgtagctcaccccatgacgaatgggcaggtagagcgtgccaacggcatgattctacagggacttaagccgagaatctacaatgacctcaacaagttcggcaagcgatggatgaaggaactcccctcggtggtctggagtcagaggaccacgacaagccaagtcacgggcttcacgccgttttttctagtctatggggccgaggctatcttgcccacagacttagaatacggctccccgaggacaagggcatacaacgactga

SEQ ID NO: 115866 - DNA, 2529 bp, Zea mays
  Clone ID: MRT4577_37151C.1
atgggtagtctccagcaacctttccagcccaggacagtgctccgtttcgggagtcttgagttcatgtccctcgacggcagctacgacatgatacttcttcccccgccgcgcgacagcgacaatggcggccgacaacccgcccggcggcggcggaatcgaaaacgtcttccccacgtggcggaagaacaacattcgggcttgtcccgtcccctcccccgccgacggaggaggaggcggggcaaccaaggccaagcaggaggcggcacctcgtcggctgtcaagcgagtcgacggcgccggcgccccaacggggggcacgtcgggcatcgacctcgcgtctgagacgaagacgagcgtcgtttccccgcaacacgcccactccaagcggacggacgacgccagcacgctcacaaaggacttgctgggcgtcaccctcgtacctgagacgacggtgcagtctgcccctgacgtgactccgtcactgcccgtcgaccaagaggtaccgaccgattcccatctcgagcctgttggattcagcctcgacccaccaagcgacttcgcttcggtggacgctttcatagaggcgagtccaaaccctccggggtacggtatgtggtcaccctgggaccggctgacagccgtctcgacctacgggccctcgggttctgaggaagatgacgagcccgacttttgttgggatttctctggacttggtaaccctagtgccatgcgggacttcatgaccgcatgcgactactgcctttccgattgttccgacggtagccgcagcttcggcgatgaggactgcgacccaagtcgtgaatgtttccacgtcgatctagggggtcccggcgaaggcaaccatcttggtataccggaaaacggtgatccccctaggcctgcgcctcgcgttgacatccttcgggagctagttgtggtcctagtccccgcggggggtcaggacgcacagctcgagcaaatccgctttcagccgggccatacgacgggcgccgttcccgacccggttccgaacccgactactatcacaaagtactcgggggagacgaggccggaactgtggctcgtggactaccggctggcctgccacctgggtggaacggacgatgacaacctcatcatccgcaacctccccctgttcctctccgacaccgctcgagcctggctggagcatttgcctccggggcagatctccaactgggacgacctggtccaagccttcgccggcaatttccagggcacgtaccagccgggagagtctctccgggactacatccggcgattctcgaagcagcgcaccgagctgcccaacgtcaccgactcggatgtcatcggtgcgttcctcgccggcaccacctggcacgacctagtgagcaagctgggtcgcaagaccccgactagggcgagcgagctgatggacatcgccaccaagttcgcctctggccaggaggcgattgaggtcatcttccggaaggacaagcagccccagggccgccagccggaagatgtccccgaggcgtccactcagcgcggcaccaagaagaaaggcaagaagaagtcgcaagcgaaacgcgacgccgctgacgcggaccttgtcgccaccgatgaatacaagaaccctcggaaacctcccggaggtgccaatctcttcgacaagatgctcaaggagccgtgcccctatcatcaggggcccgtcaagcacacccttgaggagtgcgccatgcttcggcgccactttcacaaggccgggccacctgcggagggtggcagggcccgcgacgacgataagaaggaggatcacaaggcaggagagttccccgaggtccacgactgcttcatgatctacggtgggcaagtggcgaacgcctcggctcggctctgcaagcaagagcgtcgggaggtctgctcggtaaaggtggcggcgctagtctacctagactggtccgacaagcccatcaccttcgaccagggcgaccaccccgaccgcgtgtcaagcccggggaaatacccgctcgttgtcgaccccgtcatcggcaacgtcaggctcaccaaggtcctcatggacggaggcagcagcctcaacatcatctacgccgagaccctcgggctcctgcggatcgacctatcctcggtccgggcaggcgcgacgcctttccacgggatcatccccaggaaacgctgttgggggaggccatgctacgccaagttcatggccgtccccaactacacctacctcaagctcaagatgatgggccccaatggggtcatcaccgtcggccccacataccgacacgcgtacgaatgcgacgtggagtgcgtggagtacgtcgaggccctcgccgaatccgaggccctcatcgccgacctggagagcctctccaaggaggagccagacgtgaagcgccatgccggcaactttgagccagcggagacggttaagtccgtccctctggaccccagcaacgacacctccaagcggatccggatcggctccgagctcgatcccaaatag

SEQ ID NO: 115867 - DNA, 3033 bp, Zea mays
  Clone ID: MRT4577_37152C.1
atgtccctcgacggcagctacgacatgatactccttcctccgccgtgcgacagcgacaatggcggccgtcagcccgcccgccggcggcggaatcaacgacattcgggtttgtcccatcacctcccccgccgacggaggaggaggcggggcaaccatggccaagcaggaggcggcacctcgtcggctgtcgagcaagtcgacgacgccggcgccccagcgggggacacgtcgggcttcgaccttgcgtctgagacgaagacgagcaccgtttccccgcaacacgccaaccccaagcagacgaacgacgccagcacgttcgcgaaggacttgctgggcgtcgccctcgtacctgagacaacggtgcagtccgcccctgacgcgacttcatcaccgcccgtcgaccaagaggatagactgacggccgtctcgacctacggaccctcgggttccgaggaagatgacgagcccgacttttgttgggatttctccgggctcggtaaccccagtgccatgcaggacttcatgaccgcatgcgactactgcctctccgattgttctgatggtagccgcagcttcagcgacgaggactgcggcccaagtcgtgaatgtttccacgtcgatctaggtggtcccggcgaaggcaaccatcttggtataccggaaaacggcgatccccctaggcctgtgcctcgcgttgacatccttcgggagctagctgtggtctcagtccctgtggggggtcaggacgcacagctcgagcaaatccacgagatgcaggccaggctcgacgagggagcaggaacacttgagcagttccggcggaacatcgggcaggaatgggcagaccaagctccggccggagaagcgcgtcatctaccccagggcatccagcaccgcattgccgacgacgccaggacaaggccgccaccggcttccagtggggtcggccagaacctggctgcagcagcaatactactccgcgcgatgcaggaaccatcgaccaccgaagggcgacgtatccagggagagctcaagaatctcctggaggatgccacggtccgacgggccgaaagctctacctcccgaaggcaggggtacccctcggagcatcgcgccgcgacttccctatttatgcgggaagcctcggtccacaccgggcgcacgcgcaacacggcgcctgtggccccgggtcgcctcggcaacgagcaccaccaccgcaaccgtcgagcccacctcgacgagagggtgcgccgaggctaccaccccaggcgtgggggacgctacgacagcggggaggatcggagtccctcgcctgaaccacccggtccgcaggctttcagccgggccatacgacgggcgccgttcccgacccggttccgaaccccgactactatcacaaagtactcgggggagacgaggccggaactgtggctcgcggactaccggctggcctgccaactaggtggaacgaacgatgacaacctcatcatccgcaacctccccctgttcctctccgacaccgctcgagcctggctagagcacctgcctccagggcagatctccaactgggacgacccggtccaagccttcgccggcaacttccagggcacatacatgcgccctgggaactcctgggatctccgaagatgccgccagcagccgggagagtctctccgggactacatccggcgattctcgaagcagcgcaccgagctgcccaacgtcaccgactcggatgtcatcggtgcgttcctcgccggcaccacctaccacgacctggtgagcaagctgggtcgcaagacccccaccagggcgagtgagctgatggacatcgccaccaagttcgcctctggccaagaggcggttgaggccatcttccggaaggacaagcagccccagggccgccagccggaagatgtccccgaggcgtccactcagcgcgacaccaagaagaaaggcaagaagaagtcgcaagcaaaacgcgacgccgccgacgcggaccttgtcgccgccgctgagtacaagaaccctcggaaacctcatggaggtgccaatctcttcgacaagatgctcaaggagccgtgtccctatcatcaggggcccgtcaagcacaccctcgaggaatgcgtcatgcttcggtgccactttcacaaggtcgagccacctgcggaaggtggcagggcccacaacaacgacaagagggaggatcacaaggcagaggagttccccgaggtccacgactgcttcatgatctacggtgggccagtggcgaacgcctcggctcggcaccgcaagcaagagcgtcgggaggtctgctcggtaaaggtggcggcgccagtctacctagactggtccgacaagcccatcacctttgaccagggcgaccaccccaaccgcgtgccgagcctggggaaatatccgctcgttgtcgaccccgtcatcggcaacgtcaggctcaccaaggtcctcatggacggaggcagcagcctcaacatcatctacgccgagaccatcgggctcctgcggatcgatctatcctcgctccgggcgggcgcgacgccttttcacgggatcatccccgggaaacgcgtccagcccctcggacaactcgatctgtccgtctgcttcgggactccctccaacttccgaagggaaaccctcacgttcgaggtggtcgggttccgaggaacctaccacgtagtgctggggaggccatgctacgccaagttcatggtcgtccccaactacacctaccttaagctcaagatgtcgggccccaacggggtcatcaccgtcagccccacgtaccgacacacgtacgaatgcgacgtggattgcgtggagtacgccgaggccctcgccgaatccgaggccctcatcgccgacctggagagcctctccaaggaggcgccagacgtgaagcgccatgccgacaatttcgagccagcggagacggtcaaatccgtccctctcgaccccagcaacgacgcctccaagcagatccggatcggctccgagctcgaccccaaatag

SEQ ID NO: 115868 - DNA, 1309 bp, Zea mays
  Clone ID: MRT4577_37153C.1
agccggttccacgagctgtcgcacttcgacgacaccaagcgcagctgccgcctgcgcctggcggggcacaacgagcggcgccggaggaacccggcggaggcgcaggaccagcacggcgggcggggcgccccggggccccgccgcccggcgcgccgataaaaacctactacgtcagcatgctctctctcttctgtcatgcaggacgcacgcacctagcgtcgtcaccgatccatagtccgatatgtgtctcaagtgttgtgtgtgcgcgctctcgccgcctacccctgtcctgcagtgttgcgtagtatatggttctacgacctacacgtactgctgctgctgcgtgctaactttagtttgatggcagtccacagctagctagtactgtgcttatctctatgtgcaccgaccggaaccggaggcgtgcgtacctacgctgatctgccacgaagcctactagtagttaaatgcaacgtaacctgcaggcaattaagcagggcgctgctatatatagcgtaattaattgtgcgtatgggtatggtggttcgattatcggatgtgtaatccctgtacgtggccgggcccgtgccaaacgtacggtgacctgtgcaggctctgtgtgtcgatgatgttgtctgccgcctgcgcctggcggggcacaacgagcggcgccggaggaaccccgcggaggcgcaggaccagcacggcgggcggggcgacccggggagccaccacctccagatcagataaaaacctactacgtcagcatgctctctctcttctgtcatgcaggacgcacgcacctagcgtcgtcaccgatccatagtccgatatgtgtctcaagtgttgtgtgtgcgcgctctcgccgcctacccctgtcctgcagtgttgcgtagtatatggttctacgacctacacgtactgctgctactactgcgtgctaactttaatctgatggcagtccacagctagctagcacatcacctcctgtaagtaatgtgcttatctatatgtgcaccgaccggaaccggaggcgtgcgtacgctgatctgccacgaagcctactagtagttaaatgtaacgtaacctgcaggcaattaagcagggcgctgctatatatagcgtaattaattgtgcgtatgggtatggtggttcgattatcggatgtgtaatccctgtacgtggccgggcccgtgccaaacgtacggtgacctgtgcaggctctgtgtgtcgatgatgttgtactctgataatgatataatccattgtggtaatgtatgctatttaataaaaaaaaaaaaaaaaaaaa

SEQ ID NO: 115869 - DNA, 410 bp, Zea mays
  Clone ID: MRT4577_37154C.1
agaatctggaaatgtaacacacccttggtggccggccacatacataattcagaaaacgttactattgaattacaggctggcagatacctaaagcaggcaccacctatgttgagtacaacgaaggaggctgctggggtgggcaaccccgatggtcaaagggcggcaggaggccgatcggtcatgaggaagcaagggggaccacaggactgattggttaaaggcagcaaatggtggtggggcaagaagaaaaacggttgtgctaaaggcagcaacggttaatggtggcaataatgagatgctgctaattagcagctaggttgctaaacggcaataggatttaatgatagaaataatcgtcggtgataataggcagccaactaggctaaatgagaaggaaatagttgttgctg

SEQ ID NO: 115870 - DNA, 440 bp, Zea mays
  unsure (1)..(440): unsure at all n locations
  Clone ID: MRT4577_37155C.1
atttctangattcaaaaaaaaaaaaaaaaaaaaaaaaaaaaaaaaaaaaaaaaaaaaaaaaaaaaaaaaaaaaataaaaaaaaaacagaaaaaaaaaataaaaggggttgtcctttgcccgggctgcccccctccaggggggccattttgggggttttccttcacccctgagggccgccctgtgcttgcttttttgggggcccattttggccctttggtggggccgttttacaacttgggtggcccgcggttttaccccggcttgattgggtaaaaccctggtcgtccccaccttaattgcttggcaggcaatcccctttttaccggtgggctttttaacgagggggcccccccggttggcccttgcacccagtttgtaaccctgtttggggagtggacccccccttgtgtgcccctttaatccccgggggggtgggggt

SEQ ID NO: 115871 - DNA, 389 bp, Zea mays
  unsure (1)..(389): unsure at all n locations
  Clone ID: MRT4577_37156C.1
ctggccatgtcgttctataagaaactagtgatcgttggcttcgccttaaccttgctccttgtgtcattccgaatggatgcgactgcaaagctttgcagtacgacaatggagagactcatttgcggcggagcaagtcgaggcgacgtgaacagggcatgcgatgaaacgtgcagatccaagggctacacgggtggcggcttttgcaacatgaaaatacaacgctgtgtttgtcgcaagccgtgtgtccaggaggagcaaacagaggcgcgcgccagagacgaagcatncggcgctggagatatgatgagccggacgatggcagattgagtgatgcgcatgacagatgtttagccaccatatatatatatatatatatatatataaggaat

SEQ ID NO: 115872 - DNA, 3049 bp, Zea mays
  Clone ID: MRT4577_37157C.1
aaaggagggcaacaaggcagaggagttccccgaggtccacgactgtttcatgatctacggtgggcaagtggcgaacacctcggctcggcaccacaagcaggagcgccgggaggtctgctcggtgaaggtggcagcgccagtctacctaaactggtccgacaagcccatcaccttcgaccaaggcgaccaccccgaccgcgtgccgagcccaggaaagtacccgctcgttgtcgaccccgtcatcggcaacgtcaggctcactaaggtcctcatggacggaggcggcagcctcaacatcatctacgccaagaccctcgggctcttgcagatcgatctgtccacgatccgggaaaccctcacgttcgaggtggtcgggtttcgaggaaccaaccacgcggtgctggggagaccgtgctacgccaagtttatggccgtccccaactacacctacctcaagctcaagatgtcgggccccaacggggtcatcaccgtcggatccacataccgacacgcgtacgaatgcaacgtggagtgtgtggagtacgctgaggccctcgccgagtccgaggccctcatcgccaacctggagtgcctctccaaggaggtgccagatgcgaagcgccacgccggcaacttcgagccagcagaggcggttaagtccgtccctctcgaccccagcaacgacgcttccaagcaagtttttgcgtggagtccctcaggcatgcctggcataccgagggatgtcgccgagcactcgctgtatatccgagctggagcccgacccgtgaagcagcctctgcgctgtttcgacgaagaaaagcgcagagtcataggcgaggagatccacaagctgatggctgcggggttcatcaaagaggtattccatcctaaatggttagccaaccctgtgcttgtgaaaaagaaaggtgggaaatggaagatgtgtgtagactacactggtctaaacaaagcatgtccgaaggttccctaccctctgcctcgcatcgatcaaatcgtggattccactgctgggtgcgaaactctgtcattcctcgacgcctactcagggtatcaccaaatcaagatgaaagagtccgaccagctcgcgacttctttcatcacaccttttggcatgtactgctatattactatgccatttggcttgaggaatgcaggtgcgacataccaaaggtgcatgaaccacgtgttcggagagcacatcagccgaacggtcgaggcttatgtcgatgacatcgtagtcaagacgaggaaagcctccgacctcccctctgaccttgaaacaacattcaagtgtctgagggcgaagggcgtgaaactcaaccccgagaaatgtgtcttcggagtcccccgaggcatgctcctggggttcatcatctccgagcggggcatcgaggccaacccggagaaaattgcggccatcaccaacatggggcctattaaagacttgaaaggagtacaaagggtcatgggatgccttgcggctctgagccgcttcatctcacgcctcggcgaaaaaggcctacccttgtaccgcctcttaaggaagaccgagcgcttcacttggacccccgaggccgaggaagccctcggaaaattaaaggcgctcctttcaaacgcgcccatcttggtgcccctcgctgcaagagaagccctcttgatctacgtagccgcaaccactcaggtggtcagcgccacgatactagtcgagagacgagaagaagggcatgcactgctcgtccagaggccggtctacttcatcagcgaagtgctatccgagaccaagatccaaaacccgcaaattcagaagctactgtacgcatctcatccggtgactgtggtgtcatccttccccctgggggagatcatccagtgccgagaggcctcgggtaggatagcaaagtgggcggtggagatcatggacgagacaatctcgctcgctcctcggaaggccatcaagtcccaagtcttggcagacttcgtggctgaatgggtcgacacccagcaaccaacagctccgatccaaccggaactctggaccatgtacttcgatgggtcgctgatgaaaacaggagcaggtgcgggtctgctcttcatctcacccctcgggaagcacctccgctacatgctgcgcctccatttcccggcgtcaaacaacatggccgagtacgaggctctggttaacgggttgcgcatcgccatcgagctaggggttcggtgccttgacgctcgtggcgactcgcagcttgtcattgaccaggtcatgaagaactcccactggcgcgaccggaagatggaggcctactgcgaagaagttcgacgcctggaagacaagttctatgggctggagctcaaccacgtcgctcgacggattgtacgctcctgccaagggtgtcaattctacgcaagacagatgcacctgcccactcaggccctgcagacaatacccatcacctggccattcgctgtgtggggtctggacctcgtcggtcccctgcagaaggcacctgggcgattctcgcacctgctggtcgccatcgacaaattctccaagtggatcgaggtccgacccctaaccagcatcaggtccgagcaggtagtggtgttcttcactaacatcatccatcgcttcggggtcccaaactccatcatcaccgacaatggcacgcggttcactgggaagaagttcctgggcatctgcgaggaccaccacatccgtgtggactgggccgccgtagctcaccccatgatgaatgggcaggtggagcgtgccaacggtatgattctgcagggactgaaaccgaggatctacaacaacctcaacaagtttggcaagcggtggacgaaagagctaccctcggtggtctggagtctgaggacgacgccgagccgggccacgggtttctcgccgttctttctagtctatggggccgaggctatcttacccacaaacttagaatacggttccccgaggacaaaggcgtacgacggccgaagcaaccagaccagccgagaagactcacttgactag

SEQ ID NO: 115873 - DNA, 2898 bp, Zea mays
  Clone ID: MRT4577_37158C.1
atgggtagtctccagcaacctctccaacccgggacggtgctccgtttcgggagtcttgagttcatgtacctcgacggcagctacgacatgatactccttccaccgccgtgcgacagcgacaatggcggacgacagcccgcccgccggcggcggaatcgacgacgtcttccccgcgtggtggaagaacaacattcgagctcaccccgtcctctcccccgccgacggagggggaggcggggcaaccaaggccaagcaggaggcagcgcctcgtcggctgtcgagcgagtcgacggcgccagcgccccaacggggggcgcgtcaggcatcgacctcgcgtttgagatgaggacgagcgccgtctccccgcaacgcaccgattccgagcaaacggacgacgccagcacgctcgcgaaaggcttgctggacgtcaccctcgtacctgagacgacggtgcggtcagtccccgacgtgacttcatcactgcccgtcgaccaagaggtaccgaccgattcccatctcacgccccctggattcagccttgacccgccaagcgacttcgctttggcgggcgctctcatagaggcaagtccaaaccctctagggtttcgtatgcggtcaccttgggaccggctgacggacgtctcgacctacgggccctctgggtccgaggaagacgacgtgtccgacttctgttgggatttctctggacttggcaaccccagtgccatgcgggacttcatgaccgcatgcgactactgcctttccgactgttccgacggtagccgcagcctcggcgacgaggactgcggcccaagccgcgaatgtttccacgtcgatctagggggtccctccgaaggcaaccatctcggcatgccggaggacggtgatctccctagtcggctcgacgagggagcaggagcgcttgagccggccgctgggacgtcgggcagggatgggcgggccaacctccggccggagaaatgcgtcatctacccgagggattccagcaccgcatcgccaacgatgtcagggtcaggccgccacccgcatccagtggggtcggccagaacctggctgcagcaacaatgcttctccgtgcgatgccagagccatcaaccaccgaggggcggcgaatccagggagagctcaagaatctcctggaaggcgccacggcccgacgggccgagagctccgcctcccgaaggcaggggcacccctcggaacatcatgccacgacttcccgattcatgcgggaagcctcggtctacaccgggcgcacgtgcaacacagcgcctgcggccccgggacgcctcggcaacgagcaccatcaccgcgaccgtcaggctcacctcgacgaaagggtgtgccgaggctaccaccccaggcacggaggacgctacgacaacggggaggatcggagtccctcgcccgaaccacccgatctccaactgggacgacctggtccaggccttcgccggcaatttccagggcacgtacgtgcgccctgggaattcctgggaccttcgaagctgccgacagcagccaggagagtctctccgggactacatccggcgattctcgaagcagcgcaccgagctgcccagcatcaccgactcggatgtcatcggcgcgttcctcgtcggcaccacttgccgcgacctggtgagcaagctaggtcgcaagacccccaccagggcgagcgagctgatggacatcaccaccaagttcgcctctggccaggaggcggtcgaggctatcttccggaaggacaagcagccccagggccaccccccggaagatgcccccgaggcatcaactcagtgtggcgccaagaagaagggcaagaagaagtcgcaagcgaaacgcgacgccgctgacgcggaccttgtcgccgccgccgagtacaagaaccctcggaaaccccccggaggtgccaacctcttcgacaagatgctcaaggagtcgtgcccctatcaccaggggcccgtcaagcacacccttgaggagtgtgtcatgcttcggcgccacttccacagggccgggccacccgtggagggtggcagggctcgcgacgatgacaagaaggaagatcaccaggcaggagagttccccgaggtccgcgactgcttcatgatctacggtgggcaagcggcgaacgcctcggctcggcaccgcaagcaagagcgtcgggaggtctgttcggtaaaggtggcggcgccagtctacctagactggttcgacaagcccatcaccttcgaccaagccgaccaccccgaccgcgtgccgagcccggggaaatacccgctcgttgttgaccccgtcatcggcgacgtcaggctcaccaaggtcctcatggatggaggcagcggcctcaacatcatctacgccgagaccctcgggctcctgcgtgttgatctgtcctcggtccgagcaggcgttgcgcctttccatgggatcatccctgggaaacgcgtccagcctctcggacaactcgatcttcccgtctgctttgggacaccctccaacttccgaagggagaccctcacgttcgaggtggtcgggttccgaggaacctaccacgcagtactggggaggccatgctacgcgaagttcatggccgttcccaactacacctacctcaagctcaagatgccgggccccaacggggtcatcaccgtcggccccacgtaccgacacgcgttcgaatgcgacgtggagtgcgtggagtacgccgaggccctcatcgccgacctggagagcctatctaaggaggtgccagacgtgaagcaccacgccggcaacttcgagccagcggagacggttaagtccgtccccatcgaccccagcagcgacgcctccaagcagatccggatcggctccaagctcgatcccgaatag

SEQ ID NO: 115874 - DNA, 1899 bp, Zea mays
  Clone ID: MRT4577_37159C.1
atgccgttcggcttgaggaatgcgggcgcgacgtaccagcggtgcatgaaccatgtgttcggcaaacacattggccggacggtcgaggcctacgtcgatgacatcgtagtcaagacgaggaaagcttccgacctcctttccgaccttgaagtgacattccggtgtctcaaggcgaaaggcgtgaagctcaatcccgaaaagtgtgtcttcgaggtgccccgaggcatgctcttggggttcatcgtctccaagtggggcgtcgaagccaacctggagaagatcgcggccatcatcagcatggggcccattaaagacttgaaaagcgtacagagagtcttgggatgtcttgcggctctgagccgcttcatctcacgcctcggcgaaagaggcctgcctctgtaccgcctcttaaggaaggccgagtgcttcacttggacccctggggccgaggaagccctcgggaacctgaaggcgctcctcacgaacgcgcccgtcttgatcgacgacacgcccgagcccgaggtgccctcggcccagcccgaggtacccttggctcagtccgaggtacccacggttcagcccgaggtaccctcggcccccgagggtgaggcactgtgcgtcgaggaggagcgaagcggggtcacgcctaatcgaaactggcagaccccatacctgcaatatctccaccgaggagagctacccctcgaccgagccaaagctcggcggttggcgtggcgcgccaagtcgttcgtcttgctgggagatgggaaggagctccaccaccgcagcccctcaggcatcctccagcggtgcatttccatcgctgaaggccaggagctcctacgagagatacactcgggggcttgcggccatcacgcagcacctcgagccctcgtcggaaacgccttccgacaaggtttctactggccgacggcggtggccgatgccactagaattgtccgcacctgcgaagggtgtcagttctacgcgaggcagacccgcctgcccgctcaggctctgcagacgatacccatcacctggccttttgctgtgtggggtctggacctcgtcggccccttgcagaaggcacccgggggctacacgcacctgttggtcgccatcgacaaattctccaagtggatcgaggtccgacccctaaacagcatcaggtccgaacaggcggtggcgttcttcaccaacatcatccatcgctttggggtcccgaactccatcatcaccgacaacggcacccagttcaccggcagaaagttcctggacctctgcgaggatcaccacatccgggtggactgggcagccgtggctcaccccatgacgaatgggcaagtagagcgtgccaacagcatgattctacaagggctcaagcctcggatctacaacgacctcaacaagttcggcaagcgatggatgaaggaactcccctcggtggtctggagcctgaggacaacgccgagccgagccacgggcttcacgccgttctttctagtatatggggccaaggccatcttgcccacagacttagaatacggttccccgaggacgagggcctacgctgaccaaagcaaccaagctagtcgagaagactcgctggaccagctggaagaggctcgggacatggccttactacactcggcgcggtaccagcagtccctacgacgctaccacgcccgaggggtccagttccgagacctccaggtgggcgacctggtgcttcggctgcgacaggacgcccgagggcggcacaagctcacacctccctgggaaggatcgttcgtcatcaccaaagttctgaagcccagaacgtacaagctggccaacagtcaaggcgaggtctacagcaacgcttggaacatccaacagctacgtcgcttctacccttaa

SEQ ID NO: 115875 - DNA, 269 bp, Zea mays
  unsure (1)..(269): unsure at all n locations
  Clone ID: MRT4577_3715C.1
gatcgtgcaggggccggacttcccgaccgaagccgagatcatcacgccacgcgacgagatccgcaanatctaccagaacggccgtggttcgatccgccagcgtgcggtgtggaaaaaagaggacggcgaagtggtgatcaccgcgctgcctcaccaggtgtcgggcgcgcgcgtgctggagcagatcgccagccagatgcgnaataanaanctgccgatgnntgangatngtngctatgaancgtatnngtaaanccgnggcggctggg

SEQ ID NO: 115876 - DNA, 303 bp, Zea mays
  Clone ID: MRT4577_37160C.1
gtcatgatcatctcctcgccttcaacttttttttacagccaccgacagaaaactgacggggaacaaagtcgtgttgttgtcatcccgtcaaattgtgctaacacggacgctagcttgtgcccacatcaccacacaggcaaacaaaaagctagtcaccatcgtccacatatatggtaagagtgtgcaaaacaactactactaaactctggtccaccgcaggaagacaatccaccttgggcactgcaactgagtgcagcaacctctgacagtgctttatccttgcactgtaccgaatggtccatt

SEQ ID NO: 115877 - DNA, 6397 bp, Zea mays
  Clone ID: MRT4577_37161C.1
atgggcagtctccagcaacctctccagcccgggacggtgcttcgtttcgggactcttgagttcatgtccttcgacggcagctatgacatgatacttcttccaccgccgcgcgacaacgacaatggcggccgacaacccgctcgccggcggcggaatcgacgacatcttccccgcgtggtggaagagcaacattcgagctcgccccgttctctcccccgccaacggaggaggaggcggggccatcaaggccaagcgggaggacacgcttcgttggccgtcgagcgaatcgacgcccccgacgccccgacggaaggcacgccggacgtcgacctcgcgttcaagacgaaggcaagcgccgtccccccgcgacacgctgaccccgagcaagaagacgacgtcggcgcgctcgcggaaagcctgcaggacgtcgccctcgtacctgagatgacggtgcaaccagtccccgacgtgaccacgttgctcctcgtcgaccaaaaggcgaatgcaaccccactggggtttcgtatgcggtcgccttgggaccggctgacggacgtctcaacctacgggccctctgggtccgaggaagatgacgaccccagcgtctgttgggatttctccggacttggcaaccccagtgccatgcgggacttcatgaccgcatgtgactactgcctatccgacggttccgacggaagccgcagccttggcgacgagagctgcggcccaagccgcgaatgtttccacatcgagctaggggatccctccgagggcaaccgtctcggcatgccggaggacgatgatcttcctaggccggtgcctcgcgccgacatcccacgggagctagctgtggtccccgctccggcggggggttacgacccacaactcgagcaagtccgtgaggcgcaggccaggctcgacgagggaacaggagcgcttgtgccgatccgtcgggacgtcgggcaggtatgggcggaccaacccctggtcggagaaatacgtcacctgccccaaggtctccagcaccgcgtcgccaacgatgtcagggtcaggctgccgcccgcatccagcggggttggtcagaacctggcagccgcagcgatgctcctccgcgcgatgccggagccatcaaccaccaagggtcggcgaatccagggagagctcaaggatctcctggaaggcgctgcggcccgacgggccgagagcactgcctcccgaaggcaaggatatccctcggaacctcatgccgcgacttcccgattcatgcgggaagcctcgatctacaccgggcgcacgcgcaacaccgcgcctgcggccccgggccacctcggcaacgagcaccatcgacgcgaccgtcgagcccacctcgacgaaagggtgcgccgaggctaccaccccaggcgtggggggcgctacgacagcggggaggatcggagtccctcgcctaaaccacccgctgggtggaacggacgatgacaacctcatcatccgcaacctccccctgttcctctccgacaccgctcgagccaggctggagcatctgcctccggggcagatctccaactgggacgacctggtccaagccttcgccggcaacttccaaggcatgtacgtgcgccctgggaactcctgggatctccgaagctgccgccaacacctgggagagtctctctgggactacatccggcgattctcgaagcagcgcaccgagctgcccaacatcaccgactcggacgtcatcggcgcgttcctcgccggcaccacctgccgtgacctggtgagcaagctggatcgcaagacccccaccagggcgagcgagctaatggacatcgccaccaagttcgcctctggccaggaggcgcgcgacaccaagaagaagaacaagaaaaagtcgcaagcgaaacgcgacgccaccgacgcggaccttgtcgccgccgctgagtacaagaaccctcagaaacctcctgggggtgccaatctcttcgacaagatgctcaaggagccgtgcccctatcatcaggggcccgtcaagcacacccttgaggagtgtgtcatgcttcggtgccactttcacaaggcagggccacctgcgaaaggtggcagggaccacaacaacaacaagaaggaggatcacaaggtagaggagttgcccgaggtccacgactgcttcatggtctacggtgggccagtggcgaacgcctcggctcggcaccacaagcaagagcatcgggaggctcaccaaggtcctcatggacggaggcagcagcctcaacatcatctacgccgagaccctcgggctcctgcagatcgatctgtcctcgatccggacagggaaaccctcacgttcgaggtggtcgggttccgaggaacctaccacgcagtactggggaggccatgctacgccaagttcatggccgtctccaactacacctacctcaagctcaaaatgacgggcccaaacggggtcatcaccgtcggccccacgtaccgacacgcgtacaaatgtgacgtggagtgcgtggagtacgccgaggctctcgccgaatctgaggccctcatcaccgacctggagagcctctccaaggaggcgccagacgtgaagcgccatgccggcaacttcgagctagcagagacggaagcagtgctcgtcgactttctccgcgcgaacgccgaagtctttgcgtggagtccctcggacatgcctggcataccgagggatgtcgtcgagcactcgctggatatccgagctggagcccgacccgtgaagcagcctctgcgccgattcgacgaagaaaagcgcagagccatatgcgaggagatccacaagctgatggccgcagggttcatcaaagaggtattccatcccgaatggcttgccaaccctgtgcttgtgagaaagaaaggagggaaatggcggatgtgtgtagactacactggtctaaacaaagcatgtccgaaggttccctaccctttgcctcgcatcgatcaaatcgtggattccactgctgggtgcgaaaccctgtctttcctcgatgcctactcagggtatcaccaaatcaggatgaaagagtccgaccagctcgcgacttctttcatcacaccttttggcatgtactgctacgttattatgccatttggtttgaggaacgcgggtgcgacgtaccaaaggtgcatgaaccacgtattcggagagcacattggtcgaacggtcgaggcttacgtcgatgacatcatagtcaagacgaggaaagcctccgacctcctctccgaccttgaaacgacattccggtgtctcagggcgaaaggcgtaaaactcaatcccgagaagtgcgtcttcggagtcccccgaggcatgctcttggggttcatcgtctccgagcggggcatcgaggccaacccagagaaaatcgcagccatcaccaacatggggcccatcaaggacttgaaaggcgtacatagggtcatgggatgccttgcggctctgagccgcctcatctcgcgcctcggcgaaagaggcctacctctgtaccgcctcttaagaaagaccgagtgcttcacttggacccccgaggccgaggaagccctcgggaacctgaaggcgctccttacgaatgcacccatcctggtgcctcccgctgccggagaagccctcttgatctacgtcgccgctaccactcaagtggttagcgccgcgatcgtggttgagagacaagaagaagggcatgcattgcccgtccagaggccggtctacttcatcagtgaggtactgtccgagaccaagatccgctacccccaaattcagaagctgctctacgcagtgattctgacgcggcggaagttgcgacactacttcgagtctcatccggtgactgtggtgtcatccttccccctgggggagatcatccagtaccgagaggcctcgggtagaattgcaaagtgggtggtggaaatcatgggcgagacgatctcgttcgcccctcagaaggccatcaagtcccaagtcctggcagactttgtggctgaatgggttgacacccagctcccgacagctccgatccaaccggaactctggaccatgtttttcgacgggtcgctgatgaaaacaggggcaggcgcgggcctggtcttcatctcgcccctcgggaagcacctccgctacgtgctgcgcctccatttcccggcatccaacaacgtggctgagtacgaggctctggtcaacgggttgcgcatcgccatcgagctaggggtccgacgcctcgacgctcgcggtgactcgcagcttgtcatcgaccaagtcatgaagaactcccactgccgcgacccgaagatggaagcctactgcaatgagactgcggacgagctggctaagatagcctcggggtggacaacggttccctcggacgtcttctcccgagacctacatcaaccctcagtcaagaccgacgacacgcctgagcccgagaaggcctcggcccagcccgaggcaccctcggtccccgagggtgaggcactgcgcgtcgaggaagagcggaatggggtcccgcctaatcgagactggcataccccgtacctgcaatatctccaccgaggagagctgcccctcgaccgagccaaagctaggcgactagcgcggcgcgccaagtcgttcatcttgttgggggacgggaaggagctctaccaccgcagcccctcaggcatcctccagcgatgcatatccatcgccgaaggccaggagctcttacaagaaatacacttgggggcttccggtcatcacgcagcgcctcgagcccttgttggaaacgctttccgacaaggtttctactggccgaccgcggtggccgacgccactagaattgttcgcacctgccaagggtgtcaattctacgcaaggcaaacacacctacccgctcaggctctgcaaacaatacccatgacctggccgtttgctgtgtggggtctggacctcgtcggtcccttgcagaaggcacccgggggctacacgcacctgctggtcgccatcgacaaattctccaagtggatcgaggttcgacccctaaacaacatcaagtccgaacaggcggtggcgttcttcaccaacatcatccaccgcttcggggtcccgaactccatcatcaccgacaacggcacccagttcactggcagaaagttcctggacttctgcgaggatcaccacatccgggtggactgggccgctgtggctcaccccatgacgaatgggcaggtagaacgtgccaacggcatgattctgcaaggactcaagccacggatctacaacaacctcaacaagttcggcaggcgatggatgaaggaactcccctcggtggtctggagtctgaggacaacgccgatccgagccacgggctttacaccgttctttctagtctatggggccgaggccatcttgcccacagacttagaatacggttccccgaggacgagggcgtacgacgaccaaagcaatcgaaccaaccaagaagactcactggaccagctggaagaggctcaggacatgaccttactacactcggcgcggtatcagcagtccctgcgacgctaccacgcccgaggggttcggtcccgagacctccaggtgggcgacttggtgcttcgactacgacaagacgcccgagggcggcacaagctcacgcctccctgggaagggctgttcgtcatcgccaaggttttgaagcccgggacgtacaagctagccaacagtcaaggcgagccgcaaaaaacatatgcacactacaggcggaccgccatgcaggcggcatgcaaccgcaccaagggggcgcaccctttcgacttcgacgcgtccagcatggaggcccaggcccacacgtcatgtaaccggcgcgccggttactacgtgcgagaaactgcaccgccactcgtgccagtaccgcgccttctcgactgtggaaccggtgccgcgactcgaggcgaccctgcgcatgacccaacagtgccaaccgagcacatcggtcacggggaccgagaaaggggatactccgaaagggatccttctccgcgaaggaagcgggccccgagccccctactgatcagaggttcgaaggctggcccctcggaagggttcaacagccgcctcagagcactcgggctccgcgctcactactggtcagaggttcgaaggctggcccctcggaagggttcaacgagcgcctcaggccactcgggctccgcgcccactactgatcaggggttcgtaggctggcccccgaagggttctgacagccgcctcagagcacacagagcgagggatgaccctgggtacgttcgatacataaccaaggctcgggctacgctcccgaggtaccctaggacatttccgagaccgacgggaacgattttgtaa

SEQ ID NO: 115878 - DNA, 231 bp, Zea mays
  Clone ID: MRT4577_37162C.1
cggacgcgtgggttcaaaagcagaaacactttagttaaatgagatatgcgtcacaggaagctaggtgatatgcgttcattattctgttcacaaagaaagcaccagctgtttagctatcaagtggcatacccatcataactaaggggagaaggagtgtcttttagctggtttttaccatctgtcatcaataaaatgagtgccacattgcgactattgcattattacgtttac

SEQ ID NO: 115879 - DNA, 3975 bp, Zea mays
  Clone ID: MRT4577_37163C.1
atggccgatgcagcgcagctcccttctaccctcgcgctcgcgcttgtgggctctctcgcagtcgcaggctcgggccgtcgggcgcccccacaccacatggcacttggggggcttcggtccgtttccaccggtgcagcaccggagggcggaggggggtcgtggtccgtacgcgcggcgccgagggagacgcccggccagggtcgtgcgtgcatgtgcgtggcgcgaggaagatctgcccttgcccgtggatcgcgtggccgcgtcgccgtctccgtcgccgccacaacacgtggacgtgggaggggtaccctcaagacgcctaattctcagctgagccgaagtgaccgccgtcactccaccgctcctctgaccgggctgacagaaggacagcgccgcctgcgccactccgactgcggtgccactcgacagagtgagtctgaccggcagtcaggccttgccaaaggcgccacggcgaactccgctccgcccgaccccagggctcggactcgggctaagacccggaagacggcgaactccgctccgcccgaccccagggctcggactcgggctaagacccggaagacggcgaactccgctccgcccgaccccagggctcggactcgggctaagacccggaagacgacgaaactccgcctcgcccgaccccagggctcagactccgccctggcctcggtcgaacgacttccgcctcgcccgaccccatggctcgggctcggcctcggcaacagaggacagactcaacctcggcttcggaggagcccccacgtcaccctgcctagggcacagacccgccacctccccgtcaagctccagatgagcagtctccagcaacctctccggcccggggcggtgcttcgtttcgggactcttgagttcatgtccttcgacggcagctacgacatgatacttcttccaccgccgcgcgacgacgacaatggcggccgacagcccgcccgccggcggcggaatcgacgacatcttccccgcgtggtggaagagcaacattcgagctcgctccgttctctcccccgccaacggaggaggaggcggggccgtcaaggccaggcgggaggccgcgcttcgttggccgtcgagcgaatcgacgcccccgacgccccgacggaaggcacgccggacgtcgacctcgcgttcgagacggaggcaagcgctgtccccccgcgacacgctgaccccgaacaagaagacgacgccagcgcgctcgcggaaagcctgcaggacgtcgccctcgtacctgagatgacggtgcaaccagtccccgatgtgactacgtcgctcctcgtcgaccaaaaggtaccaactaactcccatcttgcgtcatttcgactcagcctcaacccgccaaacgaccttgttttggcgggcgctctcattgaggcgagtgcaaccccactggggtttcgtatgcggtcgccttgggaccggctgacggacgtctcgacctacgggccctctggtgccgtgcgggacttcatgaccgcatgtgactactgcctctccgactgttccgacgaaagccgcagccttggcgacgagagctgcggcccaagccgcgaatgtttccacatcgagctaggggatccctccgaaggcaaccatctcggcatgccggaggacggtgatcttcctaggccggtgcctcgcgccgacatcccacgggagctagctgtggtccccgctccggcggggggttacgacccacaactcgagcaagtccgcgaggcgcaggccaggctcaacgagggaacaggagcgcttgagccgatccgtcgggacgtcggacaggtctccagcaccgcgtcgccaacgatgccagggtcaggctgccgcccgcatccagcggggttggtcagaacctggcagccgcagcgatgctcctccgcgcgatgccggagccatcaaccaccgagggtcggcgaatccagggagaactcaagaatctcctggaaggcgcggcggcccgatgggccgaaagcactgcctcccgaaggcagggatatccctcggaacctcatgccgcgacttcccgattcatgcggcaagcctcgatctacaccggacgcacgcgcaacaccgcgcctgcggccccgggccacctcggcaacgagcaccatcggcgcgaccgtcgcgcccacctcgacgaaagggtgcgccgaggctaccaccccaggcgtgggggggtgctacgacagcagggaggatcggagtccctcgcccgaaccacccggtccgcaggccttctgtcgggccatccgacgggcgccattcccgacccggttccgacccccgactactatcacgaagtactcgggggaaacgagaccggaactgtggctcgcggactaccgccttgcctgccaactgggtgggacggacgacgacaacctcatcatccgtaacctccccctgttcctctccgacactgctcgcgcctggttggagcacctgcctctggggcagatctccaactgggacgacttggtccaagccttcgctggcaatttccagggcacatacgtgcgccccgggaattcctgggaccttcgaagctgtcggcaacaaccgggggagtcgctccaggactacatccggcgattctcgaagcagcgcaccgaactgcccaacatcaccgactcggatgtcatcggcgcgttcctcgccggcaccacttgccgcgacctggtgagcaagctgggtcgcaagacccccaccagggcgagcgagctgatggacatcgccaccaagttcgcctctggccaggaggcggttgaggctatcttccggaaggacaagcagccccagggccgcccctcggaagaggctcccgaggcgtctgctccgcgcggcgccaagaagaaaggcaagaagaagtcgcaaccgaaacgcgacgccgctgacgcggaccttgtcgccgccgccgagtacaagaaccctcggaagccccacggaggtgcaaacctcttcgacaagatgctcaaggagccgtgcccctaccatcaggggcccgtcaagcacaccctcgaggagtgtgttatgcttcggcgtcacttccatagggccgggccacccgccgagggtggcagggcccgcgacgacgacaagaatgaagatcacccagcaggagagttccctgaggtccgcgactgcatcatgatctatggagggcatgcggcgaatgcctcggctcggcaccgcaagcaagagcgccaggaggtctgctcggtgaaggtggcggcgccagtctacctagactggtccgacaagcccatcaccttcgaccaggccgaccaccccgaccatgtgccgagcccggggaaatacccgctcgtcgtcgaccctgtcatcggcgatgtcaggctcaccaaggtcctgatggatgggggcagctgcctcaacatcatctacgccgagaccctcaagctcctgcgcgtcgatctgtcctccgtccgagcaggcgctgcgcccttccacgggatcatccctgggaagcgcgtccagcccctcgggcgactcgacctccccgtctgcttcgggacgccctccaacttccgaagggagaccctaacgttcgaggtggtcgggttccgaggaacctaccacgccgtactagggaggccatgctacgcgaagttcatggccgtccccaactacacctacctgaagctcaagatgtcgggccccaacggggtcatcaccgtcggccccacgtacaaacacgcgttcgaatgcgacgtggagtgcgtggagtacgccgaggccctcgccgagtccgaggccctcatcgccgacttggagaacctctccaaggaggtgccagacgtgaagcgccatgccggcaacttcgagccagcggagacggttaaggccgtccctctcgaccccagtggcgacaccaccaagcgggtccggatcggttccgggctcgaccccaaatag

SEQ ID NO: 115880 - DNA, 4002 bp, Zea mays
  Clone ID: MRT4577_37164C.1
atgggtagtcttcagcaacctcttcagcccgggacggtgctccgcttcgggagcctcgagttcatgtccatcgacggcagctacgacatggtactcctccccccgcagcgcgacaacaacaacgacggtcgtcagctcgcccagcggtggcgaactcgacgacgtcttccccccgtggtggaagagcagcatccgggcttgccctgccaccctccttgccgcaggaggaggagacggggcaaccgtggccaagcaggaggcagcacctcgtcggctgttggtccagagcgagtcgacgacgccggcaccctagcgggggacatgtcgggcgttgtcctcgcacctgagacaatgatggatgtcgtttccccacgacgtgccaaccccaagcggactgatgacgccagcactctcgtgaaggacttgctgggcgttagcctcgtacctgagatgacggtgcagtccgtccccaacgcgacttccccaccatccatcgaccgagaggtaccgtccgttttccaccctgtgccttttagattcagcttcgatccaccaagcgaccccgatgcggtgagcgctttcgtaaaattgtaccctaaccttctggggtaccacatgtggtcatcctgggaccgactgacggccgtctcaacctacgggcccccgggttccgaggaagaggacgaccccgactccggttgggatttcttcgggctcagtgatcccaatgccatgcgagacttcatgaccgcatgtgactgctgcctctccggttgctctgatgttggccacagccttgacgacgagggttgtggcccaagtcgcgaatgtttccacgtcgatctagggggtcacaacgaaggcaaccacctcggtatgccggaggatgacgatccccctgtgcctgcttctcgcgttgacatcccgcgagagctagctgtggtcccagtccctgcggggggtcaggacacacagctcgagcaaatccgcgagatgcaggccaagctcgacgaggaagcagggcaacttgtgcagctccgacaaaacatcgagcaggagtgggcaggccgagcactcgccagagaagcgtgtcatcgggttcgggacgtccaacgccgtattgttgacgatgccagggcacggctgcccctggcctccagtggggtcggccagaatctagctgcagcggcaatactactccgagcaatgccgagccatccaccaccgagtggcggcgtatccaaggagaactcaagaatctcctggaggatgctgcggtccgacgagccgaaagctctgcctcccgaaggcaagggtgtcccccggagcatcgcgcgacgacttcccgactcatgcgggaggcctcggtccacaccgggcgcacgcgggatgggacgcctgcagccccgggtcgcctcggcgacgaacaacaccatcgcaaccgtcgagcccgcctcgacgagagggtgcgccgaggctaccaccccaggcgtggaggacgctacgacagtgaggatgatcggagttcctcacccgaactaccagctgggaggaacgaacgacgacaacctcatcatccgcaacctccccctattcctctccgacgctgcccgggcctggctggagcatctgcctcccgcgcagatctccaactgggacaacctggtcaaggccttcgctggaaatttccagggcacgtacgtgtgccttgggaactcatgggatctccgaagctaccgccagcagctaggggaatccctacgagagtacatccgacggttctcaaagcagggcaccgagctgcccaacatcaccgactcggatgtcatcggggcattcctcgccggcaccacctgccgagatctggaggcggtcgaagccatcttctggaaggacaagcagcctccgggacggcagcaggaagacgtccccgaggcgttcgcccagcgtggcacgaagaagaaggccaagaagaaggcgcaagcaaagcgcgacgcggatctcgtcgctgctgtcgaacacaggaaccctcggaagcctcctggaggggccaacctgtttgacgagatgctcaaggagtcgtgcccctatcaccagggtcccgtcaagcacacccttgaggaatgcgtcatgctccggcgctacttccataaggctgggcccccggcggaaggtggcaaggaccaagacaacaacaagaaggagggcgacaaggaagaggagttccccgaggtccacggctgcttcatgatctacggtgggcaagtggcgaacgcctcggctcggcaccgcaagcaggagcgccgggaggtctgctcggtgaaggtggcggcgccagtctacctagactggtccgacaagcccatcaccttcgaccaaggcgaccaccccgactgcgtgccgagcctaggaaggtacccgcttgttgtcgatcctgtcattggcaacgccaggctcaccaaggtcctcatggatggaggcagcagcctcaacatcatctacgtcgagaccctcgggctcttggagatcaatttgtccatgatccgggccggtgcggcgccctttcacgggatcgtccccggaaagcgcgtcctgcccctttggcaactcgatttgcccatctatttcgggactccctccaacttccgaaaggaaaccctcacgttcgaggtggtcgggttccaagggacctaccacgcggtgctggggagaccgtgctacaccaagttcatggtcgtccccaactacacatacctcaagctcaagacgcctggccccaacggggtcatcaccgtcggatccacgtaccgacatgcgtacgaatgcaacgtggagtgcatggagtacgctgaggccctcgccgagtccgaggccctcatcgccgatctagagtgcctctccaaggaggtgcctgatgcgaagcgccacaccggcgacatcgaaccagctgaggcgcagcctctgcgccgtttcgacgaagaaaagcacagagccataggcgaggaggtccacaagctgatggttgcagggttcatcaaagaggtattccatcccgaatggttagctaaccctgtgcttataaaaaagaaaggtgggaaatggaggatgtgcgtagactacactggtctaaacaaagcatgtccaaaggttccctaccctctgcctcgcatcgatcaaattgtggactccactgctgggtgcgaaaccctgtcattcctcgacgcctattcaggttatcaccaaatcaagatgaaagagtccgaccagctcgcgacttctttcatcacaccttttggcatgtactgttatactactatgccatttggcttgaggaatgcaggtgcaacataccaaaggtgcatgaaccacgtgttcggagagcacatcggccgaacggttgaggcttacgtcgatgacatcgttgtcaagacgaggagagcctccgacctcctctccaaccttgaaacaacattcaagtgtctgagagcgaagggcgtgaagctcaatcccgagaagtgtgtcttcggagtcccccgaggcatgcttctggggttcatcgtctccgagcggggcatcgaggccaacccggagaaaatcgcggccatcaccaacatggggcctatcaaagatttgaaaggagtacaaagggtcatgggatgccttgcggctctgagccgcttcatctcgcgcctcggcgagaaagggttacccttgtaccgcctcttaaggaagaccgagcgcttcacttggacccccgaggctgaggaagccctcggaaacttaaaggcgctccttacaaacgcgcccatcttggtgccccccgctgcgggagaagccctcttgatctatgtagccgcaaccactcaggtggtcagcgtcgcgatcgtagtcgagagacgagaggaagggcatgcgctgctcatccagaggctggtctacttcatcagtgaagtgctatccaagaccgagatccgctacccgcaaattcagaagctactgtag

SEQ ID NO: 115881 - DNA, 273 bp, Zea mays
  Clone ID: MRT4577_37165C.1
ctcgcattggttttttttttttttttttttttttggggaagaggccgttttatttttatatccccccaatggttttggaccaaaatttgggaggggaaacaaaatctgtcctttttaaccccaaaatggggttgggaaaaacgggaagaagaaggggcccccccgttccaagggaccaattaccggccaaataaaggccggggtttttaagtttttagggggcggttttaataaaaaaacccgggttttttttgtccaaaaaaccgtttgggc

SEQ ID NO: 115882 - DNA, 153 bp, Zea mays
  Clone ID: MRT4577_37166C.1
acgctcatacccaccagcgcaaagccggcctatcgttctgtcgtgagaagcaatggctgaccgtggcaaggcgatcggcgctggtgcccctaagaacgcgacatcaaggagctgcaaggctggtctgcagtttcccgtcagaaggatcgctcg

SEQ ID NO: 115883 - DNA, 4644 bp, Zea mays
  Clone ID: MRT4577_37167C.1
atgggcagtctccagcaacctctccaaccccggacggtgctccgtttcgggagtcttgagttcatgtccctcgacggcagctacgacatgatactccttccaccgccgcgcgacaacgacaatggcggccgacagcccgcccgccggtggcggaatcgacgacgtcttccccgcgtggtggaagaacaactttcgagctcgtcccgccctcttccccatcgacggagggggaggcggggcaaccaaggccaagcaggaggcagcgcctcgtcagctgtcgagcgagtcgacagcgccggcaccccaacggggggtgcaccgggtatcgacttcgcgcttgagacgaagacgagcgccgtcttcccgcgacacgccaatcccgagcaagcagacgacgccagcacgctcgcgaaaagcttgctggacatcaccctcgtacctgagacgacggtgcagtcagtccccgacgtgactttatcgccgctcgtcgaccaagaggtaccgaccgattcccatcccacgacatttggattcagcctcaacccgcctagcgaccccgctttggcgggcgctctcgtagaggcgagtccaaacccactggggtttcgtatgcggtcactttgggaccggctgacggacgtctcgacctacgggccctccgggtccgaggaagacgacgagcccagcttctgttgggatttctctggacttggcaaccccagtgccatgtgggacttcatgaccgcatgtgactactgcctctccgactgttccgacgcctcggtctacaccgggcgcacgcgcaacaccgcgcctgcggccccaggtcgcctcggcaacgagcaccatcaccgcgaccgtcgggcccacctcgacgagagggtgcgccgaggctaccaccccaggcgtgggggacgctacgacagtggggaggattggagtccctcgcccgaaccacccgatccgcaagccttcagccgggccatccgacgggcgccgttctcgacccggttccgacccccgactactatcacaaagtactcgggggaaacgagaccggaactgtggctcgcggactaccgtctggtctgccaactgggtggaacggacgatgacaacctcatcatccgcaacctccccctgttcctctccgacaccgctcgcgcctggttggagcacctgcctccgcggcagatctccaactgggacgacctagtccaagctttcgccgtcaatttccagggcacgtacgtgcgccccgggaattcctgggacctccgaagctgccagcagcagccgggagagtctctccgggactacatccggcgattctcgaagcatcgcaccgagctgcccaacatcaccaactcggatgtcatcggcgcgttcctcgccagcaccacctgccgcgacctggtgagcaagctgggtcccaagacccccaccagggcgagcgagctgatggacatcgccaccaagttcgcctccggccaggaggcagtcgaggctatcttccgaaaggacaagcagccccagggccgcccatcggaagatgctcccgaggcatcaactcagcgcggcgccaagaagaagggcaagaagaagtcgcaagcgaaacacgacgccgccgacgcggaccttgtcgccgccgccgagtacaagaaccctcggaaaccccccggaggtgccaacctcttcgacaagatgctcaaggagccgtgcccctatcaccaggggcccgtcaagcacacccttgaggagtgcgtcatgcttcggcgccacttccaaagggccgggccacccgcggagggtggcagggcccgcgacgatgataagaaggaagatcaccaagcaggagagttccccgaggtccgcgactgcttcatgatctatggcgggcatgcggtgaatgcctcggctcggcatcgcaagcaagagcgccgggaggtctgctcggtgaaggtggcggcgccagtctacctagactggtccgacaagcccatcaccttcgaccaagccgaccaccccgaccacgtgctgagcccgaggaaatacccgctcgtcgtcgaccccgtcgtcggcgacgtcaggctcaccaaggtccttatggacgggggcagcagcctcaacatcatctacgccgagacccttgggctcctgcgcgtcgatttgtcctccgtccgagcaggcgctgcgcccttccacgggatcattcccgggaagcgcgtccagcccctcggacgactcgacctccccgtctgcttcggaactccctccaacttccgaagggagaccctgacgttcgaggtggtcgggttccgaggaacctaccacgtggtactggggaggccatgctacgcgaagttcatggccgtccccaactacacctacttgaagctcaagatgccgggccccaacggggtcatcaccgtcggccccacgtacaaacacgcgttcgaatgcgacgtggagtgcgtggagtacgccgaggccctcgccgagtccgaggccctcatcgccgacctggaaagcctctccaaagaggtgccagacgtgaagcgtcatgccggcaacttcgagccaatggagacggaagcagtgctcgtcgactttctccgcgcgaacaccgacgtcttcgcgtggagtccctcggacatgcccggcataccgagggatgtcgccgagcactcgctggatattcgggccggagcccgacccgtcaagcagcctctgcgccgattcgacgaggagaagcgcacagcgataggcgaggagatccacaagctaatggcggcagggttcatcaaagaggtattccatcccgaatggcttgccaaccctgtgcttgtgagaaagaaaggggggaaatggcggatgtgtgtagactacactagtctcaacaaagcatgtccgaaggttccctaccctctgcctcgcatcgatcaaatcgtggattccactgctgggatgaaagagtccgaccagctcgcgacttctttcatcacacccttcggcatgtactgctatgtcaccatgccgttcggtttgaggaatgcgggtgcaacgtaccagcggtgcatgaaccatgtgttcggcgaacacattggccgcacagtcaaggcctacgtcgatgacatcgtagtcaagacaaggaaggccttcgacctccttttcgaccttgaagtgacattccgatgtctcaaggcgaaaggcgtcaagctcaatcccgagaagtgtgtcttcggagtgccccggggcatgctcttggggttcatcgtctccgagcggggcatcgaagccaacccggagaagatcgcagccatcaccagcatggggcccatcaaggacttaaaaggcgtacagagggtcatgggatgtctcacggccctgagccgcttcatctcacgcctcggcgaaagaggtctgcctctgtactgcctcttaaggaaggccgagtgcttcgcttggacccctgaggccgaggaagctctcgggaacctgaaggcgctcctcacaaaggcgcctatcttggtggttagcgccgcgattgtggtcgagaggcaagaagaggggcatgcattgcccgttcagaggccagtctacttcgtcagcgaggtactgtccgaaaccaagacccgctacccacaagttcagaagctgctttatgctgtgatcctgacgaggcagaagttgcgacactacttcgagtctcatccggccatcaagtcccaggtcttggcggacttcgtagccgaatgggtcgacacccagctaccgacggctccgatccaaccggagctctggaccgtgtttttcgacgggtcgctgatgaagacgggagccggcgcgggcctcctcttcatctcgcccctcgggaagcacctacgctacgtgctacgcctccatttcctggcgtccaacaatgtggctgagtacgaggctctggtcaacgggttgcggatcgccatcgagctaggggtccgacgcctcgacgctcgcggtgactcgcagctcgtcatcgaccaagtcatgaagaactcccactgccgcgacccgaacatggaggcctactgcgatgaggttcggcgcctggaagacaagttctacgggctcgagctcaaccacatcgctcggtgctacaacgagactgcggacgagctggcaaaaatagcctcggggcgagcaacggttcccccggacgtcttctcccgggatctgcatcagccctccatcaagatcgacgactcgcccgagcccgaggcgccctcggtccagcccgaggcgccctcggtccagccagaggtaccctcggcacagcccggggcaccctcggctcggcccgaggcgccctcggttcggcccaaggtaccctcggcctccgagggcgaggcactgcgcatcgaggaggagcggagcggggccacgcctgatcaaaattggcagaccccgtacctgcaatatctccgccaaggagagctacccctcgaccgagccgaggctcggtgggtggcacgacgcgccaagtcattcgtcttgctgggcgatgagaaggagctctaccaccgcagtccctcaggcatcctccagcgatgcatctccgtcgccgaaggtcaggaactcctccaagagatacactcggggtga

SEQ ID NO: 115884 - DNA, 529 bp, Zea mays
  unsure (1)..(529): unsure at all n locations
  Clone ID: MRT4577_37168C.1
ccgctgccctttctcgtgtcggccggaagcagaagcggcagaagggctccgaggcggtggcgcgtttccccgccgtggcgccgttctcatagtgcctccttctcctactcaatctcgaactctttaaggactatcttttcatggaatagtagttctttgccagccagtatcgcctgcgccccagcgaggaaaagacggaggaggaccganccaaggncgacgacctccgcggcactcccatgaacgtcggatcgctggaggagaacaacgacgagacccaagccancgncnccncgnccgncggncccgagaacaacgncgggaaacnnnccnncgnnganaaggaccagcncgagccnggaagngccaaacngaagcacaacaaggnnncngncagnnggnnggnannnngcaagacgaagnnnganccaaaggnnnncngngangaaagnngaaaaggcaccnnnnggagncnnaangcngacaaaaggnggcnnnggaagcncaaaaacaagaaancaaagaagca

SEQ ID NO: 115885 - DNA, 346 bp, Zea mays
  Clone ID: MRT4577_37169C.1
cgtcgccaccgtcggaacatttcactctccaggataacccgccccaacccaagagtgttcaaggcggggtgctaccaccaccttaccaaggccagtttgaccaccacctttggcttaaccttaagattaaccatcttaagattaaccaagccggcgcttccggcctcattaagcttccctttcgcggcgttccctacaacgtcaaccccatgttccccaaggggagcaacccccatttcaacacgttcaaaataaatgtttgggttaaccaagacttcaacaacgccaacgggaaagacaccggcgggaaaagcagttgccgcggcagcaacaacaacatcggcag

SEQ ID NO: 115886 - DNA, 462 bp, Zea mays
  Clone ID: MRT4577_3716C.1
ttcttcctttttctttcttttcttttttcctcttccccttttttgtggcgtttttattttattttttttcttccttttccccaaccacaaaaaaactttctgtttaaacacttaaacatccgccccccgtagcaagccaactctattacactgtcaatatttacaacaccccaccacacttcacctttttggttgcgtgcaacacccacaattacaacattcacacttgcctcacccctttttctttaaatatttccacaccccacaggcgaaaaacccaacacccaaccatttattggatataaccaccaccccttttccaataaacaagggatcatccacctttttaccgtggtcaacccccaaaaaaacaaactttctctcccccaaattctaaggtaaaactcctcttgcaggccccacatcgaatccccaaataccaaaccccagcaaatgcttttt

SEQ ID NO: 115887 - DNA, 355 bp, Zea mays
  unsure (1)..(355): unsure at all n locations
  Clone ID: MRT4577_37170C.1
aaggcgcaaacagacggnagaaggaagaaagggacgcncgncncggcttgtcacccgccgccgccacggcngcncngggccgaggccggcccccccgccggggccgccaccgcgccgnagcgggggccgccaacgccgcggcggcgcccggcggcacgaccagcaacaccaacaacgaggagcacggcgcgcgggggcaggagcggacggagacggaggagcgggacacgcacgaccacaggaacacggagcacggacgcgccaacaacgcgcagggcgagggcgagggcgatttttttcgccgcccccccgccgcctgggacaacgtccgattcgacaacccgcaccaccagcg

SEQ ID NO: 115888 - DNA, 440 bp, Zea mays
  Clone ID: MRT4577_37171C.1
gacagagaaaaggcattccattttccattcagggaaccaacacgttccgaaatagccaaatgggcccgggataaaaaggacccaccaccatttattttagacattacaacgaccaacaggagcagcgcaacagtttaagccctttggcccctgatgcggggggcgagctggatgtccttgggcatgagggggacccttttggcgtggatggcccaaaggttggtgttcttaaaaagccccaccaggaacgccttcgggggcttttgcagccccgccacggccgaggactggaacccgaggtcccttttgaagtcctgcgcgatttcctggacgaagcccttgtaaggggagcttgagaaagagcaattccgtgctttttggggacttgcggatctcggggagagcgacagtcccggggcaggaagcggggcgatttttta

SEQ ID NO: 115889 - DNA, 451 bp, Zea mays
  unsure (1)..(451): unsure at all n locations
  Clone ID: MRT4577_37172C.1
gtcgccgtagatcgcggacgtgccgctctagnaggaggcaagctgaccggcgcgtgcctgcgaggtcctagtgctcttctagcgcaacgtctgtccatacgactggccgctggtcgacaacggggcgactggcaaacccctggtgttaccagcttagtagcctacgtaggcacgcacctccgatcgggtgtcttcttctacacgaggcaccaagagactctgcttcgcaacaggttggcagcctaacaggaggagtgggacgcaccctttagcaccgcagtactgccggcgcgtgtggtggtcccccgcaaggagacccatccactggacctcgagataggcggccattctttcaataagggctgtagctttcccatcccctgctacggctgatggctgaccgacctacatccggagcatccgttacggcgtgaatgaactgctctacatg

SEQ ID NO: 115890 - DNA, 566 bp, Zea mays
  Clone ID: MRT4577_37173C.1
gggtaccggcgcctccctcgagttttttttttttttttttttttttttttttttttttttttttttttttttttttttttcttttttttttttttttttaaaccggggaacccccaaaaggggggggttggaaaaacccaaacacccaaaaggacatgaccgtttttaaaaaaacccgggtttttttttttttttttttttttttgggggaaaacggaacacacaaatacgggggggagggggaaaatactggctcccatgcaaaggcaaggggccgggccccccgggaaagtttttttttaggagcccatagcagaaaacaaggacccctcgtccatcccccggagatggaaaaatttcatcaggacaacaatcgataacccgcccgggggaaacggggaaagggggggtcaatcaaaaagggggccgggggcgcgcggggccaaggttttattccccccggaaccaaccgggggagggccttatggggtagggaatcccccccccccccttggagggaatcctgggggctttcccgggtttaaggcctttcctcgggccaaatt

SEQ ID NO: 115891 - DNA, 398 bp, Zea mays
  Clone ID: MRT4577_37174C.1
aacttatataatctaagagggacaaacaggacctaaaaagctcgttgggggaggaagcaaacgaagaacttgccacgaagcaaacaataccaggcgcgcgaaatcaaaaaacaaacgccagggagcgcaagaaacaagcaaaccgaacgagccacaaccaaaagccgatcagggggaaaaaaaaaacgaacacacgtcccccaatcacctctaaaccccagcaaccaaaaccaggagtcaccaagccccagaacaggcaaccctcggccagaggcacacacgacaaacccgcttggccggacagaaggggccaaacgggccaacaaaaaccgtttacacaaagaatccccaaccaaacaaagcccgggaagaaaaaagagggggggcccaatacagcc

SEQ ID NO: 115892 - DNA, 244 bp, Zea mays
  Clone ID: MRT4577_37175C.1
cgtcgagtccattgccatagctggtgttgctaggtgctcttacattcgggctaagattgaagaggagaaaaggaaaaagagcgcatgactgctgtggagaagattatcgagaccttcctcggacacaacatcgtgcacaatcacgacctacttctatatcttgttttgttttcatcttggggcaatccgtccattgtttgttcccagtctggtgattaaaagtccgcagattctgtttgtggaa

SEQ ID NO: 115893 - DNA, 336 bp, Zea mays
  Clone ID: MRT4577_37176C.1
gcgcactgactgtaactgatgtaaatgacgactaccccctacctaagcggataatgttcctgcctcttgctacattcactgctagcttacaggtatatatgcatggcatagggctataatgcatctagcaccttcgccgacatattctgcatgctgctgttctacctggatgggacgtgggattaatactaccttcccgcctacgtaagggagtgccttttatcttgggacacctgtcgctcggcactccagaccataatccaccacaaccataattacatccatgtaggagatggtgtgcccgcacttcgatccactgtttgcatgggctatcca

SEQ ID NO: 115894 - DNA, 550 bp, Zea mays
  unsure (1)..(550): unsure at all n locations
  Clone ID: MRT4577_37177C.1
aaaacccccgcggcgggcgcaccccgcgcgtgcgcaggggactgacgccgagatccggcgcctctgcgccaccaccaacgacgggcggcaccagcccccagcaggcggggacggaggcgcccgggaccgggcgagggaaacgagccagacgcagngcccagggccagccgccgacaagcaggtgttgcgangggggccncctcgggggggggagccanggctttttttctggacgaccttggctacacgaaggagatgcagctccaggcctaagcgttacattctctctaccactaccagagtaagacgggggtggaacatgtttggtggcctttgtgctcagacgaagcctgaccatattgtcatgtagctgctaacagacgcggtgggccactgacagtcacagagcgtcgaacttaaggggtgtcaggttgcgttcctcctcttcgtcatgtcatggggctctcttgaagggtcttgccggtgctggcgtgcgtctgcgatatttgtgaatgagttattggttgctgggctgatggactgggatctg

SEQ ID NO: 115895 - DNA, 287 bp, Zea mays
  Clone ID: MRT4577_37178C.1
agaggggattgtcccttatccgatctgatccggtgctgtttgccaaactgttaggcgagcccatcaggaaccaccatggcagaggaagacggcgactccgaacccgacgcacctgagggcgacatgtccacctgcgcccatcgacaacgagagatcccttgttcgaacatcgacttgcattactagacattgtgcccgtaacctccaaaagtgccagcactgtggagaaatgattactacgtaacttatggattaacactatgatgcgaacaattcctcgatcagtt

SEQ ID NO: 115896 - DNA, 316 bp, Zea mays
  Clone ID: MRT4577_37179C.1
tcgagcggccgcccgggcaggtacaagctttttttttttttttttttttttttttttttgtttttttttttttttttttttttttttttttttttttttttttttttttttttttttttttaaacgggaacccatgacccccatccctagattcaaaggagacccccccaggggacccaacatacccaaaggtggggacccccttccaccctcccacgacattacaaacattttgacaaaccccctaattcttggaacccaattttatttcacaaaaccaccgaggcgaactgccgttcctaaaaccacccaggtc

SEQ ID NO: 115897 - DNA, 265 bp, Zea mays
  Clone ID: MRT4577_37180C.1
gggggggaaagatttgatcctttagccagcagcatcctttcgaggggtacataaaaggaactacgcttttacagggtttttccacgtacctgacgagcaccgtggcgggtgggggactgaacttgctagcttatttacaggtttttgaaagaacccgcctcctcatgggtgggtgggtggtgcgcaccagagattcaaagggaaaggaatccttccttgccccccggtcaaagagggtggcgacgaacccccccgttcttggggg

SEQ ID NO: 115898 - DNA, 351 bp, Zea mays
  Clone ID: MRT4577_37181C.1
tttgtttgtttttttttatatggggtgcacccttcacacatccttttacttccgcaatgcaaataatatcacgaatgaatattcgacaacataggatctggtttcgaaaacccctcctgctaaaattgacccactgatatttgcaaaaacccaggttccgctttcccttgaacaatctgtgaaaaagaaaaccaaggttaaagtgggcatgccgaatacaaccacgcccaagcagccccatgttgagaaaaaggtctattaccaaactgggtattggccctgacaaaaagtgtcaggtgattataaccaggaccacacccttgacattaataccgacctaagccactccca

SEQ ID NO: 115899 - DNA, 4986 bp, Zea mays
  Clone ID: MRT4577_37182C.1
atgcgggacttcatgaccgcatgtgactactgcctctccgattgctccgatgatggccacaaccttgacgacgaggactatggcccaagtcgcgaatgtttccacgtcgatctagggggtctcgacgaaggcaaccaacttggtatgccggaggacggcgatccccctaggcctgcgcctcgcgttgacatccttcgggagctagctgtggtcccagtccctatggggggtcaggacacacagctcgagcaaatccgcgagatgcaggccaggctcgacgaggaggcaggacaacttgtgcagcttcggcagaacatcgggcaggagtgggcaggccgagctacgaccagagaagcgcgtcatctggcccaggacgtccagcaccgcatcaccgacgatgccagggcaaggctgcccccggcttctagtggggtcggccggcaatactactccgagcaatgccggaaccatccaccaccgaggggtgacgtatccagggagagctcaagaatctcctggaggatgccgcggtccgacgggccaaaagctctgcctcccgaagcctcggtccacaccgggcgcacgcaggacacagcgcctgcggccccaggtcgcctcggcaacgagcaccaccgctgcaaccgtcgagcccacctcgacgagaaggtgcgccaaggctaccaccccaggcgtgggggacactacgacagcggggaggatcgaagtccttcgcccgaaccacccggtctgcaggctttcagccgagccatacgacgggcgttcttcccgacccggttccaaaccccgacaaccatcaccaagtactcgggggaaacaaggccagaactgtggctcgtggagtaccggctggcctgccagttgggtggaacggacgatgacaacctcatcatctgcaacctccccgtgttcctctccgacgccgcccgagcttggctggagcacctgcctcctgcgcagatctccaactgggacgacctggtcaaagccttcgccggtaacttccaggacacatacgtgcgccctgggaactcctgggatctccgaagctaccgccagcagccgagagaatccctgcgggactacatccggcgattctcgaagcagtgcaccgagctacccaacatcaccgactcagatgtcatcggcgcgttccttgccggcaccacttgccgcgacctggtgagcaaggtgggtcgcaagactcccaccagggcgagcgagctgatggacatcgccaccaagttcgcctctaggcaggaggcggtcgaggccatcttccggaaggacaagcagcctcaggggcgccaaccggaaggcatccccgaggcgtccgctcaacgcggcaccaagaagaagggcaagaagaagtcacaagcgaaacgcgacgccgccgacgcagaccttgtcgccgccgccgagcacaggaaccctcggaagtctcccggaggcgccaacctgttcgacaagatgctcaaggagtcgtgcccctatcatcagggtcccgtcaagcacacccttgaggagtgcgtcatgcttcgacgctacttccacaaggccgggcccccggcggaaggtggtagaggccatgacaacgacaagaaggagggccacaaggcagaggagttcaccgaggtccatgactgcttcatgatctacggtgggcaagtggcgaacgcctcagctcggcaccgcaagcaagagcgtcgagaggtctgctcggtgaaggtggcggcgccagtctacctagactggtctgacaagcccatcaccttcgaccaaggcgaccaccccgacctcgtgccgagcccggggaagtacccgctcgttgtcgatcccgtcatcggcaacgtcaggcttaccgaggtcctcatggacggaggcagcagcctcaacatcatctacgccgagaccctcgagctcttgcagatcgatctattcgcgatccgggccggcgcggggccctttcacgggatcatcctcgggaagcgcgtccaacccctcgagcaactcgatctacccgtctgcttcgggactccctccaacttccgaaaggaaaccctcacgttcgaggtggtcgggttccgaggaacctaccacgcagtgctagggagaccatgctacgccaagttcatggccgtccccaactacacctacctcaagctcaagatgtcgggccccaacggggtcatcaccgtcggatccacgtaccgacacgcgtacgaatgcgacatggagtgcgtggagtacgctgaggccctcaccgaatccgaggccctcatcgccgaccaggagagcctctccaaggaagtgccagacgcgaagcgccacaccggcaacttcgagccagcagaggcgtttaagtccatccctctcgaccccagcaacgatgcctccaagcaagtttttgcgtggagtccctcggacatgcctggcataccgagggatgtcgccgagcactcactggatatccgagctggagcccgacccatgaagcagcctctgcgccgattcgacgaagaaaagcgcagagccataggcgaggagacccacaagctgatggctgcagggttcatcaaagaggtattccatcttgaatggctagccaaccctgtgcttgtgaaaaagaaaggtgggaaatggcggatgtgtgtagactacactggtctaaacaaagcatgtccgaaagttccctaccctctgcctcgcatcgatcaaatcgtggattccactgctgggtgcgaaaccctgtcgttcctcgatgcctactcagggtatcaccaaatcaggatgaaagagtccgaccagctcgcgacttctttcatcacaccttttggcatgtactgctacatcactatgccatttggtttgaggaatgcaggcgcgacataccaaaggtgcacgaaccacgtgttcggagagcacattggtcgaacggtcgaggcttatgtcgatgacatcgtagtcaagacgaggaaagcctccgacctcctcgctgaccttgaaacgacattcaagtgtctcaaggcgagaggcgtaaagctcaatcccgagaagtgtgtcttcggagtcccccgaggcatgctcctggggttcatcgtctccgagcggggcatcgaggccaacctagagaaaatcgcggccatcaccaacatggggcccatcaaggacttgaaaggagtacagaggatcatgggatgccttgcggctctgagccgcttcatctcgcgcctcggcgaaagaggcttacccctgtaccgcctcttaaggaagaccgagcgcttcacttggacccccgaggccgaagaagccctcgagaacttaaaggcgctccttacaagcgcgcccatcctggtgccccccgctgccggagaagccctcttgatctacgtagctgcaaccacccaggtggtcagcgtcgcgatcgtggtcgagagacgagaagaagggcatgcattgcccatccagaggtcagtctacttcatcagtgagttgcgacactacttcgagtctcatctggtgactgtggtgtcatccttccccctgggggagatcgttcagtgccgagaggcctcgggtaggattgcaaagtgggcggtggaaatcatgggcgagacaatctcattcgctcctcgaaaggccatcaagtcccaagtcttggcggacttcgtggctgaatgggtcgacacccagcttccagcagctctgatccaaccggaactctggaccatgtttttcgatgggtcgctgatgaaaacaggagcgggtgcaggcctgctcttcatctcacccctcgggaagcacctccgctacgtgttgcgcctccatttcccggcgtccaacaacgtggccgagtacgaggctctcgttaacgggttgcacatcaccatcgagctaggggttcggcgcttcgacgctcgtggcgactcgcagctcgtcatcgaccaagtcatgaagaactcacactgccgcgacctgaagatggaagcctactgcgacgagaccgacgacacgcccgagcccgagggggcctcggcccagcccgaggcaccctcggctgccgagggtgaggcactgcgcgtcgaggaagagcggaatggggtcccgcctaatcgaaactggcagaccccgtacctgcaatatctccatcgaggagagctacccctcgacagagccgaagctcggcgactagcgcggcgcgccaagtcgttcgtcttgctaggtgacggaaaggagctctaccaccgcagcccctcaggcatcctccagcgatgcatatctatcaccgaaggtcaggagctactgcaagaaatacactcgggggcttgcggtcatcacgcagcacctcgagccctcgttggaaacgccttccgacaaggtttctactggccaaccgcggtggctgatgccactagaattaaggcacccgggggcttcacacacctgatggtcgctatcgacaaattctccaagtggattgaggcggtggcgttcttcaccaacatcatccatcgctttggggtcccaaactccatcatcaccgacaacggcacccagttcactggcaggaagttcctggacttctgcgaggaccaccacatccgggtggactgggccgccgtagctcaccccatgacgaatgggcaggtagagcgtgccaacgacatgattctacagggactcaagccgaggatctacaacaacctcaacaagttcggcaggcgatggatgaaggaactcccctcggtggtctggagtttgagggcgatgccaagccgagccatgggcttcacgccgttctttctagtctatggagccgaggctatcttgcccacagacttagaatacggttccccaaggacaagggcgtacgacgaccgaagcaaccagaccagccgagaagactcactggaccagctggaagaggttcgggacatggccttactacactcgacaaggtatcagtag

SEQ ID NO: 115900 - DNA, 5410 bp, Zea mays
  Clone ID: MRT4577_37183C.1
atggcggccatcagccagcccgccggcggcggaatcgacgacgtcttccccacgtggaggaagagctacatccggtccgtctctgacgcgacttcgtcgccatccgtcgatcaagaggtaccgtccgtttcccatcccatgccttttggattcagctgcgacccaccaagcgaccccgctttggtggacgctttcataaaggcatgtccaaaccctccggggtatcatatgtggtcgacctgggaccgactgacagccgtctcaacctacaggcccctgggtttcgaggaagatgacgagtctgactctggttgggatttctccggactcgataaccccagtgccatgcgggacttcatgaccgcatgcgactactgcctctccgattgctccgatagtagccacagcctcggcgacgaggactgtggcccaagtcacgaatgcttccacgtcgatctagggggtctcgacgaaggcaaccatcttggacaacttgtgcagcttcagcaaaatatcgggcaggagtgggcaggccgagcaccgaccggagaatcgcgtcatctggcccaggacgacctacaccgcatcaccgacgatgccagggcaaggctgcccccggcttccagtggggtcagccagaacctggctgcagtagcgatactactccgagcgatgccagaaccatccaccaccgaggggcggcgtatccagggagagctcaagaatctcctggaagatgccgcggtccgacgggtcgagagctctacctcccgaaggcaggggtaccccccggagcatcgcgccgcgacttcccgattcaggcgggaagcgtcggtccacaccgggcgaacgcggaacaccgcgcctgcggccccgggtcgcctcgacaacgagcaccaccgccgcgaccgtcgagcccacctcgacgagaaggtgtgccgaggctaccaccccaggcgtgggggacgctacgacagcggggaggatcagagcccctcgcccgaaccacccggtccacgagctttcagccgggccatacgacgggcgccgttcccgacccggttccgaaccccgactaccatcaccaagtactcgggggagtcaaagccggaactgtggctcgcggactaccggctggcctgccagctgggtggaacggacgatgacaacctcatcatccgcaaccttccactgttcctctccgacgccgcccgagcctggctggagcatctgtctcctgcgcagatctccgattgggacgacctggtcaaagccttcaccggcaacttccagggcacgtaccgcaccgagctgcccaacatcaccgactcggatgtcattgacgcgttcctcgccggcaccacttgccacgacctggtgagcaagctgggtcgcaaaactcccaccagggcgagcgagctgatggacatcgccaccaagttcgcctcaggtcaggaggcggtcgaggccatcttatggaaggacaagcagcctcaggggcgccagccggaagacgtccccgaggcgtccgctcagcacggcaccaagaagaagggcaagaagaagtcgcaagcgaaacgtgacaccgccgacgcagaccttgtcaccgccgctgagcacaggaaccctcggaagcctcccggaggcgccaacctgttcgacaagatgctcaaggagtcgtgcccctatcatcagggtcccgtcaggcacacccttgaggagtgtgtcatgcttcggcgctacttccacaaggccgggccaccgacggaaggtggcagagcccccgacaacgacaagaaggaggatcacaaggcagaggagttccccgaggtccacgactgcttcatgatctacggtgggcatgtggcgaacgcctcggctcggcaccgcaagcaagagcgtcgggaggtctgctcggtaaaggtggcggcgccagtctacctagactggtccgacaagcccatcaccttcgaccagcgcgaccaccccgaccgtgtgccgagcccgggaaagtaccctcttgttgtcgatcctgtcatcggcaacatcaggcttaccaaggtcctcatggacggaggcagcagcctcaacatcatctacgccgagaccctcgggctcctgcagatcgatctgtcatcgatcctggccggcgcggtgccctttcacgggatcatccccgggaaatgcgtccaaccccttgggcaactcgatctgcccgtctgcttcgggactccctccaacttccgaaaggaaaccctcacgttcgaggtggtcgggttccgaggaacctaccacgcagtgctggggagaccgtgctatgccaagttcatggtcgtccccaactacacctacctcaagctcgagatgtcgggccccaacggggtcatcatcgtcggctccacgtaccgacacgcgtacgaatgcgacgtggagtacgccgaggccctcgccgaatccgtggccctcatcgccgacctggagagcctctccaaggaggcgccagacgcgaagcgccacgacggcaacttcgagccagctgagacggttttcgcgtggagtccctcggacatgcctggcataccgagggatgtcgccgagcactcgctggacatccgagctggagcccgacccgtgaagcagcctctgcgccgtttcgtcgaagaaaagcgcagagccataggcgaggagatccacaagctgatggctgcagggttcatcaaagaggtattccatcccgaatggcttgccaaccctgtgcttgtgagaaagaaaggagggaaatggcggatgtgtgtagactacactggtctaaataaagcatgtccgaaagttccctaccctctgcctcgcatcgatcaaatcgtggattccactgctgggtgcgaaaccctgtctttcctcgatgcctactcagggtatcaccaaatcaggatgaaagagtccgaccagctcgcgacttctttcatcacaccctttggcatgtactgctacgttactatgccattcggtttgaggaatgcgggtgcgacataccaaaggtgcatgaaccacgtgttcggagaacacattggccgaacggtcgaggcttacgtcgatgacatcgtagtcaagacgaggaaggcctccgacctcctctccgaccttgaaacgacattcaagtgtctcaaggcgaaaggtgtaaaactcaatcccgagaagtgtgtcttcggagtcccccgaggcatgctcctggggttcgtcgtctctgagcagggcatcgaggccaacctagagaaaatcgcggccatcaccaacatggggcccatcaaggacttgaaaggagtacagagggttatgggataccttgcggcactgagtcgtttcatctcgcgcctcggcgaaagaggcctacctttgtaccgcctcttaaggaagaccgagcgcttcacttggacccccgaggtcgaggaagccctcgggaacctaaaggcgctccttacaagcgtgcccatcttggtgccccccgctgctggagaagccctcttgatctacgtcgccgctaccgctcagatggtcagcgccacgatcgtggtcgagagacgagaagaagggcatgcattacccgtccagaggccggtctacttcatcagtgaagtactgtccgagaccagaatccgctacccgcaaattcagaagctactgtacgcggtaattctgacgcgacgaaagttgcgacactacttcgagtctcatccggtgactgtggtgtcatccttccccctgggggagatcatccagtgccaagaggcctcgggtaggattgcaaagtgggggagatcatgggcgagacaatctcgttcgctcctcggaaggccatcaagtcccaagtcttggcggacttcgtagctgaatgggtcgacacccagcttccagcagctccgatccaactggaactctggaccatgttttcgacgggtcgctgtgaaaacaggagcgggcgcgggcctgctcttcatctcacccctcgggaagaacctacgctacgtgttgcgcctccatttcccggcgtcaaacaatgtggctgagtacgaggccctggttaacgggttgcgcatcgccatcgagctaggggttcgacgcctcgacgctcgtggcgactcgcagcttgtcatcgaccaagtcatgaagaactcccattgcagcacccgaagatggaggcctactgcgacgaggttcggcgcctggaagacaagttctacggactcgagctcaaccacgtcacccgacggtacaacgagattgtggatgagctggctaaatagcctcggggcggacaacggttcccccggatgtcttctccagagacatacatcaaccctccatcaagaccgacgacatgccgaagcctcggcctagcccggggaagcctcagcccagcccgaggaggcctcggcccagcccgaggcaccctcggccgctgagggtgaggcactgcgtgtcgagggagagcggaatgaggtcacgcctaatcgaaactggcagaccccgtacctgcaatatctccaccgaggagagctacccctcgacaaagccgaagctcggtgactggcgcggcgcgccaagttgttcgtcttactgggtgatgaaaaggagctctaccaccgcagcccctcagccattctccaacgatgcatatccatcgctgaaggacaggagctgttgcaagagatacactcgggggcttgcggggtgtcaattctacgcaagacagacgcacctgcccgctcaggccctgcagacaatacccatcacctggtcgtttgctgtatggggtctggacctcgtcggtcccttgcagaaggcacccgggggcttctcgcacctgctggtcgccatcgacaaattctccaagtggatcgaggtccgacccctaacgagcattaggtccgagcaggcggtggctttcttcaccaacatcatccatcgcttcggggtctcgaactccatcatcaccgacaatggcacccagttcactagcaagaagttcctggacttctgcgaggaccaccacatccgggtggactgggccgccgtggctcaccccatgacaaatgggcaggtggagcgtgccaatgacatgattctgcagggacttaaaccgaggatctacaacgacctcaacaagttcggcaagcggtggatgaaggaactacccttggtggtctggagtctgaggacgatgccaagccgggccacgggtttctcgccgttctttctagtctgtggggccgaggctatcttgcccacagacttagaatacggttctccaaggacaagggcgtacgacgaccaaagcaaccagaccagccgagaagactcactggaccagctggaagaggctcgggacgtggccttgctacactcggcgtga

SEQ ID NO: 115901 - DNA, 258 bp, Zea mays
  unsure (1)..(258): unsure at all n locations
  Clone ID: MRT4577_37184C.1
cctnccttttttttttttttttttttaagagnaagggtnnaatggttttgattaggccccccccnaaaaaaaaaaatgaatcatccatccatccaataaccaaaaaatggcctatataaaccccaacccggtgacctttattaccagaaaaccggggaaccttttatccaaccaatcaaggaaaagcctgccccaaaaagccccaatggccgcccaaggcccctccccggcctcaagccaattttgcaacacccccat

SEQ ID NO: 115902 - DNA, 2728 bp, Zea mays
  Clone ID: MRT4577_37185C.1
atggcggaagagcagcatccgggcctgtcccgtcaccttccccgccgtaggaggaggaggcggggcaaccatggccaagcaggaagcggcacctcgttggctatcgagcgagtcgacgacgccggcgccccagcgagggacacgtcgggcgttgacctcgcgtctgagacgaagacgagcgtcgtttccccacaacacgccaaccccaagcggacggaggacgccagcacgctcgcgaaggacttgctgggcgttagcctcgtacccgagataacggtgcagttcgtccccgacgcgacttcatcaccatccgtcgatcaagaggaccgactgacggtcgtctcgacctacgggccccggggttccgaggaagatgacgagcccgactctggttgggatttctccggactcgataaccccagtgccatgcgagacttcatgaccgcatgtgattactgcctctccaattactccgatggtggccacagccttgacgacgaggactgtggcccgagtcgtgaatgtttccacgtcgatctagggggtctcgatgaaggcaaccaccttggtatgccggaggacagcgatccccctaggcctgcgcctcgcgttgacatccttcgggagctagctgtggtcccagtccctgcggggggtcgggtcgcacagctcgagcaaatccgcgagatgcaggccaggctcgacgaggaagcaggacaacttgtgcagctccgacagaacatcgggcaggagtgggcaggccgagcaccagccggagaagcgcgtcatctgccccaggacgtccagcaccgcatcgctgacgatgctagggcaaggctgcccccggcttccagtggggtcggccagaacgtggctacggcagcaatactactccgagcgatgccagagccatccaccaccgaggggcgacatatccagggagaactcaagaatctcctagaggatgccgcggtccgacgggccgaaagctctacctcccgaaggcaggggaaccccccggagcatcgcgccgcgacttcccgattcatgcgagaagcctcggtccacaccgggcgcacgtgggacgcaacgcctgcagccccgggccgcctcagcaacaagcaccgccgccatgaccgtcgagcccacctcgacgagaaggtgcgccgaggctaccactccaggcgtgggggtcgctacgacaacggggaggatcagagtccctcggccgaaccacccggtccgcaagctttcagtcgggccatacgacgggcgccgttcccgacccggttccgaaccccgactaccatcaccaagtacttgggggaaacaaggccagaactgtggctcgtggactaccggctggcctgccagctgggtggaacggacgatgacaacctcatcatccgcaacctccccctgttcctctccgacgccgcccgagcctggctggagcatctacctcctgcgcagatctccaactgggacaacctggtcaaagccttcgccggaaacttccagggcacatacgtgcgcccagggaactcctgggatctccgaagctgccgccagcagccaggggaatccctgccggactacatccggcggttttcgaagcagcgcaccgagctgcccaacatcaccgactcagatgtcatcggcgcgttcctcgccggcaccacttgccgcgacctggtgagcaagctgggtcgcaagactcccaccggggcgagcgagctgatggacatcgccaccaagttcgcctctggtcaggaggcggtcgaggccatcttctggaaggacaagcagcctcagggacgctagcaggaagacgtccccgaggcgtccgctaagcgcggcacaaagaagaagggcaagaagtcgcaagcgaaacgcgacgccgccgacgtagatcttgtcgccgccgccgagcagacttttaaagtggcttcctcctcccaagttaagcgaggtgggataattctaaggctcacacggtcaccgtccgactacaattgggccaactgggcctattgcgtctttgccaacgggtaatagtggaggatgtcctcatcattcccaccttcttaaaatgggccctagctttgataccagatgatacacccagcccaggtggggttggccgaggcccaacaaattagggttgcccggagcccaacagttcattaagcacacccaactcagggaaaggcccaattgcccccaaaagactagtccaatgggggaagggtggctctcccttttaaagtggcttcctcctcccaagttaagcgaggtgggataattctaaggctcacacggtcaccgtccgactacaattgggccaactgggccaattgcgtctttgccaacgggtaatagtggaggatgtcctcatcatagtagaaagcacccatttggctagaaactttagaaaatcaaaataaaatacctaataagttttagtggctgaaaatttgtacagagtcatgttataacatttaaatgccagcaaaaataagtcttagagaataacacactgttaaaagaaagttatagttcaaaataccccttctgccctaataattgataattttgtacagagagaacccctcactttttaagccccaaattttgagacagaattatttaccagtaagaagccactataatgtttgcagaattttttgaaatttattaagctatcttgtagttcaaacccaccccc

SEQ ID NO: 115903 - DNA, 2708 bp, Zea mays
  Clone ID: MRT4577_37186C.1
atgggcagtctccagcaacctttccagcccgggacgatgctccgttttgggagtcttgagttcatgtccctcgacggcagctacgacatgatactccttcccccggcgtgcgacaacgacaatagcggccgacagtccgcccgccgacggcggaatcgacgacgtcttccccgcgtggtggaagaacaacattcgagctcaccccgtccccttccccaccgacggaggaggaggcggggcaaccaaggccaagcaggaggcggcacctcgtcggctgtcgagcgagtcgacggcgccggcgccccaacggtgggcacatcgagcatcgacctcgcgtctaagacaaagacgagcgccgtctccccgcaacgcgccaatcccgagcaaacggacgacgcaagcacgctcgcgaaggacttgctgggcgtcaccctggtacctgagacgatggtgcagtcagtccctgacgtgacctcgtcaccgcccatcaaccaagaggtaccgaccgattcccatctcactcctttcggattcagcctcgacccgccaagcgacttcgctttggtggacgctcttgtagaggcgagtcccaaccctctggggtatcgtatgcggtcaccctgggaccggctgacggacgtctcgacctatgggccctcggggtccgaggaagacgacgagcccgacttctgttgggatttctccggacttcgtagccccggtgccatgcgggacttcatgaccgcatgcgactactgcctttccgactgttctgacggtagccgcagcctcggcgacgaggactgtggcccaagtcgtgaatgtttccacgtcgatctagggggtcccaacgaaggcaaccatcttggtatgccggagaacggtgatctccctaggcctgtgcctcgcgttgacatgctacgggagctaactgtggtccccgttctatcgagggttcatgacccacagctcgagcaaatccgcggggtgcaggccaggctcgacgagggagcaggaacacttgagccgatccgccgggacgtcgggcaggaatgggtgggccaacctccggccggagaaatgcgtcatctaccccagggtatccagcaccgcatcgccgacgatgtcaggatgaggccgccacccacttccaatggagtcggccagaacctggctgcagcggcaatgcttctccgcgcgataccggagccatcaaccaccgaggggtggcaaattcagggagagctcaagaatctcctggaggacgccacggcttacagccgcgccatacgatgggcgccgttcccgacccggttccgaaccccgactactatcacaaagtactcgggggagacgagaccggagctgtggctcgcggactaccggctggcttgccaactgggtggaacggacgatgacaacctcatcatccgcaacctccccctgttcctctccgacaccgctcgcgcctggttggagcacctgcctccggggcagatctccaactgggacgacctggtccaagccttcgccgacaatttccagggtacatatgtgcaccctggaaactcctgggatctccgaagctgccgacagcagctgggagagtctctccgggactacatccggcgattctcgaagcagcgcaccgagctgcccaacatcaccgattcagatgtcatcggcgcgttccttgccagcaccacctgccgcgacctagtgagcaagctgggtcgcaagacccccaccagggcgagcgagctgatggacatcgccaccaagttcgcctctggccaggaggcggttgaggctatcttccggaaggacaagcagccccagggccgcccgccggaggatgcccccgaggcgtcaactcagtgcggcgccaagaagaaaggcaagaagaagtcgcaagtgaaacgcgacgccgccgacgcggaacttgtcgccgccgccgagcacaagaaccctcggaaaccccccggaggtgccaacctcttcgacaagatgctcaaggagtcggccgggccacccgcggagggtggcagggctcgcgacgacgacaaggaagatcaccaggcaggagagttccccgaggtccgcgacttcttcatgatctacggtgggcaagcggcgaacgcctcggctcggcactgcaagcaagagcgtcgggaggtctgttcggtaaaggtggcggcaccagtctacctagactggtccgacaagcccatcaccttcgaccaagtcgaccaccccgaccacgtgccgagcccagggaaatacccgctcgttgtcgaccccatcatcggcgacgtcaggctcaccaaggtcctcatggacggaggcagcagcctcaacatcatctatgccgagaccctcgggctcctgcgtgttgatctgtcctcggtccgggcaggtgctacgcctttccacgggatcatccccaggaagcgcgtccagcccctcggacaactcgaccttcccgtctgcttcagaacaccctccaacttccgaagggagaccctcacgttcgaggtggtcgggttccgaggaacctaccacgcagtattggggaggccatggtacgcgaagttcatggccgtccccaactacacctacctcaagctcaagatgtcgggccccaacagggtcatcaccatcggccccacgtaccgacacgcgttcgaatgcgacgtcgagtgcgtgga

SEQ ID NO: 115904 - DNA, 2520 bp, Zea mays
  Clone ID: MRT4577_37187C.1
atgccgttcggtttgaggaacgcgggtgcgacgtaccagcggtgcatgaaccatgtgttcggcgaacacatcggtcgcacggttgaggcttacgtcgatgacatcgtagtcaagacaaggaaagcttccgacctcctctccgaccttgaagtgacattccagtatctcaaggcaaaaggcgtcaagctcaatcccgagaagtgtgtcttcggggtgccccggggcatgctcttggggttcatcatatccaagcggggtattgaagccaacccgaagaagatcgcagccatcaccagcatggggcccatcaaggacttaaaaggtctgcctctgtaccgcctgttaaggaaggccgagtgtttcgcttggacccctgaggccgaggaagctctcgggaacctgaaggcgcttcttacaaaggcgcctatcttggtacccccagctgatggagaagccctcttggtctacgtcgccgcgaccactcaggtggttagcgccgcgattgtggtcgagaggcaagaagaagggcatgcattgcccgttcagaggccagtttacttcgtcagcgaggtactgtccgaaaccaagattcgctacccacaagttcagaagctgctgtatgcagtgatcctgacgaggcggaagttgcgacactacttcgagtctcacccggtaactgtggtgtcatccttccccctgggggagatcatccagtgccgagaggcctcgggcaggattgcgaagtgggcggtggaaatcatgggcgagacaatctcgttcgcccctcggaagtccatcaagtcccaggtattggcggacttcgtagccgaatgggtcgacacccagctgccgacggctccgatccaaccggagctctggaccatgtttttcgacgggtcgctgatgaagacgggagccggcgcgggcctgtacttcatctcgcccctcaggaaacacctacgctacgtgctacgcctccatttcccggcgtccaacaatgtggctgagtacgaggctctggtcaacgggttgcggatcgccatcgagctaggggtcagacgcctcgacgcccgcggtgactcgcagctcgtcatcgaccaagtcatgaagaactcccactgtcgcgacccgaagatggaggcctactgcgatgaggttcggcgcctggaagacaagttctacgggctcgagcttaaccacatcgctcggcgctacaacgagactgtggacgagctggcaaaaatagcctcggggcgaacgacggttcccccggacgtcttctcccaggatctgcaccaaccctccgtcaagatcaacgacacgcccgagcccgaggcaccctcggtccagcccgaggcgtcctcggttcagcccgaggtaccctcagcccccaagggcgaggcgctgcgcgtcgaggaggagcggagcggggccacgcctgatcgagattggcagaccccgtacctgcaatatctccgccaaggagagctacccctcgaccaagccgaggctcggcgggtagcgcgacgcgccaagtcgttcgtcttgctgggcgatgagaaggagctctaccaccgcagcccctcgggcatcctccagcgatgcatctccatcgccgaagcgccccgagccctcatcgggaatgctttccggcaaggcttctactggccaacggcggtggctgacgccactagaattgtccgcacctgcgaagggtgtcaattctatgcgaagcagacccacctgcccgctcaggctctgcagacgatacccatcacctggcccttcgctgtgtggggtctggacctcgtcggtcccttgcagaaggtgcccgggggctacacgcacctgctggtcgccatcgacaaattctccaagtggatcgaggtccgacccctgaacagcatcaggtccgagcaggcggtggcattcttcaccaacatcatccatcgcttcggggtcccaaactccatcatcaccgacaacggcacccagttcaccggcagaaaattcttggatttttgcgaggatcaccacatccgggtggactgggccgccgtggctcatcccatgtcgaatgggcaagtagagcgtgccaacggcatgattctacaagggctcaagcctcggatttacaacgacctcaacaagttcggcaagcgttggatgaaggaactcccctcggtggtctggagcctgaggacaatgccgagccgagccacaggtttcacgttgttcttcttggtctacggggccgaggccgtcctgcccgctgacctggaatacggctccctgaggacgagggcctacgacgatcaaagcaaccaggctagccgagaagactcgctggaccagctggaagaggctcgggacagggccttactacgctcggcgcggtatcagcagtccctgcggcgctaccacgcccgaggggtccgacctcgagacctccaggtgggcgacctggtgcttcggctgcggcaagacacccgagggaggcacaagctcacgcccccctag

SEQ ID NO: 115905 - DNA, 6012 bp, Zea mays
  Clone ID: MRT4577_37188C.1
atgggtagtctccagcaacctttccaacccgggacgatgctccgtttcgggagtcttgagttcatgtccctcgacggcagctacgacatgatactccttcctccgccgtgcgacagcgacaatggcgaccgtcagcccgcccgccggcggcggaatcaacgacgtcttccccacatggcggaagaacaacatccgggtttgtcccgtcacctcccccgccgacggaggaggaggcggggcaaccatggccaagctggaggcgacacctcgtcggctgtcgagcaagtcgacgacgccggcgccccagcgggggacacgtcgggcttcgtccttgcgtctgagacgaagacgagcgctggttccccgcaacacgccaaccccaagcagatgaacgacgccagcacgctcgcgaaggacttgctgggcgtcgccctcgtacctgagacaacggtgcagtccgcccctgacgcgacttcgtcaccgcccgtcgaccaagaggtaccgaccgattcccatctcgtgccttttggattcagcatcgacccaccaagcgacctcgcttcggtggaagccttcatagaggcatgtaccaaccctccagggtaccacatgcggtccccctgggacagactgacggtcgtctcgacctacggaccctcgggttccgaggaagatgacgagcctgacttttgttgggatttctccgggctcggtaaccacagtgccatgcgggacttcatgaccgcatgcgactactgcctctccgattgtcccgatggtagccgcagcttcggcgacgaggactgcggcccaagtcgtgaatgtttccacgtcgatctagggggtcccgacgaaggcaaccatcttggtatgccggaaaacggcgacccccctaggcctgcgcctcgcgttgacatccttcgggagctagttgtggtcccagtccctgcggggggtcaggacgcacagctcgagcaaatacacgagatgcaggccaggctcgacgagggagcaggaacacttgagcagttccggcggaacatcgggcaggaatgggcagaccaagctccggctggagaagcgcgtcatctaccccagggcatccagcactgcattgccgacgacgtcagggcaaggccgccaccggcttccagtggggtcggccagaacctggctgcagcagcaatactactctgcgcgatgccagaaccatcgaccaccgaagggcagcgtatccagggagagctcaagaatctcctggaggatgccgcggtccgacgggccgaaagctctgcctcccgaagctgccgccagcagccgggagagtctctccgggactacatccggcgattctcgaagcagcgcaccgagctgcccaacgtcactgactcggatgtcatcggcgcgttcctcgccggcaccacctgccgcgacctggtgagcaagctgggtcgcaagacccccaccagggcgagcgagctgatggacatcgccaccaagttcgcctctggccaggaggcggttgaggccatcttccggaaggacaagcagccccagggccgccagctagaagacgtccccgaggcgtccactcagcgcggcactaggaagaagggcaagaagaagtcgcaagcgaaacgtgacgccgccgacgcggaccttgtcgccgccgctgagtacaagaaccctcggaaacctcctggaggtgccaatctcttcgataagatgttcaaggagtcatgcccctatcatcaggggcccgtcaagcacacccttgaggagtgcgtcatgcttcggcgccactttcacaaggccgggccacctgcggaaggtgacagggcccacaacaacgacaagaaggaggatcacaaggcagaggagtttcccgaggtccacgactgcttcatgatctatggtgggccagtggcgaacgcctcggctcggcaccgcaagcaagagcgtcgggaggtctgctcggtaaaggtggcggcgtcagtctacctagactggtccgacaagtctatcgccttcgacctgggcgaccaccccgaccgcgtgccgagcccggggaaatatccgctcgttgtcgaccccgtcatcggcaacgtcaggctcaccaaggtcctcatggacggaggcagcagcctcaatattatctacgccgagaccctcgagctcctgcagatcgatctgtcctcgatccgggcaggtgcggcgccttttcacgggatcatccccgggaaacgcgtccaacccctcggacaactcgatctgcccgtctgcttcgggactccctccaacttccgaagggaaaccctcacgttcgaggtggtcgggttccgaggaacctaccacgtagtgctggggaggccatgctacgccaagttcatggccgtccccaactacacctacctcaagctcaaaatgccgggccctaacggggtcatcaccgtcggccccacgtaccgacacgcgtacgaatgcgacgtggagtgcgtggagtacgccgaggccctcgccgaatccgaggccctcatcgccgacctggaaagcctctccaaggaggcaccagacgtgaagcaccacgccggcaacttcgagccaacagagacgcgcagagccataggcgaggagatccacaagctgatggccgcagggttcatcaaagaggtattccatctcgaatggcttgccaaccctgtgcttgtgagaaagaaaggagggaaatggtggatgtgtgtagactacacttgtctaaacaaagcatgtccgaaggttccctaccctctgcctcgcatcgatcaaatcgtggattccacagatgggtgcgaaaccctgtctttcctcgatgcctactcagggtatcaccaaatcaggatgaaagagtccgaccagctcgcgacttctttcatcacgccctttggcatgtactgctacgttactatgccatttggtttgaggaatgcgggtgcgacgtaccaaaggtgcatgaaccacgtgttcggagagcacattggtcgaacggtcgaggcttacgtcgatgacatcgtagtcaagacgaggaaagcctccgacctcctctccaaccttgaaacgacattcctgtgtctcaaggcgaaaggcgtaaaactcaatcccgagaagtgcgtcttcggagtcccccgaggcctgcctctgtaccgcctcctaaggaagaccgagcgcttcacttggacctccgaggccgaggaagccctcgggaacctaaaggcgctccttacaagtgcgcccatcttggtacctcccgctgccggagaagccctcttgatctacgtcgccgctaccactcaggtggtcagcgccgcgatcgtggttgagagacgagaagaagggcatgcattgcccgtccagaggccggtctacttcatcagtgaggtactgtccgagaccaagatccgctacccacaaattcagaagctgctatacgcggtgattctgacgcggcggaagttgcgacactacttcgagtctcatccgatcatccagtgccgagaggcctcgggtaggattgcaaaatgggcggtggaaatcatgggcgagacaatctcgttcgcccctcggaaggccatcaagtcccaagtcttggcagactttgtggctgaatgggtcgacacccagctcccggcagctccgatccaaccggaagtctggaccatgtttttcgacgggtcgctgatgaaaacaggggcaggcgcgggcctgctcttcatctcacccctcgggaagcacctccgctacgtgatgcgcctccatttcccggcgtccaacaacgtggccgagtacgaggctctagttaacgggttgcgcatcgccatcgagctaggggtccaacgcctcgacgctcgcggtgactcgcagcttgtcatcgaccaagtcatgaagaactcccactgccgcgacccgaagatggaagcctactgcgacgaggttcggcgcctggaggacaagttctatgggctcgagaccgacgacacgcctgagcccgagaaggtctcggccctgcccgaggtgccctcggctcagcccgagacaccctcggcccccgagggtgaggcactgcgcgtcgaggaagagcggaatggggtcccgcctaatcgagactggcagaccccgtacttgcaatatctccaccgaggagagctacccctcgacagagccgaagctcggcgactagtgcggcgcgccaagtcattcgtcttgctaggtgacgggaaggagctctaccaccgcagcccctccggcatcctccagcgatgcatatccatcgccgaaggtcaggagttattacaagaaatacactcgggggcttgcggtcaccatgcagcacctcgagccctcgttgggaatgccttccgacagggtttctactggccgaccgcggtggccgacgccactagaattgtccgcacctaccaagggtgtcaattctacgcaaagcagacccacctgcccgctcaggctctgcaaacaatacccatcacctggccttttgttgtgtggggtctagaactcgtcggtcccttgcagaaggcacccgggggctacacgcacctgttggacgccatcgacaaattctccaagtggatcgaggtccgacccctaaacaacatcaggtccgaacaggcggtggcgttcttcaccaacatcatccatcgatttggggtcccgaactccatcatcaccgacaacggcacccagttcactggcagaaagttcctggacttctgtgaggatcaccacatccgggtggactgggccgccgtggcacaccccatgacgactgggactcaagccgaggatctacaacgacctccacaagttcggcaggcgatggatgaaggaactccccttggtggtctggagtctgaggacgacgccaagccgagccacgggcttcacaccgttctttctagtctatggggccgaggccatcttgcccacagacctagaatacggttccccgaggacgagggcgtacgacgaccaaagcaatcgaaccaaccgagaagactcactggaccagctggaagaggctcgggacgtggccttactacactcggcgcggtatcagcagtccctgcgacgctaccacgcccgaggggttcggtcccgagacctccaggtgggcgacttggtgcttcgactacgacaagacgcccgagggcggcacaagctcacgcctccctgggaagggccgttcgtcatcgccaaggtcttgaagcccaggacgtacaagctggccaacagtcaaggcgaggccctgacaaccacaatgaacagacaccggcactcaaggtgccattacaaacggaactccggttccgcccccgcaggggctcgaaaggtggaaggacgcgatacatggagtgcgaagatatggttgccatccaagggggtcaccctccttttaaaggcgactctccccacttgcgtcctcagccggcgcggactgagtcttctccaacacgctccaaggtccccccctacgacacgggggctgggtcccacgcgtcatgcaagctggcccaggacagaaggagccaaaaccgccacgctgtgcgcacaactgcccagcggttacaagcattcctccactatcgcccggaccagtgggtgaaagggcggactgccacgcaggcggcatgcaaccgcaccaagggggcgcaccctttcaacttcgacgcgtccagcatggaggcccaggcccacacgtcatgtaaccggcgcgtcggttactacgtgcaagaaactgcaccgccactcgcgccagtacctcgcctcctcgactgcggaaccggtgtcgcgactcgaggcgaccctgcgcatgacccgacagtgccaaccaagcacatcggtcacggggaccgggaaaggggatactccaaaagggatccttctccgcgaaggaagcgggccccgagcccccctattgatcagaggttcgaaggctggcccctcggaagggttcaatag

SEQ ID NO: 115906 - DNA, 2835 bp, Zea mays
  Clone ID: MRT4577_37189C.1
atggcggccgatagcccgcccgccggcggcggaatcgacgacgtcttccccgcgtggtggaagaacaaccttcgagctcatcccgccttcttccccgccgacggaggggaaggcagggcaaccaaggccaagcaggaggcagcgcctcgtcggctgtcgagcgagtcgacgccgccggcaccccaacgggaggcgcaccggtcgccttgggaccggctgagggatgtctcgacctacgggccctctgggtttgaggaagacgatgagcccaacatctgctgggatttctctggacttggcaaccccagtgccatgcgggacttcatgaccgcatgtgactactgcctctccgactgttccgacggtagccacagcctcggcgatgaggactgcggcccaagtcgcgaatgtttccacgtcgatctagggggtccctccgaaggcaatcatctcggcatgccggaggacggtgatctccctaggccggtgccccgcgttgacatcccacgggagctagctgtggtccccgttcaggcggggggccatgacccacagctcgagcaaatccgcggggtgcaggccaggctcgacgagggagcaggagcgcttgagccgatccgccgagacgtcgggcaggcatgggcgggccaacccccggctggagaaatacgtcatctgccccagggcttccagcaccgcgtcgctgacgacgtcagggtcaggccgccacccgcatctagtggggtcggccagaacctggctgcagcagcgatgcttctccgcgcgatgccggagccatcaaccaccgagggccggcgaatccagggggagctcaagaatctcctggaaggcgccgcggtccgacgggccgagagctctgcctcccgaaggcaggggtacccctcgaaacctcatgtcgcgacttcccgattcatgcgggaagcctcggtctacaccgggcgcacacgcaacaccgcgcctgcggccccgggtcgcctcggcaacgagcaccatcaccgcgaccgtcgggcccacctcgacgagagggtgcgccgaggctaccaccccaggcgtgggggacgctacgacagcggggaggatcggagtccctcgcccgaaccgcccggtccgcaggccttcagccgggccatccgacgggcaccgttcccgacccggttccgacccccgactactatcacaaagtactcgggggagacgagaccggaactatggctcgcggactaccgtctggcctgccaactgggtggaacggacgatgacaacctcatcattcgcaacctccccctgttcctctccgacaccgctcgcgcctggttggagcacctgcctccggggcagatctccaactgggacgacctagtccaagctttcgccgacaatttccagggcacgtacgtgcgccccgggaattcctgggacctccgaagctgccgacagcagccgggagagtctctctgggactacatccggcgattctcgaagcagcgcaccgagctgcccaacatcaccgactcggatgtcatcggcgcgttcctcgccggcaccacctgccgcgacctggtgagcaagttgggtcgcaagacccccaccagggcgagcgagctgatggacatcgccaccaagttcgcctccggccaagaggcggtcgaggctatcttccgaaaggacaagcagccccagggccgcccatcggaagatgcccccgaggcgtcaactcagcgcgacgccaagaagaagggcaagaagaagtcgcaagcgaaacgcgacgccaccgacgcggaccttgtcgccgccgccgagtacaagaaccctcggaaaccccccggaggtgccaacctcttcgataagatgctcaaggagtcgtgcccctatcaccaggggcccgtcaagcacacccttgaggagtgcgtcatgcttcggcgccacttccacagggtcgggccacccgcggagggtggcagggcccacgacggcgacaagaaggaagatcaccaggcaggagagttccccgaggtctgcgactgcttcatgatctacggtgggcaagcggcgaacgcctcggctcggcaccgcaagcaagagcgccgggaagtctattcagtgaaggtggcggcgccagtctacctagactggtccgacaagcccatcaccttcgaccaagccgaccaccccgaccatgtgccgagccccgagaaatacccgctcgtcgttgaccccgttgtcggcgacgtcaggctcaccaaggtcctcatggacggaggcagcagcctcaacatcatctacgccgagaccctcgggctcctgcgtgtcgatttgtcctccgtccgggcaggcgttgcgcccttccatgggatcattcccgggaagcgcgtccagcccctcgggcaactcgaccttcccgtctgcttcggaacaccctccaacttccgaagggagaccctgacgttcgaggtggtcgggttccgaggaacctaccacgcggtactgggaagaccatgctacgcgaagttcatggccatccccaactacacctacctgaagctcaagatgccgagccccaatggggtcatcaccgtcggccccacgtacaaacacgcgttcgaatgcgacgtggagtgcgtggagtacgccgaggccctcgccgagtccgaggccctcatcgccgacctagagagcctctctaaggaggtgccagacgtgaagcgtcatgccagcaactttgagccagcggaaacggttaaggccgtccccctcgaccccagcagcgacacctccaagcagatctggatcggctccgggctcgatcccaaatag

SEQ ID NO: 115907 - DNA, 191 bp, Zea mays
  Clone ID: MRT4577_3718C.1
ctcaggccctgggaaaccagcccagtttctggcaggagaggcagaggaggtcaatgcctttgctctgggcttacctgagcaccagcagtggtgtctctggagcagatgaagtagagcccttacacgatggagttgaagaggcagagaaaaagatggaagaagaaggtgtgagtgtgcgtaaaatggaggca

SEQ ID NO: 115908 - DNA, 5812 bp, Zea mays
  Clone ID: MRT4577_37190C.1
atggcggccgacagcccgcccgccggcggcggaatcgatgacgtcttccccgcgtggaggaagcagggcaaccaaggccaagcgggaggcagcgcctcgtcggctgtcgagcgagtcgacggccccagcgccccaacggggggcgcgtcgggcatcgacctcgcgtttgagacgaaggcgagcgccgtatccccgcgacacgccaattccgagcaaacggacgacgccgacacgctcgcgaaaggcttgctggacgtcaccctcgtacctgagacgacggtgcagtcagtccccgacgtgacttcatcaccgcccatcgaccaagaggtaccgaccgtttcccatcccacgcctttcagattcagcctcgacccgcctagcggcttcgctttggcggacgctctcgtagaggtgagtccgaaccctctggggtttcgtatgcggtcaccttgggaccggctgacgaacgtctcgacctacgggccctctgggtccgaggaagacgacgagcccagcttctgttggtatttctctggacttggcaaccccagtgccatgcgggacttcatgaccgcatgcgactactgcctttccgactgttccgacggtagtcatagcctcggcgacgaggactgcggcccaagccgcgaatgtttccacgtcgatctagggggtccctccgaaggcaaccatctcggcatgccggaggacggtgacctccctaggccggtgcctcgcgttgacatcccacgggagctagatgtggtccccgttcaggcggggggccatgacccacagctcgagcaaatccgcggggtgcaggccaggctcgacgagggagcaggagcgcttgagccgatccgccgggacgtcgggcaggaatgggcaggccagcctccggccggagaaatacgtcatctaccccagggcttccagcaccgcatcgtcgacgatgttagggtcaggccgccacccgcatccagtggggttggccagaacctggctgcagcagcaatgctcctccgcgcgatgccggagccatcaaccacaaaggggcggcgaatccagggagagctcaagaatctcctggaaggcgccgcggtccgacaggccgagagctccgcctcccgaaggcaggggtacccctcggaacctcatgccgcgacttcccgattcatgcgggaagcctcggtctacaccgggcgcacgcgcaacacagcgcctgcggccccgggtcgcctcggcaacgagcaccatcaccgcgaccgtcgggcccacctcgacgagagggtgcgccgaggctaccaccccaggcgtgggggacgctacgacagcggggaggatcggtgtccctcgcccgaaccacccagttcgcaggccttcagccgggccatacgacgggcgccgttcccgacccggttccgacccccgactactatcacaaagtactcgggggagacgagaccggaactgtggctcgcggactattgtctggcctgccaactgggtggaacggacgatgacaacctcatcatccgcaacctccccatgtttctctccgacactgcccgcgcctggttggagcacctgcctttggggcagatctccaactgggatgacctagtccaagctttcgccggcaatttccaagccacgtacgtgcgcccccggaattcctgggacctccgaagctgccaacagcagccgggagagtctctccgggactacatccggcgattctcgaggcagcgcaccgagctgcccaacatcaccgactcggatgtcatcgacgcgttcctcgctggcaccacctgccgcgacctggtgagcaagctgggtcgcaagacctccaccagggcgagcgagctgatggacatcgccaccaagttcgcctccggccaggaggcggtcgaggctatcttccgaaaggacaagcagccccagggccgcccatcggaagatgcccccgaggcgtcaactcagcgcggcgccaagaagaagggcaagaagaagtcgcaagcgaaacgcgccgccgccgacgcggaccttgtcgccgccgccgagtacaagaaccctcggaaaccccccggaggtgccaacctcttcgacaagatgctcaaagagtcgtgcccctatcaccaggggcccgtcaagcacacccttgaggagtgcgtcatgcttcggcgccacttccacagggtcgggccacccgcggagggtggcagggcccgcgacgacgacaagaaggaagatcaccaggcaggagagttccccgaggtccgcgactgcttcatgatctacggtgggcaagcggcaaacgcctcagctcggcaccgcaagcaagagcgccgggaggtctgttcggtgaaggtggcggcgccagtctacctagactggtccgacaagcccatcaccttcgaccaagccgaccaccccgaccatgtgccgagcccggggaaatacccgctcgtcgtcgaccccatcatcggcgacgtcaggctcaccaagatcctcatggacggaggcagcagcctcaacatcatctacgccgagacccttgggctcctgcgtgtcgatctgtcctcggtccggggcaggcgttgcgcctttccatgggatcatccccgggaagcgcgtccagcccctcggacaactcgaccttcccgtctgcttcggaacaccctccaacttccgaagggagaccctgacgttcgaggtggtcgggttccgaggaacctaccacgcggtactaggaaggccatgctacgcgaagttcatggtcgtccccaactacacctacctaaagctcaagatgtcgggccccaatggggtcatcaccgtcggccccacgtacaaacacgcgttcgaatgcgacgtggagtgcgtggagtacgccgaggccctcgccgagtccgaggccctcatcgccgacctggagaacctctccaaagaggtgccagacgtgaagcgtcatgccggcaacttcgagccagcggagacggttaaggccgtccctctcgaccccagtggcgacgcctccaagcagatccggatcgggtatcatcaaatcaggatgaaagagtccgaccagctcgcgacttctttcatcacgcccttcagcatgtactgctatgtcaccatgccgttcggtttgaggaatgcgggtgcgacgtaccagcggtgcatgaaccatgtgttcggcgaacacatcggtcgcacggtcgaggcctgcgtcgatgacatcgtagtcaagacaaggaaagcttccgacctcctcaccgaccttgaagtgacattccggtgtctcaaggcaaaaggcgtcaagctcaatcccgagaagtgtgtcttcggggtgccccggggcatgctcttggggttcatcgtctccgagcggggcatcgaagccaacccggagaagatcgcagccatcaccagcatggggcccatcaaggacttaaaaggcatacagagggtcatgggatgtctcgcggccctgagccgcttcatctcacgcctcagcgaaagaggtctgcctctgtaccgcctcttgaggaaggccgagtgtttcgctcggacccctgaggccgaggaagctctcgggaacctgaaggcgctccttacaaaggcgcctatcttggtgcccccagctgatggagaagccctcttggtctacgtcgccgcgaccactcaggtggttagcgccgcgattgtggtcgagaggcaagaagaggggcatgcattgcccgttcagaggccagtttactttgtcagcgaggtactgtccgaaaccaagatccgctacccacaagttcagaagctgctgtatgcagtgatcctgacgaggcgaaagttgcgacattacttcgagtctcatctggtaactgtggtgtcatccttccccctgggggagaacatccagtgccgagaggcctcgggcaggatcgcaaagtgggcggtggaaatcatgggcgagacaatctcgttcgcccctcggaaggccatcaagtcccaggaattggcggacttcatagccgaatgggtcgacacccagatgccgacggctccgatccaaccggggctctggaccatgtttttcgacgggtcgctgatgaagacgggagccagcgcgggcctgctcttcatctcgcccctcgggaaacacctacgctacgtgctacgcctccatttcccggcgtccaacaatgtggctgagtacgaggctctggtcaacgggttgcggatcgccatcgagctaggggtcagacgcctcgacgcccgtggtgactcgcagctcgtcatcgaccaagtcatgaagaactcccactgccacgacccgaagatggaggcctactgcgatgaggttcggcgcctggaagacaagttctacgggctcgagcttaaacacatcgctcggcgctacaacgagactgcggacgagctggcaaaaatagcctcgaggcgaacgacggttcccccggacgtcttctcccaggatctgcatcaaccctccgtcaagatcaacgacacgcccgagcctgaggcaccctcggtccagcccgaggtaccctcggctcagcccgagacaccctcagctcggcccgaggcaccctcggtccagcccgaggtaccctcggctcagcccgaggtaccctcggcctccgagggcgaggcactgcacgtcgaggaggagcggaacggggtcacgcctgatcaaaattggcagaccccgtacctgcaatatctccgccaaggagagctacccctcgaccaagctgaggctcggcgggtagcgcgacgcgccaagtcgttcgtcttgctgggcgatgagaaggagctctaccaccgcagcccctcgggcatcctccagcgatgcatctccatcgacgaaggtcaggaactcctgcaagaaatacactcgggggcttgcggccatcatgcagcgcctcgagccctcgtcgggaatgctttctggcaaggcttctactggccaacggcgaaggcgcccaggggctacacgcacctgctggtcgccatcgacaaattctccaagtggatcgaggtccgacccctgaacagcatcaggtccgagcaggcggtggcgttcttcaccaacatcatccatcgcttcggggtcccaaactccatcatcaccgacaacggcacccagttcaccggcagaaaattcttggacttctgcgaggatcaccacatcggggtggactgggccgccgtggctcatcccatgacgaatgggcaagtagagcgtgccaacggcatgattctacaagggctcaagcctcggatttacaacgacctcaacaagttcggcaagcgatggatgaaggaactcccctcggtggtctggagcctaaggacaacgtcgagccgagccacgggtttcacgccgttcttcctggtctacggggccgaggtcgtcttgcccactgacctggagtacggctccccgaggacgagggcctaccacgatcaaagcaaccaagctagccgagaagactcgctggaccagctggaagaggctcgggacaaggccttactacactcggcacggtatcagcaatccctgcgacgctaccacgcccgaggggtccggccccgagacctccaggtgggcgacctggtgcttcagctgcggcaagacgcccgagggaggcacaagctcacgcccccctgggaggggccattcgtcatcgccaaagttctgaagcccggaacgtacaagctggccaacagtcaaggcgaggtctacggcaacgcttggaacatcaaacagctacgtcgcttctacccttaa

SEQ ID NO: 115909 - DNA, 380 bp, Zea mays
  Clone ID: MRT4577_37191C.1
aaataaaaacaaacaatataaaaaataactaaaaatacatacacatataggggacataagggaggagggtataatatgggccgaaattcaatttactttcccctggggggccccgttttaaagtaccaaagctttcggccggcgccatccaaatttattttttttttatggggccccctaaatcatattccctggccgcctttttacaaaccgggcactggaaaaaccctggcttcaccaaatttaatcgtgttacacaaaatccccctttccactattggcatattaaaaaaaaggcccgcccatattgccctttacaattttcccacaccttgaatgggaattgggccccccctttgttcggctctttaaacgcgggg

SEQ ID NO: 115910 - DNA, 5927 bp, Zea mays
  Clone ID: MRT4577_37193C.1
atgggcagtctccagcaacctttccagcccgggacggtgctccgttttgggagtcttgagttcatgtccctcgacggcagctacgacatgatactccttcccccaccgtgcgacagcgataatggcggccgacagcccgcccgccggcggcggaaccgacgacgtcttccctgcgtagtggaagaacaacattcgagctcaccccgccctctcccccgccgacggaggaggaggcggggcaaccaaggccaagcaggaggcgacacctcgtcggctgtcgagcgagtcgacggcgccggcgccccaacggggggcacgacgggcatcgacctcttgtttgagacgaagacgagcgccgtctccccgcaacacgctaattccaagcaaacggacgacgccagcacgctcgcgaaaggcttgctgggcgtcaccctcgtacctgagacgacggtgcagtcagtccctgacgtgacttcgtcaccgcccgtcgaccaagaggtacccaccgattcccatctcacgccctttggattcagcctcgacccgccaagcgacttcgctttggcagacgctctcgtagaggcgagtccaaaccctctggggtttcgtatgcggtcaccttgggactggctcacggacgtctcgacctacgggccctcggggtccgaggaagatgacgtgtccgacttctgttgggatttctccggacttggtaaccctagtgccatgcgggacttcatgaccgcatgcgactactgcctttccgactgttccgacggtagccgcagcctcggcgacgaggactgcggcccaagtcgtgaatgtttccacgtcgatctagggggtccctccgaaggcaaccatcttggtatgccggagaacggtgatctccctaggcctgtgcctcgtgttgacatcctacgggagctagctgtggtccccgttcaggtggggggtcatgacccacagctcgagcaaatccgcggggtgcaggctaggctcgacgagggagcaggaacacttgagccgatccgccgggacatcgaacaggaatgggcgggccaacctccggccggagaagtgcgccatctaccccagggtatccagcaccgcatcgccgacgatgtcagggtgaggccgccacccgcttccagtggagtcggccagaacctggctgcagcggtaatgcttctccacgctatgccggagccatcaaccaccgaggggcggcgaatccagggagagctcaagaatctcctggaaggcgccgcggtccgacaggccgagagctccgcctcccgaaggcaggggtacccctcggaacatcgcgccgcgacttcccgattcatgcgggaagcttcagtccacactgggcgcacgcgcgacacagcgcctgtggcctcgggtcgcctcgacaacgagcaccatcaccgcaaccgtcgggcccacctcggcgaaagggtgcgccgaggctaccaccctaggcatgggggacgctacgacagcggggaggatcggagtcactcgcccgaaccacccggtccgcaggctttcagccgcgccatacgacgggcgccgttcccgacccggttccgaaccccgactactatcacaaagtactcgggggagacgagaccggaactgtggctcgcagactaccggctggcgtgccaactgggtggaacggacgatgacaacctcatcatccgcaacctccccctgttcctctccgacaccgctcgcgcctgctgccgacagcagtcgggagagtctctccgggactacatccgacgattctcgaagcagcacactgagctgcccaacatcaccgattcagatgtcatcggcgcgttcctcgccggcaccacttgccgcgacctggtcagcaagctgggtcgaaagactcccaccagggcgagcgagctgatggacatcgccaccaagttcgcctctggccaggaggcggttgaggctatcttccggaaggacaagcagccccagggccgcccaccggaagatgcccccgaggcgtcaactcagcgcggcgccaagaagaaaggcaagaagaagtcgcaagcgaaacacgccgccgccgacgcggaccttgtcgccgccgccgagcacaagaaccctcggaaaccccccggaggtgccaacctcttcgacaagatgctcaaggagctgtgcccctatcatcaggggcccgtcaagcacacccttgaggagtgcgctatgcttcggcgccacttccacagggtcgggccacccgcggagggtggcagggcttgcgacgacgacaagaaggaagatcaccaggcaggagagttccccgaggtccgcgactgcttcgtgatctacggtgggcaagcggcgaacacctcggctcgacaccgcaagcaagagcgtcgggagactgggtccgacaagcccatcaccttcgaccaagccgaccaccccgaccacgtgccgagcccggggaaatacccgctcgttgtcgaccccatcatcggcgatgtcaggctcaccaaggtcctcatggacggaggcagcagcctcaacatcatctatgccgagaccctcgggctcctgcgtgttgatctgtcctcggtccgggcaggcggtgcgcctttccacgggatcatccccgggaagcgcgtccagcccctcagacaactcgaccttcccatctgcttcggaacaccctccaacttccgaagggagaccctcacgttcgaggtggtcgggttccgaggaacctaccacgcagtattggggaggccatgctacgcgaagttcatgaccgtccccaactacacctacctcaagctcaagatgccgggccccaacggggtcatcaccgtcggccccacgtaccgacacgcgttcgaatgcgacgtcgagtgcgtggagtacgccgaggccctcgccgagttcgaggccctcatcgtcgacctggagagcctctctaaggaggtgccagacgtgaagcgccacgccggcaacttcgagccagcggagacggttaagtccgccccctcgacctcagcagcgacgcctccaagcatatccggatcggctccgagctcgaccccgaataggaagcagtgctcgttgactttctccgcgcaaacgccgacgttttcgcgtggagtccctcggacatgcctggcgtaccgagggatgtcgccgagcactcgctggatatccgagctggagtccgacccgtcaagcagcctctgcgccgattcgacgaagaaaagcgcagagccataggcgaggagatccacaagctgatggtcgcagggttcatcaaagaggtattccatcccgaatggcttgccaaccccgtgcttgtgagaaagaaaggaggcaaatggcagatgtgtgtagactacactggtctaaacaaagcatgccaaaaagttccctatcctctgcctcgcatcgatcaaatcgtggattccactgcgggatgtgaaaccctgtctttcctcgatgcctactcagggtatcaccaaatcaggatgaaagagtccaaccagctcgcgacttctttcatcacaccttttggcatgtactgctatgttactatgccatttggtttgaggaatgcgggtgcgacgtaccaaaggtgcatgaaccacgtgttcggcgaacacattggtcgaacggtcgaggcttatgtcgatgacatcgtagtcaagacgaggaaagcctccgacctcctttctgaccttgaaacgacattccggtgtctcaaggcaaagggcgtaaaactcaatcccgagaagtgtgtcttcggagtcccccgaggcatgctcttggggttcatcgtctccaagcggggcatcgaggccaacccggagaaaatcgcggccatcaccaacatggggcccatcaaggacttgaaaggcgtacagagggtcatgggatgccttgcggctctaagccgtttcatctcgcgcctcggcgaaagaggcctacctctgtaccgcctcttaagaaagaccgagtgcttcacttggacctccgaggccgaggaagccctcaggaacctgaaggcactccttacgaacgcgcccatcttggtggtcagcgccgcgatcgtggttgagagacaagaagaagggcatgcattgcctgtccagaggccggtttacttcatcagtgaggtactatccgagaccaagatccgctacctgcaaattcagaagctgctgtacgcggtgatcctgacgcggtggaagttgcgacactacttcgagtctcatccggtgactgtggtgtcatccttccccctgggggagatcatccagtgccgagaggcctcgggtaggattgcaaagtgggtggtggaaatcatgggcgagatgatctcgttcgcccctcggaaggccatcaagtcccaagtcttggtggactttgtggctgaatgggccgacacccagctcccggcggctctgatccagccggaactctggaccatgtttttcgatgggtcgttgatgaaaacaggggcaggcgtgggcctgctcttcatctcgcccctcaggaaacacctacgctacgtactgcgcctccatttcccggcgtccaacaacgtggctgagtacgaagctctggtcaacgggttacgcatcgccattgcgctaggggtccgacgccttgacgctcgcggcgactcgcagctcgtcatcgaccaagttatgaagaactcccactgccgcgacccgaagatggaagcctactgcgatgaggttcagcgcctggaggacaagttctacgggctcgagctcaaccacatcgcccgacgacacaacgagactgcggatgagctggctaagatagcctcggggcggacaacgcggtgcatatccatcgccgaaggccaggagctcttacgagaaatacacacgggggcttgcggtcatcacgcagcgccccgagcccttgttggaaatgccttccgacaaggtttctactggccgaccacggtggccgacgccactaggattgtccgcgcctgccaagggtgtcaattctacgcaaggcagacccacctacccgctcaggctctgcagacaatacccatcacctgggcgtttgctgtgtggggactggacctcgtcggtcccttgcagaaggcacccgggggctacacgcacctgctggtcgccatcgacaaattctccaagtggatcgaggtcctacccctgaatagcatcaggtccgaacatgcggtggcattcttcaccaacatcatccatcgctttggggtcccgaactccatcatcaccgacaacggcacccggttcaccggcagaaagttcctggacttctacgaggatcaccacatccgggtggactgggctgccgtggctcacccccatgacgaatgggcaggactcaagccgaggatctacaacgacctccacaagttcggcaggcgatggatgaaggaactcccctcagtggtctggagtctgaggacaacgccgagccgagccacgggcttcacaccgttctttctagtctatgggactgaggccgtcttgcccacagacttagaatacggttccccgaggacgagggcgtacgacgaccgaagaaaccagaccgaccgagaagactcactggaccagctcgaagaggctcgggacatggccttactacgctcggcgcggtaccagcaatccctgcgaggctaccacgcccgaggggttcggtcccaagacctccaagcgggcgacctggtgcttcggctgcgacaagacgcccgagggcggcacaagctcacgcctccctgggaagggtcgttcgtcatcgccaaggttctgaagcccgggacatacaagctggccaacagccaaggcgaggtctacagcaacgcttggaacatccgacagctacgtcgcttctacccttaa

SEQ ID NO: 115911 - DNA, 3876 bp, Zea mays
  Clone ID: MRT4577_37194C.1
atggcttcaattagggctcccattgcctatgggggttttgctttggggttttggggagatccccacttagatgtgcatgataagctagggcatgacatccaaggtagtttacacttggttaagatcttgaattcaaggtttgaggggggtaaccctggggtggacaccctgagtaacacctggggtgttacagtgagcaagttgggtcgcaagactcccaccagggcgagcgagctgatggacatcaccaccaagttcgccactggtcaggaggcggtcaaggccatcttccagaaggacaagcagcctcaggggcgccagccggaagacgtccccgagggtcccgtcaagcacacccttgaggagtgcgtcatgcttcggcgctacttccacaaggctgggcccccggcggaaggtggcagagcccacaacaacgacaagaaggaggatcacaaggcagaggagttccacgaggtccacgactgcttcatgatctacggtgggcaggtggcgaacgcctcggctcggcaccgcaagcaagagcgccgggaggtctgctcggtgaaggtggcggcgccagtctacctagactggtccgacaagcccatcaccttcgaccaaggcgaccaccccgaccgcgtgccgagcccgggaaagtacccgctcgttgtcgatcccgtcatcggcaacgtcaggcttaccaaggtcctcatggacggaggcagcagcctcaacaccatctacgctgagaccctcgggctcctgcagatcgatctgtcctcgatccgggccggcgcggcgccctttcacgggatcatccccgggaaacgcgtccaaccccttgggcaactcgatctgcccgtctgcttcgggactccctccaacttccgaaaggaaaccctcacattcaaggtggtcgggttccgaggaacctaccacgcagtactggggagaccatgctacgccaagttcatggccgtccccaactacacctacctcaagctcaagatgtcgagccccaacggggtcatcaccgtcggctccacgtaccgacacgcgtacgaatgcgacgtggagtgcatggagtacgccgaggccctcgccgaatccgaggccctcatcgccgacctagagagcctctccaaggaggtaccagatgcgaagcgccacgccggcaacttcgagccagcagaggcggaagcagtgctcgtcgactttctccgcgcgaacgccgaggtttttgcgtggagtccctcggacatgcctggcataccgagggatgtcgccgagcactcgctggatatccgagctggagcccgacccgtgaaacagcctctgcgtcgattcgacgaagaaaagcgcagagccataggcgaggagatccacaagctgatagctgcagggttcatcaaagaggtattccatcccaaatggctagccaaccttgtgcttgtgagaaagaaaggtgggaaatggcggatgtgtgtagactacactggtctaaacaaagcatgtccgaaagttccctaccctctgcctcgcatcgatcaaatcgtggattctactgcttggaatgcgggtgcgacataccaaaggtgcatgaaccacgtgttcggagagcacattggtcgaacggtcgaggcttacgtcgatgacattgtagtcaagacgaggaaagcctccgacctcctctccgacctcgaaacgacattcaagtgtctcaaggcgaaaggcgtaaaactcaatcccgagaagtgtgtcttcggagtcccgcgaggcatgctcctggggttcatcgtctccgagcggggcatcgaggccaacccggagaaaatcgcggccatcaccaacatggggcccatcaaggacttgaaaggagtacagagggtcatgggatgctttgcggctctaagccgtttcatctcacgcctctgcgaaagaggcctacctctgtaccgcctcttaaggaagaccgagcgcttcacttggacccccgaggccgaggaagccttcgagaacctaaaggcactcctcacaagcgtgcccatcttggtgcccccccgctgcgggagaagccctcttgatctacgtcgccgctaccactcaggtgcttccagcagctccgatccaaccggaactctggaccatgttttcgacgggtcgctgatgaagacaggagcgggagcgagcctgctcttcatctcacccctcgggaagcaccttcgctacgtgctgcgcctccatttcccggcgtccaacaacgtggccgagtacgaggctctggttaacgggttgcgcatcgccatcgagctatgggtccagcgcctcgacgctcgtggcgactcgcagcttgtcattgaccaagtcatgaagaactcccactaccgcgacccgaagatggaagcctattgcgatgagacaacggttcctccggacgtcttctcccgagacctacatcagccctcagtcaagaccgacgacatgctcgagcccgagaaggtctcggccctgcccgaggcgccctcggctcagcccaaggcaccctcggcccccgagggtgaggcactgcgcgtcgaggaagagcggaatggggtcacgcctaatcgaaactggcagaccccgtacctgcaatatctccaccgagcccctcgggcatcctccagcgatgcatatccatcgccgaaggtcaggagttattacaagaaatacactcgggggcttgcggtcaccacgcagcacctcgggccctcgttggaaacgccttccgacaggggtttctactggccaaccgcggtgaccgatgccactaggattgtacgcacctgccaagggtgtcaattctacacaaggcagatgcacctgcccgctcaggccctacaaacaatacccatcacctggccatttgctgtgtggggtctggacctcgtcgatcccttgcagaaggcacccgggggctacacgcacctgctggtcgctatcgacaaattctctaagtggattgaggcggtggcgttcttcaccaacatcatccatcgctttggggtcccgaactccatcatcaccgacaacgacacccagttcactggcagaaagttcctagacttctgcgaggaccaccatatccgggtggactgggccgccgtagctcaccccatgacgaatgggcaggcgatggatgaaggaactcccctcggtggtctggagtctgagaacgacgccaagccgagccacgggcttcacgccgttctttctagtatatggggccgatgctatcttgcccacagacttagaatactgatccccgaggacgagggcgtacgacgaccgaagcaaccggaccaaccgagaagactcactggaccagttggaagaggctcgggacatggccttactacactcggcaaggtatcagcagtccctgcgacgctaccacgcccgaggggttcggtcccaagacctccaggtgggcgatttggtgctttggctacgacaagacgcccgagggcgccacaagctcacacctccctgggaagggccgttcatcatcgccaagattttgaagctcggaacatacaagctggccaacagtcaaggcgaggtctacatcaacgcttggaacatccgacagctacgtcgcttcttcccttaagatgttttcaagtcgttcatatacctcgtttacatacacaaataaagtctaaccatcaaggaagggtcagccttgcctcggcaaagcccgaccctccctcaggggctagaagggggaaccccctctgcgtcaaaattttcctcggaaaaagcctttctgccagaacatctttcgtgcttttcgactactttgatagtgggatcctgaaaacgacggagtacacgtaa

SEQ ID NO: 115912 - DNA, 216 bp, Zea mays
  Clone ID: MRT4577_37195C.1
atgtgcatgactggtctgtacaagaagaaagcttgtgcctcctcatacaccaaagttaagttgtagcctacttgattgctgtccttgctggagaacgccagcccctccgtttaggatttcactgacaccctgctcttccctggcctccaagctcacactgtaatctcggaattactgctgaaacaactgaccgggaaggatatcactcacctcatc

SEQ ID NO: 115913 - DNA, 186 bp, Zea mays
  Clone ID: MRT4577_37196C.1
aaaaaaataatgatttttacgggtccttaatatcgccgatttaaaaaacgcttgtaaaaatttgttccggcggttttttttggtactacccatgggggtggggacaaaaccccgaaagcgggggggccctgaaaatcacgtgtcctttaattgcctttttttggcccggcggacgaccccaaaacc

SEQ ID NO: 115914 - DNA, 631 bp, Zea mays
  unsure (1)..(631): unsure at all n locations
  Clone ID: MRT4577_37197C.1
gccggccgggnatcactttctcagtcggtcactgctcgcagtaaacacctcgaagtcgcccccggtctcgaacacagtaccgagtaaagcgtctaatggcctcccgaatgcgtctcgatcacatccgacagtcatcagattggcagcaccaaggtaggagcaaaaagcccgtcggatgaagacagcccagtggcagcgtaggagacctcgcggaccagacgaaggctggacgaaggtttccggacaggcatagaagccgaaggaggggaaacgcctccccgcggcatagtccggtgccggtgagggcaaaaagggcaagaagaaatccgagaagagcgtggagacctacaagatctacgtcttctatgtgctctagctggtgcaccccgacatccgcatctcgtccaacgccatgtccatcatgaatttctgcatcaacgagcatctatccagatatctctccgccgagggcgccaagttcgcccgctacaactagaagcccatcatcacctaccgtgagatgcagacctccggacgcctcgtcctacccggcaagctcgccaagctcgccgctctctgaaggtacaaaggcggtcaccaagttcacttcgtctcatattggttgccttcc

SEQ ID NO: 115915 - DNA, 1720 bp, Zea mays
  Clone ID: MRT4577_37198C.1
cggggacggcttagccgcggacagtacaggaacccgaaggagtttgctgaggatgtccggctcactttccataatgcgatgacatataatcctaagggtcaggatgtgcattttatggcagagcagttgtcaggaatcttcgaggcacagtggcctgagattgaggctgaggttaactaccttgcatcgtgtcctccattgccgaagaagtttccacctccaccaattgacctgcacttcctagagaggtcagattcgatgagacaccacatggcattggacaccaattcaagaccgatcagtcatactcccacttacacccggactccatcaatgaagaaaccaagggcaaaggatccaaataagagggacatgacaatagacgagaagcgtaagcttagtgagaacctgcagaatttgccacctgagaagcttgatgctgttgtgcaagtcattaagaacaagaacctatcagttatgcagcatgatgatgagattgaggttgaaattgatagtatggatgctgagacactttgggagcttgaccggtttgtggccaactacaagaagaacctgagtaagcaaaagaggaaggccgagcgagcgatgcttgccagacaagatgcagagttgcgtgcgcagcgccttatacaacaaccgcaaccaaccccagtcccccaagaacctgttggtgaaaaatctctaaagcaagttgcaaaagattcactggcaggtgagcaactaccaacatctgcatcagagaaaaacgacgagaatagacagaacgcgagtggttcaagcaattcaagcagctccagcagtgactcaggatcatcgtctagcgactcagacagtgatagctcctcttcagatggatctgatgctgccaattcatcttgagatataggttcacaagttctgtcgagtagacaataactgtctatttgacatgacattggcaccataagactgtacatgcttaccttgtctggcttaggaaaccccctgtattttaagtagctttgtatgtggattcaccggctggaggcagtaacttaggtttcatggtgtacccgcctaataagactaggcttgttgctgacaccgtgtctttgtacaccgcactgttgctaggagccctcagttggctcagtagcctgtacattagcggcagcttgcacattgattctgtttagctgtgttgattgcagtatgtaggaaggcgattgccgtaagcattgtttcttccatctgttaactgactgatgaaagcattgacaaagcccaaaaaaaaaaaaaaaaaaaaaaaaaccagtgattcggaggcttcatcaccacaccatgcgcaaaagtctgttggattgactgctctaaattcgggtcttgggtttgcataaagtttgttgatgcacatgatgttcgtcatgacgatcattgatggtccattgttatgttatggagtgaggaatagaggtgattaggtggttgtgttgggcacgagagatgatgtatagcagcagttcggacctttgggtgggtagcagtaggtagcctcccctcctttcctctggtctggtgatgatggtttgttggagatgtggctatatgtgcgtatgatatgccgtggctccttttgagctgtttgctgcctggcgtcttccagcgatggataatacgtgaagggtgggctgggacagccatacaaccaccccctcagttg

SEQ ID NO: 115916 - DNA, 282 bp, Zea mays
  Clone ID: MRT4577_37199C.1
ggactttgagaccgatgtcgtcttcctggtgcccaccgagattgccctagcccagcacagagccaatgccaagagtgccaagacctacgcctacctgttttcccatccctctcggatgcgcgtctaccccaaatgggtgggggccgaccatgcagatgacattcagtacgttttcgggaagcccgtcgccacccccacgggctaccggccccaagacaggacagtctctaaggccatgatcgcctactggaccaactttgccaaaacaggggaccccaacat

SEQ ID NO: 115917 - DNA, 440 bp, Zea mays
  Clone ID: MRT4577_3719C.1
gtgctttgtttggcagacttagcaccgggacggcacctggacacctcttggacacgtgccctgccgctgcaacatcacggcctgggcttacgcgaccgacttgccgcggggcgggcgagcgagggggtaactgctggcatgcgtgtacctgagcactctgtacgttgcaacaatgtctggctaaggaggtttggcagccacaaaacatggaccaatggtgtatctgtggctgcacgctcgggagtgcagctggtcaactatatatgctgtgcctgggcaagaagaacaacgtcaagtcggggaccgcgatctagatgatccaacgttacctaacctggcatgctacgggattcatcttgtatccaggatgctaaatgtacaagagtggcagctttttaacaagcactgaattgggaacaccttgtggtggcccaacttaa

SEQ ID NO: 115918 - DNA, 412 bp, Zea mays
  Clone ID: MRT4577_371C.1
caagtgcatatcatacacaatgggtggaggtggaaagattccgtatcccaaggaagtttggtcacccgccggtggttggtacgcccagccaggctattggaaggccaacactgcgatcatgggtgctttcgtgatcggtgtcgctgccgtcgcattcagcatcagcgccgaccgcgagtaccgtgaccggatgcctgaacctggccgattattgcctagccgatactggagcctacagattcgcgaacacgaaaagcagcaggccgcgcaaaactcctcatgaggagcaggtctacgagccggaaaaggacgaggggtggctttgcggcgtgacagagcagtttccttaatatgtgtcttctatcatttcatcattctctgtggctgtatgacaacgaaaagggcgtttttt

SEQ ID NO: 115919 - DNA, 255 bp, Zea mays
  Clone ID: MRT4577_37200C.1
ccgcaggttttactgtttgcttcagagtccagttgtttttttatgaaaatcggacagaaaatctctaggttagacctcaattgtgacctggagagtgtgcgttcaaaaactgacttattgttgccgcaagtgtaggggacttaaacggccagctgttgcacgcattgagaggtttcctctgggaggtgttttgaggagccctcgccatgggattgctgggggccagccacatggctttaaattgaaacggactgg

SEQ ID NO: 115920 - DNA, 2341 bp, Zea mays
  Clone ID: MRT4577_37201C.1
gatttacggaaatttcctataaaaataatttatctttattaggcttctttggtggggctctcagttggcaagggacttctatattacccagcgtccggcttgccggattcctccctcacacatggttgtgttgggtagttcgcagccggcctggagcgccccaagcaccacaagaagaaacataggtccctagaatctcgtggcgcagactttgatgccgagcggcgcctgtactctcatgcgttcaagaagtcctcatcacttctgagccgcttaatgaagcacaagtttgggtgggtgttcaacaagcctgttgatccagttacacttggtttgcatgatatcaagcacctggatcttggcacaataacggcttagccgtggacagtacaggaaccctaaggagtttgctgaggatgtccggcttactttccataatgcgatgacatataatcccaagggtcaggatgtgcattttatggcagagcagttgtcaggaatcttcgaggcacagtggcctgagattgaggctgaggttaactaccttgcatcgtgtcctccattgccgaagaagtttccacctccaccaattgacctgcacttcctagagaggtcagattcgatgagacaccacatggcattggacaccaattcaagaccgatcagtcatactcccacttacacccggactccatcaatgaagaaaccaagagcaaaggatccaaataagagggacatgacaatagatgagaagcgtaagcttagtgagaacctccagaatttgccgccggtgaagcttgatgctgttgtgcaagtcattaagaacaagaacttatcagttaagcaacatgatgatgagatagaggttgaaattgatagcatggatgctgagacactttgggagcttgacaggtttgtgtcgaactacaagaagaacctgagcaagcaaaagagaaaggccgagcgagcgatgcttgcccgacaagatgcagagttgcgtgcacagcaccctatacaacaaccacaaccaaccccagtcccccaagaaccttttggtgaaaaatctccaaaacaagttgtgaaagattcgctggaaggcgagcaactgccagcatctgcaccagaacaaaatggtgagaatagacagaatgcgagtagttcaagcaattcaagcagctccagcagtggctcaggatcatcttctagtggctcagacagtgatagctcctcttcagatggatctgatgctggcaattcatcttgagatataggttcagaagttctgtcgagtaggcaataactgcctatttgacgcgacaatagcaccataagattgtacatgcttaccttgtctggcttagggaacccctgtagtttaagtaggttttgtatgtcgattcacccgctgatgaaggcagtaacttgtaggtttcgtggtgtacccgcctaataagactaggcttgttgctgacaccgtcccttggtacaccgcacttttgctaggagccctctggctggcccagacagtactagcatgtacattagcggcagcttgaacgctgattttgtttagctgtgttgattgcagtatgtaggaaggcgactgctgtatgcatttttttcttacttttgtttaacttacggatgaaagcattggcaagccccgttggtgttcagtttgcccccatctttttgtggactacctgtaacccctgtgggttcatcgccatgtgccaagtctttttgatgttgtaaattaaagtttgttgatgcatctgatgtttagcatcacgactattgacggtccattgttatgttatgatgtgaggaatgtttgctggaaaaaaaaagaaaaaaaaaaaaaaaaaagaataggtggttgtgttgggcacgagcacgagagatgatgtgtagcagttcggacctttgggtgggtagcagtaggtagcctcccctcctttcccctggtctggtgatgatggtttgttggagatgtggctatatgtgcgtatgatatgccgtggctccttttgagctgtttgctggctggcgtcttccagcgatggataatacgtgaaggctgggctgcgacggcctccagcatgcagtcagttgaagtgaagtgtacgtgtggatgttccgtctgttgggtgtgccttcctttggcactgtacgtttggttcgtcagctcaggtgtctggtctacgaggagcaatgtagtaaaggcagcaggctgttcgtattggttatttggaagtagtagggtcagcataatggaggggatcgaaggggccaaaataacttaggctaaaacaacatagtacctctgttttaaaatagt

SEQ ID NO: 115921 - DNA, 256 bp, Zea mays
  Clone ID: MRT4577_37202C.1
aatcgaaacaatgaccacaatacagatactgttagccatccgttttggaaatgaggagaatgttacaacagagatattcattatcccattgctgagtcccaaatcctatttgaaaaacatgacttcaaattcagtactcttgattatatactactgcttgcttccagcattcaaaggcttacatattttaataaaatcaaatatataaaacgtctaagttggggttggggatttaactcactggtagagcgcttgc

SEQ ID NO: 115922 - DNA, 522 bp, Zea mays
  Clone ID: MRT4577_37204C.1
ccaattaaaaaatgatttttattttttaaaataatggaatttctttttctttttataaaacaaaaaatgtgaagagaaagcgaccaaagagaacgaacgacgaagcatttgcacttgaaattgaaattcgctcactttgtaaattaaaagcgaaatcattgtgtgtccattggttcggcttcgagttgacgggcgattgtattttcgattttgatcggaatgacgaatcgagagatgattgcagcgcttcctcgcttgaatcgatacttcttttccttttcgcctcgtttgacggcaatttcgtaatttcgcagataatcggcaccatctttagtgatcacacacaaatcaatgttgttacctgatccttaatcgttgaaaacaccggcagcaattgcattcctgaccaattgtttgccttcttccaacgtcatgtccggtttccatccacgttcaaggaccgacaaagcggccaaacaccggaaccattgcagtgtattgcttttgtcgatcgaaccatgc

SEQ ID NO: 115923 - DNA, 177 bp, Zea mays
  Clone ID: MRT4577_37205C.1
actagtaagttcactttttcggggggaatttttgaatatcacaggcggaccaaaaccaacccttacagaaggactacggtcacaacaaagagtgacccacagagggcacaaaaaaaaggccctccgaacggggaatgcaacaaggcaacatcccaaacagttctgaaaaccggggcc

SEQ ID NO: 115924 - DNA, 233 bp, Zea mays
  Clone ID: MRT4577_37206C.1
aggcaccgtccgggagctcggaattcgtctcgagacaggacatccaactgattttttgctcgcccctcttattctgctgtcgtgggggtgatttttgaccctcaagaagaaacaaacacggctgtctcacactacatagctgctcctccccgaaattaccagccggaccactaccattacagcggcacaccgtttccatatactcagacttgttctaacttggaagaatgcac

SEQ ID NO: 115925 - DNA, 206 bp, Zea mays
  Clone ID: MRT4577_37207C.1
tttccttcagcttcagccgccgaccgccagcgtgcagcctgcgactctatcaggtgccaacctcaaccccagccccagctacagccgaccagccgactagctcccagactatctctacccgccttctgctttcaccagctacagccgccgcccgtcaagcgctagccgtacgacctatcgcctacaaagctgaggccaaaatccag

SEQ ID NO: 115926 - DNA, 1461 bp, Zea mays
  Clone ID: MRT4577_37208C.1
gagagagagagagagagagagagagagagagagagagagagagagagagagagagagagagagagagagagagagagagagagagagagagagagagagagagagagagagcgcacctggtttcgtccccaaatctcactcaatccccagtcccgacacccatcctctccaccgaagtcaccaccgcatggacgacgccgcgaatcccacccctccaccatccacctccgccgcatccgcggcggccgcggcggcgcaacaccagcagctccagcgccaactcttcctaatgcagcaggcgcagtcccatccgcagcagctgtcgcagcaggccatgtcccgcttcccctccaacatcgacgctcacctccgccctctagggccgcttcgcttccaacagccccagccccagccccagccgtcccactcccagggtccatctcagtcgccgtcgcaggccacgcagcaggcgtcaccccagcagcagcagcagcaggcggcggcggcggcggcagcggcgcaggcacaagcacaggcccaggcccaggcggcacgggtacgaagccccgagatggagatggcgctgcaggacgccatgcgggtctgcaatccggacgtcaagacgcccttccagtccatcgaggacgctgtcaacaggttattaccttaccatgttgttgccgactatgaggctgaagaagatgacaggatccttgatagcgacacaacaggccagatcccttctcgcctgcagcaatgggaccataatattctggtgaagattgctgagttcacgacaacttttgacaagcaagtattggcatataacataatgaccaagaaaagggccatcggtgagttcaggtcggaggagcggctcatgctggagcaagccttattgcaggaggaaaagcaagctatgctgggactgagggcagagatggagtcgagagagaaagctggtcgcgaggctgccgaagtgaagatgcgtttggcaatggagcatgctcgtgctgaggcacaagctcactctgagatgatgaatcatggtcctataagggccagtgctgttgcttcgcaaggggaggatggtccgagtcatgacatggtgcaagaacatggcgaagatgggtggggaaattctcagagggatgatgaagatccatcggaggatttcctcaacgatgagaacgaacctgagaatgggaactcagatgggcaggaggactggcgcagatctggggagtttgatctcaactctaggtaaggcagttggatttccacatgaaggtttctaggtaggctacgacatgctggtattgtatctactattctattgttgtgttcggtgaagatgtctttgtggctgtaaacatggcattcgaacaattcagtttctttgtaatttgactagtaatatttacttgagcactcaatatgtgccatttccaacttggagaa

SEQ ID NO: 115927 - DNA, 425 bp, Zea mays
  Clone ID: MRT4577_37209C.1
aaggttgtcccatcattttattgcacataaaacagggtgcatcgtagctcctcggtgtataaacgattttttttgcttatcgcctccatcacctggcgcacaaaccgctctgatccactgacagacagacgaattttgtctactcaaacaattacgccgaaatgggcgggcggaactacggcccgctgacccaaccggcggcgatcttcctgtacgccgcctccgtcaggtggatgccgccccatctgagcgaccacaacaggttggaccacgcgtgcgcgccgggcatgccgcaactcgcgccattctggtaagtgtacttgccgcccacggcgccgcaggacgccctgaggttcgcgctgaacccgtagctgacggacctactgaccatatattatacgcgggcggagaagtcggcgtacatg

SEQ ID NO: 115928 - DNA, 153 bp, Zea mays
  Clone ID: MRT4577_3720C.1
atgggacaatgccaagaagtacatgcaccgcctaaggcgtcttcagaaacacgacaatgagcgatcaacagatatattgacattcaataaagagcgcatcaatcataatatgcaagagagaggtatggataaagactttgtaaaaggtatttg

SEQ ID NO: 115929 - DNA, 708 bp, Zea mays
  unsure (1)..(708): unsure at all n locations
  Clone ID: MRT4577_37210C.1
agcgccgcagctttgaacctggttctcctgtcgctgtcgcccatcttgcggcatcccaccacggcaccaccgccacagaagagcggccgagcggtgcagagaaccagccagccgagctgagcggccgcgcttccggtgggaggatggagaaggctctcaccaaactgggcagcttcaccatctcccgcaaggccaagcaggagctctccgccatcggcgacgacatctctcgtttctcgagcacggtggaggagaaggcaaaatgggtcttcgaaaagctcaaaggtacagttgttctgttccattgcattttgtggctctgaaaataagagtgtctcttaaaagatgtatgtagatgatgaattagaaccttctggctgcatgttaagttgttatgacatcatcatcagggcaactatgaactatcgattgcggctaccttttctttgcctcatgcgtaaaaccaaagcaatgcaggaaagagaggtttatccaatatgattatatgtactggcttcctgattcctagcctttcctctgattggatctagcttttcttggatttcctgtacccctttgatctgtaaagtagagtgcacatgggggtcgaaactgaaatgacttttgtgacatcctgctgcacgcactgtgaaattttggcggtccgggcatgtgccnnccgcccccccccccccccccctttttttt

SEQ ID NO: 115930 - DNA, 225 bp, Zea mays
  Clone ID: MRT4577_37211C.1
cccacgcgtccgaggacgcgtgtggggtcccgcgctcgcggataactaggcgcaggggtccacttttggcgttttgctcatattcgacggcaccatcatctctcccgccgaccttgtgttccctggtgtccctgggatatacaatcaagagcagacttattcattgaaaaaggaggttgatgctgaacatgccaagtaagctatcttattctgccaactattgta

SEQ ID NO: 115931 - DNA, 327 bp, Zea mays
  Clone ID: MRT4577_37212C.1
ccgggatcatcctcacctcatcacttgcaagtatagtctcgtgcgagtctacaatactatgggcaaggacgacgtgatcgagagcggcgctggcggcggtgagttcgctgccaaggactacacggacgctcccccggggccgctgatcgacgcggatgagctgggctcactggagctgtagcgcaccgagagcggcgaggtcttcgcacacgctgctcggccggggaggtgcggtggccgcgctggtcccgggacaccaccagacggattctgccgctgcggagagagttcgcacattgcacttggacgaaagagtgctgttgccca

SEQ ID NO: 115932 - DNA, 2901 bp, Zea mays
  Clone ID: MRT4577_37213C.1
atggcggccgacaacccgcccgccggcggcggaatcgacgacgtcttccccatgtggaggaggcggggcaaccaaggccaagcaggaggcggcacctcgtcggctgttgagcgaatcgacggcgccgacgccccaacgggggacacgtcgggcgtcgacctcgcgtctgagacgaagacgagcgtcgtttccctgcaacacgccaactccaagcggacgaacgacgccaacacgctcgcaaaggacttgctgggcgtcaccctcgtacccgagacgacggtgcagtctgcccctgacgcgacttcgtcaccgcccgtcaaccaggaggtaccgaccgattcccatctcgtgccttttggattcagcctcgacccaccaagcgactttgcttcggtggaagccttcatagaggcgtgtccaaaccctccggggtacggtgtacgatcaccctgggaccggctgacagccgtctcgacctatgggccctcgggttccgggaaagatgacgagcccgacttttgttgggatttctccggacttggtaaccccagtgccatgcgggacttcatggccgcatgcgactactgcctttccgactgttccgacggtagccgcagcttcggcgacgaggactgcggcccaagtcgtgaatgtttccacgtcgatctagggggtcccgacgaaggcaaccatcttggtataccagaaaacggtgatccccctaggcctgcgcctcgcgttgacatccttcgggagctagctgtggtcccagtccctgcggggggtcaggacgcacagctcgagcaaatccgcgagatgcaggccaggctcaacgagggagcaggaacacttgagccgttccgccgggacatcgggcaggaatgggcaggccaagctccggccggagaagcgcgtcatctaccccagggcatccagcaccgcatcgccgacgatgtcagggcaaggccgccaccggcttccagtggggtcggccagaacctggctgcagcggcaatacttctccgcgcgatgccggagccatcaaccaccgaggggcggcgtatccagggagagctcaagaatctcctggaggatgtcgcggtccgacgggccgaaagctctgcctcccgaaggcagggatacccctcggagcatcgcgccgcgacttcccgattcatgcgggaagcctcggtccacaccgggcgcatgcgcaacacagcgcctgcggccccgggtcgcctcggcaacgagcaccaccaccgcaaccgtcgaacccacctcgacgagagggtgcaccgaggctaccaccccaggcatgggggacgctacgacagcggggaggatcagagtccctcgcccgaaccagccgggccatacgacggccgtcgttcccgacccggttctgaaccccgactactatcacaaaatctccaactggaagacctggtccaagccttcgccggcaacttccagggcacgtacgtgcgccctgggaactcctgggatctccaaagctgccgccagcagccgggagagtctctccgggactacatccggcgattctcgaagcagcgcaccgagctacccaacgtcaccgactcggatgtcatcggcgcgttcctcgccggcaccacctgccgcgacctggtgagcaagctgggtcgcaagacccccaccagggcgagcgagctgatggacatcgccaccaagttcgcctctggccaggaggcggttgaggccatcttccggaaggacaagcagccccagggccgccagccgaaagatgtccccgaggcgtccactcagcgcggcaccaagaagaaaggcaagaagaagtcgcaagcgaaacgcgacgccgccgacgcggaccttgtcgccgccgctgagtacaagaaccctcggaaacctctcggaggtgccaatctcttcgacaagatgctcaaggaatcgtgctcctatcatcaggggcccgtcaaacacacccttgaggagtgcgccatgcttcggcgccactttcacaaggccaggccacctgcggaaggtggcagggctcacaacaacgataagaaggaggatcacgaggcgggggagttccccgaggtccacgactgcttcatgatctacggtgggcaaatggcgaacgcctcggctcggcaccgcaagcaagagcgtcgggaggtctgctcgataaaggtggcggcgccagtctacctagactggtccgacaagcccatcaccttcgaccagggcgaccaccccgactgtgtgccgagcccggggaaatatccgctcgttgtcgaccccgtcatcggcaacgtcaggctcactaaggtcctcatggacggaggcaacaacctcaacatcatctacgctgagaccctcgggctcctgcagatcgatctgtcctcggtctgggcgggcgcggcgccttttcacgggatcatccccgggaaacgcgtccagccccttggacaaatcgatctacccgtctgcttcgggactccctccaacttccgaagggaaaccctcacgttcgaggtggtcgggttccgaggaacctaccacgcagtgctggggaggccatgctacgccaagttcatggccgtccccaactacacctaccttaagctcaagatgccgggccccaacggggtcatcaccgtcggccccacgtaccgacacgcgtacgaatgcgacatggagtgcgtggagtacgccaaggccctcgccgaatctgaggccctcatcgtcgacctggaaagcctctccaaggaggcgccagacatgaagcgtcatgccggcaatttcgagccagcagagacggtcaaatccgtccctctcgaccccagcaacgacgcctccaagcagatccggatcggctccgagctcgaccccaaatag

SEQ ID NO: 115933 - DNA, 4587 bp, Zea mays
  Clone ID: MRT4577_37214C.1
atgggtagtctacagcaacctcttcagcccgggacggtgctccgcttcgggagtctcgagttcatgtccctcgacggcagctacgacatggtactccttcccccgcagcgcggcagcaaccgcgacggtcgtcagctcgcccggcggcgatggactcgacgacgtcttccccccgtggcagaagagcagtatccaggtttgtcccgccaccctcctcgccgcaggaggaggagacggggcaaccgtggccaggcaggaggtggcacctcgtcgactgtcgaacgagtcgacgacgccggcaccccagcgggggacatgtcgggcgttgtcctcgcacctgggacaacgacggatgtcgtttccccgcaacgtgccaaccccaagcggacagatgacgacagcacactcgcgaagggcttgctgggcgttagcctcgtacctgagataacggtgcagtccgtccccgacgcgacttcgtcaccgtccatcggtcaagaggtaccgtccgttttccaccctgtgtcttttagattcaacttcgatccaccaagtgaccccgcttcggtgagcgctttcgtaaaggcataccctaaccttttgtggtaccacatgtggtcaacctgggaccgactgatggccgtctcaacctatgggccctcgggttccaaggaagaagacgagcccgactctggttgggatttctccgggctcagtaatcccagtgccatgcgagacttcatgaccgcatgtgactactgcctctccgattgctccgatgatggccacagccttgacgacgagggttgtggcccaagtcgcgaatgtttccacgtcgatctagggggtcacgacgaaggcaaccacctcggtatgctggaggatgacgatccccttgggcctgtgcctcgcgttgacatcctgcgggagctagatgtggtcccagtccctgcggggggtcaggacacacagctcgagcaaatccgcgagatgcaggccaagctcgacgaggaagcagggcaacttgtgcacctccggcaaaacatcgagcaggagtgggcaggccgagcactcgccggagaagcgtgtcatcgggcccaggacgtccaacgccgtattgttgacgatgccagggctaggctacccccgacctctagcggggtcggccagaatctggctgcagcggcaatactactccgagcaatgccagagccatccaccaccgaggggcggcgtatccagggagaactcaagaatctcctggaggatgccgcggtccgacgggccgaaagctctgcctcccgaaggcaagggtgccccccagagcatcgcgcaacaacttcccgactcatgcgggaggcctcggtccacaccgggcgcacgcgggacacgacgcctgcagccccggatcgcctcggcaatgagcatcaccgccgcgaccgtcgagcctgcctcgacgagaaggtgcgccgaggctaccaccctaggtgtgggggccgctacgacaatgaggaggatcgaagcccctcgcccgaaccaccaggggaatccctgcgagagtacatccgacggttttcaaagcagcgcaccgagctgcccaacatcaccgactcggatgtcatcggggcgttcctcgccggcaccacttgcctcgacctggtgagcaaactgggccgcaagactcccaccaaggcaagcgagttgatggacatcgccaccaagttcacctctggtcaggaggcggtcgaagccatcttccggaaggacaagcagcctcagggacggcaacaggaagacgtccccgaggcatccgcccagcgcggcacgaagaaaaaggccaagaagaaggcgcaaccaaagcgtgacgccactgacgcggatctcgtcactgctgtcgagcacaggaacccacggaagcctcccggaggggccaacctgttcgacaaaatgctcaaggagtcgtgcccctaccaccagggtcccgtcaagcacacccttgaggaatgcgtcatgcttcggtgctacttccataaggccgggccactggcggaagacggcaaaggccaagacaataacaagaaagagggcgacaaggaagagggtttccccgaggtccacggctgcttcatgatctacggcgggcaagtggcgaacgcctcggctcagcactgcaagcaggagcgccgggaggtctgctcggtgaatgtggcggcgccagtctacttggactggttcgacaagcccatcaccttcaaccaaggcgaccaccccgactgcgtgccgagcccaggaaagtacccgctcgttgtcgatcctgttatcggcaacgccaggctcaccaaggtcctcatggacaggggcagcagcctcaacatcatctacgccgagaccctcgggctcttggggatcgatctgtccacaatccgggccggtgcggcgccctttcacgggatcgtccccggaaagcacatcctcccccttgggcaactcgatttgcccgtctgcttcggaactccctccaacttccgaaaggaaaccctcacgttcgaggtggtcgggttccgagagacctaccacgcggtgctggggagaccgtgctacgccaagttcatggtcgtccccaactacacgtacctcaagctcaagatgtcaggccccaatggggtcatcaccgtcggatccacgtaccgacacgcgtacgaatgcgacatggagtgcgtggagtatgttgaggccctcgctgagtccgaggccctcatcgctgacctagagtgcctctccaaggaggtgcctgatgcgaagcgccacgccggcaacttcgaaccggctgaggcgttagctaaccttgtgcttgtgaaaaagaaaggtgggaagtggaggatgtgcgtagactacactggtctaaacaaggcatgtccaaaggttccctaccctctgcctcgcattgatcaaattgtggactccactgctgggtgtgaaaccctatcattcctcgacgcctatccaggttatcaccaaatcaagatgaaagagtccgaccagctcgcgacttctttcatcacaacttttggcatgtactgttatactactatgtcatttggcttgaggaatgcaggtgcaacataccaaaggtgcatgaaccacgtgttcggagagcacatcggtcgaacggtcaaggcttacgtcgatgaaatcgttgtcaagacgaggaaagcctctgacctcctctccgaccttgaaatgacattcaagtgtctgagagcgaagtgcgtgaagctcaatcccgagaagtgtgtcttcggagtcccccgaggcatgctcctggggttcatcgtctccgagcggggcatcgaggccaacccagagaaaatcgcggccatcaccaacatggggcctatcaaagatttgaaaggagtacaaagggtcatgggatgccttgcggctctgagccgcttcatctcgtgcctcggcgaaaaaggcctacccttgtaccacctcttaaggaaggccgagcgcttcacttggacccccgaggctgaggaagccctcggaaacttaaatgcgctccttacaaacgcacccattttggccataaagtcccaagtcttggcagatttcctggcggaatgggtcgacacccaattgccaacagctccgatccaaccagaactttggaccatgtacttcgatgggtcgctgatgaaaacaggagcaggtgctggcctgctcttcatctcacccctcgggaaacatctccgctatgtgctgcgcctccatttcccggcgtcaaacaacgtggccgagtatgaggctctggttaatgggttgcgcatcgccgtcgagctaggggttcggcgcctcgacgctcgcggcgactcgcagcttgtctttgaccaagtcatgaagaactcccactgccgcgaccagaagatggaggcctactacgacaaagttcggcgcctggaagacaagttctacgggcttgagctcaaccatatcgctcgacggtacaacgagactgcggatgagctggcgaaaatagcctcagggcggacgacggttcccccggacgtcttctccagggacatacatcaaccctccgtcaagaccgacgacacgcccgagcccaaggagatctcggcccagcacgaggtatcctcggccgccgagggagaagccctgcgcatcgagggggagcggaatggggtcacgccaaacccgaactggcagacctcgtacctggaatatctcctccgaggagagctacccctcgacaaggccgaagcccggcgactggcgcggcgtgccaagtcgctcgttttactgggtgatgaaaaggagctctaccaccgcagcacctcgggcattctccaacgatgcatatctgtcgcccaaggacaggagctgttgcaagaaatacactcgggggcttgcggtcaccatgcagcacctcgggccctcgttggaaacgctttccgacaaggtttctactggccgaccgtggtggccgatgccactaggattgtacgctcctaccaagggtgtcaattctacgcaagacagacgcacctgcccgctcaggccctgtag

SEQ ID NO: 115934 - DNA, 157 bp, Zea mays
  Clone ID: MRT4577_37215C.1
ctcttatacttcagctgtagctgcgatggcaacgcccgatttgtgcccggtctcgccggttcggcgggacgacaagcagtgcgctctagcgtcttcgtcgggcacaattctgatagtgcattacgcggccgctgccgatgcgtacgagcagtacctg

SEQ ID NO: 115935 - DNA, 2751 bp, Zea mays
  Clone ID: MRT4577_37216C.1
atgtcgggcgttgtccttgcacctgagacaacgacgggtgtcgcttccccgcaacgtgccaaccccgagcggactgatgacgccagcactctcgcaaaggacttgctgggcgttagcctcgtacctaagataacggcgcagtccgtccccgacgcgacttcgccaccgtccatcgaccaagaggtaccatccgttttccaccctatcccttttagattcagcttcgatccaccaagcgaccccgcttcggtgagcgcctccgcaagggcataccctgaccttccagggtaccatatgtggtcatcttgggaccgactgacggccgtctcaacctccagactcgtgggttccgaggaagacgacgactccgacttcggttgggatttctccagactcagtaatcctagtgccatgcgagacttcatgtccgcatgtgactactgcctctccggctgctctgacgatggccatagcctcggcgacgagggttgcgacccaagccgcgagtgtgtccacatcgatcagggggatcacggcgaggacaaccacctcggcatgccgcaagatgacaacaccgctgtgcctgcgtctcgcgttgatatcccgcgggagctagctgtggtcccagtccctgcgggggatcaggacacacagctcgagcaattccgcgagatgcaggccaagctcgacgaagaagcagggcggcttgtgcagctccgacaaaacatcgagcaggagtgggcaggccgagcgcttgccggaggagcgcctcatcgggcccgggacgtccaacgccgtatcgttgacgatgccagggcaaggctgcccccggcctccagcggggtcggccggaatctagctgcagcggcaattctactccgagcaatgccggagccatccaccatcgaggggtggcataaccagggagaactcaagaatctcctagaggatgccgcggtccgacgggccgaaagctctgcctcccgaaggcaagggtgcccccccggagcatcgcgcaacgacttcccgactcatgcgggaggcctcggtccacaccgggcgcaccgcgggacgggacgcctgcagccccggatcgcctcggcaacgagcagcaccatcgcgaccgtcgagcccgcctcgacgagagggtgcgccgaggctaccaccccaggcgcgggggacgctacaacagtgaggaggatcggagcccctcgcccgaaccaccagctgggaggaacggacgacgacaacctcatcatccgcaacctccccctgttcctctccgacgccgcccgggcctggctggagcatctgcctcccgcgcagatctccaactgggacgacctggtcaaggccttcgctagaaatttccagggcacgtacgtgcaccctaggaactcatgggatctcctaagctgccgccagcagccaggggaatccctgcgagagtacatccgacggttttcgaagcagcgcaccgagctgcccaacatcaccgactcggatgtcatcggggcgttcctcgccggcaccacgtgccgagacttggtgagcaaactggggtgcaagactcccaccaaggcgagcgaattgatggacatcgccaccaagttcgcctctggtcaggaggcggtcgaagccatcttccggaaggacaagcagcctcagggacggcagcaggaagacgtcctcgaggcgtccgcccagcgtggcacgaagaagaaggccaagaaaaagtcacaagcgaagcgcgacgccgctgacgcagatcttgtcgctgctgccgagcacaggaaccctcggaagcctctcggaggggccaacctgttcgacaagatgcttaaggagtcgtgcccctaccaccagtgtcccgtcaagcacacccttgaagaatgtgtcatgctccggcgctacttccataaggccgggcccccggcggaaggtggcaaagaccaagacaacaacgagaaggagggcgacaaggaagaggagttcccggaggtccacagctgcttcatgatctatggtgggcaagtggcgaacgcctcagctcggcattgcaagcaggagcgccgggagcccatcaccttcgacctaggcgaccaccccgactgcgtgccgagcctaggaaggtacccgctcgttgtcgaccccatcatcggcaacgccagactcaccaaggtcctcatggatggaggcagcagcctcaacatcatctacgccgagaccctcgggctcttggagatcgatctgtccacgatccgggctggtgcggcgccctttcacgggatcgtccccagaaagcgcgtcctgccccttggacaactcgatttgcccgtctgcttcggaactccctccaacttccgcagggaaaccctcacgttcgaggtggtcgggttccaagggacctaccacgcggtgctggggaggccatgctacgccaaattcatggtcgtccccaactacacgtacctcaagctcaagatgccaggccccaacagggtcatcaccgtcggatccacgtaccgacacgcgtacgaatgcgacgtggagtgcgtggagtacactgaggccctcgccgagtccgaggccctcatcgccgacctagagtgcctctccaaggaggtgcccgatgcgaagcgccacgccggcaacttcgaaccggctgaggcggttaagttcgtcgccctcgaccccagcaacgacgcctgcaagcaagtccggatcggctccgagctcgaccccaaatag

SEQ ID NO: 115936 - DNA, 285 bp, Zea mays
  Clone ID: MRT4577_37217C.1
actttcttttaccatgacgaggccttaccctgtacgactggcccctcttgtgaatcctgtgcactgcatcgtactgaaaaaatcttgaagactgttcactcattccactcttgaaactcactaaatcaccgtcaatccatatggataagaagctttgctacctcaccctagtttgtactgatgctctggctcacgatcactcactcatagcatctgtatctacactggctaggaaccaaagcctctactctacatggattgtccgtgattgattgaacttctgac

SEQ ID NO: 115937 - DNA, 4080 bp, Zea mays
  Clone ID: MRT4577_37218C.1
atgccggagccatcaaccaccgaggggcgccgtatccagggagagctcaagaatctcctggaggatgccgcggtccgacgagccgaaagctctgcctcccgaaggcaggggcacccctcggaacatcgcgccgcgacttctcgattcatgcgggaagcctcggtccagaccgggcgcacgcgcaacacagcgcctgcggccccgggtcgcctcggcaacaagcaccatcaccgcgaccgtcgagcccacctcgacgacaaggcacaccgaggctaccaccccaggcatgggggacgctacgacagcggggaggatcggagtccctcgcccgaaccacccggtccgcaggctttcagccgggccatacgacgggcgtcgttcccgacccggtttcgaaccccgactactatcacaaagtactcgggggagacgagaccggaactgtggctcgcggactaccggttggcctgccacctgggtggaacggacgatgacaacctcatcatccgcaacctccccctgttcctctccgacaccgctcgagcctggctggagcacctgcctccggggcagatctccaactgggacgacctggttcaagccttcgccggcaacttccaggggacgtacgtgcgccctggaaactcctgggatctccaaagctgccgccagcagccgggagagtctctccgggactacatccggcgattctcgaagcagcgcaccgagctgcccaacgtcaccaactcggatgtcatcggtgcgttcctcgccggcaccacctgtcgcgacctggtgagcaagctgggctgcaagacccccaccagggcgagcgagctgatggacatcgccaccaagttcgcctctggccaggaggcggttgaggccatcttccggaaggataagcagccccaggggcgccagccggaagatgtccccgaggcgtccactcagcgcggccccaagaagaagggcaagaagaagtcgcaagcgaaacgcgacgccgccgatgctgggccacctgcggagggaggtagggcccgcgacgacgataagaaggaagatcaccaagcaggagagttccccgaggtccgcgactgcttcatgatctacggtgggcaagtggcgaacgcctcagctcggcaccacaagcaagagcgttgggaggtctgctcggtaaaggtggtggcgccagtctacctagactggtccgacaagcccatcaccttcgaccagggcgaccaccccgaccacgtgccgagcccggggaaatacccgctcgttgtcgaccccgtcatcgacaacgtcaggctcaccaaggtccccatggacggaggcaacagcctcaacatcatctacgccgagaccctcgggctcctgcggatcgatctgtcctcggtccgggcaggcgctgcgccttttcacgggatcattcccgggaaacgtgtccagcccctcggacaactcgatctacccgtctgttttgggacgccctccaacttccgaagggagaccctcacgttcgaggtggtcgggtttcgaggaacctaccacaccgtgctggggagaccatgctatgccaagttcatggccgtccccaactacacctacctcaagctcaagatgtcgggccccaatggggtcatcaccgtcggccccacgtaccgacacgcgtacgaatgcgacgtggagtgcgtggagtacgccgaggccctcgccgaatccgaggccctcatcgccgacctggagagcctctccaaggaggcgccagacgtgaagcgccacgctggcaacttcgagccagcggagacgatcaggatgaaagagtccgaccagctcgcgacttctttcatcacacccttcggcatgtactactatgttaccatgccgtttggtttgaggaatgtaggtgcaacgtaccaacggtgcatgaaccatgtgttcggcgaacacattggtcgaacggtcgaggcctacgtcgatgacatcgtagtcaagacgaggaaagcctccgacctcctttctgaccttgaaacgacattccggtgtctcaaggcgaaaggcgtaaaactcaatcctgagaagtgtgtcttcggggtcccccgaggcatgctcttggggttcatcgtctccgagcggggcatcgaggccaacctagagaaaatcgcggccatcaccaacatggggcccatcaaagacttaaaaggagtacagagggtcacgggatgccttgcggctctgagccgtttcatctcgcgcctcggcgaaagaggcctgcctctgtaccgcctcttaaggaaggccgagtgcttcacttggacccctgaggccgaggaagccctcgggaacctgaaagcgctcctcacgaacgcgcccatcttggtgccacccgctgccggagaagccctcttgatctacgtctccgctaccactcaggtggttagtgccgcgatcgtggttgagagacgagaagaggggcatgcattgcctgtccagaggccagtctacttcatcagtgaggtactgtccgagaccaagatccgctacccacaaattcagaagctgctgtacgcggtgatcctgacgcggcggaagttgcgacactacttcgagtctcatccgatcatccagtgccgagaggcctcgggtaggattgcaaagtgggcggtggaaatcatgggcgagacaatctcgttcgcccctcggaaggccatcaagtcccaagtcttggcggactttgtggctgaatgggtcgatacccaactcccaacagttccgatccaaccggaactctggaccatgtttttcgacgggtcgctgatgaagacaggggcaggcgcgggcctgctcttcatctcacccctcgggaagcacctacgctacgtgctacgcctccacttcctggcgtccaacaatgtggccgagtatgaggctctggtcaacgggttgcgcatcgccatcgagctgggggtccgacgcctcgacgctcgcggtgactcgcagctcgtcatcgaccaagtcatgaagaactcccactgccgtgacccgaagatggaagcctactgcgatgaggttcggcgcctggaagacaagttctacgggctcgagctcaactacatcgcccgacgctacaacgagactgcggacgagctggctaaaatagcctcggggcgaacaacagttccccggacgtcttctcccgagacctgcatcaaccctctgtcaagaccgacgacacgcctgagcccgagaaggcctcagcccagccacggcaccctcggtccggcccgagacaccctcggctcggcccgaggcacccttggctcagcccgagacctcgttggtcccttacagaaggcacccgggggctacacgcacctgctggttgccatcgacaaattctccaagtggatcgaggtcagacccctaaacagcatcaggtccgaacaggcgatggtgttcttcaccaacatcatccatcgctttggggtcccgaactccatcatcaccgacaacggcacccagttcaccggcagaaagttcctggacttctgcgaggatcaccacatccgggtggactgggccgccgtggctcaccccatgacgaatgggcaagtagagcgtgccaacggcatgattctacaagaactcaagccgtggatctacaacgacctcaacaagttcggcaagcgatggatgaaggaactcccctcggtggtctggagtctaaggatgacgccgagtcgagccacgggcttcacaccgttctttctagtctatggggccgaggccatcttgcccacagacttagaatacggttccccgaggacgaaggcctacgccgaccaaagcaatcgagctaatcgagaagactcactggaccagctggaagaggctcgggacatggccttactacactcggcgcggtaccagcagtccctgcgacgctaccacgcccgaggggttcggtcccgagacctccaggtgggcgacctggtgcttcggctgcgacaagacgcccaagggcggcacaagctcacgcctcctggaaagggccgttcgtcgtcgccaaggttctga

SEQ ID NO: 115938 - DNA, 702 bp, Zea mays
  unsure (1)..(702): unsure at all n locations
  Clone ID: MRT4577_37219C.1
aatcctgtgctcttcttcttggttcttgcgcgacacgaccacgacgacgacgatgaaagcgtcggctccattcagcacgagccagcctctttcttgtcgcacccatggcggtcggccgtcgtccatgtccatgtctgccggcgcacggaccgcaacatcagtgggcaccagctctaagaggccttggttcggtgacctcctggggcgtctgtcgtccacgatggacggagcgtccagggccctcaaggatgcgccgcagaggtttctcgatgcgctggttgacgcaaccttcagattcaccgatcaagctctgaattccgccgagagcaatttcgcaccggtcgatgagactggtgaagccatagagatacaccagagccagatccaaggggcgataccggacggtttccccgagggggtgtacatcagaaacggttccaacccgctctttggcgccctccattccacgtcctcggtcctgggacagtccagggagatctgggtcgagggggagggcatgcgcgctccacgccgtctacttcaccaaaagcagcgcgggtcatctatggtcagtctcctacgccagccgctacgtgcagtccgagacgctggagctggaaacggcgcggcacaaaccttgcttcctccttgccgtcgagggcgactctgcanccatcgtcgccgcctacgttttcaactatc

SEQ ID NO: 115939 - DNA, 137 bp, Zea mays
  Clone ID: MRT4577_3721C.1
gcatatgcctggcgctggtggccgctccgggctgcgtgcatagcgtggcgttcgccctatcgtgagtgatctctgcttttgcctctcgtgtggtcaccggggctggccttgttgtcgcgtgcctcacgcgactgcgt

SEQ ID NO: 115940 - DNA, 3168 bp, Zea mays
  Clone ID: MRT4577_37220C.1
atggtggaagaacaacattcgagctcaccccgtcctctcccccgccgacggaggagggggcggggcaaccaaggccaagcaggaggcagcgcctcgtcggctgtcgagcgagtcgacggcgccagcgccccaacggggggcgcgtcgggcatcgacctcgcgtttgagacgaagacgagcgccgtctccccgcgacacgccagttctgagcaaacggacgacgccagcacgctcgcgaaaggcttgctggacgtcaccctcgtacctgagacgacggtgcacctcgacccgccaagcggcttcgctttggcggacgctctcgcaggggcgaatccaaaccctctggggtatcgtatgcggttaccctgggaccggctgacggacgtctcgacctacgggccctcggggtccgaggaagatgacgagcccgacttctgttgggatttctctggacttggcgaccccagtgccatgtgggacttcatgaccgcatgcgactactgcctttccgactgttccgacggtagctgcagcctcggcgacgaggactgcggcccaagccgcgaatgtttccacgtcgatctagggggtccctccgaaggcaaccatctcggtatgccggaggacggtgatctccctaggccggtgcctcgcgttgacatcccacgggagctagctgtggtccccgttcaggcggggggccatgacccacacctcgagcaaatccgcggggtgcaggccaggcttgacgaggcagcaggagcgcttgagccgatccgccgggacgtcgggcaggaatgggcgggccaacctccggccggagaaatgcgtcatctaccccagggcttccagcaccgcatcgccgacgatgtcaggttcaggccgccacccgcatctagtggggtcggccagaacctggctgcagcagcaatgcttctccgtgcgatgccagagccatcaaccaccgaggggcggcgaatccagggagagctcaagaatctcctggaaggcgccgcggtccgacgggccgagagctccgcctcccgaaggcaggggtacccctcggaacatcatgccgcgacttcccgattcatgcgggaagcctcggtccacaccgggcgcacgcgcaacacagcgcctgcggccccgggtcgcctcggcaacgagcaccaccaccgcgaccgtcgggcccacctcgacgagagggtgcatcgaggctaccaccccaggcgcggaggacgctacgacagcggggaggatcagagtccctcgcccgaaccacccggtctgcaggctttcagccgggccatacgacgggcgccgttcccgacccggttccgacccccgactactatcacaaagtactcgggggagacgagaccggagctgtggctcgcggactaccggctggcctgccaactgggtggaacggacgatgacaacctcatcatccgcaacctccccctgttcctctccgacaccgctcgcgcctggttggagcacctgccttcggggcagatctccaactgggacgacctggtccaagccttcgccggcaatttccagggcacgtacgtgcgccctgggaattcctgggacctccgaagctgccgacagcagccgggagagtctctccgggactacatccggcgattctcgaagcagcgcaccgagctgcccaacatcaccgactcggatgtcatcggcgcgttcctcgccggcaccacctgccgcgacctggtgagcaagctgggtcgcaagacccccaccagggcgagcgagctaatggacatcgccaccaagttcgcctctggccaggaggcggtcgaggctatcttccggaaggacaagcagccccagagccgcccaccggaagatgcccccgaggcgtcaactcagcgcggcgccaagaagaagggcaagaagaagtcgcaagcgaaacgcgacgccgccgacgcggaccttgtcgccgccgtcgagtacaagaaccctcggaaaccccccggaggtgccaacctcttcgacaagatgctcaaggagccgtgcccctatcaccaggggcccgttaagcacacccttgaggagtgcgtcatgcttcgacgccacttccacagggccgggccacccgcggagggtggcagggcccacgacgacgacaagaaggaagatcaccaggcaggagagttccccgaggtccgcgactgcttcatgatctatggtgggcaagcagcgaatgcctcggctcggcaccgcaagcaagagcgtcgggaggtctgttcggtgaaggtggcggcgccagtctacctagactggtccgacaagcccatcaccttcgaccaggccgaccaccccgaccatgtgccgagcccggggaaatacccgctcgtcgtcgaccccatcatcggcgacgtcaggctcaccaaggtcctcatggacggaggcagcagcctcaacatcatctacgccgagaccctcgggctcctgcgtgtcgatctgtcctccgtccgggcaggtgctgcgcccttccatgggatcattcccgggaagcgcgtccagcccctcggacaactcgaccttcccgtctgcttcggaacaccctccaacttcagaagggagaccctgacgttcgaggtggtcgtgttccgaggaacctaccacgcggtactgggaagaccatgctacgcgaagttcatggccgtccccaactacacctacctaaagctcaagatgccgggccccaacgaggtcatcaccgtcggccccacgtacaaacacatgttcgaatgcgacgtgaagtgcgtggagtacgccgaggccctcgccgagtccgaggccctcatcgccgacctggagagcctctctaaggaggtgccagacgtgaagcgtcatgcaggcaactttgagccagcggagacggttaaggccgtccccctcgaccccagcagcgacgcctccaagcagatccggatcggctccggctcgatcccaatagggaagcagtgctcgtcgactttctccgcgcgaacgccaatgtcttcgcgtggagtccctcggacatgcccggcataccgagggatgtcgccgagcactcgctggacatccgagccggagcccgacccgtcaagcagcctctgtgccgattcgacgaagaaaggcgcagagctatag

SEQ ID NO: 115941 - DNA, 367 bp, Zea mays
  Clone ID: MRT4577_37221C.1
ggtttttgctttttggttctctttctttggggtggttttttattggttggaccttccaacccactgacccctatggcaactgcataaacacaagtgtgcagcacaatttttatcacaaacttgcgaaaacatccggctagatttgacccccaacccccccttttttttttggaaaagaaatcatgccagcctgtcccattaaaaggaggtcgctgccgattggaaatttgccatttggtaggcaatcacataattttacaggatgacactttttctggacatcacactaagtcagaggggcgggagacccacgctccacgagggtccctggagggtggcgcattcaaacaaacataaccctgacgct

SEQ ID NO: 115942 - DNA, 373 bp, Zea mays
  unsure (1)..(373): unsure at all n locations
  Clone ID: MRT4577_37222C.1
ggccctggacctttgggctgatttatgtgcttgtttatgtgcttggagtccggctctcccgttacccccgacggttacccaggagacaaggcgttaagccatccgaaagtcaattcccccagtaatacaacgaaagagttctctcctcggctcagtttctaagaagtaacaaagaacgtacatcgtctcataaataagcacacctcagaaaacattaaataatccggattaagcggcctgatagtagccatcgtcaccgcagccgacggcaaggatacgcggacagtaaacgcangtgatctcagagtcgccgcgcgcgaaagaggtctcgtcaagtagtctatcgccgattacgagttttacgaaatcaacg

SEQ ID NO: 115943 - DNA, 1840 bp, Zea mays
  Clone ID: MRT4577_37223C.1
ctgcagcagcaatactactccgcgcgatgccggaaccatcgaccaccgaagggcggcgtatccatggagagctcaagaatctcctggaggatgccgtgatccgacgggcggaaagctctgcctcccgaaggcaggggggtacccctcggagcatcgcgccgcgacttcccgattcatgcggggagcctcagtccacaccgggcgcacgcgcaacatggcgcctgcggccccgtgtcgcctcggcaacgagcaccaccaccgcaaccgtcgagcccacctcgacgagagggtgcgccgaggctaccaccccagacgtggtggacgctacgacagcggggaggatcgaagtccctcgcccgaaccacccggtccgcagactttcagccgggccatacgacgggcgccgttcccgacccggttccgaaccccgactactatcacaaagtactcgggggagacgagaccagaactatggctcgcggactatcggctggcctgccaactgggtggaacggacgatgataatctcatcatccgcaacctccccctgttcctctccgacaccgctcgagcctggctggagcacctgcctccagggcagatctccaactgggacgacctggtccaagccttcgccggcaatttccaaggcacgtacccaggagagtctctccgggactacatccggcgattctcgaagcagcgcaccgagctacccaacgtcaccgattcagatgtcatcggcgcgttcctcgctggcaccacctgccgcgacctggtgagcaagctgggtcgcaagacccccaccaggacgagcgagctgatggacatcgccaccaagttcgcctctggccaggaggcggttgaggccatcttccggaaggacaagcagccccagggccgcccgccggaagatgttcccgaggcgtcaactcagcgcggcaccaagaagaagggcaagaagaagtcgcaagcgaaacgcgacgccgccgacgcggaccttgtcgccgccgccgagtacaagaaccctcggaaacctcccggtggtgccaaccttttcgacaagatgctcaaggagtcgtgcccctatcatcaagggcccgtcaagcacacccttgaggagtgtgccatgcttcgacgacactttcacaaggccgggccacccgcggagggtggcaaggctctcgacgacgctaagaaggaagatcacaaggcaggagagttcctcgaggtccgcaactgcttcatgatctacggtgggcaagtggcaaacgcctcggctcagcaccgcaagcaagagcgtcgggaggtctactcggtgaaggtggcagtgccagtctacctagactggtccgataagcccatcaccttcgaccaggccgaccatcccgaccatgtgccgagcccggggaaatacccgctcgttgtcgaccccatcatcggcaacgtcaggctcaccaagaccctcacgttcgaagtggtcgggtttcgaggaacctaccacgcagtgttggggaggccatgctacgtcaagttcatggccatccccaactacacctacctcaagctcaagatgccgggccccaacggggtcatcaccgtcgggcccacgtaccgacacgcatacgaatgcgacgtggagtgcgtggagtacgccgaggccctcaccgagtccgaggccgtcatcgccgacctggagaacctctctagggaggcgccagacgtgaagcgccacgccggcaacttcgagccagcggagacggttaagtccgtccctctcgacccctgcaacgacgcctccaagcagatccagatcggctccgagctcgaccccaaatag

SEQ ID NO: 115944 - DNA, 2643 bp, Zea mays
  Clone ID: MRT4577_37224C.1
atgccgtttggtttgaggaatgcgggtgcgacataccaaaggtgcatgaaccacgtgttcggcgaacacattggtcgaacggtcgaggcttacgtcgatgacattgtagtcaagacgaggaaagcctccgacctcctttccgaccttgaagcgacattccggtgtctcaaggcgaaaggcgtaaaactcaatcctgagaagtgtgtcttcggagtcccccgaggcatgctcttggggttcatcgtctccgagcggggcatcgaggccaacccgaagaaaatcgcggccatcaccaacatggggcccatcaaggacttgaaaggcatacagagggtcacgggatgtctggcggctctgagccgcttcatctcgcgcctcggcgaaagaggcctacctctgtaccgcctcttaagaaaggccgagtgcttcacttggaccccagaagccgaggaagccctcgggaacctgaaggtgctcctcacgaacgcgcccatcttggtgcccctcgctgctggagaagccctcttgatctacgtcgccgctaccactcaagtggtcagcgccgcgatcgtggttgagagacgagaagaggggcatgcattgcccgtccagaggccagtctacttcatcagggaggtactgtccgagaccaagatccgctacccacaaattcagaagctgctgtacgcggtgatcctgacacggcggaagttgcgacactacttcgagtctcatccgtgggcagtggaaatcatgggcgagacaatctcgttcacccctcggaaggccatcaagtcccaagtcttggcggactttgtggctgaatgggtcgatacccagctcccgacagctccgatccaaccagagctctggaccatgttcttcgatgggtcgctgatgaagacaggggcaggcgcgggcctgctcttcatctcgcccctcgggaagcacctactctacgtgctacgcctccacttcccggcgtccaacaatgtggccgagtacgaggctctggtcaacgggttgcgcatcgccatcgagctaggggtccgacacctcgacactcgcggtgactcgcagctcgtcattgaccaagtcatgaagaactcccactgccgcgacccgaagatggaagcctactgcgatgaggttcggcgcctggaggacaagttctacgggctcgatctcaaccacatcgcccgacgatacaacgagactgcggacgagctggctaagatagcctcggggcagacaacggttcccccggacgtcttctcccgagacctgcatcaaccctccgtcaagatcgatgacgcgcccgagcccgaggcaccctcggcccccgagggtgaggcactgcgcgtcgaggaggagcggagcggggtcacgcctaatcgaaactggcagaccccgtacatgcaatatctccaccaaggagagctactcctcgaccgagccgaagctcggcggttggcgcggtgcgccaagtcgttcgtcttgctgggggacgggaaggagctctaccaccgcagccccttaggcatcctccagcgatgcatatccatcgccgaaggccaggagctcttacaagaaatacactcgggggcttgcggtcatcacgcagcacctcgagcccttgttggaaacgtcttccgacaaggtttctactggccgaccgcggtggccgacgccactagaattgttcgcacctgccaagggtgtcaattctatgcgaggcagacacacttgcccgctcaggctctgcagacgatacccatcacctggtcgtttgctgtgtggggtctggacctcgtcgaccccttgcagaaagcacccgggggctacacgcacctgctggtcgccatcgacaaattctccgagtggatcgaggtccgacccctaaacagcatcagatccgagcaggcggtggcgttcttcaccaacatcatccatcgctttggggtcccgaactccatcatcaccgacaacggcacccagttcaccggcagaaagttcctagacttctgcgaggatcaccacatccgggtggactgggccgccgtggctcaccccatgacgaatgggcaagtagagcgtgccaacgacatgattctgcaagtactcaagccgcggatctacaacgacctcaacaagttcggcaagcgatggatgaaggagctcccctcggtagtctggagtctgaggacaacgccaagccgagccacgggcttcacactgttctttctagtcaatggggctgaggccatcttgcccatagacttagaatacggttccccgaggatgagggcttacgacgaccaaagcaatcgagctaaccgagaagactcactggaccagccggaagaggctcgggacatggccttactacactcgacgcggtatcagcagtccctgcgacgctaccacgcccgaggggttcggtcccgagacctccaggtgggcgacctggtgcttcggctgcgacaagacgcccgagggcggcacaagctaacgcctccctgggaagggccgttcgtcatcgccaaggttctgaagcccgggacatacaagctggccaacagtcaaggcgaggtctacagcaacgcctggaacatccgacagctacatcgcttctacccttaa

SEQ ID NO: 115945 - DNA, 3696 bp, Zea mays
  Clone ID: MRT4577_37225C.1
atgtcgggtgttgtcctcgcacctgagacaacgacgggtgtcgcttccccgcaacgcgccaaccccgagcggactgatgacgccagcaccctcgcaaaggacttaatgggcgttagcctcgtacctgagataacggtgcagtccgtccccgacgcgacttcgccaccgtccatcgaccaagagattcaacttcgatccaccaagcgaccccgcttcggtttcgaggaagacgacaactctgacttcggttgggatttctccggactccgtgatcccagtgccatgcgagacttcatgtccgcatgtgactactgcctctccggctgctctgacgatgaccacgacctcggcgacgagggttgcgacccgagtcgcgagtgtttccacatcgatcagggggatcacggcgaagacaaccaccttggcatgccgcaagatgacaacgcccctgtgcctgcgtctcgcgttgacatcccgcgagagctagctgtggtcccagtccctgcggggggtcaggacacacatctcgagcaattccgcgagatgcaggccaagctcgacgaagaagcagggcggcttgtgcagctccgacaaaacatcgagcaggagtgggcaggccgagcacttgccggaggagcgcgtcatcgggcccgagacgtccagcgccatatcgttgacaattccagggcagggctacccccgacttttagcggtgtcggccagaatctagctgcagcggcgatgctactccgagcaatgctgaagccatccaccaccgaggggcggcgtatccagggcaaactcaagggtctcctggaagacgcagcggtccgacgagccgagagctctgcctcccgaaggcaggggtgcccctcggagcatcgcgcaatgtcttcccgacgcttgcgggagaccatggtccgcactagacgcacgcgggacgggacgcctgcagtccccgatcgccttggcgacgagcagcaccgccgcgaccatcgagcccgcctcgaagagaaggtgcgccgaggctaccaccccaggcgcggaggacgctgcgacagtgaggaggaccggagccccttgcccgaaccgccaggtccgagggtcttcagccgggccatacgacgggcgtcgttcctggcccggttccgagccccgactaccatcaccaagtactcaggggagacaaggccggagttgtggcttgcggattaccagctggcctgccagctgggagggacggacgacgacaacctcatcatccgcaacctcccccttttcctctccgacgctgcccgggcatggctggagcatctgcctcctgcgcagatctccgactgggatgacctggtcaaggccttcgcgggaaacttccaaggtacgtacgtgcgccctgggaactcatgggaccttcgaagctgccgccagcagccaggggaatccctgcgagagtacatccgacggttttcaaagcagcacaccgagctgcccaacatcaccgactcggacgtcatcggggcattccttgccggcaccatgtgccgggacctagtgagcaaactagggcgcaagactcccaccaaggcgagcgaattgatggacatcgccaccaagttcgcctctggtcaggaggcggtcgaagccatcttccggaaggacaagcagcctcagggaagacagaaggaagacacacctgaggtgtccgtccagcgtggcttgaaaaagaaggccaagaaaaaggcgcaagcaaagcgcgacgccattgacgcggatctcgtcgctgccgctgagcacaggaatcctcggaagcctcccggaggagtcaacatgtttgacaagatgctcagggagtcgtgcccctatcacaggggtcccgccaagcacacccttgaggagtgcgacatgctccggcgctacttcatcaaggcgggaccctcggcagaaggtggcaaggaccaaggcaacaacaagaaggggggcgacaaggatgaggagttcccggagcggactccagtctacctagactggtctgagaagcccatcaccttcaaccaaggtgaccaccccgactatgtgccgagcccaggaaggtacccgctcgtcgtcgaccccgtcatcggcaacgctaggctcaccaaggtcctcatggacggaggcagtagcctcaacatcatctacgccgagaccttagggctcttggggatagatctgtccatgatccgggccggtgcagcaccctttcacgggatcgtccccggtaagcgcgtcctgccccttgggcaacttgatttgcctgtctgcttcagaactccctccaacttccgcagggaaaccctcacgttcgaggtggtcgggttccgaggaacctatcactcgatgctggggagaccgtgctacgccaagttcatggccgtccccaactacatgtacctcaagctcaagatgccgggccccaacggaatcatcaccgtcggatccacgtaccgctacgcttacgaatgcgacgtggaatgcgtggagtacgctgaggccatcgccgaatccgaggccctcatcgccgacctggaatgcctctcaaaggaggcgcctgacgtgaagcgctacaccggcaacttcgaaccagctgaggcggttaagaccgttgccctcaaccccagcaacgacgcctgcaagcaagaagcagtgctcgtcgactttctccgtgcaaatgccgaaatttttgcatggagtccctcggacatgccaggcataccgagggatgtcgccgagcactcgctggatatccgagctggagcccgacccgtgaagcagcacctgcgctgttttgatgaagaaaagcgcagggccataggcgaggaggtccacaagctgatggctgcagggttcatcaaagaggtattccaccccgaatggttagctaaccctgtgcttgtgaagaaaaaaggtgggaaatggaggatgtgcgtagactacactggtctaaacaaaacatgtccaaaggttccctaccctctgcctcgcatcgatcaaattgtggactccactgctgggtgcgaaaccctgtcattcctcgacgcctattcaggttatcaccaaatcaagatgaaagaatccgaccagctcgcgacttctttcatcacaccttttggcatgtattgttatattaccatgccatttggcttgaggaatgcaggtgcaacctacccatggtgcatgaaccatgtgttcggagaacacattggcagaacggtcgaggcttacgtcgatgacattgttgccaagacaaggaaagcctctgacctcctctccgaccttgaagtaactttcgggtgcctgcgcgcaaaaggcgtaaaactcaatcccgagaagtgtgtcttcagagtcccccgaggcatgctcctggggttcatcgtctccgaaagaggcatcgaggccaacccggagaaaatcgcagccattaccaacatgggacccatcaaggatttgaaaggagtacaaagggtcatgggatgccttgcggctctgagccgcttcatctcgcgcctcggcgagaaaggattacccttgtaccacctcttaaggaaggccaagcgcttcacttggacccccgaggccgaggaagccctcggaaacttaaaggcactccttacaaacgcgcccatcttggtgcccctgctgcgggagaagccctcttga

SEQ ID NO: 115946 - DNA, 3293 bp, Zea mays
  Clone ID: MRT4577_37226C.1
atgaacaaaacactggcattcgaagtgccattacaaacggaactccggttcccccctccgcaggtacgaacaaccccactcgattggggtgggcctgcggagcaacagaagaccgacgaacggcgcaccgtcacctgctccagcagtggcgacgacgacgacttctgccccggggggccgaacagcggcagcactgacctcaaggcggatgcttctgtcaggaggcccccgcccatgcccaaactcgtgaggcaaggacgggcagaaggccgtagagttggagggaccgggaaaggggataccccgaaaaggatccttccccgtgaaggaaccaggctccgagcctccttactgatcagaggttcgaaggctggccccccgaagggttcaacagccgcctcagatcgcgtgggccctacacccactactggtcagagaggctcgggggctgctctcgcaaacccggctccggccaaaacctccacacactccacgtcgcattcgtacgtgtgtcggtacgtggggccgacggtgatgaccccgttggggcccgacatcttgagcttgaggtaggtgtagttggggacggccatgaacttggcatagcatggcctccccagcactgcgtggtaggttcctcggaacccgaccacctcgaacgtgagggtttcccttctgaagttggagggagtcccgaagcagacaggcagatcgagttgtccgaggggctggacgcgcttcccgagaatgatcccatgaaaaggcgccgcacctgcccggaccgaggatagatcgatccataggagcccgagggtctcggtgtagatgatgttgaggctgctgcctccgtccatgaggaccttggtgagcctgacgttgccgatgacggggtcgacaacgagcgggtatttccccggactcggcacgcggtcggggtggtcgccctggtcgaaggtgatgggcttgtcggaccagtctaggtagactggcgccgccacctttaccaagcagacctcccgacgctcttgcttgcggtgccgagccgaggcgttcgccacttgcccaccgtagatcatgaagcagtcgtggacctcggggaactcctctgccttgtgatcctccctcttgtcgttgttgtgggccctgccaccttccgcaggtggcccggccttgtgaaagtggcgtcgaagcatggcgcactcctcaagggtgtgcttgacgggcccctgatgataggggcacggctccttgagcatcttgtcgaagagattggcacctccgggaggtttccgagggttcttgtactcagcggcggcgacaaggtccgcgtcgggggcgtcacgtttcgcttgcgacttcttcttgcccttcttcttggtgccgcgctgagtagacgcctcggggacatcttccggcgggcggccctggggctgcttgtccttccggaagatggcctcaaccgcctcctggccagaggcgaacttggtggcgatgtccatcagctcgctcgccctggtgggggtcttgggacctagcttgctcaccaggtcgcggcaggtggtgccggcgaggaacgcgccgatgacatccgagtcggtgacgttgggcagctcggtgcgctgcttcgagaatcgccggatgtagtcccggagagactctcccggctgctggcggcaggtgccctggaagttgccggcaaaggcttggaccaggtcgtcccagttggagatctgccccggaaacaggtgctccagccaggctcgagcggtgtcggagaggaacagggggaggttgcggatgatgaggttgtcatcgtccgttccacccaggtggcaggccagccggtagtccgcgagccacagttccggcctcgtctcccccgagtactttgtgatagtagtcggggttcggaaccgggtcgggaacagcgcccgtcgtatggcccgactgaaagcctgtggaccgggtggttcgagcgagggactccgatcctccccgttgtcgtagcgtcccccacgcctggggtggtagcctcggcgcaccctctcgtcgaggtgggttcgacggttgcggtggtggtgctcgttgccgaggcgacccggggccgcaggcgctgtgttgcgcgtgcgcccggtgtggaccgaggcgcggcgtcttccaggagattctttgagctctccctggatacgcagcccttcggtggttgatggttccggcatcgcgcggagtagtatcgctgccgcaaccaggttctggccgaccccactagaagccggtggcggccttgccctgacgtcgtcggcaatgcggtgctggatgccctggggtagatgacgcgcttctccggccggagcatggcctgcccattcctgcccgatgtcccggcggaacggctcaagtgttcctgtttcctcgtcgagcctggcctgcatctcgcggatttgctcgagctgtgcgtcctgaccccccgcagggactgggaccacagctagctcccgaaggatgtcaacccgaggcgcaggcctagggggatcaccgttttccggtataccaagatggttgccttcgccgggaccccctagatcggcgtggaaacattcacgacttgggccacagtcctcgtcgccgaagctgcggctaccgtcggaacagtcggaaaggcagtagtcgcatgcggtcatgaagtcccgcatggcactggggttaccgagtccgaagaaatcccaacaaaagtcgggctcgtcatcttccttggaacccgagggtccgtaggtcgagacagccgtcagccggtcctcttggtcgacgggcggtgacgaagtcgcgtcgggggcggactgcaccgtcgtctcaggtacgagggcgacgctcagcaagtccttcgcgagcgtgctggcgtcgtttgttcgcttggagttggcgtcttgcggggaaacggcactcgtcttcgcctcagacgcgaggtcgacgcccgacgtgtcccccgttggggcgccggcgccgtcgacttgctcgacaaccgacgaggtgccgcctcctgcttggccttggttgccccgcctcctcctccgtcggcgggggaggcaacgggacaaacccgaatgttgttcttccgccacgtggggaagacgtcgttgattccgccgccggcgggcgggttgtcggccgccattgtcgctgtcgcgcggcggaggaaggagtatcatgtcgtagctgccgtcgagggacatgaactcaagactcccaaaacggagcatcgtcccgggctggaaaggttgctggagactacccat

SEQ ID NO: 115947 - DNA, 614 bp, Zea mays
  Clone ID: MRT4577_37227C.1
tttaaatattaatagagctcctgcagagatctggggggggggggggggggcccatgacctacgttctacacggccagccccagttcgacatgggtttgcacgtgaatgccacgtggcacgtggttcgcggcggtagccccgagcagactttacagaacctctgccccgagtacttgatactgcccactgggacacttcaggtgtactcacgcccctacaggtacgaaataaatgggctgctttagaacacttgtacattccgggttacaagtatgctcactaccgctataacctagaggaggaccgaagcctcctagttggtgcgggttacctcatagagtcgagtactttgtagaactgaggccgagtcaaatgttcacccaaccagtaactcgactaccgtccctgtgaagactgagacaacagaagcgtcagctgacgacacaaaactaaatacatagggtcacgaggacactaagaccgcagagactgacactcgaatcgggttggccaaggtctactcctttacggtacgtcgggagaaggtcgctaaggctaccaaagctgttttggttgtcatctccttgacgacaaccaccgagtacaggtagaga

SEQ ID NO: 115948 - DNA, 2040 bp, Zea mays
  Clone ID: MRT4577_37228C.1
atgacgcttcacgtctggcacctccttagagaggctttccaggttggcgatgagggcctcggtgtactccacgcactccacgtcgcattcgaaagcgtgtttgtacgtggggccgacggtgatgacctcgttggggcccgacatcttgaacttgaggtaggtgtagttggggacggccatgaactttgtgtagcatggccttcccagtaccgtgtggtgggttcctcggaacccgaccacctcgaacgtcagggtctcccttcggaagttggagggtgctccgaagcagatgggaaggtcgagttgtccgaggggctagacgcgcttccaggggatgatcccatggaaaggcgcagcgcctgcccggaccgaggacagatcgacacgcaggagcccgagggtctcggcgtagatgatattgaggctgctgcctccgtccatgaggaccttggtgagcctgacgtcgccgatgacggggtcgacaacgagcgggtattttcccgggctcggcacgtggtcggggtggtcggcttggtcgaaggtgatgggcttgtcggaccagtctagatagactggcgccaccaccttcaccgagcagacctcccggtgctcttgcttgcggtgccgagccgaggcattcgccgcttgcccaccgtagatcatgaagcagtcgcggacctcgaggaactctcctgcttggtgatcttccttcttatcgtcgtcgcgggccctgccaccctccgcgggtggcccggccctgtggaagtggcgccgtagcatgacgcactcctcaagggtgtgcttgacgggcccctggtgataggggcacggctccttgagcatcttgtcgaaaaggttggcacccccatggggtttccgagggttcttgtgctcggcggcggcgacaaggtccgtgtcggcggcgtcgtgtttctcttgcgacttcttcttgcccttcttcttggcgccgcgctgagttgacgcctcaggggcatcctccgatgggcggccctggggctgcttgtcctttcggaagatagcctcgaccgcctcctggccggaggcaaacttggtggcgatgtccatcagctcgctcgccctggtgggggtcttgcgacccagcttgctcaccaggtcgcggcaggtggtgccagcgaggaacgcgtcgatgacatccgagtcggtgatgttgggcagctcggtgcgctgcttcgagaatcgccggatgtagtcccggagagactctcctggctgctgtcggcagcttcggaggtcccaggaattcccggggcgcacgtacgtgcccctctcgtcgaggtgggcccgacggtcgcggtgatggtgctcgttgccgaggcgacccagggccgcaggcgctgtgttgcgcgtgcgcccggtgtagaccgaggcttcccgcacgaatcgggaagtcgcggcatgaggttccgaggggtacccctgccttcgggaggcagagctctcggcccgtcggaccgcggcgccttccaggagattcttgagctctccttggattcgccgcccctcggtggttgatggctccggcatcgcgcggaggagcattgctgctgcagccaggttctggccgaccccactagatgcgggtggtggcctgaccctgacgtcgtcggcgtcgcggtgctggaagcccttgggtagatgacgtatttctccggccggaggttggcccgcccatgcctgcccgacgtcccggcagattggctcaagcgctcctgctccctcgtcgagcctagtctgcaccccgcggatttgctcgagctgtgggtcatggtctcccgcctgaacggggaccacaactagctcccgtgggatgtcaacgcgaggcaccagcctaggtagatcaccatcctccggcatgccgagatggttgccttcggagggaccccctagatcgacgtggaagcattcgcgacttgggccgcagtcctcatcgccgaggctacggctaccatcggaacagtcggagaggcagtagtcacatgcggtcatgaagtcccgcat

SEQ ID NO: 115949 - DNA, 348 bp, Zea mays
  Clone ID: MRT4577_37229C.1
cctcgaggccggccgggatgtatcccgcggccgctgtcaacgtcacatgcgccattgctaatccgccactcctccatgaacaggggatgtatcctactgcctaataaatttcgaagtggggggtggaaaagcaatatataaacatgaggattgaattctacaccgacaacaacgtgctcccaggaggactagattgtgtactcgaagcgaaagatgaagaatgtgcgtgacttcacaacacacctgatgcgtctcatccagcgcggcgctgctggtggcaactgcggtcttcttcaggatgatgatggggtaccgctcatggagttgatagcggatgacgcccaccat

SEQ ID NO: 115950 - DNA, 898 bp, Zea mays
  Clone ID: MRT4577_3722C.1
actcaggcaacagacattgatttttcagagggtaacaaactgtttgctgagagaggtctgagcagtccagtgaaacttaacgtccgcaacagctatcgtcaaatctacgacattcccagcaatgactatgctagtaattatacagaggaaacatcaatacaacttccagaaataggcaccagcaatactattgttcaaggtcatgttgatgtcaatgaacaccgatttgatggaccaagaacaatcgaagaaatcgttcctgttccattggatgagatacagatccatgaggatgtcccagggcaaccgggagcagccgatgagatagatgaggttccattttctgacgctccgatcattggtgctccattcagactgatctcatttgttgctaggtatgtcagcggcgctgatttggtcaaccaaaaataactgtctgcataccaggaattcaggacttttatgtcaggagttcctttttgatcccactgataattacgtcagtatcttgagataaagatggatagattggattcagaatagatatggagctgtattcattcgtgtcagtgctcacgtcactgccaattcttctccttcccctgtacttttttcaggcgccggagaaattcttgttccttggcttatactacctgttcttgaatatttgtcatccgctatttcatttttaaattaaaacacgacaaataaaaaagaacggaggagtacaatataagaagctatgtaccatgggcctctttacgggtctaaccatgcgaaaaagttgttctggaaattcttattaatgactgaattttggtgtgctgacactataacctgtgacagacacctatatgcttgatttattgcatcgtcttgttaatcttaatcttttttt

SEQ ID NO: 115951 - DNA, 460 bp, Zea mays
  Clone ID: MRT4577_37230C.1
acgaatttttggggaaatctctcgggctgactaatgcacccgcatacttcatgtatttgatgaactatgtttttatgcccgaattggacaaattcatactggtttttattgatgatatcttggtgtactcgaagaacgaagaagaacatgtcggacatttgcatgtagtgcttcaacgtctgcgagagcaccacctttatgccaagttgtcgaaatgtgatttttggctaaaggagatcaaattcttgggtcacactatctctcaggcaggaatagctgccgatcttgataaggtgcatgaagtgatgaactggaagccacccacgactgtccgtcagattcgaagttttctgggattagcaggttatcaccgaagattcattccggacttctcttgaattgagaagcccataactgagctgttgaagaaagatgccaagtttgtttggggtcagaagtg

SEQ ID NO: 115952 - DNA, 439 bp, Zea mays
  Clone ID: MRT4577_37231C.1
atataataaaattaacggcaaccaagccacaaaaaacaaaacccaggaagccccggccccggcaaacacaaacccgcaacagccggggccgggaaagaaagcaaaaaaaaagacgcaagaagaaaaaaaaacgaaaaaaaaaaaagccagccaaggccccccccagcagaaaaccccccgccgcagggcacgccccgagggaaacccgaaccgcaggaccagggcgcgcggggggggcaacccaaagaaggcccccaagaggggccccaggacaaccccaacccgggccagagcggccaccaccagcgggccacggggaaccaggggaacccagaagagggaacttagaaagggggccaccggggggaaggaggggaagatgaccacccccccaactaagaggaggaaactggaactgagctcaggcaaaagcaccaaa

SEQ ID NO: 115953 - DNA, 262 bp, Zea mays
  Clone ID: MRT4577_37232C.1
aatccctaccaaatgcaacaggttcattgggtgctcttctggtttttgcaaagaaaaaggcaacggcaacaccaattgaaaaaagaggaaaccgacagcaaccccccaggcttaaaagaaccaaagagtgccttaagccccacaccaaaagcggcccgagcgcgtagggatctaccgatacggggaccaagtgcaacgcgataagtgatacaagagctggattagacatccatctactaggaaaaaagcatctatcacgact

SEQ ID NO: 115954 - DNA, 384 bp, Zea mays
  Clone ID: MRT4577_37233C.1
atgggcaagagcaagaaaggcggaagctcctcgcaccattccggcgataagcagaagcgcgagccaactccttcttcggaggacttcggcaattccgaatacttggaggaggagttctcctccgagtccgagggattaccagtccatgcctctcccccggccgtcgagcgcgctggactcgagggctcagatgagttagaggtctcctcggacgagggggactcctctgactcgtccgaggaggggagcgatggcgacgacggcggcgagggcgacggcggcgacggcgatggcggtggtgacggcagcaagggcgacggcaagggcgacggcggcaacgtcaacggcaagggcggcagcggcggcggcaaggccagtggctag

SEQ ID NO: 115955 - DNA, 787 bp, Zea mays
  Clone ID: MRT4577_37234C.1
atgtcgaggagagccgcagcagcgctcgcgctcgcgtgcctcgccgtgatggcggcggcactggcggacggcgcgctgctcccgtggttcggcgaagggaggcgcgggggcgacgaggccgcggcggcggcggcgtctccgctgtccgggcccggggtgggcctcctggccgacccgttccggatcctggagcacgtccccttgggcttcgaccgggacgacgtggccatggtctccatggcgcgcgcggactggcgcgagactcccgacgcgcacgagatcgtggtggacgtgcccgggatgcgcagggaggacctcaagatcgaggtggaggactacagccgggtgctgcgagtcagcggcgagcggcggcgcgcggaggagcacaggggcgaccactggcaccgcgaggagcgctcccacggcaggttctggcgccagttccgcctccccgagaacgccgacctcgactccgtcggcgccagcctcgacaacggcgtcctcaccgtgcggttccggaagctggcccccgagcaggtcaagggcccgcgcgtcgttgggattgccgggggagacggtgacggcgacgcgaagaagagtattggcggcggcgccggggatggtcatcatcagaccaagaaggtggagctctgaacagtcaaacgaggggtgttcgcgtttttttttttttttgggtatgttctttatgttccacgacgtattcggtatctccacctgtattgtatggagaggcagagaaagtgtgcgatcttgactgagaaataaa

SEQ ID NO: 115956 - DNA, 356 bp, Zea mays
  Clone ID: MRT4577_37235C.1
agccgccgtcgcgctcaccaagtgaccggatcggtcggcgttccccgtcgactgtgtgcgatcgctggatcgggtggcacgctgcgatgactatctgtatggcgagtcgctatacttacgcagacataagctgctccgacgtgtcttccggacgcgtggggccgtgggcgagtgctgcgtagacgaggaggacgagctcgggctgatcggcggcggcggcatcagcgccggcgacgcgctgctacggacgcttgcgcagctcaagctgaccaagcggtatatcagcgacgcggcgctgctcgcggaccatctgccgtgcaacaagctcggccggtcctactacaccaactgcgcgg

SEQ ID NO: 115957 - DNA, 765 bp, Zea mays
  Clone ID: MRT4577_37236C.1
acccttccataagatcaaatttttttgctcttcccttctccattcaaggagccggggcagccatggacgccgccacgggcacgggcatggaggagctgtcatggtgcgcgcggtgcgccggcctggcattccttgtcttctccgtgtgcgtggtggcgctcggcgcggcgctcttcctcgcccgccggtggccgtggtgcagctgccacgtctgccgctcgtacctcacggggtcgtgggcgcgggacttcaccaacctcggcgactggtacgcacacctgctccgctgctccccgaccggcaccgtggccgtccacgtcctcggctgtaccatcaccgccaacccggccaacgtcgagcacatgctccacacccgcttcgacaacttccccaaagggaagcccttcgccgccgtcctcggcgacctcctcggcggcggcatcttcaacgtcgacggcgacgcctggcgccaccagcgcaagatggccagcctcgagctcggcagcgtcgcggtgcgctcctacgcgtacggcatcgtcgccgaggaagtggaggcgcgcctcctgccactgctcgccgacgccgccgacaatggcagggtggtcgacctgcaggacgtgttccggcgtttcgctttcgacaccatctgcaagatctccttcggactagaccccggctgcctcgagctcgacatgcccatgtccaagctcgccgccgcgttcgacaccgcctcgcggctatccgccatgcgcggcgcggcggcgt

SEQ ID NO: 115958 - DNA, 1074 bp, Zea mays
  unsure (1)..(1074): unsure at all n locations
  Clone ID: MRT4577_37237C.1
ccggccgggctccccgggcctttctctcatttcgccctccctccgccggctagggttactgccaccgccttccacccctccccgactgcccgtgggtggaggaggctggttggcgtgcagggtacctcggcggcggagatggagccggacttctcgaccgtgggcgggcccagctttgagttcgctttcaacgaggccaacttctccgaccgggaattgcggatcgaggtcgtcgcgggggattacgacgcgccggggtccactggcggcggttccggaggaggtggcctcgccgactgggcgcgccatcggaagcgccgacgcgaggagctcttcaaggagaaaggtgatgatgagcaaggtattgatccatcttgggctgctgtggttacgccggttttacgagtcaagacaatttatatcagttcggcgattcttgctgcgaagagtcctttctttttcaagcttttctcaaacggcatgaaagaatcggaccagagacatgcaacccttagaattactgactcaggtaatgtgacaattttgggaaactagagcatcctgcttcttttgtatttatttcctaataattttcatttttaaatcaactgttatgattatatatgccaagaatattcgatgtttccaaagttgtgcttttttttctttgatagtgacattgcctactatttttccctccttagctctacctatcaaatggatattttgtgtagcctgctttctgtacagatttcatcatttgttctctgagaaccagttgccacaaaaacacacacacacgtgcacaaacaaacacaaataaaatagaaaaatccttctctagtggatctttactttgtgcgtcatcctttttcccttaattctcttggaacagaggaaactgccctcatggagcttttaagctttatgtatagtggaaagttggcaactactgagcccactcttctgctggatatcttgatggctgccgacaaatttgaggttgtttcatgcatgangtactgcagccagttgctcacaagcttgccgatgaccacagaatctgcacttctc

SEQ ID NO: 115959 - DNA, 2462 bp, Zea mays
  Clone ID: MRT4577_37238C.1
tctttccgctctcccggccatttctctcatttcgccctccctccgccggctagggttactgccaccgccttccacccctccccgactgcccgtgggtggaggaggctggttggcgtgcaggcgacctcggcggcggagatggagccggacttctcgaccgtgggcgggcccagctttgagttcgctttcaacgaggccaacttctccgaccgggaattgcggatcgaggtcgtcgccggggatgactacgctccggggtccagcggcgccggtgccggtcgacggcggggggagcccttttcctaatcttgctgctaccgcgcgctccctctcccccggccatttctctcatttcgccctccctccgccggctagggttactgccaccgccttccacccctccccgactgcccgtgggtggaggaggctggttggcgtgcagggtacctcggcggcggagatggagccggacttctcgaccgtgggcgggcccagctttgagttcgctttcaacgaggccaacttctccgaccgggaattgcggatcgaggtcgtcgcgggggattacgacgcgccggggtccactggcggcggttccggaggaggtggcctcgccgactgggcgcgccatcggaagcgccgacgcgaggagctcttcaaggagaaagaatctacaacctacatgccagaccaaactaattttaatgaagtcgaagcagaagagtgtgatgcatatgaagaaaatcaagaggaacctgtagcaatgatggaaggatctccacctgatgttggtcaagatggtgatgatgagcaaggtattgatccatcttgggctgctgtagttacgccggttttacgagtcaagacaatttatatcagttcggcgattcttgctgcgaagagtcctttctttttcaagcttttctcaaacggcatgaaagaatcggaccagagacatgcaacccttagaattactgactcagaggaaattgccctcatggagcttttaagctttatgtatagtggaaagttgacaactactgagcccactcttcttctggatatcttgatggctgccgacaaatttgaggttgtttcatgcatgaggtactgcagccagttgctcacaagcttgcagatgaccacagaatctgcacttctctacctagatctcccttgctcagtttcaatggcagctgcagttcaacctctgacagatgcagctaaggattttctcgctgtaaagtacaaggatttgattaagttccaagatgaagtgatgaacatccctcgtgctggaatcgaagccatcttgtcaagtaatgacctccaggtggcatctgaagataccatctatgacttcttactcagatgggcccgtgcacaatacccgaaatcagaagagagacgtgaggtccttagttctcggctgctccctcttgtgcgattcagtcatatgacgtgtaggaagctgcggaaggtcctagcctgcacagatatagaccacgagcaagcaaccaagtgtgtcaccgaggctcttctgttcaaagctgatgcaccacaccggcaacgagctcttgcagcggacgcaataacctgccggaaattcgccgagcgggcttacaagtacagaccactcaaagttgttgagtttgatcggccctacccacagtgcatagcatacttggatctcaagcgcgacgagtgctctcgactctttcctgcagggcggatatactcgcaagcgttccaccttgcagggcagggtttcttcctctcagctcactgtaacatggagcagcaaagcgcgttctactgcttcgggctcttcctggggatgcaagagaagggctccacgagtgtgacagtggactacgagttcgctgcaaggacgagaccatccggcgagtttgtgagcaagtacaagggtaactacacattcaccggtggaaaggcggttgggtacaggaatctctttgcaatcccatggcagaagttcttggccgatgacagcctcttcttcgtggatgggatgctgcatctgagagccgagcttacgataaagcaaccctagagcaatggtctctgtatagtggtagttgttacgacagatgaaaaatatatcggatgggatacctcacaagttccagttcgctgcaagtttccagattggccggtatctcactgccaatgagcttgtttgcctccgtaacggcgcagggtgtgtaatggcttatttattcctagtatatacaagttggggtgagatgtgcgaggagcagcagcggtggcggcgatctggatgaagactccgtcccccgacctgtgcaccaggacggcggggaagcacgccaacaagtacaaggtggtggacgcggtgacggtgctagagatgcaggtggacgcgttcaagaagcgcgtgaaggcggcgcggaggctcgccaacgatgaggtcaagacgg

SEQ ID NO: 115960 - DNA, 524 bp, Zea mays
  Clone ID: MRT4577_37239C.1
ccctcttccctctcctctggccgtcgatacatctctctcccctcggcggccattaattggacgggatatcgattcctccctccctccgcggacgatctagctccagcgagagacaagtgttgtgtctgcgctgagagggagaggcagagagaagggggcggccatgaccaccggcgggaacggggaggagcagcaggggcggaggctgttcggcgtgtcgctcacggacaggcccgtctggcagcagctcctcatctgctcctccggcttcttcttcggctacctcgtcaatggcatctgcgaggaatacgtctacaaccggctccagttcagctacgggtggtacttcacgttcgtgcagggatttgtgtacctggggctgatcaggctgcaggggttcaccacgaagcagatggtgaacccgtggcggacctacgttgcgcctctccgccgtgctcatgcgatccaacggtcctcacaagggctccctcgtcttcctccactaccccccccagaatcatgtt

SEQ ID NO: 115961 - DNA, 1340 bp, Zea mays
  Clone ID: MRT4577_3723C.1
ccggccgggatagatatatcacatgccttggactatatccttagaaacgatccctcgaaaggattaattattcatgcatggcatgcaacacggcctgctggatgtcgatcaagctaggcggaccgggtcctgcggaaactgcatgcccaggcatggcgttgcctgaataggctattcgcgccgggcaggagcgtacgtgtagcgtcgagtgccggcctccccgttacatctccaagccaagcaggtccagagatctcgatcggtcctcttgcagaaacgaggaaagaaaacatgtcttctcgctgggttagggcggaggtgtacccgctgttcgcgacgacaggggtggcggtggggatctgcgtgatgcagctggtgcgcaacatcaccaccaacccggaggtgcgggtgaccaaggagaagcgggcggccggggtgctggacaaccacgacgaggggcggcgctactcgcagcacggcgtgcgcaggttctggctctccaagcgccgcgactacatgcaggccatggacaaggtgcccacggaccctaataagtagacgacgacgatataccccaatgcatggcaagaagatatatatatcagcacaacgcaactgcatgcgatgctgcttgttgctgcaattaatccactatactatatactataggagtattattaattccagttgcatcatgcatgatgatatacgtgtgtctctatatgcatgcgttggtatatacaattcagatatgcatggtgtatacaagtggtagctatacgcacgtacactacatgcagtcattaatttgtacgtcttcgcgtgcatttgggctgtcagcttattaattaaagttcatactatttactaaaaaaatctataaatattcaggttcagcagtaaccaaaaaaaaaaaagcggcagaccgaaacttacgtgttacgacctgacggaagagcacaagatcctggacctcaaggggcggcccttttaatgattggtctatccgacatactattcctgcaatatttcgtgtctaccatcattgctacttgtcagagatggatttgctgcttacatggatgtggatttgttctcatgtctagtccacagatattgcttcttgcttctttcctcttgctactgtcattctgggttgacctgtgtcatcagacaaatgatgaagaccaagaagatggaaggagtcagagtcaccatgaagctttactagacagaacaaaagcgaaacctggcattcatcctgttaatatccgtcaaaggcgttgcccaggaatacagcttgggaagccgcccaaaaatttgggattttgggtgcttct

SEQ ID NO: 115962 - DNA, 2109 bp, Zea mays
  Clone ID: MRT4577_37240C.1
agaattcgggagtacaagaacctccgggccggccgggctctcctcctttccctcccggccacttctctcgtttcgccctccccctcgagcaccccgccggctagggttacggccaccgccttccacgcctcccccacttcccgtaggcggaggctggtcggcgtgcacgcgaccgcggcggcggagatggacccggacttctcgcccgggggcggggggcccagctttgaattcgccttcaacgaggtcaacttctccgaccgggaattgcgtatcgaggtcgtcgccggggatgactacgctccggggtccagcggcgccggtgccggaggaggtggcctcgccgactgggcgcgccaccgcaagcgtcgccgtgaggagctcctcaaggagaaagaatctacaactcacatgtcagaccaaacaaattgcaatgaagttgaagcagaagagtgtgatgcgtatgaagaaaatcaagaggaacctgtagcaatggtagaagaatctccacccgatgttggccaagatggtgatgatgggcaaggtattgattcgtcttggactgtggttggtacaccagttttacgagtcaagacaatttatatcagttcagcgattcttgctgcgaagagtcctttctttttcaagcttttctcaaacggcatgaaagaatcggatcagagacatgcaacccttagaattactgactcagaggaaactgccctcatggagcttttaagctttatgtatagtggaaagttggcaactactgagcccactcttctgctggatatcttgatggctgccgacaaatttgaggttgtttcatgcatgaggtactgcagccagttgctcacaagcttgccgatgaccacagaatctgcacttctctacctagatctcccttgctcaatttcaatggcagcagcagttcaacctctgacagatgcagctaaggatttccttgctgtaaaatacaaggatttgactaagttccaagatgaagtgatgaacatccctcttgctggaattgaagccatcttgtcaagtaatgacctccaggtggcatctgaagataccatctatgacttcttgctcagatgggcccgtgcacaatacccgaaatcagaagagagacgtgagatccttagttctcggctgctccctcttgtgcgattcagtcacatgacatgtaggaagcttcggaaggtcctaacatgcacagatatagaccacgagcaggcaaccaagtgtgtcaccgaggctcttctgtacaaagctgatgcaccacaccggcaacgagctcttgcagcggacacaacaacctgtcggaaattcgctgagcgggcttacaagtacagaccactcaaggtcgttgagtttgatcggccctatccacagtgcatagcatacttggatctcaagcgcgaggaagtgctctcgactctttcctgcaggccggatatactcgcaagcgttccacctcgcagggcagggcttcttcctctcagctcactgtaacatggagcagcaaagcaccttctactgctttggcctgttcctggggatgcaagagaagggctcaacgagcgtgaccgtggactatgagtttgctgcaaggacgagaccatccggcgagtttgtgagcaagtataagggtaactacacatttaccggtgggaaggcagttgggtacaggaatctctttggaatcccgtggcaggcgttcatggccgatgacagcctcttcttcatcgacgggatgctgcatctgagagctgagcttacgataaagcaacctacgtagatgtgctgccgtcgggttaagtgtgtccagtcatgggtgatgtggaaaatgctgtgtgctgcagatatcctttttgttttttttccttttgttcacgcaccttaatccttacattaatagacagtttggtgatgacaaaatataaaggaaaaaaaagggctggaaagctgccttttgttgtttcactaagatgaaggttgtatgatctctgtctcttcgtagtggaagttgttacaccagatgaaaaagaaaagatatcggatgggaatccccccgcccttgagttctctgcaagtttccat

SEQ ID NO: 115963 - DNA, 2859 bp, Zea mays
  Clone ID: MRT4577_37241C.1
atgggtagtctccagcaaccactccaacccgggacggtgctccattttgggagtcttgagttcatgtccctcgacggcagctacgacatgatactccttcatccgccgcgcgacgacgataatggcggccgtcagcccgcccgccggcggcggaatcgacgacgtcttccccacgtggcggaagagcaacatccgggtctgtcccgtcaccttcctcgccgatggagggggaggcggggcaggcatggccaagcaggaggcggcacctcgtcggctgtcgagcgagtcgacgacgccggcgccccagcgggggacacgtcgggcgtcgacctcgcgtctgagatgaagacgagcgtcgtttccccgcaacacggcaaccccaagcagacggacaacgccagcacgctcgcaaatgacttgctgggcgttagcctcgtacctgagacaacggtgcagtccatccctgacgcagcttcgtcaccacccgtcgatcaagagattcagctgcgacccaccaagcgaccccgcttcggtggatgctttcataaaggcatgtccaaaccctccggggtatcatatgcggtcaccctggaccgactgacggtcgtctcgacctacgggcctctgggttccgaggaagatgacgagcccgactctggttgggatttctccagacttgataaccccagtgccatgcgggacttcatgaccgcatgtgactactgcctctccgattgctccgatagcagccacagcttcggcgacgaggactgtggcccaagtcgcgaatgcttccacgtcgatctatggggtctcgacgaaggcaaccatcttggtatgctgggggatggtgatccccctaggcctgcgcctcgcgttgacatccttcgggagctagctgtggtcacagtccctgcggggggtcaggacgcacagctcgagcaaatccgcgaggggtaccccccggagcatcgcaccgtgacttcccggttcatgcgggaagccttggtccacaccgggcacacgcggaataccgcgcctgcggccctgggtcgcctcggcaacgagcaccaccgccgcgaccgtcgagcccacctcgacgaggaggtgcgccgaggctaccaccccaggcgtgggggatgctacgacagcagggaggatcggagcccctcgcccgagccatccggtccgcgagccttcagccgggccatacgacgggcaccgttcccgacccggttccgaaccccgactactatcaccaagtactcgggggagtcgaagccggaactgtggctcgcggactaccggctggcctgccagctgggtggaacggatgatgacaacttcatcatccgcaaccttcccctgttcctctccgacgctgcccgagcctgcctggagcatctgcctcttgcgcagatctccaactgggacgacctcgtcaaagccttcgccggcaacttccagggcacatacatgcgccctgggaactcctcggatctccgaagctgccgccagcagccgggagagtccctgcgagactacatccgacgatttttgaagcagcgcaccgagctgcccaacatcaccgactcagatgtcatcggcgctttcctcgctggcaccacttgtcgcgacctggtgagcaagttgggtcgcaagactcccactagggcgagcgagctgatggacatcgccaccaagttcgcctctggtcaggatgcggtcgaggccatcttccggaaggacaagcagcctcaggggcgccagcaggaagacgtccctgaggcgtccgctcagcgcggcgcgaagaagaagggcaagaagaagtcgcaagcgaaacacgacgccgccgacgcagatcttgtcgccgccgccgagcacaggaaccctcggaagcctcccggaggggccaacctgttcgacaagatgctcaaggagacgtgcccctatcatcagggtccccgctacttccataaggccgggcccccggcggaaggtggcaaaggccacggcaacgacaagaaggagggccacaaagcagaggagttccccgaggtccacgactgcttcatgatctacggtggacaagtggcgaacgcctcggctcggcaccgcaagcaagagctccgggaggtctgctcggtgaaggtggcggcgccagtctacctagactggtccgacaagcccatcaccttcgaccaaggcgaccaccccgaccgcgtgccaagcccggggaagtaccctctcgttgtcgatcctgtcatcggcaatgtcaggcttaccaaggtcctcatggacggaggcagcagcctcaacatcttctacgccgagaccctcgggctcttgcagatcgatctgtccacgatccgggccagtgcggcgccctttcacgggatcatccccgggaagcgcgtccaacccctcgggcaactcaacctgcctgtctgcttcgggactccctccaacttccgaaaggaaaccctcatgttcgaggtggtcgggttccgaggaacctaccacgcagtgctggggagaccatgctacgccaagttcatggtcgtctccaactacacctacctcaagctcaagatgtcgggccccaacggggtcatcaccatcggatccacgtaccgacacgcgcatgaatgcgacgtggagtgcatggagtacgctgaggccctcgccgaatccgaggccctcatcgccgacctggagagcctctccaaggaggtgccagatgtgaagcgccacgctggcaacttcgagcctgcagaggcggttaagtctgtccctctcgaccccagcaacgacgcctccaagcaagtccggatcggctccgagctcgaccccaaatag

SEQ ID NO: 115964 - DNA, 224 bp, Zea mays
  Clone ID: MRT4577_37242C.1
aaaatagtcttcgagcttgcggggataggaggaaataaaaaaacacacacaaaaataagtatctaactataggagggttctctcgggcttctaattatataggagattagacaagtagatagactgggctaccagttcagaccgtagaccgcctcttaaacatgcagtccatcttcgacagagtgtgcttccctcctgacgtccaacactgctgctgccacccg

SEQ ID NO: 115965 - DNA, 2461 bp, Zea mays
  Clone ID: MRT4577_37243C.1
ctatttgggatcgagctcggagccgatccggatctgcttggaggcgtcgtggctggggtcgagggggacggatttaaccgtctccgctggctcgaagttgccggcgtggcgcttcacgtctggcacctccttagacaggctctccaggtcggcgatgagggcctcggattcggcgagggcctcggcgtactccacgcactccacgtcgcattcgaacgcgtgtcggtacgtagggccgacggtgatgaccccattggggcccggcatcttgagcttgaggttggtgtagttggggacggccatgaacttcgcgtagcatggcctccccagtactgtgtggtaggttcctcggaacccgaccacctcgaacgtgagggtctcccttcggaagttggtgggcgtcccaaagcagacgggaagatcgagttgtccgaggggctggacgcgcttcccagggatgatcccgtggaaaggcgcaacgcctgcccggatcgaggacagatcaacacgcaggagcccgagggtctcggcgtagatgatgttgaggctgctgcctccgtccatgaggaccttggtgagcctgacgtcgccgatgacggggttgacaacgagcgggtatttcccctcccgacgctcttgcttgcggtgccgagccgaggcgttcgccgcttgcccaccgtagatcatgaagcagtcgcggacctcggggaactctcctgcctggggagtcttccttcttatcgtcggcgcgagccctgccaccctccgcgggtggcccggccttgtgaaagtggcgccgaagcatggcgcactcctcaagggtgtgcttgacaggcccctgacgataggggcacggctccttgagcatcttgtcgaagaggttggcacctccggggggtttccgagggttcttgtactcggcggcggcgacaaggtccgcgtcggcggcgtcgcgtttcgcttgcgacttcttcttgcctttcttcttggcgccacgctgagttgacgcctcggggacatcttccggtgggcggccctggggctgcttggtcttccggaagatggccttaaccgcctcctggccagaggcgaacttggtggcgatgtccatcagctcgctcgccctggtgggggtcttgcgacccagcttgctcaccaggttgtggcaggtggtgccggcgaggaacgcgccgatgacatctgaatcggtgatgttgggcagctcggtgcacagcttcgagaatcgccggatgtagtcccggagacactctcccggctgctgtcggcagcttcggaggtcccaggagtttccagggcgcacgtgcgtgcccctgacatcgtcgacgatgcggtgctggataccctggggtagatgacgcacttctctgaccggaggttggcccgcccattcctgcccgacgtcccggcggatcggctcaagtgttcctgctccctcgtcgagcctggcctgcaccccgcggatttgctcgagctgtgggtcatgaccccccgccgaaacggggaccacagctagctcccgttggatgtcaacgcgaggcacatgcctagggagatcaccgttctccggcataccaagatggttgccttcggagggaccccctagatcgacgtggaaacattcacgacttgggcagcagtcctcgtcgccgaggctgcggctaccgtcggaacagtcggaaaggcagtagtcacacgcggtcataaagtaccgcatggcactggggttaccaagtccggagaaatcccaacagaagtcgagctcgtcatcttcctcggaccccgagggcccgtaggtcgggatgtccgtcagccggtcccagggtgaccgcatacgataccccagagggtttggactcacctctacgagagcgcccaccaaagtgaagtcgcttggcgggtcgaggctgaatccaaaaggcgtgagatgggaatcggttggtacctcttggttgacgggcggtgacgaagtcacgtcagggactgactgcaccgtcatctcaggtacgagggtgacgcccaacaagtccttcgcgagcgtgctggcatcgtccgtttgcttgggattggcgcgttgcggggagacggcgctcgtcttcgtctcaggcgcgaggtcgatgcccgacgtgccccccgttggggtgccggcgccgtcgactagatcgacagccgacgaggtgccacctcctgcttggccttggttgccccgcctcctcctccgtcggcgggggaggggacggggtgagctcgaatgttgttcttccaccacgcggggaagacgtcgtcgattccgccgccggcgggcgggctgtcggccgccattgtcgttgtcgcacggcgggggaagcagtatcatgtcgtagctgccgtcgagggacatgaactcaagactcccgaaacggagcactgtcccgggctggaaaggtcgctggagactgcccat

SEQ ID NO: 115966 - DNA, 2784 bp, Zea mays
  Clone ID: MRT4577_37244C.1
atgggcagtctccagcaacctctccaacccaagacggtgctccgtttcgggagtcttgagttcatgtccctcgacggcagctacgacatgatactccttccaccgccgcgcgacaacgacaatggcggccgacagcccgcccgccggtggcagaatcgacgacgtcttccccgcgtggtggaagaacaaccttcgagctcatcctgccctttcccccgccgacggaggggaaggcagggcgaccaaggccaagcaggaggcagcgcctcgtcgactgtcgagcgagtcgacagtcccggcaccccaacgaggggtgcaccgggtatcgacttcgcacttgagacaaagacgagcgccgtctccccgcgacacgccattcccgagcaagcggacgatgccagcgcgctcgcggagagcttgctggatgtcaccctcgtacctgagacgacggtgcagtcagtccccgacgtgactttatcgccgctcgtcgaccaagaggtaccgaccgatccccatcccacgtcatttggattcagcctcaacccgcctagcgaccgtgctttggcgggcgctctcgtagaggcaagtccaaaccctctggggtttcgcatgcggtcgccttgggaccggctgacggacgtctcgacctacgggccctctgggtccgaggaagacgacgagcccagcctctgttgggatttctctggacttggcaaccccagtgccatgcaggacttcatgaccgcatgtgactactgcctctccgactgttctgatggtagccgcagcctcggcgacgagggctgcggcccaagccgcgaatgtttccacgtcgatctagggggtccctccgaaggcaatcatctcggcatgccggaggacgatgacctccctaggccggtgccccgcgttgacatcccacgagagctagctgtggtccccgttcaggcgggggggcatgacccacagcttgagcaaatccgcggggtgcaggccaggctcgatgagggagcaggggcgcttgagccgatccgccgggacgtcgggcaggcatgggcgggccaacccccggccggagaaatacgtcatccgccccagggcttccagcaccgcgtcgccaacgacatcagggacaggccgccacccgcatctagtggggtcggccagaacctggctgcagcagcgatgcttctccgcgcgatgctggagccatcaaccaccgagggccggcgaatccagggggaactcaagaatctcctggaaggcgccgtggtccgacgggccgagagctctgcctcccgagggcagggatacccctcggaacctcatgccgcgacttcccgattcatgcgggtagcctcggtctacaccggacgcacgcgcaacaccgcgcctacggccctgggccgcctcggcaacgagcaccgtcaccgcgaccgtcgggcccacctcgacgagaggccgggagagtccctccgggactacatccggcgattctcgaagcagcgcaccgagctgcccaacatcaccgactcggatgtcatttgcgcgttcctcgccggcaccacctgccgcgacctggtgagcaagttgggtcgcaagacccccaccagggcgagcgagctgatggacatcgccaccaagttcgcctctggccaggaggcggtcgaggctatcttccgaaaggacaagcagccccagggccgcccaccgaaagatgcccccgaggcgtcaactcagcgcggcgccaagaagaagggcaagaagaagtcgcaagcgaaacgcgacgccgtcgacgcagaccttgtcgccgccgccgagtacaagaaccctcggaaaccccccggaggtgccaacctcttcgacaagatgctcaaggagccgtgcccctatcaccaggggcccgtcaagcacacccttgaggagtgcgccatgcttcggcgccacttccacagagccgggccacccgcggagggcggcagggctcgcgatgacgacaagaaggaagatcaccaggcaggagagttccccgaggtccgcgactgcttcatgatctacggtgggcaagcggcgaacgcctcggctcggcaccgtaagcaagagcgtcgggagcccatcaccttcgaccaagccaaccaccccgaccacgtgccgagcctggggaaatacccgctcgttgccgaccccgtcatcggcgacgtcaggctcaccaaggttctcatggaccgaggcagcagcctcaacatcatctacgccgagaccctcgggctcctgcgtgtcgatctgtcctcggtccggacaggcgctgcgcctttccataggatcatccccgggaagcgtgtccagcccctcggacaactcgaccttcccgtctgcttcggaacgccctccaacttccgaagggagaccctgacgttcgaggtggtcgggttccgaggaacctaccacgcggtactgggaaggccatgctacgcgaagttcatggccgtccccaactacacctacctcaagctcaagatgttgggccccaacggggtcatcaccgtcggccccatgtataaacacacgttcgaatgcgacgtggagtgcgtggagtacgccgaggccctcaccgagtctaaggccctcatcgccgacctggagagcctctctaaggaggtgctagacgtgaagcgtcatgctggcaacttcgagccagcggagacggttaagtccgtccccctcgaccccaacagcgacgcctccaagcaagtccggatcggctccgagctcgatcccaaatag

SEQ ID NO: 115967 - DNA, 143 bp, Zea mays
  Clone ID: MRT4577_37245C.1
cacagatcagagttcacaagatcgatgtcttcctcaacaagaaggacatggacgacgacgaagaactgctcgaactcatcgaactggaagtccagaagctgctcagcaactatgagtacgacggcgacgaagtgccaatcgtc

SEQ ID NO: 115968 - DNA, 383 bp, Zea mays
  unsure (1)..(383): unsure at all n locations
  Clone ID: MRT4577_37246C.1
agatgcatttgcaatcgatgggggagaaaatgtctaaataaagtcaaggttccgaatcacattgtcctcacagtactccctacgaacctctggtgcaagcgaatccgcgatttcatccaattgaatagcatttcgtggctctacaatacactcctgggccaccttgtggcnngtacttgtggaggtggggagtatgctctcgtgataattataccgttgctccaagagcatcacgttcaccgatgccacatcgtcaaccatattatcgttatcctgacattgattctgttcgtccctacatctctacacttgagctgcctgctccccagtatgtcgagcagggccacctgcttttcttcgtcggtatgacctccctgtcgaac

SEQ ID NO: 115969 - DNA, 252 bp, Zea mays
  Clone ID: MRT4577_37247C.1
attcggctcgagctctactacacccttttttagaggaacccgatcggagtaagagtgggggtcttattaagaggatcatcgtggtatccgcaggaggggcgaatcctaaacccaattgtagcatgagggctgatataaatcttaccccaactcctatcgctgaggaggatcgggacaagcagccttctatcggagagatcattaacatcaagctggtagagactggcgataaggagaagctcatggtgctcc

SEQ ID NO: 115970 - DNA, 1908 bp, Zea mays
  Clone ID: MRT4577_37248C.1
atgtcgttcggtttgaggaatgcaggcgcgacgtaccagcggtgcatgaaccatgtgttcggcgaacacatcggtcgcacggtcgaggcctacgtcgatgacatcgtagtcaagacaaggaaggtttccgacctcctctccgaccttgaagtgacattccgatgtctcaaggcgaagggagtcaagctcaatcctgagaagtgtgtcttcggggtgccccgaggcatgctcctagggttcatcgtctccgagcgaggcattgaagccaacccggagaagatcgcggccatcaccagcatgggacccatcaaggacttaaaagatggagaagccctcttggtctacgtcgccgcgaccactcaggtggttagcgccgcgattgtggtcgagaggcaagaggaagggcatgcattgcccgttcagaggccggtctacttcgtcagcgaagtactgtccgagaccaagatccgctacccacaagttcaaaagctgttgtatgctgtgatcctgacaaggcggaagttacgacactacttcgagtctcatccggttatcaagtctcaggtgttggcggacttcgtggccgaatgggtcgacacccagttgccgacggctccgatccaaccggagctctggaccatgtttttcgacgggtcgctgatgaagacaggagccggcgcgggcctgctcttcatctcgccccttggaaagcacctgcgctacgtgctgcgcctccatttcccggcgtccaacaatgtggccgagtacgaagctctggtcaacgggttgcggatcgccatcgagctaggggtcagacgcctcgacgcccgcggtgattcgcagctcgtcatcgaccaagtcatgaagaactcccactgccgcgacccgaagatggaggcctactgcgacgaggttcggcgcctggaagacaagttcttcgggctcgagctcaaccacatcgctcggcgctacaacgaaaccgcagacgagctggctaaaatagcctcggggcgaacgacggtccccccggacgttttctcccgggatctgcatcaaccctctgtcaagatcgacgacgcgcccgagcccgagaaggcgcccgggggctacacgcacctgctggtcgccatcgacaaattctccaagtggatcgaggtccgacctctgaacagcatcaggtccgagcaggcggtggcgttcttcaccaacatcatccatcgcttcggggtcccgaactccatcatcaccgacaacggcactcagttcaccggcaaaaaattcttggatttttgcgaggatcaccatatccgggtggactgggccgccgtggctcatctcatgtcgaatgggcaagtagagcgtgccaacggcatgattctacaagggctcaagcctcggatctacaacgacctcaacaagttcggcaagcggtggatgaaggaactcccctcggtggtctggagcctaaggacgacgccgagtcgtgccacgggtttcacgccgtttttcctagtctacggtgctgaagctatcttgcccactgacctggaatacggctccccgaggacgagggcctacaccgatcaaagcaaccaagctagccgagaagaatcgctggaccagctggaggaggctcgggacagggccttactacactcggcgcggtaccagcagtccctgcgacgctgccacgcccgaggggtccggtcccgagacctccaggtgggcgatctggtgcttcggctgcggcaagacgccagagggaggcacaagttcacgcccccctgggaagggccattcgtcatcgccaaagttctaaagcccggaacatacaagctggccaacattcaaggcgagatctacggcaacgcttggaacatcaaacagctacgtcgcttctacccttaa

SEQ ID NO: 115971 - DNA, 5913 bp, Zea mays
  Clone ID: MRT4577_37249C.1
atgggcagtcttcagcaacctttccggcccgggacggtgctccgtttcgggagtcttgagttcatgtccttcgacggcagctacgacatgatactccttccaccgccgcgcgacaacgacaatggcggccgacaacccgcccaccggcggcggaatcggcgacatcttccccgcgcggtggaagaacaacattcgagctcgccccgtcctctcccccaccaatggaggaggaggcggggcaaccaaggccaagcgggaggccgcgcttcgtcggctgtcgagcgaatcgacgtccccagcgccccgacggagggcgcgccgggcgtcgacctcgcgttcgagacgaaggcaagcgccgtccccccgcgacacgctgatcccgagcaagtggacgacgccggcacgctcgcgaggagcttgcaggacgtcgccctcgtacctgagatgacggtgcaaccagtccccgatgtgactacgtcgccccgcgtcgaccaaaaggtaccgactaactcccctcttacgtcatttcgactcggcctcaacccgccaagcgacctcgctttggcgggcgccctcattgaggcgagtgcaaccccactggggtttcgtatgcggtcaccttgggaccgattgacggacgtctcgacctacgggccctccgggtccgaggaagatgacgatcccagcatctgttgggatttctctggacttggcaaccccagtgccatgcgggacatcatgaccgcatgtgactactgcctctccgactgttccgacggaagccgcagccttgacgacgagggctgcggcccaagccgcggatgtttccacgttgagctgggggatccctccgaaggcaaccatcttggcatgccggaggacggtgattttcctaggcccgtgcctcgcgccgacatcccgcgggagctagctgtggtccccgttccggcggggggtcacgacccacagctcgagcaagtccgcggggcgcaggccaggctcgacgagggaacaggagcgcttgagacgatccgccgggacgtcgggcaggtatgggcgggccaacccccggccggagaaatacgtcacctgccccagggtttccagcaccgcgtcgccaacgatgttagggtcaggccgccgcccgcatccagcggggttggtcagaacctagcagccgcagcgatactcctccgcgcgatgccggagccatcaaccaccgagggtcggcgaatccagggagagctcaagaatctcctggaaggcgctgcggcccgacgggccgagagcactgcctcccgaaggcagggatatccctcggaacctcatgtcgcgacttcccgattcatgcgggaagcctcggtctacaccggacgcacgtgcaacaccgcgcctgcggccccgggccacctcggcaacgagcaccactgtcgcgaccgacgggcccacctcgacgaaagggtgcgccgaggctaccaccccaggcgtgggggacgctacgacagcggggaggatcggagtccctcgcccgaaccacccggtccgcaggccttccgtcgggccatccgacgggcgccgttcccgacccggttccgacccccgactactatcacgaagtactcgggggaaacgaggccggaactgtggctcgcggactaccgcctggcctgccaactgggaggaacgaacgacgacaacctcatcatccgtaacctccccctgttcctctccgacactgctcgcgcctggttggaacacctgcctccagggcagatctccaactgggacgacttggtccaagccttcgccggcaatttccagggcacgtacgtgcgccccgggaattcctgggacctccggagctgccggcaacaaccgggagagtctctctgggactacatccggcgattctcgaagcagcgcaccgagctgcccaacatcaccgactcagatgtcatcggcgcgttcctcgccggcaccacctgccgcgacctggtgagcaagctgggtcgcaagacccccaccagggcgagcgagctgatggacatcgccaccaagttcgcctctggccaggaggcggctcccgaggcgtctactccgcgcggcgccaagaagaaaggcaagaagaagtcgcaatcgaaacgcgacgccgccgacgcggaccttgtcgccgccgccgagtacaaaaaccctcggaagccccccggaggtgctaacctcttcgacaagatgcttaaggagccgtgcccctaccatcaggggcccgtcaagcacaccctcgaggagtgcgtcatgcttcggcgtcacttccacagggccgggccacccgcggagggtggcagggcccgcgacgacgacaagaacgaagatcaccaagcaggagagttccccgaggtccgcgactgcttcatgatctacggtgggcatgcggcgaacgcctcggctcggcatcgcaagcaagagcgccgggaggtctgctcggtgaaggtggcggcgccagtctacctagactggtccgacaagcccatcaccttcgaccaggccgaccaccccgaccacgtgtcgagcccggggaaatacccgctcgtcgtcgaccccgtcatcggcgacgtcaggctcaccaaggtcctgatggatgggggcagctgcctcaacatcatctacgccgagaccctcaagctcctgcgcgtcgatcagtcctccgtccgggcaggcgctgcgcccttccacgggatcgtccctgggaagcgcgtccagcccctcggacgactcgacctccccgtctgcttcggaacgccctccaacttccgaagggagaccctggcgttcgaggtggtcgggttccgaggaacctaccacgctgtactggggaggccatgctacgcgaagttcatggtcgtccccaactacacctacttgaagctcaagatgccgggccccaacggggtcatcaccgtcggccccacgtacaaacacgcgttcgaatgcgacgtggagtgcgtggagtacgccgaggccctcgccgagtccgaggccctcatcgccgacctggagaacctctccaaggaggtgccagacgtgaagcgtcacgccggcaacttcgagccagtggagacggttaaggccgtccctctcgaccccagcggtgacacctccaagcagatccggatcgactacactggtctcaacaaagcatgtccgaaggttccctaccctctgcctcgcatcgatcaaatcgtggattccactgctgggtgcgaaaccctgtccttcctcgatgcctactcagggtatcaccaaatccggatgaaagagtccgaccagctcgcgacttctttcatcacgccgttcggcatgtactgctatgtcaccatgccgttcggtttgaggaatgcgggcgcgacgtaccagcggtgcatgaaccatgtgttcggcgaacacatcggtcgcacagtcgaggcctacgtcgatgacatcgtagtcaagacaaggaaggcttccgacctcctctctgaccttgaagtgacattccgatgtctcaaggcaaaaggagtcaagctcaatcctgagaagtgtgtcttcggggtgccccggggcatgctcctggggttcatcgtctccgagcgaggcatcgaagccaacccggagaagatcgcagccatcaccagcatgggacccatcaaggacttaaaaggcgtacagagggtcatgggatgcctcgcggccctgagccgcttcatctcacgcctcggcgaaagaggtctgcctctgtaccgcctcttaaggaaggccgagtgtttcgcttggacccctgaggccgaggaagccctcgagaacctgaaggcgctccttacaaaggcgcctgtcttggtgcccccagctgatggagaagccctcttggtctacgtcgccgccaccactcaggtggttagcgccgcgattgtgctcgagaggcaagaggaagggcatgcactgcccgttcagaggtcagtctacttcgtcagcgaagtactgtccgagaccaagatctgctacccacaagttcagaagctgttgtatgctgtgatcctgacgaggcggaagttacgacactacttcgagtctcatccggtaactgtggtgtcatccttccccctcggggagatcatccagtgccgagaggcctcgggcaggatcgcaaagtgggccgtggaaatcatgggcgaaacaatctcgttcgcccctcggaaggccatcaagtcccaggtgttggcggacttcgtggccgaatgggtcgacacccagctgccgacggcttcgatccaaccggagctctggaccatgtttttcgacgggtcactgatgaagacaggagccggcgcgggcctgctcttcatctcgcccctcggaaagcacctgcgctacgtgctgcgcctccatttcccggcgtccaacaatgtggccgagtacgaagctctggtcaacgggttgcggatcgccatcgagctaggggtcagacgcctcgacgcccgcggtgattcgcagctcgtcatcgaccaagtcatgaagaactcccactgccgcgacccgaagatggaggcctactgcgatgaggttcggcgcctgaaagacaagttcttcgggctcgagctcaaccacatcgctcggcgctacaacgagactgcagacgagctggctaaaatagcctcggggcgaacgacggtccccccggacgtcttctcccgggatctgcatcaaccctccgtcaagatcgacgacgcgcccgagcccgaggtaccctcggctcagcccgaggcaccctcggctcggcccgaggaagagctctaccaccggagcccctcgggcatcctccagcgatgcatctccatcgccgaaggtcaggaactcctgcaagaaatacactcgggggcttgcggccatcatgcagcaccccgagcccttgtcgggaatgctttccggcaaggcttctactggccaacagcggtggctgacgccactggaattgtccgcacctgcgaagggtgccaattctatgcgaaggagacccacctgcccgctcaggctctgcagatgatacccatcacctggccctttgctgtatggggtctggacctcgtcggtcccttgcagaaggcgcccgggggctacacgcacctgctggtcgccatcgacaaattctccaagtggatcgaggcggtggcgttcttcaccaacatcatccatcgcttcggggtcccaaactccatcatcactgacaacggtacccagttcaccggcaaaaaattcttggatttttgcgaggatcaccacatccgggtggactgggccgccgtggctcatcccatgtcgaatgggcaagtagagcgtgccaacggcatgattctacaagggctcaagcctcggatctacaacggcctcaacaagttcggcaagcgatggatgaaggaactcccctcggtggtctggagcctaaggacgacgccgagtcgtgccacgggtttcacgccgttcttcctggtctacggggccgaggctatcttgcccactgacctggaatacggctccccgaggacgagggcctacaccgatccaagcaaccaagctagccgagaagaatcgctggaccagctggaggaggctcgggacagggccttactacactcggcgcggtaccagcagtccctgcgacgctaccacgcccgaggggtccgatcccgagacttccaggtgggcgacctggtgcttcggctgcggcaagacgcccggggaaggcacaaactcacgcccccctgggaggggccattcgtcatcgccaaagttctgaagcccggaacatacaagctggccaacaatcaaggcgagatctacggcaacgcttggaacatcaaacagctacgtcgcttctacccttaa

SEQ ID NO: 115972 - DNA, 350 bp, Zea mays
  Clone ID: MRT4577_3724C.1
atatcgcagaccactagagaaaaactatgacaaaaaacgcaaaggaaatattcattcaaacaaacaaaatgaccaaattatgccgatatataaaatcatatttacatacagttacaaaatcatgtgacaaaaatatatatatacaccataaaaaaaactagcctcaaataaaagaagtgcaagttctacaaactattcggttgtatttaaaaaaaagtatgaactaacccttttatgaaaaaatcatgaaattactaggaaaaataaaaatctctccaaaaatgtaaaatgaaaaagtaacaagcattttacgcatcgcacttgttaatagcacctaacgccatgtaacc

SEQ ID NO: 115973 - DNA, 3318 bp, Zea mays
  Clone ID: MRT4577_37250C.1
atgccgacagttggcgcgccaggtaggggcctgctgcgtgttgacgaacagcttcccgtcaagctccagatgggcagtctccagcaacctctccggcccgggacggtgctccgttttgggagtctcgagttcatgtccttcgacggcagctacgacatgatactccttccaccgccgcgcgacaacgacaatggcggccgacaacccgcccgccggcggcggaatcgacgacatcttccccgcgcggtggaagaacaacattcgagctcgccccgtcctctcccccgccaacggaggaggaggcggggcaaccaaggccaagcgggaggccgcgcttcgtcggctattgagcgaatcgacgtccccagcgccccaacggggggcgcgtcgggcgtcgacctcgcgtttgagacgaaggcgagcgccgtccccccgcgacacaccaatcccgagcaagtggacgacgccagcgcgctcgcggagggcttgcaggacgtcgccctcgtacctaagacgacggtgcaatcagtccccgacgtgactatgtcgctcctcgtcaaccaaaaggtactgactgattcccatcttacgtcatttcgactcggcctcaacctgcctagcgacctcgctttggcgggcgctctcgttgaggcgagtgcaacccctctggggtttcgtatgcggtcgccttgggaccgattgacggacgtctcgacctacgggccctctgggtccgaggaagatgacgatcccagcatctgttgggatttctctggatttggcaaccccagcgccatgcgggactttatgaccgcatgtgactactgcctctccgactgttccgacggtagccgtagccttgacgacgaggactgcggcccaagccgcgaatgtttccacgtcgagctaggggatccctccgaaggcaaccatctcggcatgccggaggacggtgatctccctaggccggtgcctcgcgctgacatcccgtgggagctagctgtggtccccgttccggcggggggtcacgacccacagctcgagcaagtccgcggggcgcaggccaggctcgacgagggagcaggagcgcttgagccgatccgccgggacgtcgggcaggtatgggcgggccaacccccggccggagaaatacgtcacttgccccagggtttccagcaccgcgtcgccaacgacgtcagggtcaggccgccacccgcatccagtggggtcggtcagaacctggcggccgcagcgatgctcctccgcgcgatgccggagccatcaaccaccgagggtcggcgaatccagggggagctcaagaatctcctggaaggcgccgcggtccgacgggccgagagcactgcctcccgaaggcaaggatacccctcggaaccacatgccgcgacttcccgattcatgcgggaagcctcggtctataccgggcgcacgcacaacaccgcgcctgcggccccgggccgcctcggcaacaagcaccatcatcgcgaccgtcgggctcacctcgacgaaagggtgcgccgaggctatcaccccaggcgtgggggacgctacgacagcggggaggatcgaagtccctcgcccgaaccacccggtccgcaggccttcagccgggccatccgacgggcgccgttcccgacccggttccaacccccgactactatcacaaagtactcgggggagacgagaccggaactgtggctcgcggactaccgccttgcctgccaactgggtggaacggacgacgacaacctcatcatccgcaacctccccctgttcctctccgacaccgctcgcgcctggttggagcacctgcctccggggcagatctccaactgggatgacttggttcaagccttcgccggaaatttccagggcacgtacgtgcgccccgggaattcctgggacctccgaagctgccggcagcagccgggagagtctctccgggactacatccggcgattctcgaagcagtgcaccgagctgcccaacgtcactgactcagatgtcatcggcgcgttccttgccggcaccacctgccacgacctggtgagcaagttgggtcgcaagacccccaccagggcgagcgagctgatggacatcgccaccaagttcgcctctggccaggaggcggtcgaggctatcttccgaaaggacaagcagccccagggccgtccatcggaagatgctcccgaggcgtcaactctgcgcggcgccaagaagaaaggcaagaagaagtcgcaagcgaaatgcgacgccgccgacgcggaccttgttgccgccgccgagtacaagaaccctcggaagccccccggaggtgccaacctcttcgacaagatgctcaaggagccgtgcccctatcatcaggggcccgtcaagcacaccctcgaggagtgcgtcatgcttcggcgccacttccacagggccgggccacccgcagagggtggcagggcccgcgacgacgacaagaaggaagatcaccaagcaggagagttccccgaggttcgcgactgcttcatgatctacggtgggcatgtggcgaatgcctcggctcggcatcgcaagcaagagcgccgggaggtctgctcggtgaaggtggcgacgccagtctacctagactggtccaacaagcccatcaccttcgaccaagctgaccaccccgaccacgtgccgagcccggggaaatacccgctcgtcgtcgaccccatcgtcggcgacgtcaggctcaccaaggtcctgatggacgggggcagctgcctcaacatcatctacgccgagaccctcaggctcctgcgtgtcgatctgtcctccgtccgagcaggcgctgcgcccttccacgggatcattcccgggaagcgcgtccagcccctcggacgactcgaccttcccgtctgcttcggaacgccctccaacttccgaagggagactttgacgttcgaggtggtcgggttccgaggaacctaccacgcggtattggggaggccatgctacgcgaagttcatggccgtccccaactacacctacctgaagctcaagatgccggaccccaacggggtcatcaccgtcggacccacgtacaaacacgcgttcgaatgcgacgtggagtgcgtggagtacgccgaggccctcgccgagtccgaggccctcatcgccgacctggagagcctctccaaagaggtgccggacgtgaagcgtcatgccggcaacttcgagccagcggagacggttaaggccgtccctctcgatcccagtggcgacacctccaagcggatccggatcggttccgggctcgaccccaaatag

SEQ ID NO: 115974 - DNA, 293 bp, Zea mays
  Clone ID: MRT4577_37251C.1
gttaacatcagcagcatgctgggtcgcatggccaacccagcccgctcaccatactgcatcaccaagtttggggtagaggctttctcggactgcctacgctatgagatgcaccctctgggtgtgaaggtcagtgtggtggagcctggcaacttcatagctgccaccagcctctatagccctgagcgtatccaggccattgccaagaagatgtgggatgagctgccagaggtcgtccgcaaagactatggcgagaagtacttcgatgaaaagattgccaagatggagacctactg

SEQ ID NO: 115975 - DNA, 5499 bp, Zea mays
  Clone ID: MRT4577_37252C.1
atggactccgccccgcccgaccccagggctcgggctcagcctcggctccggaagacgatgaactctgcctcgcccgaccccagggctcggactcagcctcggctccggaagacgacgaactccgcctcgcctgaccccagggctcggactcagcctcagctccggaagacgacaaactccgcctcgcccgaccccagggctcggactcagcctcggctccggaagacgacgaactccgcctcgcccgagcccagggctcggactcagccttggcctcggacgacggtctccgcctcgcccgacccagggctcggactcgacctcgaaagacggactcgacctcgacctcagaggagcctccgcctcgcccgaccaagggctcggaccgaccacgtcacaaggggggccatcattaccctacccctagctagctcaggctacggggaacaagaccggcgtcccgtctggctcgccccgcttcccgtcaagctcgagatgggtagtctccagcaacctttccaacccgggacgattctccatttcgggagtcttgagttcatgtccctcgacggtggctacgacatgatactccttcctccgccgcgcgacagcgtcaatggcggccgacagcccgcccgccggcggcggaatcaacgacgtcttccccacgtggcggaagaacaacattcgggtttgtcccgtcgcctcccccgccgacggaggaggaggcggggcaaccatgaccaagcaggaagcggcaccttgtcggctgtcgagcgagtcgacgacgccggcgccccaatgggggacacgtcgggcgatgaccttgcgtctgagacgaagacgagcgtcgtttccccgcaacacgccaactccaagcgaacgaacgacgccagcacgctcgcgagggacttgctgggcgtcaccctcgtacctgagacgacggtgcagtccgcccctgacgcgacttcatcaccgcccatcgaccaagaggtaccgaccgattcccatctcgtgccttttggattcagcttcgacccaccaagcgacctcgcttcggtggaagccttcatagaggcacgtaccaaccctccggggtaccatatacggtcgccctgggatagactgacggccgtctcgacctacgggccctcgggttccgaggaagatgacgagcccgacttttgttgggatttctccgagctcggtaaccccagtgccatgcgggacttcatgaccgcatgcgactactgtctctccgattgttccgatggtagccgcaacttcggcgacgaggactgcggcccaagtcgtgaatgtttccacgtcgatctagggggtcccggcgaaggcaaccatcttggtatgccggaaaacggcgatccccctagccctgcgcctcgcgttgacatccttcaggagctagccgtggtcccagtccctgcgggagaaccatcgaccaccgaagggcggcgtatccagggagaactcaagaatctcctggaggatgccgcggtccgacgggccgaaagctctgcctcccgaaggcaggggtacccctcggagcatcgcgtcgtgacttcccgattcatgcgggaagcctcggtccacaccgggcgcacgcgcaacacagcgcctgcggccccgggtcgcctcggcaacgagcaccaccaccacaaccgtcgagcccacctcgacgagagggtgcgccgaggctaccaccccaggcgtgggggacgctacgacagcggggaggatcttagtccctcgcccgaaccacccggtccgcaggctttcagccgggccatacgatgggcgtcgttcccgacccggttccaaaccccgactaccatcacaaagtactcgggggagacgaggccggaactatggctcgcgaactaccggctggcctgccagctgggtggaacagacgatgacaacctcatcatccgcaacctccccctgttcctctccgacaccgctcgagcctggctggagcatctgcctccggggcagatctccaactgggacgacctggtccaagccttcgccggcaacttccagggcacgtacgtgcgccctgggaactcctcggatctccgaagctgccgtcagcagccgggagagtctctccgggactacatccggcgattctcgaagcaacgcaccgagctgcccaacgtcaccgattcggatgtcatcgacgcgttcctcgccggcaccacctgccgcgacctgggccgccagccggaagatgtccccgaggcgtccactcagcgcggcaccaagaagaagggcaagaagaattcgcaagcgaaacgcgacaccgctgacgcggaccttgtcgccgccgctgagtacaagaaccctcggaaacctcccggaggtgccaatctcttcgacaagatgctcaaggagccatgcccctatcatcaggggcccgtcaagcacaccctcgaggagtgcgtcatgcttcggcgccactttcacaaggctaggccacctgcggaaggtggcagggcccacaacaatgacaagaaggaggatcacaaggcagaggagttccccgaggtccacgactgcttcatgatctacggtgggccagtggcgaacgcctcggctcggcaccgcaaacaagagcgtcgggaggtctgctcggtaaaggtggtggcaccagtctacctagactggtccgacaagcccatcaccttcgaccagggcgaccaccccgaccgcgtgccgagctcggggaaatatccgctcgttgtcgaccccgtcatcggcaacgtcaggctcaccaaggtcctcatggacgggggcagcagcctcaacatcatctacgtcgagaccctcgggctcctgcagatcgatctgtcctcgatccggacaggcgcggcgccttttcacgggatcatccccgggaaacgcgtccaaccccttggacaactcgagctgcccgtctgcttcgggactccctccaacttccgaagggaaaccctcacattcgaggtggtcgagttccaaggaacctaccacgcagtactggggaggccatgctacgccaagttcatggtcgtctccatctacacctacctcaagctcaagatgtcgggccccaacggggccgaggccctcgccgaatccaaggccctcatcgccgacctggagagcctctccaaggaggcgccagacgtgaaacgccatgccggcaacttcaagccagtagagacggaagcagtgctcgtcgactttctccgcgcgaacgccgaagtctttgcgtggagtccctcggacatgcctggcataccgagggatgtcgccgagcactcgctggatatccgagctggagcccgacccgtgaagcagcctctgcgccaattcgacgaagaaaagcgcagagccataggcgaggagatccacaagctgatggctgcggggttcatcaaagaggtattccatcccgaatggcttgccaaccctttgcttgtgagaaagaaaggagggaaatggtggatgtgtgtagactacactggtctaaacaaagcatgtccgaaggttccctaccctctgcctcgcattgatcatatcgtggattccactgctgggtgcgaaaccctgtctttcctcgatgcctactcagggtatcaccaaatcaggatgaaagagtctgaccagctcgcgacttctttcatcacatcttttggcatgtactgctacgttactatgccatttggtttgaggaatgcgggtgcgacgtaccaaatgtgcatgaaccacgtgttcggagagcacattggtcgaacggtcgaggcttacgtcgatgacatcgtagtcaagacgaggaaagcctccgacctcctctccgaccttggaacgacattccggtgtctcaaggcgaaaggcgtaaaactcaatcccgagaagtgcgtcttcggagtccctcgaggcatgctcttggggttcatcgtctccgagcggggcatcgaggccaacccggagaaaatcgcgaccatcaccaacatggggcccatcaaggacttgaaaggcgtacagagggctgagtgcttcacttggacccccgaggccgaggaagccctcgggaacctgaaggcgctcctcacgaacgcgcccatcttggtgccccccgctgccggagaagccctcttgatctacgtcgccgctaccactcaggtggtcagcgccgcgatcgtggttgagagacgagaagaagggcatgcattgcccgtccagaggccggtctacttcatcagtgagttgcgacactacttcgagtctcatccggtgactgtggtgtcatccttccccctgtgggagatcatccaatgccgagaggcctcgggtagaattgcaaagtgggcggtggaaatcatgggcgagacaatctcgttctcccctcggaaggtcatcaagtcccaagtcttggcggactttgtggccgaatgggtcgacacccagcttccagcagctccgatccaaccgaaactctggacaatgtttttcgatgggtcgctgatggaaacaggggcagacgcgggcctgctcttcatctcgcccctcgggaagcacctcagctacgtgctacgcctccacttcccggcgtccaacaacgtggctgagtacgaggctctggtcaacgggttgcgcatcgccatcgagctagggaaggcacccgggggctacacgcacctcctggtcgccatcgataaattctccaagtggatcgaggtctggcccctgagcagcatcaggtccgaacaggcggtggcgttcttcaccaacatcatccatcgttttggggtcccgagctccatcatcaccgacaacggcacccagttcactggcagaaagttcctggacttctacgaggatcaccacatccgggtggactgggccgccatggctcaccccatgacgaatgggcaagtagagcgtgccaacggcatgattatgcaaggactcaagccacggatctacaacgacctcaacaagttcggcaagcgatggatgaaggagctcccctcggtggtctggagcctgaggacaacgccgagccgagccacgggtttcacaccgttctttctagtctatggggccgaggccatcttgcccacagacttagaatacggttccccgagggcaagggcctacgacgaccaaagcaatcgagctagccgagaagactcactggaccagctggaggaggctcgggacatggccttactacactcggcgcggtatcagcagtccctgcgatgctaccatgcccgaggggttcggtcccgagacctccagatgggcgacttggtgcttcggctgcgacaagacgcccaagggcggcacaagctcacgcctccctgggaagggccgttcatcatcgccaaggttctgaagcccgggacatacaagctggccaacagtcaaggcgaggtctacagcaacgcctggaacgtccgacagctacgtcgcttctacccttaa

SEQ ID NO: 115976 - DNA, 434 bp, Zea mays
  Clone ID: MRT4577_37253C.1
ttttggaactaaatacaatattatacttcctaagtccatggtcacgtcgtttgagagtacaaggaatggaattagacaattagtagtgtatgatgtagtattacacaaaccccaaaagttgatagcacaatacactaaccaatgatttatatgtacaagttcttggcttgccctgcattcatcccaccaactgtacaaataatatttgaaagcaagatgaaatcatacacttagcacacaaaataaagctccttcaatccgatttactttttgaggttgatttatcttcttttccaggctgcactagaaatttgaatgtccacactgctaaaatagttgcttctatgggagcaagccaatatacaaggaagtgctcctttgttatgtgatcgcctcgagcatatgcccatcccattacagatgcagggttcatg

SEQ ID NO: 115977 - DNA, 330 bp, Zea mays
  Clone ID: MRT4577_37254C.1
ctacatgtgggggcgtttatttaccttatgggtgattttcagcatgaacacattacaactgcaatggcgatccatacaaatgaaattccaggaacacctaaccaaagcttgcgagtaaacaaaggcacagaacaacccagtagccgtaaccttacgggactaaaactacagaaagatcccagtgcgcaacgcgaggcagatcttgcacgaacacaataaagcaagggtgaaagacagagaagaattaccaagtgaccataaacacagggcaaataaaaggaacccgggaatagtaagccccgaaatgaaggccgacaagctacataaccc

SEQ ID NO: 115978 - DNA, 5700 bp, Zea mays
  Clone ID: MRT4577_37255C.1
atgggcagtctccagcaacctctccggcccaggacgatgcttcgtttcgggactcttgagttcatgtccttcgacggcagctacgacatgatacttcttccaccgccgcgcgactacgacaatggcggccgacaacccgcccgccggcggcggaatcgacgacgtcttccccgcgtggtggaagggcaacattcgggctcgctccattctctcccccgccaacggaggaggaggcggggccgtcaaggccaggtgggaggccacgcttcgtcggccgtcgagcgaatcgacgcccccgacgccccgacggaaggcacgccggacgtcgacctcgcgttcaagacggaggcaagcgccgtccccccgcggcacgctgaccccgagcaagaagacgacgccggcgcgctcgcggaaagcctgcaggacgtcgccctcgaaccagagatgacggtgcaaccagtccctgatgtgactacgtcgctcctcgtcgaccaaaaggtaccgactaactcccatcttgcgtcatttcgactcggcctcaacccgccaaacgacctcgttttggcgggcgccctcattgaggcgagtgcaaccccactgaggttccatatgcggtcgccttggggccgactgacggacgtctcgacctacgggccctctgggtccgaggaagatgacgatcccagcatcggttgggatttctccggtcttggcaaccccagtgccgtgcgggacttcatgaccgcatgtgactactgcctatccgactgttccgatggaagccgcagccttggcgacgagagctgcggcccaagccgcgaatgtttccacatcgagctaggggatccctccgaaggcaaccatcttggcatgccggaggacggtgatctccctaggccggtgcctcgcgccgacatcccacgggagctagctgtggtccccgctccggcggggggttacgacccacaactcgagcaagtccgcgaggcgcaggccaggctcaacgagggaacaggagcgcttgagccgatccgtcgggacgtcggacaagcatggggtgcgccgaggctaccaccccaggcgtggggggcgctacgacagcggggaggatcggagtccctccgcccgaaccacccggtccgcaggccttcagtcgggccatccgacgggcgccattcccgacccggttccgaccccccgactactatcacgaagtactcgggggaaacgagaccggaactgtggctcgcggactaccgcctcgcctgccaactgggtggaacggacgacgacaacctcatcatccgtaacctccccctgttcctctccgacactgctcgcgcctggttggagcacctgcctccggggcagatctccaactgggacgacttggtccaagccttcgctggcaatttccagggcacatacgtgcgccccgggaattcctgggaccttcgaagctgccggcaacagccgggggagtcgctccgggactacatccggcgattctcgaagcagcgcaccgagctgcccaacatcaccgactcggatgtcatcggcgcgttcctcgccggcaccacttgccgcgacctagtgagcaagctgggtcgcaaaacccccactagggcgagcgagctgatggacatcgccaccaagttcgcctctggccaggaggcggtcgaggctatcttccgaaaggacaagcagccccagggccgcccgtcggaagaagctcccgaggcgtctgctccgcgcggcgccaagaagaaaggcaagaagaagtcgcaatcgaaacgcgacgccgccgacgcggaccttgtcgccgccgccgagtataagaaccctcggaagccccccggaagtgcaaaccttttcgacaagacgctcaaggagccgtgcccctaccatcaggggcccgtcaagcacaccctcgaggagtgcgttatgcttcggcgtcatttccacagggccgggccacccgccgagggtggcagggcccgcgacgacgacaagaacgaagatcgcccagcaggagagttccccgaggtccgcgactgcttcatgatctatggagggcgtgcggcgaatacctcggctcggcaccgcaagcaagagcgccgggaggtctgctcggtgaaggtggcggcgccagtctacctagactggtccgacaagcccatcactttcgaccgggccgaccaccccgaccatgtcctgatggacgggggcagctgcctcaacatcatctacgtcgagaccctcaagctcctgcgcgttgatccgtccttcgtccgggcaggcgctgcgcccttccacgggatcatccctgggaagcgcgtccagcccctcgggcgactcgacctcccagtctgcttcgggacaccctccaacttccgaagggagaccctgacgttcgaagtggtcgggttccgaggaacctaccacgccgtgctagggaggccatgctatgcgaagttcatggccgtccccaactacacctacctgaagctcaagatgccgggccccaacggggtcatcactgtcggccccacgtacaaacacgcgttcgaatgcgacgtggagtgcgtggagtacgccgaggccctcgccgagtccgaggccctcatcgccgacctggagaacctctccaaggaggtgccagacgtgaagcgccatgccggcaacttcgagccagcggagacggtcaaggccgtccccctcgaccccagtggcgacaccaccaagcagatccggatcgggtatcaccagatccggatgagagagtccgaccagctcgcgacttctttcatcacgccgttcggcatgtactgctatgtcaccatgccgttcggtttgaggaatgcgggcgcgacgtaccagcggtgcatgaaccatgtgttcggcgaacacatcggtcgcacagtcgaggcctacgtcgatgacatcgtagtcaagacgcggaaggcttccgacctcctctccgaccttgaagtgacattccggtgtctcaaggcgaaaggagtcaagcttaatcctgagaagtgtgtcttcggggtgccccgaggcatgctcctagggttcatcgtctccgagcgaggcatcgaagccaacccggagaagattgcgaccgtcaccagcatgggacccatcaaggacttaaaaggggtacagagggtcatgggatgcctcgcggccctgagccgcttcatctcacgcctcggcgaaagaggtctgcctctgtaccgcctcttaaggaaggccgaatgtttcgcttggacccctgaggccgaggaagccctcggcaacctgaaggcgctccttacaaaggcgcctgtcttggtgccgccggcggacggagaagccctcttggtctacgtcgccgcgaccactcaggtggttagcgccgcgattgtggtcgaaaggcaagaggaagggcatacattgcccgttcagaggccggtctacttcatcagcgaagtgctgtccgagactaagatccgctacccacaagttcaaaagctgctgtatgctgtgatcctgacaaggcggaagctgcgacactacttcgagtcccatccggtaactgtggtgtcatccttccccctgggggagatcatccagtgccgagaggcctcgggcaggatcgcgaagtgggtggtggaaatcatgggcgaaacgatctcgttcgcccctcggaaggccatcaagtcccaagtgttggcggatttcgtggccgaatgggtcgacacccaactgccaacgaccccgatccaaccggagctctggaccatgtttttcgacgggtcgctgatgaagacgggggccggcgcgggcctgctcttcatctcgcccctcggaaagcacttgcgctacgtactgcgcctccacttcccggcgtccaacaatgtggccgagtacgaagctctggtcaacggattgcggatcgccatcgagctaggggtcagacgcctcgacgctcgcggtgattcgcagctcgtcatcgaccaagtcatgaagaactcccactgccgcgacccgaagatggaggcctactgcgacgaggttcggcgcctggaagacaagttcttcgggctcgagctcaaccacatcgctcgacgctacaacgaaaccgcagacgagctggctaagatagcctcggggcgaacgacagtccccccggacgtcttctcccgggatctgcatcaaccctccgtcaagctcgacgacacgcccgagcccgaggtaccctcggctcagcccgaggtaccctcggcacagcccgaggtaccctcggcccccgagggcagagcactgaacgtcgaggaagggcagagcggggccacaccagatcaagattggcaggccccgtacctgcaatatctccgtcgaggagagctacccctcgaccaagtcgaggctcggcgggtagcgcgacgcgccaagtcattcgtcttgctgggcgacgaagaggagctctaccatcgcagcccctcgggcatcctccagcggtgcatctccatcgccgaaggtcgggaactgctgcaggaagtacactcgggggcttgcggccaccacgcagcgccccgagcccttgtcggaaatgctttccggcaaggcttctactggccaacggcggtggctgacgccactagaattgtccgcacctgcgaagggtgccaattctatgcgaagcggacacacctgcccgctcaggccctgcagacaatacccatcacctggcccttcgctgtatggggtctggacctcgtcggtcccttgcagaaggcgcccgggggctacacgcacctgctggtcgccatcgacaaattctccaagtggatcgaggtccgacctctgaacagcatcaggtccgagcaggcggtggcattcttcaccaacatcatccatcgcttcggggtcccgaactccatcatcaccgacaacggcacccagttcaccggcaaaaaatccttggatttttgcgaggatcatcatatccgggtggactgggccgccggggctcatcccatgtcgaatgggcaagtagagcgtgccaatggcatgattctacaggggctcaagcctcggatctacaacgacctcaacaagttcggcaagcgatggatgaaggaactcccctcggtggtctggagcctaaggacgacgccgagtcgtgccacgggcttcacgccgtttttcctggtctacggggctgaagctatcttacccactgacctggaatacggctccccgagggcgagggcctacaccgaacaaagtaaccaagctagtcgagaggaatcgctggaccagctggaggaagctcgggacagggccttactacactcggcgcggtaccaacagtccctgcgacgctaccacgcccgaggggtccggtcccgagaactccaggtgggcgacctggtgcttcggctgcggcaagacgcccgagggaggcacaagctcacgcccccctgggaagggccattcgtcatcgccaaagttctgaagcccggaacatacaagctggccaacaatcaaggcgagatctacggcaacgcttggaacatcaaacagctacgtcgcttctacccttaattcgccgtaataaccgcttcagaaaagggaccgagaaagggggacaccccgaaagggatccttccccgcgaaggaaccgggctccgagccccccattactga

SEQ ID NO: 115979 - DNA, 322 bp, Zea mays
  unsure (1)..(322): unsure at all n locations
  Clone ID: MRT4577_37256C.1
ggcggatctgtactgagntacatatacccgttgttnagncaccaccactgtncccaagnatcaagntaggcaggcttggtcccgaagaaacccttctctggncgtcgnatngcagggnagctagntaggtagctaacatccgccatggcgngcgggggagacgnnctgcaggtggtgagggcgctggacgcggcgaagacgcagtggnacnanttcanggncatcatngnngccggcatgggcttcttcacgaacgnctaaaacctcttctggatntccctcgtcancaagntggtgggncgcatctactacacggaaacca

SEQ ID NO: 115980 - DNA, 5337 bp, Zea mays
  Clone ID: MRT4577_37257C.1
atggcggccgtcctcccgcccgccggcggcgaaatcgacgatgtcttcctcgcgtggcggaagagcggcattcgggtctgccccgtcaccttccacgctgacgaaggaggaggcggggcaaccatggccaaacaggaggcggcacctcgtcggctgtcgagcgagtcgacgatgccggcaccccagcgggggacacgtcgggcgtcgacctcgcgtctgagacgaagacgagcgtcgtttccccgcaacaccccaaccccaagcggacggatgacgccagcacactcgcgaaagacctgctgggcattagcctcattcagcttcgacccaccaagcgaccccgcttcggtggacgctttcataaaggcatatccgaaccttccgaggtatcatatgtggtcaacctgggaccgactgacgaccgtctcgacctacgggcccccgggttccgaggaagatgacgagcccgactatggttgggatttcttcgggctcggtaaccccagtgccatgcgggacttcatgaccgcatgtgactactgcctctccgattgctccgatggcagccacagcctcggcgacgaggactgtggcccaagtcgcgaatgtttccacatcgatctagggggtctcgacgaaggcaaccaccttggtatgccggaggacggcgatccccctaggcctgcgcctcgcattgacatccttcgggagctagctgtggtcccagtccctgcggggggtcaggacgcacagctcgagcaaatccgcgagatgcaggccaggctcgacgaggaagcaggacaacttgtgcagctccggcagaacatcgggcaggagtgggcaggccgagcaccagccagagaagcgcgtcatctaccccaggacgtccagcaccgcatcgctgacaatgccagggcaaggctgcccccggcttccagtgggctgggtggaacggacgatgacaacctcatcatccgcagcctccctctgttcctctccgacgccgcccgagcctggctcaagcatctgcctcctgcgcagatctccaactgggacgacgtggtcaaagccttcgctggaaacttccagggcacatacgtgcgccctgggaactcctgggatctccgaagctgctgccagcaaccgagagaatccctgcgggactacatccggcgattttcgaagcagcgcaccgagctgtccaacatcaccgactcagatgtcatcggcgcgctcctcgccggcaccacttgccgcgacctggtgagcaaggtgggtcacaagactcccaccagggcaagcgagctgatggacatcgccactaagttcgcctctggccaggaggcggtcgaggccatcttccggaaggacaagcagcctcagggacgccagcaggaagacatccccgaggtgtccgctcagcgcggcacgaagaagaagggcaagaagaagtcgcaagcgaaacacgacgccgccgacgcagatcttgtcgtcgctgccgagcacaggaacccccggaagcctcccggaggggccaacctgttcgacaagatgctcaaggagtcgtgcccctatcatcagggtcccgtcaagcacacccttgaggagtgtgtcatgcttcggcgctacttccacaaggccgggcccccggcggaaggtggcagagcccacgacaacgacaagaaggagggccacaaagcagaggagttccccgaggtccatgactgcttcatgatctacggtgggcaagtggcgaacgcctcggctcggcaccgcaagcaggagcgccgtgaggtctgctcggtgaaggtggcggcgcccgtctacctagactggtccgacaagcccatcaccttcgaccaaggcgaccaccccgatcgcgtgccgagcctggggaattacccgctcgttgtcgatcccgtcatcggcaacgtcaggcttaccaaggtcctcatggacggaggcagcagcctcaacatcatctacgccgagaccctcgggctcttgcggatcgatctgtccgcaatccgggccggtgcggcgccctttcacgggatcattcccgggaagcgtgtccaaccccttggacaactcgatctgtccgtctgcttcgggactccctccaacttccgaaaggaaaccctcacgttcgaggtggtcggattccgaggaacctaccacgcagtgctggggagaccatgctacgccaagttcatggccgtccccaactacacctacctcaagctcaagatgtcgggccccaacggggtcatcaccgtcggatccacgtaccgacacgcgtacgaatgcgacatggagtgcgtggagtacgctgaggccctcgccgaatccgaggccctcatcgccgacctggagagcctctccaaggaagtaccagatgcgaagcgccacgccgacaacttcgagccagtagaggcggttaagtccgtccctctcgaccccagcaacaacgcctccaagcaggaagcagtgctcgtcgactttctccgcacgaacaccgaggtttttgcgtggagtccctcggacatgcctggcataccgagggatgtcgccgagcactcgctggatatccgagctggagcccgacccgtgaagcagcctctgcgccaattcgacgaggaaaagcgtagagccataggcgaggagatccacaagctgatggctgcagggttcatcaaagaggtattccatcccgaatggctagccaaccctgtgcttgtgaaaaagaaaggtgggaagtggaggatgtgtgtagactacactagtctaaacaaagcatgtccgaaggttccctaccctctgcctcgcatcgatcaaatcgtggattccactgctgggtgcgaaaccctgtcgttcctcgatgcctactcagggtatcaccaaatcaggatgaaagagtccgaccagctcgcgacttctttcatcacaccttttggcatgtactgctatattactatgccattcggtttgaggaatgcaggtgcgacataccaaaggtgcatgaaccaagtgttcggagagcacgttggccgaacggtcgaggcttacgttgatgacatcgtagtcaagacgaggaaagcctccgacctcctcactgaccttgaaatggcattcaagtgtctcaaggcaaaaggcgtaaaactcaatctccagaagtgtgtcttcggagtccctcgaggcatgctcctggggttcatcgtctccgagcggggcatcgatgccaacccggagaaaatcgcggccatcaccaacatggggcctatcaaggacttgaaaggagtacagagggtcatgggatgccttgcggctctgagccgcttcatctcgcgcctcggcgaaagaggcctacccctgtatcgcctcttgaggaagaccgagcgcttcacttggacccccgaggccgaggaagccctcgggaacttaaaggcgatccttacaagcatgcccattctggtgccccccgctgccggagaagccctcttgatctacgtagccgcaaccactcaggtggtcagcgccgcgatcgtggtcgagagacaagaagaagggcatgcgttgctcgtccagaggccggtctacttcataagtgaagtactgtccgagaccaaaatccgttacccgcaaattcagaagctactgtacgcgctttcagcagctctgatccaaccgaaactctggaccatgtttttcgacgggtcgctgatgaaaataggagcgggcgtgggcctgctcttcatctcacccctcgggaagcacctccgctacgtgctgcgcctccatttcccggcgtcaaacaacgtggccgagtatgaggctctggttaacgggttgagcatcgccttcgagctaggggttcggcgcctcgacgctcgtggcgactcgcagcttgtcatcgaccaattcatgaagaactcacactgccgcgacccgaagatggaagcctactgcgacgaggttcggcgcctggaagacaagttctacaggctcgagctcaaccacgtcgctcgacgatacaacgagactgcagacgagctagctaaaatagcgtcggggcgaacaacggttccccggacgtcttctcccgagacctacatcaaccctccatcaagaccgacgacacgcccgagcctaaggaggcctcggcccagcccgaggcaccctcgacctagcccgaggcaccctcggcccccgaggaccccgtacctgcaatatctccaccgaggagagctacccctcgacagagccgaggctcggcgactggcgcaacgcgccaagtcgttcgtcttgctgggtgatgagaaggagctctaccaccgcagcccctcaggcaccctccaaggatgcatatccatcgtcgaagtgcctcgagccttcgttggaaacgccttccgacaaggtttctactggccaaccgcggtgcccgacgccactaggattgtacgcacctgccaagggtgtcaattctacgcaaggcagacacacctgcccgctcaggccctgcaaacaatacccatcacctggccgtttgctgtgtggggtctggacctcgttggtcccttgcagaaggcacccaggggctacacgcacctgctagtcgctatcgataaattctccaagtggattgaggtccgacccctaaacaacattaggtccgaacaggcggtggcgttcttcaccaacatcatccatcgctttggggtcccgaactccatcatcatcgacaacgacacccagttcacgggcaggaagttcctagacttctgcgaggaccaccgcatccgggtggactgggccgctgtagctcaccccatgacgaatgggcaagtagaacgtgccaacggcatgattctgcagggactcaagccgaggatctacaacgacctcaacaagttcggcaggcgatggatgaaggaactcccctcggtggtctggagtctgaggacgacgccaagccgagccacgggcttcacgctgttttttctagtctatggggccgaggctatcttgcccacaaacttagaatacggttccccgaggacgagggcgtacgatgaccgaagcaaccagaccagccgagaagactcgctggaccagctggaagaggctcgggacatggccttactacacttggcacggtatcagcagtctctgcgacgctaccacgcccgaggggttcggtcccgagacctccaggtgagggacttggtgcttcggctacgacaagacgcccgagggcgccacaagctcacacctccctgggaagggccgttcatcatcgccaagattttgaagcccggaacatacaagctggcataa

SEQ ID NO: 115981 - DNA, 4936 bp, Zea mays
  Clone ID: MRT4577_37258C.1
atgggtagcctccagcagcctcttcagctggggacgctgctccgcttcgggagtttcgagttcatgtcccttgacggcagctacgacatggtactcctccccccgcaacgcgacggcaacaacggttgtcggctcgcccggcagcggcgaactcgacgacgacttccccccatggcagaagaggaacactcgggtttgtcccaccgccctccttgccggaggaggaggagacggggcaaccgtggccatgcaggaggcgacacctcgtcggctatcaggccagagcgagtcgacgacgccggcacccctgcgggggccatgtcgggtgttgtcctcgcacctgagacaacgacgggtgtcgcttccccgcaacgtgccaaccccaagcggactgatgatgccagcaccctcgcaaaggacttgctgggcgttagcctcgtacctgagataacagtgcagtccgtccccgacgcgacttcgccaccgtccatcgaccaagaggtaccgtttgttttccactctgtcccttttagattcagcttcgatccaccaagcgaccctgcttcggtgagcgcttccgcaagggcataccctgaccctccagggtatcatatatggtcatcttgggatcgactgacggtcgtctcaacctctggacccacgggttccgaggaagacgacgattccgacttcggttgggatttctccggactcagtgatcccaatgccatgcgagacttcatgtccgcatgtgactactgcctctccggctgctttgacgatggccatagcctcggcgtcgagggttgcgacccaagccgcgagtgtttccacatcgatcagggggatcacggcgaggacaaccacctcggcatgccgcaagatgacaacacccccgtgcctgcgtctcgcgttgacatcccgcgggagctagctgtggtcccagtccctgcggggggtcaggacacacagcttgagcaattccgcgagatgcagaccaagctcgatgaagaagcagggcggcttcagttcgacgagccgagagctctgcctcctgaaggcaagggtgcccctcggagcatcgcgcaacgtcctcccgactcatgcgagaggcctcggtccacactgggcgcacgcgggatgggacgcctatggccccggatcgcctcggcgacgagcaccacttccgcgaccatcgagcccgcctcgaagagaaggtgcgccgaggctaccaccccaggcgcgggggacgctacgacacgcaccgagctgcccaacatcaccgactcggacgtcaccggggcattcctcgccggcaccacgtgccgggacctggtgagcaaactggggcgcaagactcccaccaaggcgagcaaattgatggacatcgccaccaagttcgcctctggtcaggaggcggtcgaagccatcttccggaaggacaagcaacctcagggaagacagaaggaagacgcccccgaggcgttcgtccagcgtggctcgaaaaagaaggccaagaagaaggtgcaagcaaagcgcgacgccattgacgcggatctcgtcgctgctgccgagcacaggaatcctcggaagcctcccggaggagtcaacacgtttgacaagatgctcaaggagtcgtgcccctatcacaggggcgggaccctcggcagaaggtggcaaggaccaaggcaacaacaagaagggggcgacaaggaagaggagttcccggaggtccacgactgctttatgatctacggcggaccggtggcgaatgcatcgactcggcaccgcaagcaggagcgccgggatgtctgctcggtgaaggtagcggtaccggtctacctagactggtccgacaagcccatcaccttcaaccaaggcgaccaccccgactatgtgccaagcccaggaaggtacccgctcgtcatcgaccccatcatcggcaacgctaggctcaccaaggtcctcatggacggaggcagcagcctcaatatcatctacgtcgagaccatagggctcttagggatagatctgtccacgatctgggccggtgcaacaccctttcacgggatcgtccccggtaagcgcgtcttgccccttgggcaacttgatttgcccgtctgcttcggaaccccctccaacttccgcagggaaaccctcacgttcgaggtggtcgggttccgaggaacctatcatgcggtgctggggagaccgtgctacgccaagttcatggccgtccccaactacatgtacctcaagctcaagatgtcgggccccaagggaatcatcaccgtcggatccacgtaccaccacgcttatgagtgcgacgtggaatgcgtggagtacgctgaggccatcgccgagtccgaggcgcctgatgcgaagcaccacatcggcaacttcgaaccagccgaggcggttaagaccatcgccctcgaccctagcaacgacgcctgcaagcaagaagcagtgctcgtcgactttcttcgtgcaaatgccgaaatttttgcgtggagtccctcggacatgccaggcataccgagggatgtcaccgagcactcgctggatatccgagctggagcccgacccgtgaagcagcacctgcgccactttgacgaagaaaagcgcagggccataggcgaggagatccacaagctgatggctgcagggttcatcaaagaggtattccatcccgaatggttagctaaccctgtgcttgtaaagaaaaaaggtgggaaatggagaatgtgcgtagactacactggtctaaacaaagcatgtccgaaggttccctaccctctgcctcgcatcgatcaaattgtggactccactgctgggtgcgaaaccctgtcattcatcgatgcctattcatgttatcaccaaatcaagatgaaagaatctgaccagctcgcgacttctttcatcacgccctttggcatgtattgttatattactatgccatttggcttggggaatgcaggtgcaacctaccaaaggtgcatgaaccatgtgttcggggagcacatcagcagaacggtcgaggcttacatcgatgacattgttgtcaagacaagaaaagcctccgacctcctctccgacctcgaagtgactttcgggtgcctgcgcgcgaagggcgtaaaactcaatcccgagaagtgtgtctttggagtcccccgaggcatgctcctggggttcatcgtctccgaaagaggcatcgaggccaacccggagaaaatcgcagccatcaccaacatgggacccatcaaggatctaaaaggagtacaaagggtcatgggatgccttgcggctctgagccgcttcatctcgcgccttggcgagaaagggttacccttgtaccgcctcctaaggaaggtcgagcgcttcacttggacccccgaggccgaggaagccctcggaaacttaaaggcactccttactaacacgcccatcttggtgccccctgctgcgggagaagccctcttgatctacgtagccgcaaccactcaggtggtcagcgccgtgatcgtagtcgagagacaagaagaggggcatacactgctcgtccagaggccggtatacttcatcagtgaggtgctatccgagaccaagatccgctacccacaaatccagaagctactgtacgcagtaattctgacgcggcaaaagttgcgacactacttcaagtctcatccggtgactgtggtgtcatccttccccctgggagagatcatccagtgccgagaggcctcgggagcaggtgctagcttgctcttcatctcacccctcgggaaacatgtgcactacgtgttgcgcctccattttccggcgtcaaacaacatggtcgagtacgaggctttggttaatgggttgcgcatcgccgtcgagctaggggttcggcgcctcgacgctcggggcgactcgcagcttgtcattgaccaagtcatgaagaactcccactgccgcgatcgaaaaatggaggcctattgcgacgaagttcggcgcttggaagataagttccacgggctggaactcaaccatgttgctcgacggtacaacgagaccgcggatgaggtggctaaaatagcctcggggcgaacgacggttcccccggacatcttctccagggacatatatcaaccatttgtgaaactcgacgacgcgcccgaacccgatgagacctcggccgccgagggtgaggccttgcgcatcgagggagagcggaatggggttgcgccaaaccaaaactggtagaccccgtacctgcaatatctcctccgaggagagctgcccctcgacaaggacgaagctcggtgactggctcagcgcgccaagtcgttcgttttactgggtgatgaaaaagagttgtaccaccgcagcccctcaggcattctccaacggtgcatatccgtcatccaaggacaagagctgttacaagaaatacactcgggggcttgcggtcaccatgcaacacctcggaccctcatcggaaacgctttccgacaagaaggcaccggggggcttcaagcacctgctggtcgccatcgacaaattctctaagtggatcgaggtccgacccttaaccagcatcaggtccgagcaggcggtggcgttctttacaaatattatccatcactttggggtcccgaactccataatcaccgacaatggcacgcagtttactgggaagaagttcctggacttctgcgaagaccaccacatccatgtggactgggccgccgtagctcacccaatgacaaatgggcaggtggagcacgccaacggtatgattttgcagggactgaagccgaggacctacaatggcctcaataagttcggcaagcggtgggtaaaggaactaccctcggtggtttggagtctgaggacgacaccgagccgagccacgggtttctcgccgttctttctagtctatgtgtag

SEQ ID NO: 115982 - DNA, 534 bp, Zea mays
  unsure (1)..(534): unsure at all n locations
  Clone ID: MRT4577_37259C.1
cacagacagncacaactcacagggggttgggtagggttgtgtactactctgcgccctactgtccgccgaccggccaggagatggatcgcctgaccgattcgacccccaacatgacgaagtacacgtcgaaggccgcctgcctgcccgcggggctgcacgccccccacggccggcccctgacggcgcgcacggcgcacagcatgtccaccacggtgctcaccaccaagttcaacaccaacgcctagttgctccgcagggtgctcttcaggccgctcttccccctgctccgcaacctgctggaggagctgctcgacaccaagctcgccacgctattccccgccctgtcgctcgccatgcccgtccacatcgcccacttctgccagcactgggtgcatttgttcatgctactcgtcctcatactcctcctcatgcgtgtcagcttgctcaccaagcagatcaccatatacatcgggatctacgtcggccgcctcctgaacgcgatgttcaacaacaccaccgagctcatcatcgagc

SEQ ID NO: 115983 - DNA, 288 bp, Zea mays
  unsure (1)..(288): unsure at all n locations
  Clone ID: MRT4577_3725C.1
aaaaacaaaaacaagagaacttggcttcttgggggtacccaaagctcacagccttgggcccagtcacactgaatttgcctagatctagcggggggacgtcaggggggcaataagcctccttttttgaagcccaaatgctcttttgctggctaaagactgggggctaaccctttgacaggtgggtggggacattaccattttcttctcctggtttttcctcccattcctgggggaaaaggggggggggggttgaactgggtgttgttccnggagacgcccttgttggtg

SEQ ID NO: 115984 - DNA, 153 bp, Zea mays
  Clone ID: MRT4577_37260C.1
agggacacaatagcctaacgaactgcccgctcgctgaaacagtctcctacagaggggacaggaccaccgtgcaggtgctactcaggtgggcgctccagtaggggacaagcgtcattcctaaatcgagcaaggaccgaaggatcaaagagaaca

SEQ ID NO: 115985 - DNA, 2542 bp, Zea mays
  unsure (1)..(2542): unsure at all n locations
  Clone ID: MRT4577_37261C.1
gccaacatcgcatatccgccacctcgggcgcgccctccctcctcggcctcgcgcgcgccttcccacacatcctcctcccccccacgccacgaaacgccaaagggagggagcccgagcctagcaggagcagcgcacggaaacaatggcgcgggaggagcaggagcagtccgcattgggcgccgcccacgtccaccaccaccagcctccggccggcggatgcggcctctccgccaaccccaccgccgccgcagccgagtacgcccacgaacagggctacagtgtcgttctgcctgagaagctgcacactggaaagtggaatgtgtacagatctgcacattctcctctaagattaataaataaattccctgataacccggagattggaacgctccatgataattttgtatatgcagttgaaactttccgagattgtagatatttgggtacaagaatccgcccagacgggacagttggagactacaagtggatgacgtatggagaagctagcacgagcagaactgcaataggttctggtcttatttatcacggaatatctgaaggtgcacgaattggtctatattttataaacagaccggagtggatcatacttgaccatgcttgtgcggcatactcatatgtatctgtgccgctttatgatactctcgggccagatgcagttcagtttatagtgaaccacgcaacggtagaagttatattctgtgtgccccaaactctaagcgctattttaagctttattactcaaatgccgtgtgttcgtcttattgtggtggttggtggagatgattcaaatatgccatctgcaccagcaactactgaatgcaaaattatgacgtacaacaggctacacaatgagggaaagatgagtcctcaaacttttcgtccaccaaaacctgaagatatagccactatctgctacaccagtggcactactggcacaccaaagggagctgtactttctcatgagaacttaattgcaaatgtagcagggtcaagtttaggcattaagttttacccctctgatgtgtacatctcgtatctacctttggctcacatctatgagagagctaaccaggttgcattgcttcactatggtgttgccattggattctaccaaggggataacttgaggctgatggatgatttggctgttctgagaccaacaatattcgcaagtgttccccggttatataacaaaatttatgctgcaattacaaatgctgtgaaggagtctggggggttgagagaaaggttgtatcatactgcatacaatgccaagcgacatgcaatgataaatggtagaaacccatcacctatgtgggacaagttggtatttaacaaaattaaagctagacttggtggacgaatgaggcttatgacttcaggtgcttctccattgtcaccagatgtcatggaatttttaagaatatgcttcggtgaagttcttgaagggtatggaatgacagagacatcttgtgtcatcagtacaatgaatattggtgacagatcaattggacatgttggatctccaaatccttcttgtgaggttaaacttgtggacgtcccagaaatgaattatacttcggaggatcaaccgtatcctcgtggagagatttgtgttaggggacctataatattctggggttactataaagatgaagtccaaacaagagaggtcattgatgaggatggttggttgcatactggagacataggtctgtggctgcctggagggcgtctaaagatcatcgataggaaaaagaacattttcaagttagctcaaggagaatacatagctccagagaagattgagaatgtctatgctaagtgcaagttcattgctcaatgctttatatatggtgatagtttcaactcttccctagttgccattgtagcagtcgaaccggatgtgttgaaggcttgggctgcatcagaaggaatccagtacgaggacttgagacagctctgtgctgatcctagagcaacagctgctgtcctggctgatatggattccattgcgaaggaagcacagctgagaggtttcgagtttgctaaagcggttactcttgttgctgagccattcacattggataatggccttctcaccccaacattcaaggtcaagaggccgcaagccaaagcatactttgcaaaagaaatctcagacatgtattcacggttgctagagacagagttagctaggtcgaagttgtaacttgtgcggtatcagtatcaggagaaaggtcatcaatacagccgtacaggagattggattctgcaattgtttattccacctcacgaaataagtagtaaaatctttttactgatacgggaaataacggatcatgccatgctccggagtcgatagtcgtttttttcaccagacggaggcagtgcttggcgcatgctgaatatatggtttctagttataaannnngaaatgagagtgtatattgngatctgaacagctgccctggnaaggtagttcacagaaaatatattgtggtattgcaaatgcaatcct

SEQ ID NO: 115986 - DNA, 390 bp, Zea mays
  Clone ID: MRT4577_37262C.1
ttgtggacgtcccagaaatgaattatacttcggaggatcaaccgtatcctcgtggagagatgtgtgttaggggacctataatattctgtggttactataaagatgaagtccaaacgtaacttgttatcattacacatctatttacatcctttaaataaatacatccattaaactttgataaatgtatttgaaaacctgcagaagagaggtcattgatgaggatggttggttacatactggagacataggtttgtggctgcctggaaggcgtctaaaaattatagataggaaaaagaacattttcaagttaactcaaggagaatacatagctccagagaagattgagaatgtctatgctaagtgcaagttcattgctcaatgctttatata

SEQ ID NO: 115987 - DNA, 701 bp, Zea mays
  Clone ID: MRT4577_37263C.1
agccactatctgctacaccagtggcactactggcacaccaaagggagctgtactttctcatgagaacttaattgcaaatgtagcagggtcaagtttaggcattaagttttacccctctgatgtgtacatctcgtatctacctttggctcacatctatgagagagctaaccaggttgcattgcttcactatggtgttgccattggattctaccaaggggataacttgaagctgatggatgatttggctgttctgagaccaacaatattcgcaagtgttccccggttatataacaaaatttatgctgcaattacgaatgctgtgaagcagtctggggggttgagagaaaggctgtatcatactgcatacaatgccaagcgacatgccatgataaatggtagaaacccatcacctatgtgggacaagttggtatttaacaaaattaaagctagacttggtggacgaatgaggcttatgacttcaggtgcttctccattgtcaccagatgtcatggaatttttaagaatatgcttcggtgaagttcttgaagggtatggaatgacagagacatcttgtgtcatcagtacgatgaatattggtgacagatcaattggatacggttggtcctccgaagtataattcatttctgggacgtccacaagtttaacctcacaagaaggatttggagatccggacgcgtggg

SEQ ID NO: 115988 - DNA, 428 bp, Zea mays
  unsure (1)..(428): unsure at all n locations
  Clone ID: MRT4577_37264C.1
gttcccatccattggtgtggacgtgtggtggttgcgttgcgttgcgttgcttcgagttggaggttggagttggagtgggccgcgtgcgagaggatctgagcggagaggccatggagtggagtgattagcggttgctgggtcaggagaaggcggcgtgtgttttgatcctactcgcgtttgaggggccccgatttcgagcgggtgttcaattttggtgccggatttttaaggaggatccaatttaggaagaattttggttttggggacaatggttttggactgcctgatattcgattcataggacttcgagtcggcagatccaagggaacgccgaattttgcctgatttcttcgcgatttttggtccgatcaaagaggttcctagcctttttttttcctcgcgagaagcaaggggtctnccttttcttc

SEQ ID NO: 115989 - DNA, 418 bp, Zea mays
  Clone ID: MRT4577_37265C.1
gagctcactagttggtggccgcccttttttttttttttttttttggtttttttttttttttttttttctttttttttaatcacacgggaaaacaaaaatgggttttaaaagaggaaaaactccccaaatccaccaaagattggaaattgggtaaaaacattgcactagctcataaggttttaacacgactggtgttcctgcttttggtttgaatggtcaccttggcaagcccacactattttcttgggggcgggccttattttttggttcaggaccttttgatcctttagagggtggccattcgtcttttttttctccacaagaaggaagggggggctaaccttaaaaacttcgggattgatacccattaccccttttctttcggggtttgaaggtctcatttttaacaagccccatt

SEQ ID NO: 115990 - DNA, 297 bp, Zea mays
  unsure (1)..(297): unsure at all n locations
  Clone ID: MRT4577_37266C.1
ccaacccagctcgctcgncccagctgancaggncgagcacctaggggcgaccggctcgancatcagngnagagngncgggaggngncngncnctcttgggggcgggnngcaacggncanggcgacgncgncncgncgggggcccccgcngcngcngngccngggcgngcnggnggccngcnccnncgcggcgggcaggggggggggggagcnggacancacgnggggcgacgggcggngcaagggccgngacaacgggcggcngcngacgcngacgcnggaccgcacgaccggcacc

SEQ ID NO: 115991 - DNA, 2177 bp, Zea mays
  Clone ID: MRT4577_37267C.1
cccacgcgtccggtggagtggtggttgcgttgcgttgcgttgcttcgagttggaggttggagttggagtgggccgcgtgcgagaggatctgagcggagaggccatggagtggagtgattagcggttgctgggtcaggagaaggcggcgtgtgttttgatcctactcgcgtttgaggggccccgatttcgagcgggtgttcaattttggtgccggatttttaaggaggatccaatttaggaagaattttggttttggggacaatggttttggactgcctgatattcgattcataggttggtcaaacgctttggagtagagaattttttttcccggaaaacaagaaccatttttctagttgtgctactcgtcaatcaatccatggaagctgaactctggaagaagaaactttcctaattagacccggtatttcgtggttggccgttggcgtctaaagtctaatttatttgtcgcgttttagtttaaatatatgaacactatttcctgtttactccgcccaaaatctttccgctggatctacttgtgaatcgggtttgtttgttttttacctgagctattcttgttgatttaggacttcgagtcggcagatccaagggaacgccgaattttgcctgatttcttcgcgatttttggtccgatcaaagaggttcctagccttttttttttcctcgcgagaagcaagggggtctcccttttcttctttcgctatgtccatggctttgagccgcttcacgcaatggctgtggccggggggcgccgcggcgcgggtggacacccacgagcaccccagcggggggctaacgagctcctccttccctgacttcccctccgggttccgggagcccgacaccgtcacgttctacaccggccgccagcgcgcgcgcccgaggagggtcaggaaccggcgccgcagccgcggtgagccccgtgtcgaccgggagtacgacatggtcatcgtcccgtccgacggcggtgggtgcctctccggctctgactcggacgactccgactggtccatcggctggctcgagccacaggcaccggagcttcagacggatggcgaccccgagaactgcttcgccgtcctcgtgccctgctaccgccacggccgccaagagcagcagcccgggaggcacgagggcaggtttcttggcgccggcaccctcaccaatggtggattctctgatggaaagaattttgtagagcagtggctttcttctctccagaactaataccgtccgacctgtcctagctaccctgtaaatagtatcactctgttttgttctactacgtttgtcctagtcgcagaatgtatcgatgaaggaagacatggaaaagccctaaaaaaagaaggaaatctaaaaagaaaaatgaggagcagtgggattctgaagcggcaccaaatgggtatgtccttcctgaggtgttcccagccgccattctactcttgcaaagcaatgcgaaagctgaactacacaaactgcacgccatcaaaaatgattttgccgtcctgatatgtgcggagtgctaacctgatgattgataacacgtagagatgaactgctattccattgttaatttgtcccacttgctcgtggacctcgaattctactgcatgtacattctgttcttgcagtgtatatatatatagtcttgcccagagctgcagtggcgtgattgttcagtctgcctgtatatagtgttcttgcagtgtatatagccttgcgcagagctgcagttgcgtgatttagtgtgtggtgcgtgtgtcctattcttgtacatgggaattgtattctgatgaatgaatctatgaatgaatctatctatctgctgtatacaaattttgtgacaatgtgagctcaattctgctgaaaaaaaaaaaaaaaaaaaaaaaaaaaaaaaaaaaaaaaaaaaaaaaaaaaaaaaaaaaaaaaaaaaaaaaaaaaaaaaaaaaaaaaaaaaaaaaaaaaaaaaaaaaaaaaaaaaaaaaaaaaaaaaaaaaaaaaaaaaaaagggccccctagggccgggcccccttaaaaaaaaggggcccccccgggggggggaatttcaatttaaattttttcaaaccccccccccccgggggggggcccggacccaaattccccctaaagggggccgatttcccccgcccccc

SEQ ID NO: 115992 - DNA, 133 bp, Zea mays
  unsure (1)..(133): unsure at all n locations
  Clone ID: MRT4577_37268C.1
gccacagagcatgtgtctgacacagtggaatgatccaaataccgtgtaaaccatcgctaagcatgactaagctcgcacatgaaagcaagcataaccgcttntcatgcttcctaaaacatggtgtatacccccc

SEQ ID NO: 115993 - DNA, 296 bp, Zea mays
  Clone ID: MRT4577_37269C.1
ctttactccatcatttcaccagcagctgaaaaattttgctcttctgttgcatacaagaagaagattcagtatgatgaagctacttcttcttcttcctctagcctgcttggtttcttctgcagatgaaccgttaccgttttcaggccaattgaataccatcttcctagcagccaaatgtgtggattctataaaagaagatagtcaagcaaggatactgatgcgtgaggttaatttttttaacaaatacaccctcatgagtatgacattctatgtaagacgaaacgggacatgccaat

SEQ ID NO: 115994 - DNA, 416 bp, Zea mays
  Clone ID: MRT4577_3726C.1
cgcctgaggctccgattctgattcatcgattgttgatacaaatatgttggatagctctcatgatatgtacctgatagtgtgacccgattgcctttacatacgtcctgctctcttggtatggtaacaagctggtctcgcggccgaccgacgaacggcgtgcatattgaacacgcgcaaggcgttacttctgtgcaactaccttctaatggtcgccggcttcagatgcatgattctcacgctgacgttgcgcctgttgatcgaccagagcggcctcctactgatcttactctcacgccgtaaccgtcgtcttttccgtggtcggctgcttgggctccttgacggagcccgcctcgccagctcagcggcacatcgagcacaccgtgggggccgtgctcaccgtcatcttccagggggcg

SEQ ID NO: 115995 - DNA, 528 bp, Zea mays
  Clone ID: MRT4577_37270C.1
cccatccgacaaggtcatgcagggctacgcctacatcctcacccatccaggagtcccctgcattttctacgaccacatgttcgactggaacctgaagcaggagatatccacgctgtctgccatcagggcgcggaacggcatccgcgcggacgcgtgggtgcggatcctcgtggcggacgcggacgcgtacgtggccgtcgtcgacgagaaggtcatggtgaagatcgggacaaggtacgacgtgagcagcgtggtcccgtcggatttccacccggcggcgcacggcaaggactactgcgtctgggagaaagcgagcctccgcgtcccagcggggcgccacctctagcagctcagactgctcagtcttgtgctgcattgcaaacacagcagcacgacactgcataacgtcttttccttagtttcctgaattttaccttttcctagttcaatttcatatatgtatttctacatgtacacactatcacaatcagataaataaacaagcttagtcacctgaaagaattatta

SEQ ID NO: 115996 - DNA, 256 bp, Zea mays
  Clone ID: MRT4577_37271C.1
tctcttttttacttttcatactcttttttcattttcccaattccaactttttatgtgcatatgtgttattcacattattacctttatacatccacctattttcacttctttacactaatttcttttaccactcaaaacaacctttattcttacaacacatcctaaaaatccatcatctaaatcatattcttccaattcatccactcatggaaaaacaaatattacttttaacactcaccctacatttaaactaaac

SEQ ID NO: 115997 - DNA, 221 bp, Zea mays
  Clone ID: MRT4577_37272C.1
cttggtatgttcttattcctttaattacacataccattacctggggtttgtgctgggtgcgggcacctcggaacgtgaggcaaaaacttatcaagggcgggagagccgaccttctggcctaaacagaaatgcccgagggctaccattattttctttcgggggtgggaagaaattttttaagaacgccaccctcttttataatcccagggggggtatccaat

SEQ ID NO: 115998 - DNA, 115 bp, Zea mays
  Clone ID: MRT4577_37273C.1
ctgctggtaaccggaaccggaacatcccggacttggcttgaactgcatcgaaaaccgaaatcgcacgcggcaacttgccccccacgaatcataacctagaccggccgacaccagg

SEQ ID NO: 115999 - DNA, 335 bp, Zea mays
  Clone ID: MRT4577_37274C.1
ccttacattctgtgtaattaccccctaaataacaccccccccgcagacgcgcccagaggggggggagcgaacacagaaccacccaaccgcggcgggcgacaacaccaacagggcccaaaaggggccgaaaaaaaaccagaaggccaatgaagcccgcccacaaacagacctcccaccccaaacgggccgaaaccaaaacaaaccccccccccaccaggcgcaagaaggccccccccagcagggccgcccgacaacttgacggcccaaacactttcggcgccccacaacactccgggccaacaagacaaggaggtgtctccggacggaggtcgcaa

SEQ ID NO: 116000 - DNA, 344 bp, Zea mays
  unsure (1)..(344): unsure at all n locations
  Clone ID: MRT4577_37275C.1
ttcagaaacacaccaagcgaagcgcactagcaacgacctaacaacaatggctaccaagatattagccctccttgcgcttcttgcccttttgtgagcgctcatatgcgtcattattcacaatgctacttgctctaggcattattcacagtctccacagtacttaatggcttnaacactactgtgcagccactcacacaagctggggaggctacacaacaatgcaatgacacatctgcaattacatcaagcataacgacagacacagtctcaactgcactactggactgcgtatgagaagtgtgatcacatgttgcacgatgacagacaaagtcaagttgacgtag

SEQ ID NO: 116001 - DNA, 2512 bp, Zea mays
  Clone ID: MRT4577_37276C.1
atggctggctcgggcgagtccggcgaggtacggaggaagcaatggggaaggcaaccgagcgctggggcgggttttataggcgcggacgcggccggggcgtcggttcgaccgtttggcgcgacgtgggcacgcggggcgcgcgcgggcgtgccctggcgagctcagagcccgtcgaacacgtggcgcgttgcttctgcccgtgttcttcgctctgctgagcggccaggcgtacgaatcttgccctaccgcctgtgggagatctcttccctgcacctagagctacctagttcatcttcccgtcaagctccaaatgggcagtctccagcaacctctctagcccgggatggtgctccgtttcgggagtctggagttcatgtccttcgacggcagctacgacatgatactccttccaccgccgtgcgacaacgacaatggcggccgacagcccgcccgccggcggcggaatcgacgacgtcttccccgcgtggtgggagaacaacattcgagctcacccagtcctctcccccatcgatggaggaggaggcggggcaaccaaggccatgcaggaggcagcgcctcgtcggctgtcgagcgagtcgatagcgccggcaccccaacgaggggcgcaccggacatcgacctcgcgtttgagacgaagacgagcaccgtctccccgcgacacgccaatcccgagcaagcggacgacgccagcgcgctcgcggagagcttgctggacgtcaccctcgtacctgagacgacggcgcagtcagtccccgacgtgacttcatcgccgctcgtcgaccaaaaggtaccgaattcccatcctacgtcatttggattcagcctcaacccgcctagcgatctcgctttggcggacgctctcgtaggggcgagtccaaaccctctggggttttgcatgtggtctccttgggaccggctgacggacgtctcgacctacgggccctctgggtccgaggaagacgacgagcccagcatctgttgggatttctctggacttggcaaccccagtgccatgcgggactttatgaccgcatgtgactactgcctctccggccgttccgacggtagccgcagcctcgacaacgaggactgcggcccaagccgcgaatgtttccacgtcgatctagggggtcccttcgaaggcaatcttctcggcatgccggaggacggtgatccccctaggccggccaggctcgacgagggagcaggagcgcttgagccgatccgccgggacgtcgggcaggcatgggcgaaccaacccccggccggagaaatacgtcatctgccccagggtctccagcaccgcgtcgccgacgacatcagagtcaggccaccacccgcatctagtggggtcggccagaacctggctgcagcagcgatgctcctccgcgcgatgtcggagccatccaccaccgagggtcggcgaatccagggggagctcaagaatctcctggaaggcgccgcggtccgacgggccgagagctctgcctcccgaaggcagggatatcccttggaaccccatgccgcgacttcccgattcatgcgggaagcctcggtctacaccgggcgcacgcgcaacaccgcgcctgcggccccgggccgcctcggcaacgagcaccatcatcgcgaccgtcgggcccacctcgacgagagggtgcgccgaggctatcaccccaggcgtgggggacgctacgacagcggggaggatctgagtccctcgtccgaaccacccgacgatgacaacctcatcatccgcaacctccccctgttcctctccgacaccgctcgcgcctggttggagcacctgcctccggggcagatctccaactgggacgacctggtccaagccttcgccggcaatttccaaggcacgtacgtgcgccctgggaattcctgggacctccgaagctgccgacagcagccgggagagtctctccgggactacatccggcgattctcgaagcagcgcaccgagctgcccaacatcaccgactcggatgtcatcggcgcgttcctcgccggcaccacctgtcgcgacctggtgagcaagctgggtcgcaagacccccaccagggcgagcgagctgatggacatcgccaccaagttcgcctctagccaggaggcggtcgaggctatcttccggaaggacaagcagccccagggccgcccaccggaagatgcccccgaggcatcaactcagcgcgacgccaagaagaagggcaagaagaagtcgcaagcgaaacgcgacgccgccgacgcggaccttgtcgccgccgccgagtacaagaaccctcagaaaccccccggaggtgccaacctcttcgacaagatgcttaaggagtcgtgcccctatcaccaggggctcgtcaagcacacccttgaggagtgcgccatgcttcggcgtcacttccacagggccgggccacccgcggagggtggcagagctcgcgacgacgacaagaaggaagatcaccaggcaggagagttctga

SEQ ID NO: 116002 - DNA, 3126 bp, Zea mays
  Clone ID: MRT4577_37277C.1
atgggcagtctccagcaacctctccaacccgggacggtgctccatttcgggagtcttgagttcatgtccctcgacggcagctacgacatgatactcattccaccgccgggcgacagcgacaatggcggccgacagcccgcccgccggcggcggaatcgacgacgtcttccccgcgtggtggaagaacaaccttcgagctcaccccgcccactcccccgccgacggagggggaggcggggcaaccaaggccaagcaggaggcagcgcctcatcggctatcgagcgagtcgatagcgccagcaccccaacggggggcgcaccgggcatcgacctcgcgcttgagacgaagacgagcgctgtctccccgcaacgcgccgattccgggcaaacggacgacgccagcgcgctcgcgaaaggcttgctggacgtcaccctcgtacctgagacgacggtgcagtcagtccccgacgtgacttcatcaccgcccgtcgaccaagaggtaccgatcgattcccaacccacgtctttcggattcagcctcgacccgcctagcggcttcgctttggcgggcgctctcgtagaggcaagtccaaaccctctggggtttcgtatgcggtcaccttgggaccggctggcggacgtctcgacctacgggccatctgggtccgaggaagacgacgagcccagcttctgttgggatttctctggacttggcaaccccagtgccatgcgggacttcatgaccgcatgcgactactgtctttccggctgttccgacggtagccgtagcctcggcgacgaggactgcggcccaagccgcgaatgtttccacgtcgatctagggggtccctccgaaggcaaccatctcggcatgccggaggacggtgatctccctaggccggtgcctcgcgttgacatcccacgggagctagttgtggtccccgttcaggcggggggccataacccacagctcgagcaaatccgtggggtgcaggccaggctcgacgagggagcaggagcgcttgagccgatccgccgggacgtcgggcaggcatgggcgggccaacctccggccggagaaatacgtcatctaccccagggcttccagcaccgcatcgccgacgatgtcagggtcaggccgccacccgcatccagtggggttggccagaacctggctgcagcagcaatgctcctccgcgcgatgccggagccatcaaccaccgaggggcggcgaatccagggaaagctcaagaatctcctggaaggcgctgcggtccggcgggccgagagctccgcctcccgaaggcaggggtacccctcggaacatcatgccgcgacttcccgattcatgcgggaagccttcggtctacaccgggcgcacgcacaacacagcgcctgcggccccgggtcgcctcggcaacgagcaccatcaccgcggaccgtcgagcccacctcgacgagagagtgcgcccgaggctaccaccccaggcgtgggggacgctacgacagcggggaggatcggagtccctcgcccgaaccacccggtccgcaggccttcagccgggccatacgacgggcgtcgttcccgacccggttccgacccccgactactatcacgaagtactcgggggagacgagaccagaactgtggctcgtggactaccgtctagcctgccaactgggtggaacggacgatgacaacctcatcatccgcaacctcccctgttcctctccgataccgctcgcgcctggttggagcacctgcctccggggcagatctccaactgggacgacctggtccaagctgtcgccggaaatttccagggcacatgtcatcggcgcgttcctcgccggcaccacttgccgcgacctggtgagcaagctgggtcgcaagacccccaccagggtgagcgagctgatggacatcgccaccaagttcgcctccgaccaggaggcggtcgaggctatcttccggaaggacaagcatccccagggccgcccttcggaagatgcccccgaggcgtcaactcagcgcggcgccaagaagaagggcaagaagaagtcgcaagcgaaacgcgacgccgccgacgcggaccttgtcgccgccgccgagtacaagaaccctcggaaaccccccggaggtgccaacctcttcgacaagatgctcaaggagccgtgcccctaccaccagaggcccgtcaagcacacccttgaggagtgcgtcatgcttcggcgccacttccatagggccgggccacccgcggagggtggcagggcccacgacgacgacaagaaggaagatcaccaggcaggagagttccccgaggtccgcgactgcttcatgatctacggtgggcaagcggcgaacgcctcggctcggcaccgcaagcaagagcgtcgggaggtctgttcggtgaaggtggcggcaccagtctacctagactggtccgacaagcccatcaccttcgaccaagccgaccaccccgaccacgtgccgagcccggggaaatacccactcgtcgtcgaccccgtcatcggcgacgtcaggctcaccaaggtcctcatggacggaggcagcagcctcaacatcatctacaccgagaccctcgggctcctgcgtgtcgatctgtcctcggtccgggcaggcgctgcgcctttccatgggatcatccccgggaagcgcgtccagcccctcggacaactcgaccttcccgtgtgcttcggaacaccctccaacttccgaagggagaccctgacgttcgaggtggtcgggttccgaggaacctaccatgcggtactggggaggccatgctacgcgaagttcatggccgtccccaactacacctacctgaagctcaagatgccgggccccaacggggtcatcaccgtcggccccacgtacacacacgcgttcgaatgcgacgtggagtgcgtggagtacgccgaggccctcgctgagtccgaggccctcatcgccgacctggagagcctctctaaggaggtgccagacgtgaagcgtcatgccggcaactttgagccagcggaaacggttaagtctgtccccctcgacctcagcggcgacgcctccaagcagatccggatcggcttcgagctcggtcccaaatag

SEQ ID NO: 116003 - DNA, 6218 bp, Zea mays
  Clone ID: MRT4577_37278C.1
atgggcagtctccagcaacctttccagcccgggacggtgctccgttttgggagtcttgagttcatgtccctcgacggcagctacgacatgatactccttcccccaccgtgcgacagcgataatggcggccgacagcccgcccgccggcggcggaaccgacgacgtcttccctgcgtagtggaagaacaacattcgagctcaccccgccctctcccccgccgacggaggaggaggcggggcaaccaaggccaagcaggaggcgacacctcgtcggctgtcgagcgagtcgacggcgccggcgccccaacggggggcacgacgggcatcgacctcttgtttgagacgaagacgagcgccgtctccccgcaacacgctaattccaagcaaacggacgacgccagcacgctcgcgaaaggcttgctgggcgtcaccctcgtacctgagacgacggtgcagtcagtccctgacgtgacttcgtcaccgcccgtcgaccaagaggtacccaccgattcccatctcacgccctttggattcagcctcgacccgccaagcgacttcgctttggcagacgctctcgtagaggcgagtccaaaccctctggggtttcgtatgcggtcaccttgggactggctcacggacgtctcgacctacgggccctcggggtccgaggaagatgacgtgtccgacttctgttgggatttctccggacttggtaaccctagtgccatgcgggacttcatgaccgcatgcgactactgcctttccgactgttccgacggtagccgcagcctcggcgacgaggactgcggcccaagtcgtgaatgtttccacgtcgatctagggggtccctccgaaggcaaccatcttggtatgccggagaacggtgatctccctaggcctgtgcctcgtgttgacatcctacgggagctagctgtggtccccgttcaggtggggggtcatgacccacagctcgagcaaatccgcggggtgcaggctaggctcgacgagggagcaggaacacttgagccgatccgccgggacatcgaacaggaatgggcgggccaacctccggccggagaagtgcgccatctaccccagggtatccagcaccgcatcgccgacgatgtcagggtgaggccgccacccgcttccagtggagtcggccagaacctggctgcagcggtaatgcttctccacgctatgccggagccatcaaccaccgaggggcggcgaatccagggagagctcaagaatctcctggaaggcgccgcggtccgacaggccgagagctccgcctcccgaaggcaggggtacccctcggaacatcgcgccgcgacttcccgattcatgcgggaagcttcagtccacactgggcgcacgcgcgacacagcgcctgtggcctcgggtcgcctcgacaacgagcaccatcaccgcaaccgtcgggcccacctcggcgaaagggtgcgccgaggctaccaccctaggcatgggggacgctacgacagcggggaggatcggagtcactcgcccgaaccacccggtccgcaggctttcagccgcgccatacgacgggcgccgttcccgacccggttccgaaccccgactactatcacaaagtactcgggggagacgagaccggaactgtggctcgcagactaccggctggcgtgccaactgggtggaacggacgatgacaacctcatcatccgcaacctccccctgttcctctccgacaccgctcgcgcctgctgccgacagcagtcgggagagtctctccgggactacatccgacgattctcgaagcagcacactgagctgcccaacatcaccgattcagatgtcatcggcgcgttcctcgccggcaccacttgccgcgacctggtcagcaagctgggtcgaaagactcccaccagggcgagcgagctgatggacatcgccaccaagttcgcctctggccaggaggcggttgaggctatcttccggaaggacaagcagccccagggccgcccaccggaagatgcccccgaggcgtcaactcagcgcggcgccaagaagaaaggcaagaagaagtcgcaagcgaaacacgccgccgccgacgcggaccttgtcgccgccgccgagcacaagaaccctcggaaaccccccggaggtgccaacctcttcgacaagatgctcaaggagctgtgcccctatcatcaggggcccgtcaagcacacccttgaggagtgcgctatgcttcggcgccacttccacagggtcgggccacccgcggagggtggcagggcttgcgacgacgacaagaaggaagatcaccaggcaggagagttccccgaggtccgcgactgcttcgtgatctacggtgggcaagcggcgaacacctcggctcgacaccgcaagcaagagcgtcgggaggtctgttcggtaaaggtggcggcaccagtctacctagactggtccgacaagcccatcaccttcgaccaagccgaccaccccgaccacgtgccgagcccggggaaatacccgctcgttgtcgaccccatcatcggcgatgtcaggctcaccaaggtcctcatggacggaggcagcagcctcaacatcatctatgccgagaccctcgggctcctgcgtgttgatctgtcctcggtccgggcaggcggtgcgcctttccacgggatcatccccgggaagcgcgtccagcccctcagacaactcgaccttcccatctgcttcggaacaccctccaacttccgaagggagaccctcacgttcgaggtggtcgggttccgaggaacctaccacgcagtattggggaggccatgctacgcgaagttcatgaccgtccccaactacacctacctcaagctcaagatgccgggccccaacggggtcatcaccgtcggccccacgtaccgacacgcgttcgaatgcgacgtcgagtgcgtggagtacgccgaggccctcgccgagttcgaggccctcatcgtcgacctggagagcctctctaaggaggtgccagacgtgaagcgccacgccggcaacttcgagccagcggagacggttaagtccgccccctcgacctcagcagcgacgcctccaagcatatccggatcggctccgagctcgaccccgaataggaagcagtgctcgttgactttctccgcgcaaacgccgacgttttcgcgtggagtccctcggacatgcctggcgtaccgagggatgtcgccgagcactcgctggatatccgagctggagtccgacccgtcaagcagcctctgcgccgattcgacgaagaaaagcgcagagccataggcgaggagatccacaagctaatggcggcagggttcatcaaagaggtattccatcccgaatggcttgccaaccctgtgcttgtgagaaagaaaggagggaaatggcggatgtgtgtagactacactggtctaaacaaagcatgtccgaaagttccctaccctctgcctcacatcgatcaaatcgtggattccactgctgggatgaaagagtccgaccagctcgcgacttctttcatcacacccttcggcatgtactgctatgttaccatgtcgtttggtttgaggaatgcgggtgcaacgtaccaacggtgcatgaaccacgtgttcggcgaacacattggtcgaacggtcgaggcctacattgatgacatcgtagtcaagacgaggaaagcctccgacctcctttccggccttgaaacaacatttcggtgtctcaaggcgaaaggcgtaaagctcaatcccgagaagtgtgtcttcggggtcccccgaggcatgctcttggggttcatcgtctccgagcggggcatcgaggccaacccggagaaaatcgcggccatcaccaacatggggcccatcaaggacttaaaaggcgtacagagggtcacgggatgccttgcggctctgagccgtttcatctcgcgcctcggcgaaagaggcccgcctctgtaccgcctcttaaggaaggtcgagtgcttcacttggacccttgaggccgaggaagccctcgggaacctgaaggcgctcctcacaaacgcgcccatcttggtgccccccgcggccggagaagccctcttgatctacgtcgccgctaccactcaggtggtcagcgccgcgatcgtggtcgagagacaagaagaggggcatgcattgcccgtccagcggccagtctacttcatcagtgaggtactgtccgaaaccaagatccgctactcacaaattcagaagctgctgtacgcggtgatcctgacacggcggaagttgcgacactacttcgagtctcatccggtgactgtggtgtcatccttccccctgggggagatcatccagtgccgagaggcctcgggtaggattgcaaagtccctgatgaagacaggggcaggcgcgggcctgctcttcgtcttgcccctcgggaagcacctgcgctacgtgctacgcctccacttcccggcgtccaacaatgtggctgagtacgaggctctggtcaacgggttgcgcatcgccatcgagctaggggtccgacgcctcgacgctcgtggtgactcgcagctcatcatcgaccaagtcatgaagaactcccactgccgcgacccgaagatggaagcctactgcgatgaggttcggcgcctggaagacaagttctacgggctcgagctcaaccacatcgcccgacgctacaacgagactgcggacgagctggctaaaatagcctcggggcgaacaacggttcccccggacgtcttctcccgagacctgcatcaaccctccgtcaagaccgacgacacacccgagcccgagaaggcctcggcccagcccgaggcaccctcggctcggtccgaggcaccctcggctcggcccgaggcaccctcggctcggcccgaggcaccctcggctcggcccgaggcaccctcggctcggcccgaggagctcttacaagagatacactcgggggcttgcggccatcacgcagcacctcgagcccttgttggaaacgccttccgacaaggcttctactggccgaccgcggtggccgacgccactagaattgtccgcacctgccaagggtgtcaattctatgcaaggcagacccacctgcccgctcaggctctgcagaccatacccatcacatggtcgtttgctgtgtggggtctggacctcgtcggccccttgcagaaggcacccgggggctacacgcacctgttggtcgccatcgacaaattctccaagtggatcgaggtccgacccctaaacagcatcaggtccgaacaggcggtggcgttcttcaccaacatcatccatcgctttggggtcccgaactccatcatcaccgacaacggcacccagttcactggcagaaagttcctggacttctgcgaggatcaccacatccgggtggactgggccgccgtggctcaccccatgatgaatgggcaagtagagcgtgccaacggcatgatcctgcaagggctcaagccgcggatctacgacgacctcaacaagttcggcaagcgatggatgaaggagctcccctcggtggtctggagtctgaggacaacgccgagccgagccacgggcttcacaccgttctttctagtctatggggccgaggccatcttgcccacagacttagaatacggttccccgaggacgagggcctacgccgaccaaagcaatcgatctaatcgagaagactcactggaccagctggaagaggctcgggacatggccttactacactcggcgcggtaccagcagtccctgcaacgctaccacacccgaggggttcggtcccgagacctccaggctcggatcttgacagttgaagggagcagcagcaccctcggcgtcaactacaccgtcggcgaggtccggcctagcctcggacggcgacgcggtcggaggatctccactccgaaggacgacatcaacaccatgctcgggccatcgccgccagggtcttctccaggaattcggctcggccggccaccccgaagcctcagccagctgtcccccgaggacatcagcccggcttgtggcatcggtgactcaactccggcgtcggtcccgctagtggacgacccggccaggctccggccgaccaaatcttcttttcgagccaactctgcctccgtccgtgctgacaccgctacctccggctttggctcatcgaagagcggccgagggttcctttaa

SEQ ID NO: 116004 - DNA, 291 bp, Zea mays
  Clone ID: MRT4577_37279C.1
aacgacgctacccaactcctcagccggatccatcctcatgaacgcttctgcgctggcgtcacacgtcccacatatagcaagggtccccaaaccttgcattacccccgtgcccaaacatccccgtccccatggaccttgggataaggcctaaacggagatctcccgcgacgtccaccccaccgttaatatctctcaaggatagcactcactcccgcaggtttaaaaatggtgaattttcaagcccatcataattaaaaggttctaagataaaagcttctttctcatcaccct

SEQ ID NO: 116005 - DNA, 190 bp, Zea mays
  Clone ID: MRT4577_3727C.1
cgattgggtcggaaatcgagggtttggtaagcgagatcgccgccggtgacagctgacagggacgagatggacgccgccgaaggcggctttttggtcgccgttttttgaatgctgttggccttggccattttccccttcttcttttggggccgccgttccaatgccgcacaccgccgttaacacaccgttc

SEQ ID NO: 116006 - DNA, 5808 bp, Zea mays
  Clone ID: MRT4577_37280C.1
atgccaggtaggggcctgctgcgtgttgacgaacagcttcccgtcaagctccagatgggtagtctacaacaacctttccaacccgggacgattctccgtttcgagagtcttgagttcatgtccctcgacggcggctacgacatgatactccttcctccgccgcgcgacggcgacaatggcggccgacagcccgcccgccggcgatggaatcaacaacgtcttcctcacgtggcggaagaacaacattcgggtttgtcccgtcatctcccccgccgacggaggaggaggcggggcaaccatggccaagcaggaggcggcacctcgtcggctgtcgagcgagtcgacggtgccggcgcccaaacgggggacacgtcgggcgatgaccttgcgtctgagatgaagacgagtgccgtttccccgcaacacgccaactccaagcggacgaacgacgccagcacgctcgcgagggacttgctgggcgtcaccctcgtacctgagatgacggtgcagtccgcccctgacgcgacttcgtcaccacccgtcgatcgagaggtaccgaccgattcccgtctcgtgccttttagatccagctgcgacccaccgagtgaccccgctttggtggacgcttttataaaggcatgttcaaaccctccggggtatcatatgcagtcaccctggcaccggctgacggccgtctcgacctacggaccctcgggttccgaggaagatgacgagcccgacttttgttgggatttctccgggctcggtaaccccagtgccatgcgggacttcatgaccgcatgcgactactgcctctccgattgttccgacggtagccgcagcttcggcgacgaggactgcggcccaagtcgtgaatgtttccacgtcgatctagggggtcccggtgaaagcaaccatcttggctcgacgagggagcaggaacacttgagcagttccgccagaacatcgggcaggaatcggcagaccgagctccggccggagaagtgcgtcatctgccccagggcatccagctccgcattgccgacgacgtcagggcaaggccgccaccggcttccagtggggtcggctagaacctggctgcggcagcaatactactccccgcgatgccggaaccatcaaccaccaaagggcggtgtatctagggagagctcaagaatctcctggaggatgccgcggtctgacgggccgaaagctctgcctcccgaaggcaggggtacccctcggagcatcgcgccgcgacttctcgattcatgcgggaagcctcggtccacaccgggcgcacgcgcaacacagcgcctgcggccccgggtcgcctcggcaacgagcaccaccaccgcaaccgtcaagcccacctcgacgagagggtacgccgaggctaccaccccaggcgtgggggacgctacgacaacggggaggatcggagtccctcgcccgaaccacccgggcacgtacgtgcgccctgggaactcctgggaccaccgaagctgccgccagcagccgggagagtctctccgggactacatccggcgattctcgaagcagcgcaccgagctgcccaacgtcaccgactcggatgtcatcggcgtgttcctcgccggcaccacctgccgcgacctggtgagcaagctgggccgcaagacccccaccagggcgagcgagctgatggacatcgccaccaagttcgcctctggccaggaggcggttgaggccatcttccggaaggacaagcagccccagggccgccaaccggaagatgtccccgaggcgtccactcagcgcggcaccaagaagaaaggcaagaagaagtcgcaagcgaaacgcgacgccgccaacgcggaccttgtcgctgccgctgagtacaagaaccctcggaaacctctcggaggcgccaacctcttcgacaagatgctcaaggagccatgcccctatcaccaggggcccatcaagcacacccttgaggagtgcgtcatgcttcggcgccactcccacagggccgggccaccggcggaagtggcgaacacctcggctcggcaccgcaaacaagagcgtcgggaggtctgctcggtaaaggtggcggcgccagtctacctagactggtccgacaagcccatcaccttcgaccagggcgaccaccccgaccgcgtgccgagcccggggaagtatccgctcgttgtcgaccccgtcatcggcaacgtcaggctcaccaaggtcctcatggacggaggcagcagcctcaacatcatctacgccgagaccctcgggatcctgcagatcgatctgtcctcgatccaggccggcgtgacgccttttcacgggatcatccctgagaaacgcgtccagcccctcggacaactcgatctgcccgtctgcttcgggactccctccaacttccgaagggaaaccctcacgttcgaggtggtcagtttccgaggaacctaccacgcagtgctggggaggccatgcttcgccaagttcatggccgtccccaactacacctacctcaagctcaagatgtcgggccccaacggggtcatcaccgtcggccccacgtaccgacacgcgtacgaatgcgacgtcgagtgcgtggagtatgccgaggccctcgccgaatccgaggccctcatcgccgacctggagagcctctccaaggaggcgcctgacatgaagcgccatgccggcaacttcgagccagcagagatggttccctaccctctgcctcgcatcgatcaaatcgtggattctactgctgggtgcgaaaccatgtctttcctcgatgcctactcagggtatcaccaaatcaagatgaaagagtccgaccagctcgcgacttctttcatcacaccttttggcatgtactgctacgttactatgccatttggtttgaggaatgcgggtgcgacataccaaaggtgcatgaaccacgtgtttggcgaacacattggtcgaacggtcgaggcttacgtcgatgacattgtagtcaagacaaggaaagcctccgacctccttttcgaccttgaagcgacattccggtgtctcaaggcgaaaggcgtgaaactcaatcccgagaagtgtgtcttcggagtccctcgaggcatgctcttggggttcatcatctccgagcggggcatcgaggccaacccggagaaaatcgtggccatcaccaacatggggcccatcaaggacttgaaaggcatacagagggtcatgggatgccttgcggctctgagccgcttcatctcgcgcctcagcgaaagaggcctacctctgtaccgcctcttaagaaagaccgagagcttcacttggacccccgaggccgaggaagccctcgggaacctgaaggcgctccttacgaacgcgcccatcttggtgcccctcgcggccggagaagccctcttgatctacgtcgccgctaccactcaggtggtcagcgccgcgatcgtggttgagagacgagaagaagggcatgcattgcccgtccagaggccggtctacttcatcagtgaggtactattcgagaccaagatctgctacccacagattcagaagctgctgtacgtggtgattctgacgcggcggaagttgcgacactacttcgagtctcatccggtgactgtggtgtcatccttccccctgggagagatcatccagtgccgagaggcctcgggtaggattgcaaagtgggcggtggaaatcatgggcgagacaatctcattcgcccctcggaaggccatcaagtcccaagtcttggcggactttgtggctgaatgggtcgacacccagctcccggtagctctgatccaaccggaactctggaccatgtttttcaacgggtcgctgatgaaaacaggggcaggcgcgggcctgctcttcatctcgcccctcgggaagcacctacgctacgtgctgcgcctccatttccctgcgtccaacaatgtggctgagtacgaggctctggttaacgggttgcgcatcgccatcgagctagggctcgtcatcgaccaagtcatgaagaactcccactgccgcgacccgaagatggaagcctactgcgatgagactgcggacgagctggctaagatagtctcggggcggacaacggttcccccggacgtcttctcccgagacctacatcaaccctcagtcaagaccgacgacacgcccgagcccgagaaggcctcggccctgcccgaggcaccctcggctcagcacgaggcgccctcggctcggcccgaggcgccctcggttcagcccgagacaccctcggcccccgaggcgcctcgagcccttgttggaaacgctttccgacaaggtttctactggccgaccacggtggccgacgccactagaattgtccgcacctgccaagggtgtcaattctacgcaaggcagacccacctacccgctcaggctctacaaacaatacccatcacctggccgtttgctgtgtggggtctggacctcatcaatcccttgcagaaggcacccgggggctacatgcacctgctggtcgccatcgacaaattcttcaagtggatcgaggcggtggcgttcttcaccaacatcatccatcgctttggggtcccgagctccatcatcaccgacaacgacacccagtttaccggcagaaagttcctggacttctgcaaggatcaccacatccgggtggactgggccaccgtggctcaccccatgacgaatgggcaggcgatggatgaaggaactcccctcggtggtctggagtctgaggacaacaccgagccgagccacgggcttcacaccgttttttctagtctatggggccgaggccatcttgcccacagacttagaatacagttccccgagggcgagggcgtacgacgaccaaagcaaccagaccaatcgagaagactcactggaccagctggaagaggctcgggacatggccttactacactcggcgcggtatcagcagtccccgtgatgctaccacgcccgaggggttcggtcctgagacctccaggtgggcgacttggtgcttcggctgcgacaagacacccgagggcggcacaagcttacgcctccctgggaagggtcgttcatcatcgccaagattttgaagcccggaacatacaagctggccaacagtcaaggcgaggtctacagcaacgcttggaacatccgacagctacgtcgcttctacccttaagatgctttcaagtcattcgtacacctcgttcacaaacaaagtctaaccatcaaggaagggtacgaacaaccccccacgttggagggcctgcggagcaacagaacgccgacggacggctcgctgacgcccgctctggcaacagcgacaatgacttccgctccgggcggccaaataggagtagcgatgacctcagggcagacgctgctgcaacaaggcccttgcccgcgtccccgcccaaggggcaaggacatgcagaaggccgtagagttggaggtcagtccgcgggtggcgccgactatctcatcggcggagaaacctcttccggctgcctcggtgggaggtggcaccggaagcagcgccgaagccactcaggccggagagccagacacgcggcagctgccagcgccacgaacggcgaacgcccttccccccgatcactgagggaaggagcgggccactgcccgcgcggggaccggccccaactcggcgcactcctctccccagcactgatgatgaacatccttgaagctgagggaggggcagaggccgcagcccggcttgcttcttcccaccctgggactggtggtcaccgtcttgggtga

SEQ ID NO: 116007 - DNA, 2635 bp, Zea mays
  Clone ID: MRT4577_37281C.1
atgccgttcggcttgaggaatgcgggcgcgacgtaccagcggtgcatgaaccatgtgttcggcgaacacatcggtcgcacggtcgaggcctacgtcaatgacatcgtagtcaagacgaggaaagcttccgacctcctttccgaccttgaagtgacattccgatgtctcaaggcgaaaggcgtcaagctcaatcccgagaagtgtgtcttcggggtgccccgaggcatgctcttggggttcatcgtctccgagcggggcatcgaagccaacccggagaagatcgcagccatcaccagcatggggcccatcaaggacttaaaaggcgtacagagggtcatgggatgtctcgcggctctgagccgcttcatctcacgcctcggcgaaagaggtctgcctctgtaccgcctcttaaggaaggccgagtgcttcacttggacccctgaggccgaggaagctctcgggaacctgaaggcgctcctcacaaaggcgcctatcttggtgcctccagctgccggagaagccctcttggtctacgtcgccgcgaccactcaggtggttagcgccgcgattgtggtcgagaggcaagaagaggggcatgcattgcccgttcagaggccagtttacttcgtcagcgaggtactgtccgaaaccaagatccgctacccacaagttcagaagctgctgtatgcagtgatcctgacacggcggaagttgcgacactacttcgagtctcatccggtaactgtggtgtcatccttccccctgggggaaatcatccagtgccgagaggcctcgggcaggattgcaaagtgggcggtggaaatcatgggcgagacaatctcattcgcccctcggaaggccatcaagtcccaggtcttggcggacttcgtggccgaatgggtcgatacccagctaccgacggctccgatccaaccagagctctggacaatgtatttcgacgggtcgctgatgaatacgggatccggcgcaggcctactcttcatctcgcccctcgggaaacacctacgctatgtgctacgcctccatttcccggcgtccaacaatgtggttgagtatgaagctctggtcaacgggttgcggatcgccatcgagctaggggtccgacgccttgacgcccgcggtgactcgcagcttgtcatcgaccaagtcatgaagaactcccactgccgcgacccgaagatggaggcctactgcgatgaggttcggtgcctggaagacaagttctacgggctcgagcttaaccacatcgctcggcgctacaacgagactgcggacgagctggctaaaatagcctcgggggcgaacaacggttcccccgaacgtcttctcctgggatctgcatcaaccctccgtcaagatcgacgacacgcccgagcctgaggcgccctcggcccagtctgaggtaccctcggtccagcccgaggtaccctcggcacagcctgaggcaccctcagctcggcccgaggcgccctcagttcagcccgaggtaccctcggcctccgagggtgaggcactgcgcttcgaggaggagcaaagcggggccacgcctgatcgaaactggcagaccccgtacctgcaatatctccaacaaggagagctacccctcgaccgagccgaggctcgacgggtggcgcggcgcgccaagtcgttcgtcttgctgggcgaagagaaggagctctaccaccgcagcccctcgggcatcctccagcgatgcagctccgtcaccgagggtcaggaacttctgcgagagatacactcgggggcttgcgggcatcacgcagcgcctcgagcccttgtcgggaatgctttccgacaaggcttctactggccaacggcggtggctgacgccactagaattgtccgcacctgcgaagggtgtcaattctatgcgaagcagacccacgtgcccgctcaggctctgcagacgatacccatcacctggccctttgctgtgtggggtctggacctcgtcggccccttgcagaaggcgcccgggggctacacgcacctgctggtcgccatcgacaaattctccaagtggatcgaggtccgacctctgaacagcatcaggtccgagcaggcggtggcgttcttcaccaacatcatccatcgcttcggggtcccgaactccatcatcaccgacaacggcacccagttcaccggcagaaagttcttggacttctgcgaggatcaccacatccgggtggactgggccgccgtggctcatcccatgtcgaatgggcaagtagagcgtgccaacggcatgattctacgagggctcaagcctcggatttacaacgacctcaacgagttcgacaagagatggatgaaagaactcccctcggtggtctggagcctgaggacgacgccgagccgagcaacgggtttcacgccgttcttcctagtctacggggccgaggccgtcttgcccatagacctggaatacggctccccgaggacgagggcctacagcgatcaaagcaaccaagctagccgagaagactcgctggaccagctggaagaggctcgggacaaggccttactacactcggcgcggtaccagcagtccctgcgacgctaccacgcccgaggggtccggtcccgagacctccag

SEQ ID NO: 116008 - DNA, 3199 bp, Zea mays
  Clone ID: MRT4577_37282C.1
atgggcagcctccagcaacctctccggcccggggcggtgcttcgtttcgggactcttgagttcatgtccttcgacggcagctacgacatgatacttcttccaccgccgcgcgacaacgacaatggcggccgacaacccgcccgccggcggtggaatcgacgacatcttccccgcgtggtggaagagcaaccttcgagctcgctccgttctctcccctgccaacgaaggaggaggcggggccatcaaggccaagcgggaggccgcgcttcgtcggccgttgagcgaatcgacgcccccgacgctccgacggaaggcacgccggacgtcgacctcgcgttcaagacgaaggcaagcgccgtccccccgcgacacgctgaccccgagcaagaagacgacgccggcgcgctcgcggaaagcctgcaggacgtcgccctcgtacctgagatgacggtgcaaccagtccccgatgtgactacgtcgctcctcgtcgaccaaaaggtaccgactaactcccatcttacatcatttcgactcggcctcaacccgccaaacgaccacgttttggcgggcgctctcattgaggcgagtgcaaccccactggggtttcgtatgcggtcaccttgggaccgactgacggacgtctcgacctacgggccctctgggtccgaggaagatgacgatcccagcatctgttgggacttctccggacttggcaaccccagtgccatgcgggacttcatgaccgcatgtgactactgcctatccgactgttccgacggaagccgcagccttgacgacgagagctgcggcccaagccgcgaatgtttccacatcgagctaggggatccctccgaaggcaaccatctcgacatgccggaggacggtgatcttcctaggccggtgcctcgcgccgacatcccacgggagctagctgtggtccccgctccggcggggggttacgacccacaactcgagcaagtccgcgaggcacaggccaggctcaacgagggaacaggagcgcttgagccgatccgtcgggacgtcgggcaggcatgggcgggccaacccctggccggagaaatacgtcacctgccccaaggtctccagcaccgcgtcgccaacgatgccagggtcaggccgccgcccgcatccagcggggttggtcagaacctggcagccgcagcgatgctcctccgcgcgatgccggagccatcaaccaccgagggtcggcgaatccagggagagctcaagaatctcctggaaggcgctgcggcccgacgggccgagagcactgcctcccgaaggcaaggatatccctcggaacctcatgccgcgacttcccgattcatgcgggaagcctcggtctacaccgggcgcacgcgcaacaccgcgcctgcggccccgggccacctcggcaacgagcaccatcgacgcgaccgtcgggcccacctcgacgaaagggtgcgccgaggctaccaccccaggcgtggggggcgctacgacagcggggaggatcggagtccctcgcccgaaccacccggtccgcaggccttcagtcgggccatccgacgggcgccattcccgacccggttccgacccccgactactatcacgaagtactcgggggaaacgagaccggaactgtggctcgcggactaccgccttgcctgccaactgggtggaacggacgacgacaacctcatcatccgtaacctccccctgttcctctccgacactgctcgcgcctggttggagcacctgcctccggggcagatctccaactgggacgacttggtccaagccttcgctggcaatttccagggcacatacgtgcgccccgggaattcctgggaccttcgaagctgccggcaacagccgggggagtcgctccgggactacatccggcgattctcgaagcagcgcaccgagctgcccaacatcaccgactcggatgtcatcggcgcgttcctcgccggcaccacttgccgcgacctggtgagcaagctgggtcgcaagacccccaccagggcgagcgagctgatggacatcgccaccaagttcgcctctggccaggaggcggtcgaggctatcttccgaaaggacaagcagccccagggccgcccatcggaagaggctcccgaggcgtctgctccgcgcggcgccaagaagaaaggcaagaagaagtcgcaatcgaaacgcgacgccgctgacgcggaccttgtcgccgccgccgagtacaagaaccctcggaagccccctggaggggcccgtcaagcacaccctcgaggagtgcgttatgcttcggcgtcacttccacagggccgggccacccgccgagggtggcagggcccgcgacgacgacaagaacgaagatcacccagcaggagagttccccgaggtccgcgactgcttcatgatctatggaggacatgcggcgaatacctcggctcggcaccgcaagcaagagcgccgggaggtctgctcggtgaaggtggcggcgccagtctacctagactggtccgacaagcccatcactttcgaccaggccgaccaccccgaccatgtgccgagcccggggaaatacccgctcgtcgtcgaccccgttgtcggcgatgtcaggctcaccaaggtcctgatggatgggggcagctgcctcaacatcatttacgtcgagaccctcaagctcctgcgcgtcgatctgtcctccgtccgagcaggcgctgcgcccttccacgggatcatccctgggaagcgcgtccagcccctcgggcgactcgacctccccgtctgcttcgggacaccctccaacttccgaagggagaccctgacgttcgaagtggtcgggttccgaggaacctaccacgccgtgctagggaggccatgctacgcgaagttcatggccgtccccaactacacctacctgaagctcaagatgccgggccccaacggggtcatcaccgtcggccccacgtacaaacacgcgttcgaatgcgacgtggagtgcgtggagtacgccgaggccctcgccgagtccgaggccctcatcgccgacctggagaacctctccaaggaggtgccagacgtgaagcgccatgccggcaacttcgagccagcggagacggtcaaggccgtccccctcgaccccagtggcgacaccaccaagcagatccggatcggatccgggctcgaccccaaatag

SEQ ID NO: 116009 - DNA, 1774 bp, Zea mays
  Clone ID: MRT4577_37283C.1
gtctaatcatctcattaatcattacaacaatttctttactcattttgatttcatcctgacttacgatgtaagacagtgaccaagtctccactatccggggatataaggtgatccgaatcgatttactcagctgaggatctctaaccagacgacatatgcttcttgtaactcttgcatatgtctaccattcccatggatcctccactacatgaacaggtctgcgccacccgagagcacactaccctttttaggcggtactttgccagaagggtacatgccactctcccatctctcaactcccagtgcgcgattgtcttttcacatatggaatagccgggttcaagcttaccctgtcccatttccagggcatgtggccagttaagatagtccttgatcaacaggcctacatacgcatccaatccttaattgacccgggcggagcatcatctgttcctagcccaagtctcgatttaagtatttccatccttaggattgtgtctgttccttaggatgaaagagcatcacagggaactttgcagtaagatcccactattgctccaaatgaaaatattcttgcaggtagaagccatcctttctcgagttaaattaaggacaacctctatccacgagatctaagcaaggctaagcatttttgtaaatcatattttgatacttcacagaagtatctataaaggtatggatatcaaggaaagcaatgcatcaaagggttccaagcaattcctatgaacctaatgcacatttcactagacttaaaatgtgcgaaaattatttaaaaacacaaagaaagggttgcatgcaccggggcttgctctttttaacactatgttagtgtttgttagatgacgtccacttgacgagtatccctcgaccgaccacttgcttgatttaaccatcttcttgatggtccatcagcttcaccatgcggagtagtccacgcttggggtcaacttgactcaagttctccgcatctcgtggttaatcaacgtaccacatcacaactcgatttggtagttgcctgaacgacgacgaccttcagctaaagtccttgatcgaacatctggcgagcgtgaccgacgagctaaggctaaggcgaagctcgacgacgagatcgtgtttgaagcgagctggtgaggtggggtttgagcagaggatgacaggttcgacgacttgacggcaaacgacgagatcgacgacgcgattgggaattaaagtcgagcgagccgagagggcgcactggcgagcaggaaacaggacgcgactgcgtgcagaggagcgggtcggactcagtggccgagcagacccgacccagtagcgagaacaaacagagggggagctggagtatggatagagccaagctgggcgactgggtgagatccgggctaggggaaagctctggccatgggaattccgagcagaagcagaggcaggaaccaggggcgcggctggcgtccatgggaggtagagggagtcggctgccaatgagcagggaatagagagagagagcagagaagggactgcgctggccgagcaggatggcggcgagcagggcaagcatccagggagccggacgccgagccctagtcaccggagcagggagctggaagaactccataggcgagcaggagtcgagctcgcaggggaagaggctaggggaagccgagcggtcgagctggaggagctccggcgagcacagcagggagaagacgccactggagcaccgcgcgctgggactggctgggagaagatcccggcc

SEQ ID NO: 116010 - DNA, 5868 bp, Zea mays
  Clone ID: MRT4577_37284C.1
atggcgaccgacaacccgcccgccggcggcggaatcgacgacatcttccccgcgtggaggaggcggggcaaccaaggccaagcgggaggtcgcgcttcgtcggctgtcgagcgaatcgacgtccccagcgccccaactgggggcgcgtcgggcgtcgacctcgtgttcgagacgaaggcgagcgccgtccccccgcgacacgcgaatcccgagcaagtggacgacaccagcgcgctcgcggagagcttgcgggacgtcgctctcgtacctgagacgacggtgcaatcagtccccgacgtgactatgtcgctcctcgtcgaccaaaaggtactgactgattcccatcttacatcatttcgactcggcctcaacccgcctagcgacctcgctttggcgggcgctctcgttgaggcgagtgcaacccctctggagtttcatatgcggtcgccttgggaccggttgacggacgtctcgacctacgggccctctgggtccgaggaagatgacgatcccagcatctgttgggatttctctggatttggcaaccccagtgccatgcgagactttatgaccgcatgtgactactgcctctctgactgttccgacggtagccgcaaccttgacgacgagaactgcggcccaagccgcgaatgtttccacgtcgagctaggggatccctccgaaggcaaccatctcggcatgccggaggacggtgatctccctaggccggtgcctcgcgctgacatccctcgggagctagttgtggtccccgttccggcggggggtcacgacccacagctcgagcaagtccgcggggcgcaggccaggctcgacgagggagcaggagcgcttgagtcgatccgccgggacgtcgggcaggtaagggcgggccaacccccggccggagaaatacgtcacctgccccagggtttccagcaccgcgtcgccaacgacgtcagggtcaggccgccgcccgcatccagtggggtcgttcagaacctggcagccgcagcgatgctcctccgcgcgatgccggagccatcaaccaccgagggtcggcaaatccaggaagagctcaagaatctcctggaaggcgcagcggtccgacgggccgagagctctgccttccgaaggcagggatacccctcggaacctcatgccgcgacttcccgattcatgcgggaagcctcggtctgcaccgggcgtacgcgcaacaccgcgcctgcggccccgggccacctcggcaacgagcaccatcgtcgcgaccgtcgggcccacctcgacaaaagggtgcgccgaggctaccaccccaggcgtgggggacgctacgacagcggggaggatcggagtccctcgcccgaaccacccggtccgcaggccttcagtcgggccatccgacgggcgccgttcccgacccggttccgacccccgactactatcacaaagtactcgggggaaacgagaccggaactgtggctcgcagactaccacctggcctgccaactgggtggaacggacgacgacaacctcatcatccgcaacctccctctgttcctctccgacactgctcgcgcttggttggagcacctgcctccggggcagatctccaactgggatgacttggtccaagccttcgccggcaatttccagggcatgtacgtgcgccccgggaattccagggacctccgaagctgccggcaacagccgggagagtctcttcgggactacatccggcgattctcgaagcagcgcaccgagctgcccaacatcaccgactcggatgtcatcggcgcgttcgttgccggcaccacctgccgcgacctggctcccgaggcgtctactccgcgcggcgccaagaagaaaggcaagaagaagtcgcaagcgaaacgcgacgccgccgatgcggaccttgtcgccgccgccgagtacaagaaccctcggaagccccccggaggtgctaacctcttcgacaagatgctcaaggagccgtgcccctatcatcagggggccgtcaagcacaccctcgaggagtgcgtcatgcttcggtgccacttccccagggccgggccacccgcagagggtgacagggcccgcgacgacgacaaaaaggaagatcaccaagcaggagagttccccgaggtccgcgactgcttcatgatctacggtgggcatgcggcgaatgccttggctcggcatcgcaagcaagagcgccgggaggtctgctcggtgaaggtggcggcgccagtctacctagactggtccgacaagcccatcaccttcgaccaagctgaccaccccgaccacgtgccgagcccggggaaatacccgctcgtcgtcgaccccatcgtcggcgacgtcaggctcaccaaggttctgatggacgggggcagctgcctcaacatcatctacgccgagaccctcaggctcctgcgcgtcgatctgtcctccgtccgagcaggcgctgcgcccttccatgggatcatccctgggaagcgcgtccagcccctcgggcgactcgacctccccgtctgcttcgggacaccctccaacttccgaagggagaccctgacgttcgaggtggtcgggttccgaggaacctaccacgccgtgctagggaggccatgctacgcaaagttcatggccgtccccaactacacctacttgaagctcaagatgccgggccccaacggggtcatcaccgtcggccccacgtacaaacacgcgttcgaatgcgacgtggagtgcgtggagtacgccgaggccctcgccgagtccgaggccctcatcgccgacctggagaacctctccaaggaggtgccagacgtgaagcgccacgccggcaacttcgagccagcggagacggtcaaggccgtccctctcgaccccagcagcgacaccaccaagcaggttccctaccctctgcctcgcatcgaccaaatcgtggattccaccgctgggtgcgaaaccctgtccttcctcgatgcctactcagggtatcaccagatccggatgaaagagtccgaccagctcgcgacttctttcatcacgccgttcggcatgtactgctatgtcaccatgccgttcggtttgaggaatgcgggcgcgacataccagcggtgcatgaaccatgtgttcggcgaacacatcggtcgcacagtcgaggcctacgtcgatgacatcgtagtcaagacaaggaaggcttccgacctcctctccgaccttgaagtgacattccggtgtctcaaggcgaaaggagtcaagcttaaccccgagaagtgtgtctttggggtgccccgaggcatgctcctagggttcatcgtctccgagcgaggcatcgaagccaacccggagaagatcgcggccatcaccagcatgggacccatcaaggacttgaaaggggtacagagggtcatgggatgcctcgcggccctgagccgcttcatctcacgcctcggcgaaagaggtctgcccctgtaccgcctcttaaggaaggccgagtgtttcgcttggacccctgaggccgaggaagccctcggcaacctgaaggcgctccttacaaaggcgcccgtcttggtgcccccggcggacggagaagccctcttggtctacgtcgccgcgaccactcaggtggttagcgccgcgattgtggtcgagaggcaagaggaagggcatgcattgcccgttcagaggccggtctacttcatcagcgaagtgctgtccgagaccaagatccgctacccacaagttcaaaagctactgtatgctgtgatcctgacaaggcggaagctgcgacactacttcgagtctcatccggtgactgtggtgtcatccttccccctgggggagatcatccagtgccgagaggcctcgggcaggatcgcaaagtgggcggtggagatcatgggcgaaacgatctcgttcgcccctcggaaggccatcaagtcccaggtgttggcggacttcgtggccgaatgggtcgacacccagctgccgacggctccgatccaaccggagctctggaccatgtttttcgacgggtcgctgatgaagacgggggccggcgcgggcctgctcttcatctcgcccctcggaaagcacttgcgctacgtgctgcgcctccacttcccggcgtccaacaatgtggccgagtacgaagctctggtcaacgggttgcggatcgccatcgagctaggggtcagacgcctcgacgcccgcggtgattcgcagctcgtcatcgaccaagtcatgaagaactcccactgccgcgacccgaagatggaggcctactgcgacgaggttcggcgcctggaagacaagttcttcgggctcgagctcaaccatatcgctcggcgctacaacgaaaccgcagacgagctggcgaagatagcctcggggcgaacgacggtccccccggacgtcttctcccgggatctgcatcaaccctccgtcaagctcgacgacgcgcccgaggtatcctcggctcagcccgaggtaccctcggctcagcccgaggtaccctcggctcagcccgaggcaccctcggcccagcccgaggtactctcggcccccgagggcggggcattgaacgtcgaggaagggcagagcggggccacgccagaccaggattggcaggccccgtacctgcaatatctccgtcgaggagagctacccctcgaccaagtcgaggctcggcgggtagcgcgacgcgccaagtcattcgtcttgctgggcgacgaagaggagctctaccatcgcagcccctcgggcatcctccagcgatgcatctccatcgccgaaggtcgggaactgctgcaagaagtacactcgggggcttgcggccaccacgcagcaccccgagcccttgttggaaatgctttccggcaaggcttctactggccaacggcggtggctgacgccactagaatcgtccgcacctgcgaagggtgccaattctatgcgaagcggacacacctgcccgctcaggctctgcagacaatacccatcacctggcccttcgctgtatggggtctggacctcgtcggtcccttgcaaaaggcgcccgggggctacacgcacctgctggtcgccatcgacaaattctccaagtggatcgaggtccgacctctgaacagcatcaggtccgagcaggcggtggcattcttcaccaacatcatccatcgcttcggggtcccgaactccatcatcaccgacaatggcacccagttcaccggaaaaaaattcttggatttttgcgaggatcaccatatccgggtggactgggccgccgtggctcatcccatgtcgaatgggcaagtagagcgtgccaacggcatgattctacaagggctcaagcctcggatctacaacgacctcaaccagttcggcaggcgatggatgaaggaactcccctcggtggtctggagcctaaggacgacgccgagtcgtgccacgggcttcacgccgtttttcctggtctacggggctgaagctatcctgcccactgacctggaatacggctccccaagggcgagggcctacaccgagcaaagcaaccaagccagccgagaggaatcgctggaccagttggaggaagctcgggacagggccttactacactcggcgcggtaccaacagtccctgcgacgttaccacgcccgaggggtccggtcccgagaactccaggtgggcgacctggtgcttcggctgcgacaagacgcccgagggaggcacaagctcacgcccccctgggaagggccgttcgtcatcgccaaagttctgaagcccggaacatacaagctggccaacaatcaaggcgagatctacggcaacgcttggaacatcaaacagctacgtcgcttctacccttaa

SEQ ID NO: 116011 - DNA, 5316 bp, Zea mays
  Clone ID: MRT4577_37285C.1
cgcgatctagtcaagctccagatgggcagtctctagcaacctctccaacccgggacggtgctccgtttcgggagtcttgagttcatgtccttcgaccgcagctacgacatgatactccttccaccgccgcgcgacaacgacaatggcgaccgacagcccgcccgccggcggcggaatcgacgacgtcttccccgcgtggcggaagaacaaccttcgagctcgtcccgccttcttccccgccgacggaggggaaggcagggcaaccaaggccaagcaggaggcagcgcctcgtcggctgtcgagcaagtcgacagcgccagcaccccaacggggggcgcaccgggtatcgacttcgcgcttgagacgaagacgagcgccgtctccccgcgacacaccaatcccgagcaagcggacgacgccagcatgctcgcgaaaagcttgctggacgtcaccctcgtacctgagacgacggtgcgatcagttcccgacgtgactttatcgccgctcgtcgaccaagaggtaccgaccgattcccatcccacgtcatttggattcagcctcaacccgcctagcgacctcgctttggcgggcgctctcgtagaggtgagtccaaaccctctggggtttcgcatgcggtcgccttgggaccggctgacggacgtctcgacctacgggccctctgggtccaaggaagacgacgagcccagcatatgttgggatttctctggacttggcaaccccagtgccatgcgggacttcatgaccgcatgtgactactgcctcttcgactgttccgatggtagccgcagcctcggcgacgaggactgcggcccaagccgcgaatgtttccacgtcgatctagggggcccctccgaaggcaatcatctcggcatgccggaggacggtgatctccctaggccggtgccccgcgttgacatcccacgggagctagctgtggtccccgttcaggcggggggccatgacccacagctcgagcaaatccgcggggtgcaggccaggctcgacgagggagcaggagcgcttgagccgatccgccgggacgtcgggcaggcatgggcgggccaacccccggccggagaaatacgtcatctgccccagggcttccagcaccgcgtcgctgatgacgtcagggtcaggtcgccacccgcatctagtggggtcggccagaacctggctgcagcagcgatgcttctccgcgcgatgccggagccatcaaccaccgagggccggcgaatccagggggagctcaagaatctcctggaaggcgctgcggtccaacgggccgagagctctgcctcccgaaggcaggggtacccctcggaacctcatgccgcgacttcccgattcatgcgggaagcctcggtctacaccgggcgcacgcgcaacaccgcgcctgcggccccgggccgcctcggcaacgagcaccatcaccgcgaccgtcgggcccacctcgacgagagggtgcgccgaggctaccaccccaggcgtgggggacgctacgacagcggggaggatcggagcccctcgcccgagccacccggtccgcaggccttcagccgggccatccgacgggcaccgttcccgacccggttccgacccctgactactatcacaaagtactcgggggagacgagaccggaactgtggctcgcggactatcgtctggcctgccaactgggtggaacggacgatgacaacctcatcatccgcaacctccccctgttcctctccgacaccgctcgcgcctggttggagcacctgcctccggggcagatctccaactgggacgacctagtccaagctttcgccggcaatttccagggcacgtacgtgcgccccgggaattcctgggatctccgaagctgccggcagtagccgggagagtctctccgggactacatccggcgattctcgaagcagcgcaccgagctgcccaacatcaccgactcggatgtcatcggcgcgttcctcgccggcaccacctgccgtgacctggtgagcaagttgggtcgcaagacccccaccagggcgagcgagctgatggacatcgccaccaagttcgcctccggccaggaggcggtcgaggccatcttccgaaaggacaagcagccccagggccgcccattggaagatgctcccgaggcgtctactcagcgcggcgccaagaagaaaggcaggaagaagtcgcaagcgaaacgcgacgctgccaacgcggaccttgtcgctgccgccgagtacaagaaccctcggaagccccccggaggtgccaacctcttcgacaagatgctcaaggagccggccgggccacccgcggagggtggcagggcccgcggcgacgacaagaaggaagatcaccaagcgggagagttccccgaggtccacgactgcttcatgatctacggtgggcatgcggcgaatccctcggctcggcatcgcaagcaagagcgccgggagtccgacaagcccatcaccttcgaccaagctgaccaccccgaccacgtgccgagcccggggaaatacccgctcgtcgtcgaccccgtcatcggagacgtcaggctcaccaaggtccttatggacgggggcagcagcctcaacatcatctacgccgagaccctcaggctcttgcgcgtcgatctgtcctccgtccgagcaggcgctgcgcccttccacgggatcattcccgggaagagcgtccagcccctcgggcgactcgaccttcccgtctgcttcggaacgccctccaacttccgaagggagaccctgacgttcgaggtggtcgggttccgaggaacctaccacgcggtactggggaggccatgctacgcgaagtttatggccgtccccaactacacctacctgaagctcaagatgccgggccccaacggggtcatcaccgtcggccccacgtacaagcacgcattcgaatgcgacgtggagtgcgtggagtacgccgaggccctcgccgagtccgaggccctcatcgccgacctggaaagcctctccaaagaggtgccagacgtgaagcgtcatgccggcaatttcgagccagtggagatggtcaaggccgtccccctcgaccctagcggcgacgcctccaagcagatccggatcggctctgggctcgaccctaaacaggaagcagtgctcgtcgactttctccgcgcaaacaccgacgtcttcgcgtggagtccctcggacatgcccggcataccgagggatgtcgccgagcactcgctggatattcgggccggagcccgacccgtcaagcagcctctgcgccgattcgacgaggagaagcgcagagcgataggcgaggaggtccacaagctaatggcggcagggttcatcaaagaggcgaaaggcgtcaagctcaatcccgaaaagtgtgtcttcggggtgccccgaggcatgctcttggggttcatcgtctccgagcggggcatcgaagccaacccggagaagatcgcagccatcaccagtatggggcccatcaaggacttgaaaggcgtacagagggtcatgagatgcctcgcggctctgagccgtttcatctcacgcctcggcgaaagaggtctacctctgtaccgcctcttaaggaaggccgagtgcttcacttggacccctgaggccgaggaagacctcgggaacctgaaggcgctcctcacaaaggcacctatcttggtgcccccagctgccggagaagccctcctggtctacgtcgccgcgaccactcaggtggttagcgcagcgattgtggtcgagaggcaagaagaggggcatgcattgcccgttcagaggccggtttacttcgtcagcgagtgggcggtggagatcatgagcgagacgatctcgttcgctccccggaaagccattaagtcccaggtcttggcggacttcgtggccgaatgggtcgacacccagctgccaacggctccgatccaaccggagctctggaccatgtttttcgacgggtcgttgatgaagacgggagccggcgcaggcctactcttcatctcgcccctcgggaaacacctacgctatgtgctacgcctccacttcccggcgtccagcaatgtggctgagtacgaggctctggtcaacgggttgcggatcgccatcgagctaggggtccggcgcctggacgcccgcggtgactcgcagctcgtcatcgaccaagtcatgaagaactcccactgccgcgacccgaagatggaggcctactgcgatgaggttcggcgcctggaagacaagttctacgggctcgagcttaaccacgtcgctcggtgctacaacgagactgcggacgagctggctaaaatagcctcggggcgaacaacggttccctcggacgtcttctcccgggatctgcatcaaccctccgtcaagatcgacgacacgcccgagcccgaggtaccctcggcccagtccgaggcgcccacggctcaacccgaggtgccctcggctcagtccgaggcaccctcggctcatcccgaggcaccctcagctcgacccgaggcgccctcggttcagtccgaggtaccctcggcccccgagggtgaggcactgcgcatcgaggaggagcaaagcggggtcacgcctaatcgaaactggcagaccccgtacctgcaatatctccaccaaagagagctacccctcgaccgagtcgaggctcggcgggtggcgcggcgcgccaagtcgttcgtcttgctgggcgatgagaaggagctctaccaccgcagcccctcaggcatcctccagcgatgcatctccatcgccgaaggccaggaactcctgcgagagatacactcgggggcttgcggccatcacgcagcgcctcgagcccttgtcgggaatgccttccgacagggcttctactggccgacggcggtggccgacgccacaagaattgtccgcacctgcgaagggtgtcaattctacgcgaggcagacccacctgcccgctcaggctctgcagacgatacccatcacctggccttttgcggtgtggggtctggacctcgtcggccccttgcagaaggcacccgggggctacacgcacctgctggtcgccatcgacaaattctccaagtggatcgaggtccgacccctgaacagcatcaggtccgagcaggcgatggcgttcttcaccaacatcatccatcgcttcggggtccggaactccatcatcaccgacaacggcacccagttcaccggcagaaagttcctggacttctgcgaggaccaccacatccgggtggactgggccgccgtggctcatcccatgacgaatgggtag

SEQ ID NO: 116012 - DNA, 3289 bp, Zea mays
  Clone ID: MRT4577_37286C.1
atgcccggcataccgagggaggtcgccgagcactcgctggatattcgggccggagcccgacccgtcaggcagcctctgcgccgattcgacgaggagaagcgcagagtgattggcgaagagatccacaagctaatggcagcggggttcatcaaagaggtattccatcccgaatggcttgccaaccctgtgcttgtgaggaagaaaggggggaaatggcggatgtgtgtagactacactggtctcaacaaagcatgtccgaaggttccctaccctctgcctcgcatcgaccaaatcgtggattccactgctgggtgcgaaaccctgtccttcctcgatgcctactcagggtatcaccagatccggatgaaagagtccgaccagctcgcgacttctttcatcacgccgttcggcatgtactgctatgtcaccatgccgttcggtttgaggaatgcgggcgcgacgtaccagcggtgcatgaaccatgtgttcggcgaacacatcggtcgcacagtcgaggcctacgtcgatgacatcgtagtcaagacgcggaaggcttccgacctcctctccgaccttgaagtgacattccggtgtctcaaggcgaaaggagtcaagcttaatcctgagaaatgtgtcttcggggtcccccgaggcatgctcctagggttcatcgtttccgagcgaggcatcgaagccaacccggagaagattgcagccatcaccagcatgggacccatcaaggacttaaaaggggtacagagggtcatgggatgcctcgcggccctgagtcgcttcatctcacgcctcggcgaaagaggtctgcctctgtaccgcctcttaaggaaggccgaatgtttcgcttggacccctgaggccgaggaagctctcggcaacctgaaggcgctccttacaaaggcgctccttacaaaggcgcctatcttggtgccgccggcggacggagaagccctcttggtctacgtcgccgcgaccactcaggtggttagcgccgcgattgtggtcgaaaggcaagaggaagggcatacattgcccgttcagaggccggtctacttcatcagcgaagtgctgtccgagactaagatccgctacccgcaagttcaaaagctgctgtatgctgtgatcctgacaaggcggaagctgcgacactacttcgagtcccatccggtaactgtggtgtcatccttccccctgggggagatcatccagtgccgagaggcctcgggcaggatcgcgaagtgggcggtggaaatcatgggtgaaacgatctcgttcgcccctcggaaggccatcaagtcccaagtgttggcggatttcgtggccgaatgggtcgacacccaactgccaacgaccccgatccaaccggagctctggaccatgtttttcgacgggtcactgatgaagacgggggctggtgcgggcctgctcttcatctcgcccctcggaaagcacttgcactatgtgctgcgcctccacttcccggcgtccaacaatgtggccgagtacgaagctctggtcaacggattgcggatcgccatcgagttaggggtcagacgcctcgacgctcgcggtgattcgcagctcgtcatcgaccaagtcatgaagaactcccactgccgcgacccgaagatggaggcctactgcgatgaggttcggcgcctggaagacaagttcttcgggctcgagctcaaccacatcgctcgacgctacaacgaaaccgcagacgagctggctaagatagcctcggggcgaacgatggtccccccggacgtcttctcccgggatctgcatcaaccctccgtcaagctcgacgacacgcccgagcccgaggtaccctcggctcagcccgaggtaccctcggctcagcccgaggtaccctcggctcagcccgaggtaccctcggctcagcccgaggtaccctcggctcagcccgaggcaccctcggcccccgagggcagggcactgaacgtcgaggaagggcagagcggggccacaccggatcgagattggcgggccccgtacctgcagtatctccgtcgaggagagctacccctcgaccaagtcgaggctcggcgggtagcgcgacgcgccaagtcattcgtcttgctgggcgacgaagaggagctctaccatcgcagcccctcgggcatcctccagcggtgcatctccatcgccgaaggtcgggaactgctgcaagaagtacactcgggggcttgcggccaccacgcagcgccccgagcccttgttggaaatgctttccggcaaggcttctactggccaacggcggtggctgacgccactagaattgtccgcacctacgaagggtgccaattctatgcgaagcggacacacctgcccgctcaggctctgcagacaatacccatcacctggcccttcgctgtatggggtctggacctcgtcggtcctttgcagaaggcgcccgggggctacacgcacctgctggtcgccatcgacaaattctccaagtggatcgaggtccgacctctgaacagcatcaggtccgagcaggcggtggcattcttcaccaacatcatccatcgcttcggggtcccgaactccatcatcaccgacaacggcacccagttcaccggcaaaaaattcttggatttttgcgaggatcaccatatccgggtggactgggccgccgtggctcatcccatgtcgaatgggcaagtagagcgtgccaacgacatgattctacaagggctcaagcctcggatctacaacgacctcaacaaattcggcaagcgatgggtgaaggaactcccctcggtggtctggagcctaaggacgacgccgagtcgtgccacgggcttcactccgtttttcctggtctacggggctgaagctatcttgcccactgacctggaatacggctccccgagggcgagggcctacaccgaacaaagcaaccaagctagccgggaggaatcgctggaccagctggaggaagctcgggacagggccttactacactcggcgcggtaccaacagtccctgcgacgctaccacgcccgaggggtccggtcccgagaactccaggtgggcgatctggtgcttcggctgcggcaagacgcccgagggaggcacaagctcacgcccccctgggaagggccattcgtcatcgccaaagttctgaagcccggaacatacaagctggccaacaatcaaggcgaaatctacggcaacgcttggaacatcaaacagctacgtcgattctacccttaagatgttttcaagttgttcatatacc

SEQ ID NO: 116013 - DNA, 363 bp, Zea mays
  Clone ID: MRT4577_37287C.1
caagatggaagcggttgggatgggaatttggaggacggggatgatacaattgaatcagaattcagaaggctagtagatgatctacacacttatcacgagcttggcgcggatccttctttctccttcttgcttgtcgtcgtcgtcgtggctggggcgacactgctactacttgcactagcactggaaataatacttgcaggaggagccggcgtggcggtctgctgtcgttgtggttcatctgcagatggcgatggttcgtcgtcgtcctcgtcatcaccaccgccggcccctgacgacgtcccggcggcctctgcagttacaacaggaggcggggcgaccggaggcgcggtggggctcccgcgc

SEQ ID NO: 116014 - DNA, 809 bp, Zea mays
  unsure (1)..(809): unsure at all n locations
  Clone ID: MRT4577_37288C.1
ccggccggggttttagaggcggcggcggttccctcgagcatgcgagtggcggcaatccctggggcgagcgacggtggtgcctcgaggcgggcgactggtggcggtgctcccccatgaccgaggacggcagcgcaccccagggctggtgacgacgtcaggaggcgtggtaggcttccacagcggtggtggcggccatgggagacgcaggtggctccggcggtcgcgtgagacatggtcgtctctagncgatgnnngtggcctactacgaggcgtgggtggctctggcgtccttcgatgaccaactcctccaatccggttgcctcggcggcatcctccagcgacgacccctttcatcctttgtttatgcatgcagttgttggtttgagccctatactaaagatttttttccgnttaaattatggatggactgggtatgtatttatgccacctttctggaaatgattttatggctttttgggcgaaaattcaaaccccagaatagaaaagttttttttcgggggatatttttcttgggggaaaaaaaaaaaaaaaaagtttttctggcaaaaaaaaaaaaaaaaaaagggagggcccccccccccccccccttttttttttcttttttctttggggggggttttttccgccccgggggaaaaaaaaaaagaaaaaaaatttttttttgtcggggaaaaaaaatattttttttcccttnctcccacccccaacaaaaaaaaccggggggaaagaaaaaaaaaaaaaaaaaacagaggggggggggggcggtttttttggtccccccccccccc

SEQ ID NO: 116015 - DNA, 353 bp, Zea mays
  Clone ID: MRT4577_37289C.1
acgctcaggtcaaactatcagcacgtgctatgttttcttaccccttgattcacggcgtcaatatgttggcgatctctgcgagggatgcaaccatgttagatgaatgcaaacaagagatctagctaatgcctgcacggatcaacaatgtaaaacgcaagctctactacagattgtctctcaagctcaagaacacaaagaactggtctaccattctaagccatatcttcactttctcatacacgcgaatgaacaaaacgcatagtgacaacatgacggataaatggcttatttacatgaccaatgatggactgaaattgtagctcgactgttactgtctaaatgtgattatctag

SEQ ID NO: 116016 - DNA, 411 bp, Zea mays
  Clone ID: MRT4577_3728C.1
cccacgcatcccgtactttagaagctctccagaaaagtatctaagttgattctagctaaagcccttcccttgattcctatttaaccagtttatgcttgagaggcattttaccttaggcgggtaaggctggacaaagtacaatacgttgagtaagacgtgtgaacccacgccggcgaaggtgttgagaagtactccccccgtgcctgaggctggagggcacctccatttttggcaggaggatgaggtaggcttgagtataacctgtggagggtaactaccttgctgatatcgaaatagagcatgcactgggagtatatcaggacttggaagaaaagtaactgtcgctatgtaataagcggcagttcgagaaatgtaaagacagtcgcagaaaaaaaaaactaaagggaggcc

SEQ ID NO: 116017 - DNA, 1013 bp, Zea mays
  Clone ID: MRT4577_37290C.1
tcgaggccggccgggacgccagaacaggagggagagagactgaaatctggctgtggggagaagcccgcagcctcaccctgcactgcagccagcgacggcgcgagtccttgcgtgcgtctccctccatcccaccctctagctttgctataatcagtgccagcaatatcacacgccgtgaagtcggcgctggtgcgcgccggatacgggggcgtggacatcgtggtggccgagacggggtggccgaccaggggcgacgccggggagcccggcgccacggtggagaacgccagggcctacgtgtccaacctggtggcgcacctgcggtccggcgccggcacgccgctgatgccggggaggtcggtggacacgtacctgttcgcgctgtacgacgaggacctcaagccggggccgacgtcggagcgctcgttcgggctgtaccacacggacctgaccatggcgtacgacgccgggctgacctccaactccaacgccgggggaggtacaggtactgcggcgccggcgcagcccaaggcgggcgggtggtgcgtggaactgcgacttccgggcgtccgccacgctcacctccgagaacccaagctacggcgcatgcgtgtacaccgggggaggccaataatacaccgcgtggcagcgcacgattagttttgcgtgtaccatgcatgatgccgagcgagggaagttgggcccacaggctacagcaaggaggtctggactaccatggatgccaatgcgatccacggaggcgaagcatcctcttgtttggcgcgtcctttccagatgccttgcctgccaggctgggatgtgtttgtaacttcgtgtaaaaagaactgttagatgtttgccagtgtcacgtgatctttgtgcatatagtacgcgtgtcttaatttacaagtggaatgagattgtatgtgtgattaatttttttaaataatgttttatatataaaaatgttagaatatagtataaatgaattgtctgtatcctcctattaactt

SEQ ID NO: 116018 - DNA, 2337 bp, Zea mays
  Clone ID: MRT4577_37291C.1
atgctcttggggttcatcgtctccgagcggggcatcgaagccaacccagagaagatcgcagccatcaccagcatggggcccatcaaggacttgaagggcgtacagagggtcatgggatgtctcgcggctctgagccgcttcatctcacgcctcggcgaaagaggtctgcctctgtactgcctcttaaggaaggccgagtgcttcacttggacccctaaggccgaggaagccttcgggaacctgaaggcgctcctcacgaatgcgcctatcttggtgcccccagctgccggagaagccctcttgatctacgttaccgcgaccactcaggtggttagcgccgcgattgtggtcgagaggcaagaagaggggcatgcattgcccattcagaggccagtctacttcgtcagcgaggtactgtccgaaaccaagatccgctacccacaagttcagaagctgctgtacgcggtgatcctgacgcggcggaagctgcaacactacttcgagtctcatccggtaactgtggtgtcatcctttcccctgggggagatcatccggtgccgagaggcctcgggtagaatcgcaaagtgggcggtggaaatcatgggcgaagcaatctcgttcgcccctcggaaggccatcaagtcccaggtcctggcggacttcgtggctgaatgggtcgacacccagctcccaacagctccgatccaaccggagctctggaccatgttcttcgacgggtcgctgatgaagacaggagccggtgcaggcctactcttcatctcgcccctcgggaagcacctacgctacgtgctacgcctccatttcccggcgtccaacaatgtggctgagtacgaggctctggtcaacgggttgcggatcgccatcgagctaggggtccgacgcctcgacgctcgcggtgactcgcagctcgtcatcgaccaagtcatgaagaactcccactgccgcgacccgaagatggaggcctactgcgatgaggttcggcgcctggaagacaagttctacgggctcgagctcaaccacatcgcccggcgctacaacgagactgcggacgagctggctaaaatagcctcggggcgaacaacggttcccccggacgtcttctcccgagacctgcatcaaccctccatcaagatcgacgacacgcccgagcccgaggcaccctcggcccagcccgaggtaccctcggctcagtccgaggcatctttggcacggcccgaggcaccctcagcccggcccgagccaccctcggttcagcccgaggcaccctcggcccccgagggcgagacgctgcacgtcgagggggagcgaagcgggatcacgcctaatcaaaactggcagaccccgtacctgcaatatctccaccgaggagagctacccctcgaccgagccgaggctcggcagttggcgcgacgtgccaagtcgttcgtcttgttgggagacgggaaggagctctaccaccgcagcccctcaggcatcctccagcggtgcatctccatcgccgaaggtcaggaactcttacgacagatacactcgggggcttgcggccaccacacagcacctcgagcccttgtcggaaatgccttccgacaaggtttctattggccgacggcggtggtcgacgccactagaattgtccgcacctgcgaagggtgtcagttctacgcaaggcagacccacctgcccgctcaggctctacagacgatacccatcacctggcctttcgctgtgtggggtctggaccttgtcggccccttgcagaaggcacccgggggctacacgcacctgttggtcgccatcgacaaattctccaagtggatcgaggtccgacccctaaacagcatcaggtccgagcaggcggtggcgttcttcaccaacatcatccatcgttttggggtcccgaactccatcatcaccgacaacggcacccagttcaccggcagaaagttcctggacttctgcggggccgccgtagctcaccccatgtcaaatgggcaagtagagcgtgccaacggcatgattctgcaagggctcaagcctcggatctacaacgagctcaacaagttcggcaagcaatggatgaaggaactcccctcggtggtctggagtctgaggacaacgccgagccgagccacgggcttcacgccgttcttcctagtctacggggccgaggccgtcttgcctacagacctggaatacggctccccgaggacgagggcctacaccgaccaaagcaaccaagttagccgagaagactcgctggaccagctggaggaggctcgggacaaggccttgctacactcggcgcggtacctgtag

SEQ ID NO: 116019 - DNA, 249 bp, Zea mays
  Clone ID: MRT4577_37292C.1
ggggggggaccaaaaaactttttccaatttgtccataagcaagcttaaggctaacatgcccaacggggtctggtttgaatactctggaagccatctctactaaggggtttggaactattttttttgggaacagaaaaagtcctacgtacaagagacgctttagccctttagccccaccaatttttagcaggtactaatgcctattggaaggcacttttacttgccttggctttgggccatcctcggaaa

SEQ ID NO: 116020 - DNA, 388 bp, Zea mays
  Clone ID: MRT4577_37293C.1
gcagtaggcggaaagactctgccttgcaccctgcactgcagccacagcgacgctgcgagtccttgcgtgcgtctcccgccctcccaccctctcgccttgctttcctcagcgccttcgatctctctctcccctcgcgtcctccccggccgccgccgcgtcctgggccgccgccaacatccccaccacgcttcccgtctcctccatctccgtcggaaacgagctgctcaactccggcgaccccacgctcgcgcctcagctcctccccgccatgcagaacctgctcgccgcgctcccggctggctcgaccaccaagatctccaccgtgcactccatggccgtgctgtcggcgtcggacccgccgtcgtccggcgcgttccacccggacctc

SEQ ID NO: 116021 - DNA, 245 bp, Zea mays
  Clone ID: MRT4577_37294C.1
cccctcctcgcgtttttttttttttttttttttttttttttttttttttttttttttttttttgtttcctatttgattccttcacagctgcaacagtacagagccctgattggattcaaaggagcattcagggaggaagtttactatttattcattctaagagggggggcaagagagccagagaaaaccaacaccctcattcaacaaaactaaacatggaggagccgggggcccaaaaaccggaa

SEQ ID NO: 116022 - DNA, 666 bp, Zea mays
  Clone ID: MRT4577_37295C.1
cggacgcgtgggcggacgcgtgggcggacgcgtggggtcggtggacacgtacctgttcgcgctgtacgacgaggacctcaagccggggccgacgtcggagcgctcgttcgggctgtaccacacggacctgaccatggcgtacgacgccgggctgacctccaactccaacgccgggggaggtacaggtactgcggcgccggcgcagcccaaggcgggcgggtggtgcgtggcgcgggacggcgcttcggacgcggagctgcaggcggacctggactacgcgtgctcgcaggtgggcgtcgactgcggcgccatccagcccggcggcgcgtgcttcgagcccaacacggtgcacgcccacgcagcgtacgccatgaaccagctgtaccaggcggccgggcggcaaccgtggaactgcgacttccgggcgtccgccacgctcacctccgagaacccaagctacggcgcatgcgtgtacaccgggggaggccaataatacaccgcgtggcagcgcacgattagttttgcgtgtaccatgcatgatgccgagcgagggaagttgggcccacaggctacagcaaggaggtctggactaccatggatgccaatgcgatccacggaggcgaagcatcctcttgtttggcgcgtcctttccagatgccttgcctg

SEQ ID NO: 116023 - DNA, 700 bp, Zea mays
  Clone ID: MRT4577_37296C.1
gcttgcatctgttgtaaatagtttgaaatccaagaaataaaaattcaaaaaatactaaaatatggcttagaaataaagagtggtatttagattcattcgcatcccttcttcctctatattatattccttcgtactatagcatctgaaacatgaatcctaggtggccagtactaggcgcctggcttcaagatgcgcattgaaccagaagccttctgtgtactggtgaaaacagctgatttcatccacgccggcgacggcgagccccgtcccacggcgccgcttgccttgcgtaccgcgcggagaaggagcgcgacaggttctcgggctccctcgccgcgccgccctcgtcgaagttctgcgcgtactcctcgtgcccgtactgctgctccttcaccgacgatccggtccggctgatgaccaccttcctcctgcccctagcgatccacgcccacagcgcgcggaccaccgcccccacgccgcctgctgttggccggggcgcgcgccagccgagctcgccgtcgccgtcgccgtcgccgccccccgctaggtttcttcgccatccgtggccgccgcctccggagccgcatgacgcgaaggtggccgcgagggcgggcggcatggacatctgcctcctgagctcgtgtgctgcgacgggcatgtacgggcttgaggcggcgccgccggacgcgggggggacgct

SEQ ID NO: 116024 - DNA, 2612 bp, Zea mays
  Clone ID: MRT4577_37297C.1
atagttttgcgtgtaccatgcgtggtggtaactctactgcggtgacgatactgtaggggaggtcctgcggcaaaatagctcgatgccgggaacacacagctcgtgcaggcagattccagatatacgcgcgcgcgaaagacacacggtgaccagggggtcgactgcgcgtacaacgccttggcgtcgttgccacgcccacggccgggccaccggcacggtgtcgccgcgcgcttttccgtcttctattccacgcagtaggcggaaagactctgcccgcagcctcaccctgcactgcagccagcgacggcgcgagtccttgcgtgcgtctcccgccctcccaccctctcgccttgctttcctcagcgccttcgatctctctctcccctcgccactggtagccatatttggtggcagcgagcaccgagcagcgcgtcggcatggggatgaggaggcggcaggacgctgctgccatcttggggctcctgaagctcttcctcttccgcttggcggcgtcgcagtcgttcatcggggtcaactacgggacgatcgcggacaacctgccgccgccggcgtcgacggccagcctcctcatgtcgacgtccatcgccaagctccgcctgtacgagccacagccggacctggtcgcggcgctcgcgggctccaacatctccatcctgctgggcatacccaacggcgccgtcccgaacctcgcgtcctccccggccgccgccgcgtcctgggccgccgccaacatccccaccacgcttcccgtctcctccatctccgtcggaaacgagctgctcaactccggcgaccccacgctcgcgccccagctcctccccgccatgcagaacctgctcgccgcgctcccggctggctcgaccaccaagatctccaccgtgcactccatggccgtgctgtcggcgtcggacccgccgtcctccggcgcgttccacccggacctcgccggcagcctggacccggtgctggacttcctgcaccagaacggcgcgccgttcatgatcaacccgtacccctacttcgcgtacgcctccgacacgcgcccggagacgctggccttctgcctgttccagcccaacgcgggccgcgtcgacgccgtgtcagggctcacctacaccaacatgttcgacgcgcagctggacgctatccgcgcggcgctggacgccaaggggtacagcgacgtggagatcgtcatcgccgagaccgggtggccgtacaagggtgacgccgacgaggccggcgccacggtggacaacgccaaggcctacaacagcaacctcgtggcgcacctcaagtcccaggtcggcacgccgcggacgccaggcaagtcggtggacacgtacatcttcgcgctctacgacgaggacctcaaggggggcccggagtccgagcgctccttcgggctgtacaagactgacctgacggcgaactacgacgtcgggctcgcaaaagacaacggcacggcggccccgaccagcttgactccggttccggcacagggcacgccgcagccgagcaaagggacgatgccgacggggtactgcgagaccacgtccgccgtgcccggcaccacgcaaggccaacagttgccgcagagcagctcgtgctacattcccggcggactgagtcgcggcacgccacatggcagcttgttttattgggtgttttgatgtgcttggtcaaggtagccggcatctagttacaacatctgtgtgcgacggaacgagtacagggttcgctctccacagttgtgcgtatggattcaccactgtaatagaattcacgaaagctgctaggcacgatcgaatgttgagccacacggttgcactgctttggcctctccagtccgaacgccgggggaacaggtactgcggcgccggcgcagcccaggcgggcgggtggtgcgtggcgcgggacggcgcttcggacgcggagctgcaggcggacctggactacgcgtgctcgcaggtgggcgtcgactgcggcgccatccagcccggcggcgcgtgcttcgagcccaacacggtgcacgcccacgcagcgtacgccatgaaccagctgtaccaggcggccgggcggcaaccgtggaactgcgacttccgggcgtccgccacgctcacctccgagaacccaagctacggcgcatgcgtgtacaccgggggaggccaataatacaccgcgtggcagcgcacgattagttttgcgtgtaccatgcatgatgccgagcgagggaagttgggcccacaggctacagcaaggaggtctggactaccatggatgccaatgcgatccacggaggcgaagcatcctcttgtttggcgcgtcctttccagatgccttgcctgccaggctgggatgtgtttgtaacttcgtgtaaaaagaactgttagatgtttgccagtgtcacgtgatctttgtgcatatagtacgcgtgtcttaatttacaagtggaatgagattgtatgtgtgattaatttttttaaataatgttttatatataaaaatgttagaatatagtataaatccattgtctgtaaaaaaaaaaaccaagggcggccgcttgcgatttaaaaaaaaaagggttggttgaa

SEQ ID NO: 116025 - DNA, 388 bp, Zea mays
  Clone ID: MRT4577_37298C.1
tgcccgcggacgtaagctcggaattcggctcgaggaaactggtacctacagatggatggcacctgaggtaataaaccataagccgtacgatcacagggcagatatcttcagctttgctgtggttctgtgggagctggtcacttcaaagggaatgcggttggagatcccgtcatgggtcaatccacaactgtctaaactgattcagcgttgctgggacgaaaatcctaacctgcgcccctctttctcagagatcactgcagagctggaaggcatgttaagggatcatcaggcctccaagggaagcaacaaacattcgaaggcaaaggcacacaaaaaatcgcagagagaggcagaataacgaggttgtcagttaccaccttgtgaaaag

SEQ ID NO: 116026 - DNA, 749 bp, Zea mays
  Clone ID: MRT4577_37299C.1
gtacccccgggcctgcctcggcctatccccactccctcaccatgtctcctccaccgcgcctctccctggccgcccacggaagctcgccggccgttcctgctcttccttccgcgtcggcgccttgtcccctccctgctcgcctcgacaaggtcaggtccggccgtcacttccccaaggccgctcgaatctcgcctagctcggcctcccatcacaccgttcccccacgcactgctccaagtccggccgccggtcatgctccttccctcgacgtcgaactgcgccccgtgccctgcttcgatcggacgctgcgcgtcgtcttccgccatccagcatcgtgcccaggcccccctcatctccctcaagtctggccacgccgcgcctctggtcaccgtcgctcagtctctcggcgtgtgtccttatctgtccgtggagccacttgtgccgccgtcgactcaccagcctcaccatcgcgccctctctctgtgccctcacgggcccgctggagctcgccggccgccaccacctcaccggtgctgttctccggccgtggctcatatgcgccaagtccgtgcggttcgttgccgcaccttgcagccattttcagaacgtcgtcatagggacttctctgcgtcacgtgtgcttcttctcgtcgtgctcaaccgatccgtttctaccgttctgcgtcacgtgtgcttcctctcgtcgtgctcaaccgatccgtttctactgtcggttctactgtatcgaca

SEQ ID NO: 116027 - DNA, 375 bp, Zea mays
  Clone ID: MRT4577_3729C.1
tcgtacagaaaactctagccgtcgtcacctaagcgtccttccatgtaagcatagagcgtccaccccgccgtcgtcatgaagcgcaatccccgcgtcacgagctctcgccggaagtgccgcaaggcgcacttcacggctctgttctacgttcggcgcgttctaatgttcgtcgtgctgtctacggagcttcgtcacaagttcaacgtgcgctccatcccgatccgtatggacgacgaggtgcatgtcgtgcgcggcacctatcatggccgagaggtgaaggtggtgcaagtgtaccgtcgactgtgggtcatccacgtagagcggatcatccgcgagaaggtgaacggctgcaccgtgaacgtgggcattcaccct

SEQ ID NO: 116028 - DNA, 293 bp, Zea mays
  Clone ID: MRT4577_372C.1
gcaccgccccggaaccccgggggcgacccacgcgccctccgacccgagagcaggcgcaagggaagagaggggcacaaaaacacgggccggcgacaccccaagccacacagagaggagaaaaaaagccaccaaggcgacggagcgcgcccgaggacacacaggcagcaccagagcgaagcgcacacacagaacaagggaaggcaggaccccgccccaaaaccaaagcggaggcgccaaaacaccacgaccccccccaccaagcaccaggccagccgcacggagacaaggcccgg

SEQ ID NO: 116029 - DNA, 212 bp, Zea mays
  Clone ID: MRT4577_37300C.1
aaattcctaaacttactagagccagggggatacatcggctggaaactaagaggtttgggaaaccagaaattggttcggacttagccctagacagaacatcacgaacagcacaatttattgcagtgaggacactcggcatggttatggcttagggcttttggctggcgggcatttaaggcgcggccagggccccgttacaggggatggcagga

SEQ ID NO: 116030 - DNA, 1588 bp, Zea mays
  Clone ID: MRT4577_37301C.1
aaaggttgtgggtgactatgtggccggttcttcgaggggagaatgtagaaatcctccgatgttcaaaatgcttttttttaccatgacaaaccaaagctcctcgctcagctatctgctttgttgtctgaagttggactgaacatccgtgaagctcatgtcttctcaacgactgatggcttttgtttggatgtatttgttgttgatggctgggatacaaaggaaacagatactttgctacagattctcaaggagacagcggcacgaaatcatgcctcattatcaaacccaaccaattctgcagcctcagaaagagtactggaactacaagagaagattggtgattcaaatattgacaggaattttctgcagattggggagaagattgcatctggatcttccggggacttgcatcgaggaacttatcaaggtatggatgttgcagtaaagttcctcagaaccgaacatgttaatgactcgtcaaaggtggagtttttacaagaaataattattctaaagagtgttaatcatgataatgttgggcgattctacggggcatgcacaaagcagagaaaatatgtcatcgtgacagagtatatgcctggaggcaatctgtatgattttcttcacacgctaaaaaatactttggatctcccaacggttctcaggattgctatcggcatctccaaggggatggattatttgcaccaaaataacatcatccatcgggacttgaagactgccaatttgcttatgggctctgattatgttgtgaagattgcagactttggagtctcaaggaatccatctcaaggtggagacatgactgctgaaactggtacctacagatggatggcacctgaggtaataaaccataagccgtacgatcacagggcagatatcttcagctttgctgtggttctgtgggagctggtcacttcaaagataccatacagaaatctgacacccttgcaagctgcactgggagtaaggcagggaatgcggttggagatcccgtcatgggtcaatccacaactgtctaaactgattcagcgttgctgggacgaaaatcctaacctgcgcccctctttctcagagatcactgcagagctggaaggcatgttaagggatcatcaggcctccaagggaagcaacaaacattcgaaggcaaaggcacacaaaaaatcgcagagagaggcagaataacgaggttgtcagttaccaccttgtgaaaagcttagtggagcttggctatcatcgtccaagattctgaggctactacaaagatgctgctagtgtacaattgtcaaatattgtatatgattggtgtgtgtgtgtgtttctattactcccaaaaacactatatacgggagaagcgtcgacaatacagcgggacaagcaaagacacggaatccttgtacaaaatggcttgcaagcagcataaaatgccctctagtttttgtatacaaaacatgaaaaatatatgtgcatgaaccgtgcgtgcttcctgtgataaaaaaaaaaaagcggccgtatctccatgaatcctgttctttgattctacatctcctgccaaagttacatttcttct

SEQ ID NO: 116031 - DNA, 1582 bp, Zea mays
  Clone ID: MRT4577_37302C.1
ccgcccacgcgtccgcggacgcgtggggacgacggcaacggcggtggcggtggcggcaaggagacctccacgccgtcccgcctgcgcaagctgctgcagtccatcagcttcaacgagagggtgcagcagctaacgggcggcagccccgcgaagaagaagtccaccgtcattcgcctctcgtacaagacgacgtcgtcgtgcggcggggacgactacgaggacggcggcggcggcggaggcggcgaatgcggtagatctaagaagtacgttgttcgtccgaaggtagggcagacagtcccgtgcggaggagagaggccggcgacgggatgctggtcgcggatggacccgtccctcttcaagctcaggagcgacaccttcctaaaagacaagaagaaatgcgcggctccaaactacgctgcctactatccgataggcgttgacctgtttgcctgccccaagaaggtccatcacatcgcccagcacctcgaccttccgcagatcaagacgcaccccaagatcccgtcgctcctcatcgtgaacatccagatgcctacctaccccgctactatgttcctcggcgacagcgacggggaaggcttgagcctcgtcctgtacttcagggtgtccgaatgctacgacaaggaggtttccgaacatttcaaggagtctatgatgaggtttttcgaggacgaaaccgagaaggtgaaagggttcacgtcagaatccactgtgagctacagagatcggctgaagatcatggccggcctggtcaacccggacgacctccagctgggctctacggagaggaagctcgtccaggcgtacaacgagaagccagtcctctcgcggccccagcacagcttctacgagggagaggactaccttgaggtggaccttgacatccaccggttcagctacattgctaggaaggggctggactcgttcagggcacgcctcaagaacggcatcctcgatctggggttaacgatccaggcccagaagcagtcggagctccctgagcaggtcctctgctgcgtcaggttgaacaagatcgatttcactgaccaagaagttccaacaatagtcaccgttgatgacacctgacgcatttgatcaaaatggtcatcagacgtgcgagctattattaactgctgcaaggctagatccatgggattcagaggcgacacaagaactgatgactccacgccttggtttctgcctaatatgttcgccgatctgcctacttttaagcacgggctttttcttgtcttccctgtaactataatataataatgtatattatatacaagacgatacaaccctgcgggtgttggtcatgttcctaacctttttgcacactccacttgctggttgcaatatgcctgcttccagatgcagaaagacattgaacctgacaatattcaaatgcccatgcatcagacggacatgtacatccataataggattttgacagaaattgcggcgggtgcgcctgttgtaagcttttgttccggacattccggtattaaaagcaaaggtaacctgtttccggaaaagcgaaacaaaataaaggatccagaca

SEQ ID NO: 116032 - DNA, 368 bp, Zea mays
  Clone ID: MRT4577_37303C.1
gccgcgatctcggcgggcgtgccgacctgcggcatccgcccgcagcgcggcgccagcgtcaggaggggcagcgcgtgccgcagcctctggaacagccgggccggccgggacgacgagcccgcctggtgccgccgccgcgatggcggctcctccagcgtgtggcccggtgtgcgggcctgctggccgcggacgccgttgtcgtcgagggaggaggcagacgaggacgtcgtcgacctcccggtgccggcggacggcaggctgtcgctggggcgtccatgggcggggtggatagcgaagccgcccatagacgcgcgcgcgacggccggcggcgaggtgtccggcgacgacgaacgaccggtggatgcgat

SEQ ID NO: 116033 - DNA, 369 bp, Zea mays
  Clone ID: MRT4577_37304C.1
atggtggatcagggatggagaaatcttacaatggttacgcagtgcctgaccctattcacggcgtgcggcggatctcgtgtccaatggcaaaattccggtcgttccacaggtcgccccttccttccccggccacgagcgcactctacacaatgccgcgaatctcccaggcccccgcggaaccaccgaacaccggctgaggccgagggcggctaccgacaagatgttcaggcgcagcgtcggatgtcaaagtggacgaggaaagtcagctgggcgtggcgtgctatttgtagggcggctaacacggcgtccatgatcgggtcgtacgccgcgcggttcggagggtccggccacccgcagctccggcgttga

SEQ ID NO: 116034 - DNA, 164 bp, Zea mays
  Clone ID: MRT4577_37305C.1
aacggtgacattactgaaacacctgtaccacagtcatacattctgggctatataaactactgcctggtgttatgccaactaattattaaaccttgtgtgaatgaccttggcccaagaagcaatcatggttacatttattaagcatagtcccacatttaacactt

SEQ ID NO: 116035 - DNA, 193 bp, Zea mays
  Clone ID: MRT4577_37306C.1
ggtgaccgcagaatacttgcttcttcctcttgagagaggagggctgcagactgcaggggccggtatagagcagaggaggcggtatcatgggtagcttcactaagctggcaaggagggcggaagagacagacgctccggccatggatgaaatacaagaactgctcacaggagaccaaggattaagatgtcaata

SEQ ID NO: 116036 - DNA, 1037 bp, Zea mays
  Clone ID: MRT4577_37307C.1
attaccgacgaccaactccaggagtatcatagaattaaggaggatgcaggaatgaagacagcaaagctaagagatgaaaaagaagttatagaaaaaaaattaaatgctgatgctgaagcaaaaaagaatttagtggagaacatgcagcagctggaaagccgtaaagatgagatatcatcacaagaacgtgaactgcagacaaaacttagcaagattctccattctattcccaagcttgaaaatgagctcacacacttgcatgaggaacacaacaaaattgcaaaggaacgccaatcttcaggatctgaataccaaatgctgaagcagagattggatgaaatagaaacacaactacgggagcttaaagctgacaaacatgaaagtgagcgtgatgctcggttaaaagaaaccgttggacgtctaaagcggctattccctggagtccatggccgcatgcttgaactttgcaggccctcgcagaagaaatataaccttgctgttactgttgccatgggaaagttcatggatgcagttgtagtggaagacgagaacactggaaaggaatgcattaagtatctgaaggagcagcggcatcctccgcagacatttattcccttgcaatcagtccgtgtgaagccgataattgagaagctgcgaactcttggtggatctgcacagttagtttttgatgtcattcattttccccgtcttttggtgggcgccgcgctccttgctgtgggaattacacttgtctgtgtttatcttgttggaccgatggccttttgtgggcgtgctgataggttgatagttgttactgtcgatgggattctgctgactaaatctggcacaatgactggtggaacaagtggggggatggaagctagatcaacaaatgggccgacagcacaatagaatctttgaagaaagaagaaaatctgttggaaaataaaatgtcagaacttggttcccccaaggagttgcagagaaaagagctgccatatctgagaaaaaactggacttgagaaaaattgcactac

SEQ ID NO: 116037 - DNA, 1017 bp, Zea mays
  Clone ID: MRT4577_37308C.1
cgggaaaaaaaaaaaaaaaaaaaaaaaaaacctcctcactcctcagactcctctccgcacacaccctccctacctcgccgtcgccgtcgcatctgccatgggggcgtacaagtacgtctcggagttatggagaaggaagcaatccgacgtgatgcggttcgttcaacgcgtgcgctgttgggagtacaggcagcagccggccatcgtccgcctcacaaggcccacccgccccgacaaggcccgccgcctcggcttcaaggccaagcaggggtatgttgtttaccgcgtccgtgtgaggcgtggtggcaggaagaggcctgtgccgaagggtattgtctatggcaagcccaagcaccagggtatcacccagctcaagttccagaggaacaagagatctgttgctgaggaacgggctggacgaaagcttggtggactcagggttctcaactcctactgggtgaatgaggatagcacctacaagtactttgagatcatcctggttgatgtggcccacactgccatccgcaacgacccaagaatcaactggctatgcaatcctgtgcacaagcatcgtgagctccgtggtctcacctctgcaggcaagaagttccgtggcctgcgtggcaagggccacactcaccacaagaacaggccgtcgaggagggccacctggaagcgcaaccagaccctgtccctccgccgctaccgttgagcacacacatcttgatgctctgctaccgtggaacccgccccatgcaggctatgatagtatttggtatttttgttgcattgttaaattttgctacccgtgttccttccgagccccttgaactgtgttgtcagtgtaccgtggagcaagtgacgcgaactatatttgtggttctcagtcaatgaaaatgattgtttgtagtttattgctgtgtattatttctggcacgatggatttagtgttgtggcggcagctgttttttttatctcatgctggttgatgaaaaaaaaaaaaaaaaaaggccccta

SEQ ID NO: 116038 - DNA, 660 bp, Zea mays
  Clone ID: MRT4577_37309C.1
agcacagtcgcagttatcctaagggagagtaccgtaaaggatatctgattgagcctaaccctgtgtacattgtgcggaggaagatgctggacttggtattatctggatctcgtaacgttggtgaatgccaacaggatagtgcaacttggtcagctgaggagcatggtctgggaagcagtcatgggtgccaggataacatatgccaggtggattctgcaattccatactggaacatggagttagaagtgacgcatggaaagaaccaattaactcaaccgtgatcttgctgtaatctctacatataaaaatacctactgatatcgtctgcctagggtgaaccggtgaagcgatgcctagctgcggcattggtaatctgtcaagcagtgaccaaaacaagcagcaatccccgccgtcgtgaaacgccgccgtgtgccatgtcgatttacgctatccagcttgctgccttgctcacctgctttcctgagtatctgtgttcatcaattgcgaattatcattcgttcgattccgacctcctcgggtggctcctgccgtcctgcgtgcattcccattttcaaaccagcatgttcagcactgcttggcgtgggggttcgccgctagtgggggtccaagaggcgccattcctgttccaaattcttaggc

SEQ ID NO: 116039 - DNA, 567 bp, Zea mays
  unsure (1)..(567): unsure at all n locations
  Clone ID: MRT4577_3730C.1
ccctnncttatnnctgggaagccacaaacatcagacaaaaaactntattattgaactataactcataagaaatctaaaagagggcaccaccaatgatgggttgttggtagaacgctgctgggtttgtcaaagcaagttggttgaatggcaggaagtngggcagttgtttttttttccagcgnnaggcgcaacgngcnggnagaacggcagcaacgggggnngnacccccaccgnagcagggcncacaccagcnagcnggcngaagggnagnagnngncgcagaaaaaaaaaagcaggagagnncaangcngccagnnggnngaanggaagaaanngcngggggnaggcagcaggnagcnggcngaagggnagnnngnngnngngcaaanaagaagcagagnncaaggcagcnagnnnggnngaanggaagaaacngcngnngcngagagnaggcagcaaggggggcnagcacaagnngnnngnagnngngngcccngangnnnngngccaanaaangcaccaaaggnaaccgangnaaaagggcngangaaagggggaggaacaagg

SEQ ID NO: 116040 - DNA, 802 bp, Zea mays
  unsure (1)..(802): unsure at all n locations
  Clone ID: MRT4577_37310C.1
aagtggagctagagctcgccaatcgccattgccaacaggaggagagagaaccgtgagcgccaaaccaggatccgatccctgtgaacagagagaaggggtagccaccactgaaggattacgattgtcacgcggccgggtttgtgaacgccaatgccgggagagagattaagaatgacctgtacggatcttcctcaagcacgagatgtagggatggatggcctcggccatggtgtttccttgctggtgcgagacttgccgtggtgccgcaaccccgacgtggaccaacgctctgtgctgcgagctctggtgagaccctctgcccttggttcgtttttgtctaattaccgcgtagtactggtttcttgagggagttgtcgcgcggtagtggtggttggtcaaacaccggtgtagccgtcgccctaggtgcagggcgccgccgtaccctggtcagctggaggaggaagacggtacctggtgccgttgatctgcggggtaacggccgggatgagatcaagcatcgcaacttggttgggccgttggatcggcgatggatggatatgattagtttcctgtccattaaatcgcggccggtcgatctcgatcggacgactctagattatagaggaggttttgtcgtcgactgatgtaatctggnatcgtgcgttnttagatctgacggcccatggctcacaataccccttcagncagcacattttccaanagaacccttatgtttctatgcaatcaacccgtcgtcctggtgcggggaaaactgagtcttaaaaatttatgattttaacct

SEQ ID NO: 116041 - DNA, 1003 bp, Zea mays
  Clone ID: MRT4577_37311C.1
aaaacctcctcactcctcagactcctctccgcacataccctccctacctcgccgtcgccgtcgcatctgccatgggtgagttcttggccctaccgctgatgccctctccgattcgcatgtgtggggctttacggtatgttgcaccgtttctcgctgtggcgcaggggcgtacaagtacgtctcggagttatggagaaggaagcaatccgacgtgatgcggttcgttcaacgcgtgcgctgttgggagtacaggcagcagccggccatcgtccgcctcacaaggcccacccgccccgacaaggcccgccgcctcggcttcaaggccaagcaggggtatgttgtttaccgcgtccgtgtgaggcgtggtggcaggaagaggcctgtgccgaagggtattgtctatggcaagcccaagcaccagggtatcacccagctcaagttccagaggaacaagagatctgttgctgaggaacgggctggacgaaagcttggtggactcagggttctcaactcctactgggtgaatgaggatagcacctacaagtactttgagatcatcctggttgatgtggcccacactgccatccgcaacgacccaagaatcaactggctatgcaatcctgtgcacaagcatcgtggagctccgtggtctcacctctgcaggcaagaagttccgtggcctgcgtggcaagggccacactcaccacaagaacaggccgtcgaggagggccaccctggaagcgcaaccagaccctgtccctccgccgctaccgttgagcacacacatcttgaattcttgatgctctgctaccgtggaacccgccccatgcaggctctgatagtatttggtattttgttgcattgttaaattttgctacccgtgttccttccgagccccttgaactgtgttgtcagtgtaccgtggagcaagtgtcgcgaactatatttgtggttctcagtcaatgaaaatgattgtttcaaaaaaaaaaaaaaaaaagcggcc

SEQ ID NO: 116042 - DNA, 307 bp, Zea mays
  unsure (1)..(307): unsure at all n locations
  Clone ID: MRT4577_37312C.1
ttattcggcacgaggctttggtggcggggagctggaggatggccgtaccctcgccgactacaacatccagaaggagagcaccctccacctggtgctccgcttgcgaggtggtatgcagatctttgtgaagaccttgactggcaagaccataaccctggaggttgagagctccgacacgatcgacagcgcgaagtctcttttctggacaaagagggcanccccccagaccagcagcgggggaggcgcgcnggcacgcacccggagganggccgcacccnagcagaccacaacanccagaaggagagca

SEQ ID NO: 116043 - DNA, 3027 bp, Zea mays
  Clone ID: MRT4577_37313C.1
atggcggccgacaacccgcccgccggcggcggaatcgacaacatcttccccgcgaggtggaagagcaacattcgagctcgctccgttctctcccccgccaacggaggaggaggcggggccatcaaggccaagcgggaggccgcgcttcgttggccgtcgagcgaatcgacgcccccccgacgccccgacggaagcctgcaggacgtcgccctcgtacctgagatgacggtgcaaccagtccccgatgtgactacgtcgctcctcgtcgatcaaaaggtaccgactaactcccatcttgcgtcatttcgactcggcctcaacccgccaaacgacctcgctttggcgggcgctctcattgaggcgagtgcaaccccactggggtttcgtatgcggtcgccttgggaccggctgacggacgtctcgacctacgggccctctgggtccgaggaagatgatgatcccagcatctgttgggatttctccggacttggcaaccctagtgccgtgcgggacttcatgaccgcatgtgactactgcctctccgactgttccgacggaagccgcagccttggcgacgagagctgcggcccaagctgcgaatgtttccacatcgagctaggggatccctccgaaggcaaccatctcggcatgccggaggacggtgatcttcctaggccggtgcctcgcgctgacatcccacgggagctagctatggtccccgctccggcggggggttacgacccacaactcgagcaagtccgcgaggcgcaggccaggctcaacgagggaacaggagcgcttgagccgatccgtcaggacgtcgggcaggtatgggcgggccaacccctggccggagaaatacgtcacctgccccaaggtctccagcaccgcgtcgccaacgatgtcagggtcaggccgccgcccgcatccagcggggttggtcagaacctggcagccgcagcgatgctcctccgcgcgatgccggagccatcaaccaccgagggtcggcgaatccagggagagctcaagaatctcctggaaggcgctgcggcccgacgggccgagagcactgcctcccgaaggcagggatatccctcggaacctcatgccgcgacttcccgattcatgcgggaagcctcggtctacaccgggcgcacgcgcaacaccgcgcctgcggccccgggccacctcggcaacgagcaccatcgacgcgaccgtcgggctcacctcgacgaaagggtgcgccgaggctaccaccccaggcgtggggggcgctacgacagcggggaggatcagagtccctcgcccgaaccacccggtctgcaggccttcagtcgggccatccgacgggcgccattcccgacccggttccgacccccgactactatcacgaagtactcgggggaaacgagaccggaactgtggctcgcggactaccgcctcgcctgccaactgggtgggacggacgacgacaacctcatcatccgtaacctccccctgttcctctccgacactgctcgcgcctggttggagcacctgcctccggggcagatctccaactgggacgacttggtccaagccttcgctggcaatttccagggcacatatgtgtgccccgggaattcctgggaccttcgaagctgccgacaacagccgggagagtctctccgggactacatccggcgattctcgaagcagcgcaccgagctgcccaacatcaccgactcggatgtcatcggcgcgttcctcgccggcaccacttgccgcgacctggtgagcaagctgggtcgcaagacccccaccagggcgagcgagctgatggacatcgccaccaagttcgcctctggccaggaggcggtcgaggctatcttccgaaaggacaggcagccccagggccgcccatcggaagaggctcccgaggcgtctgctctgcgcggcgccaagaagaaaggcaagaagaagtcgcaatcgaaacgcgacaccgctgacgcggaccttgtcgctgccgccgagtacaagaaccctcggaagccccccggaggtgcaaaccttttcaacaagatgctcaaggagccgtgcccctaccatcaggggtccgtcaagcacaccctcgaggagtgcgttatgcttcggcgtcacttccacagggccgggccacccgccgagggtggcagggcccgcgacgacgacaagaacgaagatcaccaagcaggagagttccccgaggtccgcgactgcttcatgatctatggagggcatgcggtgaatgcctcggctcggcatcgcaagcaagagcgccgggaggtctgctcggtgaaggtggcggcgccagtctacctagactggtccgacaagcccatcaccttcgaccaggccgaccaccccgaccatgtgccgagcccagggaaatacccgctcgtcgtcgaccccgttgtcggcaatgtcaggctcagcaaagtcctgatggatgggggcagctgcctcaacatcatctacgccgagaccctcaagctcctgcgcatcgatctgtcctccgtccgagcaggcgctgcgcccttccacgggatcatccctgggaagcgcgtccagcccctcgggcgactcgacctccccgtctgcttcgggacgccctccaacttccgaagggagaccctgacgttcgaggtggtcgggttccgaggaacctaccacgccgtactagggaggccatgctacgcgaagttcatggtcgtccccaactacacctacctgaagctcaagatgccgggccccaacggggtcatcaccgtcggcaccacgtacaaacacgcgttcgaatgcgacgtggagtgcgtggagtacgccgaggccctcgccgagtccgaggccctcatcgccgacctggagaacctctccaaggaggtgccagacgtgaagcgccatgccggcaacttcgagccagcggagacggttaaggccgtccctcttgaccccagtggcgacaccaccaagcagatccggatcggttccgggctcgaccccaaatag

SEQ ID NO: 116044 - DNA, 6294 bp, Zea mays
  Clone ID: MRT4577_37314C.1
atgggtaatctccagcaaccactccaacccgggacggtgctccgtttcggggatcttgagttcatgtccctcgacgacagctacgacatgatactccttcctccgtcgcgcgacaacgacaatggcggccgtcagcccgcccgccggcggcggaatcgacgacatcttccccacgtggcggaagaacaacattcgggtctgtcccgtcaccttccccgccgatggaggaggaggcggggcaggcatggccaagcaggaggcggcacctcatcggctgtcgagcgagtcgacggctccggcgccccagcgggggacatgtcgggcgtcgacctcgcgtctgagacgaagacgagcgtcgtttccccacaacacgccaaccccaactgcgacccaccaagcgaccccgcttcggtggacgctttcataaaggcatgtccaaaccctccgaggtaccatatgcggtcaccctgggaccgactgatggccgtctcgacctacgggcctctgggttccgaggaagatgacgagcccgactctggttgggatttctctgggctcggtgactccagtgccatgcgggacttcatgaccgcatgtgactactgcctctccgattgctccgatagtagccatagcctcggcgacgaggactatggcccaagttgcgaatgcttccacgtcgatctagggggtctcgacgaaggcaaccatcttggtatgctggaggacggtgatccccctaggcctgcgcctcgcattgacatccttcgggagttagctgtggtcccagtccctgcgggggatcaggacgcacagctcgagcaaatccgcgagatgcaggccaggctcgacgaggaagcaggacaacttgtgcagcttcggcaaaatatcgggcaggagtgggcaggccgagcaccggccggggaagcgcgtcatctgtcccaggacgtccagcactgcatcgccgacgatgccagggcgaggctacccccagcttccagtggggtcggccagaacctggctgcagcagcgatactactccgagcgatgccggaaccatccaccatcgaggggcggcgtatccagggagagctcaagaatctcctggaggatgctgcggtccgacggaccgaaagctctgcctctcgaaggccggggtaccccggagcatcgcgccgcgacttctcgattcatacgggaagcctcagtccacaccgggcgcacgcggaacacagcgccggcggcctcgggacgcctcggcaacgagcaccaccgcgaccgtcgagcccacctcgaggagaaggtgcgccgaggctaccaccccaggcgtgggggacgctacaacagcggggaggatcggagcccctcgcccgaaccacccggtctgcgagctttcagccgggccatacgacgggcgccgttcccgacccggttctgaaccccgactaccatcaccaagtactcggggagtcaaaaccgaaactgtggcttgcggactaccggctggcctgccagctgggtgtaacggacgatgacaacctcatcatccgcaaccttcccttgttcctctccgacgcagcccgagcctggctggagcatctgcctcctgcgcagatctccaactgggacgacttggtcaaagccttcgtcggtaacttacagggcacatacgtgcgccctaggaactcctgggatctccgaagctgccgccagcagccgggagagtccctgagggactacatccggcgatttttgaagcagcgcaccgagctgcccaacatcactgactcggatgtcatcggcgcgttcctctccggcaccacttgccgcaacctggaggcggtcgaggccatcttccgaaaggacaagaagcctcaggggcgccagccggaagacgtccccgaggcgtccgctcagcgcggcgtgaggaagaagggcaagaagaagtcgcaagcgaaacgcgacgctgccgacgtggaccttgtcaccgccgccgagcacaggaaccctcggaagcctcacggaggcgccaacctgttcgacaagatgctcaaggagtcctgcccctatcatcagggtcccgtcaagcacacccttgaggagtgcgtcatgcttcggcgctacttccacaaggttgggccaccagtggaaggtggcagagcccccgacaacgacaagaaggagggccacaaggcagaggagttccccgaggtccacgaatgcttcatgatctacggtgggcatgtggcgaacgcctcggctcggcaccgcaagcaagagcgccgggaggtctgctcggtaaaggtggcggcgccagtctacctagattggtctgacaagcccatcatcttcgaccagggcgaccaccccgaccgcgttccgagcccaagaaagtacccgctcgttgtcgatcccatcatcggcaacatcaggcttaccaaggtcctcatggacggaggcagcagcctcaacatcatctacgccgagaccctcgggctcttgcagatcgatctgtcctcgatccgggccgacgcagcgccctttcacgggatcatcctcgggaaacgcgtccaacccctcggacaactcgatctgcccgtctgcttcgggactccctccaacttccgaaaggaaaccctcacgttcgaggtggtcgggttccgaggaacctaccacgcagtgctggggaggccatgctacgccaagttcatgtccgtccccaactacacctacctcaagctcaagatgtcgggccccaacggggtcatcaccgtcggctccacatatcgacacgcgtacgaatgcgacgtggagtgcgtggagtacgccgaggccctcgccgaatccgaggccctcaccgccgacctggagagcctctccaaggaggcgtcagatgcgaagcgccacgccggcaacttcgagccagctgagacggaagcagtgctcgtcgactttctccgcgcgaacgccgaggtttttgcgtggagtccctcggacatgcctcgcataccgagggatgtcgccgagcactcacaggatatccgagctggagcccgacccgtgaagcagcctctgcgtcgattcgacgaagaaaagcgcagagccataggcgaggagatccacaagctgatggctgcagggttcatcaaagaggtattccatcccgaatggcttgccaaccctgtgcttgtgagaaagaaaggagggaaatggtggatgtgtgtagactacactggtctaaataaagcatgtccgaaagttccctaccctctgcctcgcattgatcaaatcgtggattccactgctgggtgtgaaaccctgtctttccttgatgcctactcagggtatcaccaaatcaggatgaaagagtccgaccagctcgcgacttctttcatcacaccctttggcatgtactgctacattactatgccattcggtttgaggaatgcgggttcgacataccaaacgtgcatgaaccacgtgtccggagaacacattggccgaacggtcgaggcttacgtcgatgacatcgtagtcaagacgaggaaagcctccgacctcctctccgaccttgaaacgacattcaagtgtctcaaggcgaaaggcgtaaaactcaatcccgagaagtgtgtctttggagtcccccgaggcatgctcctggggttcgtcgtctccgagcggggcatcgaggccaacccggagaaaatcgcggccatcaccaacatggggcccatcaaggacttgaaaggagtacagagggtcatgggattccttgcggccctgagccgtttcatctcgtgcctcgacgaaagaggcctacctctgtaccgcctcttaaggaagaccgagcgcttcacttggacccctgaggccgaggaagccctcggaaacctaaaagcgctccttacaagcgcgcccatcttggtgccccccgctgtcggagaagccctcttgatctacgtcgccgctaccactcaggtggtcagcgccgtgatcatggtcgagagacgagaagaggggcatgcattgcccgtccagaggctggtctacttcatcagtgaagtactgtccgagaccaaaatccgctacccgcaaatccagaagctattgtacgcggtaattctgacgcggcgagcgggcgcgggcctgttcttcatctcacccctcgggaagcacctccgatacgtgcagcgcctccatttcccggcgtccaacaacgtggccgagtacgaggctctggttaacgggttgcgcatcgccatcgagctagggatggaagcctactgcgatgaggttcggcgcctggaggacaagttcttcgggctcgaactcaaccacatggcccgacgatacaatgagactgcggacgagctggctaagatagcctcggggcggacaacggttcccccggacgtcttctccagagacctacaccaaccctccgtcaagaccaacgacacgcccgagcccgagaaggcctcggctcagcccgaggcaccctcggcccccgagggtgaggcactgcgcgtcgagggagagcggaatggggtcacgcctaatcgaaactggcagaccccgtacaagcaatatctccaccgaggagagctacccctcgatagagccgaagctcggcggcttgcgcggcgcgccaaatcgttcgtcttgctgggtgacgggaaggagctctaccactgcagcccctcaggcatcctccagcgatgcatatccatcgccgaagcgcctcgatcccttgttggaaacgccttccgacaaggtttctactggccaaccgcggtggccgacgccactaggattaaggcactcgggggctacgcgcacctgctagtcgccatcgacaaattctccaagtggatcgaggtcagacccctaaacagcatcaggttcgaacaggcggtggcgttcttcaccaacatcatccattgctttggggtcccgaactccatcatcaccgacaacgacacccagttcaccggcagaaagttcctagacttctgcgaggatcaccacatccgggtggactgggccgtcgtagctcaccccatgacgaatgggcaagcgatggatgaaggaactcccctcggtggtctggagtctgagaacgacgccaagccgagccacgggcttgacgccgttttttctagtctatggggccgaagctatcttgcccacggacttggaatacggatccccgaggacgagggcgtacgacgaccgaagcaaccagtccaaccgagaagactcactggaccagctggaaggggctcgggacatagccttactacactcggcacggtatcagcagtccctgcgacgctaccacgtccgaggggttcggtcccgagacctctaggtgggcgacttggtgcttcggctacgacaagacgcccgagggcgccacaagctcacgcctccctgggaagggccattcatcatcgccaagattttgaagcccggaacatacaagctggccaacagtcaaggcgaggtctacaacaatgcttggaacatccgacaactacgtcgcttctacccttaagatgttttcaagtcgttcatacacctcgtttacatacgccaacaaagtctaaccatcaaggaagggtcagccttgcctcggcaaagcccgaccctccctcgggggctagaaggggggcaccccctctgcgtcaaaattttcctcggaaaaagtctttctgtcagaacgtcttttgtgcttttcgactacttcaaaagtgggatcctgaaaatgacggagtacatgatcggacatcagcagggggagcagcagcaccctcggcatcgactccaccttcggcggagtccgacccagcctcgaacggcgacacggtcggaggatctccacctcgaaggaacctgtcagcaccacgcctgggccatcgtcgtcggggtctcctccaggaacccggcccgagcagacggctcgaccggccactccgtagcctcagccagctgtcccccgaggacatcagcccgactcgtggcctcgacaacccgactccggcgtcggtcccgccagtggacgacccggccaggctccggccgacgaagcttcttttcaagccaactctgcctctgtccgtgctggcaccgctacctccggctccggctcattgcagagcggccgagggtttctttaaccaagcaaaagaagcctcgggcggcaaggtcgaccgagccgagggactcctacgcctctgggatacggatacctcactcgtcaccttccgcacgaggcaactcacacttggttaa

SEQ ID NO: 116045 - DNA, 610 bp, Zea mays
  unsure (1)..(610): unsure at all n locations
  Clone ID: MRT4577_37315C.1
cagccggncgatcccgcacacgagtggctcaggtttgagaggcatacagcgagcggaagatgcatgacacgtacttaccatgtggtccctcggcttcttcttgtagtacgcgagcacgccgttgtcgaggacgaagtagcgcgtgtggaagaaggacctcccgatcttcctccggccgtggcgcaccatccatccctcgcaccgcaccgcatcaggggccgtcgcggagggggcgcccttgggcagctccccgctccgcgccatccctgccaccgcgtgcggccgagggagctccgcgccgctcctcgcggcgtccctcctggacgccgacgagctgagcatctcccagctgcggagacgcaagtccgaccgggcgtcccagctgcaactcctcccacaggcctctcgtcaaggagccgtctccggggccgagtgcgcaggtgtggcggaagcgggagccctaggcacaggttgcgggcggcggccggagtccggcgagaagcggaggcgggctggggagaggacagagagagagaggcctgcagtaacaggctagcagctattgtgatttgtataagtctctgacattaattaataattaattgattcg

SEQ ID NO: 116046 - DNA, 5823 bp, Zea mays
  Clone ID: MRT4577_37316C.1
atgggcagtctccagcaacctttccagcctgggacggtgctccgtttcgggagtcttgagttcatgtccctcgacggcagctacgacatgatactccttcctccgccgtgcgacagcgacaatggcggccgacagcccgcccgccggcggcggaatcgacgacgtcttcctcgcgttgtggaagaacaacattcaagctcaccccgccctctcccccgccgatggaggaggaggcggggcaaccaaggccaagcaggaggcggcccctcgtcggctgtcgagcaagtcgacggcgccggcgccccaacagggggcgcgtcgggcattgacctcgcgtttgagacgaagacgagcgccgtctccccgcgacacgccaattccgagcaaacggacgacgctagcacgctcgcgaaaggcttgctgggcgtcaccctcgtacctaggacgacggtgcagtcagtccctgacgtgacttcgtcaccgcccgtcgaccaagaggtacccaccggttcccatctcacacccattggattcagcctcgacccgccaagcgacttcgctttggcggacgctctcgtagaggcgagtccaaaccctctggggttttgtatgcggtcgccctgggaccggctgacggacgtctcgacctacgggcccttggggtccgaggaagatgacgagcccgacttctgttgggatttctctggacttggcaaccccagttccatgcaggacttcatgaccacatgcgactactgctttccgactgttccggcggtagccgcagcctcggcgacgagctcgagcaaacccgcgggggtgcaggccaggctcgacgagggtgcaggagcacttgagccgatccgtcgggacgtcgggcaggaatgggcgggccaacctccgtccggagaagtgcgccatctaccccagggtatccagcaccgcatcaccgacgatgtcaggatgaggccgccaccctcttctagtggggtcggccagaacctggctgcagcagcaatgcttctccgcgcgatgccggagccatcaaccaccgaggggcggcgaatccagggagagctcaagaatctcctggagggcgccgcggtccaatgggccgagagctccgcctcccggaggcaggggtacccctcggaacatcatgccgcgacttcccgattcatgcgggaagcctcggtccacaccgggcgcacgcgcaacacagcgcctgtggccccgggtcgcctcggcaacgagcaccatcaccgcgaccgtcgagcccacgtcgacgagagggtgcgccgaggctaccaccccaagcatggaggacgctacaacagcggggaggatcggagtccctcgcccgaaccacccggtccgcgggccttcagccgtgccatacgacgggcgccgttcccgacccggttccgacccccgactactatcacaaagtactcgagggagacgagaccggaactgtggctcgcggactaccggctggcctgccaactgggtggaacggacgatgacaacctcatcatccgcaacctccccctgttcctctccgacaccgctcgcgcctggttggagcacctgcctccggggcagatctccaactgggacgacctggtccaagccttcgccggcaatttccagggcacgtacgtgcgccccggaaattcctgggaccttcgaagctgccgacagcagccgggagagtctctccgggactacatccgacgattctcgaagcagcgcaccgagctgcccaacatcaccgattcagatgtcatcggcgcgttcctcgccggcaccacctgccgcgacctagtgagcaagctgggtcgcaagacccccaccagggcgagcgagctgatggacatcgccaccaagttcgcctctggccaggaggcggttgaggccatcttccggaaggacaagcagccccagggccgcccaccggaagatgcccccgaggcgtcaactcagcgcggcgccaagaagaagggcaagaagaagtcgcaagcgaaacgcgatgccgccgacgcggaccttgtcgccgccgccgagtacaagaaccctcggaaaccccccggaggtgccaacctcttcgacaagatgctcaaggagtcgtgcccctatcatcaggggcccgtcaagcacacccttgaggagtgcgctatgcttcggcgccacttccacagggccgggccacccgcggagggtggcagggctcgcgacgacgacaagaaggaagatcaccaggcaggagagttccccgaggtccgcgactgcttcatgatatacggtgggcaagcggcgaacgcctcggctcgacaccgcaagcaagagcgtcgggaggtctgttcggtgaaggtggcggcgtcagtctacctagactggccagacaagcccatcaccttcgaccaagtcgaccaccccgatcacgtgccgagcccggggaaatacccgcttgttgttgactccgtcatcggcgacgtcaggctcaccaagatcctcatggacggaggcagcagcctcaacatcatctacgccgagaccctcgggctcctgcggaccgatctatcctcgcccctcggacaactcgatctgcccgtctgcttcaggactccctccaacttccgaagggaaaccctcacattcgaggtggtcgggtttcgaggaacctaccacgcagtgctagggaggccatgctacaccaagttcatggctatccccaactatacctacctcaagctcaagatgtcgggccccaacggggtcatcaccgccggccccacgtaccgacacgcgtacgaatgcgacgtggagtgcgtggagtacgccgaggccctcgccgaatccgaggccctcatcgccgacctggagagccagcggagacgtccctcggacatgtccggcataccgagggatgtcgtcgagcactcgctggatatccgagctggagcccgacccgtgaagcagcctctgcgccgattcgacgaagaaaagcgcagagccataggcgaggagatccacaagctaatggcagcagggttcatcaaagaggttccctaccctctgcctcgcatcgatcaaatcgtggattccactgctgggtgcgagaccttgtctttcctcgatgcctactcagggtatcatcaaatcaggatgaaagagtccgaccagctcgcgacttctttcatcacaccttttggcatgtactgctacgttaccatgccatttggtctgaggaatgcgggtgcgacgtaccagaggtgcatgaaccacgtgttcggcgaacacattggtcgaacggtcgaggcttacgtcgacgacatcgtagttaagacgaggaaagcctctgacctcctttccgaccttgaagcgacattctggtgtctcaaggcgaaaggcgtaaaactcaatcccgagaagtgtgtcttcggagtaccccgaggcatgctcttggggttcatcgtctccgaacgaggcatcgaggccaacccgaagaaaatcgcggccatcaccaacatggggcccatcaaggacttgaaaggcgtacagagggtcatgggatgccttgcggctctgagctgcttcatctcgcgcctcggcgaaagaggcctacctctgtaccccctcttaaggaaggccgagtgcttcacttgtacccctgaggccgaggaagccctcgggaacctgaaggcgctcctcacgaacgcgcccatcttggtgccccccgctaccggagaagccctcttgatctacgtcgctgctaccactcaggtggtcagcaccgcgatcgtggttgagagacgagaagaggggcatgcattgcccatccagaggccactctacttcatcagtgaggtgttgtccgagaccaagatccgctacccacaaattcagaagctgttgtacgcggtgatcctgacgtggcggaagttgcgacactacttcgagtctcatccggtgactgtggtgtcatccttcccctgggggagatcatccagtgccgagaggcctcgggtaggattgcaaaggcaggcgcaagcctgctcttcatctcgcctctcgggaagcacctacgctacgtgctacgcctccacttcccgcgcgtccaataatgtggccgagtacgagactctggtcaacgggttgcacatcaccatcgagctaggggtccgacgcctcgacgctcgcggtgactcacagctcgtcattgaccaagtcatgaagaactcccactgtcgcgacccgaagatggaagcctactgcgacgaggtttggcgcctggaagacaagttctacgggctcgagctcaaccacgtcacccgacgatacaacgagactgcggacgagctggctaagatcgcctcggggcgaacaacggttcccccagacgtcttctcccgatacctacatcaaccctcagtcaagaccgacgacacgcccgagcccgaggcaccctcggctcagcccgaggcacccttggcccccgagggtgaggcactgcgcttcgaggaagagtggaacggggtcatgcctaatcgaaactggcagaccccgtacctacaatatctccaccgaggagagctacccctcgaccgagccgaagctcggcgactggcgcggcgcgccaagttattcgtcttgctgggggacgggaaggagctctaccaccgcagcccctcaggcatcctccagcgatgcatatccatcgccgaaggccaggagctcttacaagaaatacactcgggggcttgcggtcaccacgcagcgccccgagcccttgttggaaacgccttccgacaaggtttctattggccgaccgcggtggccgacgccactagaattgtccgcacctgccaagggtgtcaattctacgcaaggcagacccacctgcccgctcaggctctacagacaatacccatcacctggccatttgctgtgtggggtctggacctcgtcggtcccttgcagaaggcacccgggggttacacgcacctgctggtcgccatcgacaaattctccaagtggatagaggtccgacccctaaacagtatccggtccgaacaggcgatggcgttcttcaacaacatcatccatcgtttcggggtcccgaactccatcatcaccgacaacggcacccagttcactggcagaaagttcctggacttctgcgaggatcaccacatccgggtggactgggccgccgtggctcaccccatgacgaatgggcaagtagagcgtgccaacgacatgattctgcaaggactcaagccacggatctacaatgacctcaataagttcggcaagcgatggatgaaggagctcccctcggtggtctggagtctgaggacaacgccgagccgagccatgggcttcacaccgttctttctagtctatgggaccgaggccatcttgcccacagacttagaatacggttccccgagggcgagggcctacgacgaccaaagcaatcgaacaaaccgagaagactcactggaccagctggaagaggctcggactcgggctcgaccccggaagacgatgaactccgcctcgcccgaccccagggctcggactcgggctcagccccggaagatgacggactccgcctcacccgaccccagggctcggattcgacctcgacctcggaggatagactcgacctcgacctcggaggagccaccgcctcgcccgacccagggctcggaccgaccacgtcacaggggggccatcattaccctatccctagctagctcaggctacggggaacaagaccggcgtcccatctggctcgccccggtaaacaagtaa

SEQ ID NO: 116047 - DNA, 289 bp, Zea mays
  Clone ID: MRT4577_37317C.1
gctcagttaattgattttaccaagtttccgacttgagatgatttcaggcagctaaaatttgaatatgacagactaggctgtaaggagatgcagccgtgatgctaaacatccgctcaggctgaagaggccgtcggcagctactcatgctgaaatgacaggtgcttttactgcgacaccatacctggtcctgattacccacgtggaagtgcaggggacggctcaggacctgttgtagctgcctgcacacacggtgacaggccacttacaaaaattatttgtgatttgcact

SEQ ID NO: 116048 - DNA, 351 bp, Zea mays
  Clone ID: MRT4577_37318C.1
ctttcccggctccgatcgaatctatgctcgccgaggccgtcaagaagatggaaccttcaaaagctccaatgaggaagagttcaaggaggaacaggaggagtcgatggagccgcagaccatccgccacatgatcgacgatgactgcgccgaccacggcgtccctcttcctaaggacgtctccaagatcctatacgagggaatcgataactgcaagaagcacatatatggcgccatcgcagcagcggccgcactctaatggcggtggcgaagatgtgggtgacgcctccgggaagagcagcgccgcctcagaggatatcctcatcaacgggtatgctgacttcgtccgggtcg

SEQ ID NO: 116049 - DNA, 3249 bp, Zea mays
  Clone ID: MRT4577_37319C.1
atgggcagtctccagcaacctctccggcccgggacggtgcttcgtttcggggctctcgagttcatgtccttcgacggcagcaacgacatgatacttcttccaccgccgtgcgaccacgacaatggcggccgacaacccgcccgccggcggcggaaccgacgacgtctaccccgcgtggtggaaaagcaacattcgggctcgctccgttctctcccccgccaacggaggaggaggcggggccgtcaaggccagacgggaggccgcgcttcgccggccgtcgagcgaatcgacgccccagacgccccgacggaaggcacgccggacatcgacctcgcgttcaagacggaggcaagcgccgtccccccgcggcacgacgaccccgagcaagaagacgacgccggcgcgctcgcggaaagcctgcaggacgtcgccctcgaaccagagatgacggcgcaaccagtccccgatgtgactacgtcgctcctcgtcgaccaaaaggtaacgactaactcccatcttgcgtcatttcgactcggcctcaacccgccaaacgacctcgttttggcgggcgccctcattgaggcgagtgcaaccccactgaggttctgtatgcgatcgccttgggaccgactgacggacgtctcgacctacgggccctctgggtccgaggaagatgacgatcccagcatcggttgggatttctccggacttggcaaccccagtgccgtgcgggacttcatggccgcatgtgactactgtctgtccgactgttccgatgcaagccgcagccttggcgacgagagctgcggcccaagccgcgaatgtttccacatcgagctagggaatcccaccgaaggcaaccatcttggcatgccggaggatggtgatctccctaggctggtgcctcgcgccgacatcccacgggagctagctgtggtccccgctccggcggggggttacgacccacaactcgagcaagtccgcgaggcgcaggccaggctcaacgagggaacgggagcgcttgagccgatccgtcgggacgtcggacaggcatgggtgggccaacccctggccggagaaatacgtcatctgccccaaggtctccagcaccgcgtcgccaacgacgtcaggatcaggccgccgcccgcatccagcggggtcggtcagaacctggcaaccgcagcaatgctcatccgcgcgatgccggagccgtcaaccaccgagggtcggcggatccagggagaactcaagaatctcctggaaggcgccacggcccggcgggccgagagcactgcatcccgaaggcaaggatgtccctcggaacctcatgccgcgacttcccgatccatgcgggaagcctcggtctacaccgggcgcacgcgcaacaccgcgcctgcggccccgggccacctcggcaacgagcaccatcgacgcgaccgtcgggctcacctcgacgaaagggtgcgccgaggctatcaccccaggcgtgggggacgttacgacagcggggaggatcggagtccttcgcccgaaccacccggtccgcaggctttcagtcgggccatccgacgggctccattcccgacccggttccgacccccggctactatcgtaaagtactcgggggaaacgagaccggagctgtggctcgcggactaccgccttgcctgccaactgggtggaacagacgacgacaacctcatcatccgcaacctccccctgttcctctccgacactacccgtgcctggttggagcacctgcctccggggcagatttccaactgggacgacttggtccaagccttcgctggcaatttccagggcacatacgtgcgccccgggaattcctgggaccttcgaagctgccggcaacggccgggggagtcgctccgggactacatccggcgattctcgaagcagcgcaccgagctgcccaacatcaccgactcggatgtcatcggcgcgttcctcgccggcaccacttgccgcgacctggtgagcaagctgggtcgcaaaacccccaccagggcgagcgagctgatggacatcgccaccaagttcgcctccggccaggaggcggtcgaggctatcttccgaaaggacaagcagccccagggccgcccgtcggaagaagctcccgagacgtctgctccgcgcggcgccaagaagaaaggcaagaagaagtcgcaatcgaaacgcgacgccgcagacgcggaccttgtcgccgccgccgagtataagaaccctcggaagccccccggaggtgcaaacctcttcgacaagatgctcaaggagccgtgcccctaccatcaggggcccgtcaagcacaccctcgaggagtgtgttatgctccggcgtcatttccacagggccgggccacccgccgagggtggcagggcccgcgacgacgacaagaacgaagatcaccaagcaggagaattccccgaggtccgcgactgcttcatgatctacggagggcatgcggcgaatgcctcggctcggcaccgcaagcaagagcgccgggaggtctgctcggtgaaggtggcggcgccagtctacctagactggtccgacaagcccatcactttcgaccgagccgaccaccccgaccatgtgccgagcccggggaaatacccgctcgtcgtcgaccccgttgtcggcgatgtcaggctcaccaaggtcctgatggacgggggcagctgcctcaacatcatctacgccgagaccctcaagctcctgcgcgtcgatccgtccaccgtccgagcaggcgctgcgcccttccacgggatcatccctgggaagcgcgtccagcccctcgggcgactcgacctcccagtctgcttcgggacaccctccaacttccgaagggagaccctgacgttcgaagtggtcgggttccgaggaacctaccacgccgtgttagggaggccatgctacgcgaagttcatggccgtccccaactacacctacctgaagctcaagatgccgggccccaacggggtcatcaccgtcggccccacgtacaaacacgcgttcgaatgcgacgtggagtgcgtggagtacgccgaggccctcgccgagtccgaggccctcatcgccgacctggagaacctctccaaggaggtcccagacgtgaagcgccatgccggcaacttcgagccagcggagacggtcaaggccgtccccctcgaccccagcggcgacaccaccaagcagatccggatcggttccgggctcgaccccaaatag

SEQ ID NO: 116050 - DNA, 745 bp, Zea mays
  Clone ID: MRT4577_3731C.1
aattcggcacgaggcaaacagagactagtccaaagcaccataacgagagagagggagagagagaaagagagaaaaaaaaacactcggaaacgatccgcgaactagtccaccggcgatttgttgttttgttcttcagtgcgtcagccaaccttaactgctacgatcggtcgatcaagggggaggaagtttctggagctctgcccatggcgtcggcgatgaagctgctggggagatcttccttggcgagccctgctgccgcggcgcccggacgggagcggcgaggcgggccctgcttcgccgcggtcggaagggaggggagcgcgcacaggaggaggtcgtcgctgaggtcgaccgcgccggtgggcgcgctggccgagcgggtcgtggtgacgccggcgccaccggagagggccggggcgggccccccggagccgcacccccagagcgtggccgcgcgggccgtggtcaccgtgcggcggaggcggaaggaggacgccaagcgccgggtcgccgagcagctggacgcgtacgccgaccgggttggccgcagtgtcctcctcgagctcatcagcacggagaccgacccaagaaaggggggccccaagaagagcaggcgctcggcgctggtgggctggttcgagaagaagacgtcaagacggagcgggtggtgtacccggcggacttcaccgttgacgggtcctttcgcgagccggggcgcgtcaccgtgctcaaccggcaccagcgc

SEQ ID NO: 116051 - DNA, 161 bp, Zea mays
  Clone ID: MRT4577_37320C.1
ggaagtcaaatattaagttttataaggacctaagctttattggtgtagaatagtttttgggtcatcacatgggacacatctatgtccattttattaactgatccacggcctctatttaaggcatacaaacctaaaattgttattttactactacatctata

SEQ ID NO: 116052 - DNA, 1918 bp, Zea mays
  Clone ID: MRT4577_37321C.1
atgtttttcgacgggtcgttgatgaagacaggagcaggcgcgggcctgctcttcatctcgcccctcgggaagcatctactctacgtgctacgcctccatttcccggcgtctaacaatgcggccgagtacgaggctctggtcaacgggttgcgcattgccatcaagctaggggtccgacgcctcgacgctcgcggtgactcgcagctcgtcatcgaccaagtcatgaagaactcccactgccgcgacccgaagatggaagcctactgcgatgaggttcggcgcctggaagacaagttctacgggctcgagctcaaccacatcgcccgacgctacaacgagactgcggacgagctggctaaaatagcctcggggcgaaaaacggttcccccggacgtcttctcccgaaacctgcatcaaccctccgtcaagaccgacgacacgcccgagcccgagaaggcctcggcccagcccgaggcaccctcggctccgtccgaggcaccctcggctcggcccgaggcaccctcggcccccgagggtgaggcactgcgcgtcgaggaggagcggagcggggtcatgcctaatcgaaactggcagaccccgtacctacaatatctccaccgaggagagctacccctgaccgagccgaagctcggcggttggcgcgacgcgccaagtcgttcgtcttgctgggagacgggaaggagctctaccaccgcagcccctcaggcatcctctagcgatgcatttccttcgccgaaggccaggagctcttacaagagatacactcgggggcttgcagccatcatgcagcgcctcgagcccttgttggaaacgccttccgacaaggcttctacttgccgaccgcggtggccgacgccactagaattgtgcgcacctgcaaagggtgtcaattctacgcaaggcagacccacctgcccgctcaggctctgcagaccatacccatcacctggccgtttgctgtgtggggtctggacctcatcggccccttgcagaaggcacccgggggctacacgcacctgttggtcgccatcgacaaattctccaagtggatcgaggtccgacccctaaacagcatcaggtccgagcaggcggtggcgttcttcaccaacatcatccatcgtttcggggtcccgaactccatcatcaccgacaacggcacccagttcaccggcagaaagttcctggacttctgcgaggatcaccacatccgggtggactgggccgccgtggctcaccccatgacgaatgggcaagtagagcgtgccaacggcatgattctacaaggactcaagcctcagatctacaacgacctcaacaagttcggcaagcaatggatgaaggaactcccctcggtggtctggagcctgaggacaacgccgagccgagccacgggcttcacgccgttctttctagtctatggggccgaggccatcttgcccacagacttagaatacggttccccgaggacgagggcctatgctgaccaaagcaaccaagttaatcgagaagactcgctggatgtagcatcccaaaaattcaaattctgaaattttctcaaactcgccctaaattcaaaatgaatttcaaatttcatttcaaaatgtttgtttgcgagttgatatcaacaaataaattatagtggtctatattctctctaaaatcctcctcaaaatatcctacaaatatttccccagtgatccccctcaaattctttccagaaatactgctcaggtatttccccagtaaccccctttgatttctttccagaaatactgcccaaaatattccaccgatgtatctccggatattttcctcttgagaaataccttcagaatcatttttcaagaccctacaaatattttcttcatactttcctcatgccatacatatacgtatg

SEQ ID NO: 116053 - DNA, 133 bp, Zea mays
  Clone ID: MRT4577_37322C.1
gagcggccgccccacacacctacgattggacatcccctttttttttttttttttttatcacatggaagtttatcaaaatcgagtgtaacaagtatgtggggaaccaacccctcaaaacgaagaacagcaagga

SEQ ID NO: 116054 - DNA, 3249 bp, Zea mays
  Clone ID: MRT4577_37323C.1
atgggcagtctccagcaacctctccggcccgggacggtgcttcgtttcgggactcttgagttcatgtccttcgacggcagctacgacatgatacttcttccaccgccgcgcgactacgacaatggcggccgacaacccgcccgccggcggcggaatcgacgacgtcttccccgcgtggtggaagagcaacattcgggctcgctccgttctctcccccgccaacggaggaggaggcggggccgtcaaggccagacgggaggccacgcttcgccggccgtcgagcgaatcgacgcccccgacgccccgacggaaggcacgccggacgtcgacctcgcgttcgagacggaggcaagcgccgtccccccgcggcacgctgaccccgagcaagaagacgacgccggcgcgctcgcggaaagcctgcaggacgtcgccctcgaaccagagatgacggcgcaaccagtccccgatgtgactacgtcgctcctcatcgaccaaaaggtaacgactaactcccatcttgcgtcatttcgactcggcctcaacccgccaaacgacctcgttttggcgggcgctctcattgaggcgagtgcaaccccactgaggttccgtatgcggtcgccttgggaccgactgacggacgtctcgacctacgggccctctgggtccgaggaagatgacgatcccggcatcggttgggatttctccggacttggcaaccccagtgccgtgcgggacttcatgaccgcatgtgactactgtctatccgactgttccgatggaagccgcagccttggcgacgagagctgcggcccaagccgcgaatgtttccacatcgagctaggggatcccaccgaaggcaaccatcttggcatgccggaggatggtgatctccctaggccggtgcctcgcgccgacatcccacgggagctagctgtggtccccgctccggcggggggttacgacccacaactcgagcaagtccgcgaggcgcaggccaggctcaacgagggaacaggggcgcttgagccgatccgtcgggacgccggacaggcatgggtgggccaacccctggccggagaaatacgtcatctgccccaaggtctccagcaccgcgtcgccaacgacgtcaggatcaggccgccgcccgcatccagcggggtcggtcagaacctggcgaccgcagcgatgctcatccgcgcgatgccggagccgtcaaccaccgaggggcggcgaatccagggagaactcaagaatctcctggaaggcgctgcggcccggcgggccgagagcactgcatcccggaggcaaggatatccctcggaacctcatgccgcgacttcccgattcatgcgggaagcctcggtctacaccgggcgcacgcgcaacaccgcgcctgcggccccgggccacctcggcaacgagcaccatcgacgcgaccgtcgggctcacctcgacgaaagggtgcgccgaggctaccaccccaggcgtggggggcgctacgacagcggggaggatcggagtccctcgcccgaaccacccggtccgcaggccttcagtcgggccatccgacgggcgccattcccgacccggttccgacccccgactactatcacgaagtactcgggggaaacgagaccggaactgtggctcgcggactaccgccttgcctgccaactaggtggaacggacgacgacaacctcatcatccgtaacctccccctgttcctctccgacactgctcgcgcctggttggagcacctgcctccggggcagatttccaactgggacgacttggtccaagccttcgctggcaatttccagggcacatacgtgcgccccgggaactcctgggaccttcgaagctgccggcaacagccgggggagtcgctccgggactacatccggcgattctcgaagcagcgcaccgagctgcccaacatcactgactcggatgtcatcggcgcgttcctcgccggcaccacttgccgcgacctggtgagcaagctgggtcgcaaaacccccaccagggcgagcgagctgatggacatcgccaccaagttcgcctccggccaggaggcggtcgaggctatcttccgaaaggacaagcagccccagggccgcccgttggaagaagctcccgaggcgtctgctccgcgcggcgccaagaagaaaggcaagaagaagtcgcaatcgaaacgcgacgccgcagacgcggaccttgtcgccgccgccgagtataagaaccctcggaagccccccggaggtgcaaacctcttcgacaagatgctcaaggagccgtgcccctaccatcaggggcccgtcaagcacaccctcgaggagtgcgttatgcttcggcgtcatttccacagggccgggccacccgccgagggtggcagggcccacgacgacgacaagaacgaagaacacccagcaggggggttccccgaggtccgcgactgcttcatgatctatggagggcatgcggcgaatacctcggctcggcaccgcaagcaagagcgccgggaggtctgctcggtgaaggtggcggcgccagtctacctagactggtccgacaagcccatcactttcgaccgggccgaccaccccgaccatgtgccgagcccggggaaatacccgctcgtcgtcgaccccgttgtcggcgatgtcaggctcaccaaggtcctgatggacgggggcagctgcctcaacatcatctacgccgagaccctcaagctcctgcgcgtcgatccgtcctccgtccgagcaggcgctgcgcccttccacgggatcatccctgggaagcgcgtccagcccctcgggcgactcgacctcccagtctgcttcgggacaccctccaacttccgaagggagaccctgacgttcgaagtggtcgggttccgaggaacctaccacgccgtgttagggaggccatgctacgcgaagttcatggccgtccccaactacacctacctgaagctcaagatgccgggccccaacggggtcatcaccgtcggccccacgtacaaacacgcgttcgaatgcgacgtggagtgcgtggagtacgccgaggccctcgccgagtccgaggccctcatcgccgacctggagaacctctccaaggaggtcccagacgtgaagcgccatgccggcaacttcgagccagcggagacggtcaaggccgtccccctcgaccccagcggcgacaccaccaagcagatccggatcggttccgggctcgaccccaaatag

SEQ ID NO: 116055 - DNA, 1346 bp, Zea mays
  Clone ID: MRT4577_37324C.1
agtgagttttttttttttttttttaaatagactgtgcatgtgcaccatggttgccccgaccctcaacaaaatgtggttacaataaacagacatgctgccactcagaagtcagaaggccgctgaggttgttctctgaaacatcagactaccgagagttcctagcttcacattcttcttgggccaaaaagtctaactcatttcaacagaaacattttctcctagaggctaagatgcctactatcggaactgccagacaaacggactctcgctataacctctaccaatctaccatcatcactaagccactgcagaagtgaaacatgcaaaaccatacgtcgtcagacaacagactgccactacaatctctatgtcatcatcgtcgctgtagaagtgaacgtgccaacaccattacaccagtcgtcatcagaaagcttgtcgcttcagcctgtccatcagaaggtgcgcaactgactcgtatccttgctcccttgcattatatatggcaatcccagtcggtggtatcttccgcttcttcaagcagaaggagctgttgcatatccagaatttcttgatacccttctcctcaacgcagtgagggcacaaccagttcttgttcttccgcacctcttccatctcttcgccgtacctaactttcaggcaagcacggcagagtatcccattagaagaatggcaagatgagcactccgtctttcctaagcatggctgcttcaggtctccttccccgcagcgcttgcagtctccctcgccgcacaatttcttctgcctgcagaaatggcagcagatcccaagaacagagtcgtacgcgccgcccctccccctgctgtcgcaccgcctctcttgcagcgcctgtaccctctccttggccaccgccaccgcccacttcccctccttatcatcttcccatgtatcatcctcctcctccgatcccgccgccgtcaacttactcagaacccctgtgccctgtccattcagccgagtggaacagcggtgcgtcgacgcggatccggtcgggcgggtcggcgtcgcggcgaggaggcggccggagcggcggagcggggtcatgctcgtcacccgtggcctgggggtcttccgaggcgtcgcgctccctgccgcgcggtggctggaggcggaggcgatgtcgctgagctcccccgcgcagcggagaaggccgagcatctccatccgggccatgttctcggagatgcgggcgtcgcggagactctcgtagtcggacttggctccgagtttccccatggcgtcggcggcggcggctgcaggcttgcaggacggcttgcaaagatttggaggattggtagtgggtcgcg

SEQ ID NO: 116056 - DNA, 448 bp, Zea mays
  unsure (1)..(448): unsure at all n locations
  Clone ID: MRT4577_37325C.1
cggacgcgtgggttctcaagctccgtatttttttctcaatagttgatatagatccgttatggcatggattgagattgatagatttggtggagaatgacgacgataggaggattgttaatggggattggaagatcattcagaagaaagagatcttcttctcttgacattctctctcccaaaagagctccaagagacttttacaagggcaaaaactgcaaacctactggtttccacacgagaaaaggaggatatgttgtgcagccagataagttgccgaattacgtagtccctgatctcaccggctttaagctgaaaccatatgtatctcaatgcccgatacaagtcaacacanacgagtcaactgaagcttccaagtgaaaaatagtcagtcagaagatatatatgtttttaagtcttcttcataaagctntaagttatgagtatgttc

SEQ ID NO: 116057 - DNA, 168 bp, Zea mays
  Clone ID: MRT4577_37326C.1
cgaatttccggggtgaaccaacccttccggccgccgggaactggcttaaattttctttttcaagaagccgggcgttcccgtggacctcaatcctcccttggactggatcgaaacggaaatccacccggacctgcgggggtcctttcctttttcgcattaatgagctcg

SEQ ID NO: 116058 - DNA, 397 bp, Zea mays
  Clone ID: MRT4577_37327C.1
gcgacgcgacgcgtaacctcagatcctaatcagtcgatccatgcgtcttatccacaccattggtgctgccgaggatgggggcaatgcgctttctggaatccacgctctctcgtcctgcatgtctacacgggctccaaccgtatatgtaactacatctaagctgactggtaggccagagatgtccccgacctatgctgagaccaacgccgcgccctatgcctcctcctaaacggaggcacactggcatcacctcgtcacgtccatgaggacctacgttctaccgttctacaacgagacagcacatctaatacctctgctgctcctgctgacattgcaccgaacagatactccctgaagctccttgcctgatacgacaccgatttggcatacaactccc

SEQ ID NO: 116059 - DNA, 1422 bp, Zea mays
  Clone ID: MRT4577_37328C.1
ggcgcgtccgggaatcttgacgggtctgtctacagtgtgcttattcatgggcattgtagggcaggaaatgttatgaaggctctcagcttccataagcaaatgctgcagcgtggttttgctccaaattcaacaagcacgatttccttgattaggggtctatttgaaaatgggatggttgtagaagcagatcaggtgattcagcagttgttgaactgttgttcccttgctgatgcagaagcatcaaaggctcttattgacctcaacttaaatgaaggtaatgtggacgcagtcttagacgttctgcatggcatggcaaaggatggactgcttccaagtccaagatgagggtgattttcaacattcaagaaccaccctctctgtggaatactggagacctgatggtcatgtttggtacatattgtctcatgagtcataacacgagcatctgaatcagtgttatgtggtaagaacggtctgccctaaatcatgatgtgctccatatggaaaaggctgaaagaagttgcctcatgctgcattattgtgtaaagtgagcaaccatttctatctcattaaccgctctgctcttaacaagtgaaatgaattttggttcttgataaatacttgattttgaagggcaggctggtttagtgatgagagttgtttcactaagtcaccggatcttaggtttgaagcaacctctctgcatttgcagaggaaggctggtattgatttatcctttttctaggccccactcacgtgggagtctctggcactaggtctggccccttttataaatacttgattttgtattagcagctttttgtattgttgtttataataattattaggttagagaaggttgtactgatattttatgatgtattacttattgtcttacttttagacactataataaaagatcttgatatatgtaattagtgaactctaaagggacagagatagttcagtgcatggaaaaccaatgcatatggtatctacctgtatacctgatgattcaactttgagaattgggagtgaaaaaaaatataccgtgaaactggatgtcatattcgtttcttgcttctcccttgaagccagaaaaaggaaaatgaaaaatgaaagcgtgaaatccccggaaaatgaggagcttgaaaaaagtggaacatcaatggcaatggatgtatacaggtggtttgcacttacaggtccctgcacatggcgtgccagctgtgccttttctgtctttacttgccccatggagccaactagttggtcatccaacatacaatttgggtaccttgtccccatcagtttagccagggttaaaaacttaaaaccaggtgactcggtggataggtcatttggaatatataattgttgaaataagttaattgccttatgcaaaacaaattagcttgtttt

SEQ ID NO: 116060 - DNA, 318 bp, Zea mays
  Clone ID: MRT4577_37329C.1
acatccttcgttctttttttttttttttgaaggcctcacattcaaggatgaggctaataacgaaccgggcaatggatagttacactcaaacggtcaaaccttctcagaaaccggttcttctttcttctacttctgagcaattgtttcttctttcttctcctcgccggcggccggctggggcacggcctattacttaatctctccttcggtcgctggcttccatcccttggccttcgcagtcttagcagcagctgcagctgcagctgcagcggcctcggtctcggcgcgctcgttgacggccttctttgtcattagcac

SEQ ID NO: 116061 - DNA, 293 bp, Zea mays
  Clone ID: MRT4577_3732C.1
ccgcgttctccgtctccgtctccgtctccgtccgcgcggcgtagagatcagcctctctcatcacagccgccacgctatggccgaggagaccgacaccaggcctgcctccgcgggctcgcgatcttgccccgtgcccgaggacgacgacagggatgacggcgagatcaccgacctcgcctgcgctcattccccgcccgccacgcacccgctcgagcactcctggtacttctggttcgagaacccgcagagctagtcaaagcaggctgcctgggggcactctatcggcgccatac

SEQ ID NO: 116062 - DNA, 394 bp, Zea mays
  Clone ID: MRT4577_37330C.1
cctttttatttcctcttttctaatattttattattaaagggaaggggttactttgaaagtcggggggcgttttcaaacaacaaaaaaaaaaacacttagacgaaaaggagggggagacagggacaaacaggacccccctaacacaggggagggaacaaaacaaaaagctgccctgggggatcggctggtgagcccgtgcaagaacaaagcatgccccggatcaccaggaacaaaaggggctgaccctaccaccaaagggggggaaacggcacctgggccttgcaatgccccaggaaagggaccttccgcccaaaagggggaatgaaaaaccagaggatggccggaacccggaacccccggaaaagacccccaaggcccccaaaaaccccccccg

SEQ ID NO: 116063 - DNA, 462 bp, Zea mays
  Clone ID: MRT4577_37331C.1
tcttactcatctagcaacatataaagcacaatagtgttctcaactatggctgccaaaatattatgcttccttgtgctggttggtctttctgcaagtattgctacctcaaccattttcccacaatgctcacaagctcctatagcttcccttcttccttcatacctctcaccaaacgtgtcttcaatttgttaaaccccaattgttcaaccctaccttatccaacaagcaattccaacaagcatcttaccattatcaaccttgttactccaacaacccgtaaccctattacaacaattacctttggtccattttgtggcacaaaacattaatgcacaacaactaccacaacttgtgctaacaaaccttacttcatactcttaacaacatcaatttctttcattcaaccaacttgcttcattgaactctactgcttattttcaacaacaattaccattcaatcat

SEQ ID NO: 116064 - DNA, 286 bp, Zea mays
  Clone ID: MRT4577_37332C.1
cccgctcgacccacgcgttcgagcaagtcaacttgtggagggtgctttgaccacggcacatgcgatcactgatgcgcggaagcactatacctggtccgatctatctcgactatacctatgtatggcactactagtttgaacctcatgcccagctactgtagatctgatccagcattccttattctgcattgtctcctcattctacaagtgacttgtatgaatctcacggtcctaactgagaatctttgtgagcttgatccagatcctaagatcttgatcctaaaca

SEQ ID NO: 116065 - DNA, 2163 bp, Zea mays
  Clone ID: MRT4577_37334C.1
aattcgcaccctcccgggccgccttctcttctccagcgtccgatctcccactcccctccctcaccgcagctctcccacctccgccctccccccgcacgcgctcgccacctcgccctcccctccacgttgctcgcacccgcgcttatataagtgcaggaggagctcatggcggaagctccggcgagccctggcggcggcggcgggagccacgagagcgggagccccaggggaggcggaggcggtggcagcgtcagggagcaggacaggttcctgcccatcgccaacatcagtcgcatcatgaagaaggccatcccggctaacgggaagatcgccaaggacgctaaggagaccgtgcaggagtgcgtctccgagttcatctccttcatcactagcgaagcgagtgacaagtgccagagggagaagcggaagaccatcaatggcgacgatctgctgtgggccatggccacgctggggtttgaagactacattgaacccctcaaggtgtacctgcagaagtacagagaggtgcgtacggtgtttgggaatttgggggtcaggtcgtgcaatcgccaatctgtcaccttgtcgatcgtacctctgattgaacttaaatgatcctgttgggcatcaagacagtaataaatcataagaggggtttcctctacccttacaatgctaccgcggaatatttatacttctttagttgaggacataaagagaccccctgttctaatgaagaaatcgactttttctgcctcatacagctattactttaggagggtgtttcgtttcaattgtttactaagtcagtcaacatggagtggtcattaaaaagtaactaatcagcctgggtaggtcaatttttatctgcacgaactgatgaggccgcttggtaggagtaaatcgcttttcctgggagcgattgttggttagcaccgctactgtatgtatattgagataccttaaagattggtcttttggctgccatttggttacatgtttttgtgttagcttgtagtagttttgtgaaaattttgatgaaactagtgcattgaatataatattaaatctagctcagcttcttgtacaaatctaataaacatagtacacatattaaattatcaccatccattctagatctaacgtctttagttgtccattctagatctaacatctttagttgctctgtataattgtatattttgcaaagaaccccttccaccactactctctaccacttctaccctgctcggagggtgttctctgcaaaaatatatagaacaaccatagatgttagatataggatgaatgatggtgatctaatatgtacaccatgtgcaccaaactcagtgcaccagatatattctcgagtttatttagctgtatttttctatacgctcttcgtattggttgaataatctgtctaatgaggtttctcttttggtcttatgtctggtggatgacatcacggattgcagatggagggtgatagcaagttaactgctaaatctagcgatggctcgattaaaaaggatgctcttggtcatgtgggagcaagtagctcagctgcagaagggatgggccaacagggagcatacaaccaaggaatgggttatatgcaacctcagtaccataacggggatatctcaaactaatgaaggtatggaccttttctgcgacagctgctcttacctgaggcgattttttttgtcttagttatttactaagacaccttgcggtgaccattaaagagtaaccaatcgccctcaataggtccgtttttatctgccagaactgatgaggtcgctcactaggagtaagtcgcttccctgggaacggttgtcggctagcaccgctcttgtatgtatattaagagtaacttaatgattggtcttttggctgcgatttgattatatgtatttgtatcgggaggcataaatattgtgtaatttgtgttaaagactagtgtaattgaactatgggaagagctgctttggttgtaaccatattttgatgcccgtatattaggcaaaaacagaaggctgtgggcgtgcacaacatatttactgttcaccgaaatacttgtattgatgtatttccgcatcaattatagtcatcgtcagcttgtaactacggcaatgaataaataaaaattcactgagt

SEQ ID NO: 116066 - DNA, 1642 bp, Zea mays
  unsure (1)..(1642): unsure at all n locations
  Clone ID: MRT4577_37335C.1
atctcaaccaagttatcatttatttaccatgctgaaaaacatgaggtcagaaggctaaattttttttccactcagcccagccacacacacaaaaaaaaagagggggaaaagatggagaaaaactagccggtccacacactagactagatcctgagcatttaccatattaggcacctttgcatgccaaaaacacctggtgtccaaactagaaactccctatttagaatagaaatcaccggacgcctccggcgtttggcgtttaatttggactggcgaagaaaatgcaggcccccctgctgctgctgcacgtccgtcaaatagattggtagggagcccagagggtgatgggaatggcgaaggagcagcacttcgtgcttgttcatggcgaagggcatggggcctggtgctggttcaagctccgctggctcctcgagggcgctggccaccgtgtcacgtgcgttgacctggccggaggcggcgtcgatcctaccgaccccaacaccatccggtccttcaagcagtacgacaagccgctcatagacctcatctccaacttgccagacggagagaaggtgattctgatcggacatggcgctggagggctgagtgtgatccatgcaatgcatgaatttgttgacaggatcggtcaagcatttttcgtggccgccacaatgctgccgtttggatttcaagccgatgaagataagaacgatgggttaccgactttgcccgagaacgagattgagttgacacttggtgcaggagcagatgatcctccaacaaccattgccttgaggccagaattccagcgtgatcgactatcacaacaaagccctgaagaggaatcagtacttgcttcaatgcntgatgcgtccgtggcctgcaacagctatcagtacagcaagcttcgaaggagatgatgagagattgaaccgaatcaaacgaactttcataaagatggagcgcgaccacatgctggatcctcaacagcaagactccatgatcaaaaagtggccacccagtgaggttttggtcatagatacagatcacagcccttcagaccccagaccagaacagctcatgacaatatggggacttatcaactgtcagaacaaatatgaacagaagctaaatcaattcccagtgcactatggttcatgataaaatccatcccaatagttccagaataagcatctgccatctgggttcacatgcagaagttttggagtcgacggaccataaaacccttcaacgccgcatctctaaaaggtgcacagggtctatagatttcacataagacgccatctctgcaatgtgttggctgatggatctgaatggcagtatggctcattgatcagctcccaggcaagaatcgtagggtcatccatgtaggcgacatttgtgattgtattttttctcatcaaaacagcctaagatatgaaagaacaatgtatgcaattgtgatggtatctggtaagacatggcagaagggcgatcaaacaaaataagtgccataaaaaacagctgttgttaagaattcagatcccaacgctatgaatataccaacactcgcttctccatcttgtgaatgtggcatcagccccccccccgtcccacgaagtatgtnccaggccagctccaa

SEQ ID NO: 116067 - DNA, 246 bp, Zea mays
  Clone ID: MRT4577_37336C.1
ggccttttggccggtgacggagactgcccaggtgtggtcaccatgttcctctccgcggtcttctttgccaagagcaagtcaaaaaacattctggtgagaatggtgagcgaagctgggacaggtttctgcttcaacaccaagagaaaccgactgcgggaaaaactgactcttttgcattatgatccagttgtgaaacaaaggtcctcttcgtggaaaagaaaaaaatacgctccctttaaacggtgg

SEQ ID NO: 116068 - DNA, 555 bp, Zea mays
  Clone ID: MRT4577_37337C.1
aaaaaaaaaaaaaaaaaaaaaaaaaaaaaaaaaaaaaaaaaaaaaaaaaaaaaaaaaaaaaagcttgaaaaaaaaaaaaggtttgtaaagatagaacctaaggccgggctcgcccttggggcgaaacctccctaagggcaaatcctgggggtgtccttcacccttggcggccgggggcccattcttccctagggcccatttcgccctattgggggtggccttacatttacacgggccgggggtttaaaaacccctggcgtggcaaacccttggggttcccaacttaacccctttgcgccacttgcccttttcgccagaaggcccaaaccgataagaggtccccaccgttggcccttcccaaatggtgaacggcctcgccgggaaagggcccctccctgtcgggggcctttaagctctcccgcagtggggcctatccactgggagacccttaactcgccagcgttttagtgcctgcccttttttttttctccctttccttggtttccccggtcagggtctttcccgggggctctcttaagggggggcttcttttgg

SEQ ID NO: 116069 - DNA, 164 bp, Zea mays
  Clone ID: MRT4577_37338C.1
tctaataattctaatgagaaggctatgaatgaacagccgaagagactgtcccacgtttcgcgtctgtatcacggaacgacatctgacgcggcggtttcgaaaatgtataaatcgagaaggtatgtacgggcggcgcccactgagaccataatcgtcattaacgt

SEQ ID NO: 116070 - DNA, 389 bp, Zea mays
  Clone ID: MRT4577_37339C.1
ccacctatgctatgctttttatgtttgttttacctttttgttttataactatatgcttttttttcccggggcccaatgcttttccgcgggaaaaaaaacctcagtttcctcccccttgaagacaaatgtcactttactgctaaatgctgcaacttttttgcactccacctcccccatttcattgctgatagttgactcggagcagaagctgctggatgcaaaaccctactagggctcattttacatctttacgacgacgatggtggccaagaccaccaccgctgagggtctcacatcctttttccagcaggggacttttcctcccgggacctggagtgggtagctacctatgggtgtgattttgcaatcaccccgttggacttctttgg

SEQ ID NO: 116071 - DNA, 671 bp, Zea mays
  Clone ID: MRT4577_3733C.1
attgggacctcgagccggccggaaactgagaaaagaagagaaaggagccttcagactcgtctatctacgtcattgccatctttgcaaggagcgcgcacatgtctaatatgtcgcatctcgggcgctcttgctgctgcctcttagcctggagtacaccgcgtcaccatgcgcgttcgacaaggtcgaaccttttgcccaactgaataatgcaacgtgccctgtccccaacatggaatctttcgtgatgcgcaaaggccccgcgaacccagcatagtctcacgggtcgatgcttactccaccttgtccgccgacaatggggatgtcaacgacgaccccaacgactgccgttgttgaccatgtactacctgccttcgacgaagagaggaatgtcccctaccaccacgtcttctctactgagcagctcatcataggatggtcccatgtaaccgacaacttacatctcgccgactacaccatgtggaaggatacttaggtgacctgccgtcttgacagcatacagaaccttggagataactgcccgtgcggctccaggggcttcctcacacgttactcctctgttggccgtacgaacgatactctgccatcgactctctcctccgggagcgcctgtatggtcaccccttcaacaaccaaagatacgttctcaccga

SEQ ID NO: 116072 - DNA, 671 bp, Zea mays
  Clone ID: MRT4577_37340C.1
cattgggtacctcgaggccggccgggacgccaatttcatcaccccgaattcaatcgtacatgcgtatcgcgtgtcttctttctcgaacaacccgacgtcgcgcaccggatcagtgagtgacgtttgatgaggcgagatgctgtcatatgaccgcaaatctcccttctcgagctacgatataatagagcttgatgagtagcttctcgcacgaagatatctcactaggctaccgagccttccaaggcatcgacattggctggctacacgttgcttttcgtctggtcactcgtccaataatatcaacgtacgaaggcggcataatcacatggaatgccctccggatgctgagtcctattactgcacaaggccatcgtgcgaatgctagaatcctcaccgactccttcagccccaactccatatgcggctcgaagcgcaggccccaatggatgaggaggactactacgatgatgcatgaccttttcgtgaggacgaccgcaagatgacaagaatgctgctggaagagcgtgctagatctgccaaggcttctaggccagaataaagaatgtgagctatcagcatctatacatgacggcaagccaatgtacgatgagactgacatgtacaatctacgagaaactgttaccacagtccatatggaagggatgatctgg

SEQ ID NO: 116073 - DNA, 548 bp, Zea mays
  unsure (1)..(548): unsure at all n locations
  Clone ID: MRT4577_37341C.1
tgcccacgcgtccgtttttttnttttagtggacgcaaatattggaattaacacttcctcgaaccatacgcatgatcatgacaagcgaaatgcgagagttccagtctatgattctagaacaagacggttcacaaggcgttttggattgcagcgagcacagaattgcgtctcgcgcctaagttcataggactgatatcgcggggggggtgggggtattctcttgtttgcccacgtctggcgacctagtgacgtatgttaagtaagcctatccgtaagggctgatatccaagaaccactccttacaatgggcggagagcccgcataagttcaaggtatcttggacaagcctatgatgttttgagtgatccatagaaacgtgagatgtatgatcagtatggtgaagttgttcttaaggaaggaatgcgcggtggcggatcccatgttgatacatttgacatcttgtgattattttttggaccctcttttggaggacgtggtggaagtgtagggtaggaaggtgaggaggggagaagcagttggtaccctctt

SEQ ID NO: 116074 - DNA, 280 bp, Zea mays
  Clone ID: MRT4577_37342C.1
tatgggaagtggaccaccactggccacctgatctacaagcttggaggtattgacaagcgagtgattgagaagttcgagaaaaaagcttgccaaaatgaacaagcggtcataaaattatgaggggtgggttcacaatttaagcgttaaccgtaataaaggttttaaaattgattttgccctgtggaagtttgagaccaccaagtactactgcactgttattgatgccccgggacaccaacaacactctggtaatatgatcactggcacttcccaagctgac

SEQ ID NO: 116075 - DNA, 215 bp, Zea mays
  Clone ID: MRT4577_37343C.1
attcggctcgaggccgattgaaattttgatcttacacacatggtccatcttgaatggatggtttctaacacgccaggcatggcaccagaatggattaaaccagcggaggcgtgactaaaaacgaaaaaacgtctcatctttactgaatggcccgacaaatatttgggtaggaacaggtatctaaaaaaacacccactgagttaccaggagtagag

SEQ ID NO: 116076 - DNA, 433 bp, Zea mays
  Clone ID: MRT4577_37344C.1
gccggccgggattcaaaaagaaggttgtttggttgcttacttaccttgcttgtcagatggacctggtgccgcacccggacagcccgcacgccgcccggcgccgcggcttgactggccagccggccggccggccggagctcccggtcccggcgcggccccatgtatgctactaccacatgcactactattagccgatcatcttcttggtcggtgcctctctatagctagctgaagctcctgtgatcgactactatatatctattgcctctatctagttcttggctcctttctactatcgatctgtggctatagcttagctgccactactgctactacaactgctgctgctgctacaaattactcccgttgctctttcaaatatgcttttgctgctggcattgctactggaaaaaaaaaaaaaaaaaggccccta

SEQ ID NO: 116077 - DNA, 1349 bp, Zea mays
  Clone ID: MRT4577_37345C.1
cccacgcgtccgcccacgcgtccgctctctcacaggaccacggctcgcgcgcgcgggcaccgactccaaaatagatagatctcatctcatctccttcttgctgataggttgtttggttgcttacttagcttgcttgtcagatggacctggtgccgcacccggacagcccgcactccgacaacagcggcggcggcggcggctcggcgtccggggcgctgtcgccgggggcgtcatccgcgggcgcggcgtcggcgctggcgtcgccgagccggtacgagtcgcagaagcggcgggactggaacacgttcgggcagtacctgcggaaccaccggccgccgctgtccctggcgcgctgcagcggcgcgcacgtgctggagttcctgcgctacctcgaccagttcggcaagaccaaggtgcacaccccggcctgccccttcttcggccacccggcgccgccggcgccctgcccgtgcccgctccgccaggcgtggggcagcctggacgcgctcgtgggcaggctgcgcgccgcctacgaggagaacggcgggcggcccgagaacaaccccttcggcgcgcgcgccgtcaggctctaccttcgcgaggtccgcgaccatcagtcccgcgcccggggcgtcagctacgagaagaagaagcgcaagaaggccccggcgcaccccgtccctgccgccgtcatctcctcctcccacgacggcaacgggcaccactacgagcaccagatgccgccgccgccgccgcccggcgccgcggcttgactggccagccggccggccggccggagctcccggtcccggcgcggccccatgtatgctactaccacatgcactactattagccgatcatcttcttggtcggtgcctctctatagctagctgaagctcctgtgatcgactactatatatctattgcctctatctagttcttggctcctttctactatcgatctgtggctatagtttagctgccactactgctagtacaactgctgctgctgctacaaattactcccgttgctctttcaaatatgcttttgctgctggtattgctactggaactactactgtctcttgattaggtcagttctcgatctgatcgtttcccagcttagccttagatgttccatcgtcgcctcgacggctcgtagcctcgtacgtacgtacgtacgctctcccatttggccggtatgatgccagattcagcttgagcatacatattttatgtatctctacgcgcgcgtatgcgtgcatgcatgtgcatggcagcagtagtgtatgatgatccgtgtactctacccgtgagaagcactactatctagtacgtgtgtgtactgc

SEQ ID NO: 116078 - DNA, 1512 bp, Zea mays
  Clone ID: MRT4577_37346C.1
cgccctgccgacgcgtcagcccctagctacgagtagctcggtcacgcacctgcggcatgccagcgcatcctggacctctgtctgccgcgggccgcggcgtcatcgtcctccactccattggctgctgcttcacctggctagtagatagctagctgagctgacgacggccattatatatattgagcgcccgggaagcttcgtcgccgaacccatgtcgacgagcggcgcgaggtcgtggtcgccctccaatctcgccgccaattaatactcgccccctcccttccatccgctcctcccctccccttctcgccaagctcagcgccgaggcatgctgtgagcgagagcgatctgtgcggcgtcagctccggtgatcttggaggcgccgctagcagcttggtgccgcgggctggctggttgtccgtctggccggagctagctacctagctctcgagcgaggagaagagggcgggagccaactgaagtgaagcgaagcgaagcgagatggacctggtgccgcagctggacagcccgcactcggacaacggcggcggcggcggcagcggaagcttggcgtccggggcgctgtcgccgggggcatcgtccgcaggcacggtgtcggcgctggcgtcgccgagccggtacgagtcgcagaagcgccgggactggaacacgttcgggcagtacctgaggaaccaccgcccgccgctgtcccttgcgcgctgcagcggcgcgcacgtgctcgagttcctgcgctacctcgaccagttcggcaagaccaaggtgcacaccgccgcctgccctttcttcggccacccggcgccgccggcgccctgcccgtgcccgctccgccaggcgtggggcagcctcgacgcgctcgtcggcaggctgcgcgccgcctacgaggagaacggcgggcggcccgagaacaaccccttcggcgcgcgcgccgtcagactgtacctccgcgaggtccgcgaccatcagtcccgcgccaggggcgtcagctacgagaagaagaagaagcgaaagaaggccccgccgcaccccgtccctgccgccgtcatctcctcctcccacgacggcaacggacaccactacgagcaccagatgccgccgccaccaccgcccggcgcagcggcttgactagccggccggccccatgtatgctactactaccactgtaccacatgcactactggtcgatctctctagctagctgaagctcctgtcaccgactactatatatggagtacccatctatctatctatagttattggcttcttgctactgtatatctatcgatcgatcgatcgatctgtagttatagtttagcgcgctgccactactagtacaaagacaaaccccctgctgctgctacaaattacttagccggttgctctttcatatgatttgctgctggtattgctactggaactactactgcttcctaattagatcagttgtcgatctgatcattttctagctgacgcgcgttcacgcgccgtcctgcc

SEQ ID NO: 116079 - DNA, 1649 bp, Zea mays
  Clone ID: MRT4577_37347C.1
tggtacaggtggctgctaggatgaaggagatcgcaattcgcaaggtcttgcgtggacccagacctcaacaagagatcgaccacggatggtacaggtggctgctaggatgaaggagatcaccgcgctggggccgggcctgagggagcgactcccaaggtgtcgccgctctggtgggcagagctggagatcatgggcgtgtttggttcattcggctcgaggcagcagccatggagatgctgagcatgctgaaggtggggtacaccatcctgcgcagcgagacgcccgcgacagacctcgtcaacaccttcatggactgggcggcgcgcaggtcccttatgctcctggccatcttcctcccgccgtactacatctacaagctcaccacgtctgcgttcgctgctgccgtgccagaggacgtcgcagggaaggttgtgctcatcaccggcgccgcctccggcatcggccagcaaatagcttaccagtacgcaaagaaggtagcgagactggcgctagtggcgaggatggtgggaagcctgcatgatgtcgcggcgagagccagggatggcggctcgccagacgttctggttgttgccggggacgttgcgaaaccagaggattgccggaggtttgtgcaggccacagttgaacatttcggccgattggatcatcttgtgaacaacgctggtgtagcaaatgtctgctggtttgaggacgtaccggatgttgctgctttgaagcgagtcctggccgtgaacttctggggcgcagttcatgcgacccactgcgctcttccccatctgaagaagagcggcggtgggaaggtcttcgtcaactcctcggctgcggcggcgctggcaatgccaggaatgagcctctacaatgccagcgaggctgctgttctcaacttcttcgagaccctgcgggtcgagctccgcgacgaggtcggcatcaccatcgcgacttccgggtggatcgtgtcggagatgaccggagggaagcagctgtccaaggaagggacggtggaggtcgcccgtgcggtgcgccgaggccaccgtggacgccatctgccgcggccggcgccacctcaccgtcccgctgtggtaccgggcgctgttcctgtggcgggcgctcgcgcccgaggtggtggagttcagccagagactgttgtgccgacggaccgcgggcgggcgcggtcaccaggcgaagggcaagaggttgcaggaggtcaccggcgccaaagggggcctccagccggcgccgctgcacagctcggacatcaaacgggagtagccaaacgctgcaatatggtcgtcggcttcggtaaaggcagctggcagtgacatggtgctagctgctgcttgtctgttcggtcaaatgtggacgagttgtaaatcagctgtcaccttcgttcgttgtgtgactttaaacttcgtgcatacagtatgttggcttttttctggccagcttatctgaaaagctggctgtagggaaaagctggctgttgggaaaagctggtggttagaatttaggtgtttggttcgccagctgtgcagaaaagctgttcgtgaaaatctacgtgtttggatacccagattgtgatagtgcagattctgttcgaagaaatgataaaaccaaaccccataacgatg

SEQ ID NO: 116080 - DNA, 625 bp, Zea mays
  Clone ID: MRT4577_37348C.1
ggccgctttttttttttttttttgacgcagaaccaatccaatttattcctaatagagatacgaggaatactgcggatgactacagctccatggggacagtatgtcttccgaaaacgcatcacaaaataaagagagcctggacttgggtcaggtggagggacatgaacccttgcccgactaaaaaaaatcgtaactggtccttgatggcatggaagactcatgttcatgtctgttggaaccgccttcgctcgcgaaacactgctgggctctgacgtctgctgttaatgtgctcaagacagtgatcgtggcctttgacgctagaattggacagccattggccttgttgactgcacgtaaactttccagaaactaatagttgggcctgtgctgactcatactactcatagttgtgaggcccaacgcacaatcgtacaacttgatgttgatttgttgataatcaccaccagattctttaggctattggcttactaattgcctataggcgactcccctatgcagtcataacgaagctcggcagcgtgtgtccaatactccagttgtaacggagtggtgtccacatagaagaagcccacaagatctgcgttaacgatgaacgatcttatgc

SEQ ID NO: 116081 - DNA, 225 bp, Zea mays
  Clone ID: MRT4577_37349C.1
aaagaaaaaaacttttgtgtttggggcaggggggcccattagcccatatggaaacccaaaggggaaaagcccctggtgacctgaacaaagaaacccggcccggctgacaccggcttggggatgggtcggggctactctgcatggttctaaattgaaccaacaaaaaaatggtaaaatttaggcccagactacaccggtttgttttcatctttttaaggcagaact

SEQ ID NO: 116082 - DNA, 274 bp, Zea mays
  Clone ID: MRT4577_3734C.1
ggaacaaaactgcaacctcaccacaggcgggaaaaagctaatctcagggcccatattagcgagcggatctgtcacagaggggggcaggaagggaaacaaaagggcaaaacatgtccagactcagcatgaacctggggacccaaagggcccccccatccacatttattttggggatacacaagcgggaaccatccatgggaagggggggggaaaaacccctactggggcttgaacatgtgggggatcaaggcgacaaccccggtgctggagcccc

SEQ ID NO: 116083 - DNA, 280 bp, Zea mays
  Clone ID: MRT4577_37350C.1
gagcacaactgcgctatcattactatttattatgatcaagcatagtacacagcaaaaaaaaccctatatattggctataccccattgagcgggagcacctatttaatttatgtactccaccggccattgcgccgtactcactcctaacctcagttgctgggcctgtttggttcactacctcagttgccacactttgcctaacttttctgcctaaggttagttattcaattcgaacgactaaccttagtcaaagtgtggcacatttagccacaaaccaaac

SEQ ID NO: 116084 - DNA, 579 bp, Zea mays
  Clone ID: MRT4577_37351C.1
cactaaggaccctctcctacgtttttattcattaacctcttcaattagctcaaagttctttctttatctttaaagcaattctgccttgccttacactatgataacctgttctcgtaggctgagcacccttgtccaggccctactcattagctggaacatgtaaacaagtgagattctttatcggatcatacctcctactcttcaaagatcgctcccttctgtttaagatcgaacactagtcgcacctacgctgcatacactttagagatatatatcccaccttctctttacgcactatatacgtttactatgcctgctgacgcaacagtatagaccgaagagttactcttgctaccgtcaggatagatgtgtaccctgcctcgagatagcccctacgtatatgacatgctttaagaaccgtacggattatgatagacaagtttcctttatactcatggctcaagatggctaatctttactgactaacttcaacagaacaaccctccgaaattttttgagtcgtgtctcaactcttttctttatctgatctcgcacaaattgacttctattccttattca

SEQ ID NO: 116085 - DNA, 336 bp, Zea mays
  Clone ID: MRT4577_37352C.1
agcacatataaaccccactagcgtaccacctttgccacacaaaatctacaacctccatatggtcattgtgctttcttcaactgcttctacttcaaccattttccccaaatgctcccatgctcctataacttcccttcttcccccgtacctcttaccaacagtgtcttccatatgttaaaacccaattcttcaaccctacatgatccaacacgcaatcacagctggcatcttacctttatcacccttgttcctccaacaatcatcatccctattacattacttacctttgttgcattaattgacacaaaacatcatgtcacatcaactacaacaact

SEQ ID NO: 116086 - DNA, 701 bp, Zea mays
  Clone ID: MRT4577_37353C.1
gtgcggcgctcaggcggcggtctcgatccagactaccctccacgtaaccccttcgaaggacactccgacacacaagccagacgccgccgacgaacaccccttctctcaagactatgacgatcatcgcgaacccgacgacgaacactccaagtgccaagcctcccgcacacgcgacgctcagagcgcaagaccgcgactcacattgcattcccccaagcattcccagcgctcccactcctgcacacccacatgacgtaagactcctctccccgagagcgtcacgcatgccacaattatgagcctccaccaggcatacaccctaacaacgaccaccgcgtaaaaatgctcgcgcaggcaagcctgcaccagcgactgatgaacccaccgccgattctgcgcagagagaaccagctacgtaccatcttacactggcaggtggacaaacacgcaatcccgcgcgacatcatcattaagaacaaccagcgctcatcccagtgcttcctcaagaccatcacactcaacgacgtccgccagacacggaaacatcggcttcatcgccaacgtcatggatctacccgctagatgcaagtagcgatacaaacgacgtcttcgtctccaaaatacgtacctccctcattcgagatgtcggctgcgctgaagtcctaccgtgaagaagagatccgggaactgatgtgtgatca

SEQ ID NO: 116087 - DNA, 206 bp, Zea mays
  Clone ID: MRT4577_37354C.1
gcgagcagaccgcttgtagtttatataggtagacggagaacagagcagtctgggaggcgatggtgctccctgatgccggccacacaccgatgcaaggtgaggaatctgcctcccactcctacaggcctcccagaaagctccagatggtcagaccagagctcgtggcacaaatacaaaacttatgaggatgcatctcgtcgagaaca

SEQ ID NO: 116088 - DNA, 312 bp, Zea mays
  unsure (1)..(312): unsure at all n locations
  Clone ID: MRT4577_37355C.1
cacgccgacggagagccgcgggggagcacgggccacggacgacagcaacgagcgcagagangagagcgaaccaagaaccacacacggaagaccccaaggggggggagggggcccnccatttttttttccctnnagnaaancatcnaatactgaangctatcgcaattgagcatcgaaaagatgctgattccgcggatgatactgttctagatgaagtaaggccgatcatgacgggaaaaaatggagaggatggtactgttgggaatctggcatctatggatggttatgtagggaattagcccggaaagaaca

SEQ ID NO: 116089 - DNA, 260 bp, Zea mays
  Clone ID: MRT4577_37356C.1
cggacgcgtgggctcaccctttggagcacaaattaatatatttagtgcagcacaggggggagattcatgatctaagcgactagttcgaggggctgctgactgatcatataagtcttcatcttgctgtgctgtcgcgcctgtgccaaccctcttgatgcgactacgtagctgccggcgtggtccttcaatgaaaaaactatctgctgctgtatctgcaacgggtagctacctacatgagtcatttggccgcgcttattgag

SEQ ID NO: 116090 - DNA, 485 bp, Zea mays
  Clone ID: MRT4577_37357C.1
ccgataccgtacgaaccagacgattgaccaatcaccatggcggctccgtcgcggcgcaggttctgcatctgctactgtggagccagagcgcctccttccgatggtgatacgcctattgtccgccctacgtctaccgctgcgaggcctgaccaaggccatgctcaaggggatggactactgactactgcgaacccgagataaggacatgatttaagacatgtgtgtgcttcaagtaagccgttgattgtgtgcaggcgcaagggtttcggccaggccaggacctgatgctgtggaaaggcctgcacaggaacaacgtttgggctcatttgtacgacaagctggctggggcaagacaactgtccgtgatggaaatgaagttggatgggccatgaaatgtgcagattgctccactagaagggcatgggtcaaccatttcacaatatcgaccatgtactataagcctcagccataatggttcatgagca

SEQ ID NO: 116091 - DNA, 1288 bp, Zea mays
  Clone ID: MRT4577_37358C.1
acaatccaaagcaagcagaagcacgatcatgggtatcgtatcgtcccaaacagtcaatgaacagccgaacgacgagacgaccaacttcttttcctgtcccgtcgttctcctgacgcgtgttatgtatatatcccaacgagaagagccccctttgcttcagagaaaagtaataagaccgtgctgcgcctgcgctgcgcagctccagcaccacagcaccagagctcgatcgacctccctctccaatgccgtctttcatcgacggccccactttccgggcgctgctccggccgtccaccaacgggcgccggaccaagatctcggacagcggcggcggcggcgggggcatcttcaagatgttcaagctcatgcccatgctctcgtccgggtgcaagatggtggcgctgctgggcaagcacaacaaccgggcgctgctggccgaccacgcgacgacggtgacgctgttcgggccgcgccggggccgcgtgagcctggccatccacgaggacacgcgcgcgccgccgctgttcctcatcgagctgcccatgctgacgagcgcgctgcaccgggagatctcgtccggggcgctcaagctggcgctggagagcgacacccgcagcgcgcgccgccgcctcgtggaggagtacgtctgggccgtctactgcaacggccgcaaggccggatactccatccgcaggaaggaggcctccgacgacgagcgccacgtgctgcgcctcctgcgcggcgtgtccatgggcgccggcgtgctcccggccgcccccggccgagaaggagggcggcgtgcccgcggggcccgacggggagctcacgtacgtgcgcgcccgcgtcgagcgcgtcgtcggatccaaggactcggaggccttctacatgatcaaccccgaggagggcgggaacggcgccgataataacgggggcggtggaggcgccggcggcgcgccggagctgagcattttcctagtaaggatgaaatgaataaaccgtcatattattactgctacagcataaatatatataaatataatagggtgctatattgttttttacacacacccttgtgccttgttgcacacagcagatgtgttctatgaaactgtccatagatcgagtttgtaatctaactgatgtatatctccatgttagataattgattttgtgaatcgtgctgagatcaaatcaagagaacaaattgttcttagcggagtagcaagaacattattatatatgaaagagagcggtacttcattcggttgaaaaaaaaaaaaaaaaaaaa

SEQ ID NO: 116092 - DNA, 411 bp, Zea mays
  Clone ID: MRT4577_37359C.1
gacgtacaggattgtcctacccctcgggtgctgcaagggcttgtatcacctgcgcgaagattgctagctgagggtcatacaccgggtcataaaggcagacaagaatcttacggacgagtatttataggctaatgcagcggattgacgtcttgatacgctgtccacagacaccaacacgcacgtgtgcacgcgtgtgatgggagctttcggttatttcatcccggagtacacagtcgagcggaaagcgtaccgacaagtgcggacgagtactacttatgcgtcatgctactggagctcatgagcggccggtgaccgggtgataccactaactacatgtaggacagactggtagactgggccaggcgcctcttggagcgcgcgctgtgcgaagacaactacaacgagctgctt

SEQ ID NO: 116093 - DNA, 608 bp, Zea mays
  Clone ID: MRT4577_3735C.1
gatgtatcagtcagggtcaaaggtgacccgtaacctattgaagccccaacaccagttatgattgcctcagctgccaattcaaggatatgtgctaggggaagatatgccaggtacacatccttcttgccaagaccaggcacaatcgtcataacagctgaaactacagccaagacattttggtggctcatcatgactcccttaggcattcctgtgcttccactcgtatacataatcactgcagtatctgatgggagaggcaagtttgcttcaacaggtctttgcaagcctatactctctacctcttcaaatgacttgactgtccagctagtacagttttcagccaaggacacttcaactgagatgccttcctcatcaatgtagatgacatgtttcacagtgtcaagttgcccacttatatcaatcagctttttaaattcttttcgtccacatacaacagtagttacctcggtctcatttagtgagtgacatagcgctccctcccccaaagaggcatagattgtgacaactgcaatattttgtctgaagcatgcctgcaacgcaatctgccacttcagcccgtgtgtcagcaaaaatagcaacacgctcat

SEQ ID NO: 116094 - DNA, 151 bp, Zea mays
  Clone ID: MRT4577_37360C.1
aacgaagcgaacggactgggctacttcgaggacctgcgagcggcgagcaacatggacccctatgtgggcgtctgcatgagcgccgagaccaacatcatgtgtaagcgctgtagcaccccgcttgcatgtcgtgtcgggttgctgcgggaac

SEQ ID NO: 116095 - DNA, 141 bp, Zea mays
  Clone ID: MRT4577_37361C.1
actagtcacaaaacatgttaaaaataatacttaatttaaaacttgatccaaggaatatagcgtagggctatgaggcctacagatagccctaaaatcatgtctagaaacaagatataagtaacatgacgggcgcgagggcgc

SEQ ID NO: 116096 - DNA, 337 bp, Zea mays
  Clone ID: MRT4577_37362C.1
atcttgtgttttttaggatgggcaccgcaccaaaatttgcctaacacctgccacagtacatagattgcttcagcttcattctgatgctcactcacataaccacctactaagccttcccaggaagggcatgcatttgtcatatatgcatttggctaccttagcattagacttagcatgcttacgtttgctgggatcaaacacagaccatccacaggtccaatacccatgcctacttctagtaagactacaccactacttccgaggttctgatatgctggctggccctagcttactaacaagttactgagctcgcggcctgcttattgttgccgctcct

SEQ ID NO: 116097 - DNA, 375 bp, Zea mays
  Clone ID: MRT4577_37363C.1
caaggggcccattcctgaattacataaaaaatgtggggggggaacaacagccatcctaggaagttttttcgacttgggaaactaggggaaataccgttccttgttcgggaataccaataacagcccctactggtgacgaacccttgggggggggaaatttagggacgggggggacggggaataacaaatggagggttatacagaccaagctctactattaattggagcttcaaaggaagagccattcttgagggctttttggatttcaaccttccttccgaggctgggaagtgccaagggctgcaagccgtgtccctttggtcagtccgatgcaataacctggcgtttctttgtttcctgaaggcctttctgcgg

SEQ ID NO: 116098 - DNA, 219 bp, Zea mays
  Clone ID: MRT4577_37364C.1
acccacgcatacgccgactcctgtaccctatcatttcgaaacagcgtcatgcactgatacatacatgaatcggtacgactggccatgtatattctatccagtagcaatctaatatagattttcttgtatcttcatcaacatcggcacctcacctgtacacatacgacaactcatgccataatacacgtactattgtttggctcacacctaggccatttt

SEQ ID NO: 116099 - DNA, 373 bp, Zea mays
  Clone ID: MRT4577_37365C.1
gatcatcgactccagattgttcaacttgacaccatgaaagtgctgatcgcagaccttgctctcttggcgctggatgacagcgccgtctcacagaacaagcggcggatgaggctgtcatacaccacacgtgcatctacacgccttaccactatatgccgcctgctgcctatctgtcgcaacaacaacagccgcagccatggaaatacccgactgaaccacagcaggtaagtcagtgccagcagctcagactctgacgagtcagccgggtaggtagaccaagcctggctcagtgcgtgacgcaacagcggcaccagtgcagctaccaggagacggcgtataactcggcacagtgccaacaactacaacaacagtg

SEQ ID NO: 116100 - DNA, 559 bp, Zea mays
  Clone ID: MRT4577_37366C.1
cactcctatgggcgattgggtatctcgaggccggccgggacaaatacccccagctcggtctccatagcgcgctgcaccttaagcgctggacctcccttcaacactccgtcgcgccctacctctctgcccaaccccacgaccacctgtaccctccgaacaatgtcggaacgtctcctcatggccggtgcggcggaatcggtgttcacccgggggtggagctcgcggcatggccgccattgccgctgggcatagaaattggacctcgctacttcacaatagtcgagcgaggatacgtgtcatctgaaaagcaagttggtacctggattctcaagtcccaggtcaagaacaggtaccgcaggatgaggcgcttggaggatgctgcgatgagttcgtaagagagatctaggccgtcgtctcccagtcaactttgggttgctggaccgttgtctccttataatgtaattatttattttgtatagaattcctgttatgtagtaatgatgtgacattcgatcctgtgccatgattcaccaaaaaaaaaaaaaaaaaatttgcggcc

SEQ ID NO: 116101 - DNA, 416 bp, Zea mays
  Clone ID: MRT4577_37367C.1
tggaacctttgggctgatttatgtgcatggatttatgtgcgtgcttatgtgcttgtttatgtgcttgtttatgtgcttgtaaatccataatggacggtcacggtgatggtgaagtcgagatcttttggtcattagtccgtctgtcggtggttgtatgtgttgactcgtgtttgtttgtcgtatgatggagacttgtgttggtgtaggtcttcatctggatgagtctactcctattgtgaaactcgccgtccttttcgggtgcggcacctcggtcaccgacgagctaaacgtaatacgcggaaagaggccactactcaccggcccggataatatcgaagcgaattggctagtccataggtagtcccagtcgataatcgccggctccggcgaacacaccctcggtgtcaactcccctg

SEQ ID NO: 116102 - DNA, 553 bp, Zea mays
  Clone ID: MRT4577_37368C.1
tcgagtttttttttttttttttttttttttttttttttttttttttttttttttttttttttttttttttttttttttggaacccctattgggggtaaactttatagcagaccccgttggggtttagaaaaaggaattctttttaaaactggggggggccccttttggcaaaaaaacccccggcccggctttccccttggtggggcccggctttggaaaacaaaaactgggcttcgccccccggcctaattaacccaactttgggggaaaaccccacgaccccggggagggtttccccgacgcggtttttgccgtcggggggcctgacgtcggggtccccaacaacagccgggggggggccccctgcttgggggccactttcggaagggggttgcccccccggggctcctgttccttaaaaagctcccgggccgggggggccaccttttgggggttggcccgctccgacggccttcgccccgggaacagcccgcctccacgttcccggggggggagcatcccccccgttgccggggccccgggggccgggggg

SEQ ID NO: 116103 - DNA, 362 bp, Zea mays
  Clone ID: MRT4577_37369C.1
actggggggggggaagaaaaaaaaaaaggcgcggggaaggcgcaaaaaacacccccccccacaggaaaccgaaaagggaagccaaaacgggaacggggacggcgccccacacacagaaaagggggacgacacaaagggagaacaacccccaccttggggggggaagaaaaacccaaggcccccccgcaggaaccgggcccccgggccggggcctgaccccttgcaagaaacaacaccccgcccccagggccccccccccccaggcaaaaccccggcggaggtggcccggagacaccccccagcggggcctgcgggggggcccccgccaggccccccaaaagacccccaaggagggggggcca

SEQ ID NO: 116104 - DNA, 385 bp, Zea mays
  Clone ID: MRT4577_3736C.1
agcagctaacatgtttaattatgaattgtatcgagggatgtctgatttgtatttgttcacaagatagctacttttgataaagcagctggtttccaggtaacgtgttctcctgccaatttgcttacacactattctattctacattgagcttaacagtcagacttttgacaggcacttatccaccccagctgctcttgaaggtaaaaactcattgaatggaaaaggcatccccgttttttcttcttaagccagtgatactaagcacattatgttggttttgtttgcttgacatgttgatctgggggattgaaggttgaaaactctacacggtattcttagattggaaaccatgtttttaatccatcataaagttattagtcttaca

SEQ ID NO: 116105 - DNA, 682 bp, Zea mays
  unsure (1)..(682): unsure at all n locations
  Clone ID: MRT4577_37370C.1
aattcggcacgagggttactatgatgatagaggatcccatgataaacatggtgatcgtgagagatctgcatccattggctatagtaatagtggaaggcgaagataccatgatgatagagaatctcatactaggcgcgctgagcgtgagaggtctacatcaaatgaatatactaacaagagaagtcgacatgagcatagctcaagaagctcaagaacatctgcacgatctgattgggatgatggacgctgggaatgggaagatacacctcgtcgagattatcgtgataatcgtcctggctcccggagacaacatccaacacgatctcctatgctcgctgctgcatccccggatgcacgcctggtatctccttggttagacgggaatacaccacgtctagcagcgtccccgtgggataatgtatccccttcacctgctccaatacgtgcttctggttcctcaaaagggtcttcttattcacattccagtggaagatcacaccagcttaccttttcatcaactactagttctaatattattgatgctgatagaagcccctcaaatcctgataggaacagtgagataaccgaggaaatgatgcaggagatggnactacatgctgaccgtgcatggtatgactgcgaagacacactaccatgtttgatggtgatcattctatgtatc

SEQ ID NO: 116106 - DNA, 227 bp, Zea mays
  Clone ID: MRT4577_37371C.1
attcggctcgagcgagcttcttaaccgacctttctgtttcttaccatcatctgattatattgatggacatgttaagcctgtgctatgggagaaagattaattggaagaagacagggatcgctgatagtgatctgtttataacagctaggacacatctcttagcggaactcgcttatctcccatttaaaggcattgagctggatggtgtccttctgacaaagcctcat

SEQ ID NO: 116107 - DNA, 266 bp, Zea mays
  Clone ID: MRT4577_37372C.1
acggggacgcgtgggcacctctgccgatttccatccgccggggcgtactctgttaccgaggaggccattgacaacatcctggcctcctccatcctgagctcgtcgccggcggacatctccacggccggcctctcctcctgctcatccagccgtctctcaccgaggactctgcctccgacgacacctgactactcgatccctacgccaaagcaccatatggcggtcgaccaacggtccccagcggccgatcaccaacgggacgcacc

SEQ ID NO: 116108 - DNA, 701 bp, Zea mays
  Clone ID: MRT4577_37373C.1
aacaatacgtgttagtgtggtagttagtgctgaggcgaacgacctcggtcgtgggatcgattcccagctcgcgcgtactacaaggcagaggacgccgcggaaaaatattcccccgtttccctcgccgagaaatcccttcctcgagcacgcgcgagcaaatccgtagcaagcatcaccgcagccatgatggcagcaatgaacattgatctgggaggattggcaggcaggcctactacttcacaggcggatccttttcaaagtgctttgtatggagctggacctggactcatccgaagtggactaggagtgtacagtgagaagtttttaggttcaagctccgactttatgcaaagcaatatcacccaatatttgtccaatccacaatattactttcaagtgaacaaccagtatgtgaggaacaagctgaaggttgtcttgtttccttttctgcatcggggacactggactaggataactgagccagtgggaggaaggctgtcatacaaacctccagttcaagacatcaatgctccagatctgtacatccctctgatggcttttgccacctacattgttgttgctggatatgccttgggtgttcttggaaggtttaccccggaggcactgactatacagttcacaaaagggttactcggttggtttatgcaagccatcctcattaaagcactactttactcact

SEQ ID NO: 116109 - DNA, 339 bp, Zea mays
  Clone ID: MRT4577_37374C.1
aaaaacctgaatttaatttccatttgactgcaatcctcagttttatatgttctgtctttacaaagaagaaacgcagtccacaaaggacacagaccttattgagcttaggggaaaaacaatgtttttagttctcttctaatggcataaatataggcttctctctctcactagttttaatatataagctctcgactgagttccgctcggtgtccaaaactttaatatttaaaccatgactgcgccactgcctgccggggaattatctcgtttaccgacgcggcgggggtctcctcccgcctggagcttgatcttcctgggaagattcgacgtctccatact

SEQ ID NO: 116110 - DNA, 111 bp, Zea mays
  Clone ID: MRT4577_37375C.1
gagaccaggagtcagctttgacacaactgctgaaagctggagggtctctgaagaagtttcttgttcacccttgggacacggtggcttccacagcaggattggttatgagca

SEQ ID NO: 116111 - DNA, 781 bp, Zea mays
  Clone ID: MRT4577_37376C.1
atcctaacttgccttgcattgttaatgcgtgcggctgcagcgggcatagatcgaatataattgagatcgtcgatgcccgctacagaattggctgccggcgtggcctgggaccgccggcgtgagctgcaggcgttcgacgacaccaaggcgggcgtcaagggcctcgtcgacgccggcgtcacggccctcccgcccatcttccgccactcgccggagtccctggagggcatcacgtcctcaaaccatgtcgcgggggccatcccgaccgtcgacctatcggccgcgcggcgcgaggacacggtcgccctggtgcggcgcgcggccgggacggtgggcttctttcaggtggtcaaccatggcgtgccggccgagctcatggccggcatgctcgagggggtgcgccggttcaacgaggggcccgccgaggcgaagcaggccatctacagcagggatcaagctcgcaaggtgcgtttcgcttccaacttcgacctcttctcgtcggcggcggccaactggcgcgacaccctcttcttccacctcgctccggacccggcaccttcccaagagctgcccgaggctgtcagggatgtggtcacggagtacggaaacgcggtgaccaaggtggcgctgtccgtgctggagctgctgtcggagtccctgggcctgagcagcgaccacctgcgcgacatggactgcgcggagaacctcaacgcggtgtgccaatactatccgccgtgcccggagccgtacctcacctggggcaccaagaagcacaccgacc

SEQ ID NO: 116112 - DNA, 1279 bp, Zea mays
  Clone ID: MRT4577_37377C.1
actcctaagggcgattgggatcctcgaggccggccggggaccatgtcccactcccctctccctcctccagtcttccaaaatatctccctgcgcttttccgagtccttttccctccaaggaacagaaacaaccggagcttttaccccacccgctttcccctccccgccaggaacaacagggctcctcgcaataattcgtccatccatggcgaagctcgtcaacaagctggtcgattcgttcgaccaccacgaggcgccggcgccggacgtcggctgcgtgcgcgccgtgctggccgagctcgtcctcaccttcctcttcgtcttcaccggcgtctccgccacctcaaccccgcggtgacggtggggatcttggttcgcggccacatcaccaagctccgggcgctgctgtacgtcgccgcccagctgctggcgtcctccctcgcctgcatcctcctccgctacctcagcggcggcatggtgaccccggtgcacgccctgggcgctggcatcagcccgatgcagggcctggtgacggaggtgatcctcaccttctcgctgctcttcgtcacctacgccatgatcctggacccgcggagccaggtccggaccatcggcccgctgctgacggggctcatagtcggcgccaacagcctcgccggcggcaacttcaccggcgcgtccatgaacccggcgcggtccttcggtcccgccatggccaccggggtctggaccaaccactgggtctactggatcggcccgctgctcggcgggtccctggccggcttcgtgtacgagtcgctgttcatggtgaacaagacgcacgagccgctgctcaatggagacatctgacgaccgtcggcccccagggcagtgagcacggttcatgcttgttttctgtaaaatagttcgttacctacaagcatgatgcatatattgaccaaggtaattaattagagagggttgctgttagatagttaccctggtgggattgtgggatgtagaaattgttgctgggctttgcttttcttttttctttttttcttttcctcccaaggaattttttaagagggctgggttctgtaaaggatttgtttaggctattagttagctatatagtagaaaactagagaatgctatacgttggacgtgattttttttcacgtatattgttgtacgatatggtattttttatcttccggatgaaattggatgtacagcataatctttttccaaaaaaaaaaaaaaaaaaaaaaaagaaaaaaaaaaaaaaaaaagcggcc

SEQ ID NO: 116113 - DNA, 1493 bp, Zea mays
  Clone ID: MRT4577_37378C.1
aaaacattggaaacctcgaggccggccggggacatgtcccactcccctctccctcctccagtcttccaaaatatctccctgcgcttttccgagtccttttccctccaaggaacagaaacaaccggagcttttaccccacccgctttcccctccccgccaagaacaacagggctcctcgcaataattcgtgcatccatggcgaagctcgtcaacaagctggtcgattcattcgaccacgacgaggcgccggcgccggacgtcggctgcgtgcgcgccgtgctggccgagctcgtcctcaccttcctcttcgtcttcaccggcgtctccgcctccatggccgccgggtccggcgggaagcccggggaggctatgccgatggcgacgctggcggcggtggctatcgcgcacgcgctggccgctggcgtcctggtgacggccggcttccacgtctccggcggccacctcaaccccgccgtgacggtggggatcttggttcgcggccacatcaccaagctccgggcgctgctgtacgtcgccgcccagctgctggcgtcctccctcgcctgcatcctcctccgctacctcagcggcggcatggtgaccccagtgcacgccctgggcgctggcatcaacccgatgcagggcttggtgatggaggtgatcctcaccttctcgctgctcttcgtcacctacgccatgatcctggacccgcggagccaggtccgcaccatcggcccgctgctgacggggctcatagtcggcgccaacagcctcgccggcggcaacttcaccggcgcgtccatgaacccggcgcggtccttcggtcccgccatggccaccggggtctggaccaaccactgggtctactggatcggcccgctgctcggcgggtccctggccggcttcgtgtacgagtcgctgttcatggtgtacaagacgcacgagccgctgctcaatggagacatctgacgaccgtcgggcccccagggcagtgagcacggttcatgcttgttttctgtaaaatagttcgttacctacaagcatgatgcatatattgaccaaggtaattaattggagagggttgctgttaaatgttaccctggtgggattgtgggatgtagaaattgttgctgggctttgcttttcttttttctttttacttttcctcccaaggaattttttaagagggttgggttctgtaaaggatttgtttaggctattagttagctatgtagtagaaaactagagaatgctatacgttggacgtgattttttttcacgtatattgttgtacgatatggtattttttatcttccggatgaaattggatgtacatagcataattttttttgaagcagtatttaaaaaaaaaaaaatcggggaacgcccataccctcaacaaccagcaaatggattcaaagatcttgctgttcattttaatcttaattcgtatggattggatgagattgagtcaagatcttgttgttcatttt

SEQ ID NO: 116114 - DNA, 365 bp, Zea mays
  Clone ID: MRT4577_37379C.1
ttgttttttttggctcgaaaagggtttggccccacaacagaaaacattcaccatcatcaaccagaaccaacatgggctaaccaaaggataaaaacctgatggccccactatgggactgacaaacgataacaaaacatcgcgcgactaggacactccagtctccggacaaaatccaacggtcctgaccaacagtgagctgggagatcacctagctgacaaccgttcccacgcccctgacagcaccaaaccaacagatctgcccgcttcattaagctggtctaccacggcccacagcgcgggaccaccacctcatgagtgaacagctcgcccacggcgacggtagtcaccaactcacttcatgatac

SEQ ID NO: 116115 - DNA, 257 bp, Zea mays
  Clone ID: MRT4577_3737C.1
cactttatctttctatgcctaatccttggagggtgtttctgggggtttattagggggatctatccgccgtacgacacaccattcgcgccgaattggctgcaatgcatcatccttagctcaccaagctgtggccgcctatgctactccttactcgcctgtattcactgaccccctgctcggggtacattatctacaaaccaaccccccactacatcggcacatgggttcagccggacgtccactcctggatggcaatc

SEQ ID NO: 116116 - DNA, 363 bp, Zea mays
  unsure (1)..(363): unsure at all n locations
  Clone ID: MRT4577_37380C.1
gcggcccccttccccagactctcgatttttcccacgccgccgatccccctttcgaaanaccatgagggagagatgtcgagcacatcggcgcaggccggaatcgagggcggaaacgcgcgctgggagctgcactgcctcgagcatggcattcaggctgagggtcagaggcccggcgacaagacaatagggggaggcgacgaggctttcaacaccgtctgcagcgagactggaggtgggaagcacgtcgcccgggccggtctggctgacgttgagcccaccgccagcgacgaggtgaggactggcacctatggccagctcttccagcctgagcaggtcatcagaggcaaggaggatgaagccaac

SEQ ID NO: 116117 - DNA, 236 bp, Zea mays
  Clone ID: MRT4577_37381C.1
gaatgttgcgagttgcgaccatgtgcatgcgtgcgagcgatgcacagactgaagaaattcatgcacacgacaccagagggggttacattacatattccagcgatcaattacggtgacaccctaccatacaaaatttcagggaaccccaacacatgcaagaatgctgcatttgccctcttgttctggcttgtgatgatatgaagatccaaggagagagagagaactagtcctcgtgc

SEQ ID NO: 116118 - DNA, 944 bp, Zea mays
  Clone ID: MRT4577_37382C.1
ccgttccggatccgccgccgccgccgccgccgcccatgtccggccgccacgcgccgcacctccggctggccgtgccgccgcggctctccgcgcacccctctttccgcttcccctccacgccgctcccgaccccgtcgaaagcccgcggactcccttcctccgccgccccgccgtcctcccgctacgccgacgggctcctccgcctactcgtgctgcacgcgctcttcctcctcgcgcccgccgtgcgcgcgctcccctccctggcccacgcgctcgcgttttccccgcccctcgcgctgctctcggccgccgccctcctcctccaccacttcgccgccgcttcccggaagacccaccagcctcaccgcccgttccccgggttccccgctctcgtccgcccggccttcctcctcgcgctttctatcctcctccgactcgtggccctccgcatcctccccgccccgggcctcctcgtcctcgctgactccgcgggctccctgctcgcccgcgccctgcgccggccctcccgccgccgagtcctctccaccgccgtcgccgccttatcccttgtctgcatctccccttccccttccgtgatcctcgcgatccccttcgcctctggcttcctttcctcggtcgaacaatcggccacggcgcggcatgccacacgcagtcggcgcgcccgcgcggcggcatttgcgctcgctgccttcctctgcgtgccggcgcttgtgggtctcttctttttcggtggcagcgatgcgggcgatggtcctcctgatggagcagtgccgatcggcccgctctggtggctgctgcttaactctgccttctttggcatggctttggggcgacgacaggagcatggcagcagcggtggtaggccaagtgtggattttgcatgacgttcttatgcactctttgttctggagctgctgtactac

SEQ ID NO: 116119 - DNA, 490 bp, Zea mays
  Clone ID: MRT4577_37383C.1
taaaatgaatactattttagaacaaagggcaatgctagacacccgctcgagctggaccactcgtgtgtttgcgtgtgacgagatggcctgtgcgcacgcacgtatggaaccagaggtttgctggccttatacgttcttaccccggccggccggtacagtacggtgatccgaccggcgcatcgaaacgttagcatttgagtggaacacacgtacttacgtacgcccaggagagcatgcgcaggttgcgtgcgacatgtgatgaatcttgtaaaggctacgagcgccgggccgaggggcacgcacgggcacatgcagggatcggaggcacgcctggcgacggcgacaactccccgccccgacccgaccgacgcccccacccaaacaatgcagcggaccggacacggccgggtcagcgccggagctccccatgatggcagtcgaggttccccttgccctccgtttcttcctcgtgccgttcctttcttcttgg

SEQ ID NO: 116120 - DNA, 428 bp, Zea mays
  Clone ID: MRT4577_37384C.1
aactattgatagaatttctggtccttgatggggaggctgatacatgcacgtccactgataaggaaggaggggatgacccggtccttgcatgccatcaacaccgagcttgctggtaaagggaagtaaaaggagttcacacatttcatattaatccttcaaagaagccccaaggaactttattaacctgtgaggcataaactaggacatcatcgcaatggatgctatactcaaacgtggctttggtgatagatgcattcactcatgggtaagaaactattaaattcattgcgcaaaaaaaacattctttctaggatatcacatcggtgcaaccgggcaattgctgacaccaccaattaacacaatgacccaggatgtccatacgcatttggacaaggaatcatatgaccaagatgcggagacttccattg

SEQ ID NO: 116121 - DNA, 190 bp, Zea mays
  unsure (1)..(190): unsure at all n locations
  Clone ID: MRT4577_37385C.1
gaattcggctcgagaaactatgtttcttttcctaaagaaccaactaaccagaatgtccttatgagatctgcggcacnacacaaacacccccacaataaaccttttgcacccaaatattccacatgtcggtgagaaaacccttagaaaataattgcacgtttaaatcattcataggaggaacccgctcact

SEQ ID NO: 116122 - DNA, 273 bp, Zea mays
  Clone ID: MRT4577_37386C.1
ataatccagtagactctacaaaacccaaccgactcgcactcctcacaaagcacaacgacagggagacacgccaagaaaggccacaaccaaggcgacaccagacacgggaacggccaactggactcgggccccgaccaccggaggcgccgaacccaagccctggaaaccgccgactccgcgaagccaacccccagcttggctcaaccaccgaaagggcggaagactcccatgaaaacatcggccccgggccaccgggcgccacaattaaggggg

SEQ ID NO: 116123 - DNA, 2103 bp, Zea mays
  Clone ID: MRT4577_37387C.1
cattgggtacctcgaggccggccgggattcatcctcgtcttgtgtttgttgcaagtcgcaaaggtttgcgccgcctgccgggcgtcgtcggctcatcgccgtcggcggtaggcttctgcctcccccgtctcgatacctctccttcggcgaagactcgcagggaggtccccacttcatcacctccgtttcctaccggaaaaggcaacttctgtcggccatctcagtactttttttggaagatggatccagaagactctagtgactttgaagaggaggacgacgaagaagaagatgatgacttaatgatattcatattgccagcgctatatctagcatctactggaattggaactctggatcaaacatctatggttagtgatggtactgcgattgaaactccaagtcaagtatcaaagtttaacgatgcagaaaggatttgtaaagtgcttgaagatgacagaggccaaggctatgataaacttcgtgtggagccccatgttctcctcgaactttcacgctatctgaggtcaaatgatcttttgaaaaataccagaggtgtttctgtagaagagaaaattggcatgtttatttacatgctatcccgaaatgctagttttcagaaactaagtgacagattcaagtacagtacagaaactattcacaggcatatcaaagcatgctttgatgcagtcacaccaatgactggtgaattcgtcaggccaccttcaattcaagcccaccggaaaatatcatctgatacacgttatgggccttactttgagaactgtattggagcaattgatggaatccatgtccctatgacaatatcggacagtgaagcagctccataccgaaatagacaagaatccctttcccaaaacgtgatgcttgcttgtgattttgatttgaattttgtccatgtttcttgtagccgagaagggtctgcatctgacgcagcagtcttatactctgctatagaatatggatttgaagtcccaagaggaaagttctacctggttgatgggggttatgcgaacacgccatcttttcttgctccttttagtgaagtttcttaccatgctgaagagcaagatgagagcaatttccaaccaatagactatagggagcttttcaatcttcgccatgcacagctgtacagacatatcaagcgtgctgtaggcctactgaagatgcggtttccaattctaaatgtcgcaacatcataccgaaaagacactcaactgaaaattccttcagcggcagttgttatgcataacataattcagagacaaggaggtagtgaagagttgttatgtgagcaaacaattccatttgcgtcccgtaaaacagtgaatcttcctagtggtgatgacacgtatggttatgatgtttcagctttcaacagtgaatgcgacatgggtaatgctttgagagatggtattgcactgaggatgtgggcagattatgaaagtagtatgtatgtctgatttcagaatagaacaggctggccttaaagaatattgagtggtgtggtgtggatgttttcactgccctttcaggtggtgttggagctctatatggtcctttgcatggcggtgcaaatgaggtggccattgctctagaaaaggcagcactgtcaggcgaattaatattttatcaagcgggagctatatccaaatgtggacttctgctctgggctaatttatagggcgatgggatttcctacagagtttttccccgtgctggtgtctggctgagacattataccccctgtcagagaacgagtggtggtgccaagccagagtgaggaactcgcctagattgccacctcaaacgcaaccacttttgtgcttctgccatgtagaatagctgctgcatataaacacaccggcttgcctcaataaacagcaaccacttttgcgcttgaaaaaggccacagcccacagatgcttcgcttggttggagttgtaggctttctgttgtcaaaaagtatataggcaataatgcagtaagaacactacacctttacagtgtgaaactgtcattgcgttctctatgccgtaacttccattaagatgaatgaagagatacgatcaagttcct

SEQ ID NO: 116124 - DNA, 320 bp, Zea mays
  Clone ID: MRT4577_37388C.1
gagttactagtcggcggccgccctcgacctgacgggcccgagcttcctccaaacagcaggctgggaggaagaaagactggatcaggagtgtgcggagccaatactacagacgtcaatacgcacgggatttactaaaccatggcactactgaggttattcgtatttaaaacaagcgcgttttagcgggtggccaagcacttggaaaaagtactatcatctgttgcagcgccacctgttgatttgaaaggtgaaaaaacacataccctacgggcacatgtaaatgcaggtgcaaggactgtcccgtcattagaacaaaaaga

SEQ ID NO: 116125 - DNA, 370 bp, Zea mays
  Clone ID: MRT4577_37389C.1
gggggtgggttttttttttttttttttttttttcctctcttttttttgccccggggccgggaataacatgggaaaaaaaaaaaccctgtcttcccacaaaattttaggggatttccccccgggcgcgaaaatttacagggaccctggagcccttggggccctgaaaaaaaaaaaacctgatattcctacccccaccccagggccccaggggacaaacaacttttttatacccccccggggctggcacaaaggggcttttccagaccccggggccatgggttttttttttccccccgaacccctaggggtatggagggccctgacaaaaccaaaaggggccccttggtaaattattgccccgtgccaaaaa

SEQ ID NO: 116126 - DNA, 2511 bp, Zea mays
  Clone ID: MRT4577_3738C.1
caaatatagatgctatcgagcatcaaacatctgaagttcagataatgtaaattcgtcgttgagtttcttcacaatacaaggtttgcaaaaaaacatataggtagaatattcaagagacacagtgatgttcgccttcttgatgaatgggcagtggtaatgatatggatatgcagctttaacaagttatctgtattgtcacatgaaagccggtttcattcaattatatcaccatttaatgtaaacatcagttataatgttttacttattttgcgttaaattaattgtcccaccacattttacctatgctattttacattgagttaatatttatccctctctttgctaggcatgcttcagacaaaatattgcagttgtcacaatctatgcctctttgggggagggagcgctatgtcactcactaaatgaggttgggttacttcaccctgtgttgtttatgtattcgaaatctttgcttatatcattgtcaggcccatacgataccatatatcaacacaattgatttttcgcttttgctagctgtggcatctctctcttttatgatcatcatatagtggcattcattctcaaacattgttcctgaagattaatttacaatgccatacctattataggtgcattgttgtactttcagctgatcttattcttgactctgctctttagaccgaggtaactactgttgtattggacgaaaagaatttaaaaagctgattgatataagtgggcaacttgacactgtgaaacatgtcatctacattgatgaggaaggcatctcagttgaagtgtccttggctgaaaactgtactagctggacagtcaagtcatttgaagaggtagagagtataggcttgcaaagacctgttgaagcaaacttgcctctcccatcagatactgcagtgattatgtatacgagtggaagcacaggaatgcctaagggagtcatgatgagccaccaaaatgtcttggctgtagtttcagctgttatgacgattgtgcctggtcttggcaagaaggatgtgtacctggcatatcttcccctagcacatatccttgaattggcagctgaggcaatcataactggtgttggggcttcaataggttacgggtcacctttgaccctgactgatacatcaaataaaataaaaaaggggacgcaaggtgatgcttctgtactgaagccaacgctaatgactgctgtacctgctatacttgatcgtgttcgtgatggtgtacgaaaaaatgtagatgcaaaaggtgggttagcgaagagattatttgatattgcctatagccgtcgtctagctgctgtcaatggaagctggttgggtgcgtggggactagagaagcttttgtgggatatgctcgtcttccgaaaggttcgtgcaatcttgggaggacggattcgctttattcttgcaggtggagcacctctgtcaggggaaacacagagatttatcaatatatgtcttggggctccaatatctcaaggatatggcttgactgaaacctgtgctggtgggacattttcagagtatgatgaaacatctgttggtcgcgttggtccccctttgccttgttcatacattaagttgatagactgggccgaaggtggatacttaacaaccgattcaccaatgcctcggggtgaaatagttattggaggtccaaatgtaactaaaggctacttcaaaaatgaagcaaaaacaaatgaggtgtacaaggttgatgaaagaggcatgcgatggttctactctggcgacattgggcgcttgcacccagatggatgtcttgaaattatcgaccgcaagaaggatatagtcaagcttcaacacggtgaatatgtttctctaggaaaggtggaggctactttgagtgtgtgctcatacgttgaccagatcatgatccatgctgaccccttccacagctactgtgtggcacttgttgtaactgcacagagtgagctgaaatcctgggcctcaaaacaaggaatgacatatagtgatttctcagatttgtgccacaagcaagggacagtcaaagaagtcctccaatctttggtgaaggctggtaagcaagcacggttggagaagtttgagatccctgccaaaatcaagctgataccggagccgtggacgccggagtcaggcctcgtcacggctgccctcaagctcaagagggaggtgatcaagaaggcatacgagatggaccttgcccagttgtacagtcagtgacctgccgctacagtttctcaacgataggggtgatcctggtagctaccggcaacaacagttttttttatttgtacctcgtactatgttcctgtctttcttttaagacaatagttgactggtaaatcagttgccgataatgtgtagccttccattgcccgcccaaagagaactataattagcccttatttatttggctattatcatattaacctcaaaaaacatacgttagccattataattggctcctacacctaggaattgg

SEQ ID NO: 116127 - DNA, 679 bp, Zea mays
  Clone ID: MRT4577_37390C.1
ttttttttttttttttttttttttttttttttttttttttttttttttttttttttttggtacaaaaggaccctgcctttttattttttgatcataacaactgaaggaattgtctgttgcccatttcatccaagccaagcaatttttgtccaaaggaagcccactgggactgcaatatccattcacacaacaggagggggggggggggggggggccttccttggccagggtcaggttgggcaaactcaaaccccaggaaaggctccccaggggggtccttaacccctttgggggcaaaaagccctcccccccggatcccgggccgaatttccaaccccggaagaattttttggcccccaaagtcgcccttttccaacatggggaactcggccccctcccccccaaaaaaagcgagctccggaacaataaggggaaagttaaactctttttcccacaccggggcccagttgcccccaaccgggtgggtttttttaataaccgattttggtgggaccccaccaatcccaacccgggtgaaaaaatttgggggaaagtcctgaccaaagggggtttgtttaaagtccattcgccccccatggcccatgtacacctttaccttaaacgtttttttaacagggtggggtttttttgggtcaaaaacttgtggttctggttgcat

SEQ ID NO: 116128 - DNA, 873 bp, Zea mays
  unsure (1)..(873): unsure at all n locations
  Clone ID: MRT4577_37391C.1
gccggccggtctgggggtagcggcgagacgagccggatttaggtgtcaagtggaactgcagtgatgtatgcagctgaggcatcctaacgaaccgcccgggcgggatcaccagcactcagcttccatcaccactacaacatctaataaccactcttcaactctccaccttaatctaatcaccaaaccacccaaaaccatcaccatgaagttcttctccgccgtctccgccgccgttctcggcttctccagcatggcttccgccatcactgtcagctacgaccccggttacgatgatgccggccgctccatgaacgttgtctcctgctctgacggagccaacggtctggccgctcgcttccccacccagggcagccttcctcgcttccctctcatcggtggttaccaaggcattgctggctggaacagccctcagtgcggtacctgctacggtctcacctacaacggcaagaccatctacgtccttgccatggaccatactggcgccggcttcaacattgcccaggctgccatgaaccagctcaccaacggccaggctgctgccctcggccgcatcgacgctcagtaccagcaggtcgctgtcagcaactgcggtctttaaatcatgagcgttgtgcaccattacacaaaaagaatagacaagatggagagatgacggcgacgaatatgcgataatgtttatattggctttgaatacttggcatagcgcttgcttcatacagcatacgatggcgtttactgtatatacacactccttggtaccataattgaaatagtaatataattactcacgaaaaaaaaaaaaaaaaagcgggcctcgagctccagcnnnnnnnnnnnnnnnnnnnnnnnnnn

SEQ ID NO: 116129 - DNA, 482 bp, Zea mays
  Clone ID: MRT4577_37392C.1
ttccctgccaccccctaacaatctgccagcgcccaacccgccggcggacccaacgccgccgacagtagcacagccacctccgccacggcgccggccaccaagatcgcctcagacagaacctccacccctggcaccaccaccttctggaattcctgtcgaaccttccccaaccagtccctcaccgacgtccgcagatccttcgatccccactccctctagcccctcgtctccagggacgacaccgtccacaccaggctctggtggcactccatcggtgccagccccagcaacgccaggtgactcagttagcccggtaacaaccgggggccaaggttccaacaagtcgtcgagtccagcctcgcagagcagcagctcctcagtagacagtggtggactgtcttctggtgcaaaggcatgcattggggtagtcgttgccattcttgtgcttagtttggttggagcagcattttggtacaagaaga

SEQ ID NO: 116130 - DNA, 892 bp, Zea mays
  unsure (1)..(892): unsure at all n locations
  Clone ID: MRT4577_37393C.1
ctccggccggggtcactcggtcactcactcagtccacaccaccaggcactcggctcaactctcaagacagcaaagccaccacccaccgagctctatcgccggaacagcgccggttatccagcagaggtacgagaccaatgagaccttccacggctggcgctctggccgccgcggccctcgtcgcgacgctcgcgctgagcgtcggcgccaccccggagacgacgtgcgcggcggcggcggcccacgaccggcgcgtggactacggcttctgcgtgtcgaggctgagccaccaccacgacagccccgacgcggacacctggggcctggccaaggtggccgccgacgtgggcgtcgccaccgccggggacgccgtctacgacatcaaggccctgctggccaagccgccggccgacgcccaggcgcgggcggcgctggagcagtgccagaggctgtacgacgcggcggagatggcgttcgcggaggcgtacgacgggatcaaccggcgcgactacgcggcgggcaagggcaaggccacggaggcggcggcgctggcccgccggtgcgacgacgccttcgcgcgggccgccgtgcgcccgccgccgcaggtcgcgcggtggggcgaggagtcctcgaagattgccgtcgtctgcacggccatcaccgacctcatcggctgagcgatgggtaccggtcagggccaggtgatgcgctggctgcgtcgtcgtgatccgcgggcgtgttgtcttgtcatccgttggttacacgccacgccagccagagccagacaaaacgcggacgaacttgtgaattgttatgctggaataaaagcgttttatttcaaaaaaaaaaaaaaaaaagcggccctcgagctaccagnctgtgtttcccttag

SEQ ID NO: 116131 - DNA, 314 bp, Zea mays
  Clone ID: MRT4577_37394C.1
aaatccaccaacggcataccagcgtgtccgggattccgtcgagttgactgggccagagaataatctttgaccagaagaggcgaatatgagttccggcggcgggaggggcaaacccaaagggtgcaaagctgtgtctcgggcgaccaaaggccggctgtagtttcccgtctggcgcatatggcgctacctcaaaggcgggaagtacgcccagcgcgtctgcggtggtgcgcccgtctacctcttcgccgtcctagagtatatctcggcagaggtgttggaactggcgggcaacacggcgcgcgacaacaagaaga

SEQ ID NO: 116132 - DNA, 187 bp, Zea mays
  Clone ID: MRT4577_37395C.1
aaaacccggcccgacccacgcgtccgccggcgcgtgcgcccacaccagcctcaatccgagggcggacgcacaaaagcgcgcgggagaacctctgcggaggcgcgcgggccgctggtgacgaaccaagaagagccgaggaggcagagccgcggacggcaaagggcagcggctgggaaaacccggaagc

SEQ ID NO: 116133 - DNA, 306 bp, Zea mays
  Clone ID: MRT4577_37396C.1
tttattttttcgcttttgtttatattgtttgggggcctacaaaaagtatagaaagattggcccatccaaggagaggattgcacgcgcataaccagggcgcggaaacattaattaagttttcttttgaagcggcacacacgggggcaacgatggcatgcatatgcatccgtctactgggggctagcaacaactgcaggggtagtgcagtggccctcgcggaagttgaacaggttgtccccccatgggtaggcgtgcacgggcgggattacaacgccaccggaggcggtgaacctagtgcactgcttg

SEQ ID NO: 116134 - DNA, 206 bp, Zea mays
  Clone ID: MRT4577_37397C.1
acacaacactaatctttttaactatagcttaaccatcaataattataaagagccatggattaatttctttttttccttacatctaccaactgcatcaacattacttctatcacttatcttatcacaacaagactccctcccctcaaccatcattcccaatgtcatatatatcatcaccagcatttatttaatcttttctgcaaaaa

SEQ ID NO: 116135 - DNA, 263 bp, Zea mays
  Clone ID: MRT4577_37398C.1
attttgatctttattagactatcgacataggggatacggcttagtaactggacctacgagccaatcgtattagctctccggtagaccctctgtactggtgtactacaacaggcagtatgagacttagagggtaggactgggtcctgaggaagtggcagtgagaacggaaggtaaggagcaagcactggtcttgcggtgggtgtcttgtctgtagccctagtgggtttatcatttaaagaagcggagaagtacatggaagaaaa

SEQ ID NO: 116136 - DNA, 586 bp, Zea mays
  unsure (1)..(586): unsure at all n locations
  Clone ID: MRT4577_37399C.1
ctggtaagtgagcaatacctttgaaagctcatcatgcaagtgcctgtttttctctacttctttgtcatattgcatcctccattcggcagattcatccatggcttctaggtttgcttgttcaaattgcctcctgatggttgatgtggcaaaaaacatataataagagaagcaaaggtaaggcttaaggtaacataatgaatcagcaaaggataatctctcgtagttgctctgactcttccacagcacaagacgtgaatgacggccatgaaaatgtccatataataaagaggttgccatatgtcaaagaaacgagatcagcctggttacagggacgaataactaatctatgcctgtccaatttcttttttttttgttaacaaagggaaaggggctgtagcctagtggttacaagagctttaacacctncgaactagtttgactctccataaaagcgaatttaaacgggcctgcttgaggtctcgtacctcaatcgcaatgccctngggaggtcgtactcggngtctcgggctggtcgagtttttttttttctatgntaacaaacaggtagtatgtatgacttggtatg

SEQ ID NO: 116137 - DNA, 351 bp, Zea mays
  Clone ID: MRT4577_3739C.1
gcgattttagtttgagtttgcatttgtaaatcatggcagctgccggaaagaattcgagtgaaaaggcaagtatggacaatatcatgttgtagttgctaccaagcctcactattttcgtgatctgatgttctccgggtcatggataatttcttggagtatgttcgatttctggtctgttgatgagcttggtagatcaatttttatacttcatgtaccaggagaactcctaatatgcatgacatgtgattgattttttttatggacgagcagttctcttatcttttgccaacatctccttatccacgtggatgaagaaagggcttcttgatttcttaaaatctttaggcaagc

SEQ ID NO: 116138 - DNA, 633 bp, Zea mays
  unsure (1)..(633): unsure at all n locations
  Clone ID: MRT4577_373C.1
ccgtactgccttgccccctactttgcctcgcttagcttaggcggcgctgatacccactctcgccgtccttgttgccgcggcgctctgctcacgatggagttccgcgatgcatgtgctgctcgcggctcggggcgcgcgtgctggtcgacgcgccgcaagcgcacgagatggacatgggtgagacgaccgcgccgacgcccgagacgagcaccacaacctgggccgcgcagtatgatctggtcgaggctaaggtcgaccagtagttcatgctccacgaccaggagcaggagcagtaccagcttcagccgaacctgcggatacatattgaccaggcgtcagcggcagcccaggacgatcgcggtggacttaaggagcagcagaagcatgatgcatgtggtggggcagatcgggggattggatgcagcaggcgctcgcccccaagcggagctacaacaaggaccgtcacaccaaggacgacgggaggggccgacggatccggatgccggcgctctgcgccgagcggatcttacagctcacgcgggagctcggccacaagtccgacggcgagactgtgcagtggctgctgcagcaggccgagccggccatcgtcgccgncaccggcacgggcaccat

SEQ ID NO: 116139 - DNA, 427 bp, Zea mays
  Clone ID: MRT4577_37400C.1
cccgcaccaaaaaaatggccccctttcttttttttttatttagttaaaccgggttgggtccaaaacaagggccatgctgtttgggctcaactggggcggatttttagtttttccatgcttcaggggctcttttttaagacaaacaacccttcgaaagggtcgggtcttttttcaatcacctcctaccctaaagaatcaataggggaaaaggctcaaaggatcggaccacttggttggttgttccccccccattgaataatcttttagtaaaaaaggagcttgcctcatacggggacgggggtcgtttttttagtttggggggtgttggagtagtaaaaaaaaaccttccacccccccgggcacatgaaaccggttggggggttttttccagtttgggcataagggcgcatttgggttccaggggtga

SEQ ID NO: 116140 - DNA, 188 bp, Zea mays
  Clone ID: MRT4577_37401C.1
gtgtcagtgtgagcagtgacctgcctgaacatttgaaatgcccagaattggtcttgttcccctgtcgtgtttttttacggcgggcacctcttctgccgtgcttgcggctcgctccttggttcctcttgtccctctttttggggggggggggccttctttcttccctccctcgctgcccttgcgtttgg

SEQ ID NO: 116141 - DNA, 350 bp, Zea mays
  Clone ID: MRT4577_37402C.1
gggggggctacacgccgggttttttttattaaaacttttttttgggggcccgttacatgaccccccatttcatgcttgcccgggccgttggttgggcccaatttgccaagggggttacttaatactactaaagttcaattttggcaacccaagggtgtttaaaaaactttttttaacaccccttttggcaccttcaataacggaggggggaataaccgggggtccacccgccgtcctttttgacccactttttttttaaaaggcggtcggaaattcagggaaacaaggggggttggtttttgcccatgcaaacccgggccttcgccaccattgttgttgttgtccccccg

SEQ ID NO: 116142 - DNA, 851 bp, Zea mays
  Clone ID: MRT4577_37403C.1
cctcgagccggccgggaacgcacctcaccctctgcaccgtccaaaaatccatccaccgcatccaacaatccacgccactgcctctccacgggcatcaagagcacaacactctcaaacccccctcacccgcctgcttgtcgccctcccgcgacttgccctagccgccaccaccaccaccccacgcctcgaggccacacgcacaacccgctcctcagagttgccagcgacatcaggagtatatgtattcgcgccaacgttacgccttccgagtcgaacctccccccaaactgcaaaaatttcgctgtatgcggataccaagcagtactatacaccagaccaacggctaatccactgcccctcttgaccccgagtcacgcctgtctaccacccctactaccccagagcctgcatttgcgcatgtctctttcggccctcgtcaacatacccgacccgaccttgtttgtccgcacgctgcactaccagtaacaatcttacccttctgttccccgcaccaccgtcaccatggccaccgtcaacattcgccgcgatgtcaccgaccccttctaccgctacaagatggagcgtatccaatccaagattgagggcaagggtaacggcatcaagactgtcattgtcaacctgaccagcgtcgctggctcgctcgcccgtccccctgctcacgtcatcaagtactttggtttcgaacttggagcccagacaaacactagtcccaacgacgaccgctggatcatcaacggcgcccacgacgccagcaagctgcaggactaccttgacggcttcatctcccagttcgtcctctgcaagaaatgcaagaaccccgaaaacgatgt

SEQ ID NO: 116143 - DNA, 757 bp, Zea mays
  Clone ID: MRT4577_37404C.1
gccggccggtccgggcgtggaactcctcccttggttgcttctcagccgcatcagcgaggaaaacaagcacagaactatgcacacttgttctagcatgaatggaggtcgccaagatggatttggcaaacttcatggtggatactagagacgtacaccaagaagaaactcacgtagcaaagtcattgtcgcaaggtgttgctagggacaacttctattcaatgtttcacattacccagagaggaggaaattctcaaaagaggaatacaaagcattcacgagagaggagatgaataaagctatgaagcagctgttgtcgtcaccggatttcaacaggtgggcgttggctaaggcggacaggatatctgtgtggctctgccaggaggaaactacagcagcagcaacagcaaccaacagcggcatcgtttcttgggactatttttgatctgcatgtgtgtagtgtgctttcttagcagcaataggagtgctccctactcagtcatttcatgtgagttgattagcaagggtagggtaacatctgagtgttccacattatgaagtggcagcaaatatgtagaatattgtagtttagtgagtcacatcttaggtccaaaaagtccaaacagcatctgaatcttgtaacattcagtgctaaggtgagtgaatctcaatttgttgagttgtatatcatgcttgatcatcatgaggatagaatgaaagtatttaagtgtttttaaaaaaaaaaaaaaaaaggccccta

SEQ ID NO: 116144 - DNA, 376 bp, Zea mays
  Clone ID: MRT4577_37405C.1
catcagatcacctagctcagctgctgcccaagagctagccaggggcacagagcatcagactatgatatttggcaccatatgctaaggtatgggccgggccagagccacagctggtgtgttgcgctcaatgagggcgttcggcctctgcatggctacagcatgccttctgctgtcggtcagggatgccctcccttttggtggctcaggactccgtgatactgagcctgcagaactactccaatacgtgccccaacgagcagcacatagtccggacggagatggactgcaaggcgcgcgccaacacgcgcaacgtcgtgctcatgctgatgctgtatttccatgactgcttcatgcacaactgcgacgtgatggtgct

SEQ ID NO: 116145 - DNA, 1146 bp, Zea mays
  unsure (1)..(1146): unsure at all n locations
  Clone ID: MRT4577_37406C.1
ttagggaccttttctttttcgggggttgcgaaaatagttaaatgtcgacgaatggcaatgacagcgatgtcttacaaaacagcaccgggcaatcaacttcatttcttgctgaggcgggcgtgagcggcggctaccaaacacacccgctcgagctagcgtgaaaggagagccttgtggcactggcagctgcggcagtgcttctccggtgcgttcttggcgtggaagtaccatccggagagcatgtcgaagaggatccccgctccgacgccgacggccaggtcgatggtgtagtgtcccctgcacgccagcagcctgaccccctggagcgcgttgagcgcgtcgtaggggcgcgccagcgccagccggccctcgcggcgcatgtcggcggccgcgatgaccgcgcccgcgacgtggcccgagaagaagaggaagaaggagacgttgcccacggggaagtccatcccggaccccaggaactcctccggcagcgggagctgggtggcgcagcccagcgcgccccggcaggtgaacatcatgagcgcggcgacggccgcgcgcggccgctgctcggcgaggatggcccacaggatgtacgccgcctgcatcgcgacgaagaccgtgttgagcgcggcgaggagcgagttaagccagggcctcgcggcgatggcggcgtgcatgcccgcggtggcgaggaagcctaggtcgagcggcggcgcgtccggcttgaccatggggatggtgtactcgacggccatgaagagcaggaggccgcacccgaagagcgcgggcgccgggtgccgccgcagcacgcccgcgacgcccgccgccgagcaccactcgggccgcgtccacccgtccgccaccgcgcccatctcctccgtccccgcgccttcgcccagtacctggtggaccttcgcggctcggtcgttgcggcggcgggttgtggtggtggtggtgccggcggcggtgaggctgggcggcggcatgtatgtggggtggcgtcggtcgggggatgggttggcaaccggatgggtgcgtgagtgcgtgcgcgggccgtgcggacgccgaggaacgcgcggatctcggtgttttttcgggttttttttatagttttgagagggcccgggccggaccnggagggtaccc

SEQ ID NO: 116146 - DNA, 139 bp, Zea mays
  Clone ID: MRT4577_37407C.1
ctagcacggacaatcccgaacgcttggactgggcttacggccggatagacgccgtcattcaccctcccgctctctttcccactgtacttgcgacgactgggctaccgatgccgacgccctcgcaggtgcgcaggtcttc

SEQ ID NO: 116147 - DNA, 1355 bp, Zea mays
  Clone ID: MRT4577_37408C.1
cctcgaggccggccgggccgggaccaaacccagcgctatcgagaaagagaattaggtagccacaacgacgatggcattcacagaggagagtagccaggacttgctccaagctcacgacgagctctggcatcagtccgtgagctacctgaaatcgctcgcgctcaccgtggccctggacctccgcatcccagacgcgatccaccaccacggcggcggcgccaccctcctacagatcctcgacaagacagcgctccaccaatctaagcttcgcgccctacgccgcctcatgcgcgtgctcactgtctcgggcaccttcagcgtcgtccagcaaccaccatgtggtgacgatgattcaactgtctacaggctcacggcagcctcccgcttcctcgtcagcgaggaggtgagctcggcgaccttggctccctttatgagcgtggtgctccatcccatcagccagtcctcccacgccaggggcatctgcgcgtggttccggcaggagcaccacgacccgtccgcgtttggcctggcgttcggccaagccccaaccatctgggaacacgctgacgacacgaacgccatactgaacaaagggcttgctgcccagagccgcttcctggtgccagtcatgctcagggagtgcggcgaggcggtgtttcgtgggatcgactcgttggtcgacgttggcggtgggcatggtggcgccgccaccgccatcgccgctgccttcccgcacctcaagtgcagcgtgcttgacctcccgcacgtcgtcgccggggctccatccgatggcaacgtgcagttcgtcgcaggcgacatgtttcagagtattccgccggcaaccgctgttttcctcaagacggctttacacgactggggtgacgatgagtgtgtcaaaatattgaagaattgcaggcaagccatatctccatgcgatgaaggagggaaggtaataatcatggacatggtagttggatatgatgagtcaaatacaaaacgtctagaggtacaaattttgtttgatttgtttatcatgatggtcaatggggctgagcgcgacgagcaagagtggaagaagattttcatccaagctggatttaaagactacaaaattctacccgttgttggctccctgtcagtcatcgaggtctatccataaatatttggtgtgaacaaaggacgccaaaacctgaagaccgtgcatgtttgtgctgatgttaattattactatggtccgatcgaaaattggtctttactttgtgagcttgtaataagctgatgagtaacttgcttgtttccttagcgtgaggtaccgtggtgctaattacatgtcctatgaaaatatattatataat

SEQ ID NO: 116148 - DNA, 361 bp, Zea mays
  Clone ID: MRT4577_37409C.1
gccggccgtcgggcacagaggcttaggctgggagtaatcgatcgagccggcgatgggcagcgtggccatggacgccgactacggcgcgccgcgcgagctgtcgccgctgcagaaggcgcgcgcgctctaccgaccggagaccccgccgtgcctccaggaaaccaagcacttcagtcgaaccgatcgggcctccaccatcttcactctcagtgcacagcatacgcaacatatagggttgtaatcggattgaatatagaccaatattactcggaaaaaaaaaaaaaaaaaaggcatctttcggattcagatcgaatacatttattattgagttattattgatttgaatggatatcgatatctt

SEQ ID NO: 116149 - DNA, 259 bp, Zea mays
  Clone ID: MRT4577_3740C.1
cgattgctttatgattgatgcacccgactaaagatgtaaaatggtttagaaattatccgtccgaatccggattggaagaagatgaacacaggttcagatgcaatatgtattttttttggatattcagacgttttatcagataacagatacgaatacgtatataaaaaaaaaaaaaaaaaaaaaaaaaaaaaaaaaaacgagaaaaaaaaaaaaaaaaaaaaaaaaaaaaaaaaggggggggccccccttttttttcccc

SEQ ID NO: 116150 - DNA, 214 bp, Zea mays
  Clone ID: MRT4577_37410C.1
ccgggggcgtcgggtgggagtgacgtcggcggctggatttggggctcgagagacgtgggacgctccgctaacacacccaagcccaaaaataggacacctaaaatggcgcataagctaacatacaaaatagtatacaaacagctgggaagcagaagatacttaatgacaaaaacccattgtaaatatattccctcacacaaaaaaaggggggggg

SEQ ID NO: 116151 - DNA, 667 bp, Zea mays
  unsure (1)..(667): unsure at all n locations
  Clone ID: MRT4577_37411C.1
ggnacggntcatgataaatccgtggactcaanaacgaaaggnaaatttttatggagatgcttgctaaatttggcaaggatttctccaaaatttccagtttcatcacacataaaactactgcagactgtgtggagttctactacaagcatcataaatcagacagcttccgagaagtgaagaaactgttggaccttcatcaacagctgcctgccagcaattaccttggagcgaaatcaggacagaaatggaatcctgagtcaaatgctgcttctcttgatatgcttggggtagcatcagctgaagcagcccatgaccttgaatatgcaaacaaagtggagaaaatttctgtgaaatccctcatccggactgcatatgggtccaatgtttcatttgtgaccaaaaaatcttctgataaggagtgcattgacaatgtgcctttgcatgagagagaatctgtagcagctgatgtactagcaggcatatgcggcactccttctcctgatggaatgggctcatgcattactagttctgctgatcctggcctgaagatcagcatgaaaagagtggagcatgtcttatcccaagaaaatgacaaaaatgttaatgaggaagaatctctctctgatcaagagtgtgaatntgatccagttgattggaatgatgatga

SEQ ID NO: 116152 - DNA, 240 bp, Zea mays
  Clone ID: MRT4577_37412C.1
gcaagctagctggtcaccagttgttaacatatacatcagcaagctccacgaaagcaagaagaagaagaaacatgacgaccactgctgcggtcgtcaagctcctgacagccgtactcctcttcttcgccgtctctcttcggggttccagcatttgttaattacgtactcagcaacaggtaccaagggcgagccatgcggcacgtccagcatccacgtgcagaccgtcaacacgggcgcgac

SEQ ID NO: 116153 - DNA, 244 bp, Zea mays
  unsure (1)..(244): unsure at all n locations
  Clone ID: MRT4577_37413C.1
gtgctaaatgggcttagatgggctatgtaatacattacctgggttcggcctgtatagaacgatatatgtgtgtctcaaactgaggaagacatggtaaaacacataacagaaacgctacttctctgcctcgtcttcttgctgggtgccttccttacctcttctccacgcantattttgtggaggaggctaaggtttcacatgcagncnngggaaaaagggagagagagggaggcttggtgttagc

SEQ ID NO: 116154 - DNA, 835 bp, Zea mays
  unsure (1)..(835): unsure at all n locations
  Clone ID: MRT4577_37414C.1
attgggtccctcgaggccggccgggntatcattcactcatgtacacctttcttcctcctctcttcatctcctatcctaaatatctatctcaaccatctacatggcttcatctcctcctttgttcccgtcgtccgatccatttgctatcttagccttagctagctagctagggtttcttgagtcgccttggcctcagcagcttccttcttcgtctgtcttctgattatatattaacacagtagaaataaaaaagctagctatagccacgccatggatagcttcggggatcttggcggaggtgggagcagttcctccagagctgcttctgctcccttcttgcagctcccgctgccggcatcaacgtcgtcatcagcacaacaacaacaggtgtttccgccgccggacgggccgcagcagcagcactatcaccacagctcgagcatcccgttgcgacagttactgttactggccgacccgtcgtcggcagcgcagcatagccatcggaaggcggacatggcaacagtgcagggagggatgtcgtcgccggcggcggatggggatgccgacgccatcaaggccaggatcatgtcgcacccccagtactcggccctcctcgccgcctacttggactgccaaaaggttagtactacaagcgagagtatccatgcacaggacatgatatgtgatcatgttttcgtgtaatagttaatgataaaaataaataattaccttgtcaagggatcactcattgtataaatatgtttattttgatgtacatatatatataatagtttcttatatcggaaaaaaaatataaaaaagcatattttacact

SEQ ID NO: 116155 - DNA, 545 bp, Zea mays
  Clone ID: MRT4577_37415C.1
ggaaaagcaccaaattcggccctaagcagtggtaacaacgcagagtacgcggggtaacatcctccattccaaagtttttctttatgtctccaggctaaataggtatgtggcactatttggtgaatttagtcatgtaagtattttttagacaaatgatagctattcaacatatgcaatgttctgtaaatagaggcacattaggcggctcctttgctgtagttcgttaggcttggaccgatagaatcgtacccaatcgctaggcaataactgactcatgatgactgttatgatttgttcagtttcgcataactaactcaatcgctacctcatacttcgtttcgatcattgtacttttatgatcctgtgatccctagcatggttctaagactaagtatattctttttgagtttttgcttgctgttcgtgaggaagatatgcaaaattagagagggacaatatggtcagtgcaggagatgtgggaaaaaccaaaaaaaaaaaaaaaaaaaaaaaaaaaaaaaaagtactctgcgttgttaccactgctt

SEQ ID NO: 116156 - DNA, 319 bp, Zea mays
  Clone ID: MRT4577_37416C.1
gtcagccacggcgggcggatacggcgcatgcacgtgtggccggcctacggcaacaagatgtgcgagacgcatttccacctggcgccgctgtcgaccgacgacctgctgaatcatgtgcactacctgttgcgcatcggctggatactctgccttgagttcagcaaggtctgcttgcagtaccgctagaacttcacctgcgcgtgctactaccacagtcgttactgtaccatgtgcaaactgcccatgatccgctaggacgacgctaaccacgtgtacaaggagctgcacgatgccatcaaatactagctggacacctttc

SEQ ID NO: 116157 - DNA, 747 bp, Zea mays
  Clone ID: MRT4577_37417C.1
cgttttcttcttctagtgtagcttctctttttcagcatcattttgtcaaattaacgaatgaatggcatacatatgatagatcgcgatccataatcaaacatatcttgttggagttagatattatttatagagaagctacgccacagcgacaatagaactggtagtatggttggtcattggtgtttgtatatactatcgtcgcgccgccgcctcctcctccgtcatcgtccgaccccaccgtccaacggcatggcggccggccgcgacgacgtcaatgcatggtgtgcgatcgagccaggccagctgcgtgccccctgcccagccagccagcaggcagatcagaccgccggccgccgccttggcgctcagttcatgctgcgggcgcagcgcgtgatggcggagcagccgcggcggtaggggttggcggccgtctgcgccgcgcagttggtgtagtaggaccggccgcgcttgttgcacggcacctggtccgcgcgcagcgccgcgtagctgatgtaccggttggtcggcttgcgctgcgcaagcgtccgccgcagcgcgtcgccggcgccgatgccgccgccgccgctcagcccgagctcctcctcctcgtccacgccgcactcgcccacggcgcccgaacacttgctgctgcgctgccccgggatgctgctgccccgcgccgccacgaactccaccgcgctcaggtccccgaccttggccgaggccggcaccgcgaggaacgcggcc

SEQ ID NO: 116158 - DNA, 778 bp, Zea mays
  unsure (1)..(778): unsure at all n locations
  Clone ID: MRT4577_37418C.1
cctgccgggatcacaaaaaaaccacatccatcacaatgtccaagccaaacatcctcttcgtcctacctcgcacaacaaactcggcgacacaggcaaacccacaggctggtacctccccgagctcgcgcacccctaccacgtcctccacaacaaggccaacatcaccgtcgcctcgcccaagggcggcgaagcaccccttgacccctcctccgtcgaagccgccaaagacgacgtctccgtcaccttcctcaaaaacgacgaggccgtctggaaaaccaccaagaagctttccgacttcatcggcaaagccagcgagttcgacgctattttctacgtcggcggccacggccccatgttcgatctcgccgacgacgccacgtcgcagcagctcatccgcgagttctgggaggccggcaagattgtctcggctgtgtgccatgcacccgccgtactctacaatgtcaagttgagtgatggaagcttgctggttgcgggtaaggaagttacggcgtttacgaatgcggaggaggagcaggtcggattgacaaggcggtgccgtttttgccagaggatgcgctgcagaaggcgagtggcggcaagtttgtcaaggcgccggagccgtggggggagaagntannnttgtgtccggcaagttgattactgggcagaatcctgcgagtgcgacgggtgttgggtgaggcgcttgctaaggcgttgggtatctagggttatgatatgaaatatgtacatgtacagtaatgaagtatatgctttaacg

SEQ ID NO: 116159 - DNA, 784 bp, Zea mays
  Clone ID: MRT4577_37419C.1
ctcgagccggcaggaaattttttgggctccttcactcgcaccacactttagcttctcccacactgcccacatgcgcgcacgtcgcacagtcctacgctagtagcaacaaggcagccagctgagctcccactcccagtccagtcgagcgccgcagcaggggcaggtcaggcagctcggtctcgccatgagcaaggagaagcaccaccgcgactggatcctccgccgctgctgcggctccgtcgccgcctgcatcctcacgctcgccgccgtcgtcggcttcatcgtgctggtcatctacctcgcgctgcgcccctccaagccgtccttctacctccaggacgtgcagctccgctccatcgacctcagcgacccggcgctctccctcgacctccaggtcacgatcgcttcgcggaacccgaacgagcgggtgggcgtgtactacaagaccctggacgcgttcaccacgtaccgcgacgaggcggtgacggtgccggtgtcgatgccggcggtgtaccagggccacagggacgcgtcggtgtggtcgccggtgatgtcgggcgacgcggtgcccctgccgcagtacgtggcggacgccatgaggcaggacatcgccgcgggctacgtgctgctccacgtcagggtggacggccgcgtcaagtggaaggtcggcagctgggtctccggcagctaccgcctcttcgtcaactgccccgcgctgctcgccgccagcggggagcgccggcgccggcggcgcctttgccgccagcgccgcgtcgttggggtc

SEQ ID NO: 116160 - DNA, 652 bp, Zea mays
  Clone ID: MRT4577_3741C.1
cgaccagatcgacggccgccccaccctcatcgctcttcccctcgggcgccggcagatctacgcgggcggcgaccctattcgtcggcggctcacctttcgcgacgctcctctctagccatgtctacaatgaaggggcagacaaggagggagaggcctagaactcgtcctcatggcctcacgcaacagaagaggcaggaaataaaggaagcgtttgatctttttgacaccgataactcaggaaccatcgatgccaaggagctgaatgttgcgatgagagccttgggatttgagatgacagaagagcaaatcaatcagatgattgctgatgttgacaaagatggcagtggatcgatagattatgaggagtttgagcacatgatgactgccaagattggggagagggatactaaagaagagcttacaaaagcgttccgcatcattgaccaagataaaaatgggaagatttcagatgttgatattcagcgtattgccaaggagttgggtgaaaacttcactctccaagagatccaagaaatggttcaagaggcagatcaaaatggtgatggtgagatagattttggcgagtttgccaggatgatgaagaagaccagttatggctactaaggcggggatggcatctgcgagtgtctga

SEQ ID NO: 116161 - DNA, 162 bp, Zea mays
  Clone ID: MRT4577_37420C.1
ggacagtgaggcgccgcttgccctgcacatacggccgcggctaggaacccaaaaggccaagaccctgccaaaagctactacacagtacacacacggtacggaatccgggcatgcgagaaagcaggcctaatctcaaggccgatggtgcgagcgctggtttgc

SEQ ID NO: 116162 - DNA, 226 bp, Zea mays
  Clone ID: MRT4577_37421C.1
acagcgcgtcttttttatttttttttttttttcaaaaatccaagccaatataaatgtatttaccaattataccaaataacaattgtaggctctgacaatacatatcacttttgcacctaaatctgaaaagtcttattatatattttataacagaaataatgttttcatacctgcttattatttcataacactataacatttaaaaaaataattagatcgactgtac

SEQ ID NO: 116163 - DNA, 351 bp, Zea mays
  unsure (1)..(351): unsure at all n locations
  Clone ID: MRT4577_37422C.1
acaggngaaccaagcnaagnnaaaaggagaggcgcgngangccnaaccnacgaaggcttcgagcatgaagncganngtccgangaagccgcaccnacgaaagcngtgggngcnnggnnatgcagcgtgggaggccnggncnngaatggctccaagcccttaagaagtcaaagaaccttcactaggtgcatgtctgtgttcgtgcnggccagtcggtcatgnggacccgttgttaccatggnttttggntgagcccttgtgttttaagccaaaaggtggttggtggcctttaaaagctctgtgtttcctcctgtcgctttntcagtcctatggtcattttggggtgtagaaa

SEQ ID NO: 116164 - DNA, 532 bp, Zea mays
  unsure (1)..(532): unsure at all n locations
  Clone ID: MRT4577_37423C.1
ccgggnncgacccacgcgnccgaccagcgtaangcagncaaaagagaggggccgggggcagccacacaagcnacaggcaaancagcgacagccggagaaaccagaaacgcatggaccaacncnaaccgaccccggaggccaaangngcacccacaccctaccggccttaaaaaggcacggcaccaggcatttagtcgggggggggcagtgtccccttgtcctgacgttacaacctcagcccatgatatgaaccggaagacagaaccaaatggagcccaaatacacaatgcccatacatttccccctcaggacccgcccccggaccacaagccaaggtcaagccaggctacgcaatttgccaaggggggccaccacctaatggagcaccccccaggaacccaccaccccattttcctgctggacatatgcccttccatgatgaggcagaatcaacaccacttgaagaaccagagcaatgtgaggacccacgctatgatccagatgcaattgcattacttgggccaggtacaga

SEQ ID NO: 116165 - DNA, 426 bp, Zea mays
  Clone ID: MRT4577_37424C.1
aaagcgtttgaataaataatttgagaaaccattttatacatggtggggatcgcggacacccgtaaaccactttggaaaacattatttgctttgagtctatgatgacatattcacatccccaaaacttgagtttcattttgcattttgcttttttttgggtggggagggaggttaaattgaccctacctgatcactgtcgaaatctgttccctctagcccatgctgtgatcatatctacggaaataatttctttatcctgttaatggcaacaccagccgtcttgttcattggttctagaacaagggcatggttcaaatcatcaccagcatccttgtaataacctagcatctcccttgcagtgcccctccgtaaataggccttcacgctctttggatcaaggtcgacggcatttgtgcaatctgccga

SEQ ID NO: 116166 - DNA, 332 bp, Zea mays
  Clone ID: MRT4577_37425C.1
tacgaatctgaatgtgttaagtatgcacttcttaagacacaagtatatacagataggcaacggcaccgttggttgtccaattaaaataatacaagcccgcaggcggggagaaaccaactggctaacctgactactactagagcaaatgccatgaacacagcctgtcatcggtaagatacaccacgaggagataaaatgttgacaccagaccatgacggacgatgcacatttggatcgacaccctaacgtatcctacgattatgtatgggctaacccataatgtcagatcaccaccttatcagctgagaaggaagggaaaacatactaccttg

SEQ ID NO: 116167 - DNA, 1353 bp, Zea mays
  unsure (1)..(1353): unsure at all n locations
  Clone ID: MRT4577_37426C.1
cccacgcgttcganaaagaacaacaacatgtgtaggtactgctgtggttatagtcatgctnaggacgacattcctcatggtgccaataatgctgctggtgtggaagagccactggatcctcgtggtgaccttcatcgtgctgtcgctgatggtggaggttccctacttcgtggcctgcatactgaagatcgaccagggtggctgggtgccgctggtggtggcgacggccttcttcctcatcatgcgtgtggcatttctgcacggtgaagcggtacgagttcgagatgcacagcaaggtgtccatggcgtggactccggcctgggcctcggcctgggcctggtgagggtccccgggatcgggttcgtgtacacggagctggcgagcggcgtgccgcacatcttctcccacttcatcaccaacctgcccgcgatccactcggtggtggtgttcgtctgcgtcaagtacctccccgtgtacaccgtgccgacggggcagcggttcctggtgcggtggatcgggcccaggagcttctacatgttccggtgcgtggcgtggtacacatcctcgggtacaccatcgtgcgcgcgcggtcgggactctgctgttcgactgcgtcctcttcttcgtccggctggagagcatgatggagggctactccgactcgacagagttcagcgtgccggagcaggcgccgcctggctctggctccggctccggccgcggcggcccggcggcggcgttcctgcagggcggcgagcggacgtgctcgaccatgtgctccaacggcgagctgagcttctcgtcgcaggactcgatcgtgcccgccgcgcagtcgccggcgccgagggggctacggctgctgcagtgctcggcgtcggcgtcggcgtcggcggggcaggcgggcagctgcggcacggtgggcgacgagctcgagttcctgaaccggtgcaaggacgccggcgtggtgcacatcctcgggaacaccatcgtacgcgcgcggcgggactcgggcgtcgtgaagaagctcgccgtcgactacatgtacgccttcatgaggaggatgtgcagggagaacagcgtcatcttcaacgtgcctcatgagagcctgctcaatgtcgggcagatatactacatctgaatgtctatctgatgggagatagtgaggggcttgtacttcttcttctgttctcatataaatccctagtcttttttgggtaggatatgtacatgttagcttgggactaaagttttttttaagaatagagaatatattgcgctcgcaattggacaacaagttctggataatacgcaggttttggatctgactcgtgtgctcgtaccacaactaattg

SEQ ID NO: 116168 - DNA, 369 bp, Zea mays
  unsure (1)..(369): unsure at all n locations
  Clone ID: MRT4577_37427C.1
gagctctcatgacggcggccgcccttcttttttttttttgttttttttttatctttttttctttttttttctttttttttttttttttattaanttttnttggggccccgatttgaattccattagtgaaagttacctttcaaaaaaatgtttcttggccatttaactacaggggggtcaatggtccccaaagggggtttggtttaatttactgaaccaaattcggtttcataaatttggaattttaaataaacgggttcaacattaaaattgatttctgaaaattttttgcccacaagggaacaagccttgggccgaattccgggctttcctacccgtggttgggaaggtatatttttttttttgggg

SEQ ID NO: 116169 - DNA, 307 bp, Zea mays
  Clone ID: MRT4577_37428C.1
gcggcgggaaatcgatttccagccccatgtctcttgcaggctcttctcataatcaaatagaatctactgtatctaccgtaataagggcgaatgacagatgatagcatcagattaatggttcaaagatataccaccttctcgtgtgggcttatctaccatgctgaaagtagggtttgcataacactgcggtccccagatacgatgcggcgtcagctgtcaagattcatgaagactcctgatcaatgctgtgttctggtcttatattaacgaacattctcgagggccaattcacctgcgcgatcgctcc

SEQ ID NO: 116170 - DNA, 339 bp, Zea mays
  Clone ID: MRT4577_37429C.1
aatgagatcctggtccagggaagaccggaaagggccgggccgcggcgaccagctgcctatggagcgcacaacggggggggcaggtcaagcgggcctgggaaaggggccgggaaagccaaacagcgacgcgaacaaaaggaaagccgggggcaagaggagcaaagacaataacgggagagctcacagcccggattaaggagggaaacgtgggagccactgcagtaacgaacgccaacccgcgagagaggggtaggggaagggccgggggggagtagtgagaccagggagacggggacaggggaatggtttcaccgtctggccctgggagagggcaacacg

SEQ ID NO: 116171 - DNA, 120 bp, Zea mays
  Clone ID: MRT4577_3742C.1
cccagcgtccgcatatttgttgcttgtctatgctgcagaataaatgatgaacggtgcccctgtacgctggatccatgctgtttttggacaccatgccttttggtgtctaacttatctgct

SEQ ID NO: 116172 - DNA, 1316 bp, Zea mays
  Clone ID: MRT4577_37430C.1
ggacatccatcagaccggagtgaagcacaccaacatgataacttccttttatcacatcggtggatgctacatagcttcccaaacggttgtgcatttgcgttcctatttttcggcgggtatatttgccgcttatttctcacacgtactaccgtgttgtgttgatcttgtgccaggcattggtacctcgaggccggccgggacatcccttttctttatatcctacctcctgcagcagcacattccgtactgctccaccctctttttagtttctattggctcacataccaatcgaactatcttctctgtcgattttgatggtcggtttgggtcacagctggacgagctagagaagaagctcgccggcgaggtcagggtgaggaacagggcggagaggaggctcaggagggccatcaagaagctggagtccctcaagatcctggacgtcgagctctcggaaggctccattgggtcgctgtcctccaacggccgttcggatcaccaggcgccggaggccgaggagaggaacggccctggctcgttgaccactcgtgggtctgtgctggcatccggtccttccggagaccccgaccccgacgccgacagggaatcgtcagagggatcatgcacccaggtgaattcgtcctcccgggacgggagctggtgctccgttgcgtcagagcaatcccggcctggttcttgcatggatcttgccggaaacaccaccaactgcagctcagaggggagttgcggtgaccatgattcagagagggaacaccttgatgcatccagtggctgtggctcagcaaaatcggaagaagcgttctacgaaagcgacgacaggctagcgctatcgcggggtctcgttgaaccaccaccagcagctgcaggcgaaggtccaagaacgcaggataacgacacgcatgcaggagaggtccgtgccatggatcacgaggaagaagaggagaccaacaagcttgcgatcgttctagccgacccccagccacagtcgcaaggcgacgtggagtccgttctcctggcgctgcggcgggtgaaggagcagctgcgctacaccatgaaccaggaactcgccgcgccaaccaggagctctacgcccaccgagcgagcgtgccacactaggaaaccgtgtggctcacttctactacggtgtccaacattcggttccgtgaattattcgtagtgctgtttaggggagtggagtatctgtacagaatggaataaggtcgctcatgtggatgtggagtcactattttattaaccccaagagtgaatctctaaaaaaaaaaaaaaaacaaacc

SEQ ID NO: 116173 - DNA, 252 bp, Zea mays
  Clone ID: MRT4577_37431C.1
gggatctattaaagaacatgtgtgcacattacggactatgtacctaatctgaacaaactattcatacttccaattgacaacttttaacgctcaactaagccagacctgaataccaccacctttactgtcaaacgggcagcacttaattcacacacacctcatatcgaattttctttagacgctcgcagtcacacacgcaagtgatatatactaatccttgagcacctcgaacaaaatctacatcgcacccac

SEQ ID NO: 116174 - DNA, 382 bp, Zea mays
  unsure (1)..(382): unsure at all n locations
  Clone ID: MRT4577_37432C.1
cgggggggagnagggggacgcacacaaccaaacacagtaatggttcttcaaagaaggctanggagtaaccaancagtnagttttattttattaacacaatggacccacacataaatttttattggcttgggccacccgactcatgtatatgacattacttttcagtgtcactaccatggttaggttcaggccccccttcacaaccgtgttcacatacctctctcactgcacatcgaatagaccttactgctctttaatctactattaccaggcatggtggttgtgtcataataaagtaacgctgttctactcgtaggacattgaagaactatttgttatttaaccctttgatatgtacttaatatcttgcctatttcacgtc

SEQ ID NO: 116175 - DNA, 2386 bp, Zea mays
  Clone ID: MRT4577_37433C.1
tcaaccactttgcaatatgagttgggtacccaatccaatacacattcgggcccccattgccctctgcattggcgttgccaaccgcaagctcgtgcgcgcccagcttcgaaacctccgccccgtcgcataaacccctcctcgcctcctccgcccgagcctgcctcctcatcgacttatacgcctccttctcttaactcgacgcactagcctcagccaattgtcgcatttcgtcgctatggggtccacagcggccgtctccgtctccgcctcggcgatcgcgtcccgcggctgcgccagatccgaggctgcgcggcggccaggtggaatccgggtctgcggactccggagcgaggccctcacgtgtcactcgcttcggatctcgcaggcgcccgcgaggctgacggtggcgaggccgccgccgccggcggcggcgaccaatggcgcggcggcggggacctgcgggttcgactacgatctcgtcatcatcggcgcgggcgtcgggggtcacggcgccgcgctgcacgccgttgaagagggcttaaaaacagcaataattgagggagatgttgtgggtgggacttgtgtaaacagaggctgtgtcccatcgaaagcgcttcttgctgtcagcggtcgaatgcgggagcttcatgatgaacatcatatgaagtctttgggtctacaggtttcctctcctggatatgacagacaagctgttgctgatcatgcaaacaatcttgcctcgaaaatccgtatcaacttgactaactcaatgaaagctctaggagtggatatattgacaggtgttggcactattgtgggaaagcaaaaggtacgatatggaaaagctggtttcccagataaagaaatcactgccaggaacatcataattgccactggttcagttccttttgttccgaaagggattgagattgatgggaaaactgtatttactagtgatcatgcactgaaacttgagtcggttccagactggatagctattgttggaagtgggtacattggacttgagttcagtgatgtatacacagctcttggaagtgaggttacttttgttgaagctcttgaccagctgatgcctggatttgatcctgaaattgcaaaattagcccagagagttcttatcaatcctcggaaaattgactatcacactggtgtttttgcaagcaagattactcctgcaaaggatggaaaacctgtgctcatcgagcttattgatgcaaagacaaaggagcacaaagaaacccttgaggttgacgcagcccttatagctacaggaagggcgccattcaccaaagggcttggcttggaaaacatcaatgttgttacacaacgtggttttgtgcctgttgatgaacggatgcgagtcatggatgcagatggcaatgtggtacccaatttatattgcattggagatgccaatggcaagctcatgcttgcccatgctgccagtgcacaaggaatttcagttgttgaacaaatatctggaaaggatcacatcctaaatcatttaagcatcccagcagcatgtttcacccatccagagattagtatggttggactgacagagccacaagccagagagaaggcagataaagaaggatttgagataaatgttgtgaagactagctttaaggctaacactaaagctttggcagaaaatgaaggagatgggattgctaagttgatttaccgacctgacacgggtgaaattcttggggttcacattttgggtttgcatgctgctgatctcattcacgaggcatcaaatgccatcgccctaggaactcgtgtgcaagacatcaagtttgctgttcacgcacaccctacattgtctgaggtcctggatgaactcttcaaagcagccaaggttaattccggtgtttctcattctgtaaatgaaccagttgcagcctagagaaaggccggatagcaagccaaggcagccaccccaaccactcctgaaggtcctcagcttcgtcacgaccctgttttcttccccaaaacgagattgacaacggtaacggggagggtgttgttgtaggcagttgctgtaggttacaaatttgaggaagaaattcatcagtgaatacaagcacacaaatgtttcttttttgggtccagattgttaaaagggtcttttttttgacggtggggtgggtttttgttggcttcgttatttgcatatttgttgttggttgccctgtaagatgaagtgccgaggctagctcagctagtttgaaataattcatgtttcaaaactcagatgtattgcgccgacacaatggattagttggttatcttcagtaagctgcaaaacaatattttgcacggcaacatggcatgcctacacattggttttcgacgttta

SEQ ID NO: 116176 - DNA, 397 bp, Zea mays
  Clone ID: MRT4577_37434C.1
ccggccgggaattcgtcgctcaagctagtccgccacgagagcttcgtgtcggtcgagtcaatcgaaaaaggaagttgcacctgccgcggatagcaagaacagaggagaggaggatcggctcgtactgcaagtcagaccgcccgcacagtccactgtcgaggcaagtccccccgcaagcagctcgccaccaaggcgacgaggaagtcggcgccgacgaccgtcggcgtgaagaagccccacaggtacaggtccgtaaccgtgtggctgcgcgagatccgcaagtaccagaagagtacggagctgctgatccgcaagctgcccttccagcgcctggtgcgcgagatcgcgcaggacttcgagatatattttttttttcagagccccgccggggtggcac

SEQ ID NO: 116177 - DNA, 311 bp, Zea mays
  Clone ID: MRT4577_37435C.1
agatgttgttaattcaaagttaaatcaaaacaacttatttccagagaggtataacctaatagtatacatattaaaaaaactaaacgtggcatatctattattagataattacaaatagctgaaagaccataagaaaattcataataggaaggtggatagttgcataaataaaacaatcaaaatgtttttgttttcttgtttttgataatctttaacattaaaaattaagagaaatactacttctaatagacatattgagatattataacttacttttttatcttttgttttgacagaagatttaagttcat

SEQ ID NO: 116178 - DNA, 899 bp, Zea mays
  Clone ID: MRT4577_37436C.1
tgacgttgggaaggacgcatacgaagaggtagatttagtcaccaagggtggaaactacggatggcgtgtatacgaggggccatacatctttcacccgcaaaagtcgcctggagggaatacttcgcctgagtccataaacgcaatcttccccgtcatgggctacgaccattctgctgtgaacaaggaaatcgggtcagcatcgatcacaggcggatatgtgtaccgaggttccgctgacccctgcttgtacggaaggtacctctacaccgacctgtactcatcgctgatgtggacgggcacggaggccccagaggggagcgggaactacacgtcggccgtgaagccggtgagctgctccaaggcctccccgatcggctgcgagtccgtcgccgggagcacggacccgctgctcgggtacgtcttctcgttcggggaggacagccgcaaggacgtcttcgtcctggcgagcaagggcgtgtaccgcgtcgtcaggcccagcctctgcggctacacctgccccgcggagagaccggcgaccgacaacggcaccgcgccaggtccaggcgggccgtcgtcgggcgctcccgccgcgacacggctagggaggtcggtggcggcggtcgcgggagctctggcgttgatcccgtgtgtgctgttactgtgaccttcagatgtgtgtctcgtgcgatgtagtaggatcagtcgtagctgaagctactgggagctggaagagtacatacgtatagcgtgagtaacgaacactcaaaaacagttgtgctatgtggatgcctctggacaagacaaagagcaatgggtagttttggcgcggcgctggaacgttcggcaaaaaaaaaaaaaaaaaaaaaaaaaaaaaagtactctgcgttgttaccactgct

SEQ ID NO: 116179 - DNA, 749 bp, Zea mays
  Clone ID: MRT4577_37437C.1
cattgggtacctcgaggccggccgggacttctcagccgaaaactactgtcatctccttatcccgcacctgcgcctctgttatatctcaaacccggaccagcccaacacccgtactcgaccaataacctccctcccccttcctgacagacagcacccaaagaaatcatggccgattctctcaccgaggagcaagcctccagaggtcaaggaggccttctctctaggtcgacaaggatggcgatggtcaaatcaccacctaggagttaggtaccgtcatgcgctcgctcgggcaaaatcccagggagtctgagctccaggacatgatctacgaggtctatgccgataacaacggtaccattgacttcccagaattccttaccatgatggcccgcaagatgaaggacaccgactccaaggaggagattcggaaagccttctgggtcttcaaccgcgataacaacggtttcatctccggcggctaactgcgtaacgtcatgacttctattggtgataaattgaccgatgacgaggcctgactagatgatccgggaggctgaccactacggcgacggccgcatcgactacaactagatcacccatctgatgatgtaaaagcaaacgcgtgaagctccgggcgctgaatgaatacgcgtatcatgacggtgacacgggcgatgctgatcgacgacgactgactgcacaattcgatcttcttggcgtgccattgcacaacggatgcgaatgtttgc

SEQ ID NO: 116180 - DNA, 153 bp, Zea mays
  Clone ID: MRT4577_37438C.1
tcgggtggaagctacaaatataacatcggttgacttgaccaaccaaccaattccatttgtgcttggttgacccttgaagtcaatgtgaagcaacatttaactggttgcttaaggctcaccttattgggataatctggactacatctacactga

SEQ ID NO: 116181 - DNA, 472 bp, Zea mays
  unsure (1)..(472): unsure at all n locations
  Clone ID: MRT4577_37439C.1
attcccgnttggaccgccgcgtcggggaagatatactgaaatctcctgtacggagttctcgtttttatcactctccaatcctcgggagaaattcagaggatgtgcccgaggaggaancnatcaagttgatgtctcctgaaaaaaaaaaaagaagtgctttgcatatggtgatgagaagcacccaatgcatggttacatgataaacgtaaaggcaacaactaaagagcgagaggggtcagaggctacaacctaccttttaaaaattgcatcgtgtcaatgaatggcaagctgtacgcagctcaaaaactgagagaantgnnntanacaatagtgttgtcggagagcaagttcaacactcagaaccacaacatcattttaccgatctgccacccacaggatcggacaagatatacatcgatgacactgacgtgggggtggaaatcacgactcaattttagcgtgcctcacaatc

SEQ ID NO: 116182 - DNA, 1608 bp, Zea mays
  Clone ID: MRT4577_3743C.1
agtccgacacctccgtctgcgcacacattgggcctactctccacgcatgggacacccaacacttgagctcacacaatcacgctacagagcgcagagctgcacgctccaccggcgaactcacctcggccgccctcctctgccagatagcctccctctactattcaagcccaaaccctaaatcctcggttcccaaatggcgacgccgccgactgcgctgctgttgctcctcgcggcggcagcggcattccacggcgcgacggcgaagacgacgatcgagccgtgctctggcgcggacgcgtgcccggctcttctgggctacaagctctacgcggacatgaaggtgtccgaggtggcggcgctcttcggcgccgacccggcagcggtactggctgccaacgcgctggacttcgcctctccaggcgccgccaaccgcatcctccccgcgggaacacccctccgcgtgcccacccgctgcgcctgcgccgacggcgtccgcaagtccgtcgccatccgctacgccgcccggccttccgacacgctcggctccatctccgaggtcgtcttcgccggcctcccctcggccgaccagatccgcaccgccaacgggctcgccgccgaggaccccgacgcgccgctcaacccgggccaggagctcgtcatcccgctcccctgcgtctgcttcaactccaccgacaacaacctccccgctgtgtacctctcctatgtcgtgcaggtcggggacaccgtggaatccatcgccgccagccacacaaccaccgtcactgatatcagcaatgtgaacgccatggggagccccattgtcgcaccaggcgacatccttgccataccattgtctgcttgcgcctcagcatttcctaactctgcttcggactatggattgcttgtggcaaatggaacctatgcactgactgctggtaactgtgtggagtgcagttgtgggccagcgaatctcaatttgtattgcacaccgtcttcactatcagcatcatgttcaagtatgcaatgctctaatagcagcttaattcttggtaatgtgactgcacaacccaccactggtggctgcagtgtctcatcttgcaactatgatggctatgtcaatggaaccattgcaacatcgctatcctcaggtcttcaacccatgtgtccaggaccgcatcaatttcccccactcacggcggtgccaactgcggcaaaccatgggtcttattctccatcacctgcaccaggacctggagatgctggtggtgccaccccaggaggttccagcctttctccatcaaatgagcctgctgggaacagctcacaagcggctgcgataaatcaaccatgccgtttcctcctcattttcattctttctgtgacattgtccttgcgggtgtggattcctgtgtagagtattgttttttttaaaaaaataactatgtagagtatttgttggctgtatttgtattgagcgtggaaggccttattggggccaggtggaacctgaatgaagaatgcagtagcctgtcttcgttagtgtccggtgaaactttggtatgattttggttctccccagaatttgtatatgaataagcctatctccag

SEQ ID NO: 116183 - DNA, 273 bp, Zea mays
  Clone ID: MRT4577_37440C.1
ggccaagactatatatctacactgcacgaacatattgttcatgcacaacaatttgaggtcacagaacagtgggacaattaacaatggaatagcatttcatctctacgtgttataagtcctgaaggtagcactttgctcatgagagggcggggaatcattttttatggcagggagattgtgtaggtcacttttccattgatgtgaaagataagaaaggcctgtgaacaccctaggaaagaccatacccatattggtgccggttaagaaacccac

SEQ ID NO: 116184 - DNA, 144 bp, Zea mays
  Clone ID: MRT4577_37441C.1
cggcggaactggtggtgatggaagcggctgcggctgcggatctggctgcatgccgacaagcggtcatggccccttggaccctcttaaactgctcttgtgcgccaactagcttacagactgatcagcttccctgaaaaacctcta

SEQ ID NO: 116185 - DNA, 368 bp, Zea mays
  Clone ID: MRT4577_37442C.1
attcggctcgaggcaagcttgctggtggaagttttttaggcggcgcggctaaaggagccgcaagggccttgtgcagcttggattcacggaaatctttgagaactaagctatgtaacctgctgtcaagaaaagaactatgccttattggacatacccggttttgtgccagattttttggtcccttactcgcatgtggtgctgagccaaacaattgcttctgtagcatatcagtacccacatccttactatgcaggcatggttgatccctatggaacttatgttgaggctcatttacagctaactggacttactcattctcgaatggtattacctattgaaacattcgaggagcctgtttatgttaatgc

SEQ ID NO: 116186 - DNA, 478 bp, Zea mays
  Clone ID: MRT4577_37443C.1
gcgaaacgccgccgcgaagcccgcgtggccgccagatcccctcacccccggccgcggacacgtcgccaccttgccgcgcgacatgggcttgcgaatgtccacgccacgacgtagcttgcttcgcccgcgcgccgacctagcagagttacagtgcctctctgcacccaccacgttgtgcgttctgcgttgcgtgagcgtcttgccacagcttgcgtcgccagtgccgcagccacgacgatggtcgcgtctcgcccagagttatgaaaaaggcctgattttcaatcgcttctttgtaagatgctagatgcagtgtcttggttagcttcactgcatggcatctttcactactcagtggattcttttcgagagccaatacctgcaatgccttctcaaacaccactgatgatactgaaccactctcacagtttgaatgtccgcttaaggtttctaatgacttaagataacacttgcttttata

SEQ ID NO: 116187 - DNA, 638 bp, Zea mays
  unsure (1)..(638): unsure at all n locations
  Clone ID: MRT4577_37444C.1
ttatgagggcgggcgcagcaccaatcagccagcagtccagcacaatatcatgaacaagcgtcaggtgcgccgcaggcaggtgagctagcgccttcctagagcgcctagctagtccagcactcaatctgaccgggcgcgagcagtccagtggaccgcttcagactgcccgacgagggcgggtgtttttttttatatctccccagagcgggccagactgagttcgacccgagggcggcgggcggcgcctctgacataccagcccatagcatgagtccctgggtcccgactgcagatccacccgtatcaatcgtggggaaccacgctgtcgnatccagacgccaaggcccccgcaccgacncaggcaagggccccggtcggaccgccggatggaccccctcagtacgatcgcaggggaccactcgagcgaggcgctgaggcccttacacagaagccgncccatacccgggantgccaaccatcaagcggcggcagataacgtgcgtgctggcgtaccctccgagccgtacgctcacaagaccccgaagatcaccccggccgtgactggtacccacccgaggacacacgtcaccgtgttggccagctgaggaccgggcaagggtccatggccgaaccggcgg

SEQ ID NO: 116188 - DNA, 562 bp, Zea mays
  Clone ID: MRT4577_37445C.1
acctcgaggccggccgggatcaccgtccactccagaacccaaatccgttccgttttatcgtcgataaggacatgaaaggggataaaaaaaaaggtaatccatggcggcggtcggcggggagaacagcggggctggcgagggcggagggccgagttctaccctgcgctactacgtgatgacacgatggcaatgttcgggcacgagctcctctagttcaagatccgccccgacggaaagctccgctacgacaacaactccaactacgagaacgacaccgtgatccgcaaggaggacttcgtatcgacctccgtactgagggaggtcaggaggatcatccagcagtccgacatcatgaaggaggacgacagccactggaccgagtcctaccgcatcggccgacatgatctcgagatcgtcgtgggaaactagcacatttcattctcctgttccaagatcgaatccctcggcgatgtgcagtacagaaaggacccggagagactccggatcttctactacactgtacagcatctgaagtgtgtcgtgatctcactcatcgaccttc

SEQ ID NO: 116189 - DNA, 360 bp, Zea mays
  Clone ID: MRT4577_37446C.1
ggtgagtgaggggagggatgacatggttcttggggtttaaggctttagcgatagcttagcatatgacttggttatcagtatgtcctatgcatgtaggttatgaagctaagaggaaaatgaaaactagtatgggaagttttcttatcgatacgtaagacttattggcatcaattgagcttgttaagttgttacgccacttctgacaggctacagcctattgccctagtggaataatgccatttttcacactcaaatagggggtttgaatgcaatagaattaatagctagttaactaaaaattgatagtgtatgtagctaactactatgttggatgtttcggctaattttagcaactaatta

SEQ ID NO: 116190 - DNA, 586 bp, Zea mays
  Clone ID: MRT4577_37447C.1
ggccgcttttttttttttttttttctttttttttttttttttttttatatgttttttttttttttttttttttttttttttttttgttttttttttttttttttttttcttaagttagcgtactgaacccacccagaccggcccagcgaagagaaaaaaagagggacgctaccaccccccacacccaaagaaccggaacccaccacggaaaaaaccaaagacagaagcgacaggggacagccacgcccccgatcggcggggcgggcggacaaaaggcggcacaagagaagaggcacacaggaccgaggagaccgagggcagccacggagagggggggggggggggggggaagagggggcggcaggcgggggggaaccagagagccaggcggagcgcgccaaggagggggaagagggaggggcccctggcgacggggacgaggaggcagccgacgagggcggaagcggcaccggcgggggggacagaaagaaccttgaggcggggcccgctcccctgggaggaaggagggaggcccctgtagcccttgggccggggggggagaacaagaaggtcgcgcccgtcaggc

SEQ ID NO: 116191 - DNA, 700 bp, Zea mays
  Clone ID: MRT4577_37448C.1
ctgtgtgtaatttggagataatagtgttacaaaactccctgtcagattgggtgcagagctgtttcagacctctgaaactgaattttcagtgtttttactaaattttggatcaccacaacccttgttctatatgatttcagccatgagtttatattcaaaataggtagagatatccatggagaataacttttgtgaagggatagtggtctgttactaaaagaaattgggtgatcaatgcagctaaacaatgaaatgtgcaagggggcagtgttggctgattcagtaaattcagaggactgaaactgtgttttagtgatgtgtggccaacttcagagccacataacttgtgatctacatattttgggtcgtggatttttatagtaaacctgaagagccatggttggggaacaaatctgttcaggaatgcttgagctatccttgtttggaatagagagaaaaaggtgttcgaactatgtctatcaggcatgggaatgcaaacctgaataagtcactgtggatttggttcagtatttttctcctgactttggagctgtttagtatctgatctaaggattataaggcttaagtctgtatggaagattgatagtgggttagttggtcaacaaggttccttaaggtcggttcccctgttgttgcttggagctgggaaaaataaaaaggtgaagctgtgaactcagtc

SEQ ID NO: 116192 - DNA, 306 bp, Zea mays
  Clone ID: MRT4577_37449C.1
ctgaacgtatgactagataacaatatgcgttatccatggtggactagtactgctggagggggtacggtaggtctggtgctggagactactacgacagctgctacaacaggaagtccggcactgatgactacgggcgaggggaaggtggttacaacaagtagggcggggatgactactacggagcgtaaggcggagatgtgtaccgcttgatcagttgcaacaactacggcacgggcaacgagagaggtggctacaacaagtgcgatcgcggtaacaactacggtcacttcagaaacagattgtatg

SEQ ID NO: 116193 - DNA, 1164 bp, Zea mays
  Clone ID: MRT4577_3744C.1
actgctcgaagaagcacttgcatctcgtaataatcataccatattgtcccttagatcggtcgaccatggcagcagcagcagccacgagactcagcggcggcggcgtcgccctcttgctcctggtgctgctggccgccggcacctccacctcgtcggcgcagctctccaccggcttctactcgcactcgtgccccggcgtgcacgacgccgtcaggtcggtgctgcaggccgccatcgccagggagcagcgcatgggagcctccatcctccgcctcttcttccacgacacgcccagcttccagggcgagaagatggccaagcctaacaacggctccgtcagaggcttcgaggtcatcgacgccatcaagtccgccgtcgacaaggcctgccccggggtcgtctcctgcgccgacatcctcgccatcgccgccagggacagcgttgtcaccctcggaggtccgaactgggacgtcaagcttggccggagggactccaggacggcgagcttcagcggcgccaacaacaacatcccgccgcccacgtctggcctcgccaacctcacctccctcttcgccgcgcagggtctctcccagaaagacatggttgcgctctccggagctcacaccatcggccaagcacgctgcaccaacttcagagcgcacgtgtacaacgacaccaacatcgacggcgccttcgcgagagcaaggcgatcggtgtgcccggcagcagcctcatcaggctcaggcggcgacaacaacctggcgcctctggacctccagaccccgaccgtcttcgagaacgactactacaggaaccttgtctgcaggaaggggctcctgcactccgaccaggagctcttcaatggcgcggccaccgacgcgcaggtccaggcgtacgtcagcagccagagcgcgttcttcgcggacttcgtggctgccatggtcaagatgggcgacatctcgccgctcacgggctccagcggggagatcaggaagaactgcagaaggatcaattaagctagaggcagcgcgcttctaagcgtaccttgtatcgttgaagtttctaattcctccgattcaaattaagttgtcaaatcactgtgctacgctgtaccaatgcgttggcatgtctattcgtttgaataaattagtcctatcccctctc

SEQ ID NO: 116194 - DNA, 128 bp, Zea mays
  Clone ID: MRT4577_37450C.1
aaaaaaaaacccccagggtttattccaaattttcccgcaacccgcccatgccccaaccggggggccaccaaaccgaaccgaagttgggcgaacccggggccgtagggggggaaaatttcaaattgcaa

SEQ ID NO: 116195 - DNA, 2459 bp, Zea mays
  Clone ID: MRT4577_37452C.1
ggatgcgttcggtaaaagcaaatactcctgtgcctctttctggctccctgctgtctgcctggccggtgctcactgataggggaaggatggccgcacgcagggaggaggctcgcaggaccgaggatattatcatgccggtgtgcgtgtcttgcgccggagactaccctggaaagccgggcgacctcgccgccggccgggccggtactccccaagtccccatcgggcatcggcgctgccacgccacggccgacgcttgagacgctccccgccgcctgccaggccggcaccgcgcgtgacttcgcctcatcctctccggagatggacttccaggtcgtcgtcctcgccggaggcacctccgagaaactctcgcccctcgtttccaaggacgttcccaaggcgttgctcccggtcgccaatcgccccgtgctctcttacgcgctggacctccttgaggccagcgacctcaaggatctcatcgtggtggttgaggggcaggaggcagcgcagcttgtcgacgcttgggtatccagcgcgtacctggatcggcttcgagtggaggtagttgtggtttctgaagaccttggaagtgctggtgcattacgagctatttcaaagcgattgatggcaaacgatattttggtagttagcggtgacctggtaacagatgtgttgcctggggctgttgctgctactcatagaagaaatggtgctgctgttactgctttattatgttctgttcctgtcagtggtccttcagacacttcttcttctagtgggaaagataaagctaaaaagccaaatcgtttgaacatagtaggactggacaggagtaaacaattcttgttacatattgtgtcaggaactgatgttgaaaaagatgttcaagttcataaaagaaaaatacaggctggttggtcagatggaaattcgaagtgacctaatggatgcacatctttatgcttttaagaggacaatattacaggacgtactggaacaaaaggaagcataccgtagcattagacttgaagtcctcccgtatttagttaggagtcaattgagatcaactccatcaggtggcagtggaacatcagttgacgaaattgagagtagtgcctttcagtccagtggtaatttgcagtgtttgtcgcagcatcgggtcattgcaccatctgctttcaagcaggatgtattatcaagatcaagtggtggacataggtgctgtgcttatattgctagtaaaagcaaatactgtcaccgcttgaactcaatccagtcatattgtgatatcaatcgagatgttataggggaagttagccacctgtctggttattcgttttctgcacaaaacaatattatccacccatcctctgttcttggatcaaagactacaataggaccacactgtattcttgctgagggttcacagcttggtgacaagtgtagtgtgaagcgatctgtgattggtcgtcattgccgaattggttccaatgtaaagatcgtcaactctgttgtgatgaatcatgttgttattgaagatggttgccacatccaaggttctgttgtatgtaataatgttcaactgcaagaacgggcagttctgaaagattgccaggttggagctggttatattgtgactgctggcagcgagcacaaagcagaatccctagcaagaaagtacagtgagctttgactggtttgttagatcctgaatgttttttttttgtgttcacttgagatgcaccccctcagaaaaaagggtagcagttgtccaaattttataaaatgtcattatgtacaacagcacagttcagtgcgaaaggtttggttgcttatctttcctaccaggcggcttgttagagcgaaaggtttggtcgcctatctatcctaccagctgcttgagcaagttgcatgctgtctgaggacgatgggttgatagttggggcatgtagttgggacctactattgtcggaaattctggattcggtttctctaaaaaaaaaaaaaataaagcggccgatagatcgcgacgtcactgcgtaaattctgagggttcacagcttggtgacaagtgtagtgtgaagcgatctgtgattggtcgtcattgccgaattggttccaatgtaaagatcgtcaactctgttgtgatgaatcatgttgttgttgaagatggttgccacatccaaggttctgttgtatgtaataatgttcaactgcaagaacgggcagttctgaaagattgccaggttggagctggttatattgtgactgctggcagcgagcacaaagcagaatccctatcaagaaagtacagtgagctttgactgttttgttagatcctgaatgttttttgtgttcacttgagatgccccccctcagaaaaaagggtagcaattgttgtccaaatttataaaatgtcatatgtgcaccagcccagttcagtgcgaaaggtttggttgctt

SEQ ID NO: 116196 - DNA, 287 bp, Zea mays
  unsure (1)..(287): unsure at all n locations
  Clone ID: MRT4577_37453C.1
aaaaaccaaccgacgcacgcgaacgatctganactcccactctccccctaccgttttccctacccatcacacacaaacagcctctgctcaccttccacatcctccgggtcatgtcctgctgctccccatgtcgcccccactcgacctctactacatatgcctctcgccggcggccgcttccgtctctgcccaccacgacctgaattgtacccagctccgccttggtctgccggggaccgcttcgccttaccgccgcgttgtgactgccaccgcaaccaccctggacc

SEQ ID NO: 116197 - DNA, 617 bp, Zea mays
  Clone ID: MRT4577_37454C.1
aattcggcacgaggcaccactttggatgggtgtcttagctccatcgccactacaaagtctagcgcccctgtcccctgcccctgatggcaagccaaagggcaatagtggtcgacgctcgaacaaaggcaagggtggcaatggtggcggctacaacggcggcccagtcgacaactagccccctcgcaggggcaggtctcttcaagtgttttttcttggaagcatcgttgaggcgcctccactcattctgtggggtttttatgaggaaacttcacctaggcttgtgacggcggcactcaacatcgtgtctttcttgaaggcgacacctagaagatcttgcaccgctttgatggatgtcgatctgccaattcgcgtggctgatctgcaagccctgggttttcgacgaggctgagctctctctagctcacgattttcttgtggcacatctcaggttcttttggagtggatctgcagtggtgaagtcggagctgctttggttttgagggtgcaacaaagctccacaacgatggcaaattgttctttttctcaagaagtcgtggcttgttgcgagtgagtggcagcttagtatgggctttgactgaggttttttgtgggaagtc

SEQ ID NO: 116198 - DNA, 712 bp, Zea mays
  Clone ID: MRT4577_37455C.1
attgggtacctcgaggccggccggatgtgccttacaaaaaaggagatccagctttcagctctctccacctatcttccacttgctgcactccgagcgcaatcatacctgatatgtgattttctgatttgaagtcatcattgaatgcatgtcaccatgacatacaaatctgacaactaatcttaccaaactaatatgcccaatgcactaaactaactcacctcacatgcaattccaatcacggtccaatttcgaacttagaaacttaaccaagcacttccaatccatgataagtaaaatacaggtgactaaaagaatagctacttataatgtaattcattccaacactacctgacatcgtgcacctattgtatgttctgctgcgatcactattgtatttgttgcaactgaaatgcacccatggcagcaaactggtgatctcgcagatgatataatatgactgcccccacatttgaatgccatgaaacaccgagacatgacaatacttcctctttatgataaataccacgatgcttgcgatactcacgacacttgatgatctaaatataggtgacacaaacacaaactgatcaattctaccactgctacttcacactatacaatcccgtctgtgctcatcatcctacgaccctgtgaaataacatgatacaagactgcatctcaaccgtatggaactactactgtaactgactat

SEQ ID NO: 116199 - DNA, 641 bp, Zea mays
  unsure (1)..(641): unsure at all n locations
  Clone ID: MRT4577_37456C.1
aattcggcacgaggccgcgattctattctacgccgctataatcagtcgtgcggcgtcgtcggcgaccttgccgcctgcggcgcggaccacgcggttattatacagctaaccggggctttgagctacagccttctcttgtggggaggcatccccgtcctctacttcgtcgctgccctctgctgcgcctggactggcgtggagtggagatccatccacccgcacttgccacgatctcttccttctcgtagttggttgcggatttgcttactttggtgcgccgcccggcaatccaaacaatcctgcttgggttcgattcgcttcgccttcgtcttcagcgctcaagatcagtttagccgaggtgccgggcgcggtttggctgtccggaggcttttagagttactggaaccccgatgccccaagtgaagtccagctacgatggcgccggcggggactacattaagtggatgtgcggcgccggcggccgcccgggcggcgccatggccagcctccaccgcggggtgggctcccttgntcgtgacatcagcgacccctgcctcaatccctccccagntaagggaaacagaatgctgaaaccagaaagatggcancgcgnntgtttgacagtgacgggaaggctatat

SEQ ID NO: 116200 - DNA, 4962 bp, Zea mays
  Clone ID: MRT4577_37457C.1
acgatccgatgcccgggagatgctactcttcctgtacgagtctaagtattttttatgagctctatacagacctggcagcgccacttcgtaaaggtagtcaaaccagaattgctttgctaatacacattcgaacaccagataaattatgttttcaccctcttgacttcacatggggcaccgttctggccgctctagccagccttggccgaacgtggcagcggcgctgcacctcctttgttcaacaatccataaaaagaacgtgcacttcccaggagcccaagatttccacacacgctctgctggttcgaactgaactgaaccaaggaagagagcattataaacataaaaggatgtataagcgcctggagcgctgattaatcatgatggtcgcgcaattatcctctgcaggagtactactgcaaatagcagttcacaaagttccagcaattcagctgccactcctatcgagattagggcatgcgaatccaaaatagaagcaaaatgggggagagcatcttaaaacaaccatatgttggctagacaccatgtcatcaaatcaaagattgcggcaactatctccttcagacaccaccactataagcattggaccttcccgataagtctattttctacatgaccgatcttagaaagaagggctgcagcaaacagattattcactccctaacaaacatgactgggtaagtccgcccaaggcttactcgggggtgttctcggttcccacgccctggatggactcaattcccaacagaggttatttaactatttaatcccaagatcatccaactacttggcactgctaaccttaggccccctctagaggctatgaacagtaaaaaactattccctataactcaagaagaagaacttccttaacatttcgattgctttaaaggcgaaatcaggaaggacaagtggcaatgcaacatacatcaccttagctgtcatgacatactctgcataaagagaactaccagtcctggtcactgctgcagctgactcccatgccaagcggatagaagccttatcaataatctcctgcgtttcgtccattgtggacgtcactgcttaacaaaaagcgattggaatcaatctgttctgttcgccaagcatttttagtaatgaatctcttccagatttttgttgaatagccataaccatagtgataaccctgtcggtaggatatagaaataccactgcgtcacccgcgtacagcgatatacggtcctgcatattcctagaaggaagaggctgaagaaacccttcctcagaggctcgcgagtcaaaagcctttgaaatgtcaagcttgagaaggatacgagcctgcttctgacaatgtaagaatctggtcgtctgctggactagcatgaagttgtcaagaataaaccgttttttaataaaagcggtttgattgggggaaaccatattttgcagccggtctgctaacctgttagccaacaatttagttaccactttcgcgaaactatgaaccagacttattgggcgaaagtctctcacactagtggccccctccaccttgggcagaagagtgatgaatgctgaattcagcgaacccaagtttctgaaatttctggcccaaatgcagtgaatggccgccataaaatcagccatgattaccgaccaacaactcttgtaaaatctaccagtgaacccgtcaggacccggggatttgtccgaagggagagccttaattgtatcccagacctcctcctccgagacaggcgcatccagggcaacgaggtcaaaagatggcatccctagagcatccagatcaactgtaacatcccttacttctgcagttccaagtaacccttgataaaaattaaagaaggctgctgcatttccttcatgggcagtccagatttgcccatcctctgagtgtattgctgcaatgaaattctttttcttcctgaaccttgtttgtgcatgaaagagagaggtattggcatccccttcattgagccacccaatccgcgatttcaaccttgccacagtacgagagatagaagacagggcaagggagtgcttcttgagcatgttccggagccacaattcagcatgagataatgagcgattgtcctgcgcaacctctaattgatgaaggagctccctagccatctcaagcttctgcttaatcttcccagcttttttgtcattccagctctgcagactcctagccgttgcctttaacttcttggccaaagtgatcggtgggcacggcccattcgaccatgtatatttccggccaatcaacggaatttcattaagggccaaatcatttgcccatctcctgaacctgcccatcatggcacggtctaagttattattattcttctcttcctcccttaaaatcggattaaaatcccccagcacaagccatggcccattacaaagagctctaatttctctaagagattgcaaaaactgaatcttctcttggttcccttgcggaccatacacacatgtaagccaccaaggggggctggtgcttgaatgaaagttcacagagacgctatgatcattcaccctactgccagcacaaataccaatgctatttttccaagccaccaagatgccaccactagcaccaacagaaggtaggaatacaaaattgtcaaaagctggacctagcatccgcaatacaaggaaccgagaaacatccaccattttagtctgcacctcggaaagccctttgctgaaaactctggcatactcatcaaggtcttttggcctaatagttacagtctcttcagcattcacaataccaagttccttcaaaatatgtttcttgccctgcgtggccggtggaggagtagccagtctctccactcctgcaccagcgacccttctattgtgtcggggtaccacctcagtggctgtagccttgccctgtcgcggccttctgactggcgccctcagaatcccacctgctggtctggtcagcttatcgatgaactcttttgcacccgaagggggggacggggacgcgccaagcagcagactgggttgactatccttcttcctcctctgccgaaagtaagtaatgatggggcttctccgtgataggcgactcgacgttcgcgcatccaccaaggctgacttctgccctcccatgtcgaatgtggcccgagatggagatcccgggggtagcacctgaattgcctgctccttctcgcatccacccatagagcaacaaactgccggagctctcaagggtgaagagggggaagatggtactggcaggggggagtgagatgggcaaccaccggacagccccgacgccccagcctccaccatgcaggcctgctcatgtctcctgccgttactctccacattatcttctgacgcctcaatcatagccccaatatttaattccttgacagcagggatatgctcctctaaattagaagaaccatttaaagatgcctccttggaaacctcctgttccaacacttcctgtgaaatagccacgtggcggggacagattggcagcggtcctagtctctcatgcacggggcgccgaacggccaacgcttcgacagggcctccctgccttgccggagaagcttgttgcaggcgacgtcgacgagacctagtgtcccgatcatcattagacgccggcggcgacgggggaggggaaacatcgcccgccgacggagagatcagagacaccgaggccatcacctgataagctagaagatgcttcacagtggtctccacttcaaaactctgaaccggcttcagaatcaaaagatcaacagcaaccggaatgagctctggatgccggctccaaccaagaaccctgaaggaggagaagttcagacgagcaacagtgtcgggatgaagctccaatgccgtgcagtgcgctcgcagcaaacttctagcagtttccacactccatgcgtgcaacgggactccctcgaagctcacagacacaaaggaaggcagggaaaccgcttcagcgtgtgcaagccttgaccacttgatgaacttgaaagacccagaaggtgagttgagaacagctccgttgttgaagacacgtaacaccgcttgctcattttgcatgataataacgaaatcttcaggcaccgaacggtggactgaaaaacttgcaggatcaagctcatactccgctgcaatttctgccgccaaaagctcagctgtcaccggcggccgcgaaccaatgaccacgacgaacagagcacaatgccgaagattgttctccaccagagttaaatcccttgcacgctcaaggacgcaaaccggccgtgccgccgaacctgcattcttcaccacggccgactgatgtgagggtagccgagcggagctgtcatcatccactggtggcaagctagcagcgctcctagatcggggccttctccccctggtacgatgtcgacccttcttggtgtgattcatcgactgtccaggcccgtcctcagcagcagcatgtcgaccatgatccatgggaggggagaccctccgccaaaccagcctccgcttagagaacggaactgaaacctccactggttgactgcctaagcgctcccacacaggacggccgccggacgaggcactggccacgttcagcctacgagcgacgagtggatgcaggtcaggaccgccggacaaaaccttggtcacgtcgtgccctctatcggcgccagggcattcagcagcacggtggcccggccggcggcagcgcaagcagcaggacggatgtcggcacgcagccgcacgatgggacgtcgccaagcagttgaaacacctcccccggagatcctgcgggaccggtcgacggggaaggggagggcgggggcgctcagccaaacgacgacgacgacagggaccacctagtctccactgtaatccagccctctgcgtctgatggcggcgaggccccgtgcaggcgacggctaccat

SEQ ID NO: 116201 - DNA, 260 bp, Zea mays
  Clone ID: MRT4577_37458C.1
cctcaagagcgcgatcgccgacgatgaccgggaggaagatctgctagccccccgtcggagacggcgtcaagatctgtctgcgcctcaagcgaaaaaaagaagaagaacaaaaaaaaaatagtaccctgtagatcctgctgtcccgggtcgacctgatccccactactgccaccgacggaggagaggaacccccgagccagtcattgtatcgtacgtgacgcgcagaatcacaatataaaccaccggatctggatattgct

SEQ ID NO: 116202 - DNA, 318 bp, Zea mays
  Clone ID: MRT4577_37459C.1
aaggattggaaccggtcgggttccccaaacttttcttatttaggattttaccccaggggcaatacacgggtttataaaaaattaaaccgtggttggtacccccctttttttttcccccgggaaactggctttggggcttacattttaacacttgacaaccactggtgggcaactgtttgtgctagcaaactgcctttgggccattcattttttaaactgggataacaactggtggggagtttccccccatatattggaaagggggtcccaaaacaaaaaaaaaagcaccctttttgaatcctctgaaaaattttgggg

SEQ ID NO: 116203 - DNA, 1388 bp, Zea mays
  Clone ID: MRT4577_3745C.1
cctcgaggccggccgggcaccggcggccacactccaactgctcgaagaaagcacttgcatctccgtaatagtcataccatatcgtccctttgatcggtcgaccatggcagcatcagtagcagcagccacgagactcagcggcggcggcggcggcgtcgccctattgctcctggtgctgctggccgccggcacctccagctcgtcggcgcagctctccaccggattctactcgcactcgtgccccggcgtgcacgacgccgtcaagtcggtgctgcaggccgccatagccagggagcagcgcatgggggcctccatcctccgcctcttcttccacgactgcttcgtccagggctgcgacgcgtcgttgctgctggacgacacgcccagcttccagggcgagaagatggccaagcctaacaacggctccgtcagaggcttcgaggtcatcgacgccatcaagtccgccgtcgacaaggcctgccccggggtcgtctcctgcgccgacatcctcgccatcgccgccagggacagcgttgtcaccctcggaggtccgaactgggacgtcaagcttggccggagggactccaggacggcgagcttcagcggcgccaacaacaacatcccgccgcccacgtctggcctcgccaacctcacctccctcttcgccgcgcagggtctctcccagaaagacatggttgcgctctccggagctcacaccatcggccaagcacgctgcaccaacttcagagcgcacgtgtacaacgacaccaacatcgacggcgccttcgcgagagcaaggcgatcggtgtgcccggcagcagcctcatcaggctcaggcggcgacaacaacctggcgcctctggacctccagaccccgaccgtcttcgagaacgactactacaggaaccttgtctgcaggaaggggctcctgcactccgaccaggagctcttcaatggcgcggccaccgacgcgcaggtccaggcgtacgtcagcagccagagcgcgttcttcgcggacttcgtggctggcatggtcaagatgggcgacatctcgccgctcacgggctccagcggggagatcaggaagaactgcagaaggatcaattaagctagaggcagcgcgcttctaagcgtatgccttgtatcgttgaagtttctaattcctccgattcaaattaagttgtcaaatcactgtgctatgctgtaccaatgcgttggcatgtctattcgtttgaataaattagtcctatcccctgacactggaaaaaattcaacttgtgttgttgtaaatgaaaaaacgaacaaaatatgttcaaaagtaaactggaccaattggaacagttacacgataaattgattcaaaaaaaatagtttaagtttcgtcggac

SEQ ID NO: 116204 - DNA, 742 bp, Zea mays
  Clone ID: MRT4577_37460C.1
attgggtacctcgaggccggccggggcagcaaccgctcccgtggacacggcaaggcagggccgggcctctgcgcacggcatccggccggctacagcccctagccgtggccatggcggcggccagccccgcccctagtcgacctcggctctccggtgagctgccctccatatcctggccgctcagtcgttcgccgcgccgatcgcccaggaagatctgcgatgctctcgtcgttgccgaggttggtggccgagtgaggctccctcttctccctttatccctcttcctctctggctgctccctccctccccacaggttcttccccggcgagtagccctgtctgccccctgccaagcagttcgtctcctcccggcgagcccctgcgcggctccccttccctccgatgtgtggccccagcgcatggccatggccgagtccctgcagtcgtgccccctgcacgtcctgtgtgcgcacgcgccgctggctggtgggtcgccggcgagccgcgctgccccaggcccctacccctgctagcccatgcccctcggccctcgcttggcaagcctccatggctacggccctggcagcggctccctagcatgcagcgactaccgaggagcgcccctggtggacgaccccggccttgaccccggtgcgattctgctcttgcgcagctgcccagggccgtccgagcttttcccagcggccttgtaagtgaagaatggaaaattggagaagaagctg

SEQ ID NO: 116205 - DNA, 256 bp, Zea mays
  Clone ID: MRT4577_37461C.1
ttcctccagcttcagccgccgcccgccaaccccaggcgcgggacctaacacttggcgcgctcatccccacccccagctccagccgaccaaccgcctagctccctgccttcctctacccgcctcctgcttccaccagctccagccgccgaccgccaggcactagccgcgcgacctagcgcctaccgcgctcagccccagatccagcctaccagccgcctagctccctgctttcctctacccaccttctgctttctcc

SEQ ID NO: 116206 - DNA, 500 bp, Zea mays
  Clone ID: MRT4577_37462C.1
aaaaaccttaaaaacattaaaaagcagacccatgggccaaaggttaaaacgggggggaaaccacaaacaggaaaaaggggggggaaaaaaatcttaaaacagggaaaaattgggggggaaaaacaggacctggacaggggtttaaaagaaatcaaaaaaaaatttaaaaggcccggggtactaaaaaaaaattttttaggggccaaaaaaaaatttcaaagggaattccttgaaaaccaacgatcttgggggggccatttattttaaaattttccaaggggggttcccaaaggggggccataaacaagaggggggggatcgggttttatgccaaaaaaaggaagggggcggggctaaaaaaccttataagggtaaaaaaaaaaatggggaatttcaaccccttttttttttatatccccccaaaaaaccccaggcgacaaagggacttgattttccatacaaccctccaataaaaaaaacctgccaaggggggggaaggc

SEQ ID NO: 116207 - DNA, 150 bp, Zea mays
  Clone ID: MRT4577_37463C.1
tctcactcttcactagcctctgctcctcggagatggcgggggcgattgcctctaccacctacctcttcattggccgaataaccctaaacccggcccgctccgtagccacagccggcacctccgtctgcttatcccgtcacgcagcaccca

SEQ ID NO: 116208 - DNA, 359 bp, Zea mays
  Clone ID: MRT4577_37464C.1
ccggccgggagcgcatccaaggtcaggtcaggtgtgtgggggcatggcatggcaggtatggaggagttgctgacgctgctgttcaacgcgctgctgctggtgttcgtggtgaagctcttgctggccttgttccacaccaagatcatcgtcatcctcctctacatcctcgtcctcctcttcgccatgctcctctccggcagattccccggttgatattatctactcatactcccccatctgagttgttctcgcttgtagccctgccctgtatcacgtctactattaaagtaacctccattcacaaatactatcatatacaaaaaatgtcttcgattgaaaaaaaaaaaaaaaaagcggcc

SEQ ID NO: 116209 - DNA, 716 bp, Zea mays
  Clone ID: MRT4577_37465C.1
aattcggcacgaggctcgcccatcgttccatgtctttctcctccggcggtcaccacccctcccggccggaccaaccccggatcccatttccagttagatgcttccccttcaccaccaccccgccgccgcgccggagtcggcggccccggcgacagaccctccgcccccgccggtcctcgatccgtcctccctccgcatccacatcccgtcaagcccgcaccacgcactgccctccaccccgcacaagcgccccgtcgtcatgacctcgtcgtcctcctcgtccacccccacccgcccctcaccgttgcccttcaccccgcctcggaggcgcaaggtccccgcgcccgctgctcccgcggggacagcggcggccaggcatctccttcgctgcctgcacctccgcctgcgtgtcctcctcctcatctcgcttccctccctctactttctctccccgacccctgccatttttccgcgctccctcctcgccgacttcctttccgcggcggccttctcctgcgcgctcctccttctcctctgcctctccctgccgcggcttcccttcgcgctgacgctgccgctccccctccgccgcgcgcgccgatcccccatcctttggtccatcggttcctcgccatccgcatctgcgaccacccccacaaccggccatttcgtccaggtttatagcaacggtgacgtctacgagggccagttccacc

SEQ ID NO: 116210 - DNA, 422 bp, Zea mays
  Clone ID: MRT4577_37466C.1
accgttgaaactggtgctttaagtatagtatagacattccatcaattttggtgtaatcaaccactcctcatttatatactaattattagtttatgaggaatgaggtgatgatggatcaatttattctatttcacaaaccaaataaaattcacaaaccaaataaaaaagtgaaaagtgagaaagagatacaccacttcgtttctcaaaccaaacacactatatgtttctcaaatagctattgctattgttgttagctctgtgaacacagctaaaaccatagctactaattatctctagaggattggaacgagtctgctggtgccgactgccgactttcaagtcttcacgtgaacatctggagcagctttcgggcggcgtcgttgaagaacgcccctaccgctgcccactcctcgagcagtaac

SEQ ID NO: 116211 - DNA, 452 bp, Zea mays
  Clone ID: MRT4577_37467C.1
ggccccccaaggttcacgaaaacaaaatcttgtccccccgcccccggggccttaatttaagttttagccttgttaagggtaaggaacttaaccctttgtcaaaaataaaataaaaaaaggaaaacaatacccgaaacaaaaaaactttcccaaaccttgaactaaaaagattcgcataaaggaccacaactgacttttttttactaaatcgggcgggtttagaaaaaaacgacccctgtaatcatttcccgccccatataattttttgaaccgaacatcctgggaaacatggggggaacccaacaaattgcaataccagggggcccccccagaaaataatccaacccggaattgcaaatgcaaacaactgaggccatcaatttgggggcattcggatttcctccggattaaggactaaaaaattttcccaaaatttttcctaaggggagggg

SEQ ID NO: 116212 - DNA, 550 bp, Zea mays
  Clone ID: MRT4577_37468C.1
ccggccggatgacggacccgtcgctcattcctcagattaatgtatgcgactgccactgccatcgggggcaggatcttccgctcgtgtgaccccggatacaccctgtgctagatctacggattctggcaccgcgaggtcacgcgcaagcacctcgccaccgaacatgtctcccagctatacgacgggcagcgcgccatctaagacctcgtgacgtccgaggtgcacgaccgacagggcgtgccacactcgaagccgctgggggtctgaggagaggagcagcaaccccattctgtagaatgactgggagacagaccatcaccataatcgaggatgtgcatgacacggggatcatgctccccaatcaaatgaactacagcatgttaagtgctcacgcccaaccacttctcggtgtctcacaacaataaactataatgctagtgctgcgcactgcttgaatccatgacgcacggtgctattggccctgcctcctactcctcataatgagaaactactataggagcacatcatccacatgcagtaccgaagggat

SEQ ID NO: 116213 - DNA, 323 bp, Zea mays
  Clone ID: MRT4577_37469C.1
ctcagttcaaggctaaatgcatgctagagacctattgcgaacaagtactgtaagggaaagatgaaaaggactttgaaaagagagtcaaagagcgctagaaattgccgggagggaatcggatggtggcatggttacgcgcaccgtccgtatgcgtaacggatcctgctggtccggcgatcgggtcagggcgtgtacagctgtcgcccgtgcccgtggacaaagcccgtgggtgctaagcacacacggcagacgaacttgcgcggactgtatccgcgcgcctgttgcgagcccctcggagcactgcgctgcaacaggctgctagc

SEQ ID NO: 116214 - DNA, 442 bp, Zea mays
  Clone ID: MRT4577_3746C.1
gcatctaacctttttttttttagggacaacagcaagcttggcttttccaataatttttataactggtccacgttctattaaaaatacatatcccatgtttataccggttaacaacttcccttaaacggttttttttacaaagcgtccaaaacggctggtgtaatggcgtttctcctaagtcacacccaccaacttttttttcggccaattcattaaattaccgtttgggtttttaccccttggaaccctttaaacaatggttgaaaaaaaaataccggattattttacttcccttttgttttgccggcaaggtcaaaaacctttgaaaataaaaaattggaggggttagcctttttttttagacccttacaggttctaatgtgaaacggttgtggtatcacaagggggggtgggtttttttagcttttgtacccctattggt

SEQ ID NO: 116215 - DNA, 453 bp, Zea mays
  Clone ID: MRT4577_37470C.1
ctctaggtgtattagtccaccctagaacccatacttcacttttgagtttgttacttttcttttgagtttgtgttcacttgattgtacatgtttggtgtactgtttatttgtcatttctcaatgtgttgaatgcatgattctttgcgtagacaacgagcagtccgtagttcctgagtgtgttgtcggagacttccctgagcagcaacatggtgaaggttgttccaattgcaatcagtgctcaggaggggatgaaggcaacatggaggattttgaagagtttcaagactacgatgagttctagtcgtgtttagtggcaacccccagtcagctgcctatgaaggccttatcctctatgtttcgtattccacactttgattatgttaatgactatgttatgttaatgactctgtggatgtcttggacatcttgatgtaataaagtactatttccgct

SEQ ID NO: 116216 - DNA, 370 bp, Zea mays
  Clone ID: MRT4577_37471C.1
aaaaatttataaaaaaaaaaaaaaaaggggggggggggggaaaaaaaaaaaaaagaaaaaaaaatataggggaatccggaattacgttcgggggggtcccaacgtaatggactcttttttggggccccctaagttcttttttctggccgtctttttccaatgccttgactgggttttccctggggggggggggttaatcggttgggggcccttcctcttttccccggctggcgtttttgctttggggcccggcccgttcgcccttcccgccggttgcgcttcctctttggctctgggggccccccttgttggggcccgttacgcgcgttggggggggtgtttacgcgcagggtgaccgttgcttttgcca

SEQ ID NO: 116217 - DNA, 446 bp, Zea mays
  unsure (1)..(446): unsure at all n locations
  Clone ID: MRT4577_37472C.1
tttgttttaagattttagtgtcacagcccttcctatgaaatttgccaatctctatttaagtttacttctagcaaataacaagcatagtatttacgttttctacttggattgaaatacagatttatgatgtccttttcagatgcattatcttcatttgcagtcaatttggtgtttctctatgttttgcgcatggtcgcctattgtggatgtacatcaaagtagaatatgcctgcgaagttgcattgagtgcttatttttgaaaagaacagtttggctatcaacaattccaatttaggacattatgaatgatagttttataactttgtaactaacaatgggataatggtacagagtacatggcaaatgtgagtcacctggaagattttgtaattgtatggatgattaattctttgtaattntatactgatctgttatgccttctgttt

SEQ ID NO: 116218 - DNA, 300 bp, Zea mays
  Clone ID: MRT4577_37473C.1
gtcgtatccgccccttcctcgttctgatgctgtaaggctgtgaaaattggcgatgcttagactggtgtcaatttgttattggatagtcctaattgttagctactcggcgcctggggtttttgggtaggcgaactatttttttagagttccgcatctctagcatcgcactcgggaattaggaccaagcgttaaagagcgtttacagaccagctagcactaggcaaggcttaatttcaggcacccacacataagtttaagcagttttacggacaacggtaccaagcaaggcctcagagtttt

SEQ ID NO: 116219 - DNA, 458 bp, Zea mays
  Clone ID: MRT4577_37474C.1
caacaggacccagagctcacatatcttgctgggcgcacagaaagaagaaagaacctatggcacacgtcgacgttcgtctccataaagctgatgaatcatgcttgttctgcctgcgctgctgctgctggtagttcaagcacaaggagcttgatcagcggaagtaaacgctgacgaccagaacaaccactaccaccaccgggtgcgacgcgtgtaacgtgactgtggatcactacaacacgagcgacagggtcaggaacgacacggtgttctaagtgacagtgcgcaacggctggagctgccccactcactcactgcatctgagtacgagggcttcaccagctcggtgcccatgcacaagggcctgttccagcgcgccgggcagcactacctcgtcgccgactgccaccggatcgagcccggcaccgacgcgcgcttgcgctacgcctgggaacaggcct

SEQ ID NO: 116220 - DNA, 427 bp, Zea mays
  Clone ID: MRT4577_37475C.1
acctcgaggccggccgggaggctgctttcgaaacatcataccaagcggacccgcatgtcagaatcttctctcttgacaaggagcaagcctaatcccagaaccccacggtcgtgagaccctagctgccgtcgccgccgccgtcgccgccggtgaccggcgacggcgatctagatgggggcgtcgtactccgtgatctcgttcccaacggacgacacgttcccagaaggctgcagcgtcgtcgacagccgcgagtgcctctgccagctgaagcgggaggtggcgctgtcctgcatcctgcatcaccaccatcaacgcagatgctccaaggaagggtcgcctccacggttggagaagctgtacgagctgcagggcctcccatgcttcaacacactcaagtgctacgagccgttacgagcccggattcttg

SEQ ID NO: 116221 - DNA, 406 bp, Zea mays
  Clone ID: MRT4577_37476C.1
ggccccccatttttcaacccccttccaacctacaagggcccaagagcaaacaaaccggggggctccccttgaggggggacattccccccccccccaacttaacagccctttttacccagcaaaacccttgttcatacctaaccaaaaagaaaagctataaaagcttttgccccccccagctgggggcccctatcatgcccaaagcttttgaaaaccggcccccgcttattgttgggggggccggcccggggccccaagtcagaacccccccccaacacaaggggcccctgagctggcttttcctgcctaacaggggccaaacatgagagggggtattaaaacccgacccctggagcaaccctgcccccggttgaaaacctgggattacaaaagagggcatcacccc

SEQ ID NO: 116222 - DNA, 139 bp, Zea mays
  Clone ID: MRT4577_37477C.1
agcataggtagtaggtcggaatgggctctgtcgagcgctcgagccgctcgagccgcaaaaatcgtctagctcctacacaatataggccaattaggatggatctggaataaccgaagaaggcctaaattgtcaatgtttt

SEQ ID NO: 116223 - DNA, 337 bp, Zea mays
  Clone ID: MRT4577_37478C.1
aaagagtgttctgatttgattaaaagttccacggcgactcatagacctggcaaactatgagccattaatgctgaaccaaccactaggatactctcaacatagtttcagacattctgatggaaaaaaatccattctcgaaagctcttttttccgggggtatataacacaactcgctcggatcaccacacctttatttcttcatattaaatgacgcggtgcgggtggcggaccaagtccaccatgcgggtgctgaatgcgcactcggcggcggacaaggacactagccttacgaaattgctcgacatggcaatgccagcctttacatcaaatatcctaa

SEQ ID NO: 116224 - DNA, 315 bp, Zea mays
  Clone ID: MRT4577_37479C.1
tgttgctgtcggaatcatgcgcggtgcatggagaaacgaacctaatcctgaggcttgcaaggaattctttagatgccttgcaatctgtcatacagttcttccagagggtgaggagactccggaaaagataagttaccaggctgcctcacctgatgaggctgcacttgtgtctgctgctaaaaattttggtttcttcttttataggcgtacacccacaactgttatggttcgtgagtcacatgttgaaaggatggggagtatacaagatgttccatatgaaattctgaatgttctagaattcaaccgacagcaacg

SEQ ID NO: 116225 - DNA, 326 bp, Zea mays
  unsure (1)..(326): unsure at all n locations
  Clone ID: MRT4577_3747C.1
cgcgaacgcaagcncgagaccncnagagcggacgaccggggggggggggccaaaacaagagagcaagagngccaggacacgaaacgaaaaaacaaaaaaaggggaccacaaggacgcggcccagccccaagggcagcggcggcaaggagcgggaaaaccagaacgagcagcggaacgnaccggaagggggggggggccnacaaacggacaagagaaggaaaagagaacgcgaagcaaaagcccggcaaagcacgcaaccgaaagcaaggcaaccgaggaagagcacagacccacacaggcacgcgagagaagaacagaacaggaag

SEQ ID NO: 116226 - DNA, 912 bp, Zea mays
  Clone ID: MRT4577_37480C.1
atggaggagatcgacgccgccaagcccaccaaggacaacgtcgacgtccgcctcaagtggctcggcctcttccaccgctacaagcaccagtgtacacccactgattctacaccccctgcaatggttgttgttgctgttggtaggagcgaccccgcgagcgtgacacagacaaagcagccttcggtgccaggggtgcttgcatttcttgttcatggttttattgctcaagtaaaaatgtctgctttttatattacttattacatatgcatggaaaagcatgtagaagtggacttgtgcatcggcataatttgtagtctccataaggatgctaatgataggtcctcaacacaagccttattgtttcagaccacttatctggtctcaaggttcttcatggccttgactctcaaagatcagagtattcttgtcaatggggatatcaatgaaggcttgcttcgcctttgtcacaagcttcatcgtttaaggaaagaatatgcatacacatttgaaagcacaagcttatcttatcagtgttctgaggttagcaggatcttgcaaggttataaggttgttcatgacataaagaggtttgttggtcataacttatactatatgaagattatgggagtcagccctaaattcacattttctgcaatctacagattcatgtttatgaggttgtcaagttttcatttcaatgcaaatccagctggacaacaccatgtcacaaagcagaggaagcgcactagagtcattggcaagaagaagaggatcgccaagaagtctgaggctgccgagtaccaaaagcttcttgctcagaggctgaaggaacagagagaccgcgagagcttggccaagaggaggtccaagctttctgccgcttccaaggcttccgctgccaccgccgcttaa

SEQ ID NO: 116227 - DNA, 1071 bp, Zea mays
  Clone ID: MRT4577_37481C.1
accgctacaagcaccagtgtacacccagtggggctacaccccctgttgtgggtgttgttgctgttggtcgagcgaccccgcgagcgtgacacagacaaagcagccttcggtgccagtctccataaggatgctaatgataggtcctcaacacaagccttattgggccatccattcttgagcgtgtatgatgacctgcatgcaggtaggattggatctcccctggccaccttcaaaccacttatctggtctcaaggttcttcatggccttgactctcaaagatcagagtattcttgtcaatggggatatcaatgaaggcttgcttcgcctttgtcacaagcttcatcgtttaaggaaagaatatgcatacacatttgaaagcacaagcttatcttatcagtgttctgaggttagcaggatcttgcaaggctagggacccaggggctacacatcttataactgaaaaacacatgagcagtttatgaggttgtcaagttttcatttcaatgcaaatccagctggacaacaccatgtcacaaagcagtgtgcttctagatacagttcagtcttggcgtcatcgaatcaatgaaacatgaagttagaagcacactgagatccagtggcttgtgaccccttgaccctttagaggaagcgcactagagtcattggcaagaagaagaggatcgccaagaagtctgaggctgccgagtaccaaaagcttcttgctcagaggctgaaggaacagagagaccgcgagagcttggccaagaggaggtccaagctttctgccgcttccaaggcttccgctgccaccgccgcttaagaatgttcgatgctttgagatgtttcaagacctatcttgttacaccttaaataccttatgctactctgattgtgttgcaacttgcaactgcccctgtacttgatagatttgtattagatgctcaagctacagagggtaggttcctaattatgaccatatgactatgtactaaattatatatctgttgctaagttacaatacatacaaaataagtttactccggccaacttgtagaaaaaaaaaaaccaag

SEQ ID NO: 116228 - DNA, 1151 bp, Zea mays
  Clone ID: MRT4577_37482C.1
cctcgaggccggccgggaagagttctcgttcctcttcctccgcctctctgtcgtgccaatccctcctccggccctctctccaggctccagcgctttctccggcgacgccggcaccgcccctagacgcttcccgaatctagggttcccctttcccgccgttgacggccggatcgcgcccagaggagcctccgcgatgctgccgtgcgcgaggtcggtgcttcggaggagggggctggcgtcttccctcctgcggatgtgcggcggggagggccagtgctccaccggcacgggggagctggtcgccaatgccaggtgggcatatctgcagaccggcgtgattggcgcggggcggatggcgcgcacgcagaccaggtgttttctcggctgcggcgacggggaggaggggggcgtactctccaaggtctacgaggagaggcgtgtgatggggtactcgccagagcagatgtttgccgttgtcgcggcagtggacctctacgaggactttgtgccgtggtgccagcgatccagggttgttaggcggcatgacgatggctcatttgatgctgagctcgagattggattcaagttccttgttgaaagctatgtctcccgtgtggagatggagaagcccaggtatatcaagacgacagcatctgaaagtggactttttgatcatttgataaacgtttgggaatttaagcctggtcctgttccagggacatgtgacctctacttcttagttgattttaagtttcaatcaccactgtatcgtcaggttgcatcaatgttcttcaaggaagttgtttctcgactagtgagctcatttagtgaccgttgttttagaatatatggccctgctgttccagtgctggaaaacacttatggacaaggaagatgaagccgttatgattcaatttcgaaggatgaatcctttgtggatctctgggaattccttgtagtcaaagcataatccttctataattggtggtagtgccatttagggcgccatcagtcaaggaaatcggtcacttttgagttctcactcatggctatttctgaggttattttttcgtctatttctaaattcggttcacatgtatacaacgaaatggccatttcttacgattatttaccaagccattcagtcaatc

SEQ ID NO: 116229 - DNA, 584 bp, Zea mays
  Clone ID: MRT4577_37483C.1
ccggccgggaagcggactcgacgataatgtaccattgcccgtccgcgccaccacaatgcagtatacctcgccagttctcgccacgccccgctgtccgttctcctactccggcgtccggctccggacgccccaggcccaggctacatgcggaacgcccccgtcttcgccgaccccgccaccagttagtggagcatggaccccaccgtcgagcgctcgaagagcgggtttcagaatttcaagacacgaggtctatgacatagaagccggagctgctcgagcctatcaagaccggccagagccccaggtacatggcgatcggctgatccgactcccgcgtgttcccgctggggacactgggccttgcatccggggaggcattgaccggccgcaacgattagctgcatggtaccgccctacgacaagatcaagtgcgcacgcgaccgccaactccatggagtaccccgcgcgcgcgctcacggtgcaggatatcggaggcagtcgtccacagctggtgcggtggattcagggcgctcctcttctgttaggacaggcgcgactgacatcttccactctcgtggatgact

SEQ ID NO: 116230 - DNA, 1208 bp, Zea mays
  Clone ID: MRT4577_37484C.1
ttgggtccctcgaggccggccgggtccatcctatactgcccccaaatccggcttgccccgcaaaccaagagctccagttcctcttcctcacgcctctctgccgtgccaatccctcctccggccctccttccaggcttcaggaccttctcctgcgacgccagcaccgccccgagccgcggcccgaatctagggttcccctctcccgccgtcgacagccggatcgcacatagtgcacctccacgatgctgccgtgcgcgaggtcggtgcttcgaaggagggggctggcgtcttccctcctgcggaggtgcggcggggagggcgagtgctccacttgcgcgggggagctggtcgccaatgccaggtgtgcgagcacgctggccgcgctcggcggcggcgggcgcgtgctcgagcgcggcgccaggtgggcatatctgcagaccggcgtgattggcgcggggcggatggcgcgcacgcagaccaggtgttttctcggctgcggcgacggggaggaggggggcgtactctccaaggtctacgaggagaggcgtgtgatggggtactcgccagagcagatgtttgccgttgtcgcggcagtggacctctacgaggactttgtgccgtggtgccagcgatccaggattgttaggcggcatgacgatggctcatttgatgctgagctcgagattggattcaagttccttgttgaaagctatgtctcccgtgtggagatggagaagcccaggtatatcaagacgacagcatctgaaagtggactttttgatcatttgataaacgtttgggagtttaagcctggtcctgttccagggacatgtgacatctatttcttagtcaattttaagtttcaatcaccactgtatcgtcaggttgcatcaatgttcttcaaggaagttgtttctcgactagtgagctcatttagtgaccgttgttttagaatatatggccctgctgttccagtgctggaaaatagttatggacaaagaagatgaagccgttatggttcaattttgaaggttgtatctttcatggatctctagggattacttgtagtcaaggcataatccttccttttgtaatcggtggtagtgccatttagaacaccatcgtgcaagaggtcgtctataaggaaatcagtcagtattgagttttcatcattggctattaaacaggttattttttttccccccccc

SEQ ID NO: 116231 - DNA, 285 bp, Zea mays
  Clone ID: MRT4577_37485C.1
ctaaaaaaaaaaattataaaaaaaactataaaaaaaaaaaaaaaaatacaaactaaaaaataaagggaaaatgggtaaaaataaaaaaagaaataaattaaaataaaaaaatcaaataaaaaacaaaatgggggggatggttttaaagtatcaatgctttataacaatgtgtatgggaataacataaattttttttaatgggtaaccttaatttaaattaagtgggccggcatgtttaaaattgtcttaatgggaaaaactatggtttatcaaaacataatgact

SEQ ID NO: 116232 - DNA, 441 bp, Zea mays
  unsure (1)..(441): unsure at all n locations
  Clone ID: MRT4577_37486C.1
gctcaaaccacgcttcttcggncctacaacgacgtcgctgtccgcctcgccctgctgccatggacccgtctccacgacgtcttccacgtgggtctcctcaaaaagttctagggactaccaccggaggttcctctgtccctgctgctcatccaccatggggcggtgatcccggagctggaatgagctgtcaagacacgcatcgctcgctgggtgcgccaggtcttggtacagtggaagggccaaactgtggcgtcagcaacttgggaggacatcgagccgttcgtcaccaagtatcctactttccagcttgcggacgagctgcctctcgaggaggggagagatgtcatgtggggactcaagtatgccaggtgccgtatggctagggatgtgcggcgggcggctgaacgtgcggctcatgcagaagctgagcgcagcaacacg

SEQ ID NO: 116233 - DNA, 658 bp, Zea mays
  unsure (1)..(658): unsure at all n locations
  Clone ID: MRT4577_37487C.1
ctcgaggccggncgggccgtaactaccccgccgcgtactgacaccgtttactattgctggctcgcttttgggtgtggatatacagagacggagaacgaaactttatgactggcgtcatgccagcacatggacgagaatgtccacctgaaggtccgcggcgagaacaaccgattacatcaccacaagaaggacaaggacttccacgacaaggagcacggggagctcctcatgaaggacagcggccagcccacggtaggcatggggcagaacatcaaggacaagatcgccgaagagcgcgcagaccagcccgatggccaccacgggaacacggccaagaagaataaggataagagcaagcacggagagggtcacgaccacgactcactgcaacggagcagcaccagagactgcgagtgggatctgagggccccaacgtcgatgctgtcttataacgcggcacgggtgcaacacaagcatgctggctggatggaggattcataccagctgatgctgatgcagaggttcactggtgacatgcatgcatgtatcgtgctgttataatcaaaaagaatacagacataactgggcaggggatgggctgtttgccatgagatcttgaacactcctacttaacttatggctgctgcacggagctgct

SEQ ID NO: 116234 - DNA, 153 bp, Zea mays
  Clone ID: MRT4577_37488C.1
aagattactgaaccaaacttacaaggagatagctattctatactttaacctaaagtcaattagggggcacgacttttacaacaaggtgcctgagaaaactctagctaaactcaactaaattcgcttgcaccacatccaaccttctccaggtgt

SEQ ID NO: 116235 - DNA, 821 bp, Zea mays
  Clone ID: MRT4577_37489C.1
tctcccagttcgtcatcaagtcgttgcctttattttttttatcccttcgaggccggctcgctctggctgttgctacatccgctcctcctgccctccgccctcgacccttccgcaaacccagctctctgctggcagttcgtgagggcagcatgagggcgccgctgctgctatgggcggccgccacgtggctggccgtcagcgccgtggcgcaccctggcagacgtggcggcggcggcggggagcagccgctgtcgaggatcgccgtcgagagcgcggtcctcgccgtcgacgatgcggcgcacgtcagggcgtcccccttggtactggggctcaagggcgagagcagcgaatgggtggacgtggagttcttccatcccgacccatccagcgacgactggatcggtgtcttctctcccgcggatttcagtgctgcgatctgtgagcctgagaatccgaggcagtctcctccagtgctttgctctgcacctatcaagtaccagtttgcaaccttcaaaaatgatgggtataacaagaccggaaagggctacctgaagcttcagctgatcaaccagaggggagatttctcgttcgcacttttttcaggaggcctcttgaagcccaagctgattgccgtctccaacaaggtggcatttgcgaatccgaaggcgccggtgtacccacgtttggcgcaaggcaagtcttggaatgaaatgacagtaacctggacaagtggctatgatattacagaagcgggtcctttcgttgaatggggcgagaaagcgggacgccggtttcttgctccagctgggactctaacgttt

SEQ ID NO: 116236 - DNA, 496 bp, Zea mays
  Clone ID: MRT4577_3748C.1
tttttttttttttttttttttttgtgtttttttttttttttttttttttttttttttttttttttttttttttttttttttttttttttttttttttttttttttttttttttttttttttttttttttcagaaccactgcatagcagtgcttattatcttatttatatgtagcaaaaggcacttaaatgatctcttatgacacatgccagaaggaaaacaacagactacacaattacaaggtcggaagctacataggattaccataacagatagctgacggcctacaaaaaaagatagaacacaggagaacatcacacagataaaacatatcacccttgtactaacagggaggcggtgcttgctggattttaaatcaattgcttgctggattttaaatcaatacacagtcctgccattaccatgcaggatcatattcttgaaagccccaccactagggatcataggcaacacatgctcctggtgggggacgatta

SEQ ID NO: 116237 - DNA, 1401 bp, Zea mays
  Clone ID: MRT4577_37490C.1
acgccccccgcccgcccccgagccacgccgaagagatgacttggaatctcttggatatgtactcatgtacttcctgaggggcagccttccttggcaaggtcttaaagcaggaacaaagaagcaaaagtatgagaaaattagcgagaagaaagttgcaacatcaattgaggctctatgccgtgggtatcctactgagtttgcatcatatttccattattgccgttcactgcggtttgatgacaagcctgactattcctacctcaagcgattattccgtgacctttttatccgcgaaggttttcagtttgattatgtctttgactggacaatattgaagtaccaacaagctcaaattgccactgctccaccccgtgcgggccatggcgctgggccttctgggttggcacctgcattacagaatgataggcaaccaggccctgaggaagcaaggactagtggttggtcatcaatggatcggcgtcgtgccccactaccaattacaagtgtggggacattatctaagcagaaagcaccgatagggaatgatgctactgtttctagagatgctgtgatatctggaccaaattttatgggaaggtcaagtggatcttctaggaggcctgttgtttcgagtagccgtgatatggtggccactgacagttccgagccttcacgagcacgtgcaaccgacgcaagcccaggggcgttccgcagagcctcaggtcctcagagaagctcacctgtccattccgcagaacagaagcgctcatcctcaggccggcatccgtctaacgtgaagaactacgattctgctctcaaaggcattgaaggtcttcattttgatggcgacgagagggttcagtactagagccgcaggaaattctacatgcactgtaaaaatcataatcaggtggtaagcatcgtgtttcctgttcgggttttggatcaacaggaaatgaaatgctggaaggaggatctggtcacgggttgtgcggtttcaggtggtcctctgagcaaggtaaataaacggtcctatctgaggcgcttcatgcctagctctcataacgttgtcgttgtgtacgtaaatgcctcttgtagcctgaatgtcaggcgcccggattcatgaatctattttattgttgtattccttacgatgttccatcttgggactacaatgctgcaactggtagggcttgatttggaacactggaattcgagcatgtagaatttttaaatcggttcattggacgaatttgtctgtaacacgtacctgacttgtaatgtgatctgtcaggacaactgatgttatttgccaatgtgataatcagttcatccaaaaaaaaaaaagaagtgaggaaagagagtgagaaactggaggtagagtggggaagagaaggaaga

SEQ ID NO: 116238 - DNA, 292 bp, Zea mays
  Clone ID: MRT4577_37491C.1
cacgcttacatgcgctcgcccttggccgcgtgtctttctcctccctcctctgccagcaccggcctcgccctggctatggtccgaccaacacctctgcgttgtctctgtgtctcggccggccgcgcgttccctgtccgtaccatcgccctctgtgtgcacggcaagctctccccttgtcgtttctcctctagctcgcaggatcggtcatcctccttctctcctacctcgccggtggagagcttttcttgtgctagttggtctgtccgtctcgctgagcatctcgccatcgacg

SEQ ID NO: 116239 - DNA, 434 bp, Zea mays
  Clone ID: MRT4577_37492C.1
aaaccaaaaacttttttttgatgtattttttattgtataccccacacaaaaaaaggtgtggcgttttactgttttattacatttatttatagaggggggggggggggggagattccacaaatatcataaataattttagggggggaggggcaggggacaccccacaggggttggggcggtaggtggacagttgatattgaaccctccccgggcggcctttaaaagggaaaatttttaaaaatatctatcacattgcgcgggctttcgagcatatttttaaaggcccaaatcccctttatagtgagtcttataaaaatacagtgcccgggttttaaaaacaaagtgagggaaaaaaccctggcttcacccaacttaatctttttgcaaaacatccctttttcgcctgggggggtaaaaaaaaaaaggcccccccc

SEQ ID NO: 116240 - DNA, 536 bp, Zea mays
  Clone ID: MRT4577_37493C.1
accacttaactaactctgtggcgctctttcaagcaataacagttttgggacagtgtttctttgaacaaaccctgcagcgttcaatttgggcagaacaactcttgtgacggatgtgatcactagccatctgtagtaccctaacggggtaactgattccgtggctcgcgtggcgcttgctctactttagaccatgcagaataaatagaggactgggggcttaggggcgccatcctggaactcggcgaataccacgagacgccttattcttcatggacctaaccaacagaaaaattggaggtcctttggtttgcttaggggaaactaggatgcaccctctacaccttttatgaactcatgcgatgtgtctggctacaacacagtactgatgattctagatgaattttctgatgtaagacacatatgatttgttgacaaaaggacgatgctcctgacaacagatatgtgtaaacaatctaaatcacctttacagctgcgacataaacgctttttagctaaacacatctgggctgatggat

SEQ ID NO: 116241 - DNA, 231 bp, Zea mays
  Clone ID: MRT4577_37494C.1
ccttgttacctttttttacttgtggagacattctcatcacagtctggacgaccccaaccggaagcgtctgactcatgacgagaactgtaatcctaccgagggtaggatacgcggagaatggtttcatcaacataggatagctgaaaatcatttacaggataccatgatgtccgttcttcacgaacccgtgctgcttcttgagctcagggccagaccgcctgtaaatcgtgc

SEQ ID NO: 116242 - DNA, 384 bp, Zea mays
  Clone ID: MRT4577_37495C.1
tcgcagataactactgccatgcgcagatgcatgacgaactaggctccaccgctgtgtctcagaattaccatggagccggcacggtgtcgagcagaagctctacgtattgcggcatgaacaacgcggcatgcaagaagggctatgctgctgacactgcgccccacagagtctataaggcgacgaaggtgactgcaggagtctcatctgtgatgacaccaacgaccggtctttgcttctgccccacaacagaaaggctctttcggaatctatgatcgactttatcaacttgcgcatccgctgctgctgcctccgagacacgtgccactccgagagtcggaggcaagatttagatacacaatcacgacgaaacgttaaagactggca

SEQ ID NO: 116243 - DNA, 349 bp, Zea mays
  Clone ID: MRT4577_37496C.1
cgtccggagagaaaagcgcgggggcgcgaaggcaagctgtagttacacacatcacccacccggtcgcactcgcaccggagtctcccctatccccaattacgccattatccgccgagccccgccccgccctgacgatggaccaccacctcacgccgacgccgacgccgtcgtggacgacgatggggaactccgcggtggtggcgttctcgaagccgccgacgccggcgtgcacgcccaactcgcgcctcgcctcggcgccatgcttccgccacgcgcgcacgccgcacgacgcgtaggaggaggcgtccgacctggtactcgacttgcgcaccagctacagtgaccgctt

SEQ ID NO: 116244 - DNA, 135 bp, Zea mays
  Clone ID: MRT4577_37497C.1
gaaaggcaaggctactgacttccccttgtaaaggcgcacagcactgtccgatgttaaacaaactaatgtataatttttttttcgccaaaatttgtaatgtgtggggacacttggagggcttgatttgaatagatg

SEQ ID NO: 116245 - DNA, 310 bp, Zea mays
  Clone ID: MRT4577_37498C.1
aacatcgggttgggaactattatattgtattttttttacccaaaccaaccaacaacttagctttgctttttctcaaccaaatgccccaatatcctattttataaaacctcccatttcttcatttagaaaaccccatggtattaattcaacaggggacttaaccacataaacacaacactagctgacgatttttttccgcaaaaccaacccgccaatttggaaaaacataaacctttttttcaccccccggctaaccttataaatgtttaaccctgtgtccaagtttttttcccaaccctaccaacttttt

SEQ ID NO: 116246 - DNA, 189 bp, Zea mays
  Clone ID: MRT4577_37499C.1
cccacgcgtccgaataaatgaaatctgcaaatccatcatttgttagcaatcttctatctaaatttccggtgggttttgtttcctacatcagaaaaaacttgattccatacgctgtaccgaccttggaaaaaaactgttcgacttcagaggataattgtaaaatggctattaatgtgaacaagtccatgc

SEQ ID NO: 116247 - DNA, 194 bp, Zea mays
  unsure (1)..(194): unsure at all n locations
  Clone ID: MRT4577_3749C.1
ctttccccacccccacaagctctacgctctacgctctactctgctcttctctactcctgcgtgcatggtctctttcctcccctctttatccattatccaacccaaccgcctatccatccaaatcacccttccccttccaccaccaccagaccgccgncttgtatcctcaattctcctttcaaatttaaaatccc

SEQ ID NO: 116248 - DNA, 424 bp, Zea mays
  Clone ID: MRT4577_374C.1
ctacatgattagtgaaggtaataaatgtattatgatgtgctgaccgttaacctgagagagaccgatctgagtgtgcatacatgcttgagagtagagagcagcgatgtgggttctatagattcaataccagtgatctaaccggacggagcatgatgttgcggcgggagtaaagaagaaagaggaatgatacgactgcgctaagatgaggtcttgtgtctgtgtggtgagcatacatacaatagttgtatgatgatggttatgcacgttggttgagatagtgcgatacatagcatgacactgcttgaacgtaccagctggcttactcattaatgttgttgtaatggctctgggtcacttgcagggagttgaacttgcattcacagatttaattacgagagtgaatcttgttgttcaaggctttcgt

SEQ ID NO: 116249 - DNA, 340 bp, Zea mays
  Clone ID: MRT4577_37500C.1
aatatcgacccgcccctcccatccacaacattttgtgatatcttccactatatacattatctcaaactaacttactcaaaacatacggcgtgagttaaaattatataatgactccttaacttcaatacactgtccctctttttacaacctcctcactgttaaatctctcacattccccaccttaatctcctcccttcacatcctcctttaatcagcttgcttattatcctatagccccttcaccaatcacccttcccaacacttactcacccttcatgaccaattttactccccctgtatccacacattattctcctcttctgcttttttacactcattt

SEQ ID NO: 116250 - DNA, 307 bp, Zea mays
  Clone ID: MRT4577_37501C.1
tcggtgccagggccggctggtcaacagatttttggcctgcgctgtcacttcaccacgctgcttgtactgaaagcttttttccagaataaaagctggggaggaggaagcggccgccgctgcgctcaaaaaagagggtgagatgaagactctgagctcaacgagaggggagcctgggcgttttggaaatgcggcttttttggcgctcatgctctgtttcggtgtcgcgcttttccttattcgggggggattcgccccattggagatgccattaaattcgagggcgacgcttcggtggttgctcttaggg

SEQ ID NO: 116251 - DNA, 289 bp, Zea mays
  Clone ID: MRT4577_37502C.1
aaaacaggcccttgggaaaccttttatcaaaacttcccaggggaatttgtttccggtaatacccccaaaaagggttcttaaaaaagccccctcgtgtggggaaaaaggcccagaagcattttgggcttcgggggaatttttaccacttccttttccaaaaagggggtttctttttaaaaaaaaaaaaaccttccggaaaacccggtttatttggggccggggccttttttttttgttatccggctctgggggccccggggggggggggaatttttcaccggggggtggg

SEQ ID NO: 116252 - DNA, 1778 bp, Zea mays
  Clone ID: MRT4577_37503C.1
gaagagttttttttttttttttttttacaacatactttatatttccaaaactcaagttttacaacataaaaaaattataaatatctacaagtcttgagatactcaaagtgcataacttattacaatagcaggaaggtaagaaccctccaaagcgcatacataaacctagctagtcctcctccagaactggatgcgccctccagccacaggaactagaatactcctcatcacctacaacaacatgggttcgaaaaccctgagtacggagtgtactttcgcaagtcttacccgactaaggaaaaaaactctcaaggatatgctggatttgggaatcaaggaaaggcttttagcaagaatcaactttaatagtttgcagaaaagcttactaaaatgagtccttactttcaacattttaatgctagattaagtattaataaaccttgtttgcatttagtctaatttcatcatcacattaatcaatacaacatgaattttgcttattatgattccatccatgacttagattgcagggcagtgatcaagtctccattatctgaggatataacgacgatctgaatcgatttacccagctcgggatccctaaccacacgatatatgtagcacttaacccctgcatacgccaacccgcccccagctatctcaagactagaatgggttcccgctacccgagagcatagttactccaccgtccggcctcttgccacggagggtagacactactctcaccatctcccatgcccagtgcgggcgagctgttctgatattggtccagcggagattaggcttaccctgtcccataccagggcaggtggccagttaatatatgcctcgatcagcaagcctacattccctgtattctttaatcaacttgggcaaaacatcacctgttcctagcccaagtctcgatttaagtactttcatccttcggacttatttgtgtaccttaggatgatgaaaacatcacatggaaccttgtattacatctccccatgatctaggtgaaaatattcttgtaggtagagccatccttcctcaggataaatcctgagctaggcattagtgcaaaggacaaactctatctacaagatttacctctagacagggctaagcaattttgtaaacaatatttgatacttctaaagaagtatttataaaaggaatggatatcaaggtagtctatgcatcaaatagtttccaagaaactcctataaacttagtgcacatttcactagacttaaagtgtataaaagtattttaaaaatacaaggaatgggcaaattcaccgggcttgccttattgcagtgaagaggttctagatccctttatcaaatacccagttagatggctcctccacttgattagcatacactggagtagactcctccttccaacacaacttcttctaaacttcggtgctcgcgaggaatcggccggaaaaagcgtgagtcacccggtcggcggtgaagctgtctgtggcgcccatctgcggcggcacaaccctgttccgatcacctgacaatggtagagttcaaaagctgatttgcgtgagcttcactgaccactagagaccacataacaagtgtcacctgggcatgcaaccctggccacggtgagatgagcattcgggtggacttggtcaccacactggtgatggtgtgccaggctctggagcaactcgatcttgggacagagaagagggttacatcagcagtagcacaaggaatccatactcctttagctagaacttgagggtagac

SEQ ID NO: 116253 - DNA, 566 bp, Zea mays
  Clone ID: MRT4577_37504C.1
cggtgttcctgtctttctccttggctgttgaagcattacatgcatttatgcaagatgaatcggagcacaagtaagtgccatttatgtcaaatgtcttcagatgggatggtagctgtttctgctgttactagtctttctccactgccttttcatgctgacaccttatcttctaaaaaactgtcttccaggcattatctgattgtttctgctgtcaccaatcttttggttaatttacttggtgtttggttcttccggaactacgctcgtgttaacataggtacgggaagcaacttatatcctgttgcttctggtgcaaatggagattttgtacttgtttccctgcaagggttgtaaattaaacagaattatgattggcagtttacaggaatgcagaggatatgaattaccactcggtctgtttgcatgtgttggcagattcaatacggaggtacatgcattcccaggcattgttggactcttcccttgtgcacattatacttttgtaccttgctggttgccacacgcgatattgatcgactgacgcttgttatttctttcacagtgca

SEQ ID NO: 116254 - DNA, 636 bp, Zea mays
  Clone ID: MRT4577_37505C.1
agattccgcatgtgaaccgtactgagtatcagctgattgacatatcagaggatggatttgtatgtttctctaatcagtaaagctacattcttctatgaattaaattttagattgagtcttataattcaattttcatttgtttcaggtgagccttcttacttcagatggcaacactaaggatgatcttagactcccaactgatgagactcttgtggcccaggtctgtttggaaatattttccatcctaagtcctgttagttttcttgttggcttccaagtattacagatggtggttaaatttgttagcttagtcatatgttatggtagttaaatttctgagcttaggccatgtttagtttgcaaaaaatctggtttttggctactgtagcactttcgtttttatttgacaaacattgtccaatcacggagttactaggctcaaaagattcatcttacaaattacaggtaaactgtgcaattaatttttatttttgtctatatttagtaatccatgcatacgaccaaagatttgatgtgacatggaatcttgaaaatttttgcgaactaaacaaggccttagtcatatattctttctcgataccttctcttccttgaagtttgttaattgggtgctta

SEQ ID NO: 116255 - DNA, 354 bp, Zea mays
  Clone ID: MRT4577_37506C.1
ccacgcgtccgtgtcggtagtgtgtagtcgcagcagctagtttcttccggccgccaggaatcatacttcttggcattcaatggccgcaccgccctagcattacattcttccgcgccggcggcctgctttttgtccccactaagcttagggtcgcggttttcaaaaccctttggggccccatatgcggccacattttttgcgcgcacaccacatatacaacgaaaagctgatcacgccggagggggaggtggagctgcaggtgcccgacgacgtctacatcctggacttcgccgaggaggaaggcatcaacctgcctttttcttccctgcgggggtcttgttctttctgccccgc

SEQ ID NO: 116256 - DNA, 205 bp, Zea mays
  unsure (1)..(205): unsure at all n locations
  Clone ID: MRT4577_37507C.1
attatactcaactcggagcctntgggagttttttcggtttttgaaagcccccctgtcaaatttagcctgtattgatcggaataaatttctgggcagcaataaccaacggaaaatgttctgcttttgcactctccacgccaaaatgtttcccccccggcggacttgtggacccaccccaggctggggaaattttttgcacattttg

SEQ ID NO: 116257 - DNA, 793 bp, Zea mays
  Clone ID: MRT4577_37508C.1
gcgtccgaaatcaacctgctccccgacgcggcgaggctcccgtgcccctgtgagctgtaggcgcacccggaggccgcagcacagcagccacggatgaggaggcctccaatcgtggcgcgcgtgcgccgctcgctcttcctcctcctctgctgctgttgctgcctcgccgcctggtcgtcgccgccggccgtgcgcgcactcccgctgtgcaccgacgggcgggcgccggtgcctctgaacaggacgctgggcttctgctccgcttacggcgggggcggcagcagtagcagctgctgcgacgccgcagcggacgccgcgctgcggaagaggttcaacgccatgaacatctctgacgcggcctgcgctggcgtcatcaagtctgtcctctgcgcggagtgcagtccattttcggctgagttgttcaattcaagctcaaagattcagatggttcctctcctgtgcaactatacttcttcatcaagttctgctcaatcaaaagattctacacgagattactgtaaactagtttgggagacttgcaaaaatgtgacaatagtgaactctcctttccaacctcccttgcaaggaagtgcaagactgcctagttcatcgtcaaagctcacagatgtctggcagtcagaacatgacttctgcacatcatttggtggctcatctggtgagcagtctttatgtttcaatggaaatagaggtttcttcaacagcacagaaccatcacccacacctaaagggatatgccttgagagaatcagcaatggatcctaatctgacatgg

SEQ ID NO: 116258 - DNA, 783 bp, Zea mays
  Clone ID: MRT4577_37509C.1
ggatattaaatctcatccgcgggtaatccgttgaatatctgaaattaaccattagtcaattattaccggctcacacatggacactaataaacgaatcatcagccaatcattggccattgagcccaggcgtcagcccaccaaaacaccaagccacaagcccaccctaatccctaattctacatccggccattccctcagtcggtcaatccccaggcagccacccggacgcctggagccagccagccacccgcgtccctacgcgccgtcatcctcatccccacgcaactgaggcaagccacccgcgccgccgccggcccgccgtgcccctggctccctgtgctgcgtcctgatcctccctggtatctgtgctgcgtcctgcgtccgccgcgccccatgcgtcccgcgtcactcgtcagcccgccctgtgcagctgcgctgagctccgccctgctctgagccgcgggagcacggcgcgtcgcccttcaggttcgcggacgtggaggagctcggtcgtgcgtgcgaggtcgtgtgctgactgctggtgcatacagcagagcaaggcgctcaggagtcagaccaaccatgggacatgtggtgcgtgtagatgctagagggatcgggatcgctggtcgtgggcaccgcgcccgtgccgaggttcctcgagcgcttgtgtgcggaggattcgtgtacatcctgaacatatccttgtaaaatttacttggagcgcgcttgaatcaattagggcgtgttaaaaaaaagaaaaaaaaaaaaaaaaaagcggcc

SEQ ID NO: 116259 - DNA, 531 bp, Zea mays
  unsure (1)..(531): unsure at all n locations
  Clone ID: MRT4577_3750C.1
caaaaagcatccatggcaacactgcttcgtgcgcaatcaatttgcgcaatcatgcaggaacttctgggccgccctttcttgtacactggatgaactctacattacccccaagcacaattgggngccttgtgcttccgcgtggctggcaaaccgaagacagtctaaaagattgacaatagtttcttggatgtaccaagaactgccaacagaagaaaaaaaaaccgtggggggtatcacccggcaacgcttttggcagggatcctgacattttcgtaccctctcagcgtctccgcagtaaaagattccagcgcttcgaatatcggagccagacctgccttcagatcagccgcactggccacacggatctgcctcacggtttcctcgtgctcgtgccgggccctctgttcgtccgatcccttgtgcaacgtgtccagtgcaaccatgcggttatcaactgccctgccattgtcggcaacggcgggcagcccgctgccctgccagcgtcaactgcccctgcgagccatgctcctt

SEQ ID NO: 116260 - DNA, 1005 bp, Zea mays
  Clone ID: MRT4577_37510C.1
cacacacaatgcccatcaccgaaggcgcaccccgccacggcaaccccgcccacctcctcccgccctcatggcgcaaacacatcaccctctggctcgaagaagacacacccagcttcgactacggcggcttcgtcgtcggcgatgatctcgcagaagcacgcttgctcgccaagtcccaaggcatcgtcgccggcgtgccgttcttcgacgaagtcttcaagcagctcgactgcacagtagaatggcaggtgaaagagggtgacgaagtcggagtcacggacaagaagcagtgctgcgccattgtccgagggcctgtgaggaatctcctgctcggcgagcgcgtggcgttgaatttactggcgaggtgctcggggattgcgacgaagagtcatgagatgcttcagttgctacggaatgctggatacaagaacacactggctgggacacggaagaccacgcctgggttcagactggtggagaagtacggaatgctagttggaggttgtgatcctcacaggcaagatctcagcgccatgacaatgttgaaggacaaccacatctgggcttgcggcggatcgataccttccgctgtcgctgcggccaaggcgtcgggtggatttgcggtcaaggtggaggtggagtgtcagagcgaggaagaggcgaatactgctatcgaagctggcgcggacgtcgtgatgctggacaacttcactggcgacggcgtcaaggtggcttccaagaacttgaagaacaagtggggcagaggcaaccaggcaagggcgctcattgaggtctcaggtggtcttactgcggagaatgtgcaggactatgtgtgcgacgacattgatgttatcagctcgtcgagtattcaccagggcacgaagcacgttgacttctcgctcaaggtggtgcccaggaccaagtcgactggtgggaagctgggaaacggagagagcattgagacttgaatgaacgtactgttaatgtggatatggatatctgtac

SEQ ID NO: 116261 - DNA, 385 bp, Zea mays
  Clone ID: MRT4577_37511C.1
tggcttcgaacctttgggctgatttatgtgcttggatgagtacctctagctatagaaaaccctttgcggttggaccgaatacttctatgcgctattggcctatgaggaatccacttttatcctaacctacattttcggactatttcacctccgcgacgctttgacggccgaagaggttacagattttactcgtaatagttatggaatattattagacgagaagaccgttactattaacgtcaccacaaacgcacttaacggacttaagtttatatctcccgtcggtactacagtatccgcgacgagtactgtactgacggcttgctcgatttgtagtacgacgctcgggaaggcctctggagtcgttacaggcggagtcatttcc

SEQ ID NO: 116262 - DNA, 520 bp, Zea mays
  Clone ID: MRT4577_37512C.1
ctcgaagccggccgggcctggattgcgtgtctccgacaccttcctcatcctatttcctactcgccatctcggacacttttcctccgtttacctcgtgatgaagcgtgaactatacgtctcgcttcctcccagatgtacaggtggtccgcacttctcctctaggctctcggctgcgacggggtatgagacgacgctcatcattatcgccatgaaaagtttaaacatgtgtttaggtgtacatataatgtcttgtgatgatatcaggtagatgaataataatgcgatatgtagagctgctagcgacaaaaagatgaagaacactaccatagggacctaggggttcctcatgggcattcttgattgagtttctattgccgcaccaaaacttttgtgtgctaatggaaccacacgtctcgaagtgcgtgacgatgcaatgaatgttcttgtgaaatccgaaatggtttactttaataccatgcattgcccattgacagaagctgctcaacgtaactcttgattg

SEQ ID NO: 116263 - DNA, 296 bp, Zea mays
  unsure (1)..(296): unsure at all n locations
  Clone ID: MRT4577_37513C.1
caactgtgatcgtttaagtagctcctcgtttagtttgccttcatcaaacatatcgagctcaccttctaattattattcttcaactggattaagagctcgtccaaaatcatttgacgcttcttcatcgtccgctccttgtgatacgatttcagtcgatgataaagaatcaaataaattaacattanaaaaagatttgtccggacaaccaatccatagtcaagatgtaactacaatcaaaactaatgattcggaagatgtcaaggattacgaattactgtatgaacagttattagttg

SEQ ID NO: 116264 - DNA, 351 bp, Zea mays
  Clone ID: MRT4577_37514C.1
ggcccacagaatggaactttatttttcatataaaacacagacagaattgacgaattacaatttaaccaccctggattttttctttgtgagagggcccccagcagaagcaagcaagcaaattaaaggcagccaagagtgaggccagccagcttagtttattcttccaaactggacagagccctactagctagccaaagctaatctggtggctagattccctttccttttccttttaggctggctcaaacgatgcggggtgtattctgcaagaaagcaagagaagaacattgatctggtttttccctttacctatggggaagcgatcgcaagcctgtattaacttataaacaa

SEQ ID NO: 116265 - DNA, 231 bp, Zea mays
  unsure (1)..(231): unsure at all n locations
  Clone ID: MRT4577_37515C.1
tatcnacctaaccaggtgcgcatcttcctcnacatcntcgcccacaccccccacatcggcttataatatataaactagcccctatttcctttccttcccccagaacttgaaataaatatatataccaggagggaacgcgggcatncccaataatggatgtgtgaattctcactaattaactaatgcgtaaataaacctattcaaatgtcctgngcgaaaaacacacaacac

SEQ ID NO: 116266 - DNA, 176 bp, Zea mays
  Clone ID: MRT4577_37516C.1
ccccgacctgcctatggcacagggggacatatggtagctacaacctatagcacctcacgcccgttgtactgaggtgcgccatggagcttgggatccctacagggaactaccggcatagttgcgctggcatagtcgctgagcttgtcacggggcttgatgtacccttccctaagatg

SEQ ID NO: 116267 - DNA, 389 bp, Zea mays
  Clone ID: MRT4577_37517C.1
ccgggcggaccacacccttccgttgcgtcggccacctcctaatcgccttagtttttccgaagccgctgtacttggcctccggggggatcggtttttgcttaggggcgcattgcccactgttgttcgccataatttccaaggtgtttgggctaaagtcctactaaacgctttacaacttcggttccgaggccagcccaatcggcccctacttgctaaacttccggttggggggggccctttacaacttgaaggccgccaagcagaacgggggttccttggcggccggtccaaccaaaacctgcatcggcttccattgtttccgaaaggcgtccctaatatttacggccgcacacggtcgccggccccctttttttgtttttcctgttttg

SEQ ID NO: 116268 - DNA, 774 bp, Zea mays
  Clone ID: MRT4577_37518C.1
gtagtccggtacagatagtgtggtcccaagcttacaacactgtacgtaatatctttgctctggtaaacctacttcgacagccagtagatgaagatgagaaacgctcctctccttttcccccctccctgcacagcgccgctcaccgtcaccggaccacagcagcgatcgatggctgaggtacacaacgagcggcccgtggggatggtgggcggcgtccgggacgcgccggtgggccgcgagaacgacctcgaggccatcgagctcgcgcgcttcgcggtcgccgagcacaacagcaagaccaacgcgatgctggaattcgagaggctggtgaaggtgaggcaccaggtcgtggcccgggaccctgcaccacttcaccgtcgaggtggaaaaggccggcggcggcgaaaagaagctgtacgaggccaaggtgtgggagaaggcgtgggagaacttcaagcagctgcagagcttcgagctcgtcggagacgccgcggtcgcctgaggcgcacaggcttttcgctggaggctggagcacaacaatgaaagaatttaactgtcatcccactggaaaagtatgatataatgaataaaccagcgtcttaccacatgtattgtaccctaatgagatatttgacccctgtaatagaatgagatgtgctaaggaaaaaaaaaaaaaaaaaaaaaaaaaaaaaaaaaaaaaaaaaaaaaaaaaaaaaaaggagaaaaaaaaaaaaaaaaaaaaaaaaaaaagtactctgcgttgtaacaactgtt

SEQ ID NO: 116269 - DNA, 268 bp, Zea mays
  unsure (1)..(268): unsure at all n locations
  Clone ID: MRT4577_3751C.1
gcggcacgagggacggagtacatgtttatgctatggcttgattgtgatgcacgattgatcatggcatgccatggtaatatngcgatctgtacctactcctgctcactggaaacaatcgctgcactttgtacttgcactatggctttttcttttattatctattacagcagaacaaaggatgcatttatatatattccgtttttcccctttggagagaaggaaaaaaaaaaaaaaaaaaaaaaaaaaaaaaaaaaaaaaaaaaaaaaaa

SEQ ID NO: 116270 - DNA, 266 bp, Zea mays
  Clone ID: MRT4577_37520C.1
cataatatggccctaattaaaatgtaaaagctatatacaatgtaagcacatgtacatatatatgctgaagagtatatatgtttgattttttaaacaaattagggcttaatgtgttaaaagtacctattattttaaaataaatttgggtgcattctatgaatatatcataacttttatgagtccagccaatggcataaatatttacttggggactgtaacacacattatcaaattgccttccagagaggttgactgttcattattta

SEQ ID NO: 116271 - DNA, 193 bp, Zea mays
  unsure (1)..(193): unsure at all n locations
  Clone ID: MRT4577_37521C.1
cagtctaaattttgacaaaagaaccnccctgtgtgtgtgtacttgttttgttgtctatctnctaccncctccataaccttgcaagtaacatcatgcctaatcaacctcccccactaagtatcgcaccccctatcttttttaacctcccctataattctaaacatgccaaactatcattatgctctctgcccat

SEQ ID NO: 116272 - DNA, 263 bp, Zea mays
  Clone ID: MRT4577_37522C.1
agcgactatttatcttgcatcggactgggcccatgtatcagtagccaccatgcttgtcaaggaaacactggtacgagaccagcgcatccacctttagagcagtcatcgcttttcttagaagggctacgctttctggacaacagctgatgagaagaaacaggatggagcagtattcggtggtcctccggaaaaaagcaaggtctagctttacagtgtttcctggcagcgctctggcatctgaattttgaactttgttaatcgaa

SEQ ID NO: 116273 - DNA, 639 bp, Zea mays
  Clone ID: MRT4577_37523C.1
cgtccaagaccgccaggcagtgccgccacaagatcgagaagctccgccgacgcctccggtccaaccgccgacgcccatgcccgctcctcgacgccatggatctcctcgacggcccttccccgcccttcttttccaagtcccagtcccgatccacgtccctgtcctcgtcgccgccgccaccggcggcggtttccacgccgtctcccccttcccctcccgcatctccgcccaggaagaggcggcgggacgatgcctgggacgaggacggtgtgagcgacgtggtgggggctctgagggccatcggggagggtttcctgcgagcggaggagaggaggatggaggccgcccgggagacgcagaggatgcggatggagatggcgcttcgacaccttgatgcacagaggaggctcatggacgcgcttgtcggccgcatcgtcgacgccttggactgaagtggtggcacaaaggtgtctcatcgaggtttcttgcttgtcctcgttgcatgctagcttgcgagtctaggagtttcttagcgctgtttatgtgtagtagctgtgatggatctgtgatgtagttgaagcggacaagccttagtgatttttcagtcttgcatttgctcaaaaggagaagttcttatgg

SEQ ID NO: 116274 - DNA, 357 bp, Zea mays
  unsure (1)..(357): unsure at all n locations
  Clone ID: MRT4577_37524C.1
taacgtcatagtctgaataagtatgggccaccagaccaactgnattgtgtatcgcatgtgtagcaaggctagctgggtttctacaaagcaagttggacaaagggcagcatttgacccatttgtcagacggtagccgggttagccacaaactgctggtataacggaagcaattgtgtgctgttgtcaacaacgaagcggcgcttgctttatctaacatgaccaaatggctttagttttacctgctggaaataagcaaacgggttcacctctgacaattggttatattgaagaaattgttgctacttagcgtaggcaaaaccataactcgcttaatcagaaacacatgatggtgctgga

SEQ ID NO: 116275 - DNA, 318 bp, Zea mays
  Clone ID: MRT4577_37525C.1
atggagaggctcaccattggagctgaggggagggggcttcctgctggtttttccatggaagaaaatagggcgcgctggatagagagttgggcgcagggaacaacaagggggtgtccatggaggggcagatccagccatggcgtgttcctggcagggggcgagctcgtccatgcaaaagcagggaaggggagggagatgctgctgctgctgttgggcgccgacaagaggaagctgcagggggtggcgcccatgggagcttctcccactgcgccagggaggaggaagctcgcagggagggtcgccgagcacatggagtag

SEQ ID NO: 116276 - DNA, 789 bp, Zea mays
  unsure (1)..(789): unsure at all n locations
  Clone ID: MRT4577_37526C.1
cggngaggtagtgacagtgagaagtcacaagccaggccagcagatacggtcaagcaagcacttagaaaacaagttaaagcccagtgaagagtccaaagcatgagcacaaacaagatgggcgtgggcatggccatgtggggagatgagtacagacatcaccgccgggtgagccggagtgcccgaaaagagaaagaaagcagcaggaacagggtgaggtgagtaatggaagaggagccgtagagagagagagagagagagagagagagagagagagagagagagagagagagacgagagggaaagaacaaacagggggagcccatccgccgtgatcaacagcacagaaggtgagaaagcgagagagggaagagccgagctggcaagcccattgattccatccatcctcggtgcacgccagccggcggcctcccagtttccggcggcgctccggcctccggccgggtggatcccatcttgtagggagtgcggaagccgtcaggggcaggagagctcttcctgtcttcggcgcgtggagaggcttggtctccaccaggagcttgtggtacgcgaatctttcttgttcctgcgcaaagtttggttcttttcgctgtttttctgcgcatcctactagtcagttggtgccggcaggctcctcgcatttctggaagaatctacttagtnaattttccggatttctagtcccgngcggtcttggtgttgacgttcctttggcatttgagtaaaaagttgcatattgcagccacctgataccgatttggtttgcacgtt

SEQ ID NO: 116277 - DNA, 645 bp, Zea mays
  Clone ID: MRT4577_37527C.1
catgtatacgagttctttaagatatggaactgttctcgagaaagagctaattttcttgtccacgagttcttcacaacccattacttccaagatggcattcatcctattccgggggctcgagatgctctccaaactctttcttctttctgtaacttgctgtcacctatgcgcaccgtaaactataataatcatgtattgttcgttaaaaaaaaaaaaaaaaaaaaaaaaaaaaaaaaaaaaaaaaaaaaaaaaaaaaaaaaaaaaaaaaaaaaaaaaaaaaaaaaaaaaaaaaaaaaaaaaaaaaaaaaaaaaaaaaaaaaaaaaaaaaaaaaaaaaaaaaaaaaggggggggccttttaaaagaaccaaattttactccccgggcttggaaaaaaaaaattttttttttggggcccccaaattaaattccctggcccgggttttaaaaccgggggaagggaaaaaccctggggttccccaaataaaagcccttgaaaaaaaacccctttttcccaggtgggggaaaaaaaaaaaagccccacccatttcccttttcaaaaaatttgccccccttaaagtggaattggaccccccctttaacggcacattaaacccggggggggggggggtttccccccaagggga

SEQ ID NO: 116278 - DNA, 706 bp, Zea mays
  Clone ID: MRT4577_37528C.1
tcgtttagatcgcgagtttttcgccctaaaggttgttgatatttataccttccatcacacataccaacctcggcctttgatgcgtcagcaaacgttcagacatttttttcgatcaggactcaacagcaaagacagaaattgcggttgatatttacaccatcgaccactgttgacaaaacgaaaccgttaccagtagtctctgcaactgcagacgccgcgccggaaccggtggaggcggttccggtccctgatgacgatctcccggccgaaaatttccgagatcagcgcgctgtacgcgtggcattccttgctcatccggaggttggtcacgatcctcaccggtgccccctccgccgtgctgagcaggccgaatgccatggccagcttctggctgtgcgcggcgaccacacgccgcttctcctcttcgcccacgtccagcgccacctccgacgtgtcaggtttgtagccatcgaaccgcagctgccactccatctggtggagcatctcgtagatgtcgctcgtccgcgggtgcgacctgtcctgcgacacgaaccggtgcagctcgccgcgtacctccacggcgctgaccccgggggattgcgcgaggccccagtccaccgcctctgtccggagctgggcggcagcggcccagtccttggccctggcgtgcatgtccgcgacgatgacgtaggtcgacgcgttcgcg

SEQ ID NO: 116279 - DNA, 244 bp, Zea mays
  Clone ID: MRT4577_37529C.1
gttactgttctgaattaagtttttttagttcgatcaaccaacacaaaaaaataaccacggggcaaactccagagagaacaaacccacagacggacaacatgacaagggaacggggaagaagccccaggaacccacatggggcaaaagaccaggggcgcggaaaaaaaccaaagggccgggggaaaaccaggggaaggtggacaaaaggggggcatacgggcataggcttcaaatctggagatct

SEQ ID NO: 116280 - DNA, 404 bp, Zea mays
  Clone ID: MRT4577_3752C.1
gcacgaggcacggcacatcgcagaaaccggtcgctgaacctgcatcgtcttgctgctgctcggatgctgtcctcgtggtcaccgaagggcaaagcagcttgtgctactgggatcttttgctaataaaagcggagcgcgggggcgataagcgtcgggcagtggcggagggcaaaccaaaattaaggtgttgctactgcaacacgaaatagaaaaaagtcacacaaacttttggtggagattagacaaaaaatcagtattcatttggatttggttctgtgagctaaaagaaacatgttcaacacagttttcaccatgcatgcccacctgcagaaatgcagaatcaatttcaacatgctctctaccctgcttacccacctaaaaaaaaaaaaaaaaaaaaaaaaaaa

SEQ ID NO: 116281 - DNA, 336 bp, Zea mays
  Clone ID: MRT4577_37530C.1
gggggaaaaaaatcggcctacccctaatttttttttggcgaaatctgaccggctcgctttggaatttttaagggccaggaaaccttttggtacccggcccctaatttaatttttttccccaaaacaaaagattctttggaaaaacataaacaaagggcgtttgccccaaggggatctgggaggggggcccccggttatttgtcccgggtttttatttgggggggggggcggtgatccccaggggggggacgaccccccaagggtattctgaaggagcgcccttggcaagaaggggtttttttgtgccagggtctccttttaaaatgacccccctgg

SEQ ID NO: 116282 - DNA, 616 bp, Zea mays
  Clone ID: MRT4577_37531C.1
cgcaattccgggctacgcgtacgagctgttgcagatcctattgacacaaccatctgactctctaccttcatttttttgcggtttttgggttgcctgtgaggtgttgttgttcctgagtatcttgtcaggtaacatgatatttcatatttactcttggaaataatagcttttgtatatggtgaaccatgcacaattaaacatagtggctgggggaggtgttcttatttctgaattgattcaagacatcgatagtcccttagccaagggtgaaagggctataaagccaagaagaggaagaaggggtgaagaattcaggttttcggaagcaatactgaagactattttttggtttctctttgcaatatgctctattgggattggattttcaatcactgttattaataatctaacacaaatatgagttgttgcatgtcatgtcgacacaaccatctcactctctgccttcagtttttgcaatttttggctgcctggaaggtgttgttgttcctgagtatcttgtcaggtaacaggatatttcatatttactcttggaaataattgcttttgtatggtgaaccatgcacaattaaacatagaaaaatcatgttcctttggt

SEQ ID NO: 116283 - DNA, 195 bp, Zea mays
  Clone ID: MRT4577_37532C.1
cttctatgacgccctggtgaacgcatactataaccccaagagggcactaaatactaggaccggcggggactgtatccatccaggtcgggtgacggtgagcacagtatgaccaattactggcgtctactggacaagactgacactaaacagtcttgctcctactccaaggggcgcacaccacatgcaggtgacctt

SEQ ID NO: 116284 - DNA, 1000 bp, Zea mays
  Clone ID: MRT4577_37533C.1
cctcgaggccggccgggattccccgtacacacctttcgctttctcccagtccacacccccaactgcctccccacttcgcaccgccaccgtctcccgaccgcgacgccggcgacctccgcaccgcatcgctccagccgatcgttccgagatttgttgatcaaagaaccatggaaggatcgttccagttgaatcccaacgccagtcctttcatacctggattgctgggttcatctgcacaaaaagccccagaaaaacaaggaggtcttatcatttctgcagggtcatcatcaaagggagagccttctggtagcacctttgatccttctgagtatgaggaaaatgacatggatgaacttgctctagtcaaaatggtcttttcaatgttcccaaatgtctccacggacttcattgatgagttaatcaaggcaaatgattttgacatgaatctgactgttgatatgctttatgagctgaactcacaagatatggttcatgatgattctgaggttatcaatcattttcatgatgattctgaggctaccaatgaccttcatgatggcaagggcgtacctggtgctgattaccacaagactgtggtgcccgagagtagcagcaacatgaatcaagacctgcagaacgaggagtcagcaacaacttctgatgtgaaatctgtgctgccaaagttctcacagatcaatttgcttcacaatgacctgggcctgcctgatgatgataagtcagcggggacttctattgcaaattgatctttcatatcaaggcgctccgtttgacccgagttagtgggttatggtgtacatactagttgcacccagaagtagaagtgtggcttggaaggtcaaagcagcggaagcaactgtcccatttccgtttgccggaccagttaactgtttctgggttaactgtgttgggtttggtacccagttagtacaaacaatccaagttatggcgtggctgtccgttatgtgaaataaaaagaaaa

SEQ ID NO: 116285 - DNA, 1188 bp, Zea mays
  Clone ID: MRT4577_37534C.1
ttgggtacctcgaggccggccgggagctctcgcccgccgctgccgtgcgcccgtgccgtttcatttccccgtcacacacctttcgctttctcccagtccacacccccaactgcctccccacttcgcaccgccaccgtctcccgaccgcgacgccggcgacctccgcaccgcatcgctccagccgatcgttccgagatttgttgatcaaagaaccatggaaggatcgttccagttgaatcccaacgccagtcctttcatacctggattgctgggttcatctgcacaaaaagccccagaaaaacaaggagggtcatcatcaaagggagagccttctggtagcacctttgatccttctgagtatgaggaaaatgacatggatgaacttgctctagtcaaaatggtcttttcaatgttcccaaatgtctccacggacttcattgatgagttaatcaaggcaaatgattttgacatgaatctgactgttgatatgctttatgagctgaactcacaagatatggttcatgatgattctgaggttatcaatcattttcatgatgattctgaggctaccaatgaccttcatgatggcaagggcgtacctggtgctgattaccacaagactgtggtgcccgagagtagcagcaacatgaatcaagacctgcagaacgaggagtcagcaacaacttctgatgtgaaatctgtgctgccaaagttctcacagatcaatttgcttcacaatgacctgggcctgcctgatgatgataagtcagcggggacttctattgcaaattgatctttcatatcaaggcgctccgtttgacccgagttagtgggttatggtgtacatactagttgcacccagaagtagaagtgtggcttggaaggtcaaagcagcggaagcaactgtcccatttccgtttgccggaccagttaactgtttctggtggttatcctgactttgaaatcccctgttcagctccttttgggccgagtagttaggtatttctggtggtggttgtcatgagtttttacatctagttcgctcttcaagactgagtagtacttggtggtcatcctgattttgcatgtcagggttagctgtgttgggtttggtacccagttagtacaaacaatccaagttatggcgtggctgtccgttatgtgtgatgttgtgggagggttgcatcc

SEQ ID NO: 116286 - DNA, 521 bp, Zea mays
  Clone ID: MRT4577_37535C.1
tatctgtatctggtactccccttctcgccgtcgccggcctcctctccggactccgtcgctgcctctctccacaataataatctactccatcccccgctcttgtccgtctccttgaccaacttgctctccccttcttctacctgtaattcccatcctgcttgtgcgagaagggtctcttcccgcacgatgtgcgaagcacgcacgtttctagacgcctgaaagcgatcgcaaatcgaatcataggagaaggggcctgcagaagctgcagtgagtactgtcatatgtgtcacaagcaccgccgcgaccagaaggaactcaagtgccactgtatgcgggagacgcaccagaggaatatgcatgtgttaggaatgtccaccgaccgagttgtctagggcttctccaaagagttcctctagtccttcctctccttcatccgccacgcggaccgccactcccgcttgaccgcaacccatggtgtacaacaagtatatcgtcgaccgttaccacgtccacatgaactc

SEQ ID NO: 116287 - DNA, 336 bp, Zea mays
  Clone ID: MRT4577_37536C.1
ttgaaactcacgttcacgggggcagagctacagctaggtgatgaggttgaagaagagaggaaagtcacagcacatggtgagagagagaatgttcctttcattgctatatgtgtcgcgtgcagacgacaaatacctggctctgatgaccggactgccttagaggtagtaacgatgaatactgaagattgatatgttgaacggacctatggacatgctgggcctcttatagcatgaaccattagctgtcgcgaatgagatgatgtaggctttgctcactacctccaagaggaagactttcagaatacgaatgagcaacttttggatatgacatgcata

SEQ ID NO: 116288 - DNA, 618 bp, Zea mays
  Clone ID: MRT4577_37537C.1
cgagtacaaccatgctccgatggctcaccggactggtccagtggtgcaccagaccgagtgcacagagagctctgcagaaggggttcagtggattggcgcaccagaccggtctagtgacccacggaccacttatgtagagagaatgtttttaaggacttaacggttggcgcaccgagccttggttcaacgactaactctagactcgaacgggtggcacaatggctatctgacgtgagattgtaagttcaatcaaccccaattaagggttttggtgattaaatgacaaaatagataatgtttctaacaagtttgctcctagtgtatactcagtgtcagtaaagataaaaaagagtaacaactttaattgataaagtaaaaagaaagtatcaaggacaaaggaaatacatcaagtggtgccttgaaaagtttccatacgacgatcgtgtaaaactttctatatttcttaagtcgccggatttatttcttccttggtagttttcgcataagtaatggtgtttgctattgctcaagcctctaaattcaaaagctattttgaaaaccaaattctttggacactctgtgagttcgactaatgttaggtttgagagatggagagtc

SEQ ID NO: 116289 - DNA, 382 bp, Zea mays
  Clone ID: MRT4577_37538C.1
caaagcgtaagaaggggcacgcttacaaatagaacatcgatggaaacccaaacagtatgatggcaaatgaagctgcccatactactgccaatcaaagtggcgatcctcataaaggaagttagaaggggcaacccatgttgtcagaggacgctaccaccactgtttccccaagcaagagtaagaagcacgaaactcgtaatgatgaattggacaaagatagttgtaatttgtccaatggaaagaatgggaaaacagacaaacggaatatcgacagatacacatattatcttacaccaaacgaaaccataaattataatcataatggtgacattcttctcaagatttaagtatgagaaattcattattatgaaacatcaaattc

SEQ ID NO: 116290 - DNA, 329 bp, Zea mays
  Clone ID: MRT4577_37539C.1
aacaaattacatcatgtctataaattcggagcaatagattttctttttgggtacactgttaagataaattaacggcttcaaaatggtgatgtgattaatcgaatacacataatcatcttcttgtctcgtgtcaactaaaaatacaggagaagacccctagggctagtttgggaaccccattttctcaagagattcctattttaccgagaaaaaaaactaatgttccttgtaaaaattaaaatcccttaagaaaattagattctcaaactagccttaaaagatgaagaacgaaaaagaagacacaaggctttctccagatatgaacatgc

SEQ ID NO: 116291 - DNA, 595 bp, Zea mays
  Clone ID: MRT4577_3753C.1
tcgagtttttttttttttttttttttttttttttttttttttttttttttttttttttttttttttttttttatttttttttgttttaaaaataaaaaaaaaattgtttggtagccctgccaaatggcggggaaaatttaacccccggaaatttatagcaaaacacccccaaatgggaaagcaagcagggccccatacctttacaaaagtctggctttgctgggcactgccagccaggggggggggggggccaaaaaaggccctccttgagtgggggcaaagggggacccataccctcgacccaacataggagggaacctagctgggcacattgggcccacctggaccccatggactttgcttggcctaagggggagggaacggatgccccaaaaaacctgggccagaatctcttccagggaagctatcctaagggggtttcggaccccttggtggggccggggggggatccaccccccaccgcccagggagtaaaaatcgggttcacaatatggcccaggcgggttaattttatcctaaaaataaagccttttttttgcacccggccggggaaaaaaggacgggccctcagtta

SEQ ID NO: 116292 - DNA, 207 bp, Zea mays
  Clone ID: MRT4577_37540C.1
tttttacccccacgcaccagacagagaacgggcggttttcttatgaacactgaccgtttcacaacctcactaccggggggaggctcaccgagaaaacacccccgactcacctttaaacgtttatcggcatagccggccattatgcaactaatgcataattgggatggcatgcttaatttccatcttcattaaataatttttgataaa

SEQ ID NO: 116293 - DNA, 777 bp, Zea mays
  unsure (1)..(777): unsure at all n locations
  Clone ID: MRT4577_37541C.1
cataacagnagtatctggttatcctcatacttctatcatgccaccaccactatttaggaatgtacatgcttaccagaatacaataagtggcgatgctcccactaagcagaaagctaatggagtaagccagccactcagaaggaaatacatggatgaagcaaggctaaagaaggttaggttctttcatttaattgctatcactggatgccactacttgtaacttctgtacctgcctgtttcccgatctttagaacttccatggtttgctcatgacttttaatggcctgtctatccctagagttcgcatttctcccctgacctttatctgaaaaggatgtcagtgtgacatatgtgttggtttatatttattttattttatggcatgttgatattttccatttgctcgtactcccttgaccacaaaatgtcttaaatataaattcccttgaaatttctgtaagcaaacattgatggtcccttgtatcaggattcatagtgttggattcgttgttatcatattacaatagtaattcatagtgtcaggatcagtcatgtcttacatttttttttgctgtacatggtttttgttgttcataaaactaataatcttgagtttgtctgcaagtatcttcgttcttcagtactagtgtgccaattgtgtaccagcatcaaacaatggtctcaaaaactcagaatgccttataataccattcatcttgatgatgtttacataatgggttagatcagtggtgtcattcttgttgcatactattttgc

SEQ ID NO: 116294 - DNA, 145 bp, Zea mays
  Clone ID: MRT4577_37542C.1
gccttgcatattcgcccacattttttatggtgttacagggaacatagttccattcccattacataccggtacattacacatgctgctgttaaacatatctgacgaacacactcggaaatcacacgcgccgtacggatgaagacat

SEQ ID NO: 116295 - DNA, 287 bp, Zea mays
  Clone ID: MRT4577_37543C.1
cgcttaccataatttctcaaactcttttagatacttcgtctgatgaaattcggccagattattatgaacgtacaatgtgcaaaccaccaacggttcaagctaaaaacttctcatgcaaccatctatttcatctaccttgtttgtgcatcatacgcttgatcaatgactaatctaatgatactgctgtacaacttgttctacaccgttcttattatcatttgcacatccacaaatgtctacaaattcacatcgtgcaaatgttcatcaaattatctaacaacttacta

SEQ ID NO: 116296 - DNA, 596 bp, Zea mays
  Clone ID: MRT4577_37544C.1
agaggatgaaatatcgatgagaaactctcaacaacaacaaagccatttggaggaatgtgtgtgtgtgtgtgtgtgggggggggggggcaaactttgagagtttggttacacttgctcgtagctacctaccctataaatgggaaaaaacttgcttcatcatgaattacaacttgcttcatcttctgtaatatgtacatttaaatgttcatctggtaatcgtctcctctagatacatcatctaggattgatccatatatctgaaccatcaagctgccagccatgatgaagatagccccgacaaatcctgtcaggccccatcttttgccgagcattacccatgcaaaagcagcaccccatacaggttccagaccataaataattgcagtttctgtagctgatacaacgcgcatagcggccacctctgcccataaacaaaacgaagttgacaatatgcctgtgtatagaattgctggccaaggaaacaacatcgccataccaaataactctgatggagaccatactttcaaattccagtgttgtacattttgtgtgaagcatttaaaagtatatgacgctgctgataggattgctacaac

SEQ ID NO: 116297 - DNA, 311 bp, Zea mays
  Clone ID: MRT4577_37545C.1
gcttccgcaactctgcaggctgttcgtcgccctccctccactgcggaagcgccccgatacaccatgcagtggcggaacttgcctatcttgacgcttgctcgactaattcaccgatctgtcatatgaccctgcatcgtcatgcaaagcctactctgactgagtagatgtgtccacatgaagatttctcttgatgagtgctcctgaaaaccatatgctgttggtgaattgttacagagcttgtctcaccacccaaaatgcagttttccgcctccacagtcttcattcattacacatgccccccctccccacat

SEQ ID NO: 116298 - DNA, 271 bp, Zea mays
  Clone ID: MRT4577_37546C.1
acgctctcgtgcgacttaacctcggcgcttggacgctattattaggaggtaatttatactcattggttggtagacaatagagcgacatacgctgtccaacctcctaaacacttcttggggcgctttaacctacagctatgaactcaactttcaaggcctgaacttgttccacacgaccgtgggtcccaaggccaaccaatctgcgatcaaagatagcaaggccaccatcgtcgtcggagccacctgggtaaacaactggtcagggtgtgac

SEQ ID NO: 116299 - DNA, 2472 bp, Zea mays
  Clone ID: MRT4577_37547C.1
agccaacttaaacccatacgagcgcatgccagcgcaaggggttattgggtttataatctccagcagtttcctgtttcgaataacaatgactgagtggtgtttggttcgcgaaatgtaacgtaaagggtaatggtttacactcgattactggccgtaacaagtttgaatagttcggtatcaatttttagtatgatatctgattacggttggactaaaacaaacataatttaacgttatcacttacccattacgttacaaatatgtgaaccaaacggcaccatggtgtctttgaacatcagtgatcaatgcagattattaatttattgttgcgctagcctgatatcattgagctccttgggggactgatcctaactagataaagggatgcatcttagacaattacacctcagcaacccccggtatcggtactccttgccctgctgtcaggatcttgtatgccttctggatttgtctagtgactggaccaattttcccgtcgccgatttcacgtccatcaatcattacaaccggtgtgatttcacccattgttccggttgtccatacctcatctgcagcatggaattctgacagactaatgcgtcgttcatgtaacacaaagttttctttcaccacaagatccatgacagttgctcgcgtaatgcctggaaggcaatagtcagcatgaggtgtcaatacaattccctttttgaccataaaaatatttgttgcgtttgtttctgatacaaagccatccttatctagcataatggcatcctcagcctgggcaagattaccttctatctttgccagaatattgttgataagattgttgtgatgaatcttggaatctatactatttggagaatttcgacgtgtggtggcagtaaccaattttatcccatgagagttatcataaactggtggtttccactctgcaagcacaatcaaggcacacccataaagattgaaagctggactcattccagatgtcacctttttcccacgggtgagcgtgagccttatatgagcattgttgaacattccatttgcaatcagagtcttaaagatggcatccttaatccaatcacgagtaggcacattgctgaaggccatagcttttgcagaatcaaacaatctgtccaaatgttcatctaatttgaatacttttccatcatatatacgtaaaccttcccaaacagcatctcctccttgtacaactgaatcaaacactgaaacctttgcactgttacggggcaaaagttcatctccaacccaaacaagaatgtttttatttgcagggacaggcagaggagggtccgataatggtggttgctgcggtcctcttatcttccttatttggcgcttcagcatgttgtagaaaggcaagctttgctcaagcaggtcataaaacacgaatgggaaagtcagaggatattggcgaggcttagagaaacctgaagacttgtgcacactcccataccaccagggtgcccatataccatcaaattccttggggccagcttcccatttcaacatttgtggctggaaaggaatgcccagatcctcacagagtccactcaggacggcctcaggatcctgttgcagatcatctgcatctatcacagggggtgggctcccaagtccacataattcactgtatattgagacaagttcgcctatgccaagctccatgaaggatggtggaacgactttatcaaaagatggcagtatatctagagggttccgtatcaatatgaaatgttttcccttcttcatgaggtcgcttgacagatttgggagatgttgctttgagatgtgcttgcagtaacgatactttttgtcccctgggccaaaaatcacctctttgacaaccttatttccatcagggtccattttggacaggagctcctgccggtagggcctgtcgacgcctgtggcacgcaggaaatttgcgtagagaggctcgtcaagcacctccatgtcgtccctctgggcgaaggagtacatgaggctggtgctgagggagcgcggcgccgaccacgcgtggatcaccacgggcgactccgcctccgacgccattcgcccgcggccgcagcgcctcgccgatcgagtggagactggaggaggggggaatttccgggtggttggttcctcccgagtcgaatttgacccgcccgagcgtggtgccgaagtgggaacagattggaatggaaggctattatttaggattaggactgtaggagtaggagaggcggggccgcggggagcaccaccattggtgcactgatgctttggcgtcgccgccgcgtgcttggcctggtgccgaggtggcctggtgggtggagacgtttcaaaaactcgatggttcgcgggattctgcaattcacaccaggtatcgcattttgctacgttcttcatcgatgcgagagccaagatatccgttgccgagagtcgttcgaaagcccggccggc

SEQ ID NO: 116300 - DNA, 689 bp, Zea mays
  Clone ID: MRT4577_37548C.1
caggctgaggatgccattatgctagataaggatggctttgtatcagaaacaaacgcaacaaatatttttatggtcaaaaagggaattgtattgacacctcatgctgactattgccttccaggcattacgcgagcaactgtcatggatcttgtggtgaaagaaaactttgtgttacatgaacgacgcattagtctgtcagaattccatgctgcagatgaggtatggacaaccggaacaatgggtgaaattacaccggttgtaatgattgatggacgtgaaatcggcgacgggaaaattggtccagtcactagacaaatccagaaagcatacaagatcctgacagcagggcaaggagtaccgataccgggggttgctgaggtgtaattgtcaaagatgcatccctttatctagttaggatcagtcccccaaggagctcgatgatatcagtctagcgctacaataaattaataatctgcattgatcactgatgttcaaaggcaccaatcaccatgtagtcattgttattcgaaacaggatactgctggagattataaacgcaataagccattgcgctggcatgcgctcgtatgcgtctaagttggctaatactctaatccccgtgcttatagccgatccaatttgtcatcacgatccctgcccgtgcatacgatttccagtgcattttgtcg

SEQ ID NO: 116301 - DNA, 487 bp, Zea mays
  Clone ID: MRT4577_37549C.1
cacaccgggcacaccccacgagctgagcttagctccactacagctccaatcacagtcgtgaccagagcgcgagagctagctagagggccgagaaatgccgatcaataagatcgccctgcggagccaccaggatgtgtaccacccagacgccctcaaggcggcgtgcgctgagttcatctccaccctcatcttcgtcttcggcgggcggggctccgaaatggccttcagcaagctgaccggcggaggaccgacgaccccggcgggcctgatcgcggaggtggaggcacacgcgttcgcgctggtcgtggcggagtagatgagcgcgaacatctccggcgggcacgagtacccgggcgagaccttcggcgccttcgtgggcggaacatcaccctgttccgagggctcctgtactgggtggtacatatgatggagtccaccgtggcgtgctttctgctacgcttctctacgggggggcaagacacgggca

SEQ ID NO: 116302 - DNA, 218 bp, Zea mays
  Clone ID: MRT4577_3754C.1
cccactcgtccgcccacgcgtccggttaacttacagcagaatcaccatggagaggaaactcttggaatttataatgctttgtagtgtcttgttgactactttctaagaaactggtacgtaccactggcataatactttcaatgggaataaggaatgatgtgttgtgctcactgctgaaagttaaccggacgcgttggcggacgcgtggtcgggcgcgt

SEQ ID NO: 116303 - DNA, 667 bp, Zea mays
  Clone ID: MRT4577_37550C.1
actctgactctcatctgaagcgcgcgagagaaacgcgtatacccaggcggcggttgaggaagaggaggagaagaagaagaagatggcttcctccgcatacgcctcatggtccaagcggtggatccgtcccgaggtacgtacgccgttgctgtttcccatgtgatcgttcgttcggtttctatcgatcggagaattgggtcatcgtggatggatggatggatctgacgggatttgccgatcccggtgtcgcgcgcgtccatggatcaggtgtacccgctgttcgtgccgatggccgtggccctgggcatctgctcgtaccagcttgtgcgcaacatcactggcaaccccgaggtgcgggtgaccaaggagaagagggcggccggcgtcctggacaaccacgacgagggcgagaggtacgctatgcacggcctcaggaagttcgtccgcgggaagaagcccgagatcatggcctccatcaactccttcttcgccgaccctcccaaggacgattaagctagattccgtcatggatggatggaccatcgtatgttttaccattcattagcggccggcggcgcgccttgattcgtagccgtcgtcggtacattttttttggtttctaaaattctaattctcccatataaatgggaagtatggaacaccatgg

SEQ ID NO: 116304 - DNA, 395 bp, Zea mays
  unsure (1)..(395): unsure at all n locations
  Clone ID: MRT4577_37551C.1
acgagcattcaaaaccacaccaacccaatcttactaacaacaacctaacaccaatggctacgcacgatattatccatacttgcgcttctatcccttttactgagcgcaacanatgcgttcattattccacactgctcactagctcctagagccagtcttccacagacactcccaccagttacttcactgtgcttccaacatgcaacctctcagcctacaggctaaactagcgcttgggctactctctacacaccaattgccaatgcacaacatccttgcacattaccttacaacattgactcaacacacacacagatctgcatactgagcactaccgtgtgacctgcactactcacacatctctcatcaccactctctgcaactactcatacaca

SEQ ID NO: 116305 - DNA, 411 bp, Zea mays
  Clone ID: MRT4577_37552C.1
aaacaataaacatatgttctttttaatattggttcattgtttgaccatttaaaccttgttttatgggtaacctttcataacccatgataggtctttaaaaaaaacattctaataacaagggcaaaaacagaacaaaggactccagccaaaatgttataataacttatttaaaataaggagatgcccagcatgttcaacaagggcaaagaaacatcaaaaactccgccagtattggttgagcaaaagtcttagcaatcaacaatttgctagacaaattccttccaatgatttctttgcgaaaacgtgctgtgtggatgaacatcacaatgccatccctaaatacctgaggcctttgaaatgtctgggacacggacttattacattccatactcgttgcatcgaatttctgaa

SEQ ID NO: 116306 - DNA, 191 bp, Zea mays
  Clone ID: MRT4577_37553C.1
tcacgaacaacacaacaaaaagaaagatcgaacaatgggcgaaactattcaaactcccttgacaagattgcttggcatcaagcacccaattctcttggctggtatgaaccaagctgctggtcctgccttggctgccgctgtttccaatgctggtggtttgggttcaattggtggtgttggttacacacccg

SEQ ID NO: 116307 - DNA, 703 bp, Zea mays
  Clone ID: MRT4577_37554C.1
ttttttttttttttttttttttttttttttttttttttttttttttgggacgcaacaatatcatacagtcatccgttattactcaaatatgtgatgaaaatcacaaggcatgctgaattcgttcgcagccatgcaagcaaacacgacaaatgcatgatgttccatttatatgggagaattagaattttagaaaccaaaaaaatgtaccgacgacggctacgaatcaaggcgcgccgccggccgctaatgagttgtaaacatacgatggacgatcaggaatttttcatccatccatccatccatgacggaatctagcttaatcgtccttgggagggtcggcgaagaaggagttgatggaggccatgatctcgggcttcttcccgcggacgaacttcctgaggccgtgcatagcgtacctctcgccctcgtcgtggttgtccaggacgccggccgccctcttctccttggtcacccgcacctcggggttgcccgtgatgttgcgcacaagctggtacgagcagatgcccaaggccacggccatcggcacgaacagcgggtacacctcgggacggatccaccgcttggaccatgaggcgtatgcggaggaagccatcttcttcttcttctcctcctcttcctcaaccgccgcctgggtatacgcgtttctctcgcgcacttcagatcgacagcaacggaattcgag

SEQ ID NO: 116308 - DNA, 758 bp, Zea mays
  Clone ID: MRT4577_37555C.1
ggccgctttttttttttttttttttttttgggacgcaacaatatcatatagtcatcagttattaatcaaatatgtgatgaaaatcacaaggcatgctgaattcgttcgcagccatgcaagcacacacgacaaatgcatgatgttccatacttccatttatatgggagaattagaattttagaaaccaaaaaaaaaaaaagtaccgacgatggctacgaatcaaggcgcgcccccggcagctaatgattggtaaaacatacgatggacgataggcaatctctcatccatccatccatccatgacggaatctagcttaatcgtccttgggagggtcggcgaagaaggagttgatggaagccatgatctcgggcttcttcccgcggacgaacttcctgaggccgtgcatggcgtacctctcgccctcgtcgtggttgtccaggacgccggccgccctcttctccttggtcacccgcacctcggggttgcccgtgatgttgcgcacaagctggtacgagcagatacccagggccacggccatcggcacgaacagcgggtacacctcgggacggatccaccgcttggaccatgaggcgtacgcggaggaagccatcttcttcttcttcttctcctcctcctcaaccgccgcctgggtatacgcgtctgtctctcgcgcgcttcagatgagagtcagagttttttttttttttttttttttttttttttttttttttttttttttttttttcccggccggcccg

SEQ ID NO: 116309 - DNA, 875 bp, Zea mays
  Clone ID: MRT4577_37556C.1
gggacgcaacaatatcatatagtcatcagttattaatcaaatatgtgatgaaaatcacaaggcatgcctgaattcgttcgcagccatgcaagcacacacgacaaatgcatgatgttccatttatatgggagaattagaattttagaaaccaaaaaaaaaagtaccgacgatggctacgaatcaaggcgcgcccccggcagctaatgattggtaaaacatactcatccatccatgacggaatctagcttaatcgtccttgggagggtcggcgaagaaggagttgatggaagccatgatctcgggcttcttcccgcggacgaacttcctgaggccgtgcatggcgtacctctcgccctcgtcgtggttgtccaggacgcccgagttgatggaggccatgatctcgggcttcttcccgcggacgaacttcctgaggccgtgcatagcgtacctctcgccctcgtcgtggttgtccaggacgccggccgccctcttctccttggtcacccgcacctcggggttgcccgtgatgttgcgcacaagctggtacgagcagatgcccagggccacggccatcggcacgaacagcgggtacacctgatccatggacgcgcgcgacaccgggatcggcaaatcccgtcagatccatccatccatccacgatgacccaattcgccgatcgatagaaaccgaacgaacgatcagatgggaaacagcaacggcgtacgtacctcgggacggatccaccgcttggaccatgaggcgtacgcggaggaagccatcttcttcttctcctcctcctcctcctcaaccgccgcctgggtatacgcgtctgtctctcgtgcgcttcagatgagagtcagcccggccggcctcga

SEQ ID NO: 116310 - DNA, 671 bp, Zea mays
  unsure (1)..(671): unsure at all n locations
  Clone ID: MRT4577_37557C.1
aaacgccgaggcgcgattccgnnaagcgaccggccgccgcccacgactgagcgagctcgctcgancctcgtggcgcggcgctgctacaccgctagcactaccacgtagatcactccgccaccggtggggntttncatacangncgaggccacttgcgccccctgtatataaagggcgaggcgccgccgcccccctccccccaggagcaacccctgcccccgctggagcaggaacaaggcccgcgcagggaagggggaggttggccgcccccctcaccccgacacggtggccccgcacccccccccaatccccccggtggtggattatctttaggcgcacgccacgctccttgatagtcacatctccctcctcccccccgaacccccacacacatgctcccccgctgacacacccgcccccccaccccacccaccccctcccccccaccccccacacccccccccataccccctcccccccccccccccccctcccccccccccccccacctccccaccgctccccctccctcccccctccccccccccccacccccccccaccacccactaacacaccacccaccttcccccctcttcctctcctcaccccccccacccccaccctctgatcatgccaccaccccccccccccccgccctcccctcccccc

SEQ ID NO: 116311 - DNA, 2508 bp, Zea mays
  Clone ID: MRT4577_37558C.1
gccggccgggtcgcgacgcacttaacctctagtactcgactgctaccggtaccggggacgacggcggaagccgcctgtctcagtcgcggccgtcccccggcttcttggactttgtcgccgcacccgcacggcgctacgcaacaacaaaagcaggtccgctcgtcccgtctcgtgaccctacccccccgcggctcgtctccctctcacggtctctcacctcacaacctcacggtcctcacctcactccacctcgttcgccgcctcgctgccgcgtcgggccagtgcgtgcgtgggggcgggcgtgagtgactggctctcctcggcgcgcggacccaggggcggcggcgatggggaagaatatgcgcatcaagacggcgcccaaggcgaaccgtgtccccctcctcggcgacggggagacgtcaagggcgctctcggacctggaagagggcagcgacgtccagccagcgaacgtcggcttctgtcgggtcatcaaacttgcgaagcatgacgccggaaagctggtcctcgccaccgcggcgctgctcgtcgcctccctcagtaaccttctcgttcccaaatatggtggcaagataattgacattgtgtcaagagatgttcggcgcccagaagataaggcgcaagccctggaggatgtgaagggcacaattttgtacattgtgacaatcgtcttagtcggttcagtttgcacggctcttcgggcatggctattcaattctgctagtgagagagtagtcgctcgactaaggaaagacttgttcagccatctcataaaccaggaaatagcgttttttgatgtgactagaacaggagagctcttaagcaggctttctgaagatacacaaataataaagaatgctgctacaaccaacctatcagaggcactgcgcaatgtaactactacagctattggtcttggtttcatgttttcaacttcatggaagttaacattgctggcacttgtaattgtcccggttatatcagttgctgtgcgtagatttggacgttttcttcgtgagctttcacatcaaacacaagctgctgcagctgtagcttcatccatagctgaggaatcttttggtgccatccgcacagtaagatcctttgctcaggaatatcatgagatttcacgctatggtgaaaaagtagaggagacacttaaacttggtctcaaacaagctaaagttgttggcttgttttctggagggcttaatgctgcatcaaccatgtctgtggttattgttgttatttatggcgccaacttaaccatcaatggttacatgacaactggctctcttacatcattcatcttatacagccttacagttggttcgtcagtatctgccttgtcaggactatacacaactgtaatgaaagcctctggtgcaagccgtagggtttttcaacttttggaccgtgtttcgtcaatgacaaactctggggacaaatgtccaataaatgaaaaggatggggaagttgagcttgatgatgtctggtttgcatatccttctcgcccatctcatatgattcttaagggaataactctgaagctagcaccaggttcaaaggttgcacttgttgggccaagtggtggtggtaaaaccacaatagcaaatttgattgagcggttttatgaccctctaaagggaaggatcttgcttaatggagtaccgctggcagaaatttcacatcaatatcttcacagcaaggtaagcattgtcagccaggagcctacgctcttcaactgcaccatcgaagagaatattgcttatggactagagggcacaacgaactttgctgacgttgagagtgcagctaaaatggcgaatgcacacaacttcatatgcggctttcccgaccaatataagactgtcgtcggcgagcgggggatcaggttatccggcgggcagaagcagaggatcgccattgcgagagctttgcttatgaacccacgagtgcttctcctggacgaagccaccagtgccctggatgctgaaagcgaatatcttgtacaggatgcaatggactccttgatgaaagggaggactgtccttgtgatagcccaccggctctcgaccgtcaagagcgccgacaccgtcgccgtcatctccgacggcctaatcgtggagagcggcacgcacgacgaactcctggaccgcgacggcatatacacggccttggtgaagaggcagctgcaggggccgaagtttgaggccaccagcagcatcagcgaggcctccgaaattgaagcggaacccagcagtaatgggcaatagcggccccgattattaggaagaccacagttgatttgaatccacacaagtgtatgtaaccctgatgttgacgtatgccactgcgaatcacgcgaaaccattggatatcacatgatgctacggttgttgtaggagtaatttcccacttggttaatccaacacatatggtccagttttgtgtttatgataaaaaaaaaagcgggcctcgagctccagc

SEQ ID NO: 116312 - DNA, 328 bp, Zea mays
  unsure (1)..(328): unsure at all n locations
  Clone ID: MRT4577_37559C.1
cggttttaaatggcgagggccgccctttntttttttttttttttaaattaatacctccagcactttattattattgtattattacaggccatggccatactacgtgatacagtgaatatacatgacaccctttgctcgctctgtttatttgcactgtggctgctgcaaagacgcctcggagataagaccctgtatttgctagacgtatgcatgctgtgcacgatcgatggccgatggtcatatcatcgtggtcagtatagggctggatttcacgctggtgtcccctcgcaccacttcagagcacgacgtcggtgcgtcacggacccgc

SEQ ID NO: 116313 - DNA, 494 bp, Zea mays
  Clone ID: MRT4577_3755C.1
catttcccgctattcccttgcttaccattccctgcccacttagcgtcctgcagtacctcgaatcctccgccgagcttcgatcttagacggcctaatgcatgaagaacccttacgagatcatcaacaatagctgactacagcgcacacccctgtgctgggaatccccgtggctgaagacacacctgtgaccattgccaacttcctttccatattaaatggctcgaactggcaaaaaacacatcgattcttcttctccgcagcgcctggtctgatgtcctgaagtcctacaccaccttccgaccgtgatcctcttctaacataccctctaccttacgacctcagctgtcaagcctctctctcgtctatagtcctcatgagtactcacgaggcctccctgaaaaccaaggcgacaccagtccaccatatgtagatctgttgaggccaagcatgacagcaccttccacgcgcacaatgacctcctgaactcctgctct

SEQ ID NO: 116314 - DNA, 1272 bp, Zea mays
  Clone ID: MRT4577_37560C.1
ctagttgtcttcaccggagtaggagcctccggcgaagatatccttcaggtccccctcgggcgactgatacccgaggtcccgttcagccgcggccacctcgccgtcgtccaccttttctttgccgggccagcggcgaggcggggagctgtctttggaggactgctcgcgccgctcgctgatgcgttttgtgaggtcattgatctcgcaacacttcgcggcgctgtggcgaccatgcgagtgcacagggcatgaaccactgctacccttctgcagtcgcgggcgtttgttgcggtcgccctggcctccggtcgctgccgcgaccatcagagcggtggaccgcggcttctggtagtcgtggtccttcttctttttcttctttccgtcccagaggatgccccccagccacccgactgggcagctcttggtgaagcgggagatgaacttccgaagggtttccccggcctcctgcctcactgcatggaggtgggcctccacaccgtgctgctggtaagcactagcgaagttcgccacgaaccgcgcacagagttcttcccaggagtagactgatcccggggtgaggttcatgagccaggtccgggcaggtctaggcaaggccacatgaaagtatgttgccatcacagtggtgtttccacctgctgccgtgatggtggtaacgtacacctgcaggaactctgacgggtttgatgttccgtcgtatttttccgccaggtgcggccggaacttgggtggccaggacgccgcgcggagatgatccgctagtgcggcgcagcctacgccggccaaggggacacccgttggggaccgggtgcccattggcgtcagcggtctaccgcagcgaagtcggttgagctccgcccggaggtcgtcggtctgcgcaccccttatggagggcgagcgcacagacgtcgtcgcctcgcgttggcgccgggatgaccgaggcctcgacctggtcgaagtagaatgcgccatgacgagcagccggtcgacgtcgtcgcgccactgcttcatggcccccagtgatgccgtggagctaggggggtggcgtagcaactctctggccgcagacagcgccgtaggcgctgccctcgatggagtctgggacgcctgcgctggcgtgtgctgctgcacggcgtgtacggcagcactcccagagtcgaggcggtcgggcactcgtggcgcggaggatgcaacctcttgttccatcacgaaatccttcgaagttttggcgcggtgctcgatgattcgcaccat

SEQ ID NO: 116315 - DNA, 494 bp, Zea mays
  Clone ID: MRT4577_37561C.1
ttgcgccaaaggtgatagggcacaataacatccggcacacaaggcggtgctagctctggtgctgatattgagactttcttgaacagcggatgtgtaccataaacatgacaaggcgactgtgcatgaagtgcggatggggaagtgctattgacggctgcttaagggggctactgacatgaatggagacagtcatttgaaacaaagggtgccgttcactatgtacgtgaagaaggcatctaagcgacagatgcttgttggcctcatgacccagacagtatgtgaacaccggacaaggacagaggagacggtgcccctatccaacactggtgatgagacacacaaggctgatgctgacgtgactacgcatccagttgatgataaggacccattcttttttgctgaagcgcctccagaagacacgtaaccgagatgcgacacatgaaccatctatcgcaaactcatgataagcagtggtgccagaggcgacgacattg

SEQ ID NO: 116316 - DNA, 716 bp, Zea mays
  Clone ID: MRT4577_37562C.1
atattggatgaagtgcaccagcagataaattcatggatttttcagattaccagggtttacaaggagaaggactttttggaaactgaatttatagttgggcccatatcagtagatgatggaaatggaaaagaagtagcaactgaaattgttacaaacatggttacaaacaaaacattctacactgattccagtggacgtgatttcatcaaaaggataagagattatcgatcggagtggaagattgaagtgcaccagcctattgctggaaactattatcctgtgatatttcgtttgctcccatctctatgttttttcaatgaagttcaataacatcaataagatggtttactttttatctgagtcaacttccaaaaacagtcaagagtggcaatttccactcaattgatataatattgaattgtttattcttttttacttttcatatagaattttattggttattttggttcgattcaaacgctgttgattttaactgaaagatggcaacaccaacataaaatgttagctcaatcagctatttgtgcactgtggcaaaagaagttaggtttatcaatttataaaaaaaatctgcatagctgagttggatagacggtctaagtagtactccttggatcctgagttcgactcattgtgcgagtgaatttcaggttggagttaaaaaattccttcatttgtcccacgtaaaaacacaggtc

SEQ ID NO: 116317 - DNA, 3720 bp, Zea mays
  Clone ID: MRT4577_37563C.1
aattcggcacgaggaggcttaccttcttgtcgcacttagctgcttcgccggaggccctcgccgctagaatcaacagtcaatcacagtccccgcttcccggcggccaccgctgcatcctcccctttccacgctccactctcctagcgcgcccgccttcatgggccccgttcgactcgccctcctcctttccgtcgccgccgtcctcgccgccgcgggtgcggtgtacatcccctacaacacgtcggcgggggtggtgccggggaagctcaacgtgcacgtcgtgccgcacacccacgacgacgtcggatggctcaagaccgtagaccagtactacgtcggatccaacaactccatccagggggcatgcgtgcagaacgtgctggattcgctcatcccggcgcttctcaaggacgagaaccgaaagttcatctatgttgagcaggcattcttccaaagatggtggaggaaccagaatgacatgatcaaggatacagtgaaggggctcatcagctctggacggctggaattaataaatggtggcatgtgcatgcacgatgaggcggctgtacactatattgacatgatcgatcagactacacttggacacaagtacatcaaggaggagtttggccagatcccacggattggctggcagattgatccgtttgggcactctgcggttcaggcttaccttcttggcgcagaagtaggattcgatgctttctatttcttccggattgattaccaagaccgtgatacacggaaaggaacaaaagaactcgaggttgtatggaggggctccaagaccttgggctcatcggctgatatctttgctggcatctttccaaaaaactatgaaccacctcctggtgatttttattttgaagttgatgataattcccctgttgtccaggatgatccccttcttttcgattataatgttgaagaacgagttaatgattttgttgctgcagctgtagcacaggcaaatatcacgaggacaaatcatatcatgtttacaatgggaacagacttcaaataccaatacgcagagagttggttcagaaatatggacaaactaattcactatgtgaacaaggatggccgtatcaacgctctttattccacaccttcgatttataccgatgcaaaatatgctgcaaatgagcagtggcctctcaagaccaatgatttcttcccatatgcagacaacccaaatgcctattggacgggttactttacaagcagacctgccttaaaacgatatgtccgcacgatgagtgggtattacctggcagctagacagctggagttctttaaagggagatatagctcaggtctctcaacggatagtctaggtgatgctctagctcttgcacagcaccatgatgctgttacaggaacagagaaacaacatgttgcaaatgattatgcaaagagattgtcaattggatatacacaagcccaggagctcgtttcaacttctcttgcttgcttgacagagtctggctcaaaatcacgttgtgcatccccagtgacaaaattttcacaatgtcttctgctaaatgttacatattgccctccttctgagatggacttaacgaaaggaaaaagcttggttgttcttgtatacaactcgcttgggtggaaacgagaagacgtcattcgtataccggttttcagtgattcgattgtcgttcatgattctgaaggacgagaaattgaatcacaacttctgcctatagctacagcctcgttgaacataagagaaaagcatgtcaaggcttacctgggcacaacgccaggtgcaaagcccaagttttggcttgcttttcctgtgtctgttccacctcttggtttcaatacttatttcgtctcaaacttgaagaaatcagcacatatttcttcgaagtccactcagtactcacctcaaggaagtgaaagtagtaatctacaagttggtcaaggcaacttgaaacttcaatataatgaagctggaaaattatccctgtactccgatagtaagactatggttcaagcaaactttgagcagaaatacaagtattatattggacaggatggaaatggaagtgatcctcaggcttctggagcatacatattccgccctaatggcacagttccaatcagtactgatgggcaggtttctctcacagttctgcgtgggcccatattggatgaagtgcaccagcagataaattcatggatttttcagattaccaggctttacaaggagaaggactttttggaaactgaatttatagttgggcccataccagtagatgatggaaatggaaaagaagtagcaactgaaattgttacaaacatggttacaaacaaaacattctacactgattccagtggacgtgatttcatcaaaaggataagagattatcgatcggagtggaagattgaagtgcaccagcctattgctggaaactattatcctgttaatcttggcatctatgtggaggatggcagcaaagagctgtctgtactggtagacaggtcaattggaggttccagtataaaggatggacaaatagagctaatgctacacaggaggctactccatgatgatgggaaaggcgtcgccgaggcgctaaatgaaacagtctgtctcgataagcaatgtgaaggactcattatacaaggaaaatactatgtcaaaatagacccacaaggagaaggagctcggtggcgtcggacatttggccaggaaatatactcccctctccttcttgctttcacagagcaggatggaggcaactgggcgaattcacatgttgcaaaattctctgcgatggattcaacttacagcttgcctgataatgttgcaatgcttacccttcaggagcttgaagatggaagtgttctccttcggtttgctcatctatatgaggccggggaggacaaggatctttcgtctttagcgagtatcgacctcaagagagtgttcccggagaagaagattggcaaggtcatcgagacaagcttatcggcaaaccaagaacgcgcagccatggagaagaagcgtttgaaatggaaggcgcaaggttctgcggcggacgagaaggtggttcggggtggccctgtggatccttcgaagctcgtcgttgagctggggccaatggagatccgcacattcatcgtcagctttgatcacatcagtgacaagcaacagctctaatcgtctccgactagacgactaggtctggatgaagttgtcgtgcggcttcgaaataaaaaataataatgtggcctgctgtgtacctgtggttcaacccatgatatggcctgctgtgggtcagcacggttctaaagctaaggacgttttataaggcaaattttgctttagggtgtcactcctctcctcacgttgcaaaaatacagaaaaaaccagcgaaaacatgattgcaaacaggtaaggggcaactcccccacctcaattttataaaaaaaaaaaaaaaaaaggccgatatttcgtttgctcccatctgtacgttttttaatgaagttcaataacatcaataagatggtttactttttatctgagtcaacttccaaaaacagtcaagagtggcaatttccactcaattgatataatattgaattggttattcttttttacttttcatatagaattttattgggtattttggttcgattcaaacgctgttgattttaactgaaagatggcaa

SEQ ID NO: 116318 - DNA, 348 bp, Zea mays
  Clone ID: MRT4577_37564C.1
atgcgtctaggtagaagtcggaatcggctcgaggagcgcagcgcccaggcaggagcagcagccagcgatacctggagtccgttgcagaaacctcgccctacactttgcaacaaaggcagcctgctagtcagcgaggacatctgcaagccaaaaaatgtcgtcccagcaataccagcagcaacgtcgaaaatttgcagctgccttcctggccttgattttcatcctggcagccgtggacactgtgaggccgggaagaaagagaaaccagaaaaaaaggtgaaaaaatctgactgtggagaatggcaatggagtgtgtgcgtgcccaccagcggggactgtggtctaggc

SEQ ID NO: 116319 - DNA, 267 bp, Zea mays
  Clone ID: MRT4577_37565C.1
atacagtcatacgatcaggtgattagcgatgtgattagccatggtgataaaaacatcttaaaagatgggcgcaagagatttcctagtggccacacttcgtgtaagtatgcactagtaagtgctcatagactctagcatttagatggataagcttgttgtccaagtgtagagctaataactgaggtataaaataccggttctagactgtcaacaatttctgcgttcagtagaagtagtgacatggatctaaatgtttttacagctatg

SEQ ID NO: 116320 - DNA, 339 bp, Zea mays
  Clone ID: MRT4577_37566C.1
atcccatcactttttttattgcatgcttgacttggccttactgctttgttcaataggttattagccacggggctagagagaaagcctacataccccgttgcggcggacaaaaacagaaaatccccggttagaaaccacacaccaactttttatggcctgaacccacagcatgaggcccccgatttctaagaatggagaacaatgttcttgctgggcttcctttctggagatgaactgtttcaaccactgggcagactccttaatgtagagcgggcacttattgttgcggtcgacgtgaactttgccctaacgttcaaccaaaccggcgaaccattgaaa

SEQ ID NO: 116321 - DNA, 756 bp, Zea mays
  Clone ID: MRT4577_37568C.1
gacgcctgcaggttccggtccggaattcccgggtcgacccacgcgtccgcgcgaagggcttgagtcagagcgccattcttggggaccctggaacgctatcatggaaacggagagtgagcagaactctagttcgaccaatgggagttccagttcaggggccagctctcggccccagatagcacagatgtccctgtatgaacggcaagcagtgcaggctctgcaagcactgcagcggcaacctaatgcggctcaatatttccaccagttcatgctccagcaacagctcagcaatgcccaactgcacagcctggcagctgtccagcaggccacgattgctgccagtcgacaggctagctccccaaacagcagcactgcacagcagcagaccgctaccacccaggcctcgatgaatctcgcgaccacgtcagctgctcagctcatcagccgatcgcagagtgtgagctcccccagtgctaccaccctgacgcagtcggtgctgctggggaacaccacttccccacctctcaaccagtcccaggcccagatgtatctgcggccacagctgggcaacctattgcaggttaaccggaccttgggccggaatgtgcctcttgcctcccagctcatcctgatgcctaatggggcagtggctgcagtccagcaggaggtgccacccgctcagtctcctggagttcatgcagatgcagatcaggtgcagaacttggcagtgagggaccaacaggcttcagctcaaga

SEQ ID NO: 116322 - DNA, 315 bp, Zea mays
  Clone ID: MRT4577_37569C.1
ataaactccatctcctatcctcacaacactacacacatcatacatgaacaccacatcaagaatctcaccactttcttctatcaactaacaatcatcaataaatcttataacaaattacacaccaactgaatttcacctctacttccaacatctcatcctcttaccaaaccctacctcatatctctctactatacacaactgctcatatatgtgcctatactcatcatcatcactcaacaattcatggttcacatcacaaccacaatctttcatcttatcaacgattcactcactaatacataagcatatttattt

SEQ ID NO: 116323 - DNA, 526 bp, Zea mays
  Clone ID: MRT4577_3756C.1
cccgcttttgtttcgcggccgcgagagggcgttgggcgatgggcgggggtaccccccggcggtcgcggtgaggctcaccgggcactcggcgacgagcgtgcgggcgtgctgtgagctctcccagggcacttgaatgcacacttttgtcttccaatgcaagggtaggatctctcgtcgggcttgcggcctttttcctgcattttgcagagtgcctcgtgtgtcggcaaacggacagtacacttgctgcaactaaaatataaacaagcctatgttagcctgctacgcatactgtgttcgtgcatgttttcatttgaccttgtttccatgatgcttcgacgtgttacgcgtgctcgtgcttcttgctgtgtcatcactggtccacattttcttgtggaaagtgttcctttgtacgagcttatgaaaccagtgtgcacaagcgacggacggatttgtaccatccagaacgatagtgatccgttttactaactcctgaaaccatgaaaaaaaaaaaaaaaaaaggccccta

SEQ ID NO: 116324 - DNA, 326 bp, Zea mays
  Clone ID: MRT4577_37570C.1
attcggctcgagaaaataataattttatacatatgtttactgctatagtgtaaaccttttagaccgcctaggcgaccgtctaaatagagggcgactgatcctttaacgtttaggataacagtgtgaatcttctcctgctattgaacactaatcttggtagctattgaactctgctttctctcctttcgctgctgctgctgctgcttttttagtacaatattgcattcttcttcttctgtcgactgttgggtactctgttcactcggttttttttttttttttttttttttttcatgcattactggttaggtttcgattctggctgg

SEQ ID NO: 116325 - DNA, 384 bp, Zea mays
  Clone ID: MRT4577_37571C.1
aaaaaacaaaaataaaaaaaaaaaaattaataaaaaaataattacaaaaaaaaatacggaacaaaaaaaaaataaaaaaaatactcacaatatcctggcacccattccaagtctcctaaggtcatgttcacgtatcttctactccacttcactaacatcatgcacactaccttctttctttgcccgttctctttacacattcctaactgatacctccttgatgttaccgatctcaatcacctttttccatttccgcttttctccaactgtctttttccctccgtgccccctaactatcgccactcccatgagctgggccgcttgcccgccaaatgagccacgctcatcctggatcttttaaagactgctgccagtttcgctgct

SEQ ID NO: 116326 - DNA, 500 bp, Zea mays
  Clone ID: MRT4577_37572C.1
gtgattgtgtttttttttttatttttgtttgtttattgtggggaaaaacaccataacggcggggcggaccaggtgaaaaaccgtacggggggcaggcaccggggggcagcgccctaaggcaaaagggggattgaaggggtaaaaaagcgggggtagtggggtttcaaaagaaaggaaaaaaaaaaagggggcgccgggaaatccggggcgggaaccggggggggaaccaattgtccaaaaaggggggcgaataaaaattgggcaaaaaaagggaaaaggtagtgcccggggaaaaactgttaactctcaaaaattcgaaaaaaaaaacgaccgggaagaaaaaagggaaaaaccgggggtgccaaaggggggggccaactcagatgaaggggaagggcttaactgcctagttacagacaggaaaaactttttggccgagcgcggaaagaaatcggcaaaaccggtggaagagggggacaaaaataggggacgcggggggg

SEQ ID NO: 116327 - DNA, 469 bp, Zea mays
  Clone ID: MRT4577_37573C.1
aaacccataaacaaaacccgccgagggttttcgctgggcgagtccatcgggcaaaacagggcttcatatgcaaaaaaagccatgacaaggccgggggaccggtttcactgcgggaaaaaacaagggggggaagttcatagattatggcaacacaggttccccctcatcggaaacattggactatcggggtccccaaaaaaaaaacgggctacttttaaacaagccgctacaattccctggaacccccgcagcctaacttttaaacctcctaaaactttgcccccggggccgggtcgccgcccccctggggtccaaatcctgactggaagccgccaaacccaccaccaaacatgggctgcccaatcttcaaaacagccttgtgggcagcctaaagctgggccttgatcttttaaagggcatccgaggccatttcctgggggaggccaacaagggctgcctcaacctcaaa

SEQ ID NO: 116328 - DNA, 129 bp, Zea mays
  Clone ID: MRT4577_37574C.1
taccggttcggaactcgagccacgactcacacttccgcttaaagctaacgatagtgatttcactttcagttacggctactaccaaacgggtccgggcatctatggcatgcagtcatcactcttccatat

SEQ ID NO: 116329 - DNA, 256 bp, Zea mays
  Clone ID: MRT4577_37575C.1
gggggggaagcgccgaaacaagcaacaaaggtttttttttttggccggggggggggcccagctaaaaagctatgcaggaccagcgggagagaagtagtacaagccaacagaacggggaagggaaaaaaattgcccaacccctgggccctgcgatgcaacggccagagccctacccggggcaaaccgacacgacacgacacgggcacgggaagccccagggcttcccgaccaaggggggccccgccacacgggaggg

SEQ ID NO: 116330 - DNA, 316 bp, Zea mays
  Clone ID: MRT4577_37576C.1
tccaagcgtaagtggacgcgtgggcggacgcgtgtgcaaaagctgacgagatagccgaggagctattgatgcaggcacgattaggtatacagacatagtttaggtagaaatcacaatgtgagttgctgtcgtatgagaacttggggtgctaatatccaggatcttcatctaatacgatctatttctgtatcggaaagtgttatctgcttattatgtaccgtgttttacggtactgctgaagcttgataacttgctatgaaggatctttcccgagtgatatcgaatgaatgcagccattaaaaaaaaaaaaacaagg

SEQ ID NO: 116331 - DNA, 314 bp, Zea mays
  unsure (1)..(314): unsure at all n locations
  Clone ID: MRT4577_37577C.1
aaaaaaaaccgaaagacgagccagccaaggccggccgacacccgagagcgccggaagacgacgggacgcgcaccccaaagcacaaggcctcccaaaggccgaagaaaggaacagcccaacttttttgtccccacgcagatgaccccacaggcaaagggcaccccctgtttatttacccaagcaacaggccggagggaaccggactgataaacggccccccccnaaccgcaccccccacacaggaggaccaaaaaaaacgcccagcgcaccggcgcgcggacgacacgaccccagaccaacaatgagcaagacac

SEQ ID NO: 116332 - DNA, 280 bp, Zea mays
  Clone ID: MRT4577_37578C.1
cctaggcgtccgattttccttattacaacgcggcaccgagaaaaacgcaccaggggaggggaaagcccacgccggtcagggctgcagcgaccgaccctcttgcccactcctacgagccaccgagtcacacgcatacacttcaaggcacgcgacagagagggcctccatgagcccactggccttcggcacccccggagcgcgacgcgaatcccctgcacggatgctgctccaggcatcagcactcgcggcgcgccggataaactacgaacgcgcgctgagg

SEQ ID NO: 116333 - DNA, 602 bp, Zea mays
  Clone ID: MRT4577_37579C.1
tttttttttttttttttttcggaattaaatattcaatccttgtaattagacatatgtctgtttgtctgagtagccatgaatttagtttgaactaaactttagagcccatacttactgaccttcaatttatgaaccgggcaaggcaaaacattagcaaaaaaatattcaggtaaacgcctggggcctgaccgcctataagcaccacatttattgtcccatcaccaaccatagccattagccaaagtaatgcatctaataggtcgcagattcgcaatgatgaagatttccacagctccaagttggccgcctgggtggtgtcgctgcccgagtcccgtgtgggtgcgtcacgcgtggcggcgtgggcgcggccggtgcccgagtaccgggaggcaccggcgaagggccaacgacggtggtcgggcgagccgcgagcggcagataggggcgcgtaggtagaagggccagggcgccagggtcctatcgcgggcgcgcgtggtggccgtgagatcctggcgggcgaccggtggcagacggcttcggtgctcggcgggtcgcgcggtgcggcggtgggctgggctcctggcaacggcttcagacttcag

SEQ ID NO: 116334 - DNA, 159 bp, Zea mays
  Clone ID: MRT4577_3757C.1
atctgactctgttcatcgtccgcaagcggcacagctctccatcctcgcgcttgcatagattcccactgctgtaagttgtcgagcagctacgcattgatcgggctcttctgtgcagatctataccataacgctctttctctctaaatgggccagctagga

SEQ ID NO: 116335 - DNA, 302 bp, Zea mays
  Clone ID: MRT4577_37580C.1
tcggccgcccatccgcagcttcccgcgcgtagcctctcacccgggtgcctcccatggaggcgcctgcggagcgaacccgctcctcacacggcgcaggcggcgagcgctagtatgccgcgcggacctgcagcaggacgcgccgttcgcggccgccatcggcgcctgcgtactcgcctcgctcgtgctgcctcctccgaggtcccgaggggaggcgggcgacgaggtggaggatgaaggggagtttggcgcgacggacacgaggatggccgtgatggggatcatcctccttcctgccttacttc

SEQ ID NO: 116336 - DNA, 185 bp, Zea mays
  Clone ID: MRT4577_37581C.1
gttgtggcggcaccaaaaaacaccattttttccttaggattaacttaaaacaaatcctgacaggagtaacagcattcattgatccaccaacccatctggttgatcgatgggtttgctggcgcccccggtttaaccccagactaataattggtacaaaccggccttggaattaaaaaaacagatgg

SEQ ID NO: 116337 - DNA, 192 bp, Zea mays
  unsure (1)..(192): unsure at all n locations
  Clone ID: MRT4577_37582C.1
atccccttgttatnnnaaagaggctcggggacaccatgccgttgcctgggttaatatagactacacttaccccccgactctttccggggcagcgggggcggcgcctacttcgttaccccgacgaggtcctttttgggggcccttccaaagggaaagggggggcccacgctggtccctaagccactgttaatt

SEQ ID NO: 116338 - DNA, 227 bp, Zea mays
  Clone ID: MRT4577_37583C.1
tcgagcacgaatcgagtggtcaccgatccggacgaaactgcgcgatcacctcatcggtccgagtacgggcgctgccagtattcctgtcacgactagcagtgaattcaatccaaggacatggacaaaactgatagccagatcagccgctgttagtatgagacaacagcttccgaaccattaagtgcagagcggaagacggttcacagacatcgatgccgttattccgc

SEQ ID NO: 116339 - DNA, 203 bp, Zea mays
  Clone ID: MRT4577_37584C.1
cgcgagtaccatccaattcttctcctgcgaggactacagccggaccatgggcaggctactcccgaaagaccacgctgtccactaggcgcctgcattctatgccctgaaagaagatgagtccgcctgtctttacttgccgatggcaacacaacgattgaccctatgcatgacgctggacaacgtattgagaggctcgtatttga

SEQ ID NO: 116340 - DNA, 1495 bp, Zea mays
  Clone ID: MRT4577_37585C.1
gcagggaaacaggcagctctccacggacaacgcgattctatttagttatctggcggctgccagtgccagccagccgcctttcgaaaccgagcacgagggagccgacgtggtggtctctggaacctggttcgagcgagcgagcgatccatctatccagccgcccgccgggaatttctgtgacgaggaggaggaggaggagggggtatggcaatggtggcgtcgcagggaggcggccggagggacgccgaggcggagctcaacctgccgccggggttccggttccatcccaccgatgaggagctggtggtgcactacctctgcaggaaggtggcgtgtcagcagctgcccgtgcccatcatcgccgaggtcgacctttacaaattcgacccgtgggatcttccagagaaggcgctgtttggccgcaaggagtggtacttcttcacgccgcgggaccgcaagtacccaaacggctcgcgccccaaccgcgccgccgggagagggtattggaaggcaacgggcgcagacaagccgatcgcgcccaagggcggtggcggggcggcaggaatcaagaaggctctcgtcttctactcgggcaaggcgcccaggggattcaagaccgactggatcatgcatgagtaccgcctcgcggacgcggaccgtgcgccgggcaagaagggctcacggaagttggatgagtgggtgctgtgccggctgtacaacaagaaaaacaattgggagaaggtgaaggcggaggagccggaggcggcggcgccgctccgtaaccagcagggcgcagcggaggattccatgtctgacagcttccagacgcacgactcggacatcgacaacaatgcctttggtgtgcagaacggcttcggtaacatggtgcacgggcaggccatgaccatgaggaacggcattggcagcgtggcgaggacggtgaaggaggatagctattggttcacggacctgaatctagatgatctgcaggcgccctacaacgtgacccatgtgttgaatccgaacccggtccagacgatgaatctggcggctgggcaaggccatggctacttgcagtctatgagctcgccgtcgacgaagatgtggcagacgatcctgcctccgttctgagagttgctgtgatggaagggggaagagatgatcttgggcgtaggagtggttagactggctaggaacagcaggtttaaaatttggagggtttgaattctgcaactgttgctggtagtcttgtaagggttattcatttgttaaattatgtgcttggtaatataccaaaaggaaaatccatctccctttgcactacttgaagaaaccagtacaaaattacagttctcatatttaatatggtcggtttgagccaaaattggtttagggcatttcatctttattatggtaaaaattcaaatagttttttcataatgattaaatggtaggagtaacattcagtgaatggaatcgactcccttttttccct

SEQ ID NO: 116341 - DNA, 173 bp, Zea mays
  Clone ID: MRT4577_37586C.1
atcttacccatgcataaacaccacccgggggatgggaaaataacagggggcctggggcgacacccaaaataatgaaaacgactctggcaacagcctttttgccggtaattaaccatgaacctaaacaaccaggtcaggttctagaactctgggccagcagtttaccctacgca

SEQ ID NO: 116342 - DNA, 305 bp, Zea mays
  Clone ID: MRT4577_37587C.1
gtgggacagtttaagagggggacatatagaaaaaggcaagtgcacaaaaaagggacgcacaatataaagagagagaaaaaaatataagggtatgcatcctttttggtcatttgtatttgcttgtttgaactagctaaaaaaacgtttatgccagcaattttgataagggctttgtacattttattgagggttgttatatattactaacttgggggccacataaattatttatctttatgggttttccaaactccatatatttagaacagtacagggaaaagatccttgcaatattgggggcacac

SEQ ID NO: 116343 - DNA, 509 bp, Zea mays
  Clone ID: MRT4577_37588C.1
ccggccgggatcgccaccaccgcctcgcccacaccctatccctactctccgtacaacctagccacacacgcgcacacacgcatacacgcacaacatgcccgcattccgacctactcctctggcgctccgggcccagcccaacttcaatccgcacgtcggacgcattaccccgagcacctttgtcaagtgggggccaaccctcgccctctggggtggtgccggcgccggcgccgtcatgctctttatgagcaacgtgcccatcttcaagcacgacgtcctcatcaagatgccctttatcgcttcgtactttgaggacaagacccaccccgccgacaacgccttctaggctagcgagctcttttctgcctcttcgctgcagccaccggcctccttgttcagataaagcacaaggcaaggcgaggcgaggcgaggacggtcgtagttgttctgcaaggcgatgcaatcaaaggtcgtccagattcaaaaaaaaaaaaaaaaaatttgcggcc

SEQ ID NO: 116344 - DNA, 389 bp, Zea mays
  Clone ID: MRT4577_37589C.1
ggattaactggaaaatatactgaagctagcaatgtaaataaacagatactttcagtagaagacaatagcatgcagctacaagtacaggtacagcatgagaaacttcctgtttgtctaccacagcatctgtagcatcattgtacagtacaatagcatggttcggcgacagtttcagaaacatgttgatccatgtcctggaccatctggatgccaacaagcaagactatcgcatcaactgtatgtaaacctgtataccgcaatacaagattgcctttttccagttctctgggttgtactaccttctggaagcttgtactttctagcacgtccaaatggccagttcacaaatgtttgacagataatagtgactcaagaataccaattattat

SEQ ID NO: 116345 - DNA, 710 bp, Zea mays
  Clone ID: MRT4577_3758C.1
ctcgagggccggccggagttccgcaatccactccctcctccacgaaactcttggcctggcttggcgcggcgccgcctcccagctcaatcttcaccgccgtccgtgcccgcgccgcatcctcctcctcctcctcaacggccacgcgcctccgctcggtggctccaattgccgacaccccgcgccgcaccgtgcacgcctttgctttcgcggacgcgaggccgctggcggcgatggcggggtaccccgcggcggtcgcggcgaggctcaccgggcactcggcgacgagcgtgcgggcgtgctgtgagctctcccaaggccaaaatgggaaggatcggcgatgaagagattagacagaaagcttaccctgtccgtgttattttgcaggcacttgaatgcacacttttgtcttccaatgcaagggtaggatctctcgtcgggcttgcggcctttttcctgcattttgcagagtgcctcgtgtgtcggcaaacggacagtacacttgctgcaactaaaatataaacaagcctatgttagcctgctacgcactgtgttcgtgcatgttttcatttgaccttgtttccatgatgcttcgacgtgttacgcgtgctcgtgcttcttgctgtgtcatcactggtccacattttcttgcggaaagtgttcctttgtacgagcttatgaaaccagtgtgcacaagcgacggacggatttgt

SEQ ID NO: 116346 - DNA, 114 bp, Zea mays
  Clone ID: MRT4577_37590C.1
acgcattccaagctatccttcgctgatatgtttgacttacctcagctggagtcatgcattcgcacggatgacacggatactagagtgacgtacatattcacctggacccgactg

SEQ ID NO: 116347 - DNA, 243 bp, Zea mays
  unsure (1)..(243): unsure at all n locations
  Clone ID: MRT4577_37591C.1
cctgaagnncgcgannnncagcgagttgcggcgcagggcaaggagccnnnncgaagctcagcnngacggcgacgaagnnnagccgcgaagannnncgttaagaaggctgagcagaagccccgggaaaccaaaaggaaggtgaagagcagcaaacaggcggcggcggcaaaaagtgacgtacagtacgtgtggagtgtaatggagcttcctagcatgagtgaatcctagccttgttatgaatct

SEQ ID NO: 116348 - DNA, 160 bp, Zea mays
  Clone ID: MRT4577_37592C.1
tagaaactaatacaaggaaaagtatcacgacagtgtaagaaatgttcgacactttccaaacatcgtcacatatatagaaccagcggcctccaaaagtaatgtacaaatagcagccaagccgcctaccaggaactgctccaaaagcgtggtgtacaactaa

SEQ ID NO: 116349 - DNA, 180 bp, Zea mays
  unsure (1)..(180): unsure at all n locations
  Clone ID: MRT4577_37593C.1
cggacacaggcacgacacgagcctcagccggcgggacagcacgggaggagggcgaacgcttacggtcccccccaacccaactcctaccccttcccgacaaggcgacgcgaagagantgaccgctgtacgactgcatgctgctgctgaagacgacggtgaccagggcggtcctagcggaac

SEQ ID NO: 116350 - DNA, 2412 bp, Zea mays
  Clone ID: MRT4577_37594C.1
atgtctgaagacaagaaagttgtcgctgagtcgaagctgagcctttctgaggaaatgaatctcgacttccttgaatcaatagcaaagacaaatacagagaagattactaaggagattttagagggtttatctgaagacactggtgatagtgacagttatgatgtggaaagtggtggtgaagattccgaagatcgaccctggcgaccaagccatgcagtttttggaaaatcaagcattaaacaaagccatcttgtcaatatgaggggtagatattttcgggatttatctattgtaagggctgacgaaggagaaaaaacttgtcctactcccgaggaaaatgaagtcgtgatattccgaagtttcttcaaggctggacttcggtttcctttgagcagtttcgtggtagaagttttgaagatatttgaaatctgccttcatcaaattactcccgaagcaatcataaggatgggaatcttcgtatgggccgtgaagagccaagccgaagaatgccagagggccttcggcgtggtttgttcttttatcgggacaagggatttggtccaggaacacattgcctttagagtatggccacttgtagaaaagtgggaaatgccaaaggaaaccatcagcaaacctgacgaaggtggactagtcaggttaaaatacaccttcagatatggagataagttcgtcgagccagatgatgactggctgaaatgtattgaggccacaagcgatgaactgcttggatcatactcaaaggcagaagatactgcactatctgcggccttcgggggccggaagaagaaaagactgaaccgagtatttgatgccattgggtttgtctatcctgactaccgttacccgatacggggtcaaaaaagaaaagatacgacttctgtgaaggaagttgcttcagccactcctatgcctgagtttgtcggtgaaacctcttcggccaccgaagccaaggagccaactcccctgcagaatattgaagagccggccgtaatgctggagatggagaaaatagaagaaccgagggctgaagagacaaagacatcggaaattttaagtccttcagcaagagttgaggtgccaatgccaatgccgagggcacaaaaagacctttcaacaactcccaagaggaaaagaatggttaacgtgctagatgtgctggaaacgataaaatcttcaagctctgcttcgaagatagctgtcgaagctccaaagacacaaattgaggccgaagctaccaaaagtcaagcggaaactgaaactgggctttcagagcctaccaagagggaattcttggaaattgaaaaagaaacgaaaaaagaaactgcagaagaaattttatctgagaaaatcaccacacctattcccgaagcatcttctgaagcttctgactatgttttacgtcatgctttaggtaaaaatctgaccgaaaaagaaaaaagagaagctcagttctatgcacaaaaattgaaatatccaaaaggggcgctgatattcaacggcagcggagaagaagacttcttgtattgtctccctgacagcaaggagatttctgtctgtcgggagataagcaagagcttcggattcccaacattagaagacgggctctcggtgttggccttatacttagcaatgccctcagggcacaaaaagatgccgaagatgaaggaagacgaagctgctttcaaagctcaagctgaggctcagaagcgcgaaattgaggatcttcggaaacagctggccagagctaaagaagaatgcacagttgaagaagctaaacgagaaattagtgaacaatgggcaaatcatttagagaaaaacgttgaagagcttcgtgcatccaagaaaaggtgttatgaaaaatctatagaatgtgttaagaaaattagaaccagcttcgccagcgttggcgcgttctcaagtgaagaaaatttcataaggggcgaccccgagggcccaattggatggatcagccacgaagctgaagcttttgaagaaattttgaatggtcacagagacatatgtgccttctcgggtgctagggggattgccactgttttggagaaaaaaggttgtgatcacgtgaaatccttggctcaaaccgaagccgacttatcttctgaggacataaaagacccttcggccgaagcaagtttggttggtagaaaattcttcaccgacgtctgggaaaatggtggccgggagatagctcaagaaattatacggaaaagcgagaaagctgcacattctcctccctcagagcccgccgagccattagcggaccccaacgtaaagggggatgacgaaattagaaaaatggtcgaagctatcatggataaagttgttgatcaactactaaacgaagctgcagaagtagttctaagggaagattag

SEQ ID NO: 116351 - DNA, 1959 bp, Zea mays
  Clone ID: MRT4577_37595C.1
atgtctgaagataagaaagttatcgctgaaacgaagttgggcctttctgaggagatgaatctcggctttcttgaatcaatagcaaagacaaatacagagaagattactatggagattttagagggtttgtctgaagacactggtgacagtgacaactatgatgtggaaagtggtggtgaagattccgaagatcgaccttggcgaccaagccatgcagtttttggaaaatcaagcattaaacaaagccatcttgtcaatatgaggggtagatattttcgggatttatctattgtgagggctgacgaaggagagaaaacttgtccaactcccgaggagaatgaagtcatgatattacgaagcttctttacggctggacttcggtttcctttgagcagtttcgtggtagaagttttgaagatatttgaaatctgcctccatcaaattactcccaaagcaatcataaggatgagaatcttcgtatgggccgtgaagagccaaggtttggagccaaatgcaaaaagtttctgcagtatgcatgagttattgtatgagacgaaaccatgggaaaagtgggaaatgctgaaggaaaccatcagcgaacctgacgaaggtggactagttaggttaaaatacaccttcaaatatggagataagttcgtcgagccagatgatgactggctgaaaagtattgaggccataagcgatgagctgcttgggccatactcgaaggcagaagatactgcactgtctgcagccttcggaggccggaagaagaaaagactcaaccgagtatttgatgccattgggttcgtctatcctgactaccgttacccaacacggggtcaaaaaaggaaagatacggcttctgcgaaggaagtcgcttcagccgctcctagtgagccagcgccgaagaggaaaaagatgaaggttcttacgcaccggccacgctatattgaaccggtcacagtgcctgaatttgtcggtgagacctcttcggccaccgaagccaaggagccgactctcctgtcgaatattgaagagccggccaaaatgccggcgatggaaaaaatagaagaaccgaaggttgaagagacaaagacatcggaaattctaagtccttcagcaagaattgaggcgccaacgacaacccccaagaggaaaagaatggttaacgtgctagatgtactagaaacaataaaatcttcaagctctacttcgaagatagctgccgaagttccaaagacacaaactgaggccgaagctgccaaaaatcaagcggaaactgaaactgggctttcagagtctaccaagagagaattcttggaaattgaaaaagaaacggaaaaagaatctgcagaagaaactttatctgagaaaatcgccacaccaattctcgaagcatcttctgaagcttctgactatatattacgtcatgcttcgggtaaaagtctgagcgaaaaagaaaaaagagaagctcaattctatgcacaaaaattgaaatatccgaaaggggcgctgatattcaatggtagtggagaagaagacttcttgtattgtctccctgacagcaaggagatttctgtctgtcgggagatgagcaaaagcttcggattcccaacattagaagacgggctctcggtgttgtcaaagaacgagctggccgacagcttagcgtacaatagtttaaagggccttatacttagcaatgccctcagggcacaaaaagatgccgaagacgaagggtgtaccatagccttgagcaaccttcgttccgaagtaattgaactaaggaatgaaagtctcgaaaaagataaaatattacactcattactgaataaaataaaagaagacgaagctgctttcaaagctcaagctgaggctcagaagcgcgaaattgaggatcttcggaaacagctagtcagagctaaagaagagtgcacacatgaagaaacaaaatga

SEQ ID NO: 116352 - DNA, 709 bp, Zea mays
  Clone ID: MRT4577_37596C.1
ccggccattgattggcccattttgtcatctcattaatccattcccctgtccattaaccgacggcgtcatctcggccgccactccacttgactccgtccccgggccttggcgaaccctagcgccgccacgccccgccaaggttgctttgcttcagagttctccgtcgtgcagagacgatgcagccgaacgaggtcgccgacaaggccattggcataatgcagcacgccgcgaagcaggtcctggttacgtgcaaggagaagctccacctggggaagccactcagcgtgtttgaagtgaaggaactaaaagaagcgcttgaagccattgccgaagcactggaccaggactcgctgctttgccaagttgctttggatgcgggtgctcccagcttagtagaagatcactgggtcgacgaaggcggagaagccgtggtggcgggtctcccatggcctgaatccccacgtccggaggacttcatgtcccttgaaaagcacatagaaacctactggagcgtcgagtacgactcggacaatatgctgcctagcttatctgattagatgattcttcttcttcgcaagcatttttttgtcttgcattccttccttcctcctcctcccaccttccttccctctatttgtaaagcacccccggccaatcaatctcttttgaaggatgaaaaaaaaaaaaaaaaagcggccaaaaagcggcc

SEQ ID NO: 116353 - DNA, 2358 bp, Zea mays
  Clone ID: MRT4577_37597C.1
atgccgaagcttccttgcgcacagcttcggctctgttccacccttctttcttgtttcatgcttctttacgctatggtttcaaatcaagtccgaagcttcggtctcgagagtactttctcagcattttcgaagatgtctgaagacaaaaaagctgtcgctaagtcgaagctgagcctttccgaggagatgaatcttggctttcttgaatcaatagcaaagaccaatacagagaagattactagggagattttagatggtttatctgaagacactggtgatagtgacagctatgacgtggaaagtggtggtgaagattctgaagatcgaccctggcgaccaagccatgcagtttttggaaaatcgagcattaaacaaagccatcttgtcaatatgaggggtagatattttcgggatttatctattgtgagggctgacgaaatagaaaaaacttgtcctactcccgaggaaaatgaagtcgtgatattccgaagtttcatcaaggctgggcttcggtttcctttaagcagttttgtggttgaagtcttgaagatatttgaaatctgcctccatcaaattactcccgaagcaatcataaggatgggaatcttcgtatgggccgtgaagagccaagtatggccacttgtggaaaagtgggaaatgccaaaggaaaccatcagcaaacctgacgaaggtggactagttaggttaaaatacaccttcagatatggagataagttcgtcgagccagatgatgactggctgaaatgtattgaggccacaagcgatgaactgcttggatcatactcgaaggcagaagatactgcactatctgcggccttcggaggccggaagaagaaaagactcaaccgagtatttgatgccattgggttcgtctatcctgactaccgttacccaacacggggtcaaaaaaggaaagatacggcttctgtgaaggaagctgcttcagccgctcctagtgagccagcgccgaagaggaaaaagataaaggttcttacgcaccggacacgctatattgaaccggccacagtgcctgagtttgtcggtgagacctcttcggccaccgaagccaaggagtcgactcccctgccgaatattgaagagccgaccataatgccggagatggaaaaaattgaagaaccgagggctaaagagacaaagacatcggaaattttaagtccttcagcaaaagttgaggtaccaatgccaatgccgagggcacaaaaagaccttacaacaactcccaagaggaaaagaatggttaacgtgctagatgtgctggaaacgataaaatcttcaagctctacttcgaagatagctgccaaaactccaaagacacaaactgaggccgaagctgccaaagagtctaccaggagggaactcttggaaattgaaaaagaaacggaaaaagaatctgcagaagaaattttatctgagaaaatcgccacatctattcccgaagcatcttctaaagcttctgactatgtcttacgtcatgcttcgagtaaaaatctgaccgaaaaagaaaaaagagaagctcagttctatgcgcaaaaattgaaatatccaaaaggggcgctgatattcaatggcagcggagaagaaggcttcttgtattgtctccctgacaacaaggagatttctgtctgtcgggagatgagcaagagcttcagattcccaacattagaagacgggctctcggtgttgtcaaaaaaggagctggccgacagcttagcatacaatagtttaaagggccttatacttagcaatgccctcagggcacaaaaagatgccgaagatgaagggtgtgccatagccttaagcaaccttcgttccgaagtaattgaactaaggaacgaaggtctcaaaaaagataaaatattacattcgttggtgaataaaataaaagaagacgaagctgctttcaaagctcaagctgaggctcaaaagcgcgaaactgaggatcttcgaaaacagctagccagagctaaagaagaatgcatagttgaagaagctaaacgagaaattagtgaacaatgggcaaatcatttagaaagaaacgttgaagagcttcgtgcatccaagaaaaggggcgaccccgagggcccaattggatggatcagccacatagctgaagcttttgaagaagttttgaatggccgtggagacatatgtgccttctcggccgcactttctcctccttcagagcccgccgagccattagcggaccccaacgtaaagggggatgacgaaattagaaaaatggccgaagctatcatggacaaagttgttgatcaactactcaacgaagctgcagaagtagttctaagggaagattag

SEQ ID NO: 116354 - DNA, 747 bp, Zea mays
  Clone ID: MRT4577_37598C.1
gcggggcgggacttgactccgtccccgggccttggcgaaccctagcgccgccccgccaaggttgctttgcttcagagttctccgtcgtgcagagacgatgcagccgaacgaggtcgccgacaaggccattggcataatgcagcacgccgcgaagcaggtcctggttacgtgcaaggagaagctccacctggggaagccactcagcgtgtttgaagtgaaggaactaaaagaagcgcttgaagccattgccgaagcactggaccaggactcgctgctttgccaagttgctttggatgcgggtgctcccagcttagtagaagatcactgggtcgacgaaggcggagaagccgtggtggcgggtctcccatggcctgaatccccacgtccggaggacttcatgttccttgaaaagcacatagaaacctactggagcgtcgagtacgactcggacaatatgctgcctagcttatctgattagattaggtggtagatatgatggattaattcttcttcgcaagcaatttttttcttgcattccttcctcctcctcccaccttccttccctctatatttgtaaagcaccccccggccaatcaatctcttttgaaaaatgaaatgttactagaaaaaaaaaaaaaaaaaaggcccctaggttcggtcggaacgcagcgcagcggcggcggcgatagggagagagagagagtctgcaggatccagcaggtccgagggaggagtcagcggcgggcc

SEQ ID NO: 116355 - DNA, 2373 bp, Zea mays
  Clone ID: MRT4577_37599C.1
atgtctgaagacaagaaagttgtcgctgagtcgaagctgagcctttctgaggaaatgaatctcgacttccttgaatcaatagcaaagacaaatacagagaagattactaaggagattttagagggtttatctgaagacactggtgatagtgacagttatgatgtggaaagtggtggtgaagattccgaagatcgaccctggcgaccaagccatgcagtttttggaaaatcaagcattaaacaaagccatcttgtcaatatgaggggtagatattttcgggatttatctattgtaagggctgacgaaggagaaaaaacttgtcctactcccgaggaaaatgaagtcgtgatattccgaagtttcttcaaggctggacttcggtttcctttgagcagtttcgtggtagaagttttgaagatatttgaaatctgccttcatcaaattactcccgaagcaatcataaggatgggaatcttcgtatgggccgtgaagagccaagccgaagaatgccagagggccttcggcgtggtttgttcttttatcgggacaagggatttggtccaggaacacattgcctttagagtatggccacttgtagaaaagtgggaaatgccaaaggaaaccatcagcaaacctgacgaaggtggactagtcaggttaaaatacaccttcagatatggagataagttcgtcgagccagatgatgactggctgaaatgtattgaggccacaagcgatgaactgcttggatcatactcaaaggcagaagatactgcactatctgcggccttcgggggccggaagaagaaaagactgaaccgagtatttgatgccattgggtttgtctatcctgactaccgttacccgatacggggtcaaaaaagaaaagatacgacttctgtgaaggaagttgcttcagccactcctatgcctgagtttgtcggtgaaacctcttcggccaccgaagccaaggagccaactcccctgcagaatattgaagagccggccgtaatgctggagatggagaaaatagaagaaccgagggctgaagagacaaagacatcggaaattttaagtccttcagcaagagttgaggtgccaatgccaatgccgagggcacaaaaagacctttcaacaactcccaagaggaaaagaatggttaacgtgctagatgtgctggaaacgataaaatcttcaagctctgcttcgaagatagctgtcgaagctccaaagacacaaattgaggccgaagctaccaaaagtcaagcggaaactgaaactgggctttcagagcctaccaagagggaattcttggaaattgaaaaagaaacgaaaaaagaaactgcagaagaaattttatctgagaaaatcaccacacctattcccgaagcatcttctgaagcttctgactatgttttacgtcatgctttaggtaaaaatctgaccgaaaaagaaaaaagagaagctcagttctatgcacaaaaattgaaatatccaaaaggggcgctgatattcaacggcagcggagaagaagacttcttgtattgtctccctgacagcaaggagatttctgtctgtcgggagataagcaagagcttcggattcccaacattagaagacgggctctcgggccttatacttagcaatgccctcagggcacaaaaagatgccgaagatgaagggtgtaccatagccttgagcaaccttcgttccgaactggccagagctaaagaagaatgcacagttgaagaagctaaacgagaaattagtgaacaatgggcaaatcatttagagaaaaacgttgaagagcttcgtgcatccaagaaaaggtgttatgaaaaatctatagaatgtgttaagaaaattagaaccagcttcgccagcgttggcgcgttctcaagtgaagaaaatttcataaggggcgaccccgagggcccaattggatggatcagccacgaagctgaagcttttgaagaaattttgaatggtcacagagacatatgtgccttctcgggtgctagggggattgccactgttttggagaaaaaaggttgtgatcacgtgaaatccttggctcaaaccgaagccgacttatcttctgaggacataaaagacccttcggccgaagcaagtttggttggtagaaaattcttcaccgacgtctgggaaaatggtggccgggagatagctcaagaaattatacggaaaagcgagaaagctgcacattctcctccctcagagcccgccgagccattagcggaccccaacgtaaagggggatgacgaaattagaaaaatggtcgaagctatcatggataaagttgttgatcaactactaaacgaagctgcagaagtagttctaagggaagattag

SEQ ID NO: 116356 - DNA, 213 bp, Zea mays
  Clone ID: MRT4577_3759C.1
ggggggaacctttaagtttttttttttgggaaaacctggtccctaaaccgttggcaaccggttttggttggccccaaaaaaccggggttggcccttttggggggggaaagatattattcaaggccttcttttgaaccaggatccttggaaaaaaggctttgggggttcccgggccccccaatgggcaaaccggggggcgggaccaccaaattt

SEQ ID NO: 116357 - DNA, 1125 bp, Zea mays
  Clone ID: MRT4577_375C.1
cccacgcgtccgcccacgcgtccgcccacgcgtccgtccatccatccgtaatcacctcgttctcgttttccgaaccgtgaccaccgccgccggtacgcagctactacgcgcgttaggtcgggtagataggcgtcctcttcagctgctagccttctaaccactgtccgaatggaacgacccgaagaacgcttcgtgtaggttggttggttggtttggtgacgcacagtcgtggaacagtggaggcgtcgttctccgtcgtcatttatgacaatattacaagcggtctccgtcgtcatttatgacaatattacaagcggtctccgtcgttattacaagagaagcggtttggttgggtagatatacggctgctacggtcaatgcatgcatgatccgtttgctctcgagttatctttttttttttttttaccagaaatccaaatgcattctcattgctgaaatgttgacggtacattgtgctgatactacgggcgggctggtaaactagaaacgtagtacgtgatccgaggtggacgtgtcgaattctgaagcagttcgacagaaaaaaaaagaagtaaactataattgcaaaaactgaccgccacagactctgctctggcagatcaagtcggacgtggagaggcagggcgacttcatccggttcctgatcaaggaggtggagggcgcggcgttcgtggacatcgaggacgtcgtgagcttcgtcaagtggctggacgacgagctctcgcgcctggtgcgttcaaggtagccgacgagcccaccgtcggcttcagcctttgctaacaatccggcactcgtgtccgtgcaggtggacgagcgcgcggtgctgaagcacttcgagtggccggagaacaaggcggacgcgctccgcgaggcggcgttcggctactgcgacctcaagaagctggagcgggaggcggcctccttccgcgacgacgcgcgccagccctgcgccgcggcgctcaagaagatgcaggcgctcttcgagaagtaagcgggccgggggactttctttttctttttttgatcgcaagggggtttctttttttttttgggtctcaatgcgagtgcggcgtgcctgtgccccgcctttccgaaacggccggc

SEQ ID NO: 116358 - DNA, 235 bp, Zea mays
  Clone ID: MRT4577_37600C.1
ctgacgcgtgggctggctgctcacaaccgttacggttagcgcggtcttgctcccttcgcgtgtgcttgcgtaacaagatttgggcagacgttcattcttacgatatagctgacgacacgtagtatcggccggggcctggcagatactgataggtggtctggatcgtgacttgatcagtgctcatctcgaggtgtcctgccagggtgactagtacgaggagcgtggtgtggaccca

SEQ ID NO: 116359 - DNA, 2379 bp, Zea mays
  Clone ID: MRT4577_37601C.1
atgtctgaagacaagaaatctgtcgctgagtcgaaactaagcctttccgaagagatgaatctcggcttccttgcatcaatagcaaagacaaatacagagaagattactagggagattttagagggtttgtctgaagacactggtgacagtgacagctatgatgtggaaagtggtggtgaagattccgaagatcgaccttggcgaccaagtcatgcagtttttggaaaatcaagcattaaacaaagccatcttgtcaatatgaggggtagatattttcgggacttatctattgtgagggctgacgaaggagagaaaacttgtccgactcccgaggaaaatgaagtcgtgatattccgaagcttctttaaggctggacttcggtttcctttaagcagttttgtggtagaagttttgaagatatttgaaatctgcctccatcaaattactcccgaagcaatcataaggatgggaatcttcgtatgggccgtgaagagccaagatttggagccaaatgcaaaaagtttctgcagtatgcatgagttattgtatgagacgaaaccatggggtaaggagcaatatcacaacaattttggttgttatagtttcggtgctcgctctgggtcaagctgtcccgtgccaacttttcggaagagatggcctggggactggatgaaggagtggttctatgtgaagaacgacttgaagacgcgagaagatattaaagatatcattatgcgccctatctggcagcgcttcggccttcagaaaccgaaggtggaaattgacgaagcagccgaagaatgccagagggccttcggcgtggtttgttctttcatcgggacaagggatttgatccaagaacacattgccttcagagaaaccgtcagcgaacctaacgaaggtggactagttaggttaaaattcaccttcaaatatggagataagttcgtcgagccagatgatgactggctgaaaagtattgaggccataagcgatgagctgcttgggccatactcgaaggcagaagatactgcactgtccacagcctttggaggccggaagaagaaaaggctgaaccgagtatttgatgccattgggttcgtatatcctgactaccgttacccaacacggggtcaaaaaaggaaagatacggcttctgcgaaggaaattgcttcagccgctcttagtgagccagcgccgaagaggaagaagataaaggttcttacgcatcggccacgctatattgaaccggccacagtgcccgagtttgtcggtgaatcctcttcggcccccgaagccagggagccgactcccctgccgaatattgaagagccggtcataatgccggagatagagaaaatagaagagccgaaggctaaagaaacaaggacatctgaaattttaagtccttcagcaaaagttgaagtatcaaaaagccaaaagggtccagcattgacccccaaaaggaaaaggatggttaatgtactggatgtagtggagacaataaagtcttcaagcactactccaaagaaaattgtcgaaactcccgaagtgcaaatcgaagcctttggtgctgaagcttcaaaacaccaagccgagactgaagttgggccttcagagcccgccaagggtcttattcttagcaatgtcctcagggcacaaaaagatgccgaagacgaagggtgcaccatagcattgagcaaccttcgttccgaagtaattgaactaaggaacgaaggtctcgaaaaaaataaaatattacactcgttagtgaataaaataaaagaagacgaagctgctttcaaagctcaagctgaggctcagaagcgtgaaattgaggatcttcggaaacagctagtcagggctaaagaagagtgcacacttgaagaaacaaaacgagaaattagtgaacaattggccaatcatttagaaaaaaatgttgaagagcttcgtgcatccaagaaaaaatgttatgaaaaatctatagaatgtgttaagaaaataagaaccagcttcgccagcgttggcgcattctcaagtgaggagaacttcataaggggtgaccccgcaggcctaattggatggatcagccacgaagctggagcttttgaagaaattttgaatagtcgtggagacatatgtgccttttcgggtgccagggggattgccactattttggagaggaaagactgtgaccatgtgaaattcttggcacaattcgaagccgccttatcctatgaagatataaaagaccctcgaccgaagcgagcctggtcggtggaaaatttttcaccgacatctgggacaatggtggccgggagatggcccaagaaattatacgaaaaagcgagaaaggcatttatgacgctagaaaagtag

SEQ ID NO: 116360 - DNA, 1686 bp, Zea mays
  Clone ID: MRT4577_37602C.1
atgtctgaagataagaaagctgtcgctgaaacgaagctgagcctttctaaggagatgaatcttggctttcttgaatcaatagcaaagacaaatacagagaagattactggggagattttagagggtttgtctgaagacactggtgacagtgacagctatgatgtggaaagtggtggtgaagattccgaagatcgaccttggcgaccaaaccatgcagtttttggaaaatcaagcattaaacaaagacaccttgtcaatatgaggggtagatatttttgggatttatctattgtgagggctgacgaaggagagaaaacttgtccgactcccgaggagaatgaagtcgtgatattccgaagcttctttaaggctggacttcggtttcctttgagtagtttcgtgagccaaggtttggagccaaatgcaaaaagtttctgcagtatgcatgagttattgtatgagacgaaaccatggggtaaggagcaatatcacaacaattttggctgttatagcttcggtgcccactctgggtcaagctgtcccgtgccaacttttcggaagagatggcccggggactggatgaaggaatggttctatgtgaagaacgacttgaagacgcgagaagatattaaagatatcatcatgcgccccatctggcagcgcttcggccttcggaaatcgaaggtggacattgacgaagcagccgaagaatgccggagagccttcggtgtagtttgttctttcatcgggacgagggatttgatccaggagcatattgccttcagagtatggccacttgtggaaaagtgggaaatgccaaaagaaaccatcagcaaacctgacgaaggtggactagttaggctaaaatataccttcagatatggagatcagtttgtcgagccagatgatgactggctgaaatgtattgaggccacaagcgatgaactgcttggaccatactcgaagacagaagatactgcactatctacagccttcggaggccgaaagaagaaaagactcaatcgagtatttgatgccattgggttcgtctatcctgactaccgttacccaacacggggtcaaaaaaggaaagatacgacttctgcaaaggaagttgcttcagccgctcctagtgagccagcgccgaagaggaaaaagatgaaggttcttacgcaccggccacactatattgaaccggccacagtgcctgaatttgtcggtgaaacctcttcggcccccgaagccaaggagccgattcccctgccgaatatcgaagagccggtcataatgccggagatagagaaaatagaagaaccgaaggctaaagaaacaaggacatctaaaattttaagtccttcagcaaaagttgaagtaccaaaaagccaaaagggtccagcaatgacccccataagaaaaaggatggttaatgtactggatgtattggagacaataaagtcttcaagcactactccgaagaaaattgccgaaactcccgaagtgcaaatcgaagcctttggtgccgaaacttcaaagcaccaagctgagactgaagctgggccttcagagctcgccaaggtgaaatccttggaagccaaagaaacagaagcagcagaacaaattttggctgaagaaactggcactgccgcccccgaagcattttccgaagctttcaattatattttatga

SEQ ID NO: 116361 - DNA, 268 bp, Zea mays
  Clone ID: MRT4577_37603C.1
agacaagccacccccacgccacgaaacccgcaatcccagccgaagccggacgatgaagagggagggatggcagcacggcgccgtccgggccagccgcagcaaggtgcttaggacggccgccggcgacgacaactccgacgccgtcgcggtcgtggaaacggcggcggcggcggcggcggcgaggaagccgacgaacgcgttcctgagcacgtgcaagtgcctgtggtcccggtgttctttctttcactcgcatcttttttttaattgt

SEQ ID NO: 116362 - DNA, 2976 bp, Zea mays
  Clone ID: MRT4577_37604C.1
ttacaataacatataatcttcccatagtactacttctacagcttcgtttagtaattgatcaacaactttgtccatgatagcttcggccatttttctaatctcgtcatccctctttacgttggggtccgctaatggctcggcgggctctgagtgaggagaaggtgtggctattcgtccttcgagatccgtacttttctcagcggcctctgctacttttctagcgtcatgaatacctttttcgcttttccctataatttcttgagccatctcccggccaccattttccaaacttgcctcggccgaagggtcttttatgtcttcagaggataaatcggcttcggtcaatgccaaggatttcacgtgatcgcagcttttcttctccaaaacagtgacaatccccctagcacccgagaaggcacatatgtctccgcggctattcaaaacttcttcaaaagcttcagcttcgtggctgatccatccaattgggccttcggggtcgccccttatgaagttttcctcacttgagaacgcgccaatgctggcgaagctggttcttattttcttaacacattctatagatttttcataacaccttttcttgaatgcacgaagctcttcaacgtttttctctaaatgatttgccaattgttcactaatttctcgttttgtttcttcaactgtgcactcttctttagctctggctagctgtttccgaagatcctcaatttcgcgcttctgagcctcagcttgagctttgaaagcagcttcgtcttcttttattttattcaccaacgagtgtaatattttatctttttcgagaccttcgttccttagttcaattacttcggaacgaaggttgctcaaggctatggtacacccttcgtctttggcatctttttgtgccctgagggcattgctaagtataaggccctttaaactattgtacgctaagcggtcggccagctcgttctttgacaacaccgagagcccgtcttctaatgttgggaatccgaagcttttgctcatctcccgacagacagaaatctccttgctgtcagggagacaatacaagaagtcttcttctccgctgccgttgaatatcagcgccccttttggatatttcaatttttgcgcataaaattgagcttctcttttttctttttcgttcaaatttttacccgaagcatgacgtaatacatagtcagaagcttcagaagatgcttcgggaataggtgtggcgattttctcagataaagtttcttctgcagattctttttccgtttctttttcaattttcaagaattctctcttggtaggctctgaaagtccagtttcagcttccgcttgacttttggcaccttcgacctcggtttgtgcctttggaacttcggcagctatcttcgaagcagagcttgaagattttatcgtttctagtacgtctagcacgttaaccattcttttcctcttgggagttgtcgtaaggtctttttgtgccgtcggcattggcattggcacctcaattcttgctgaaggacttagaatttctgatgtctttgtctcttcagccctcggctcttctattttttccatctctggcattttggccggctcttcaatattcgacaggggagtcgactccttgactttggtggccgaagaggtctcaccgacaaactcaggcactatggccggttcaatatagcatggccggtgcgtaagaaccttcatctttttcctcttcggcgctggctcaccaggagcggctgaagcagcttccttcacagaagctgtatcttttcttttttgaccccgtattggataacggtagtcaggatagacgaacccaatggcatcaaatactcggttgagtcttttcttcttccggcctccgaaggccgcagatagtgcagtatcttctgccttcgagtatgatccaagcagttcattgcttatggcctcaatacttttcagccagtcatcatctggctcgacgaacttatctccatatttgaaggtgtattttaacctaactagtccaccttcgtcatgtttgctgatggtttcctttggtatttcccatttttctacaagtggccataccctgtaggccacatgctcttgaactaagtccctagtcccgatgcaagagcagactgcgccgaaagccctctggcattcttcggctgcttcatccatttccaccttcggcttccgaaggccgaagcgctgccaaataggacgcatgatgatatctttaatatcttctcgtaccttcaaatcatttttcacatagaaccattccttcatccagtccccgggccatctcttccgaaaagtcggcacgggacagcttgacccagagcgggcgccgaagctataacagccaaaattgttatgatattgctctttaccccagggtttcgtctcatatactagctcatgtaaattacaaaagttttttgtatttggctccaagccctggctcctcacggcccagacaaagattcccattcttatgattgcttcgggcgtaatttgatgtaggtagacttgataaatcttcaaaacctcaaccacaaatttgcttaatggaagccgaagcctagccttaaaaaagcttcggaagatcacaacttcattctcttcgggagtaggcacagtcctctctccgtcatcagcccttataatagacatgtcccgaaaatatcttcccctcatattatcaagatgactctgtttaatagtcgattttccaaaaactgtatggcttggttgccagggtcgatcttcggagtcttctccaccactttccacatcataactgtcgctatcgccagtatcttcagacaagccttccaaaatctccctggtaatcttctctatgtttgtctttgccattaattcaagaaaaccaagattcttctcttcagaaaggctcagcttcgacttagcgacagttttcttgtcttcagacat

SEQ ID NO: 116363 - DNA, 547 bp, Zea mays
  Clone ID: MRT4577_37605C.1
agcagtggtaacaacgcagagtactttttttttttttttttttttttttttaatttttttttttttttttttttttttttttttttttttttttttttggggggcgagatcaaacataaaaaaacgaggggggggtcccccggccccagccaaattacagggtggtatcatgaaaacgggagggcaagatacattctacaaaaggccaggctacgtgggggacccctagttggagggctgcccaaacaaataacagggccccaaaagctaatcctagctcaaaattacaaaaccggggctaatgggcacttgcccctttatccgaggaacaatttacatgaccattggccggtggcgacatttttcgctaacaggccctgggaatcactacctgcaggagctacggctacaagccttgccgaaaaccccgtcgccgggggggtacctaaaggcgatggaatttggccgacggcccattaccgcattaggcccaacatatgtaccgagggcaccatccaagttccaacattgggttatggccaagggg

SEQ ID NO: 116364 - DNA, 453 bp, Zea mays
  Clone ID: MRT4577_37606C.1
accaaatccacatcatacaggcatgtatattatctgggaggagagccttcatatctactgcctcagtatgcaggaccaaccctaaaaaaaagaaagacggggggtccaactgcccgcaaaggcacaggaccaaaccatttttgagctccttaacgaccacaaacggcagcgacccagtatacaccatcattgccatactgaactactgcagatatgctactgaccctacgaattcgaaagacaaaaggcgggctcctgttacacgcgagaggcacgaggcctctggcactgtctccaggtacgagaacccaaacatggttcttctcctcacagtcagaggaagctccatttgttagcaagatcaacaacggggcgaggctccaaaactaccaggccgttcagcaaccagaactaacctggctataccgaccgactccctcacaccttaccagc

SEQ ID NO: 116365 - DNA, 2544 bp, Zea mays
  Clone ID: MRT4577_37607C.1
ctaatcttcccttagaactacttctgcagcttcacttagtagttgatcaacaactttatccatggtagcttcggccatttttctaatttcgtcgtcccccttcccgtgggggtccgccgatggctcgacgggctctgggggaggaggtagtgcggctattcgcccctcgagatccgcacttttctcagcggcctctcctacttctctagcgtcgtgagtacctttctcgcttttccgtataatttcttgggccatctcccggccaccattgtcccagatgtcggtaaaaaattttccaccgaccaggctcgcttcggccgaggggtcttttatatcttcagaagataaggcggcttcggattgtgccaaggatttcacatggtcacagtctttcctctccaaaatagtggcaatccccctggcaccagaaaaggcacatatgtctctacggctattcaaaacttcttcaaaagcttcagcttcgtggctgatccatccaattgggccttccgggtcaccccttatgaagttttcctcacttgagaatgcgccaacgctggcgaagctggttcttattttcttaacacattctatagatttttcataacaccttttcttggatgcacgaagctcttcaacgttttttctaaatgattggcccatttggtcgctaatttctcgtttagcttttgcaacatcacatttttctttaaattcgaatagctgttttcgaagatcttcgatctcctgtttctgagcttcggcttgcgctttggaaacaacttcatcttcttttattttactcaacaatgagtttaatattttatctttttcaagaccttcgttccttagttcaattacttcggaacgaaggttgttcaaggctatggtacacccttcatcttcggcatctttttgtgctctgagggcattgctaagaataaggccctttaagctgttgtacgccaagctgtcggccaattcatcttttgatagaactgagagcccatcttctaacaagcttcttcccatctctcggcagacagagatctccttgctgtctaggagacaatataagaagtcttcttctccgctgccattaaaaatcaatgcccccttcggatatttcaatttttgggcataaaactgagcctcttgcttttctttttcaggcaactgttttcccgaagcatgtcgtaaagtataattgagagtttcggaaaatgcttcgggggtggcagtgatagtttcttcagtcaaaatttgttctgctgtttttgtttctttttctatggttcccaaggatttcactttgacgggctctgaagccccagcttcagtttcagcttggtgctttgcagcttcggcatcagaggctgttgtctcaatttgtgcttcgggaactttgccaattttcttcggagtggtgctcgaagactttattgtttctaatacatccagaacattaaccatcctttttctttttggggtcactactggacctttttgtgtttttggcacttcaacttcagccgaaggacttaaaaattctgatgtttttgtcccttcagctctcggctcttcaattttatcagccttcggcgttgcagctggctcttcattcttctgtgtaagagcaggctctttggtttcaatagccatagaggtctcaccaccaaattcgggcactgaggctggttcgatgaagcgcggtcggtgagtgaggaccttcaccttcttcctctttggcgcggcctcgcttagagcaactgaaacatctccttttccagaagtggcgctttttctcttttgccctttcagagggtagcgataatcaggatatataaaaccaatagtatcaaaaactctattcaacctcttcttcttccagcctctgaaggtcgtagacagcgcgttatcctccgcctttgaatatggtccaagaagttcgtcgctcgtagctttgatacatttcagccaatcatcatctggctcaataaatttaccctcgtatctaaaggtgtatttcaatctaactagtccgccttcgtcagatttactgatagtttcctttggcatttcccattgttctacaagcggccacactctgaaggttatgtgctcctggactaaatcccttgttccgatgaaagagcaaactacgccgaaggccctttggcattcttcggctgcctcatcaatatccacctttggtttccgaaggccgaagcgctgccagatagggcgcatgataatatctttaatatcttctcgtgcctgatatatctttagaacttcaaccacaaatctgtttaaggggaactgaagcctagctttaaaaaagcttcgaaatatcatgacttcattctcttcgggagtaggcacagtcctctctccgtcatcggtatcttcagataagccttctaaaatttctctagtaatcttctttgtatttgttctcgctatcgattcaatgaagcccagattcttctcctcagaaaggctcagtttcatttcggcaacagctttcttttcctgagacat

SEQ ID NO: 116366 - DNA, 2004 bp, Zea mays
  Clone ID: MRT4577_37608C.1
atgtctgaagataagaaagttgtcgctgaatcgaagctgagcctttttgaggagatgaatctcggctttcttgaatcaatagcaaagacaaatacagagaagattactagggagattttagagggtttatctgaagacactggtgatagtgacatttatgatgtggaaagtggtggtgaagattccaaagatcgaccttggcgaccaagccatgcagtttttggaaaatcaagcattaaacaaagccatcttgtcaatatgaggggtagatattttcgggatttatctattgtgagggctggcgaaggagaaaaaacttgtcctactcccgaggaaaatgaagtcgtgatattccaaagtttcttcaaggctgggcttcggtttcctttaagcagtttcgtggttgaagttttgaagatatttgaaatctgcctccatcaaattacccccgaagcaatcataaggatgggaatcttcgtatgggccgtgaagagccaaggtttggagccaaatgcaaaaagtatctgcaatatgcatgagttattatatgagacgaaaccctggggtaaagagcaatatcataacaattttggctgttatagcttcggtgcccgctctaggtcaagctgtcccgtgccaacttttcggaagagatggcctggggactggatgaaggaatggttctatgtgaaaaacgacttgaagacgcgagaagatattaaagatatcatcatgcgccccatctggcagcgtttcggccttcggaaaccgaaggtggatattgacgaagcagccgaagaatgccagagggccttcggcgtagtttgctctttcatcgggacaagggatttgatccaggaacacattgccttcacagtatggccacttgtagaaaagtgggaaatgccaaaggaaaccatcagcaaacctgacgaaggtggactagttaggttaaaatacaccttcatatatgaagataagtttgtcgagccagatgatgactggctgaaatgtattgaggccacaagcgatgaactgcttggaccatacttgaaggcagaagatactgcactatctgcggccttcggaggccggaagaagaaaagactcaaccgagtatttgatgccattgggttcgtctatcctgactaccgttacccaatacagggtcaaaaaagaaaagatacggcttctgtgaaggaagttgcttcagccgctcctagtgagccagcgccgatgaggaaaaagatgaaggttcttacgcaccagccacgctatattgaaccggccacagtgcctgagtttgtcggtgaaacctcttcggccatcgaagccaaggagccaactcctctgcagaatattgaagagtcgaccgtaatgccggagatggaaaaaatggaagaaccgagggctgaagagacaaagacatcggaaattttaagtccttcagcaagagttgaggtgccaatgccaatgccgagggcacaaaaagaccttacaacaactcgcaagagaaaaagaatggttaacgtgctagatgtgctggaaacaataaaatcttcaagctctacttcgaaggtagctgccgaagttccaaagacacaaattgaggccgaagctgccaaaagtcaagcggaaactgaaactgggctttcagagcctaccaagcgggaattcttggaaattgaaaaagaaacggaaaaagaatctgcagaagaaattttatttgagaaaaccgccacacctattcccgaagcatcttccgaagctcctaactatgtcttacgtcatgcttcgggtaaaaatctgaccgaaaaagaaaaacgagaagctcagttctatgcacaaaaattgaaatatccaaaaggggcgctgatattcaacggcagcggagaagaagacttcttgtattctctccctgacaacaaggagatttctgtctgccgggagatgagcaagagcttcggattcccgacattagaagatgggctttcggtgttgtaa

SEQ ID NO: 116367 - DNA, 292 bp, Zea mays
  Clone ID: MRT4577_37609C.1
gatttttataatcgggaacaaaaaaacctatctgtcaatattattgctaaaaagaaaaaaaatattttgaaaaagaaagaatgctagattctggaaattcaagtatagcgcggatgcctttcccgtatgagctatcatgcatcaagccaaatatacagattgaataattacctacaataaaaatattttatctgtagtattcagaatcacttttaaaattttctgtagatgtgaactgaggtatcgaagtctgatgtaatcatagatgtcaacatttaataaagctaaaagg

SEQ ID NO: 116368 - DNA, 310 bp, Zea mays
  Clone ID: MRT4577_3760C.1
cccagatggggagctgctacaagaaggagatcttcaacgaccatgtgcagaagggcgtcctggtctgggcgcagaaggtcaagatgaggaaggggttgaagggggctcttagcaagagtgactcggcgaagaacaacaatgccgatccagcaggaccttctgttaagattgagatggccaaggctggggaggatgctaaggtcgtcggaaacacggaatgagagatcaggtgattgcggcggattggacagtgtgcccgacctgtagttgaagaacaatgccatcgtttttactgtcacagcagccgagg

SEQ ID NO: 116369 - DNA, 243 bp, Zea mays
  Clone ID: MRT4577_37610C.1
cctagatcatacaacaaagctcatttttttaacaacactagcacactaactagggggggtgtttaattctctataactatcttcatacacacatacggcaaccattcatctaaattgttacacagctccaacacctttatatctttactcgtacctttaacaatcatcaatattaactatttcaaaactcaattttttaacctcataaaactcaacaaggcataacaaattgaatccaaccac

SEQ ID NO: 116370 - DNA, 278 bp, Zea mays
  Clone ID: MRT4577_37611C.1
aaaaaaaacatgcttttaagcaaattttttaccgtgactttacgttcattttcacatgcctttggaaagatgaactgacatatatttcaattttttatcctacattttttgagagaccaagatccacacttcctaactttttttcccccctcaccccccaaaggctgtgattttcggaaagccttgaaccacaataggggacaacgatgcagacataatgggtgtgagtgcgacgcaacatctcgttgaattatcagcccattaccggacggtaacaa

SEQ ID NO: 116371 - DNA, 588 bp, Zea mays
  unsure (1)..(588): unsure at all n locations
  Clone ID: MRT4577_37612C.1
gctctagaagnctctcgagttttttttttttttttttatgaaaaattctcaaaaaagtataaaaggtacgaaagtttgattacacgacagtgctcgtactataagagggggaaggagaacctatctgatttacaaaagcagtgcactactacacaagtacacaatcttaccatacaatgctgctgtcaaatgaaatatcaaaaaaatgcaccagtaatcatttaggctatgcacattgtcaattatcctttaacatgcttactaacgtattggcaagcacaaattcatccatcccgggtatacgagttgtaaaactgcttgttagcctgtgaaaatgcagccatgccatatgtacttacatatactgcctactaaatcagaaactgaatggtatctgtcataaatttgatgtattgatattctgatagtattttaagcatcctcatcaaatctccacgctctgaatcagcaacggattttaatgtctaacttcaatcccttcacttgtctagctttcaatcctttcgtcttctgagtctaaatttcttcactttccatgaaacaggcaaccccggtcctggggtagtc

SEQ ID NO: 116372 - DNA, 570 bp, Zea mays
  Clone ID: MRT4577_37613C.1
ccggccggacactggaaaagcggacaatactctggaagacctcatcctccagaggaacgatggtaccgtgctcatcgccttcaacgtattgctcaaccgcctcttctcggataggcggcttcgtcgctcgacaatgagggagcggatgcttcggagaacatactccgtcgcatcgtcgaatgctccgactaggcctcaatgacgagtcggcagaacgccctctcggcttcgatggacgatggggcgagtaccgccgctagtgccctacgttgcacgtgctgagattcagaagggtcttgttcttacgacctacctattgatatgagtccgctgacgcctcaactaacaagagttctgcttgacatgatggccccatgagtcgccacctgaggactcatgatcggtcatcccattgacgttgcctttccgatggtgagggtgatggtatcggcccgatagtagcaaatgagtgaggcgccacctcttaaagatgcttccctgagaaaggctgatatcgaagaggatacaactactgacaaggcctggtggtgcatcatccgacagcccgac

SEQ ID NO: 116373 - DNA, 417 bp, Zea mays
  Clone ID: MRT4577_37614C.1
ccaaaaaaaaaataatttcccctggaaaaaaggaaatttttttaaaaaaccggggttgccaaccggccttttaaaaattaacccaacctaccttttaaaaaaccacccgagggccgggatttggccccacaccatcatcattttttagggggggagtttttttttttacacccttttcgttttagggggggggcatcccccataattttttccccgaaaaaaactgggcccccagggccccccttgttttctagccccaaatccccagttggctttttttataacctttgttaaaagcgatctttttcttttccccgggcccacggactttgaaaagcattttttaggcccaaccctttggaacccggccctttgcccagaacaaaatttctacgggaaacccggctcctttggggt

SEQ ID NO: 116374 - DNA, 527 bp, Zea mays
  Clone ID: MRT4577_37615C.1
aacgatcaatgggtattaagaagcataagatcaactgttgtatacacaagtgcattgcatacacgatgaaccccaatggtctacaaacctacacatggggtgcatacacccatgccaggagccatgacagcggctggccaccttgactttatacactcaaacagactcgagctgatcgttccacacccgccgagtttaggcataacagggctccttggtcccaaagagaccatgtaaaacgttgcacggtcttgaagacacaattgacctggacgcacaccgggcagcacctggcaactcttaacccattgtcatctggaaaggacgctgatggcccgatgatcgccccatggagctcctgatgagcaactatggcacaccatgttagacaccacggcccaacagccagcaacatggaggctcacatgcctttggggtcttgcacagaggagcctagtgagaactgcactatgaaacagcctgaaaacatctatcacttgccaagggacactaactggtcgaaccag

SEQ ID NO: 116375 - DNA, 436 bp, Zea mays
  unsure (1)..(436): unsure at all n locations
  Clone ID: MRT4577_37616C.1
cccacgcgtccggaaaagtttacctcatattggtatcaaggttgatcgatcacaaatggcagttgcttctagaactaggtaaaaaaacgaaaatatgaatgttgtagctgacttgatgcatggttatttgttaggattactaagagatagtaacgaacctcacaatcattacggcagctcagtacctatctccaaataaaaacttttgttgatgcggcaaacatggacaagtaggtcctttaatcaatatttgtttggcgaatttgtggtgtacatgcccatatgataaatggactgtagaaggattgaatattcaaaagtgcacatgtctctgatgtgcttataggttatgtcattgaaactggaagtgtangtagccaatttctacgataccacaggatgtactgncctatcttctatgagcacacccagtgct

SEQ ID NO: 116376 - DNA, 225 bp, Zea mays
  Clone ID: MRT4577_37617C.1
gtgaactcggaggggtgcctgttcgacaagcacgcgcggacggcgctggccttcgtgacgctcaagcacgacggggagcgcgagttcatgttctacaggaacccgagcgcggacatgctgctgacgaaggcgaacctgaacttgggcttgttccgcgcgccaaggtgttccactacggctccatctcggtcatcttcgagccgtgccgctcggcgaaaatggccg

SEQ ID NO: 116377 - DNA, 284 bp, Zea mays
  Clone ID: MRT4577_37618C.1
cccacgcgtccggatctagaccgcattctcgatcttcaagttgttcattatttatggtgcccatttcctagtagaatcccgtgcttaagaatctggctgatgatgagcccgttatatagaatgcccctgccgggaagaatcccaatgcagcaaaacgtgtaccaacaggcaagtccatcagcaaggacggcgctgtggaaaagaaggaccgtaagatgcgcacgaatagcgtggagacctacacgatctacatcttcaaagtgctgaagcatgtacaccagtac

SEQ ID NO: 116378 - DNA, 497 bp, Zea mays
  Clone ID: MRT4577_37619C.1
ggcccaaaaattttgcatacgcccggaattattattaaataggacgggacaaaaaaaaattggggaagcatccccgggggccggggcaaggctttgttttaaaaaaacaggcgggttccccttggccggaccagttttgagtcggttgttcgacccccggggaaggcccccgagggggccgttcccgggccctcccccggccggaacggggggggccccttttgccgggggagcagtttgagcattcccccaaaaaacaacgggttcggggccgggacccccgagcccaacccttaaagccaatccttttcccaaaataacggatccgttttgcccacttcccttgcctacattggtccattggccaaagggtgttcaccttggaaacctgatgcgggtataaaaacaaccgggcggggacggaattcggccccccggattttaaagggcccccgggggcgcaccggacaccgggcgatggggggggcttttccggc

SEQ ID NO: 116379 - DNA, 228 bp, Zea mays
  Clone ID: MRT4577_3761C.1
aaagaaaaccccggaaaaaggggcctcaaaattgaacattggacaatgcctgggggtattgaacaaacatacatacattggtgccaatggtttttccatttccgtcatgcaggcccggtaaaccctaattaacaatgggaagcccctcccccccatggattccctcctggaacggcttcccttgacgcggggtgggggacaccaaaacgaataatgcggacagggggg

SEQ ID NO: 116380 - DNA, 457 bp, Zea mays
  Clone ID: MRT4577_37620C.1
aaaggaaccgggcatcaattctgcaactaacaaaaaagtttttttgggtctagggggggggccaaacaatcccctataaaaaagggggggggggaaaacttatgaggctgacaatccttaaaaaccaagtaaattttaaaaaaaaggggcttttggtgcttctcatctgaaaagcttgtttcaagggttgggagctggactactgggtaaccaaaaaaaacctggggggtaccaagctctcacctaatttttttttaaaattgcccattttgacaagggccttcactaactggggggaaaacatgattcggtaatttaggccccccacccaaaaaatttgaccgggccctatgattgtttttagggaacccttatactggacaaaaaccattaaaaacctggttttcatgaggatttctagcaaatcggagttcctatgcaactaataaccttcctt

SEQ ID NO: 116381 - DNA, 344 bp, Zea mays
  Clone ID: MRT4577_37621C.1
aagtgcgctctttttttttttttttcattcttttaaaaaaaagcgaccggccgattttgtattaacagggacatgtcattcccgattgctcctctgttttcaaaaggtttccagggaatacaaacaccttcccaagatccatggggggggttggccacctagcatgtagacacttcaagtactgggggggggggtaccagaccccctggattttgacatccttgggcgccttggccccaagggcgggttcggacgtgtttactctttagaaaacccctatgaccctcccggtcttcgggttggttttggtgaccctaaaaatgatgtttcccgggggggggggg

SEQ ID NO: 116382 - DNA, 362 bp, Zea mays
  Clone ID: MRT4577_37622C.1
gcttcgagccaactccacgcctttgcccatcgagcgcaacgcacgagatccgcgagcacgatatgaaggagggtggcggtcacatgtccaagaaagatgcggtcatcatgccacccaaaacgggattcacttagattctactaccaagacatgaccggcatgtttggtaagtgggagtttgaccccattgctctggcatagccgtcgtgccccgtgcacctctggcatggcgactaagacgggctactccctgctgtgctgcataggtgcctaagacccaagatcggatggatcaactaccatgaactctctggcaccggcacacttactgcggtatgtgcctgggctcagagacaccagcc

SEQ ID NO: 116383 - DNA, 832 bp, Zea mays
  Clone ID: MRT4577_37623C.1
aaatcaacaccaaccgccccttcccttcacgcatctccatggggtccgaagccaacggcggcgccgccgcgattgacctgctccgctcggcggcacccttcctgccggacgccgacctcctcctgacgcccggcacggggctcgtcctcgtcgacctcgttaacggcttctgcaccgtcggcgccgggaacctcgcccccgtcacgccgaataagcagatcgagaagatggtggaggagtctaccaggcttgccaaggtgttctgccagaggaactggccggtctttgcgttccttgatacccaccaccccgataaacccgagccgccttttccgccgcactgtatcatcggttccggtgaagaaaactttgttccagctcttgagtggctggagaatgatccaaatgtgacaatgaggcgcaaggactgtattgatggttatcttgcttcatttgagaaggatgggtccaatgttttcagcgagtgggtcgcaaagttccagatcaaaaccgttttggtcgtaggaatatgcactgacttctgtgttttggactttgtgagttctactctggctgcaagaaacattggccgagtgcccccgttggaagatgttgtgatctattccgagggatgtgcgacatttgacctccctgtcgaagtagccaggagtatcaaaggagctttggcccatccacaggatctcatgcatcacatgggactttacatggccaaatcaaggggtgcgaagatagttgacggaattcttgaagaataagactagatcattcatcaggtctgagtcttgctggaaggaccgtgctatagttctat

SEQ ID NO: 116384 - DNA, 389 bp, Zea mays
  Clone ID: MRT4577_37624C.1
ggctgctgtgtcttctgtgccctactactagttttgctgtgcagttcatggcctgttcttgacatttcaataccgggggaacgacggatcatacagccagctgcctgcgctagttgtctagctcgtctatcaggcaggaggcagttcaatgtgcattttatatcaaggttcatccaggcctcgccttgatgtttgccactgttggaacgctgccctaccattatgttgccggtgcgtcggccgcgcttgttagccacctgccgttccgcagccctgcctttggttggttcagaggagtgttcaggctccgatctcgttggtttttcggcccatgccttctatttcctttcgaccggagtccttttcctccactgcctcttcctgcccgc

SEQ ID NO: 116385 - DNA, 178 bp, Zea mays
  Clone ID: MRT4577_37625C.1
gtccttcacgagtcacgcgtactgcggctagaagctcgcctcgaggcatctcgaacagttcagagtcatgcatgttacaaccctgaggtccagcacgacccattatacgtgtggccagtatctgatccgcgagcgcttccagggattacgcacagagcgacgcgctcagtagctacac

SEQ ID NO: 116386 - DNA, 416 bp, Zea mays
  Clone ID: MRT4577_37626C.1
aacgactacacttatacaccaaccaaacactgtatggcagcctgctttgcgcggcaaccagacggatgggctatgctaacaatgacatcgcgcgtaatagcttgatcccgtgatatagacaaagaggagtgacgatgccacgccttcaagggccttcaatgcaatacactgcaaggatctggaccctccgatgtgaggggccatgcatgatcgcggtctgcgagtgcacaccgccgatgccgctaggaggcatctactcggggaggatgtactacctgaccctggtaaacgtaaactgcgtcctggacgacaagcgggcgtacctcatctgttacgggagcaacgttaccatgatttacggtgaggacggatacagctgcctcaaacaggacagagctagcaaaaagagcctcagc

SEQ ID NO: 116387 - DNA, 826 bp, Zea mays
  Clone ID: MRT4577_37627C.1
cattgggtacctcgaggccggccgggaaagtcagactcgaggccttcgacgcccaaatccgagattacaccaatgcccttgggactttcggacgcgccggatcttatccaaactccagccactcctatctccaaaactcattccagggaaccttcaagtccgacaactaccaaagctcaacgtcggttgagcaacctcatccaaacgcagactaacaaaattgaggctgcttctgatgcagttcgggattcgattcttgattccgccgaccaagcacttggcagaattaacaacacattagacaccagcttcaagttcttcttcggtggtctaaaagaaaagaacccagatggacccatgcaggaacaaccggtactccccaagacactagaagatgcaaggaagcttgtgagctctcccactcgtgcagagcgggatgatgataacttgagtggcagtgcagcgagttcagtacatggtgacgagtctacagaaaccccagttagcaaagggttggacgcgaagatggctgatctttttgctggcaaaaggcagattagagatcgtagcgtcgattccactaaatccgggggaagcagtagcggacgacgtgttgcattcgctacatcacagaatgtagaagagaaggcaccatcaccagctcctattaaggcggatgctccagcaccaggcaacatttccgctgttgactctctacgcaacatgggcaacaacttcaatccttttgaaccgattgtccagtatgaacgtactgccccgatttgcacgcgccgtaagcagcagtagcacgcctgtgctcccatcc

SEQ ID NO: 116388 - DNA, 1467 bp, Zea mays
  unsure (1)..(1467): unsure at all n locations
  Clone ID: MRT4577_37628C.1
cattgggtacctcgnagccggccgggaatggtgcccctttagtggatcacccggctagcatccatgtttgaggagcgtgaagctgagcttacttatcacacaactggagatcgctcaagtgctgcaagcagttcacttgtttgcccatatcttgccctgcgtggttttctgcatcctgttcatgtgccttctacatctaatcctggtgctgaaagcacttcatttcgtcggcatgcaactggcttggaaggccatgccactcttgatttgaataatgctcaacttttccatgcgattgagtcaataaatcatgacagtgagcacagacatttgagtaatcttcctgtatcaggaattcctgagtattctatgactccatttggtataggactaccaagatatgacagtggcagccaacagagattcagatcatatgcacatcatcatcccctaatccataggccagcacctcgcagtgggagcaatttggtggcaccaccattggggtcggttccagctgtggtggcggcggcggagaccgcaagaggcagccacatgtaccaacgctcgtccgtgcatggcagcccgttccctcctaccaccactagaagggtgaggccgagagccttgacgatcacatcgttcatcgcagcgacgtcctcagacccattgaccggccgtacaatgcatggggccgggagggcttcgctccgttcccctggatccccgctgaaggcgagtctcactggtggggcaccttcaaccctgtgcagaaccatgcgcatggaggctttagcagaaggcctgctggggagcggatgccgccgcagagccaaagccacccggagaacagctatcaggctgtgccgccgtcacagaggatgccgccgttcttgtgattcgacaaggctgttcctacgtccgatcgctgtatataaaaagaagtattcggttcgggatctgagagagcacattgagcgaagatcgactgcactgcagtctccagcgttgggacctgtgtgatgtttatgccgctggtatttcagcgtttttctttttccctccggtccagcactctggtttcattgagcgctgtagactgtctgtcctaactgatgtgttgcgttgaggaggacgatttggaaacgtgagccgaagctgaactgcatctctggtcgccggggctaaaaaatgccgtttgctgctatgaaagttgtatcgatttgcgaccgcaggtcgcctgcaaatttgttagaacaggtgaaatttagtgaacacaaatgttggagacctgcggcgtttacattttttttgttggttaccgagattgtatttcccacgcgtccggcgccatcaagcgattgtgatggatcaatttatctccctattgtagcaatgggttttttttgaaaccgatggatgtatatgtcactagaagtaaataccagacaaatatagttgtatccc

SEQ ID NO: 116389 - DNA, 140 bp, Zea mays
  Clone ID: MRT4577_37629C.1
gctatcaagctggctaagaaatggggtgctgagaagagtctatcatgccaaagaatgaggcgctgagacctcgggtcgaactcttggtgtcatttccatggtgatgtgacaacgatgcaactctggtgcgttggtccttt

SEQ ID NO: 116390 - DNA, 520 bp, Zea mays
  Clone ID: MRT4577_3762C.1
gggaaatctagaagacacatgctttattgaaatgcagcaacaagacggaacatagtgtttagctataacccacacaaactgcacgctagcatcttcattcatatcactggcacgctgcccaggccactacttccccttgacgactgtcaccgggcacgatgcgtttgacagcacgtagtttgtcacgcttcccaggagaatcctgaagtagttaccggattagagagtcgtgaacaaaatggaatatgctaaaatatttaagccaatatatgcagtttgcgtgagtcaggttctgagtgcaataataagaatatactgtatcagtttgcatgaaaaaaggaatgtggtaatttacattcatattgagtgccagatatcgtgagtttcaaataaaagaagtgaggggagagacctgcactcaaatttgatttatgacatctaaattattaagcggtgcaaagagttcaacaacgagtactatgtaactggaaaggtagagtagcaaaaactgacgcccttt

SEQ ID NO: 116391 - DNA, 1730 bp, Zea mays
  Clone ID: MRT4577_37630C.1
aattcggcaccggcggcgttctcgtgcatgctcacggtcccccacgcccacgagcgcctccgcggcgacgaagagaatcatcaggcagagcgggggtggggcggggcgcagatggatctagagaggtcaccgccagcgtcgtcggcggaggcgcccggggacggcggcgggggcggggccgcggcctgctcaatctgcctggatgcggtgctcgcccgcggcgctggtcgctccgtcgccaagctacaatgcggacacgagttccacctagattgtattgggtctgcattcaatgcaaaaggagcgatgcaatgccctaactgtcggaagattgagaaaggtcgctggctttatgcaagcggacatcgcgcctctgttgatattgatatgggtggctgggtgaccagtgacaactatgatatcacctccgagcttccttttggatttcaatggtgcccctttagtggattcacccggctagcatccatgtttgaggagcgtgaagctgagcttacttatcacacaactggagatcgctcaagtgctgcaagcagttcacttgtttgcccatatcttgccctgcgtggttttctgcatcctgttcatgtgccttctacatctaatcctggtgctgaaagcacttcatttcgtcggcatgcaactggcttggaaggccatgccactcttgatttgaataatgctcaacttttccatgcgattgagtcaataaatcatgacagtgagcacagacatttgagtaatcttcctgtatcaggaattcctgagtattctatgactccatttggtataggactaccaagatatgacagtggcagccaacagagattcagatcatatgcacatcatcatcccctaatccataggccagctcctcgcagtgggagcaatttggtggcaccaccattggggtcgattccagctgtggtggcagcggcagagacagcaagaggcagccacatgtaccaacactcgtccgtgcacggaagcccgttccctcctaccaccactagaagggtgaggccgagagccttgacgatcacatcgttcatcgcagcgacgtcctcaggtgagatcggaggcccccatggattctccgctcctggagccaccatgaacaggagcgtctctgacgctgagggcatctctagacccattgaccggccgtacaatgcatggggccgggagggcttcgctccgttcccctggatccccgctgaaggcgagtctcactggtggggcaccttcaaccccgtgcagaaccatgcgcatggaggctttagcagaaggcctgctggggagcggatgccgccgcagagccaaagccacccggagaacagctatcaggctgtgccgccgtcacagaggatgccgccgttcttgtgattcgacaaggctgttcctacgtccgatcgctgtatataaaaagaagtattcggttcgggatctgagagagcacattgagcgaagatcgactgcactgcagtctccagcgttgggacctgtgtgatgtttatgccgctggtatttcagcgtttttctttttccctccggcccagcactctggtttcattgagcgctgtagactgtctgtcctaactgatgtgttgcgttgaggaggacgatttggaaacgtgagccgaagctgaactgcatctctggtcgccggggctaaaaaatgccgtttgctgctatgaaagttgtatcgattt

SEQ ID NO: 116392 - DNA, 352 bp, Zea mays
  unsure (1)..(352): unsure at all n locations
  Clone ID: MRT4577_37631C.1
ntttatattatttattttttaataattttttttttttttttttttttttttatttttttttttttttttttttgggcaaaacatgtgctacatttttaccatttccaataataacccccaactgttaaaaagggtaaactttacagattaaccagtctttatgcctggccaggatggcaaccgttttcgtgccaaaaaccttgaacaatattgaaaattaatctttctcagagtgcttatcttgggataaaataaaccgtaagcattccttgccacacttatacgaccccctccattttgttttcaccaacgtttgcctaaagctgaggctttttaatctttttcttaaaaa

SEQ ID NO: 116393 - DNA, 422 bp, Zea mays
  Clone ID: MRT4577_37632C.1
tacggctgctacacgacgacactatggcatttaacgcctacacaaacaccatctatcatgccactcatgatgtgggcttctgtcactgccaatgcactcaaactctcttctgtctccaaacctcatctcttgcctcctttatctttctccagatgcttatcttccgtcttggatggacttaagtacgctcattcacatgaatggctcaagcaccaatgctcagtcgcccccattgttatcactgaccatgcccagtaccatcttgtagaggttgcctatgtggagctgtcagaaccacatgacacagtttccaacaagtctggcttctgatcccgttaaactgttaaagcaacaagcgatataaacccttcaatctcgcatgagatcgcctatgtcaacaaaaagcttacaaaaactccttc

SEQ ID NO: 116394 - DNA, 310 bp, Zea mays
  Clone ID: MRT4577_37633C.1
accactcgtacgatctttcccgtttttgcagatatccacttatgggatatcaaacttttaatacgtcttgagggcaaccactcaactacagagcgaagtatgactatatcgggcaacaagatgatgcctaacgagatgatgcgcaggaccagtggcgtttcggaaccataccaaacggggtcaacgccagacacagagaaactgtggttgtgggaccttaaatggattggcgacctgagcgagggcaggttcggcagggtttacaaggcacgccactgtcgtaacggtaaagtgttatggcctaagatgt

SEQ ID NO: 116395 - DNA, 375 bp, Zea mays
  Clone ID: MRT4577_37634C.1
acagccgtccaagcggaaggtccaccttgggttccaagactttctttaaaacgctgggcaactccaagggaaggtggttcataatggaaaccaagggccctccatttaggaggtttgagatggagtcctaccccaggctggccaaagttggggggcaccatttcaacggaaccaatgttgttttgggaactgcttgcggaaggacctacagggggggctgcttaagattaatcgacccaggggactgggccataataagtcccacccttggcccccagtgggccagccccggaacccatggaagttgtttggcctttttaaagaagagatgagatgtaccgctccggccctttgcccgtttcctttttttatctt

SEQ ID NO: 116396 - DNA, 390 bp, Zea mays
  Clone ID: MRT4577_37635C.1
attattttttatttgtttatttatttagcgggggcttttatttatttttttttttttatttactttttcagaaagaaaaaacgcccgttaatatccaaaattactataaatatctggtaacaaattcatcaccattagccagtaaaatgaacaaccctaattgagtcatcacgaactaacgtgccaaaaaaatggtggtttcccaaacattaaaaaaacgtgcacaattaaaaaaataatccaactatacaatattatatcctccgaaaatattgactaaaaacgattaataaacaaccttatagctcataactgttttaaaaacaaacccaatttcagttccccactacaaaaaaaccaaaaaaaatcaattgtctagcccccaataaa

SEQ ID NO: 116397 - DNA, 699 bp, Zea mays
  Clone ID: MRT4577_37636C.1
gggtacctcgaggccggccgggccggggtactcatccattcactcatcacttagctagatctactcgtaggttctataatacgatgggaaaggacaacgtgatcgagagcgatgctggcgaaggaggagttcgctgccaatgactacacggaccctcccccagcgccgctgatcgacgcggctgagctaggggacctgatcactggaccacgacgagatcgccgagttcatcgtcactctgctggtcctagtacatcacgtgggccatcgagatcggcgacaagcaccagacggacgccaccttgttcttcgtcgacgtgtcgagcgtcccgtcatgggtgctgtccatcgcctgtgctttcggggcaatgatcttcttcctcgtatactgcagcgccgtcatctcgatgatccacatcaaccccgactgcaccttcggcctcttcctggcgcgcaaggactccctggtgagcgtgctgctctacatggtgaggaagtggctcctcaccatctgcggggtctacctcatcatggagtgcctgagcgcctactgcgacaggtacgtcgtcaaggccaactagcacgccttggactagtgccgacggcaccggcctcaacgtcgagatcatcggcatcttcgtgctcgactacatcgtcttctccgccaccgaccccaagagcaacgcccgcgactcccac

SEQ ID NO: 116398 - DNA, 709 bp, Zea mays
  Clone ID: MRT4577_37637C.1
cgccgccggcaagcgtgatgcattattccatggcgcggtggcgttggagcttctgtttgccactatatgtactagtgatcacgtcatcaggcccccatcggtggatcagccgatcgatgggccgggaggccatgacgaactgatcaccctccttgctagctggggtcgtagggtgggagctggttacgaagagggcatcccagcttccagcctccagcaccagggtggcagagcgtgctccgaatcccccgccaagaaacagttcatctgaggcctctcaattctgcccgtcgaagcgaccgcgcggctttaattactgtatatatataatactacggcatctattggtccctcaaatcctcctcctccttctcctcctgccgctgaggtggagttgtcaacgtgccgaggactggagcgcccgcgtccggcgtctctataaacgagaccgcccggccatttggtctgctcctctctgttctcccctgcctgtctgcttccagctgcatctctctcctcggtcctcgctcgctcggcttccctcctccctctctctccgccgagaccgagaggaggaggaggcaaggcaggcatccctgacgtacggacggcggccatggggacgcaggcgccggagaactaccccgccgagaaggacgcgaggagcgcgcgggagaaagccattgacgactggctcccgatcaccttg

SEQ ID NO: 116399 - DNA, 842 bp, Zea mays
  Clone ID: MRT4577_37638C.1
cctcgaggccggccgggccgggtattcaaaaatcctcctcctactcctcctgccgaggactggaacgccccgcgtcctctataaacgagacgcccggccatttggtctgagtccaatcctctctgttcccctgcctacctgcttccagctgcatccctgacgtacggacggcggccatggggacgcaggcgccggagaactaccccgccgagaaggacgcgaggagcgcgcgggagaaggccatcgacgactggctcccgatcacctcgtcgcggaacgccaagtggtggtactccgccttccacaatgtcaccgccatggtcggcgccggcgtgctcagcctgccctacgccatgtccgagctcggctggggccctggcatcgcggtgctggtggtgtcgtgggtgatcacgctgtacacgctgtggcagatggtggagatgcacgagatggtgccggggaagcggttcgaccggtaccacgagctggggcagcacgcgttcggggaccggctgggcctgtggatcgtggtgccgcagcagctggtcgtcgaggtgggcgtgaacatcgtgtacatggtgaccggcggcaagtccctgaagaagttccacgacgtgctggtgtgcggcgacacgggggtgtgcgaggggaaggacaacatcaagaccacctacttcatcatgatcttcgcgtccgtccacttcgtcctctcgcagctccccaacttcaactccatctccggcgtctccctcgccgccgccgtcatgtcgctcagctactccaccatcgcgtgggggcgcgtcggtgcccaaggggaggatgtcgggcgtcgactaccactg

SEQ ID NO: 116400 - DNA, 203 bp, Zea mays
  Clone ID: MRT4577_3763C.1
ctcacgcgtccgcggacgcgtgggatcgcgagggccgcccttttttttttttttttttttttaaaaaacaatgcgtgggggaaatttggaagaagctcaaataggtggacagacattttgaataccagtattcatcccaaaaagatgatgcggtccacataatctggcggtccttgtctataaaggtgccgccaattaaactt

SEQ ID NO: 116401 - DNA, 1695 bp, Zea mays
  Clone ID: MRT4577_37640C.1
cggaagtctatttgctccagtccaccactgctctctgaatttctgctccctagctagctagctctccagtctccactgctgaaaggcgtccgtcgtcgtcgagatgaggcccgcccgcccgccgacgatggagatgcaaccaccaccgacggccatgcaaggccggagaagcccgcgaccgctggaggagtcgatcgagagctggcttcccatcagctccagcaggaacgccaagtggtggtactccgctttccacaatgtcacggccatggtcggcgccggcgtgctcagcctcccctacgccatgtcccagctcggctgggaggtcggcgtcacggtgctggttctgttgagggccatcacgctctacacgctgtggcagatggtggagatgcacgagtgcgtcccggggaagcggttcgaccggtaccacgagctcgggcagcacgcgttcggcgagcgcctgggcctctggatcgtcgtgccgcagcagctggtggtggaggtgggcgtcaacatcgtctacatggtcaccggcggcacgtcgctgaagaagttccacgacacggtctgcggcgacagctgcacggacatcaagctcacctacttcatcatgatcttcgcctcatgccacttcgtgctctcccagctccccagcttgcactccatctccggcgtctccctcgccgccgccgtcatgtcgctttgctactcgacgatcgcgtgggtcgcctcggcgcacaaggggaggtcgccggacgtgcactacggcctgcgcgcgacgacggcgccggggaaggtgttcggcttcttcggcgcgctgggggacgtggcgttcgcgtacgcggggcacaacgtggtgctggagatccaggccaccatcccgtccacgccggagagaccgtccaagaagcccatgtggaagggcgccgtcgtcgcctacgccatcgtcgccgcgtgctacttccctgcctcgctcgtcggctactgggccttcggcaaccaggtcaacgacaacgtcctcgtcagcctcagcaagcccaagtggctcatcgcgctcgccaacatgatggtcgtcgtccacgtcatcggcagctaccagattctatgccatgccggtgtttgacatgatagagaccgtgctggtgaagaagctgcgcttccctcccggcctcacgctgcgtctcatcgctcggaccctctatgttgccttcacgatgttcatagccatcaccttccccttcttcggtgggctgctcggtttcttcggcgggttcgccttcgcgccgaccacctatttccttccctgcgtcatgtggctcgcaatctacaagcccaaaaggttcagcctctcctggctgaccaactggatctgcatcattcttggggtgctcctgatgattctgtcgcccatcggagggctccggcaaataataatggacgcgaaaacctaccagttctactcgtgagctctaccaccagccatgacttgtgactgcacgattggagaaatctgtcaaagcctcaaccacgagtttttgtttttgttttttgtcatgccaaacacatacatatacgtactgtttttttaatattcaaaggtgttcttcgtggcttgcgtgtgtacagtattatgtgtatgagggagacataagtttaatgatgctggctgtcaaagataatggcggttcaatt

SEQ ID NO: 116402 - DNA, 429 bp, Zea mays
  Clone ID: MRT4577_37641C.1
ggaatcgtccgggcggcccacacctacgcgtccatggacgcggccctgcgcgcaattatgcccaacctacacggagcaccctgtgaaggtgatcaaccgtctgattgtgggctctgccatggctctggggtggaagtctggggaccacaacaagcgagatccagaacctgttggccgagaagagctctttacgagccaccaacccctgtatttcccccaccatatgggcctggcgggaggagctatatacccttgccagcgcgccctgctaccccatttacgcgttccggcttcgccacatttacagcgaagaggagaccgcgccgatggagcccacgcccgcgccgtcaggagcaaatgatgggaagggagaggaaccgatctgcatatatctgaactctttccacacttttttacaaaggagcgtgt

SEQ ID NO: 116403 - DNA, 498 bp, Zea mays
  Clone ID: MRT4577_37642C.1
agaccattccaagttgagcagcggagtttagctgaagcgagttacactcagcctggctgggcactatgtgaagggtggtaaacgaatcctcttccacctatcatttccttacggaaccttaccactctagtcttcctacaacccgtcacttccgtccggtgtcttcgcacctccattccttcctttcctttaaccgttaatgatcactgggggaatgctaataatggaaagagatctgaggccactgccaaggattctcctgctgcctattacatggctttgttaagccagttgtcggaacccagggacaggcgatgtaggttaaggattacatatgaatctctttccgaggcggagggaggcgtatgattgttttcgcgtaccaggcccgaagggctctcttgctgcttggttggccagcgccgacttcgggtgtacctgtttgtgttccaagtcaatttgaaggtgttcgtatttcgtattattagccgacctttt

SEQ ID NO: 116404 - DNA, 393 bp, Zea mays
  Clone ID: MRT4577_37643C.1
cccacgcgtccgtgtgtccacgcttgccagatagtcgttcattcgatcaaattccaagtgatctttcagaaaatcacaactcacctagtaatcgtgctgaacattcaataacatcaaattctcatacaccagttccattaagcagtactgagcaccttgctatagacgcttatattgaaaatttgctaactggtggttcttcattaacaccatctaaatttacatctcacatgaactcaactgcgccagtatctacacaaaatactttatttggatatccaatgccggtagatttgttttccgctttttatgccggtgctgtaaccactggtggtttgatcggctattttaaagctggttctaaaccatcattagcagccggcttattatttg

SEQ ID NO: 116405 - DNA, 845 bp, Zea mays
  unsure (1)..(845): unsure at all n locations
  Clone ID: MRT4577_37644C.1
caaaagcaaggaagaagacttggaactctgctagctagcagtagccagtagctagtgctaccttcccctgctccgacctctatctgtcgttctgtctatctcgtccgtcgccgtcgagccggctatggagatgcagccacagctcggcgactcttctccggaggacaagctcgccagccgccctctgacacccggagggcgctggccggactcgcagtggcggcccgcagaggagaaggccatcgacgactggctccccatcaacgcgcggaggaacgccaagtggtggtactccgccttccacaatgtcaccgccatggtcggcgccggcgtgctcggcctcccctacgccatgtccgagctcggctggggccccggcatcgcggtgctgctgctgtcgtggatcatcacgctgtacacgctgtggcagatggtggagatgcacgagatggtcccgggcaagcgcttcgaccggtaccacgagctggggcagcacgcgttcggcgagcggctgggcctgtggatcgtggtgccgcagcagctggtggtggaggtgggcctcaacatcgtctacatggtcaccggcggcacgtcgctgaagaagttccacgacacggtctgcggcgacgacgaccaccggtgcaagggcagggacatcaagctcacctacttcatcatgatcttcgcctcctgccacttggtgctctcccagctccccaacttccactccatctccggcgtctccctcgccgncgccgtcatgtcgctttgctactcgacgatcgcgtggatcgcgtcggcgcagaaggggaagtcgccggacgtgcactacggcctgcgcgcga

SEQ ID NO: 116406 - DNA, 427 bp, Zea mays
  Clone ID: MRT4577_37646C.1
cttggtttgtttttttttttttttaattttttttttatattttttttttttttttttttttttttttttttttttttttggctccgaagctgtcgatcacgacgagaggttcattcaattacacaaataactgggtacatacagaagtgtttgtttttcaaaggccctatttgcacagcaatgtaaatggccgccctgcacaatttttttttaaaaaatgaaccttgagtccttgacatctaaaaaaccattttttgtttgacttattcaccggagcctgtacacttccatgactttaagctagtttcgcgacggccttttttcaaatccaccttttttcctgctcactaagtcctacggcatgtgggttcttaacattttgtcccaaatcaaaaaaaattggtgggagtagttttttttggttcct

SEQ ID NO: 116407 - DNA, 937 bp, Zea mays
  Clone ID: MRT4577_37647C.1
ggccgggccctcaaatcctcctcctcctcctgccgcagcccgcagagaggtggagttgtcaacgtgccgaggactggagcggcccgcgtcctccgtctctataaacgagacgcccggccatttggtctgagtccaatcctctctgttcccctgcctacctgcctgcctgcttccagctgcatctctctccgccgaccgagaccgagaggaggaggaggcaaggcaggcatccctgacgtacggacggcggccatggggacgcaggcgccggagaactaccccgccgagaaggtacaggacgcgaggagcgcgcgggagaaggccatcgacgactggctcccgatcacctcgtcgcggaacgctaagtggtggtactctgccttccacaatgtcaccgccatggtcggcgccggcgtgctcagcctgccctacgccatgtccgagctcggctggggccctggcatcgcggtgctggtggtgtcgtgggtgatcacgctgtacacgctgtggcagatggtggagatgcacgagatggtgccggggaagcgtttcgaccggtaccacgagctggggcagcacgcgttcggggaccggctgggcctgtggatcgtggtgccgcagcagctggtcgtcgaggtgggcgtgaacatcgtgtacatggtgaccggcggcaagtccctgaagaagttccacgacgtgctggtgtgcggcgacacgggggtgtgcgaggggaaggacaacatcaagaccacctacttcatcatgatcttcgcgtccgtccacttcgtcctctcgcagctccccaacttcaactccatctccggcgtctccctcgccgccgccgtcatgtcgctcagctactccaccatcgcgtggggcgcgtcggtgcacaaggggaggatgtcgggcgtcgactaccacctgcgcgcgacgacta

SEQ ID NO: 116408 - DNA, 426 bp, Zea mays
  Clone ID: MRT4577_37649C.1
tatgacctaggatgcacgcgtccctcagcccggaattcggctcgaggcatgtgccatttcaagcaggacatacactagggacaaccgacaccgaaagggttttgcttccttacgcttcatggtccttgtgcaagtggtgctacctgatccatttacccacaatgctcacaggctacaatatcttatctttttcctccatacctctcaccagcgacgacttgaatgtgtgaaaacccaattgttcaaccctacaggatccaacatgcaataggaacaggcatcttaccattatcacccttgatccttcaacataccgcagccctattacatcatatacctttggcccatttggcggcacaagacatcaaggctcaacaactacaacaacttgggctagcaaaccttgctgcttactcttaccaacat

SEQ ID NO: 116409 - DNA, 283 bp, Zea mays
  Clone ID: MRT4577_3764C.1
gaccaaacgaggtctggtgtgctcaacacttgtaaagcgttcagtgcccaacgaagacgaagacgaatactgcaccttacacaacatgcagacacggaaatataccaagaaagaatgggaggactttaaagaggaatcgaataggatggcgcatggggagtgcacagtaaccatagagtttgtccagagggtcggggacaacgcgcgtcgtttgcaagaagagaaagaggaggacaacttgccagaggaagagatcatggagagcttcagctcggcggaagaa

SEQ ID NO: 116410 - DNA, 321 bp, Zea mays
  Clone ID: MRT4577_37651C.1
aaaaatcctttttttttttttttttaaaaaaccccaaccatgaatgtgcatgcttcaggccaattacaaacttttgggtcacacacgtcctggaataatattgatttttataacaaaaacgggatctttgtaaactcccccaacagcggcatcgccttgcgggggacaacgaaatgccttgcttgcatggacatatttataatcctacattttatatttcaacggacgtacgtatttttactagcttggacaaattttttaccctgccaatggatcgatgggcgtgatcagaatccctggaagcccaaggggacgcccctg

SEQ ID NO: 116411 - DNA, 340 bp, Zea mays
  unsure (1)..(340): unsure at all n locations
  Clone ID: MRT4577_37652C.1
aaacaccaccctagctaccctacctatggggcggttgcaacacattcttctccggcaagggcaccaacgtccctccccctgtgtacaacaacccctcgtgaccaccccaaaatctacccaagcaatctccgacacctgcttcacacccggcaccgaacctcgcacgtttctccccatattccgcgcgacccaaaaaccttattccagtacccacaactacccttcacaccgagttctaccaccaataccganaccagcccagcacctgaattgaaggtcatccacttcccttgacaccgtctccacttatctaggacttacacacctttcggcccaacag

SEQ ID NO: 116412 - DNA, 442 bp, Zea mays
  Clone ID: MRT4577_37653C.1
aaaaaaaaaaaaaaacacggggggtttaatgggggggggggaaacaaactgtgggtttttttgtgaaaaacagaaaaaaattctctttgattaaaaccaacacccgaaaaaaaaccaaagggggttatttcccccagataaaaattgtgttgaaaccaaaaatcctctttttgaacttgggggagaacccccttatgggaaatttctaaaaaaatgaaagcgctttttataggatccaggttcgtccccaaatggggggaaatgatggtgaaaatatgattccgggggaaaagcgtttagctgtttgaatggcacaaacttttgatgctgaaagtaaaaaggaaaaaccgcgggggccctttgggggggctgaagtaacataaatttgtgtgccctttattgccccttttgtaagtgaaaaacttgggctgacgattgtttt

SEQ ID NO: 116413 - DNA, 659 bp, Zea mays
  Clone ID: MRT4577_37654C.1
ggtgaaggcgctgcaatattcatacagggatcgacgcattaagaagagagacatgcggtctctttggattgagcgcatcaatgctggtacacgcctccatggggtatgtatcgtttacaattgaggctcattttctatccttggcccaaagtctcttttcatggtgacgctaaaacaaacaattctcagaagacaccagctttgttcatctcatgcaagtagaatgggtcgccagagctttggaatgtttcgaaacttaggcagtgcagtgcccatgcttattatagtaccttggttgtttgtccaggtgaactacggcaattttatgcatgggttaatgaaggagaacatccaactcaacaggaaggtgctctcggagctgtcaatgcacgagccatacagcttcaaggctcttgtcgatgtgtctcgcaatgcatttcctggcaacaggcctgttcctgccaaggaggggctaacgagcattctgttaacgtttttttcccaataattaaacttgatggtttacatctacatctgaaaatgacctgtctgcttgtaacgttacgaggaggttgtcacgggcattgcacgtgttattcctctatttttccccatctatctaattgcatgctttgtaccccatgcttataagttctctg

SEQ ID NO: 116414 - DNA, 305 bp, Zea mays
  Clone ID: MRT4577_37655C.1
tgtacgcctgcaggaccgacccggaacgcactggccggcccgacccacgcgtttttccttgcgcccgatttctactgatagtctatgagctggcaaaaggaatcatatcgaagggactgtgaacgccgataatgttgacttggaccaggagctacaggcgaggatggaccgaacgaacgactgcattgctatgaacaaccgcacctgggaggccgtggagggacatacctccaagactgatgagcatggccacgccgaaagccactgtgtcgccatagacatagtcaatgggaaaaaagaccaag

SEQ ID NO: 116415 - DNA, 177 bp, Zea mays
  unsure (1)..(177): unsure at all n locations
  Clone ID: MRT4577_37656C.1
aattcggnacgaggctaacgccctcaggggaagcatcatgcaagtcacacgctccgacatgatccttccggtatggataaatgggaaggtccatgactcaatcgtccatctgcttaaccttccctgatgctcctttattatcaacagtcaggaactaacctaacactgctgcgctaa

SEQ ID NO: 116416 - DNA, 927 bp, Zea mays
  Clone ID: MRT4577_37657C.1
gtgttttatttaaaaaaaaaaaaaaaaaaaaaaaaaaaaaaacctagccttttcactgctccagcgaaggcacagccgccaccgtttcttgatctcccatcttcatcttcttcgtagcgccggcgctccatcttccgctccctcccttagtcgcgctcggcacgcgggtgacggcggcagtggcggcactcaggatcgggctctcagcgacggcatcagcggtttcccctcccgcttctctccagtcgcctcgcgccctcgcctccggtcctccgcacaccagccggtgaccctccatatagggtgtgagactaccaaaactcgaaaatgaacaagggaaagatttttaagctagccaagggattcagaggaagggcgaaaaattgcataaggatagcaagagagagggtggagaaggcgctgcaatattcatatagggatcgacgcaacaagaagagagacatgcggtctctttggattgagcgcatcaatgctggtacacgcctccatggggtgaactacggcaatttcatgcatgggttaatgaaggagaacatccaactcaacaggaaggtgctctcggagctgtcaatgcacgagccatacagcttcaaggctcttgtcgatgtgtctcggaatgcatttcctggcaacaggcctgttcctgccaaggaggggctagcgagcattctgtaaacgttttcttcccaataattaaacttgatggtttacatctacatctgaaagtgacctgtctgcttgtaacgtgacgaggaggtccgaaattgtcacgggcattgcacgtgttattcctctatttttttcccacctatctaattgcatgctttgtacctcatgcttataagttttctgaagaacgtgttccattcggtcttcttgcttgtcctgaaaaaaaaaaaaaaaaaa

SEQ ID NO: 116417 - DNA, 244 bp, Zea mays
  Clone ID: MRT4577_37658C.1
ccttcttttttttttctttttttttggagggcaaaaggcggggctagagatacccagattatgaaataacgccaccccctttcacggggggggacttcataagggataaaacagggccctacgttgtttttcaggtaaggcgaaccacaacaacaaaaaatcccccaaaaggggcacagctccccccagccccatgatccacggacaacaatttgaaccaagcgcaagggcccaggtccccaaa

SEQ ID NO: 116418 - DNA, 328 bp, Zea mays
  Clone ID: MRT4577_37659C.1
ggccgacccaggtcccccacccgagaagagacaaccgcgtgcccctcgcggatgggctccaaaaccccggagccaggtgccgccgcgggactggacgacaggacaccacagacgcaagcgcgcagaggccagacagccggtctgtgtcgcgcccctccgtggcaggcccggctcattagaagcgggtaccgcggctctgcgtacagggaacagagctgccgcccaccatccaggcagaaggggttggccattggcggcgacaagaggatcccccgacacgacgccgagatccggcaggaggaccgcggcccagcgaacgtcccaacgg

SEQ ID NO: 116419 - DNA, 320 bp, Zea mays
  Clone ID: MRT4577_3765C.1
ttttggtttttctcggaacagtatgggtttccttcacacaaacaagaatgagtgacacaaggtgacactggattcccatttcacatgtagagaagtgtcatacatgcaccaatgaaatgtacatgttacacaggcacatagaccatttggcgaaaacatgtagtgtaacgaaacacccatggcaagtcaacaccactgaaactgggtatatacagtgcgtagcctactccagatgacatgtccaacagatgcaccgtagccacttaggacccttgttaacgagaatgcacactgtgtcacataaaacactccgatccggt

SEQ ID NO: 116420 - DNA, 350 bp, Zea mays
  Clone ID: MRT4577_37660C.1
gcgctcattgttgtgttccctaacatggcccccatgagggagctagcgtttgcacttgagtgtttctgggatgggaagagctccgctgcggatctgtagaacggtgctaccggcctcagggccagtatctcgctgccgatggcggatgctgggatcaagttcatgccgagcaacagcttgtcgtactatgaccaggtccgtgacaccactgacatgctctgaggtgtacccggacgctactcatggactggaggagagatagggttcgacacctacttctgcatgtgccggggcaacgccactgtgcctgctattgaaattaccaagtgggttgacaccaactaccactt

SEQ ID NO: 116421 - DNA, 118 bp, Zea mays
  Clone ID: MRT4577_37661C.1
cgcatctagttgttgtcattgattaactgacaagatcagtaagctgtttgtctcagacaattacatgctgtagatcatacttgtcagaaacctgatatgttgctttgatagtgtcaaa

SEQ ID NO: 116422 - DNA, 439 bp, Zea mays
  Clone ID: MRT4577_37662C.1
cgggcccggaattccggggtggcccacacccgtccgggaggtggatccattacctcctattttaatttttgcttaaccccagggttggggccctccagaggagcccacccttgtcccaactttccatttaagggggtggctggttcaataggccaatcttatatcctaaggctggcctttatttagtctataggtcctagttaaaataacaaatgctgcttgcagcctgggatattgggggggggaccacattgtggatggcttatggttaagaaggtaatgtatttttttggggaggggtaatattgtggcattatttttggcaccaatgttgcttggggtaaaaaaaaaaaaaaaaaaaggggcggccgtttataaaggacccaggtttacttccccgtccatgcaacgtattattcctcttttggggccacttaaa

SEQ ID NO: 116423 - DNA, 348 bp, Zea mays
  Clone ID: MRT4577_37663C.1
agaactgaatgtacctgtgttttttattattaacttacattaactttgtgaaaaaacaaaattaaaactaacggtttaaaaaacatatgtttgaaaaacaggaacaccaaattttttctgggccttttaaacaaacaaggggcatacacatatatagaagacaaaattcctgtaaaaaaacccctacgtggttgcaagtcctcccaaaaaaatttcaggggctatcgtccagatctttgggccgccacatttttttaaaaaaacaaagccggtcctcgccccccttgggggaggacatccccacctaaaactgtacggggttgggcatgctttttaggggaattaaaa

SEQ ID NO: 116424 - DNA, 289 bp, Zea mays
  Clone ID: MRT4577_37664C.1
cagggcggctggaggaagccaagaaggttatccaggacatgccgatggagccagacgtcggcgtcctcggtgcgctcttcggcgcgtccaagatacacggcgacgtcgacctgggcgaggcgatcgggtggcgcgtcattgagctggatccccagaacagcgggcgctacgtgttgctggcgaacctcctcgccacggccggccggtgggaggacgtggccagggtccggcggctgatggacgagcggaacgtgagcaaggaagcagggcggtctgtgatcgaggtcca

SEQ ID NO: 116425 - DNA, 347 bp, Zea mays
  Clone ID: MRT4577_37665C.1
gtgccttgtgcgacagtcgccagcctgccccgcctgccggcccggccgcccgcctgcccgcggcactgagaagacgaagctccgggctccgggacgccgagcagaggggaaaggatggaggacaaggcgtccaacctagacgccgtgctcaaggaggccgtcgatctcgagaacataccgatcgaggaggtgttcgagaacctccgatgcagcccgcagggtctcaccacggagcaggcggagcagcgcctcgccatcttcgggcccaacaagctggaggagaagcaggagagcaagttcctcaagttcttgggcttcatgtggaacccgctgtcctgggtcatgga

SEQ ID NO: 116426 - DNA, 538 bp, Zea mays
  Clone ID: MRT4577_37666C.1
tccacgcgtccggcaatttacatagtgcaaaacattcatcacaatggacgtggatcggtcgccggagaagggctcagaactcggcggtgttgccgagctcgcgctgccggcgcctgaacgacatgagcccgtccgacacgatgctcccgccgcagtcctcgcactcggcgctgctgccggtcaggtcgttgttatactcggtgccgccgtcgtcgttgtcgaggtcgccccgcatggcgcggagggtcttccgagccatctcgcgccggacgccgccgccctcgtcggccaccacgcgccggagcgcccggtccgcgccggccgcgcgcgccaggccgcggaaccggaggctgccacggctcatcgcgtacatcgccgacacgcaccactcctccaggcccgccgccgccgccgccgcgccgccgtcggagaggaggatggcggagacggacgccacggctcccgcgttcatgagcgcgttgcgggcctcggcgcaggctggcacgttgcaggccacctgagcgcaagccttccgacg

SEQ ID NO: 116427 - DNA, 762 bp, Zea mays
  unsure (1)..(762): unsure at all n locations
  Clone ID: MRT4577_37667C.1
cggccgggctaaaccctcacttcaactcaatatagtttgnacaacaacaagaactcagaatgccagttggtaaaccagtcaataccctcaagggttcctggaagcgtctcttgaacgatgagcgtttgcgccgctcttctcaagtactttcagttgtcgattcaaacgtctgcatctttggtggtgaagtcaagcctcgggagcccatagacgacaaggtcgatgtggttcccctcaagtccaatgcaacaaacctggaaacaaaatcggcttcctcagcacccagcccaagagtaggaagtgcatctgccgttctcaatggcaaaatgcacttattttctggacgcggcggtatcgacatggcacccatagaggaacaaggcgcagtgtggtgctacgaccccacaagctcatcatggacaaagatcaccccagctgattcatcagcgccctttccaccagcacgtagctatcattgctctactagtgacggcaaggagactttcttcctccatgccggatgtcctgaaaaaggacgcctatccgacttatggatgttcaacatcaataaccgtacatggacacaggcaccagatgctccaggctcccagcgtggaggcgcttcaattgcctaccatgatggcaagctctaccgaatgaatggcttcgacggtacgactgaacagggtggcagcgttgacgtattcgacactgccaacagcacatggtccaccgatacttnttgaagctgatggctacaac

SEQ ID NO: 116428 - DNA, 276 bp, Zea mays
  Clone ID: MRT4577_37668C.1
atgaaccaacaaaatacttttatctcgcagtcaaaccaaccaaaccaaaccaaaccaaacaatcccgctagctgttgctgagtgctgacacacacacacactgacacaccggaccggagcggaaagttgagtgcgaaaccagacgcgagtctctgatgacttcgctgcgtgctcgtgctccacgagtctcgatccgacgacaaatcaaaaccagtcggacaagttggcacacttgctgagctgagctgagcttgtacaggaagagattgattaagc

SEQ ID NO: 116429 - DNA, 231 bp, Zea mays
  Clone ID: MRT4577_37669C.1
acataacttcaagttgttggaaattattttcggaggtcccagtgaacaccatctactgggcaccgtgaaatttcacaaacatgcatatatatatgaaaaccactaacatgagcttccttctccacccacacccctttctcacgcacttcacataccatctatagttggcaggacacgccacctctgggctcgtccctggtccccacatcagggccgttctccgtcacatac

SEQ ID NO: 116430 - DNA, 283 bp, Zea mays
  Clone ID: MRT4577_3766C.1
aaaaaaaattgatactattacattacgccgaccaaacacttgataaattggttaaggcgcaggctgcgcgctcaacacttggggtgcaaagacccaaggcattttggcctgtcgcagattgaaaaacgggttgccaatagcgggcgtctaccaattcatcttttctcgcttctcaacgtaacccttacctattctaaccgggacacacgcaggagttaccaaaaagccccaaacgtatggtatgggggcgcatggcctttttcacgcaaaccaatgcttactt

SEQ ID NO: 116431 - DNA, 399 bp, Zea mays
  Clone ID: MRT4577_37670C.1
atgggcaagaacaataagcgcaagcgtgagccaactcctccatcggaggagtttggtgactcggagtactcagaggaggagttctcctctgagtctgaggggtctccggctcccatcccctgcgtctggacgtacatccgggccgtggagcgctccgggcttgagggctcggatgagttggagtactcctcggatgaggaggactcagacggcggcggcgaggacgaggacgacgacgacgatgacgacgatgacgacgacgacgacggcggcgacggtgatgacagcggcaggggcggcggcagcaaggacggtgacggcggcggcagcaggggcagcaaccggggcggcagcagcaggggcggcagcggcggcggcagcaacggggccagtggctag

SEQ ID NO: 116432 - DNA, 468 bp, Zea mays
  Clone ID: MRT4577_37671C.1
atgggcaagaacaacaagcgcaagcgtgagccaactcctccatcggaggagtttggtgactcggagtactcagaggaggagttctcctctgagtctgaggggtctccggctcccatccccctgcgtgagtcgtctgacgactcagacgactcccaggggctcacgacggaggtctggacgtacatctgggccatcgagcgctccgggctcgagggctcggatgagttggagtactcctcggatgaggaggactcggacggcggcggcgaggacgaggacgacgacgacgatgacggcggcggcggtggcgacggtgacggtgacggcagcggcaagggcggcggcggcagcaaggacggtgtcggcggcggcagcaggggcagcaaccggggcgacagcagcaggggcagcagcaggggcagcaccaggggcggcagcggcggcggcagcaacagggccagtggctag

SEQ ID NO: 116433 - DNA, 459 bp, Zea mays
  Clone ID: MRT4577_37672C.1
atgggcaagaacaataagcgcaagcgtgagccaactcctcaatcggaggagtttggtgactcggagtactcagaggaggagttctcctctgagtctgaggggtctccggctcccatccccctacgtgagtcgtctgacgactcagacgactcccaggggctcgcggcggaggtctggacgtacatccgggccgtcgagcgctccgggctcgagggctcggatgagtcagagtactcctcggatgaggaggactcggacggcggcggcgaggacgaggacgaggacgacgacgacgacgacgacgacgacggtggcgacggtgacggcagcggcaagggcggcggcggcggcagcaaggacggtgacggcggcggcagcaggggcagcaaccggggcggcagcagtaggggcagcaccaggggcggcagcggtggcggcagcagcagggccagtggctag

SEQ ID NO: 116434 - DNA, 471 bp, Zea mays
  Clone ID: MRT4577_37673C.1
atgggcaagaacaacaagcgcaagcgtgagccaactcctccatcggaggagtttggtgactcggagtattcagaggaggagttctcctttgagtctgaggggtctccggctcccgtccccctgcgtgagtcgtctgacgactcagacgactcccaggggctcgcggcggaggtctggacgtacatccgggttgtcgagcgctccgggctcgagggctcggatgagtcgaagtactcctcggatgaggaggactcggacggcggcggtgaggacgaggacgacgatgacgacgacggcgacgacgacgacgacgacgatggcgacggtgacggcatcagcagcggcaggggcagcggcggcgacaacaaggacggtgacggcggcggcagcaggggcagcaacaggggcggcagcagcaggggcagtaccaggggcggcagcggcggcggcagcaacagggccagtggctag

SEQ ID NO: 116435 - DNA, 118 bp, Zea mays
  Clone ID: MRT4577_37674C.1
acgcgtgttcggactcgtggttcggagcatcaccacaccagccttggtccagggctatcacgagctattcagtggagacgaagagggctacagctcagaggctgcaggttgtcgccat

SEQ ID NO: 116436 - DNA, 441 bp, Zea mays
  Clone ID: MRT4577_37675C.1
atgggcaagaacaacaaacgcaagcgtgagccgactcctccgtcggaggagtttggtgactcggaatactcagaggaggagttctcctctaagtccgaggggtctccggctcccatccccctgcgtgactcgtctgatgactcagacgactcccaggggcttgcggtggaggtctggacgtacatccgggccgtcgagcgctccgggctcgagggctcggatgagtctgagttctcctcggacgaggaggactcggacggcggcgaggacgaggatgacgacgacgacgacggcaacgacgacgacggtggcgacggcgacggtgatggcggcaacggcggcggaggcagcggcggcaagggtggcaccaagggcggcagcagcgtgggcagcaccggaggcggcggcggcaagggcagcggcggcagggccagtggctaa

SEQ ID NO: 116437 - DNA, 347 bp, Zea mays
  Clone ID: MRT4577_37676C.1
ccggccggagttcgcagcatcctgcagcatgcagcagaagagcagcgcctgagctccaaaataatggccgagaatggcctgaaggagttgggaatgtgttcgagccccatgctgatcagtgtggagtgcgcgctgcggctgaaggacgtccagtacgagtacgtcgacgaggacctcgtcaacaagatcgtcgacctgctccgccacaacccggtgaccgagaaggtgtccgtgctcgtccacgacggcaagccgggcgcggaggccaccatcatcgcggagtagctccacgaggcctggaagggcgactaccccaccctgttgggggagccctacgagcgcgccca

SEQ ID NO: 116438 - DNA, 872 bp, Zea mays
  Clone ID: MRT4577_37677C.1
aattcggcacgaggctccctccagtctccacacacacgcgcgccattgccgctgctgctcatcgtactcccaaatggagcagcctgcattcccctcttgctccgtggagcgcattcgctccagcacatggaagctgtgacgcatcgccgctgccaaatcctccacccgacggccaacgcttttctctcgggtctagtcggggtggagatccgtcaaggccatctcgtcgcgttgttggtcagtaatcctagctcgcttggacgaagcaaccagcactatggttcttggatgacaaaattggagcaggccactgctcacactgcagcggtgtccatttcttcgtgtctcggttcttggccccgtccttcctgatttctctgcttttcatactgaaaaaatcctcaaacctttcatccttaatcccctttctcggttccaagggggcttaaaccctaccctactgcctttttcatcttaagctccgtatctcgaaaaatccatcccatttgcatgagcattgcttcaattgcctggctgcacagcaggatcttgcgatgcggctcatcttgttgtggctctcgatctgggccgtgtgctccgctgcctcggcgggggctggttcagacatggaggcactgctggagttctcccgaggcatccggcaagacccgtcccgccgccaggccattccctggaaccccaccagcgcgctggactccgacgactgccccgtcgattggcacggcgtgcagtgcatcggcggccagattctttccattgcgttcgacggcattggtctcgttggaaatgctagcttgtcggtgctagcgaggatgccggtgctccggaacttgtccctgtcagacaacaag

SEQ ID NO: 116439 - DNA, 185 bp, Zea mays
  Clone ID: MRT4577_37678C.1
atatatacgaacactcactgccaggatcagtcacctacctgcatgagatgcaaagcaactgcggacttgaacaccagatcaatgagggagagccaagagcagattgaggagacgaatgcttgacgcgcgagcttactgtgctggcagcctaaacgacacctctaatgaacgcctgcttgctgagt

SEQ ID NO: 116440 - DNA, 3651 bp, Zea mays
  Clone ID: MRT4577_37679C.1
ctgtggcctccccgcccggtccggccgtgcgccgcggggtgtgccagcccgccctcagcggccggccactcgtcgctcgtggttactcaagtactcttaagcgcgcaatctgctgatggcgcagtaaggaagcatgctgaagaaagcctcaagcagttccaggagcagaacctccctggattcttgctctctctctcaggtgagttggccaatgaagagaaacctgaggagagccgcaggttagctggcttgattcttaagaatgcactggatgcaaaggagcagcacaggaagaatgagcttttccagagatggctggcactggatgctggtgccaaagcacaaattaaaggattgctgctgcaaactctcacatctcctgttgcaagtgccagatccactgcttcccaagttattgccaaggttgccggtattgagattccgcagaagcaatggccagaacttataggatcattgcttgcaaacatacatcaggtccagccaaatgtcaagcaagcgacgcttgagacacttggctatttatgtgaggaagtttctccagatgctgttgaccaagaccaagtcaataaaatacttacagctgttgttcagggtatgaatgcttctgaggcaaactctgatgtcaggcttgcagctacacgggcattgtataatgctttgggctttgctcaggttaatttctcgaatgacatggagcgtgactatatcatgagagtagtttgtgaagcgacacagtctccagaggtgaagataaggcaggctgcttttgagtgtttggtggctatctcgtctacttattatgataagctggcaacagacatgcgggatatatttaatataactgcaaaagctgtgaggggagatgaggagtcagttgcgctccaggctattgaattctggagttccatatgtgatgaggaaattgacattctggatgagtacagcagtgaatttacagctgattctgatgttccttgctactactttatcaagcaggctcttcctgccttagtgcctatgttgttagaaactctcctcaagcaagaggaagaccaagacttggatgaaggtgcttggaatcttgcaatggctgggggaacttgtctgggcctggtggcaaggaccgttggtgatgacattgttcctctcgtaatgccttttgtggaggagaacataaccaagtctgagtggagacaaagagaggctgcaacatatgcctttggctctatcttggagggcccatcagctgataaactggctcctcttgttaatgttgcattgggcttcatgctgtccgcgctgatgaaggatccaagtaaccatgtgaaggacacaactgcttggacccttgggagaatctttgagtttcttcatggttcagcgcttgaaactcctcctatcattacggccgagaattgtcagcaaatacttactgtgttgcttcacagcatgaaggatgtcccaaatgtggctgaaaaggcctgtggagccctctattttcttgcacaaggctatgttgattctgggtctgcatcgccactatcccctttctttcaagatattgttcagaaccttcttatggtcactcacagggaggatgctggggaatctcggctgcgaacagcagcatatgagaccctaaatgaagttgtcaggtgctccactgaggagacggctgctattgttatgcagttagtacctgtgatcatggtggaactccatcagacacttgaagctgaaaagctgtcaactgatgagagggagaagaggagcgaactgcagggcctcctttgtggttgcttgcaggtcattattcaaaagttgggagggatggagtcaactaagtactctttcttgcagtatgctgatcagatgatggaactgtttttgagagttttcgcatgtcgaaatgccacagtgcatgaggaggctatgcttgctattggtgcattggcatatgcagctggtccaaactttgcaaaatacatggcacagttttatcagtatttggagatgggtcttcagaactttgaggagtatcaggtgtgtgccattaccgtgggcgttgttggtgacctctgtagagcactggaagacaaaattttgcccttctgtgatggcatcatgactcaactcctgaaggacctgtccagtaaccagttgcacagatcagtgaaaccaccaatattttcgtgctttggtgatattgcactggcaattggggaaaactttgagaagtatttgatctatgcgatgcctatgctccaaagtgctgctgatttgtctgcccataccactgcaactgatgatgagatgctcgactacaccaatcagctaaggagtggaatcttggaagcctactctggtatcctgcaaggatttaagagttcacctaagacacaactgctgatgccattcgctccgcatattattcagttccttgatgctctgtacaatggaaaggatatggatgatgctgtgatgaagactgcaataggtgtcttgggagatctggctgacacattgggtgtccatgctggccctttgatcaatcaatccacctcaacccaggcatttttagaggaatgcttggcatcagatgatcctttggtgaaagaatctgccgattgggcgaggatagcagtcagccgtgcagtttcgggttgatgccacagtgagtcttgagtctgcacttgcatccatctacatatcatcatgcctgggtctttaattgcttcatgtccagacatgctcttcggagaagtccaacatttttacagcagagtctgagggtcctcactaactcatgcatcactacatgtgtcaacccgcccctcttgcttcggcgggaaaagagggttcaagctggccgtctgctaactttttctaaaggcatctgcaaccttcatttcttattggaggtgagatgtgagcttctattgtcgcatgacatgctgaccagtttccttggcatgtcaagcgtatgatctgtggcctatcatttccccttgcattcatctcatgcattgaacattggtcggatggtcacttgggacaacaggtccagttgcttgctgctgctccagtaagcaagagcgggctcaaacgcattgtcacaggattatttttgtatcgatcagggtggccaagtccatgctgatagtaggatgttaatttcctagcattcttttcctttcatccacttgcattgtctttgcatttcattcttggtcggattgttttgtaagagttattttagggcaaaactttgtcctgtctggtctgctaccgcacgctatttgtaagtcaagttcatgcgtgcattggtttatttacgggtgctattggagcagcgggtgtttgtgcttttttccatcttgtttttggtaatatacatacatgctgctccatttcggattatcaggagctgggcgggtgaagagacagttttataggtctttggagttgtttttgccggggcagaggcagttgagttggctgtgatatcttttgtgatttatgaagaaacaaagtgaattgagaataatatggtgaaatgtaaatggtcttcatttcccgcttgggaaaaaaaaaaaacaaccgtgcaggctggggtctaaaaaaaaaaag

SEQ ID NO: 116441 - DNA, 369 bp, Zea mays
  Clone ID: MRT4577_3767C.1
gcagcaactgacccctgctcattgttttggtttatttttcatctaaattaagatctattaatttataccaacataatggataaggttactcttgcccgcgttactaaagttcttggtcgcaccggttccactggtcaatgtacccaagttaaagtagaattcattggagaaaataacagatctttgatccgtaacgtcaaaggaccagtccgtgaaggagatgttctcactttgttggaatgtgaacgtgaagccaggaggttacgttaagaacagtgatgttcttttaactgaacagcaaaaatattgctgtttagttattaactgatttgtttaaacaaaatattgatttactcaattgtttttcgc

SEQ ID NO: 116442 - DNA, 408 bp, Zea mays
  Clone ID: MRT4577_37680C.1
cggttgtgtgggccgcacaacggcacgattcttctactccgtccgcgtagctctcggtttcggcgatgtcagagcgcggcaagggcggtaaggggctgggcaagggcggtgccaagcgccaccgcaaggtgctgcgcgacaacatccagggcatcacgaaaccggcgatcctgaggctggcagtaggggcggcgtcaagcgcatttctgggctcatctactaggagacccgacgggtgctcaagatctttctcgagaacgtcatccgtgacgccgatacctacaccgagcacgctcgcagcaagaccgtaaccgccatggatgttgtctactgcctcaagcgccaaggccggacgcttctacagtttcggtggctaggccgcatccccttctgatgctctgatatgac

SEQ ID NO: 116443 - DNA, 220 bp, Zea mays
  Clone ID: MRT4577_37681C.1
catcccaggttagccttgaactttaagcgcggtggggccctacatcccaaatattggtcaaaaacaggcgcatttgccaactaaaacaccataaaatgttgaagcccctggtattacaacagaccaattgatgattaaaccggtcgatgaaccagtatctccaacagccaaaaagtttaaagctggtcctcaaacttagaaagaggggttatctgttcct

SEQ ID NO: 116444 - DNA, 299 bp, Zea mays
  Clone ID: MRT4577_37682C.1
aatcttggccccccgcaaaaggggggtctgacttgagaacatgataaaacaagagggcgaagcccgtcaaagggggggggtggaaaaaaacaatcctggtccggggaaagggctttccgggttaaaccacttgccgccctggggggggggttgccaatttgaaaggaaggaaccgcctatggggggggggccaatccatgggccatggccccaaccaccaacgcaagaggtttccaaggcgccgggttccgcaaaaaaaccaaacaaggtggctggcttttgggttctgaacgaaaggc

SEQ ID NO: 116445 - DNA, 272 bp, Zea mays
  Clone ID: MRT4577_37683C.1
ctcacaccctgattcaaacgaatggctctagaatctctggaggtccaagaaacgagcaaccggtagaggtagcttttcacgcagctgtccggtcgtcgcagtgagcgatccagaaggcttgctaaaaaaaggcgagatttgtcctgtttcgccggcctaccgttccgggtcgtggtggtcttgttacccccatcaacaaccgtccgtcatacaggtcgtacggacgcgcacgtgtgaccggaggaaaaaaaaaacaagagaccagtaccact

SEQ ID NO: 116446 - DNA, 111 bp, Zea mays
  Clone ID: MRT4577_37684C.1
cacgcgaacagcctgctttacccttgtacctggggctaggaaaccattactatcggggtgacccgctcgcgcaagttagcaccatcccgctctagacctacagctggatca

SEQ ID NO: 116447 - DNA, 511 bp, Zea mays
  Clone ID: MRT4577_37685C.1
aagcacaataacaagccacacttgccctttcaattcgcgaccgacgacaaccggccaccatgagctccacggcagcggcggcaccggagtgcggcggcgccaagacgtcgtggccggaggtggtcgggaagagcgtggaggaagccaagaaagtgatcctaaaggacaagcccgacgccgacatcgtcgtgctgcccgtcggctcgccggtgaccatggattaccgcaccaaccgcgtccggatcttcgtcgacacagtcgcccagacgccccatgtcggctgataagctagctagctgcttctgctgctgcatgtcagtgctacttccttcgcgcctccctccagaacatgaataaaatacgacgatcgaataacgcggacacatgccatgtatgcatgtcagtgcatctgccgaaaaaataatggatgtatacgtgtttctttcatactataaattatcactacataatggcatcgttcttatataaataaatgtatcagaatgtcgtt

SEQ ID NO: 116448 - DNA, 446 bp, Zea mays
  Clone ID: MRT4577_37686C.1
ccctactttcatcacttattgctaggataggactttccttaccagaaagacaaggcgcgaagcgatgccgccctcttggttttgatttcctcacaagtatacttttccgggaaaaagagattcatacaacttcctttctgcctccaccttactcaccggctctcgcttgtcagtttggctttgtgaatttgaaataccctctctcctcgcttctaggctagggattggctcgtatcctggttgagaagaagcagttttcaagcttgacttttcttgtaataaatgatagagcagagcactcgctcgtcaactcgctactctctccccttctacttgtctaggcttcatacccgaaagatcaactggcgcaagcacattcttgaaagataaggccagagaatagtaggtatagcgctgttgtaggttaaaaggaggaagaaatagct

SEQ ID NO: 116449 - DNA, 150 bp, Zea mays
  Clone ID: MRT4577_37687C.1
aaaaaacagataggatgggtcatcataatgggggcatcgatatacatagatacctgactgcgtaatgcagatgcctcatgagaacaccgagagctgaatcctcacaaatgcagacagaagcacaacgtgtaaccatacggagttgacatg

SEQ ID NO: 116450 - DNA, 297 bp, Zea mays
  Clone ID: MRT4577_37688C.1
cccacgcgtccggttcctgcacgaacgcacgcaccgggacaccaggaaacaccccaacagacgccactgtccagtgcgcgcgtaaagcttgcttaactagccagccatggcctacctcggcgacgtctactggaagcccgtggccatcaagggtctccacggtagatacatctccggaaggtaagctcgcaacctccaggccgccggaccgctcaatccgtagatcctgagcagacgtcgcagtggccaattacggagaataaagcgtatactttgacctggacgacttctggcaca

SEQ ID NO: 116451 - DNA, 430 bp, Zea mays
  Clone ID: MRT4577_37689C.1
agaacacgtggacgcatgcgtttccaatactcactgtcatacgcgtctatgagagtatagcaaaagctcatgctgagatcaactcactgtgactctttatgtgcacatgctaactgaaatgattgtgcaatctgaatctatatatctgttccatgcttggctgatcgacaggatctctcctatgaggatcacatctgcgaattgcagtaccagggcttattgtatggattcctgagtctgctgcgaatttattgcagagacatagtacgggcggacattttagagaacccaagatcccgatcgcgcgcatgctaagacatatctcttttataatgccacctactgtctattaactggccactcttttacaactaacagactgacagaaactgtggaatacactactgaatctcctagcaacacatcctac

SEQ ID NO: 116452 - DNA, 2600 bp, Zea mays
  Clone ID: MRT4577_3768C.1
ggactgcttgaaaatgttggagcttcaatgtgtccagatcattcggattggtttggaactggtggacttgatgctcagtcgcgaaatgctgatagatcagttgttacaaaatttttgcaagcacatcctgcagactatgcaactaagaaactgcaggagatgattcgcttgatgaaacagaggcacttctcagcagctttcaaatgctactggaactaccacaagatcgattctctttcaaatgacaatttgtattacaaaatggttatccatgtgcataatgattctgtttttagacgataccagcaagagatgaggagaaaccaagggctgtggcctctgtatagaggtttctttgttgatgtgaatttgttcaaggcaaacaataagaaggcagctgaactagccaaagatggtaacactttactgaaaaatatcaatggtgccttggattcaaatggttcagttgtggatggtttggctgatgaggattcaaatctaatggttaaactaaaattcttgacatacaagttgcgaacatttttaattcgtaatggattgtctacccttttcaaagatggaccatctgcttatagaacttactacctaaggcaaatgaagaactggggaacatcaacaaacaaacagagagagcttatcaaattgttggacgagtgggctgtattcattagaaggaagtatgggaataagccactctcatcctcgacatatcttagtgaagcagagcctttccttgaacaatacgccaaacgaagccctgcaaaccaggctttgattggggctgctggtaaccttgttcaaactgaaaatttcttggccattcttgacgcagagagggatgaagagggtgatctccggacagatcatggggcagcaccttctggtcctgtgtcaacatctgttgatgtggttcccaaaacagagggccttatagtgttctttccgggtatacctggctgtgcaaagtcagctctgtgtaaggaaatattgaacacacctggtggccttggagatgatcgcccttttcatagcttgatgggggatcttattaaaggaagatactggcaaaaggtcgctgatgaaagaggaaagcggctcgctagaataacccttgctgataaaaatgcaccaaatgaagaagtttggaagcagattgaggatatgtgtgggtccacaaaggcagctcctgcctctacattcaaatccattttctctttgctctttcatcctccagcgggtcaatcatcctgttagtagtctatatttactcatgcaaatttgttagtcatttttatgcattgtgatatggctgatattatattaacttgtcatttaaaagggaaatctggacaaggcctcacctaatgcaggctatgttttgctaatgttttaccacttgtatgatggcaagagtcgaagagaatttgaaaatgaactttatgaacgttttggctcccttgttaagatgcctctcctgaagccagatagagcgccattgcctgatgcggtgaaagccatcttagatgaggggattagcttgttcaagatgcatcggagcaggcatggaagagcagagccatcaaaaggttcatacgctaaagaatgggcacaatgggaacaaaggttgcgtgcgaccttgtttgggaatgctgatcatcttaactcaattcaggttccttttgactatgctgtgaaagcagtactggaacagttaaaagctgttgcaaagggtgatctcaaaacacctgatactgggaagcggaagtttggaaatatcatgtttgctgctgttcgattaaccccgcctgatatattgggccttctccgtaaggtggcagagaaggacacggctgtcgacagttttgtgaacaagataagactggaggacaacctaacgaaggttcacgtcacccttgcccacaaacgaggccatggtgtgtctgctgtcgcaagctatggcatctaccagcaccaggaagtccccgtgtcattcaacgcattgtactacactgacaagatggccgctctcgaggcacagctgggagcagtaaacgatgagccgatcaattccaggaacgagtggccacatgccactctgtggacggctccaggcgtcactccaaaggaggcaaacatgctgccgcagctggcttcagaaggaaaagcagaacgggtgccgattgaccctcccatcaccatatcgggggtggtggacttctactgatttgtctcctcggttttaggatacggatgtgcagaggtgaaggtggaataaagaataatttgctgctgcgggccttacgttattagctgattgtggacaagacaatcgtcgagtcttacaccacataaatttttgatactataggactgacctggactgctgcatttctacttccatgttttccaataagtgcaagataccatcgattttttaagccagcacttagcactagaggagataattatctgtatagcaagcacatcattctactttctagtgtatttttgaatttccagaggccgtttgacaggacagttgaccagaaataaagttcgtgttggtggtttgttcgccc

SEQ ID NO: 116453 - DNA, 328 bp, Zea mays
  Clone ID: MRT4577_37690C.1
aacaaacacaagcaaaacaaaaaacaaaacaaaaaaaaaatttaacctaaaaaaaaaaaacaaaaccaacgggggacaggggggggactcctaaaaccctgacccaacccaacctactcggccagcagcacatccccctcctcccagctgccacaaaaacgaaaaggcccgccccgatcgcccaaccaacaggcgggcaacccccagggcgaaccgaactcaccctgcagcggagcaccccccgcggcgcgggcggtggaaacacaaacagggaccgaacacccgccctaaccctagcgccccatcctgaacgtccaaccgccccccc

SEQ ID NO: 116454 - DNA, 303 bp, Zea mays
  Clone ID: MRT4577_37691C.1
gaacctgcccctggctcacgcccgatggcaagaccttattgttttttggagcaccgcaaccagggaggcgggcggggcgccaaacaagcgcacacagaactcacctttacccaacacgacgagactgtcaccaacgactaaattgctggtgacctgaacgagcactgtattaaaccagtcattcccgaacagtacctcgaccagaagacaatcttccaccctaacccgcttggccgcttcgtcatccgcggacctcacggcgatcctggccttactggccggaagatcatcatttacacctaa

SEQ ID NO: 116455 - DNA, 504 bp, Zea mays
  Clone ID: MRT4577_37692C.1
atgccgggctcgcaggcctcgtgctttatggccatctatatccaagaggctgctcgtggtcaaggagtccagaaaccgcgctcatgctcgtctgaagctgcgtttctgaagaaaacggtggcgtcagattttggctgccacgactgctaccaagtggccgagtgcaccatcccctgggctggtggagtaagtgaaaggccggaatgggcccgtgggccggcttgcgacagcgtttctctgggcttctcgccgtcgtcgtctcctgtagcaaaccaaagaaaccacgttttgttttgctgccttgctgctggtacaggacaggagcacgattcaccaatcacacctgcagatgaaccactctcaggctctcagctatcgccatcgccaccagcagatgaaccactctccatcagggcaagggaaacaacacggctcatgagcaacatcagccacaagtcaggcagtgcgaagcttagcgcatcaaccctaaacaaagaccgatga

SEQ ID NO: 116456 - DNA, 427 bp, Zea mays
  Clone ID: MRT4577_37693C.1
caaaaaacccccccagggggttccgggccacaaaaaaaaaagggggccttcccatcccttaattaactttggggaaaggggaattttctgggttttctgggataaaccaacctggaaggaacaagccccccaagggacgggggttcaaaaaaagggggggggggggtttggtccacgggggaaagcatccccgcctgccttaagggaaaccaaatttgcccccgggggccgggcaaaaaaaaaatacctgggggggggggccaccccatttttttggggcccaagtaaaaaaaaaggggggccaaaaaaacctttggttttggtgttttccaggggccaacggcgaaggggttggcgggccccccattttcccccagtatttttttaaaattttaaggggggtcccccggggccaaaagaaactggg

SEQ ID NO: 116457 - DNA, 2634 bp, Zea mays
  Clone ID: MRT4577_37694C.1
atgtcgggagctcacgccaagaaggagatggggaccggcgagaagcccgccacaagccacgggaaggctccatcgggggagtccgccaacaagaagagggaggaatcacctcctcgcatcaagtcgcaccggagtggcgacaagaagaagaaaatgaagaaagtggtctactacgagactgattctttgttgccctccacctccggctcggacgcgccgtccgtcacttctaagcgccatgagcgcaaaaagtttagtaagatccccctacgctatcctcgcatttccaaacgcacccctttactttccgtcccactaggcaaaccaccggttttttacggtgaagattattgtatgtggagtgataaaatgaggcaccatctaacctcactccacgctagtatttgggacattgttgaatgtggtgcgcaggaaccatccgtgggggatgaaggctatgactcggacgaggtagcccaaatccggcatttcaactcccaagccacaactatactcctcgcctctctaagtcgagaggagtataataaggtgcaagggttgaaaagtgccaaagagatttgggacgtactcaagatcgcacacgaaggagacgaggtgaccaagatcaccaagagggaaacgatcgagggggagctcggtcgcttcatgcttcaccaaggggaggagccacaagcaatgtacaatcggctcaagacattggtgaaccaagtgcgcaacctcgggagcaccaaatgggatgaccatgaaatggtcaaggaagtgataggaaaatttgtgagctttgaattaatgatcaaaggctccaagaaaatcatcgagcaaggcgccacctctacatccgaggtgctacccgtcaccttcaaggcgacagaggaaaagaaggaattagagtctacatcaagtaggattcccatcgacgcctccaagctcgacaatgaggagatgactttaatcatcaaaagatttcgccaaatcctcaagcaaaggagggggaaggactacagaccccgctccaagaaagtttgctacaagtgtgggcgacgacaagaagggagaaggaaggagaataagaagtattacaagaagaaggacggcgatgcccatgtatgccacgagtgggactccgacgagagctccaccgactcctcttccgacgaggacgccaccaacatcgccgtcaacaagggcctcctcttccccaacgtcggccacaagtgcctcatggcaaaagacggcaaaaagaagaaggtaaaacctagagcttccactaaatatgcaacaactagtgattatgaggatgatttgctcaccctttttgccaacttaaacatgcaacaaaaggaaaaattgaatgaattgattagtgctattcatgagaaggatgaactcttgaatagccaagaggacttccttattaaagaaaataagaagcatgttaaagttaaaaatgcttatgctcaggagatagaaaaatgtgaaaaattaactagtgagctaagcacttgccatgacactatttccaaccttagatgtgaaaatgataaattgattgctaaggttgagaaattaaatgctaaagatttacatgtttgcaaagtttctatttccaatcttagagatgagaatgctatcttacatgctaagattgtagaattaaatacttgcaaaccctctacatctatcgttgagcatgttactatttgcactagatgtagaagtattaatgttgatgctattcatgatcaactagccttaattaaacaacaaaatgatcacatagctcaacttagtgctaaaattaatgagcatgacttagaaaatgagaaatttaaatttgctagaagcatgctctatagtgggagacgcccaagcattaaggatggcattggcttccaaaagggggacaatgtcaagcttaatgcccctaagaaattgtctaattttgttaagggcaaagtagttgccaaatatgttgggggcaaacacaagggatcaaagacttgtgtttgggtacccaaggtttatgcatccgggggctcaagttggatcattgatagcgggtgcacaaaccacatgactggggagaaaaggatgttctcctcctatgagaaaaaccatgatccccaaagagctatcacattcagggatggaaatcaaggtgttactgtctttagaagaagtgatgattcagtagcatttaagggagtgttagagggtcagctatacttagttgattttaatagagctgaacttgacacttgcttaatagctaagactaacaagggttggctctggaatcgccgactagcccacgttgggatgaagaatctccataagcttctaaagggagagcacattttgggactaacaaatgttcattttgagaaagacaggatttgtagcgcatgtcaagcagggaagcaagttggtgttcatcatccacacaagaacatcatgacgtctgacaggccgcttgagctactccacatggacctattcgggccgatagcttacataagcatcagtgggagtaaatactgtctagttattgtggatgattattctcgcttcacttgggtgttctttttgcaggataaatctcaaacccaatag

SEQ ID NO: 116458 - DNA, 746 bp, Zea mays
  Clone ID: MRT4577_37695C.1
gtcttctatttcgctgattccatcactcaagaacaagctacctctttcctgactggtgtttgcctctctaactacaagtttgtgcaaaagtcatatattggcgtcgatgaatccgctcaattcaagagaattgcctccattgccgtcgttcacagcagcttcaaccttcaagacgaaagagtccaattctctcttcaatgcaccagatactctcttttctgcagacaaattttgagtgtcagagctctcgaagccaaccccgagactatgttggacctttgcagaagcattgcccaatccaactccaagatttccattgaagctattgttggaaaggaactccaagaaaagggattgaacttgatctactctgtcggtagaggtgctgccaagaagccttgcctcgttactttgagctacaagggtaaccccaacagagctgatgatgttttggctttggtcggtaagggtgtctgcttcgactctggtggtcttaacttgaagcccactggtttcattgaagaaatgtggagtgataaaggtggtgcttgcactaccctcgctattttcaaggctgctgttgaattgaacttgcccatcaacttggtctgcactatggccttcgttgaaaatctcgttggttctgatgcttatcaccccagtgctattatcaagagttacaaggggcctcaccgttgaaatcggaaacaccgatgctgaaggtagattgatcctctgtgacgcca

SEQ ID NO: 116459 - DNA, 340 bp, Zea mays
  Clone ID: MRT4577_37696C.1
attcggttcgagctttgttcgcaaagttttttctagatcgatccatcaacaattgagccggccgtcggaaccgggctagagggggctagccacctagacggcagtaatgatgccccttgaccgcatcgtcttttacggcggccccaacgccacctacgggcacaccaacaaggaggggggaggcggccgcctgttggtcgagcagttgaaaatgggcatgctcaacgacaaggtgccgtcggcatgacaggccctgacggaggcgaccactcatcccggtggggggcctgatactggtgctgtaggggttggcgcttacggcctccgtgggggggcttgg

SEQ ID NO: 116460 - DNA, 1923 bp, Zea mays
  Clone ID: MRT4577_37697C.1
atgtcgagagatcacgccaagaaggagatggtgaccggcgagaagcccgccacaagccacgggaaggctccatcgggagagtccgacaacaaggtgaatggatccccttcacacaacaagtcgcaacggagcggcgagaagaaaaagaagatgaagaaagtggtctactacgagaccgactcctcatcgccatccacctccggctccgacgcgccgtccgtcacttctaagcgccatgagcgcaagaagtttagtaagatccccttacgttatcctcacatttccaaacgcacccctttactttccgtcccactaggcaaaccaccggtttttgacggtgaagattattgtatgtggagtgataaaatgaggcaccatctaacctcactccatgctagcatttgggacattgttgagtttggtgcgcaggaaccatccgtaggggatgaaggctatgattcggacgaggtagcccaaatccggcaattcaactcacaagccaccactatactcctcgcctctctaagtcgagaggagtataacaagttgcaagggttgaaaagtgcaaaggagatttgggacgtactcaagaccgcgcacgaaggagacgaggtgaccaagatcaccaagcgggagacgatcgagggggagctcggtcgcttcatgcttcaccaaggggaggagccacaagcaatgtacaaccggctcaagactttggtgaaccaagtgcgcaacctcgggagcactaaatgggatgaccatgagatggtcaaggttattcttagatcactcatatttattaaccctactcaagttcaattaattcgtggtgatccaaggtataaactaatgtctcccgaggaagtgataggaaaatttctgagctttgaattaatgatcaaaggctctaagaaaatcatcgagcaaggcgtctcctccacaactgatgtgcaacccgttgcattcaaagcaacggaggagaagaaagatgagtctacgtcaagtaggctccccatcgacgcctccaagctcgacaacaaggagatgcaaagaagggggaaggactacaagccccgctccaagaaagtttgctacaagtgtggtaagcccggtcattttattgcaaaatgtccattatcaagtgatagtgacaggggcgacaacaagaaggggagaaggaaggagaagaagaaatattacaagaagaagggcggcgatgcccatgtatgccgcgagtgggactccaacgagagctccaccgactcctcctccgacgaggatgccgccaacatcgccgtcaacaagggccttctcttccccaacgtcgaccacaagtgcctcatggaaaaggacggcaagaagaagaaggtagaaaaatgtgaaaaattaactagtgagctaagcacttgccatgacactatttctaaccttagaaatgaaaattccaaaataattgctaaggttgagaagtcaaatgtttgtgatgattcaattgttgatcttagaaatgataatgctagtttaattgctaagattgacatgttgaatggttctcttgctagccttaagattgaaaatgaaaaattaattgctaaggctaaagatttaaatgtttgcaatgctactattaccaatcttagagacgataatgctattttacaaactaacattgttgaattaaatacttgcaaaccctctacatctaccgttgagcatgtctcaatttgcactaaatgtagagatattaatgttgatgctattcatgatcacttagctttaattaagaaacaaaatgatcacatagctcaacttagtgctaagattaatgagcatgacttagaaaatgaaaaatttaaatttgctagaagcatgctctatagtgggagacgccctgacattaaggatggaattggcttccaatag

SEQ ID NO: 116461 - DNA, 441 bp, Zea mays
  Clone ID: MRT4577_37698C.1
tcgctcgccgtcctcgtgttcgcgttcgccgtgttcgcgttcgtggtcacccaccggggcgcgggcggcgccgtgtccgggagcgggtacagggagtaccgcctcggggactactccggctggctgcaggcgcggatcgccgagccggagacgtggcggcgcgtcgagagctgcctctctgaggcgcgcgtgtgcggcggccgggaattctacaggcaacacctctcgccaatccagtccggttgctgcaagccgccgacgtggtgcaggttccggtacgtgaacgccacgttctgggaggcaccgagatcggggctgtctgcggcggcggtcagcgacggtgactgccgggcatggagcaacgaccagcaggtgctttgcttcgagtgcgacacgtgcaaagggcgcgtgctggagaccgccaagaagaagtggaagaca

SEQ ID NO: 116462 - DNA, 200 bp, Zea mays
  Clone ID: MRT4577_37699C.1
aaaaaaaaaaaaaaaaaaaaaaaaaataaaaaaataaaaaaaaaacaaaaaccaagaaaggggatggcaacaaagcaacgcaagcatgcaaagacaattactctactatagcgaaaggtaaatacaatttgctggcctttatatgacatagtctttccatgacaaaagccgcgatcaaacaaaatttaattgacttgcat

SEQ ID NO: 116463 - DNA, 317 bp, Zea mays
  Clone ID: MRT4577_3769C.1
gagaataagaaccgtgttcttaaaattcacgagaagccacctgctggatgtgtgttaaacacatacatacaggcattatcacggacgagacgggtgtcgccgaaacggcaggcgataaataaatcacaggcgctaaccctgaccggatcatatacataatcgttatatataaggcagaatacacgacgatcttgcacaaggcgtgggggacaaaatactgggccgctggggaggaggaaagcatgtgcacgacctcccgcatggggggcctgcccgaggctggctcctctacgtacgctatgttcaccctgtaaagg

SEQ ID NO: 116464 - DNA, 185 bp, Zea mays
  Clone ID: MRT4577_376C.1
gtttttgtgtttaccccgcaagcggatgcagacgcccggaggatgtttcgccttgggcttcttgacagggaaaccgtggtccctataggccacgtccacatcagtgggacagacacgaactaatcagggtcagccggcaacttctaaggagctgactgatggatggtgatcgcacactccctatc

SEQ ID NO: 116465 - DNA, 1159 bp, Zea mays
  Clone ID: MRT4577_37700C.1
aattcggcacgaggccgcctcggtcccttctctcctgtcgttcccccctcccctggcgattagctcccgcccgcctcccgccccgctccccaccgcgctcgctgcgctgcctgtcctggcgctgcgtcctgcggcgccgcgagagttggagggtgctcgtggcgggcagatccggcgtcggcgtcggcgtcggcgtcggcagacaggctcggaggtgagatcggcgtcggtggcggcggcggagcgcgcgaggtggtcgagggaggaatcggtggcgcgcggaggcgaggacgaggctgaggaggacgtcgagctcggctggtgctgcatgggggtatgaagcgcggcgccagagacgacgcactcatggggtcacagctcaagcgcccgaacgttggccgatccgatccgtcggctcagccacaacacatgcctgtgcccggtttagcgtctgcagccgcaccgccgcctcaagctggtgctcgggcgccggcgcagccgcaacagacatccggcgcggccttgaccaaccagaagctgacgacaaatgatgcgctcgtctaccttaaggcagttaaggataagttccaggacaagcgggagaagtacgaggagttcctcgaggtcatgcgcgacttcaagagcgagaggatcgacaccaatggagtgattggccgtgtcaaaacgctgttcaacgggtaccctgaactaatccttgggttcaacgccttcttgccgaagggctatgcgatcaagctacaagaagagaagaagcctgttgattttgtggaagctatcaatttcgtgaacaagataaagatagcatgatgaacgagtttacaaggcattcttggacatcctcaacatgtaccgcaaggataataagtctatccaagatgtttaccatgaggttgctaggctgttcaaagaccataaagatttgcttgaagagttccagcacttcctgcctgatacttcagtggccccacaagcagtggcatcaaagggtggtttggttaagcgggaggacaggagctctttagtgcctcctgcaaataagatccttcacaatgagaagagggacagagacatgctgagagcttgtctatcacatgctgaccgtgactttagtgttgaccgtcctgatgtggatcatgat

SEQ ID NO: 116466 - DNA, 333 bp, Zea mays
  Clone ID: MRT4577_37701C.1
ctgttccagcagagaacaatagccaccggaggagaccaatacacagaaccgcctatccccggggagacccgccaccataccacgtaagcccgcaagggcacgccacccaaccaaggaagccgggaaccgggggccacgcctcctagccctaggagacacttggctacggccttctccgccctgagaaacaggggcccggaggacctcccctcacaggacgagacgcacggcttcttggatcacctggcagggggggggggaatgtttaattcacccgcccgggcggccgttacgggcgaatcccagcccactgccaggcgtgactaaaggatc

SEQ ID NO: 116467 - DNA, 1344 bp, Zea mays
  unsure (1)..(1344): unsure at all n locations
  Clone ID: MRT4577_37702C.1
tgacaccaatggagtgattgtccgtgtcaaaacgctgttcaacgggtaccctgaactgatccttgggttcaacgccttcttgcctaagggctatgcgatcaagctacaagaagagaagaaacctgtcgattttgtggaagctatcaatttcgtgaacaagataaagaatcggtttcagcatgatgaacaagtttacaaggcattcttggacatcctcaacatgtaccgcaaggataataagtctatccaagatgtttaccatgaggttgctatgctgttcaaagaccataaagatttgcttgaagagttccagcacttcctgcctgatacttangtggctccacaagcagtggcctcaaagggtggtttggttaagcgggaggacaggagctctttagtgcctcctgcaaataagatccttcacaatgataagagggacagagtttacctgtcacatgctgaccgtgattttagtgttgaccgtcctgatgtggagcatgatcgccagagaagacgtcttgataaagacaaagaacggaaggtggaaagggacagaagggattatgagagagaagacaaggatggtgaacatgacagcagagacctggagctaggacagcgtaagcgaaagcctttttcaaggaatatcgaggataatgtaggtgctgagacacaccaaggaggccccagtgagaatcatggaatccacagtgtatctgcttcatcatatgacgataaggatgcgctgaagagtgtatacacacatgagttccatttctgcgagaaggtgaaggaaaagctggagcatgaagcttaccaagagtttttgaaatgtctacacatctatagccaagagattatcacaagaagtgaactgaagaacttggtgaatgatatactccaacattatccagatcttatggaagggtttaacgaattcttggagcattgtgaaaatatagatggatttcttgccggtgtcttcaacaaaaggccaagcacgagggctgttaaaactgaggataaagaaaaggatagagatcgggacagggaggacaaggatagagatcgggagagggagagagcttgtctatcacatgctgaccgtgactttagtgttgaccgtcctgatgtggagcatgatcgccagagaagacgtcttgataaagaaaaagaacggaaggtggaaagggatagaagggattatgagagagaagacaaggatggtgaacatgacagtagagacctggagatagcacagcgtaagcgaaagccttttcccaaggaagatggaggataatgcaggtgcgaagacacaccaaggaggccccagtgagaatcatg

SEQ ID NO: 116468 - DNA, 328 bp, Zea mays
  unsure (1)..(328): unsure at all n locations
  Clone ID: MRT4577_37703C.1
ggtgggttngggcccaaacaaaaaagcacttggaattttaaaatacactggcattttgcatattggacgacctgctgcacaatgggttttgaaacccattacattttaaaatacatggggaaattactggaagggttcaccagaaatttatctgggaatttcttttacaattgggtcttcaccaaaaaaaattggcggaagcaggggtttattttccaattcattttcgtaaaaaatatcggtgctggggggattggaaccatttgaaaaacgacaggctccaaaatggtttggttcaggggactcaaaacacaagccttttggtaaa

SEQ ID NO: 116469 - DNA, 407 bp, Zea mays
  Clone ID: MRT4577_37704C.1
ccaaaaacgcgcaggaaaactgcccattagattttttaagatagaagaaaccccattggtctaaagaagaccagggtcccgagaaaaaataaaaataaaacccgccaaaactgttcctaaactaaggccagatggggcccaaatttttggcacccgggagacaccaccttggagcggcgtttttgatattctgaataaacggggggccactaggagcatccccctaaaacacacaattattccgttgtttccaaagcccccatgccaccaacattacaggggggttaatccctttgcgcagggcataagggaccttggcctccaaattagcccaccaattttggaaaaccaaatcatccttcgggggggagaactgccgcaaattaaccagggagaaaattctaaac

SEQ ID NO: 116470 - DNA, 289 bp, Zea mays
  unsure (1)..(289): unsure at all n locations
  Clone ID: MRT4577_37705C.1
accggcaagggccaccggccgcaggcccccaccgaccgcgccgccaacgggaaggagcaccaagggcacccaggccgcgccagagcgaacgccccacaacacagacggggggggaggcccgcaacaacacacagagcgccacaggcaggccccaccaaaaaacggcgcaggaaaccacacccgccaaggcgccccccacagaacgcgggaccggacgccgaccccnggacgccacagccagctgaccgacccgcgcgaccagcaaaaacaccggcnggccaaagacaac

SEQ ID NO: 116471 - DNA, 565 bp, Zea mays
  Clone ID: MRT4577_37707C.1
ggccctaggggccttttttttttttttttttgtatataacctcgagcagtttcactgacacaaagtttgcagtctcagatacattatatagctaagtaaagatagccatcaaactgctaaaagccagaagaggcgattgtcaacggtataaatagagcatctaaatgcaagtcaaaaggcgtttctcaatgttttggtgagtttgagcaccgtgcttgcaaacagaaattattgaatggcatggccatatcccttctcaaaactatagaaccaaaattggacatagctggccagtatttagttgtcagccacttcaattagggtttgctcgtagtcagcaggggcctcaaatccatggaggttcatcacagttgcggctacattggcgagcccagggatttgaatgtcgttccggaatttcactccggggtgaagaccagggcctccaatggcaaccggcaccggctgaagggtatgcgaggttagaatctggataccaccattcttgtcgagcaacggcttgccagatttgttcccccgcgtactctgcgttgttaccactgct

SEQ ID NO: 116472 - DNA, 217 bp, Zea mays
  Clone ID: MRT4577_37708C.1
ccgatgtttgggcggacacatgggccaggcacggggaggttcaatgagagctgcatccctctccagatctcccactatgcctctcgagagggaagccagggaaagagaaagtcacccgaggggcgcatccgtacacaggccgacccaccggattgtgtcctgagacactggggctggggggggcccactgctcgatctgaggcacgctcgctgcacc

SEQ ID NO: 116473 - DNA, 497 bp, Zea mays
  unsure (1)..(497): unsure at all n locations
  Clone ID: MRT4577_37709C.1
ccgggtgagtggacaccatatcagcagagatgtgtttctgccatatactaatgcccacagatatcgtttatcaaaaagtcgttgaagccattgattcccttgaaggttgaatgtggtaagcaattggttccatgcatttataaaatcctcctcctcttgatcatatatacatttctgaaattcaacattgaatttcttataatcttcaacaactgcggagaggcttgcatgcattctgattcatatgccatacacaaattctatgatgagttccttgtagaactatcttgattgcttttgccatggctgcgtcttcatctgtcaaaatagtttgtggtttctttccagacatcacattcagaaaggttctaaacaaccaaataaagctctcagtagtctcatcatatagaagtgcagcaccaaaaatagttgtttttttatggttattgaccccaacaagcaaacctagaggacgtncatcaccaagntttctgtat

SEQ ID NO: 116474 - DNA, 254 bp, Zea mays
  Clone ID: MRT4577_3770C.1
gcaaccggcacgcccatcttgaaggagatcaaggtaccaaaggctctgcttggcggaacaggctactatgccattgcactgttcctcacaggggctaaatctaatgcattgggctatgctgcatcttatattatagctatagccgaccacttaagccatgagccctaatgatagagcggtcattactgtattgctcctcgcgtgcatcgctagcgcgatcgctcttgggtgccgcatgaactgacgctggagca

SEQ ID NO: 116475 - DNA, 204 bp, Zea mays
  Clone ID: MRT4577_37710C.1
gcgacagcatgggagtcaggtctcatagcttgcttcattacattgcagactgcataacggaacacatcgtttcctgatcggagacgatgtgttacgacagcattgatgctgctgctagcagcagcatcgactagaaaacgtcgtgcgcataggtggcgggcatgtgcatcatggataggacagagactatgtgttaaggacatg

SEQ ID NO: 116476 - DNA, 1513 bp, Zea mays
  Clone ID: MRT4577_37711C.1
acccggccacactagtccaaactataatacagacggaagaaacctgttcaccggcaccgcagcccgccccaccgcctaactattgactgtcggattccccacccgtcggcgacaaccgctgcccccgatccgtctgctaggtcttgcacctccgggctctgggcatggctgccgaagctggcccaatctccaaggtcctcatcgtcgtagcgatgcagacggaggcgatgccgctcgtccacaagttcaagctcgtcgaggcgcccgcccacgaatccacatttcctaaaggtgccccatgggttaggtaccatggcaactacaaaggcctccacattgaccttgtattgcctggaaaggatgctgttttaggagtcgacagtgttggtacggtatcagcagctcttttgactagtttttccattcaaacattgaagccagaccttatcattaatgctggcactgctggtggcttcaaggccaaaggggcaagcattactgatgtattcctgggcatcagatgtttcattccatgacaggaggataccaatacctgtttttgacatgtatggaattggagcacggaaaacttctgcagttcctaatatcttgaaggaactcaatttgaagattggcaaattgtcgactggggattctctgggatatgtctccccaggatgagaaggtgatactgagcaatgatgctacagtaaaggatatggagggagctgctgtggcatatgtcgccgacatgttttcaacgccagcgatctttgtgaaagccgtgactgatatcgtggatggggagaagccaacatctgaggagtttctgcagaacctgattgccgtgacggcggcactggacctggcagtcaccaaagtggtgggatttcatcagcgggaaacgcatctctgatctttgaaggctgtcatgaaatccgacacccccactgctctgatgcacgatgctaggctacgaacaatacaacattgggtcaacgattttttgtgaggtgttttctatgtgaggttaaaccttcttaaccctgtgtacaaaattcctgccaattgctatgggccggccatagcgtggaattttgtagaataatttgcaaaatgtattttgtggtgcaaatatcgatatataataatatgctgggggacgggatccccgtgggattagatgaaagaccgtgtgactgtgcctcactgaaccatgattcccttttttgtccagggcggacctaggtagtgcctagtgaggatacggaggtgtcctactcctaatccagatgttggaacggggatgtttggagcaacgtggactcggggccaagaaaggagcagtgtcagtcttgtcattgttgtctaagggtgtgtttagtttacttttggctttaacttttgcttcgtaaaagccaaaagctaaattaaaaagctggatctagaaagcagttttttctgaaaactgactttctcgtattataaaattgaaagcatgggattttcttgg

SEQ ID NO: 116477 - DNA, 648 bp, Zea mays
  Clone ID: MRT4577_37712C.1
atcaagaggaaactagccgcgttctcctctgcggacgcaacctttgtcccctctagatatagaacaacacgcctcgtccacccatacctctagaagtctagatctaggcctgacctgtagtttcctgatcgtgttcgcctcgatctcggggtaagctcagttcggcgtccatgatttgttcccatcacccgtttgttatctgaatcccaggtttctccttctgatcggcgagttggggcttgcggcgatcttggagaaaagacgggaggcaagctgcatctgcgcacggaagcttccgatctgcccggctggcgtctcagatctgttgctgatctgatgcttcacggcggatctggttgttcccggcggtctcaagtcggcgcagcggctggcggcgagttttccggcaagcacgtgggatcccgtctgctcctctacctcgtgcgacgacggccaacggctctttgtgttgataataattattcgatgatatgtcgataattattagatctaagagatcggaggtgacgtaaggtaagagcatgtaacaagcgaggtgcttgtggagagggcggagaagattgagaaaaaggagatgtgaacatctagaggcctttgccatgttgggtgcgctcgcatggcaggccg

SEQ ID NO: 116478 - DNA, 185 bp, Zea mays
  Clone ID: MRT4577_37713C.1
gacaaaacatggctgagaatgtgagaaccatgtgggcgccgatgctgtcacaggtagcgatggttgtggcgttggtgttttgttgagcgtttcatggagaggttcttccaatgtccacccagtcaagaacattaatgtcacctatggcaagaactgtctggacgcttaagcaacatggtatggca

SEQ ID NO: 116479 - DNA, 341 bp, Zea mays
  Clone ID: MRT4577_37714C.1
caaagctaaaaaattttttttaagcaaaagggggcccaaccccccaaaaaaaaggtaggggttgggatttgggatccatagggggggcgggtttaatggctccataaacatggaaattgggggacatgttttaataacaggggggggagccccacggtttcatttcaacacccgggggggggggggggatgtttaaaaaggggaggggccctggcctttttggtctccccaaatttaaaaaggttggctttttttgagggcgggctggggagaaggtttccatttttggccactgaacttaaaaaaaatttttttgggggttttggcctttttggggaaaa

SEQ ID NO: 116480 - DNA, 378 bp, Zea mays
  Clone ID: MRT4577_37715C.1
aaaaaaaaatttttaaggtccatttttaaacatagaacgcttaacgaaggagtttacatgggggggggaactcaaatccgggaaacaacaaagacctgggttatttttccgggcaaacaaattgggaaggggcttggaaaatggggacccacattttggcccccggggggaaaaaaaaacggggggggtaaggggttacccttccccttgggggggggccccccgttaaggggggggccccaaggggggccatgggtcccggtttttcttttgaaaaggttccccggggaaatcacaaacccaatttaaaggaaggcgggggcccccccccccaaaaaatccggggaggctttggcttggggggggggttaggggggg

SEQ ID NO: 116481 - DNA, 284 bp, Zea mays
  Clone ID: MRT4577_37716C.1
aacccctaggaaggtaaaccagaaatttttgggttgggggggaacctgcaaaaaaattttttggaaggggacatttaaggccccccacgaaaaaaaaatttttggggaaagccccccccccggggttgttttaagggcccccaccccccttttcggggggccccgggtgaaaaaatttcccggggaaagcaaaaaaatgccggcggggaaaaatggggggggaatgggaacccaccgtttggagaccttttacaccccccggacccggggggccccccgggaat

SEQ ID NO: 116482 - DNA, 371 bp, Zea mays
  Clone ID: MRT4577_37717C.1
atgcgtcccgtactactgaggccgcatgctggcctagtacgacgtacaagtatacctgggcatctggagactaccaatgcgacatctatagcatacatgctcattcaccccacgaatacctagacttacaaatataacactggctaaaactcgaagctgcactattgcagtctcgccttaccgatacgtgctgaccataatatcatgtgtgtaacaagggacacaatagtggcacgtctaaagcattgcgcgaacaggctcacactgccaccactacctttacagttccattatgagcagccattactagtggatctcctagtttgacaggttcgcgaacaaaaaatctgcatccttctcaaaacacacac

SEQ ID NO: 116483 - DNA, 632 bp, Zea mays
  Clone ID: MRT4577_37718C.1
aacgccaagaccaacttccccgtgccaaggagcggcaccggggagctgctggcccctgcagtgccggccgcacgggaggcgcgtggtggcggtggcggcggcaccagcctgtcgcagatcctcagtgccaagctccgcaggtgctgcaagacgccgtcgccgtcgctcacctgcctccgcctcgacccggagaagtcccacattggcgtctggcagaagcgcgccggcgcgcgcgccgactccagctgggtcatgaccgtcgagctcaacaaggacgcgccgccgccaccgtcctccggcgaggagccggcgcccagctacggcggcgcggccaccacgtccacgtccacgcccacgtcgtccactatcacggccggctcgcctccacctgagatgatggacgacgaggagagtgttgcgctgcagatgatcgaggagctgctgggatcacatgggatgatgctccaggtccagggtgcagcaggcagcctcgtcatctgaaggaaaccgcatggttcaacaagctattatgatatgatcaggacatcatcatcaggtcactgtcccagatcagaccaagcagttaagattgcatcatatatataatataggtacacctctattactacatc

SEQ ID NO: 116484 - DNA, 174 bp, Zea mays
  Clone ID: MRT4577_37719C.1
taggacggagcggaacgacccagccaagcgcagggagccaacgctgagcacgccgcacgccagggggaccgcagaaaaagccgccccgggaaccgagcgcgcccaccgaggcgcgcacagggcggcgacacgccgggcgcgcacacagacaacaccagagggcaggggccgggg

SEQ ID NO: 116485 - DNA, 307 bp, Zea mays
  Clone ID: MRT4577_3771C.1
gtatcttgatgacaacgatcacaccggcgcggtgtctcaacgaactgactgcaaggcaacactgaggtcaaggaatgtgtatgctataaaaaatgatgcaccatctccacacaaacattcatactaacgcatagttagagaactaaagacactgggcgaattcaatcacagaaactagatatagctgaacgaattttggtagacacgtaataatgcatgcatgccgattgatattatggaaaagggctaacgccatgacattctgtcgaaaattcggaaagctgacaagttaccaacaggttcaact

SEQ ID NO: 116486 - DNA, 210 bp, Zea mays
  Clone ID: MRT4577_37720C.1
ctcatctactgcatacggcatcgtgaatacttctaggatgattggtctgataaacaactatagaactacttatatgattattatcttgtgttttattgccctttccatatttaactctttacacatgttccagttcttcttaactttttctagcaccttaaactaataaatatcaacttttgctctgtctaccttctttattcacaattt

SEQ ID NO: 116487 - DNA, 554 bp, Zea mays
  Clone ID: MRT4577_37721C.1
tcgcccactcgtccgctcttctttttttaaaaaaaaaacttcaccagctctagatccacactgttgcatgagtacagaaagtcattggcttcgagaggtagcgtggtcagccccaaaagatttgtgatgacaactcaaatatgagcttcaacatgctctcctgaagctcgaagcagcaaaaggcttcaacaacacagtaaaaggtggaaatgcaaattttttctttggagagagacgaactacgggtattgagttcttcatgtgcgaatagattgcaatttataacagtttattgcttactggattagcatcgtctaatcagatctggcttcaagttacttagaagtcttacagatcacagtgaccagtgattgtacaacctttttctttttaatccctgttcgatttgtttcaaacccataaggattggacgagaccgaaaggatcaaatcttttatgactttagttatcagtttgcactatgcatttcgctggagaatatgaagttattttcatcagagttaacaaatgaggaaaaagttttgatcgccgct

SEQ ID NO: 116488 - DNA, 373 bp, Zea mays
  Clone ID: MRT4577_37722C.1
cctcatcccaatgctcaactccccaagggtctaggacagctccataatgtgcatgcttccgatcgcatccctcatggaacgaatgctcaacaacaagcactacaccaccaaagtcatctctgccattgctaaagcgaaccacggtgcactgacttagacactcacgcatgtacagatcaataccaaaaggaccatctgctctagcctggcagtgttcacaacgtggattcaacagatcacaattgcttcctctgacaaacaaaacaacattgttttactgatacatgctgaacaaaactgaaccaatccagtcaatccgactcattatacatgtcccctacgaagatactatctaaatggactatcatcgcat

SEQ ID NO: 116489 - DNA, 355 bp, Zea mays
  Clone ID: MRT4577_37723C.1
gtcggggagcgcgcctgggggaccgtcctcggcgaccacccggggggcatgatgcgtgtcacagagatggcctcccaaaagcacctcttggttccggcaagaacggcgaccggaccagcaccatcacctaagctcacatcttcgggagcctggagggcctaaaactgcaataggcactcgacaggagctcggtctacatcctggaccaccacgagcactacatgtcgctcgtgattgagggcaacaaactcaacgacaactttgtttacgccaccaggacgctcttgttactgcgcggcgactgaacgcttgcgccggtggccattgagatgagccttcctgagctccgggacgg

SEQ ID NO: 116490 - DNA, 720 bp, Zea mays
  Clone ID: MRT4577_37724C.1
ggccgcgggttttttttttttttttttggtatagaattatatattttcatccctgtgatgacaggcgatgttgttatatgaaggactttttatctcatactatactcggtatatattcagccctgagcaaagatctaaatcctaacccggccattatggagatgtagggtagggctggtggtaggtcttacgaaccaatatctcattcctccttcatctcaggagtaacctcccaacgccttccataaaagacagtgcccagaagctgagagccaacgatgtatccaaggtaggctccaacaacaatcgtaacgggccacttctgccactcacggtcccagtcgagagggatagggacagatccaagccacgctccaaccacggttccgagaaagccgccaaatgtctgatcgaaaggagcagacacaccaacaacggcctgcaggggaacgggatcggaacctcgaacgtagaagacaggatatatcgcgaggagggcgatgtgagcacagcacaagaaggtgtggggaacgtgagtgaggaacggcgcgccgaaaaggacaagtagaatatggagggcgggcgttaggatgagcgctagaagtaaagaaataacagcggtagggaaagactttgcttcccttccatccgatgacttcttcttctcaccgggacgcggcttcttagatgacaaggaggatcccgctggggggaagactc

SEQ ID NO: 116491 - DNA, 493 bp, Zea mays
  unsure (1)..(493): unsure at all n locations
  Clone ID: MRT4577_37725C.1
acctgtttttgtttttaaatttttttttttttttatttttttttcttttttttttttatttttttttttttttttttatcattattcatctttttcttattctcgcaaacacccccctacttcttttttcttacatctatcagccccatctcggggggggtttaatttctcattttccaccatccattacaactttaattccaaaactacccctcntaacataaccancctaacctttttcatcccccctnacatacaaaatccttatcttaatannanatnctacacaccatctttcttacatacttaaaaactaccnttacatttttctaaaaaacaaaatctatttctctataattttttgccccgacaaacaactcgaaaaaccccttaatttttttcctggcttttttttaaaaaaaaataagctttttaaccgctttttttttattcaatatttttttaaaatatactttataagcatttttccccc

SEQ ID NO: 116492 - DNA, 316 bp, Zea mays
  Clone ID: MRT4577_37726C.1
gttggccaccgtttgatcccaacaccgggcaaggttctataccccaaaaaagaaatgcactgtctcgacatgattcattgagagcccatgcgttggctaaactatatggagactcctaggtaaagtataaggaaacggcgcgctacacgaactactaaatgactgcctcatatgcccgcatattacaggctacaagcgcatgtgctacattgcgaatatctcaaactgtgaatgttactgccatggaatggtatggaacctgggcgaaaatgcgagggcgacctgctggtgacacgtgcgaaattgattcaaaaca

SEQ ID NO: 116493 - DNA, 415 bp, Zea mays
  Clone ID: MRT4577_37727C.1
gaacggaaacgggcggggcgacccacacgtccgccagaaataagaaatgtccttttttttttgtggcaagccacaaaacatcgggggggaccaaatacaggggggggagctatcaaaccttgctgtctactctaagcaacaccagttacctatggggcatttgatgacacaaaacatcagggcacaccacctacaacaactggagctagcaaaccttgctgtctactctaacaaacaacagcatctgacattcaaccaactagctgcattgaactctgttgcttatttgcacaaccaacaactactaccattcaggcagctagctactgcctaccatcggtaatatcttacattcaaccaactggcaacattgaactttaatgcttatagccaccaacaccaactactaccattc

SEQ ID NO: 116494 - DNA, 312 bp, Zea mays
  Clone ID: MRT4577_37728C.1
gctagtttttttctttttttttttttttcgggggggaatttaacagcccgaacgggcataaacaagaacatcagatacacgatgcctcccctggtctccaaagggaacgaagggaaacatacacctaaccaagatccatgacggggggggggcaccgagaacgcaaacactggaaacacacgagcggggggggcccgacccccaggatcttgacatccttgggcgcctcgggcccaaggggggagacgggcgggtgcaccctctcgaagacccccatgacctcgcccgcctccggggggctctgggggaccc

SEQ ID NO: 116495 - DNA, 595 bp, Zea mays
  Clone ID: MRT4577_37729C.1
tgtcagtgtgagcaatgacctgaatgaacaattgaaatgaaaagaaaaaagtattgttccaaaaaaaaaaaaaaaaaaaaaaaaaaaaaaaaaaaaaaaaaaaaaaaaaaaaaaaaaaaaaaaaaaaaaaaaaaaaaaaaaaaaaaaataaaaaaaaaaaaaaaaaaccaaaaaaaaaaaaaaaaaaaaaaaaaaaaaatttttttaccttccccggggggccgttaaaaagggaaatttttgaaaaattccaaaaaatgggggggggttggagatttaattaaaagggccaatttccccttaaagggggggttttaaaaaaaaatgggcgggcttttaaaaagggggtaatggaaaaaaccttgggttccccaaattaaatcccttaaaaaaaaatccccttttccccttttgggtaattcccaaaaaggcccgaccaattcccctttccaaaaagtggcccaccctaatgggaaaatggaccccccttttacgggggtataatgcgggggggggggggggttaaccccaagggttaccgtttcatttgcaagtgccattacgcccggtcttttgttttttttccttttttttt

SEQ ID NO: 116496 - DNA, 411 bp, Zea mays
  unsure (1)..(411): unsure at all n locations
  Clone ID: MRT4577_3772C.1
gggnccggaatcccggggcggaccacacgcgtccggggcacgctgggggtacagttccttattggcttaggttccaaactggcagtcttttaagggggttgatccgaatgcgcggggaaggatttttttggttattttttacgcaaccgtaatttggttggttgaaattaaaaacgtcgggatttacatcgggacggcaactgccggggggatatttaacgggtaattacttaaaataagttggggttccatttggttggtttttttcccaatgggggcgatcggtttaatggtggttttgggcagggggctaagtaacaaggccaaggccgggggttcacattaccaggagcagagcaatgaaggttaaggtgaaggcgaaacttctactttttaatgggaaaaggttaa

SEQ ID NO: 116497 - DNA, 1497 bp, Zea mays
  Clone ID: MRT4577_37730C.1
aactttccactgccgcagttcgccactctcgccatcggggacgagggactgggagccaggatacttctgccgcgcggcgaccggtcgagcgaaatcgatctaccccaggtgcgacggacgcagctttattctcaattttttctgtgttctttagagagcagccatggacgagtggttgccgtcacaatcctgttgcttatcgtagcatcttgtctgaaatcatctagaccataactccatagttctatctgggcttagtggcagtggcaaaaccactatttactaccagcttcgggatggatcatcacatcaaggaactgttacttcaatggaagaaaacagtgatacttttgtgctgcattcggagcaagaaaggaaagacaaagtaaaacctgtgcatattgttgatgttcctggtcatgctaggctcaagcccaagcttgatgaagtcctgcctaaagctgctggggttgtctttgttgttgatgctcaggatttcttgtctagcatgcaagctgctgcagagtaaattttgtgccccctgttttactttttagcaaatactattggtgtctatttcatctacttttactgtcctttgtggtaagttgaaattaacagtgtaattaggggaccttttcaaaccgagactgcagatattactctgtatgaatatttttctatagttaccgtttgtgtgactaggagatttcactgttcccaagattgcagagcattactctgtttcatcatttattagtgttgttaacatttcataacaatattatcatccttttgcaggtacctttatgacattctgacaaaagcatctgtagttaagaaaaggatccctgtgcttatattctgcaacaagacggataaagttaccgcccactcgaaggaattcatcaagaaacagttggagaaagaattgaacaagcttcgggaatcgaggaacgccatatcttcagctgacatctccgatgaagtccagctcggggtccctggagaggcattcaacttcagccagtgccagaacaaggtggctgttgcggagggtgccggttcaactggtaatgttttggccgtggagcaattcatccgtgaacatgtgagggcgtaggtcgttcttattgttctcagggctccaaatggctctcttgatctaatgaggcaagatgtacattgcgtcaatggggttgcctttcaatgggactcttcatccggtcctttgaagttgcttaaggatgcgtttggttgcgggacaaatgaggacggaatagaatgatccctgggttgggggatggaatgattcctggtattgtttggtcggagggatgagatgatccttgttttttgtttggttagaggtataaccggggatggattggtcctgtcctttgtttggtttgagagataactgttacacttgtccttcacaaaaaatggaattcagtcaaaatgcttgcagaaaaaaaaaaaaaaaaaagcggcctg

SEQ ID NO: 116498 - DNA, 928 bp, Zea mays
  Clone ID: MRT4577_37731C.1
ccccgcgtccgccccgcgtccgccccgcgtccgcccacgcgtccgcccacgcgtccgcagtggcaaaaccactatttactaccagcttcgggatggatcatcacatcaaggaactgttacttcaatggaagaaaacagtgatacttttgtgctgcattcggagcaagaaaggaaaggcaaagtaaaacctgtgcatattattgatgttcctggtcatgctaggctcaaacccaaacttgatgaagtcctgcctaaagctgctgcggttgtctttgttgttgatgctcaagatttcttgtctagcatgcaagctgctgcagagtacctttatgacattctgacaaaagcaactgtagtgaagaaaagggtccctgtgcttatattctgcaacaagacggataaagttaccgcccactcgaaggaattcatcaagaaacagttggagaaagaattgaacaagcttcgggaatcaaggaacgccgtatcttcagctgacatctctgatgaagtccagcttggggtccctggagaggcattcaacttcagccagtgccagaacaaggtggctgttgcggagggtgctggttcaactggtaatgttttggccgtggagcaattcatccgtgaacatgtgagggcgtaggtcgttcttattgttctcagggctccaaatggctctcttgatctaatgaggcaagatgtacattgcgtcaatggggttgcctttcaatgtgactcttcatccggtcctctgaagttgcttaagaagcagtgaggcgcaatcatattctgcactggttcagctgacccatgtttacatgttgcaatgtgtatgcctgacagtcatcggatatgaatagagcatggtataactgtctggctaaaaaaaaaaaaaaaaaaaaagaaaaaaaaaaaaaaaaaagcggcc

SEQ ID NO: 116499 - DNA, 1317 bp, Zea mays
  Clone ID: MRT4577_37732C.1
tcgaggtggcacgccgcacgtgccacggcctcttgtcctggtccgtccatctccctagcagctatactttcccactgccgcagttcgccactctcgccatcggggacgagggactgggagccaggatacttctgccgcgcggcgaccggtcgagcgaaatcgatctaccccaggtgcggcgggcgcggctttattctcaagattttttctgtgttctttagagagcagccatggacgagtggattcgccaaaccgaggtgtgggtgcaccaaaccgacagctggatccggcagcagcccccggagcagatctatgtagcggccgcggtggttgccgtcacaatcctgttgcttatcgtagcatcttgtctgaaatcgtctagaccaaacaccatagttctatctgggcttagtggcagtggcaaaaccactatttactaccagcttcgggatggatcatcacatcaaggaactgttacttcaatggaagaaaacagtgatacttttgtgctgcattcggagcaagaaaggaaagacaaagtaaaacctgtgcatattattgatgttcctggtcatgctaggctcaaacccaaacttgatgaagtcctgcctaaagctgctgcggttgtctttgttgttgatgctcaagatttcttgtctagcatgcaagctgctgcagagtacctttatgacattctgacaaaggcaactgtagtgaagaaaaaggtccctgtgcttatattctgcaacaagacagataaagttaccgcccactcgaaggaattcatcaagaagcagttggagaaagaattgaacaagcttagggaatctaggaacgccgtatcgtcagccgacatctctgatgaagtccagcttggggtccctggagaggcattcaacttcagccagtgccagaacaaggtggctgttgcggagggtgctggtttgacaggtgatgtttcggccgtggaacaattcatccgtgaacatgtgaaggcataggttgttcttattgtttttggggctccaaatggctatcctgatgagataagatgtacattgcgtcaatgtggttgttacctttcatgcatgtacaccttcatccggtgctctgaagttgcttagagacagtgaagcacagtcatattttgaactggttcagctgaccttgttatagaggcattgcatgttgcactgcttatgcctgacagtcatcggatatgaacagagcatgttgaaactgactggctttggttgttaaaaaaaaaaaaaccctaagttttactagcaaaaatgcctgtgctttgcaacgggtttc

SEQ ID NO: 116500 - DNA, 408 bp, Zea mays
  Clone ID: MRT4577_37733C.1
ttttttttttttttttaacatgtttataatctagaaaaatgcggccacataatggtctagtttaaccaacttcacacgaagcactatggcaacaaacacacatgggaacttgcgcctgctctacaactctggttgggagaagttgcagaacatagtgtggcatgcaatggagtccgacgctggccagccgttgcccgtcggggcctccgccttaggggtctaggcaactgacagcggagtgcatataggccaggagcagcagccgagcaagagcagtcgcgctcgcgccataggagcaggcgagcagtggttgaggactgggcggcgggcgctgaggaggctagggtctgtggctgagcgactctacgctctccgcctgtgggactgggccgctgagtcgctgtacca

SEQ ID NO: 116501 - DNA, 600 bp, Zea mays
  Clone ID: MRT4577_37734C.1
ccgacgcatgggataagatgccatagtggttgccggggatctgctccacgcgcataggcgttcgcctggcctagaagcgcccatgtccgatcgtccccctcgccccattcgccgatgccgagctccaccccgcccatgttccgcccaggccgagctccgcctccactgtagctccgccccagcgtctggcccaagtggtctttgccacgttcttgagctcccccaacaacacgatggggcagttctacgtggccgcatacgccgctgtgtacgacacgctcctttgcgcagctgcagcgtggacgccccgaggggaggaggaggagagcaaatggccagggaaagtctggtggccgagaactccgcagcgaaccgaagcatccggatgatgaatgggagctgccgatggactactgacacaaactcgccatgatagcattctgtttagtgctattgtattgccagaaaagtacatgctttgtacatataacataccagaggattgcgaattcagaaaagacgaaaggcactttcagccttgtcagagtttgatcgctttggcccgggtgggttagtataaaaagcgagattgtgttgcca

SEQ ID NO: 116502 - DNA, 1029 bp, Zea mays
  Clone ID: MRT4577_37735C.1
cttttattttttttttttagtcccttcgttattcactaccctctctcccctctatccattagatacagtccccgtttgctagcttgcacacaaatcgttccgcctccttccttttatttcttgccggagtcggggccaatcttttatcatctaatccgctgagagttctatgcgtgcgctctcgctttccattcattcccatcggtgcttccgtgcccgtatactattttcttgtggtcctcgccgaggtcggttcggttcaataaaaatagtatctcatcagggtgcgagcagcaccgccatccgccatggttctctcggttgcagcagctcctgttttccgtgcgggtatttcttcgccgccgtctttctcctttttccgggtacctttctcctccgtgccagtctttctcttccactttttttttcttttttttctttctttttttttttttttttttttttttggagggtagtaagtttgcatttgcatgaggaagggaaacaggcacaggcagggtacataggtactaagcccatgggcctatgtgaggcccaaaggggctcacaccgctgaagcaggtccgctggtcgtcgacgccgaggtaatccacgacgcgggtgtcgtcgtccggccgccggtgctgctccgcctgctggccgccgccgtgcatcagcgacccgatggccctggtcatggagccgatgccgaccccatggccatggctgctgccgtaaaggtggtgctggcccggcaagagcctgcccacgtcgaggccacaccagctgtgtcgggcccaacggcatcccatcgtacacctcgagcgagagcgcccgcaggagtcttcacaggcccaaaaaggcccatgacgctaggcccagccatcatgggcccgaatccgacggtggagaagcccgcgcccgcgccgtacccgccggcggtggcgcccatctccgcggccttttgcagcagcgccgtggccgacatgctcgccggggaggacgcgctggggtcgtagacccggccgg

SEQ ID NO: 116503 - DNA, 1534 bp, Zea mays
  Clone ID: MRT4577_37736C.1
ctcctccccacgccatcgctcgtccgccatcgccacgagctcctccgccgatgtcgacgctcgaccggccgggacatcacgcgcggggaccatctctcattgtcgacggggggtagacgcacatgcgacggctcctgtcctgctctgtcccctctggcctccctagcagcttatactttcttatagtcttccacggccgcagttagccacatctcgccgtcggcgacgagggacagggaggcaggatactcctgtcaggccgcgacgtagccctcctcctcttgctctccccgccatcctctgcttctcgtccacctgggattagatctatttcttggtacctgagcgatcgagtgaaatcgatctagccaaggtgcggcggacgcggcttattcacgaattttctgtgttctttggaaagccgccatggacgagtggattcgccaagccgaggtgtgggtgcgccaatccgagagctggatccgccagcagcccccggagcagatctatgtcgcggccacggtggtcgccgtcacaatcctgctgcttatcgtagcatcttatctgaaatcctctaaaccaagcaccatagtgctatccgggctcagtggcagtggcaaaaccactattttctaccagcttcgggacggatcatcacatcaaggaactgtgacttcaatggaagaaaacagtgatacttttgtgctgcattcggagcaagaaaggaaaggcaaagtaaaacctgtgcatattgttgatgttcctggtcatgctaggctcaagcccaagcttgatgaagtcctgcctaaagctgctggggttgtctttattgttgatgctcaggatttcttgtctagcatgcaagctgctgcagagtacctttatgacattctgacaaaagcaactgtagttaagaaaaggatccctgtgcttatattctgcaacaagacggataaagttaccgcccactcgaaggaattcatcaagaaacagttggagaaagaattgaacaagcttcgggaatcaaggaacgccatatcttcagctgacatctctgatgaagtccagctcggggtccctggagaggcattcaacttcagccagtgccagaacaaggtggctgttgcggagggtgccggttcaactggtaatgttttggccgtggagcaattcatccgtgaacatgtgagggcgtaggtcgttcttattgttctcagggctccaaatggctctcttgatctaatgaggcaagatgtacattgcgtcaatggggttgcctttcaatgtgactcttcatccggtcctctgaagttgcttaagaagcagtgaggcgcaatcatattctgcactggttcagctgacccatgtttacatgttgcaatgtgtatgcctgacagtcatcggatatgaatagagcatggtataactgtctggctatggttgttttgcacttttgctccgtaagtttttatattttcctgatttaaaaaaaaaaaaaaaaaaaaccttttttttttttttccccccccccccc

SEQ ID NO: 116504 - DNA, 406 bp, Zea mays
  Clone ID: MRT4577_37737C.1
cgtgcgtccacgcgtccgatgctctcttccctggccctggagtgcttggcttctttcttccttccttccttacatgtttctctatagtatatatgcatatatgccaccgctttagctggctggctggctcgccgccggcggccttctgctcggacccttggatctcccctgcctgcgcggcgggggcacggtggacctaaatagagctagctagcctgcgcaggccggaggaccggagtcggaggcgccggaggtacggtgtgtgatgccctggcgtggtatggtatttatgggtgcctggccgcagaggagatggtgaaggaaattattaataaaactatgataatgataacgggtgggtgggggttgctgcacctgcctggggaattgagcatgtatatactat

SEQ ID NO: 116505 - DNA, 528 bp, Zea mays
  Clone ID: MRT4577_37738C.1
gtgcacccaaccaacagtcatagtttactcctgccttttacccacgcttggttgatattgcttcaatgcgacattcattgcactgtgcacaaatcaactattgcgtagcatcccattagaccgtggcagtgctttgcagtaattaaacaggcgacttacgattgggcggaccagtcctgcgtcagaggttcgaccacccgcggaaggcctcccagggggccgtaccctgtccctccccggggcgaaacacgtgggcccgttctaggcgcgcgagcaggtctagcattccctcagctacctacgggttcggatctggtacccccaaacccaacccttagaggcaatccttttgtcgaagatcagaacctttatgacgacgtgcgttgcctacattgccaccattgtcacacaggctgatccacttggtgacctgatccggttgaatcgaccggagcgtgacggaattctgtcctacggattttaaggccgacgtgggcgcaccggccaccgtgcgatgtgcggtgctct

SEQ ID NO: 116506 - DNA, 415 bp, Zea mays
  unsure (1)..(415): unsure at all n locations
  Clone ID: MRT4577_37739C.1
gggaaaaggaagggggggggggcacgagccacaaccggcagcgggggaccgnaacagcagcggagggcgaggagccgccgancngaccaaaaccnagnngcgcgcgngacccgngaggcgggagcacaggaggccacggagagggagccggcggacgagggggggggggacgacaaggaggaggaggcgngcgagngccgcggcnncacggaggagngcacngcgccgnacaacgcgggcgagcgcgcgcggancggcaggcgggggaaccgcagcccgagcggggacccggngggcgaggagcaggggcgcgcggggaccccgcccaacncccccgccaaggcgcnggaccggcacgcccacaccagccaaggggcgaccgcaccgcccacacccgcaggcagccccgacgggc

SEQ ID NO: 116507 - DNA, 461 bp, Zea mays
  Clone ID: MRT4577_3773C.1
atccggggagagccgctcattaataatcatatgctaaaccctagagaggggtcgatcatgcagaaattgtagggggagccggaatagacattcaccagaaccagaaacatgcttggcctggggctaaaagagatcagactcggacggggctaaaagcatgaccaagccacatctaatgcatgcgcaactacggttgggaacaacgcagcagcctcatgcaaccatatagctgactcgtgaaaacgctcaagccttgctattaaacttaactaaaacatacgcatttattaacaccttaaacgaaaattctcttaggctgcctgtgggattgaacacaacccccggatttcctaatttacagagagatcctgttaccatttcacaatgcaacaaccaatatgtggttttaaattgaaggggacatactacccaaggccaaagaacatttcgccggcaaagcc

SEQ ID NO: 116508 - DNA, 407 bp, Zea mays
  Clone ID: MRT4577_37740C.1
aaaaccaccatgcatatttttaaggggttttggaattggaaggcataaaaactaaaagttaatggcaaaaattagtggaaaatatttattttaagcaaattagtaaaaagttagctagctaatttaactagcaaatttttagccaactaactattagctatagggcattaaaacccccccaaaaaaaaaaatcggaaaaaatcaccctctataatggtaaatattaacagccgcctcctagcagaaaggggcattccaccatttttagggagaataataccggggccaaaactactacggaactatcctactgtttccgggaaaaaaaatgcctaatgtcccacccttgctgattgggggtattttctagccccaaaatttaaacactgttctaccgaacccggggg

SEQ ID NO: 116509 - DNA, 163 bp, Zea mays
  Clone ID: MRT4577_37741C.1
ttgtctcggaaccatgtcccataaaatggttcgccacataataccctgaggcattgggaggatcacaatctccggccccggggtgttacataatcaattagcatggcaaatacggaccacatggatgggaaaaacagacactggatcataagcggtccaagcc

SEQ ID NO: 116510 - DNA, 309 bp, Zea mays
  Clone ID: MRT4577_37742C.1
tttattcataaacacaccaatctaagcgcactatcaacaacctaacatcattggctaccaagatattatcccttcctgcgcttcttgcgcttattgcgagcgcaatatattcttccattattccacaatgctcactagctcctagttacataatattacagtatcgtcttccaattacttatatggccttagaacacccatgtatgcaagccttatatgcttcaacatgcaattgatgggagtgtcttacaacaaccaattgtttaattgcaacaactataccttgattcatcttaacaatacaaacca

SEQ ID NO: 116511 - DNA, 218 bp, Zea mays
  Clone ID: MRT4577_37743C.1
aaaaccatagtatcaatcatgattggccgttttttgtcaataatggccactatgctgacgaggaggctggtcgacttgctcggccgggcctccgatgtcgaggacgacctccggggcaaaaagaagcccaacatacaccacctcaaggttaaggcgtgtccatggacggacggtcacgcgactatctaaaagcggacgcgacgcgttaactgacacca

SEQ ID NO: 116512 - DNA, 331 bp, Zea mays
  Clone ID: MRT4577_37744C.1
ggggacattggaacttttggtcccaactttcattggcgaaatgatctccctaccctattcaggggtataaaattgttccccccaaattgattggtttacgaactgaccttacccttgggcccaggccaaaacatagcaaacccaaacccccggtttcggtccccgcctgaaaagggccataaaaaagctccgggtattaatgcttcgaaagggtgcccttattaggagggaaacataccccactggttccttgccgggacaatggtgtcagccctttttttcacaagggtttttcttttttggcagaaaaagctcaatggggccagggggg

SEQ ID NO: 116513 - DNA, 872 bp, Zea mays
  Clone ID: MRT4577_37745C.1
agttgctgatctatactgtactagttcatactttgagttttctagcctttgaaattggtacattaccagtggcggacccagaaatcttggagagcctggacaaaaataatactcatattgtaaatatatagctttccttattcccccccccctatatttaactatattttactgctcgctgcattgtatagattcattagcactaatagaggagcctgggcgagagcccgggcttgctcccacttaggtccaccactgtacatcaccatgatgctcaaaactggtggggttatcatgatgtgtgaaccacttgcaccataattatggccttttgatgctcttgggttatcatgctctttgaactatagttgttgatgacgcgagctattgccgtttctattcataattagtatggtaaaatgataaaatgctaccttttcaaagcatcgagtcatcggcctatcacatgctattccttgatcattttggttgcttgggagatttggaagcaccgtaatgcttgtgtttttgagggggttgtgccctgcacccagcgagttcagagtgctgtgattgaggagggcaacgtctggtgtttggctggtgcatcagctctgcaggacctcctgctgcgccagctccctaggggaccttagcagttttcctgctggtagtcgtttttggtcgggttgttaccttgtgtgtgtgtggtgcgttgtgttattgccggaggggtctcggcctaggggcctttgtaattaggggttgacaagtcttgtctctcctatgttctttttttcttcttaatttaatgacacgcagctctcctgcgtttgttcaaaaaaaaaaaaaaaaaaaactccatgcatccc

SEQ ID NO: 116514 - DNA, 278 bp, Zea mays
  Clone ID: MRT4577_37746C.1
gtttgatgagaatgccaagattggccaagccactgtggcttctggcatacctgctggctggatgggcttggactgtggtcctgaaagcagcaagacagtatgctgaggctgtcactcgggctaagcagattgtgtggaatggtcctgtgggggtatttgaatgggaagcttttgcccggggaaccaaagctctcatggatgaggtggtgaaagccacttctaggggctgcatcaccatcataggtggtggagacactgccacttgctgtgccaaatgg

SEQ ID NO: 116515 - DNA, 672 bp, Zea mays
  Clone ID: MRT4577_37747C.1
tcgagtttttttttttttttttttttttttttttttttttttttttttttttttttttttttttttttttttttttttttttttgggaaaccccctgcgggggaccaaaattttcacttttttttggggaaaccaacgggaaaaattccaggggcccctgggaaaaagggggtcccgcccgccccagtaccccaaggaatacccggggcgcccccaaaaaaaaaccttttttttacccccctttttttttttggaaaaaaagaaacgggggacatacgggaaaccccggttgctttttttttttgggggaaaccctggccagaactcgatcaaataaaaaggaaatgctgggggggatccccttgggggggaccccggggttttccccctttgcggaggggttgggaaaaaacagggggtagggaaactgggcccccctttaacggtttttaaaacgggggtccttgttaatggcccccacccgttttttgatcttgggcaacccccccccaaaccctttgaaccccccctgggccttgggggccaaagtccactctttgggggccccctggcccaggaaccccttgggggggggggggggggacgggatctccaacaaggaaatgcccaccacggcctgaaattgggcggggatgggccccaccaaaaact

SEQ ID NO: 116516 - DNA, 204 bp, Zea mays
  unsure (1)..(204): unsure at all n locations
  Clone ID: MRT4577_37748C.1
gccacgcgtccggccacatgttgagtgagcagacggcggctagcactagcagtagctgcggcggcgtcgaacgtcaggacaggtggctgcagccggtggcggagaacgacgcggaagaggaggaacaggagnagttcagggagtccgcgcgggcgggagaaggcacacgtccgtccgctccgtcgggtacgacaccgggcccag

SEQ ID NO: 116517 - DNA, 1065 bp, Zea mays
  Clone ID: MRT4577_37749C.1
gttttgaatggaattacttagcgtgtcaagtcttcttagtaatggctttggtgaaagtttggagcgattggagcgattaataaggtcatatcgtgaacagcgtggccatggtcccctcaactggaatcttgatccccccatgcacccttcaaatggaccaaatgcaaatcaggaacaagatgggaaacctgaatctcagcaatcgcaggctcctgtcaatagacctgcccttgttatccctcctccacctttgccaccgcgtccaccattatggcacagtgagctgcgtcataacaactggagcagcagacacagggaatgggatgctattaatgatttaagagctgacatgggtagacttcagcaagggatgagcagcatgcagaggatgctggaagcgtgcatggacatgcagctggaattgcagcgttctgtgagacaagaagtgtcagctgccttgaatcgatttgcaggacctgaaggattctcgatggatctgtctgacgatggatcaaaatgcaatcaagtgaggaaaggaacctgctgcatatgctgcgatacgcaaatcgattctctactgtacaggtgtggacacatgtgtacttgctcgaaatgtgcaaatgagctggtgcgcagcggtggcaagtgcccgctctgccgggctcccatcgtggaggtggtccgcgcatactcagtattgtaaggtggtggaagatacagtcagtaggaaagggaataagttgacggcaagcgaagttttgctgcaagtgaagaaaagcttgtttaggaaatggaccccctcccaatcccccaaaaaagaactctgtttttcctcctttgtgaatctataggggaggctacttacgttgcctgcatattcgttgccttgctgctcgtgtcgccgagacgcaggcggcaaagggcgtgccattaatttttggaagagcttgcgttgggaagtggtgtccccagtgcaagctgtttcactgtatatttatacactgactgatcctcaactgaagcagacaccagcaatgcattggtatataccaggttccttgagcc

SEQ ID NO: 116518 - DNA, 172 bp, Zea mays
  Clone ID: MRT4577_3774C.1
cacaacaatggacgccgacctatctctcttcttatccatgcaacaacacacccaccgaccgggacgggtttcaaaccctgagccccaccacataaagtgcgctggtcctataaggcaccacctcactttcgcgtacgtccaaacctatacctctataaagcctaactttaat

SEQ ID NO: 116519 - DNA, 387 bp, Zea mays
  Clone ID: MRT4577_37750C.1
gggggggcaacaaaaaagcgctgaaactgtttttcaattggttaatgaaaaaaaaaaactccggttttgggattttttttttttttttttaagaaatttcttttggggcctattttggcttaaaaaaattggaaaatttttggggagttttaaccaaaagtggtggggttaccataaatttgagctccgggggggcattaaaaattaaatactttatagttgaccttatgaaaaaaaaattggccccttttggaatgattttaaacccttttattttttccttgaaccccaactttaaaaaggcgccatcaaagggttttggctccttgatataaatctcggtggcaaatttgatgaaatttttcttttaacttttttgcccaagaa

SEQ ID NO: 116520 - DNA, 265 bp, Zea mays
  Clone ID: MRT4577_37751C.1
gaatcgtcggaggctgaccaaacgcaggcgcgggggccggtttaagggaaggagcgccacccatggtgcacgtcaacttctaccgcaactagtggaagacgttcaagaaaccatggcgcacttatgagaaggagcggcgtgatgctgaaccgacgctggccggcgagtataggctgaggtgccagcgtcagcttaggagggtccacaatgaactgagcaggaaccggaacgctgcaagggacgtgttcaccctcgacgagaagaa

SEQ ID NO: 116521 - DNA, 376 bp, Zea mays
  Clone ID: MRT4577_37752C.1
ccggtgtttccaccatcagagggtctctgcgccccagcaccgggcgcatggctcacgcatgccttcggcaatatacacatagaccatacagtataatacaaaaacgagaacggaataaccttcccgagacttaacatcattgtccacgaaaacagggtctatttggatatcatcattgataccagttattggagtctaaaggctgacttaactgactggctggatcggagggggttgaacatgcacactgccgctctaggacgcctccctggatgtacctattgagcctgttcaactcctccctgtgcttggccaccaccgtgcgcacgacgtcacctatggagaccatgctcagtcatccccatgccatgccaga

SEQ ID NO: 116522 - DNA, 127 bp, Zea mays
  Clone ID: MRT4577_37753C.1
ggtggagaagaagaggtgtgttattcccccgctctaccatcagagtgggctgttggaggtgcgctttcttaggtgattgtaccttacctttctctaccttcaatccatctacccttacgtgattctt

SEQ ID NO: 116523 - DNA, 286 bp, Zea mays
  Clone ID: MRT4577_37754C.1
ggagggaccggggttggatttaatgggggccccaactgtccttttatagggaacaaatgaacttccctgactggcccaaaccccattaagtttacaacccccctttcacaaaaggggaaaatgggattggtttggggcccctgtttttcctttcttcacctggggggtgaaaaaggagggatgctaacccactggaggtggaggtgaatttccccgttttccacgttcctgagggggaggaaaattttctggggaaaattggcgttcctccaaaaaacgtggtttt

SEQ ID NO: 116524 - DNA, 274 bp, Zea mays
  unsure (1)..(274): unsure at all n locations
  Clone ID: MRT4577_37755C.1
gattactaaaaaaaaaaaaaaaaagggggaaaaaaaaaagggcgacgacaccaacgcagcgccagcccacaagccnacccaaaaaagggcaccaccaatgacgggcccgcccgcccgaacaccagccccccccccaaaacaaaaaacggggggggggggggggggcccccaccccaacagggcgccagcgcnaggcaaagagcgcagggagaacggcaacaaccgacgaagggccaagaaggaagcagggcccacagaaaccagcccggcagaa

SEQ ID NO: 116525 - DNA, 733 bp, Zea mays
  Clone ID: MRT4577_37756C.1
gacgcctgcaggatccggtccggaattcccgggtcgacccacgcgtccggggagttggagtcggtcctcgggcctgagcctcgaggccgcgctcccgggtgtcgttgatgtttggggccgacgggcgcccagcgatcggaaccgccgccgggaagagctggcatttcagtcgaacaatggaagagcttgttcacgatcttgtctctgcactggaagagagctctgagcaagcccgaggtggatttgctgaaactggagaacattctcgaaatctgtcttgccctctgaaacgccaggcccggaaaaggagagggaggaagcggagatcctacaatgttcaccacccgtgggagacaggccactgcttaagtgaaggctctgattctagtttagaagaaccaagtaaggactatagagagaagcacagcaataataaaaaggaccgcagtgactctgatgaccagatgttagtggcgaagcggaggccatcttcaaacctaagcagcagcgttcgaggtaagcggcttctgtggcacgagtctgactttgccgtggacagccttgggaacagaacgctgcgccggaggaggaaggtgaagcgcatggccgtggatctcccgcaggacgtctccagcaaaaggacaatgacccagctgccagaaggctgcagagatcaggacatggaccacgatagagccagccagtatccagagtttacccgggaagaaagtta

SEQ ID NO: 116526 - DNA, 133 bp, Zea mays
  Clone ID: MRT4577_37758C.1
cagttcattaatgccggcactgccggtcccaccgccggctccaccgctcccgcggcggtatcctcgactcccagaaccgtcctgctcgttgtgctctcgaaagcgccggatacaaccttcaccacctccgggg

SEQ ID NO: 116527 - DNA, 367 bp, Zea mays
  Clone ID: MRT4577_37759C.1
gggctgctaaacccaacactgacttagaacaggctcccctggaacgctacttgtctggaaccaatggacgagactagactgcccttacaatagaaaaccattggcgttgtacaaacacaatacaacggctcacggccaaacctaccataaccgggcgcaggacctgatgaaaacaaatccaaagcttattgctgcgtttgcactgaaggaaatgaaacctttgttattcttgcagaaaacatcatgtgacctctgtgtaaatgtgcatacgatataagatccagttaaccattctgaaaagatcgagcttctaacacaatgaagaagataactgttttaactggtcaacacatactatatgctctta

SEQ ID NO: 116528 - DNA, 583 bp, Zea mays
  Clone ID: MRT4577_3775C.1
gcgctttgcatcagtaggacacatgtgctatgcaatgcatggcgagctacctcggctatcatgatggcgccggtggatcggctgtgacctgctgattgggtacctggaggagatgcacctgtactgaaaacgcctcggcaacgatcgcgagcctagcgctaccacaggatgatcgcccttcacgcttgccggcggccgcgtccatgtcatcaccaaagacgacgacagaatacgacaactcctacaccggtctcagaaggacaacctggccccgcacgaaattccgtcaaagtggtgctgtaggatgcgatgcacaagaagtctatcatccgttagcctctctgtaacaccgtgtgctacaagatgagacaatgacatggaggcacacaccagcgaatacggaaaaagctatgcatcaggcaccagcgactactattatgagcaataacgacgatccaagcactgagctgggtcacatgctgactgctgcataagaagctacctgaaacatcatatgcgactctgttcatcaacagagtgagatctacaagtacctgtgtatatatatatgctagcaaggtga

SEQ ID NO: 116529 - DNA, 257 bp, Zea mays
  Clone ID: MRT4577_37760C.1
atcaaattcaaatggacgacactatgtgtgaaacccctgatttccgagtttgcacgcctgatccgtaacagattgcactattgttttcctttctccaccaccagacgcggcagacccgggactgtgacaagcaaaaccgattctctacctagaactcttccaaatcctcggtcccggcaccttttagggagacgagcggtggcgacgactagcagagggtattctttgacaacgagaaccgtgcggttcccgcgtgt

SEQ ID NO: 116530 - DNA, 214 bp, Zea mays
  Clone ID: MRT4577_37762C.1
tcttcacgcagtatcaggccagcaggacgccacccggcccactcctgcctgcgatccgctgcttactcgccacccggagatggacaccgacgacgacttctacgactcctcgccggcggactacgacgacgccgggcgatccaaggtgtttggaggaggagccaaccaggccagaactagaactggctggcgagagaggattacgcggaagaac

SEQ ID NO: 116531 - DNA, 382 bp, Zea mays
  Clone ID: MRT4577_37765C.1
accacgcgtccgcccacgcgtccgggctagaaaagcataattattataattagtcatatatcactagttagtatctgcttaatgctttgttataagtgtttcgtcatcttcaacgtagattaattgttttataagattcctctatatattcatacatgtgcattgtgcatcccatgaggtacgataattaatcgcgtgatgcggaagacgagccaagtcgagcccaagcgcgggttactacgcatggtaatgctgatggaagaacctccctcatcaggtgctaggacaaggatactcgtcaagtggtcatcgtctaacaacactaacctagtgttatccaggttacgagtcacttgattgtgattggtgttaaacgctggtg

SEQ ID NO: 116532 - DNA, 2138 bp, Zea mays
  Clone ID: MRT4577_37766C.1
atgggtacctcgaggccggccgggaaaaaataacgagcacctccaagccaaagcaagttgctaggtcctttgaaccagcaactgaagcttcctcgtctcatcatcgagaccagtaagcaacatggcggctaatctcaagtgggctcctgttctagccctcctcgtcgtcgttgctgccatggttggcaccaccagcgccggcaacatcgcagtgtactggggccagaacggcaacgaaggcagcctggcggacgcctgcaactccgggctctacgcctacgtcaacatcgcgttcctcacaaccttcggcaacggacagaccccagttctcaacctcgccggacactgcgaccccggctccggcagctgcaccggccagagcagggacatccagacctgccaggcgctgggcatcaaggtgctcctctccatcggaggagccagcgggacgtacattgggtcctcgaggccggccgggctcatagtaaacccagctacatcatttgcaaagactccattgcagccagtattgcctctactggaatcagtgccaagcgagtttcatgctacagtgccgtatcttctcagttttgtcatgggtgacccactgaagatggctgcagttagcattgaaaacaacctatctcctccagaaactctgcagaaattgtcagacagtctcacatcaatgcttcctttgctttcagaactgtctgatattataccaagggatactcttctatggaagctcaaacttctcaaggcaggagcagcctatgcaaattctcgtctccatgccgtgcaagccgaggttctacttcttgccagtggtaaggacaatcttctaccaagcggagaagaagcggatcgactcttcaaggcactgaaaaactgcagagttcgatacttcaaggacaatggccatacactactgctggaggatggcgtcaacctgttaactgtcataaaaggagcgaacatgtatcggcgtggaaggcaaagggattctgtaaccgattatctcccgcctactctaagtgaattcaggcaaacatttgatgtggatcacaggctgttccaccttgcactgagcccagtcatgatgtccaccctgaaggatgggaaaatcgtccgcgggcttgccggtgtccctgacaaaggcccagtcttgttcgtgggctaccacgcgctcatgggcatcgagctgagtcctctgtacgaggagttcctgagggagaagaggacagtcgtccgcggcatggcgcacccgttcctgtttgggaaaaagttcgagtcgtcgcgccaggagacgtcccgtttcgacactgtttctatgtacggtggactgccggtgaccccgatcaatatgtacaggttgttccagaggaaccaatttgttctgctctaccccggcggcgttcgggaagctctgcacaggaagggtgaagagtataagttgttctggccagatcagccagaattcgtaaggatggcggcgcgctttggtgtaactatcataccctttgggtgtgttggagaagacgacgttctcgagttggttctggactacaacgatcagaagaacattcccgggctccgggaatggatacagtcgatcaacaaagaagccgagagagtgagggacagcgtaaaaggagaggatgggaaccaggacatgtacctgccagctcttctcccaaaagtgcctggccgattctactacctgttcgggcagccgattgagatgaaagggatgggcaaccttgtcagagataggaagagcgcgaacgaggtgtatctacgcatcaaatcgcaggtggaggagatcatgtcgtatctcaagaggaagagggaggaagacccttacaggagcctaccgcagcgtgcactgtaccaggcaacatggggcgcctccgctcaggtccccacttttgagccatgaagattgggagtagggaagggcgtctgcgagcggactgcaattctttgacaagatgcaatgcgttctcatttctgaggagatctccctccctcatacgctgattacatatacggactacggactagtataccgcaaatattgtacatttttaggaaaaatatgaaatgatgtttttaaacaaaaaaaaaaaaaaaaa

SEQ ID NO: 116533 - DNA, 258 bp, Zea mays
  Clone ID: MRT4577_37767C.1
cctcttttcttggggggggttaactttggccgcgccatactggacgctaggcaccggatactgtgctcccaggctgtaacgtatgcttgatctaacacgttgtgcagacgggagactagattatctatctatagaagggctttcgctaatcaaatgggctaaactttcacttgcaactaccaaaacacaggtttagatgtctacaagttgatgtaccaggactagctgatgcatgatacttagcatgtggaactttat

SEQ ID NO: 116534 - DNA, 618 bp, Zea mays
  unsure (1)..(618): unsure at all n locations
  Clone ID: MRT4577_37768C.1
agcaccaacgagtcacctccaagccaaagcaagttgctaggtcctttgaacaacaactgaagcttcctcgtctcatcatcgagaccagtaagcaacatggcggctaatctcaagtgggctcctgttctagccctcctcgtcgtcgttgctgccatggttggcaccaccagcgccggcaacatcgcagtgtactggggccagaacggcaacgaaggcagcctggcggacgcctgcaactccgggctctacgcctacgtcaacatcgcgttcctcacaaccttcggcaacggacagaccccagttctcaacctcgccggacactgcgaccccggctccggcagctgcaccggccagagcagcgacatccagacctgccagtcgctgggcatcaaggtgctcctccccatcggcggcgccagcggcagctacggcctctcctccaccgacgacgccaacagcgtggccgactacctgtgggacaacttcctgggcggcagcggctcgtcccgccctctcggcgccgccgtgctcgacggcatcgacttcgacatcgagaacggccagtcggcgctgcagacgggccagttcgacaacgtgtggatacagttctacancaac

SEQ ID NO: 116535 - DNA, 798 bp, Zea mays
  unsure (1)..(798): unsure at all n locations
  Clone ID: MRT4577_37769C.1
attgcaagaaaaaggaaatcaaaacaaagtggggggaaaagcatggcgatagctcttctcccatccgttcgtcttcttccacaaagtctctcccgaaggccaccaccaacctcgtcgccattatccgttcgccgcccacggcaaagagcccttcccctccctcgcgtccactgccgcgccggccggacctcggaccccctcgccgctgctagggaggctgctgccttttgggctgggaagctcgccggcgctgtgccatggaaggccgcggtctccggcgtggtcgccctcgccgtctccttcacctgccttgttggtttggccaatgccagaactggggtaaacaaaccagaattgcttcctaaagaatttactaccgtcatcgatgttgctggttttctctcgtcaggccaggaaaaccgtttgcgccaagagatagaagacctggagaaagatacagggtacaaactgcgagttcttgcacaaaattatcctgatacacctggactggctatcaaagatttttggcaggtcgatgagcgtactaattgtttttgttgctgatccaaccntttgggagaggacgcctcaattgaagctgctgtgacggaaatatctcgttgtctaaggaaccccgccgggacaaataacctgttcggaggtattatagaaaagtgatgagttatgccgcacaaaggaacatggaaatgacagatgcttgtgtacagaagtgaaatactagaactagaaggctaaagatgtctcatcgtatccagaagactaaggcttcactctttg

SEQ ID NO: 116536 - DNA, 327 bp, Zea mays
  Clone ID: MRT4577_3776C.1
atggcggaagagggaggtgcagggggccacccccacgaacatctcgctgaggtggacgaagatggacgcctggaggatggagtggggcgtgaggtgctgaagctggagcccgagctcctccaacagcagcaagaagaaagacgagatcggcagcgccaacccacaggagaggtaggagacgaaaagcatgaactccccggtgacgagatcgcagaggggagtgacgacggcgcggatccttccggcgtgcaccggcgcgctccatccgagcaggttgcgcaccaggttgagcgccccctcagactagaaacgctcgggatgacctag

SEQ ID NO: 116537 - DNA, 551 bp, Zea mays
  Clone ID: MRT4577_37770C.1
aggaactgtctgatattataccaagggatactcttctatggaagctcaaacttctcaaggcaggagcagcctatgcaaattctcgtctccatgccgtgcaagccgaggttctacttcttgccaggtccgtggctacagtatctgctatctatactccatagtttttgtagtccgatacgccgacttctagcctcgtgtttgggtccagagcacagatcaataatgttacctgtattcagtggtaaggacaatcttctaccaagcggagaagaagcggatcgactcttcaaggcactgaaaaactgcagagttcgatacttcaaggacaatggccatacactactgctggaggatggcgtcaacctgttaactgtcataaaaggagcgaacatgtatcggcgtggaaggcaaagggattctgtaaccgattatctcccgcctactctaagtgaattcaggcaaacatttgatgtggatcacaggctgttccaccttgcacttgagcccagtcatgatgtccaccctgaaagatgggaaaatcgtccgcgggc

SEQ ID NO: 116538 - DNA, 1057 bp, Zea mays
  Clone ID: MRT4577_37771C.1
tctgtcccctcgaggccggccgggttcgcaagaaaaaggaaatcaaaacaaagtaaagtggggggaaaagcatggcgatagctcttctcccatccgttcgtcttcttccacaaagtctctccagaaggccaccaccaacctcgtcgccattatccgttcgccgcccacggccaagagcccttcccctccctcgcgtccactgccgcgccggccggaccccggaccccctcaccgctgctagggaggctgctgccttttgggctgggaagctcgccggcgctgtgccatggaaggccgcggtctccggcgtggtcgccctcgccgtctccttcacctgccttgttggtttggccaatgccagaactggggtaaacaaaccagaattgcttcctaaagaatttactaccgtcatcgatgttgctggttttctctcgtcaggccaggaaaaccgtttgcgccaagagatagaagacctggagaaagatacagggtacaaactgcgagttcttgcacaaaattatcctgatacacctggattggctatcaaagatttttggcaggttgatgagcgtactattgtttttgttgctgatccaacctttggtaacataataaattttaacattggtccattagttgatttagacgtccctcggagcttttggagtcaggtttcagggaagtatgggaacatgttctactggaaagaaaagggagaggacgcctcaatcgaagctgctgtgacggcaatatctcgatgtctaaggaaccccgccgggacaaataactgttcggaggtattatagaaagtgatgagttatgccgcacaaaggaacatggaaatgacagatgcatgtgtacagaagtgaaatactagaacaacatagaggctaaagatgtctcatggtctccagagaactaaggcttcactctttgaaatcgagagcttttatctggtcgtgaatatggatagttttacaatgtgactggattttaaaatgtctaaataagagagaaatttgagatctccgaaaaaaaaaaaaaaaaaagcggccta

SEQ ID NO: 116539 - DNA, 622 bp, Zea mays
  Clone ID: MRT4577_37772C.1
tcgaccacgcgtaacgatctaagccaaagcaagttgctaggtcctttgaaccaacaactgaagctttctcgtctcatcatcgagaccagtaagcaacatggcggctaatctcaagagggctcctgttctagccctcgtcgtcggcgttgctgccatggttggcaccacgagcgccggcaacatcgcagggtactggggccagaacggcaacgaacgcatcctgtcggacgcctgcaactccgggctctacgcctacgtcaacatcgtgttcctcacaaccttcggcagcggacagaccccagtcctcaaccttggcggacactgagaccccggctctggcagctgcaccggccagagcagcgacatccagacctgccagtcgctgggcatcaaggtgctcctttccatcggcggcgccagcagcagatacagcctctcctccaccgacgacgccaacagcgtgggcgactacctgtgggacaacttccttggcggcagaggatcgtcccgaccgctcggcgccggcgtgctcgacggcattgactttcacatcgaagacggccagtcggtgcactacgatgaacctgcgaacgcgctcaaaggcaaggggagcgtgctgctg

SEQ ID NO: 116540 - DNA, 345 bp, Zea mays
  Clone ID: MRT4577_37773C.1
acgcaaaagcaagagagaacggaatgcaagccaattacctacttttatcaaaaacctgggttcacgtcacttattcttatgactataaggcgttcgtcacaactaaagaagaagtatgctgcgatgcaaactaatatggcaccaataacaatacgaaacattgaaacacctaaccaattaaaacaagattttacaaacacaacaaacatcacaccaatgagcaacacaacttttcatacacccaaatttggatcttcttcaaattcatcaacataccctctggataaatcacatagtgcaacacaagatactgttaccccaaaggtgaacatgctcaaagacaca

SEQ ID NO: 116541 - DNA, 1481 bp, Zea mays
  Clone ID: MRT4577_37774C.1
cctcgaggccggccggggcaccaattagcacctccaagccaaagcaagttgctaggtcctttgaaccagcaactgaagcttcctcgtctcatcatcgagaccagtaagcaacatggcggctaatctcaagtgggctcctgttctagccctcctcgtcgtcgttgctgccatggttggcaccaccagcgccggcaacatcgcagtgtactggggccagaacggcaacgaaggcagcctggcggacgcctgcaactccgggctctacgcctacgtcaacatcgcgttcctcacaaccttcggcaacggacagaccccagttctcaacctcgccggacactgcgaccccggctccggcagctgcaccggccagagcagcgacatccagacctgccagtcgctgggcatcaaggtgctcctctccatcggcggcgccagcggcagctacggcctctcctccaccgacgacgccaacagcgtggccgactacctgtgggacaacttcctgggcgccgcagtgcccctacccggacgcgtcgctggggccggcgctgcagacgggccagttcgacaacgtgtggatacagttctacaacaaccccgggtgcgcgtacgccaacggggacgacaccaacctggtgaacgcatggaacacgtggaccagcagcatcaccgcggggagcttctacctcggcgtcccagcgtctccccaggccgcgggcagcgggtacatcgaccccggcaccctgacgggcacggtgatccccgccatccgaggcattggcaactacggcggcatcatggtgtgggaccgctttaacgacgtgcagaacaactacagcagccaggtgaagggcagcgtctgatgggcataccgcatacgaagcttcaagctacagcacctagccatgcatatatatatagtggctattcgtcaagttatcggactgctagatacaaatataataagagcggatcatcgggagacaaagacgcatgtcagctattgtctcgttttctaagcaacgagcgagagctgcatgcgctggttagatttaatatggatattgcccatacgttatgtaattaaatcaaataaatgttaagttcatattgaatgtgtcgaaaaaaaaaaaaaaaaaaaaatcatcacagtcgaaacaaagccacaacacatacaggaaagcaagcaagaatcatcggaataatggctcgtgcatgtgtgttcctcgtcgtgctcctcctggccgccatcgcggtggcaccgttcgcgggcgccgcacgcgtggacgtcgtggagggtaggtccatggcatccgccgatgcaccggaggcggcggccgatgctcccgctcctagccccgactccgcctcatccccagactcatcgtcagaagcgccctccagcagcagctccctcgactagacgcaaaaccctcttcattctctggaaatactaacagtatatacgttgcaccttgatg

SEQ ID NO: 116542 - DNA, 2137 bp, Zea mays
  Clone ID: MRT4577_37775C.1
taattgtagagcatgaagaaatgagaagatttgtaaagagcctcaaccctatgattcatgcagatgcagtctcacacaatgatatagaaggacattgctgtgctctatttgagaaggaaaaggcaaaacttaaagatcaattgaccctttcctcccggcgtgtctctttgtcagcaagcatatggactcctgagggagccgaaccaacagtaaattacctttgtttgacagcacattttattgataaaaactggaaagttcaccgaatgataatcaagtttggcatgtttcggtcctcacctactgatgtggaaaggatggtacatcataaggaggcttgtgtaccagagtctgaatgtggagcatataatgtcatatgggatgccattagagattggaatcttggacaggaggtgttgagcttgacttctgttggtgaggttaggaatgctttaagttcctcaaagctgaaggaaatacttgtggagaaaaaatgccttcctatcagaggcaagctatatgatgttgcttgtgttgatgatgtccttaacactattgcttccaaagtgcagcaaaatatcattcaccttgtcggtgacatggtaacagagttttttgttgcacatacatcttcatcgttgaatcaacaacagcttatggaagtcatttcacagatgagtctgaagtgtccacaagaagatgctaagtggtggtacaaattttattttcggcttgaagtttttttgcatttcaataagccatttccttttgaagaagcagcatctccagagcatgtcatagttgctgagtctatttgcaagattttgaggacgttttatcgtgttattgaagtcatttctgcctctagttctccgacagcaaacatgtacttcaatgagatatggaaagtgagaacagtcttgcaagaagaagcatcaagtgagcatgcagaaatcactgcgatggtcgcagagatgcaggaaacattcaatgagtactggcaacattcatacttatggttatgcatacctgttatcctagaccctagattcaagttcggtttcattgagttccgtctgaaacgagcttttggattaaaatcagcaagctacttatctggcatacgtgaaacactccaggaactcttcaatgaatactgcagtccagtggatcagccgaatgtgcgtgtgccaaaaagcgaatcttttagtctagatgacaacgactcatttgaagattgggaccagcacctcaatgagcaagcgagcagtcagaaatccacggaactcgataactaccttgcggacggtttggttccaaggaaggatgacttcgataacctgaactggtggatgtgtcacgccacaaagtacccgacactggcggctatcgtgcaggacatcctggcgatgccagcatctgctgttccatcagaagcagcgttcacaagcagtggaccagtaattccaaagcaccacagcatgctaagcatcaagaccattgaggcacttgtttgcactcgagattggatgagataaagcggttacggtcatactgtgctctgtttatcgatatggctctggaacttctgttccttgcatctttgcctataaacatgaatacatgacgtgctgctgctggcccagaaaacttggcaccccagattgtgtaccctgaactctgaacaaccaatgatgggatgcagttttgttcaggggatggtcctggctcccaaccagtgggatccagtccccagccaggattgggtggtggatcctgtgaaattcctgcgttagaaacaggccctcagaggtttggtaggtgtacctgacttggttccatgtgtgtacagttgctcgatgtagttgcagatgtagttgcagatctgcggcccaaaacagagctaagctaattgtaatgttgcaggcatgctttattggtgatcttggacacttctggttctggaatagcatccctagtggctataccagttcgttgcaaatggactcgcggttgaaagaataaactgagctactacttcagtccaatgttgcataggaaacatatatggctggtttggtggccagggatcatcaggccagacaatctttctctaacaccataataccatcgcccc

SEQ ID NO: 116543 - DNA, 201 bp, Zea mays
  unsure (1)..(201): unsure at all n locations
  Clone ID: MRT4577_37776C.1
ccaaaccctagtccagccagnatccccaccgcctttggcgagagcacggcatcagatccggcgggatggcataacgccgcatcttatggcacagcggtgcgccgccgctcggccatcgccgcggcagcgtccgggaacgcgcgcgaggcctccacggccgtcgccgctgcgcccggggtgctatccccctacgctacccct

SEQ ID NO: 116544 - DNA, 1109 bp, Zea mays
  Clone ID: MRT4577_37777C.1
ccggccgggagcaccaacgagcacctctaagccaaagcaagttgctaggtcctttgaaccagcaactgaagcttcctcgtctcatcatcgagaccagtaagcaacatggcggctaatctcaagtgggctcctgttctagccctcgtcgtcgtcgttgctgccatggttggcaccacgagcgccggcaacatcgcagtgtactggggccagaacggcaacgaaggcagcctggcggacgcctgcaactccgggctctacgcctacgtcaacatcgcgttcctcacaaccttcggcaacggacagaccccagtcctcaacctcgccggacactgcgaccccggctctggcagctgcaccggccagagcagcgacatccagacccgccgtgctcgacggcatcgacttcgacatcgagaacggccagtcggcgcactacgatgacctggcgaacgcgctcaagggcaaggggagcgtgctgctgacggcggcgccgcagtgcccctacccggacgcgtcgctggggccggcgctgcagacgggccagttcgacaacgtgtggatacagttctacaacaaccccgggtgcgcgtacgccaacggggacgacaccaacctggtgaacgcatggaacacgtggaccagcagcatcaccgcggggagcttctacctcggcgtcccagcgtctccccaggccgcgggcagcgggtacatcgaccccggcaccctgacgggcacggtgatccccgccatccgaggcattggcaactacggcggcatcatggtgtgggaccgctttaacgacgtgcagaacaactacagcagccaggtgaagggcagcgtctgatgggcatatgaagcttcaagctacagcacctagccatgcatatatatatagtggctattcgtcaagttatcggactagatatacaaatataataagagcggatcatcgggagacaaagacgcatgtcagctattgtctcgttttctaagcaacgagcgagagctgcatgcgctggttagatttaatatggatattgcccatacattatgtaattaaatcaaataaatgttaagttcataccaaaaaaaaaaaaaaaaaagcggcc

SEQ ID NO: 116545 - DNA, 535 bp, Zea mays
  Clone ID: MRT4577_37778C.1
ggtaccctcgtacttggccgggaagcggttacggtcatactgtgctctgtttatctatatggctctggaacttctgttccttgcatctttgcctataaactgaatacatgacgtgctgctgctggcccagaaaacttggcaccccagattgtgtaccctgaactctgaacaaccaatgatgggatgcagttttgttaggggatggtcctggctcccaaccagtgggatccagtccccagccaggattgggtggtggatcctgtgaaattcctgcgttcgaaacagaccctcagagatttggtaggtgtacctgacttggttccatgtgtgtacagttggtcgatgtagttgcagatgtgttctcgacgccttagacagatttcagattagaatgacagcctgtatgatatgaggggtctatctgcggcccaaaacagagctaagcgaattgtaatgttgcaggcatgctttattggtgatcttgaacacttctggttctggaatagcagccctagtggctataccagttcgttgt

SEQ ID NO: 116546 - DNA, 262 bp, Zea mays
  unsure (1)..(262): unsure at all n locations
  Clone ID: MRT4577_37779C.1
cccacgcanccgcgaggacagcaagggccccacccncagccagggagagacagagnagccgcagcgccgaagaaaggccccagagccgcganagagggagcaaacgagaccgcaacagcagcgaaggacacanngccagagaagagaccaagagaagannnagaaggcgaccaggaaagagaagcgcgaggagcgagccacaganaggcgcccgcnaggggagaccgacaccccagcagaagaggcagnanacgacacccac

SEQ ID NO: 116547 - DNA, 341 bp, Zea mays
  Clone ID: MRT4577_3777C.1
tttttttttttttttttttttttttttttttttttttttttttttttgtttttactaccaattggtcactcatctcatttaaccatttgcagatttagatacccaccgtgggattttaaaaaattaagatattcttaggtttgacatttttttttgagaaagccccaaaaatgcgtattttgatgctacgcaaagctttgtataacacaacataataagccgcaggtcgataggcaaattcaaataatgaagtagggccctcagcctgcaggcctaggaaagagaatgaaaatcaattaaccaaaatagagctggattacttttacaccaaacttgggttc

SEQ ID NO: 116548 - DNA, 367 bp, Zea mays
  Clone ID: MRT4577_37780C.1
cggacgcgtgggaaaacagaaggaaacggaagctgaagctagcggccggcctaccgcacgcaacgcaagcagagtgcagaggaggattacagatcgaggcgtacggacgtcgagcgaggagtggtacatatggcagcgggaccgccgtcgtcggtgagggcggagcgcgtcctgcgggcggcgtgcgcggccatggcggcggcgggggcgctgctgctggggttcagcgcgcagaccaagaccgtgctcttcatccagaagaaggccgtccccaaggacgtgcaggccctctgggtgctgatcgtggcggccgcggcggcggcggcgtaccacgtggcccaactcgcccggtgcctctgcatggagc

SEQ ID NO: 116549 - DNA, 363 bp, Zea mays
  Clone ID: MRT4577_37781C.1
ggctgaatggcggcttctggtgagggcgcgtaactcccgactacgacgggcggcgaggatgcccaccgaccgagattgagctatttatacaagccaccgatcgtaaactactactacagccaaggatacccgatgaagcccgaactgatacaaatggatcactcaatagtcgtctaatacgaccttcagcgactacataagctctaacgatcgtacccgaactctgaggcctacattcgacgattacactccgacgactacgtctcctttgttgcgtacgccaccggaaacgcaggtgtgctcgacccacgcgccaataaccactttaacgtccgtgaggactgcaccatgttcgacggactc

SEQ ID NO: 116550 - DNA, 421 bp, Zea mays
  unsure (1)..(421): unsure at all n locations
  Clone ID: MRT4577_37782C.1
ccgaccgaccgacgacgagcgagcgcagcccaagcccaggcaagcagggcacggccatgcccgtggcccaatcctaggcgtccatttcgtattccacggccggcgaagcagcagcagcagccgccatggtggccggcagggtcaaggcggccatgggcttccagcggagcccggccacgcccaagcccggggcctcctcctcctcctcctcctcgcgcaaggcgccgccgccgccgctgcagctacccgggtcggccgcgctgccggagacgccgcgccggaggtcctcgggctctccggcgccgccaggctccgggtccaagggcggcgccggcgcgcccgcggncgngcggcgcggcgcgncgggcggcgcgcccggcccggcnggccgcggcggcggcggcggcgccccgcgcgcggc

SEQ ID NO: 116551 - DNA, 263 bp, Zea mays
  Clone ID: MRT4577_37783C.1
gttgttctcagtgagctgagctcctccggcgccggggggccgtttttgacgcgacgagtcgcgggcgggcttgcggcgctgtacttagcacgtactcacccccagtgtgtgtggtataatcggacggatgctaattggctctctcgttctcgtagtagggcggctgatgatgcgatctgacgagggtttgtgaatttggcttagagtttggcgtggcgtggcgtgctgtttcgtttggagagttggaggggtgtgtgtagcgt

SEQ ID NO: 116552 - DNA, 471 bp, Zea mays
  unsure (1)..(471): unsure at all n locations
  Clone ID: MRT4577_37784C.1
ctgcaggtannnngnnncggnagttncggggtcaggcgtaacgcgtggctgatgcacgcttcgcacggtggcatctcgatgcagccgtcgagcgccgagccaccggtcgtcgtccttcgcgcgcagctcagggcgtggagtactctggatcccagcttcgttagctgctcgggccctgctgcttctcccgcctcggcgtgctccgacgtcgtcttgccgcctgatctgaagccgaaaccctcggcttcccccgtcgctgctgctgctgcaccgttgttctcgttctctgaaaacgaaaaaaaaaagaaagaagaggatgattctatccttgccaaggtttgtgtcgctagactagaatttcgcatactatacacaaaatagcatgaaacatgcgttagcgttggcgcgcgcgcgcgcggacctttgccggccgagccgttctgcggcatctcggcggngacaaccatgcga

SEQ ID NO: 116553 - DNA, 372 bp, Zea mays
  unsure (1)..(372): unsure at all n locations
  Clone ID: MRT4577_37785C.1
gggggcttcnccncccccnccggaacggggacgggcncgngaggnactccggggcacgganaagcgggggggcgggagggagaggcggcgncggaagnagaggaccgcngcaccgncggcggccccgccngggccacggacgaccacncccnccacaacgccnncagcaccgacggcgaggnccncgagnccaagaacaaccncgancgggagacgcagggggcccgcggcnncggcnncgacaccgncnccacggaggaggcgaagcggaacgccancgagggcaagaacggcaaggagccggacggccgcaacaacacccgcaacgaggcccagncccgcggcggcccgggaggcggcggcggcggcggg

SEQ ID NO: 116554 - DNA, 370 bp, Zea mays
  Clone ID: MRT4577_37786C.1
atacaaacaccacccctttttgggcatttccaatcttttccagaaggggccccaaaagatttttttttgtggggggggggcattttttccaatagttggggggggaggggggactcaaaaaccaaccctttttgtgttcgccttacgtggtacattgggagggcaaaccaaagcaacataatttacttttttttaaagaaggggtcttaatcttttgggacccggaatgggtgggctgggttccatatgagtcttcccctatccccgccctttaagagtgcatggggggaacagcttttatcggagccttttcccccttcttctggtggggggggcttttataaaaatcttttaaaggggggggctgggg

SEQ ID NO: 116555 - DNA, 107 bp, Zea mays
  Clone ID: MRT4577_37787C.1
ggctgtatgaaacaacaaccggttcctttcatccaaagggccaaatttaattggcatgtgtcacatttcatggttgtactcacactcataaaagaggttgtcatttt

SEQ ID NO: 116556 - DNA, 628 bp, Zea mays
  Clone ID: MRT4577_37788C.1
gagtgagcactcttgttgcaatttcgattgcaatagttaaactgaatcaaataggaacctatgaaggaccgtgccgccaccacaatcatacaaagtgggaccacgaacatcctgctcctgccggtgcctgaacatagaacgaccacctgaatgcgatgctccagcttgcccgtcctgctggacttctaccacctgatcccacacctggcgcactcccgccacgacctcttcaccacatccacctccagacgcaggcgcatccccgggcacggcatttctcaagtgtatccaccaacgtgacgatcttctacgtgccccgacattcctgcagtacgcccggccggatgaaggccgcgatcgtgcacatctcgacggtgatcctggacggcgaggcccccgagacgagccccgacccgcgggtggtgtacgagtcgctctatgccgcgcgagcgcacctgtggacctgagtcgacaacaacgtccccgtcctcttcatcggcgacgatgatcaggttcgccgcacctgatccacgcgttcaagcccaacccgtggtcgcacgtgaatgagtactggagggtgttcgacttcctgtcgcacctccccgaaagactgcacaccttcttcttc

SEQ ID NO: 116557 - DNA, 782 bp, Zea mays
  Clone ID: MRT4577_37789C.1
ccggccgggatccccctttgccttagcaatcagcacgaccaggaccaggacagcgctccctcccgtccccaaagacaaacaggcgagcagcaaacacacacgctcgaaccgagacaagccaatctaataatggggagggctccgtgctgcgagaagatggggctgaagaaggggccatggacgcccgaggaggacaaggtcctggtcgcccacatccagagcttcggccacagcaactggcgcgcgctgcccaagcaagccgggctgctgcggtgcggcaagagctgccggctccggtggatcaactacctgcgcccggacatcaagcgcggcaacttcagcaaggaggaggaggacgccatcatcagcctccacgagcagctcggcaacaggtactttttactcacgccgctgttctttcccttcgtcctcgcattgctgtcttctcgggtgtaaaaatcagaggatcaatgattgtttgcttgttgcttcaaacgcaaattactattcgtcttcgtcttctcccctctctcctctgaattgttcctgtcagtggggcagggcatacaatacattatccccgtgggccccgcctcgaggcccgcccgacgaagggagaaagaaagaaaatccaagtgtgctggccacttggtcgctagtatagttcagcttgttcgctgcggcttgctgcggctgcaatccggctgcggctgcggcttctacagtatttttctctctatggattgcagctgcagcagtccaaacagctgccacagtgtcgg

SEQ ID NO: 116558 - DNA, 412 bp, Zea mays
  Clone ID: MRT4577_3778C.1
tattttgagggatgctgcgcctgctggagccgccgcgcacagttattgcggggtcccacgagtccttcttccactcctcccacgcctcctggctggtctcattgcgcttgataatagacgacggctagctagcagcagctctgttggtgtgtgtgtgcgtgaggggggtagctgctgctggcgctagctggaaaggtccgcagtcatggggaggggacgtcttgtgctaagctaatcgggaacaatatcacccttctgcacaccttgcaccaagcgccgaaacgtactactcaagaaggcttgcgagctcttcgtgctctgcgacgcccaagcattgctcatcgtctactccaaccgcggtaagctatacgagttttgtcacggaccgatactaacgagaacacttgtgagg

SEQ ID NO: 116559 - DNA, 189 bp, Zea mays
  Clone ID: MRT4577_37790C.1
gtaaattccgctccgcactgcaacaaaggacaacgccaacgaccggctctctgacgcatacggggagaggcacccatgacgcgcaccttcatacgtagcaacgcttgcgacgcccgggatgggccagctgcaccagctagcagagctggggaaacgcctggcccatctacactgagtaacgtgcactct

SEQ ID NO: 116560 - DNA, 467 bp, Zea mays
  Clone ID: MRT4577_37791C.1
cccccaaacccatccatgggggttttcaccgccctgtttttggggggttggtacaagagggggccgaagggggaaaacccagctaaaaagggggggaacttttttttccaaaggaaaaaaaaacgctcccaggcgggaaaacaacgacaacaaatggtttggagtttttaaaaaaaaaaaaggggggggttgtccccaagttgggcacttgggtttttgaaaagggccaattttggggggatttggcccacccgccccgggggggcccctttttggggggggccatttccttaaggattcgggcccggcctttggccgggatgggcccccgggggcccaaatttttttatgggccccacccggggttgagccccgattacattttccggaacgaggggccccccaaaagggatttttcccgcgggttcttggccccccacaagttggacagggcccggagctccccc

SEQ ID NO: 116561 - DNA, 417 bp, Zea mays
  Clone ID: MRT4577_37792C.1
ggggacccacaaatttatgttttcacaaagattccccgatttgcttgcagaactaaatacccggcacattattttgatcactacgggtggcagaacaaaaacaaaagtttatttcccctggaaaagggtggcgcccacccgggggggggggtaaaaaggcaaagggaggttgcccaactggaacaaaaagcacaacatgtcgggggggcaaccaacccatttacccaccccctttgtgggctggtacacaactcccaacaatgctccaccaaactttggagatgcaaaaaagggaacttccaacccccccccttcaaatttaaaccggcccccggtttggggtggccctccaaaccgaaaaaaaagggccccctggaaccggccccctcaatttaaaaggcgacagggcaccccccc

SEQ ID NO: 116562 - DNA, 730 bp, Zea mays
  unsure (1)..(730): unsure at all n locations
  Clone ID: MRT4577_37793C.1
gggggtttaattaagaatgcatgacgtatgacaggaagtaagcaactaccgatacaaacggcgcatataacgccggactaaaacaaaactaatacaatactgactactaggtcctgggggtgggctgaagctatgaaatgaatcatagtctcaaatgaagacagttttggtagaaatattgcgggcaaatagtggaatagggaaacctactaaaatacgaactgaaggccccattgaatatgtcagggctgattgtcgcattggccacatgcgggatgtagtcgtagtcggggttgtcgtatgctgcttagttgtcgtagtaattgtgcatggtcacttagttgtagttgtacgtggacttggtgggcactggcgctgtgttggtggagtaaacgggcttggacgtggtgtagacgttgctggtggtgcgttactggccgttatagagccggctggtgtggcagtgcatagactatcttatggggttttgctgcttggctgtatccgtctaatctgtggcggcttacccgctactcttgcagatgttgcttgcaaggtacatagcaacatcaaaaacctccaccctccctctggccctggcttctgtctcctccttggtggctctgggttcctcccttcttcttccatgcttgcgtggtgccacncgacttgcttggagcnctgcatgccgggctacccatcatccctggtagcaccactaaacaccccc

SEQ ID NO: 116563 - DNA, 456 bp, Zea mays
  Clone ID: MRT4577_37794C.1
ccccaaagcggattttatatattataggtttggggaaacgagtttttaaaagcgggcttttttggaaagaaggggagggggaccaaactgggctttcctttcgggggggcccggcccgttgttggcccgccccggggcccgggccggcccttttgggggggtcaagaaaaaaaagaaggcccaacataaaccccctgaaggccaacattggtttggggcccaacccccaaagaaaaagcccgggggaaacttaaaaggcccccaggccaagcaaccaggcttaattgccggggttaaccgtccgccccacgtacaaagcaaactccttcccccccttttccccgggcccgggcggaaggccccccaaaagaaaactggcgtgccccaacaggcggatggcccgcacctttcaaacaaaggccagcttaaaacaaaccacccggccaggttcttggc

SEQ ID NO: 116564 - DNA, 413 bp, Zea mays
  unsure (1)..(413): unsure at all n locations
  Clone ID: MRT4577_37795C.1
taaaaaaaaaaaaaaaaaaaaaaaaaaaaaaaaattaaaaaaaaaaaaaaaaaaaaaaaaaggaaaaactatataaaaaaaaacaaacttacaaacacatacatacaaacatcatacctcttctttaatgccacctaatttcatttccctgcccttatttttacaacatttatcctggtaaacccctctctttacccaactaaatatccttgcaccacatccctttttctccattttttttaatacccaaaaggcccccacccttcgcccttccaaacaatttcccatccttaatacccattgttactctccctttattcgcccattaacccctccccttttggcgctttcccgcaatgtgacaggtacacttcccaangccctaccacccaatcctttcactttttttcctt

SEQ ID NO: 116565 - DNA, 399 bp, Zea mays
  Clone ID: MRT4577_37796C.1
gaggaggaaaggcccggaccaaaaggaggggtccatagcaaaaaaaaaaacaaacgtaaaaagggacggaaggggccaaggggggggggccccttgccggaaaaaggggggaacaacacgaaagggaacaccgaactcatggggggccggttggcctagggaccaaaagggttaaaaaaaaaaaagccctcccctaaaaaggaaaggggcggaaccccctcctgggcctgggactcctcctgggggggaggcgggtcctggtactggggggactccaaaaaaagggggttaaaggtggttttgggctgggggaaatccaatttggccaagccctcgcccggggaccaaggaaaaaaaaccttcctcctgaacaagggagagaaatggtcgctcaccctt

SEQ ID NO: 116566 - DNA, 1547 bp, Zea mays
  Clone ID: MRT4577_37797C.1
ttttaaagggacacgaggttcgcttgttgagtcggaaaaattgccgtcacttgatttacctaaggtaagaaagaacaagtttattgagattcttcctattaatgtgggatgtttaggcgcctgcacatactgtaagacaaagcatgctcgtggccatttgggaagctatactattgacagcttggtggatcgtgtgaaaactgtcgtctccgaaggtgtccgggagatctggttgagcagcgaagatactggtgcttatggacgggatatcggtacaaatcttccaaatttgttaaatgcgatcgttgcggagcttcctgttgaccaaagcacaatgctccgcataggcatgacaaatcctcctttcatactagagcatttgaaggagatagctgccgttttgtgtcatccctgtgtttactctttcctccatgtccctgtgcaatctggaagcgattctgttttaaaggcaatgaatcgtgaatatactgttggcgagttcagaaaggtagtcgacactctgtgtgagcttgtccctggaatgcaaattgctacagatattatctgtggctttcctggtgagaccgacgaagatttctctgagactgttaacctcgtaaaggaatatcaattccctcaagtccacatttcgcagttctaccccagaccagggacgcctgctgctaggatgaagaaagtaccaagcaacgaagtgaagaagcggagccgtgaattgacttcagtcttcgaatcgttttcgccataccaaggaatggaaggcaaagtagagaagatctggatcaccgagattgcgtccgacggtgttcacctggtcggacataccaagggatacatccaggtgctggtaactgctcctgatagcatgttgggaacgtccgcggacgcgaagatcacgtctgtcggacgatggtccgtcttcggtgtagtggtagaaggatccgttgcggtcatagaagcaccaatacaaactagtgccgaactgcaggaggaacacgtacagaatcaggtggaggaagctggctgctgttgccaccgactcctgtggcgcctgcgcgtgctccaatgaggcgcaaccgtgtggcccagaccgatgtggagatgcacttcgtgccccgcagacctgtggtggtgacgttgttacaactcgccaggaggcactccagcctacgctcgtgaggagaagcgtagatggaaccacgaaaggaagcgacagtactgcggcgcattcagcagggaaggaacagcgggtggaagtagtgactaggcgtggggtagatatcgacacggttctgtggtgcggtttggccgcgagcttcgctgtgacggtagccctgcttgcactcctcaccagcaagattttgtcgacgacatcacactagggctaataaggcgaagctttgtaacttgtggtttggttcttgagcgtgtcgctggatcgattttggcggtctctttctttacttgatccgcctgtatgtcgttgcaaaaaactgtgccactgtatacaaaaacacgtggttgcaaac

SEQ ID NO: 116567 - DNA, 2541 bp, Zea mays
  Clone ID: MRT4577_37798C.1
aattcggcacgaggccgcagccgagatggaggacatcgaggacgtgctgggcgcggccggcctttctggcggcggagcgcctccggggctccgcctcccgctagccgccgtcgcggtgaagcccaagcgccggtcgtccagggtcgcacaggcgccgcctcagcccgaggccgggatccccggcacgcagacgatttacgtcaagacattcgggtgctcacataaccagagtgacagtgaatacatgtcaggtcagctctctgcatttggatatgcgatcactgaagatcctgaaggagccgatttgtggctaattaacacatgcacagtgaaaaatccaagtcaatctgcaatgacaaccctcatatctaaatgcaagaatgcgaacaagccacttgtagtggctggatgtgtaccccaaggaagccagggcctcaaggagcttgaaggtattagtataattggagttcaacagatagaccgggttgttgaagtggttgaggaaactttaaagggacacgaggttcgcttgttgagtcggaaaacgttgccgtcacttgatttacctaaggtaagaaagaacaagtttattgagattcttcctattaatgtgggatgtttaggcgcctgcacatactgtaagacaaagcatgctcgtggccatttgggaagctatactattgacagcttggtggatcgtgtgaaaactgtcgtctccgaaggtgtccgggagatctggttgagcagcgaagatactggtgcttatggacgggatatcggtacaaatcttccaaatttgttaaatgcgatcgttgcggagcttcctgttgaccaaagcacaatgctccgcataggcatgacaaatcctcctttcatactagagcatttgaaggagatagctgccgttttgtgtcatccctgtgtttactctttcctccatgtccctgtgcaatctggaagcgattctgttttaaaggtatagtttaactcgaactcttgttctcataagctttttagcagcaaacgcacaacatgaataatctttgtctctaacttatatcctgtgccttcacctcgatctaactcagtctatgattgcacatataaggcaatgaatcgtgaatatactgttggcgagttcagaaaggtagtcgacactctgtgtgagcttgtccgcggaatgcaaattgcagcagatattttctgtgagtttcctcgtatgccaagcaagttctcagtttagcgattcgctctgagttatttttttatgagtacatctgaataatatttgattaattgaatgccacaaaagatgttgctgctaatagtttgcactgaaccgacatcccattttcaggtgagaccgacgaagatttctctgagaccgtcagcctcgtaaaggaatatcaattccctcaagtccacatttcgcagttctaccccagaccagggacgcctgctgctaggatgaagaaagtaccaagcaacgaagtgaagaagcggagccgtgaattgacttcagtcttcgaatcgttttcgccataccaaggaatggaaggcaaagtagagaagatctggatcaccgagattgcgtctgatggtgttcacctggtcggacataccaagggatacatccaggtgctggtaactgctcctgatagcatgttgggaacgtccgcggacgcgaagatcacgtctgtcggacgatggtccgtcttcggtgtagtggtagaaggatctgttgcagtgatagaagcaccaatacaaactagtgccgaactgcaggaggaacacgtacagaatcaggtggaggaagctggttgctgtgccaccgactcctgtggcgcctgcgcgtgctccaatgaggcgcaaccgtgtggcccagaccgatgtggagacgcacctcgtgccccgcagacctgtggtggtgacgttgttacaactcgccaggaggcactccagcctacgctcgtgaggagaagcgtagatggaaccacgaaaggaagcgacagtactgcggcgcattcagcagggaaggaacagcgggtggaagtagtgactaggcgtggggtagatatcgacacggttctgtggtgcggtttggccgcgagcttcgctgtgacggtagccctgcttgcactcctcaccagcaagattttgtcgacgacatcacactagggctaataaggcgaagctttgtaacttgtggtttggttcttgagcgtgtcgctggatcgattttggcggtctctttctttacttgatccgcctgtatgtcgttgcaaaaaactgtgccactgtatacaaaaacacgtggttgcaaacaagttttctcgtgaattaaaaaaaaaaaaaaaaaaaaaaaaaaaaaaaaaaaaaaatcaaaaaaaaactcgggtgcggtttggccgcgagcttcgctgtgacggtagccctgcttgcactcctcaccagcaagattttgtcgacgacatcacactagggctaataaggcgaagctttgcaaccacgtgtttttgtatacagtggcacagttattgc

SEQ ID NO: 116568 - DNA, 409 bp, Zea mays
  Clone ID: MRT4577_37799C.1
attcggctcgaggccaagcaccagcgctttttagcagccttttcacgtctcgccgatagatgtacgtgcgggcaccacggggcctgccacgttcgtccagagcctgcaagagcgcgatgaggggcctagacgaggagttcctgggcggtgcgcacacggcggtagtcatacgacgggggcggcagctaggggcgcgcggagttgaggaggtcgtggggcgaccctacagtgaagcggcagccgaagctggccgtgtacaaggcctacgccgtggtggccatgttcacggcgctgatccggaagggcttgcgctggatgatggaccgctgtaccggcctcgtgcgcctgtactgaatctagacccccagccatctacctgcagatgctgccttggagtgttgctacgatc

SEQ ID NO: 116569 - DNA, 368 bp, Zea mays
  Clone ID: MRT4577_3779C.1
gggaccccccaagtttgtttattatccacgggccccttacttccaaaaacgacccaccccgaaactttaccttgtttataacccacccctgggggggagggccgggtccgtcctccaaccaaaacaaaaaaaccccctcgaggaaaagggggggcacccgtcgatcgaaaaaacactaggaagggggaggccaaccctcaaattttgctgcccgggacgtcaacaacaaaggggaccctgacatcgttcctttttaggccctggaggggggttttgacgaatcccatcccgacaacctcaaaatccggggggatcccgggctccccggaaaagtcaagcatggcctggccctcccctggggccaaatt

SEQ ID NO: 116570 - DNA, 356 bp, Zea mays
  unsure (1)..(356): unsure at all n locations
  Clone ID: MRT4577_377C.1
agaggggaagaacagggagacgatactatattgtataattcaaagccaggttcatttcatccccttctctgccctaagctaggcttatatattatattccggcactttggccgggggggcaactatttaacccattccggcctataaaacttggtgcttggcctgcgagcctaggcgcttcattatctggtgtatctcctcaaacatgctatgcctgacctccagtgactgaggaagggatactgaccttcccttctccatgaaaaccaaattgcccccaacctgaaccctgaggaaaggagaggttganttcttcccagtcttcccatgttgccaacgaggaagggtgggacgac

SEQ ID NO: 116571 - DNA, 299 bp, Zea mays
  Clone ID: MRT4577_37800C.1
tccctttgttggttaaccaattaacctttgaggtcaccttgaggggaacaaaaaaaaaattgcccctcccttgggagaacttaaagaagaaggtgattaataaaagccttaagttgggacttggccgtgcttttaaaaggttttaatgggaaaaaccgtgcggtaaccaacataaagcgcaattgaaaaaattccccttttgtccacttgacttattaccaaaaaggccccactgaaccggctttccaaacaattggagaagccttaaagctaaaggcccccgaatcggttatttttcc

SEQ ID NO: 116572 - DNA, 721 bp, Zea mays
  unsure (1)..(721): unsure at all n locations
  Clone ID: MRT4577_37801C.1
tctgcttgatctctatagagtggtgcttacaattatttatacttccttctagtccttatctaatgagataaatcccctcttttctctctaacaaatcttatctccttaatcttctaatccttatctgcatgcctatgctgttgcccggcgcctatagtggcggccggtcataacagatatatatcacacgccttgtatggtatctataaagaaggaccttacttaaattataagaactgacagcctgttggatcacagatttaagtattaaaaaacaactcaacctgccgggggatcacatatttaagtagctgaggtcgactacacaaagtggtcacatttcaccatttaagtattaaaaaaacaactcaaccctggacattcagtgaagacgacagtagttgttttgggggtcacatttcatctgtacatcttgattcttgaaagtacctacaagacatttttgttcactggttatggtgaatttgggattctaagggcctttatgctctcaaacaatttggttgcttaggatggtataaaacatcaccctgtcccaactcccaaggcacctgttaaggacttgtttggttattcctatcccacgtggattggatgggattggaaaaaaatgaaagattntaacttgtttgggatttaaatctactcaattccactcaatccacatggattgaaagaaacaagccctacatgcactaac

SEQ ID NO: 116573 - DNA, 317 bp, Zea mays
  Clone ID: MRT4577_37802C.1
aacgctcatactaggaagtgagccactttgaacaaaacgttgacagttctgagcgaccgggacgcctaagatgccgtcggcggaggcaagggcacgagggcgtggcctccaaagctctgatcgtcagttgatccgcgaatcggtctgtctgaactcagcatctactcacactctcacatgctcagctagtacagaccgccacatacacccctgtgtctgaaactcggcggttgtcttttagcttcccaatgcatgtgtagtctgatctctctatcatgaaaacgcgcatctcatttagaatgaactgcagttggaaa

SEQ ID NO: 116574 - DNA, 267 bp, Zea mays
  Clone ID: MRT4577_37803C.1
cccacgcgtccgcccacgcgttctctgacgcgtgggcgcaaattgcaccaagaggtgcatctataggccgtcgactggcgaattaatggcgtcgtcttctagcagcagccaccgccgtctcatcctcgcagacgtcgtcctgctctccgtgctcgcggctgccagcgccagcgccgaaacctactgcgtgccgtggtgggccatcccgcacaacccgctcccgagctgccgctgttaccttaccagcctgacctgctgcatcgggcc

SEQ ID NO: 116575 - DNA, 355 bp, Zea mays
  Clone ID: MRT4577_37804C.1
ctcggggctgtttgtttctaatggattcttttttttttgttgtgttagttttatgatcctggtttgttttgtctagcacggaaaaagtcacattgaaccggaccctttttggccgtgaaagacttttacggcaaaaaaccccccggtcatattttacccccccggggttgaaaaaccaaccaggatcctaaaacgggccctccatatatttggggttccttttgttccgaacacgggggtggccccggtaatattcggcccggttcctggggggggcccaacttttcttttaggggggttttttaaagcttgggggaaatatgggcaataggtgttttccgggggaaaatgtttt

SEQ ID NO: 116576 - DNA, 232 bp, Zea mays
  Clone ID: MRT4577_37805C.1
accgcatcgtccgcgcatcccactccccaaagatgccaccagcgactccgtgaggccgtcgtcgccgccccatttacttcccactaccgccttcgccaccgccgctccactgcaccactccagtctacctacccgtacacgcactctccgcggtccacgccatggcctcccagctccgcctccaccttgcggctacaccgcctctccttcctcaccgccgtccgcacctccc

SEQ ID NO: 116577 - DNA, 374 bp, Zea mays
  Clone ID: MRT4577_37806C.1
cagggggaaaggaagagccggacggagctcagcgccggcgcgagctgggcctgggctgggcagggcaggcaggattaccgcgaaagggttgacctcggccgcggctgcgccctcctcgaaggggttgtcgtacgtcgatctccccgccatggacctttccttccctcctgccggttccttgctctgctccgctccgctccgaggtcagcaaggagggcaggaccaaccggaagaagcagcagcctacttggacctcggttccttgtgtactcctcccccacccccacctagtactgaaaatttgggcagaccggccagcccggtctaagtctgtgttttcggactaaacggatttaggtaaaaagatctgattt

SEQ ID NO: 116578 - DNA, 837 bp, Zea mays
  Clone ID: MRT4577_37807C.1
gtctctcccgcagaaaccctaaccggagatccgccatcatggatctcctccagtcctcttacgcgccggacgacgcgtcgtctccggaggcttcggcggccgcgtcctcgccgctccgccttccgtccaagtccgccgcccccgccgtcggtgacaccgcgctcgcgctctcctccgccgcgtccgccgcccgcccgctcgacccttcgctccacctcgtcgccttcaaccccactgctgaccagctctgggctcccatcctcgggccccagcacccccacgccccgatctcgtccgcttccggcaaccgcaaccacaagctcggccacgttgaggacgccgctgtcctgccattcctattcgacgagcagtacaacaccttccatcggtttggctacgccgccgacccgtctggcctccacatcgtcggcgacgcccagccccaggcgcctgagcccgacaccgtctacaacctcgccccttccgagcacaagcgccgtcgcctcctggccaaggcggacaacgaggcggagctagcccccccggaggccaagaaccccgcctccgaggaatggatcctccacaacaagcagagtccctgggctgggaagaaggaagcgcctcccgcggagctcactgacgagcagaagcagtatgcggaggcgcacgctgccaagaaggccgagaaggaggcccgcctcgaagggaagagcgagaggacagaggttgtggtcaagaccaccttccacggcaaggaggagaaggactaccaaggacgctcctggatcacgccgcccaaggatgccagggccaccaacgatcactgctacatcccca

SEQ ID NO: 116579 - DNA, 455 bp, Zea mays
  Clone ID: MRT4577_37808C.1
ggaaggggcaaacccaacccaacgaaagggggggggtacatgtttagggaatccagctaaaaacaatagttcagcccggtgccagttaaaaaggcttagttatcatcgggggggcacagggtaactgagataatgcacgtttgggagcatttaaaaacactggtccaaaactgggaagggagcttatttacataaaaaactggaggatcctccaagaggtggcataaactatttttttacccatcagggggataaaagggaagggacttgagggggatcaccttttcctcaaaggtctccacatgttttgaggggaaaagaaacccaagggaacagttttcaagcactttagggtttttaaaccatgctttgggagcttcgattggtttcattttgaaacgaaaatttttgataaaaaaaagcttgggttttaaaggtcatctccgtggacggga

SEQ ID NO: 116580 - DNA, 161 bp, Zea mays
  Clone ID: MRT4577_37809C.1
gcttctacgagcccttttttctttttgacgtcgccaactccttggggggcgtgcacctggtaggggcgtaccacatctactgccagcccctgttctccttcttctagaagttgggcgcgcctgaagatgtctatgtccctctacatcacgggctatgtcga

SEQ ID NO: 116581 - DNA, 496 bp, Zea mays
  unsure (1)..(496): unsure at all n locations
  Clone ID: MRT4577_3780C.1
gcttttcctcctggnagcgctctacttggggggggggggggccgcaaccctcatcacatccgccttccactcgctcctgctgctcctccgcctcctcctccgctacccgcgccgcgctgcccctaccgatgatgggcccgccgcggcggcgctgctctaccagggcccnntcctgcggggggtgctgggccctnctncncacaccttcnnatacccctccctctacnccctcntcnacctcnacctactncctctccccnnccacctctcctcctactatnccctcctcntcncctccacctccnnccccntntnaccacctcttnactntaccctannacttnnnntactaccanaaccctctnancatttactactnctactattctncannacannnncaanatnnananctcanaacntccattncctanntcacaaacaccccctnnncananannatnatntttaccttccaacctnnctctnatctcat

SEQ ID NO: 116582 - DNA, 146 bp, Zea mays
  Clone ID: MRT4577_37810C.1
ggccgcttttttttttttttttttgcatacggaaggcttaaattcacgccaggaacctctaacgccaagcatactagcaggatactaccgcaccaaaagccaggctccatagcccaacaaaaatacatacgtccaacagcgacgga

SEQ ID NO: 116583 - DNA, 301 bp, Zea mays
  Clone ID: MRT4577_37811C.1
gaggctcggccgggcttattgcggctcacaggacagggcgtcttgcctctctagttccttaggaactaaacctgagccattggagaatactttcctgagctgatctgaccggtgcagacgactcggccaggcatacggtctgatcccaagctttttgactcgagctggttctggagtcactgcttgttgtgtgttggtgagtgttgaggataaagagcctacgagggtgcgatgctgaattactattctgcttgaataagaaattctaacaaagaaaggcctgcagagcgtgttctacttg

SEQ ID NO: 116584 - DNA, 1409 bp, Zea mays
  Clone ID: MRT4577_37812C.1
ggcaagtataacacgactatattaaaaacatgaccctacaaagacaaccatttacaaaactaaactccctcaagggtattcatacttatattatatctttgagaactaagatagtagcagcggcttgtacatgctttggtcaaagaatttaaagaatcaaggacagtactattagtgtggcagtagtgtaaaacatcaccataaacaattaagttctacacaatatataataaattttatgatacacttgactaaaatgtccatccatgtgtgttagctgcagctcacttgccaggtttttctcaaagtatcacgctcaaccaattggccagataaagctcttgtcagatcatacgttgacaacaaccacaggctcgaaccgaaacgatgacatgttgttttagaggatcctcagcaccaacaagacctacaagagacgggtctggtctagctcaacaacaggagagtcaggcgtctggaatcagcatctagcggtatagagaaacacatggtcatatttgattcatcaagtaccgcatatttcaagattgatgtaaactctgctaaaatagtgtttgtaccattcacatcatccccgtacatactaattattcgctctagttgttatataccgagggcagggcacacatcgggtgtgtatctcttatgtattcattggctaagagaaatcacctgataaaagagtagcagagatcagttaaacctttccagcttggttgctcattttaccaattattcatcaaatcctgaaatgcagcaactgtagaaatcattaagctaacattagttgatcatttctgcattaataactctagtagttgattagttcttaggatcgtaaattcatgtgagaggaatgtaggcaagtaccatttcaaggaattgaaagagggctaagcctaaggaagagaattacaagaaaaaaagaaatattcagtgtcaagctttatgttttatcatgagaacatacttcatatatgtttaacaattagagtaaaaaataaggtgagaacacatacttccctatatcttgaaggtagctaagacacagctaccttattgacacaaaaaataatcagaataaggtaaaataccagcagcatattttagttcatatgtagacataataaatgttgcattttcccctagcaaaacattggaaacagttgatgatataaatgatgctaatataatcatagcagcagcaaaacatttcataactgatactaatataatcatagcagcagctttacatttcagtactgatgcttttttaatcttaggtggagtacgtggccctcatactgcttccctggaatcagcatctagcggtatagagaaacacatggtcatatttgattcatcaagtaccgcatatttcaagattg

SEQ ID NO: 116585 - DNA, 553 bp, Zea mays
  Clone ID: MRT4577_37813C.1
ccaaggtattcatacttatattatatctttgagaaataagatagtagcagcggcttgtacatgctttggtcaaagaatttaaagaatcaaggacagtactattagtgtggcagtagtgtaaaacatcaccataaacaattaagttctacacaatatataataaattttatgatacacttgactaaaatgtccatccatgtgtgttagctgcagctcacttgccaggtttttctcaaagtatcacgctcaaccaattggccagataaagctcttgtcagatcatacgttgacaacaaccttctcttgaaagcagagcaaatacacagtgagctaaaatgaagctttagcttcagagaatggagagctatcatgctaccagcgctccttatcttaccacaggctcgaaccgaaacgatgacatgtttgttttagaagatcctcagcaccaacaagacctacaagagaacggtctggtctagctcaacaacaggagagtcaggcgtctgtaaacacatgatacgaggaaaaagtcaggcaatgtctttgtaatatc

SEQ ID NO: 116586 - DNA, 1901 bp, Zea mays
  unsure (1)..(1901): unsure at all n locations
  Clone ID: MRT4577_37814C.1
tagggnccttttgtggaaccacggggcaagctccgaaggacatctatatatactgtgtgcatatgcgcttcacgagcaaagtgtccgaagaataacaggaaattaaagcgatatcgtaatccaagaaccgaggccatgtccggtcgtaatttcgcaacgacggtggccatagcggtcgtcgtcgtagccgcgctagcgtcggcgtcggcggccgcggacgacgacgagcaagggcacctgcgccgggaagccgaccgcatcgtccggctgcccgggcagcccgacgacggcgtggacttcccgatgtactcagggtacgtgaccgtggacgagggcgcggggcgggcgctgttctactggctgcaggaggcggccgcggaggcgcagccggcgccgctggtgctgtggctgaacggcgggcccgggtgctcgtcggtggcgtacggcgcgtccgaggagctgggcgcgttccgcatccggcccgacggcgccacgctcttcctcaacgcctaccgctggaacagaggtacgtgcgtatgtatatacgccggtggttagctctaggttgtgaccggtgaataatatatataatggctgtgcagcggcgaacatcctgttcttggactcgccagcgggcgtcgggttctcctacaccaacaccacctccgacctctacgactccggcgacaggagaacagctcatgattcgtacaagtttctggcgaggtggttcgagaggttcccgcagtacaagtaccgcgacttctacatcgccggggagagctacgcagggcactacgttccccagctgtcccagatcgtgtaccgcaagaacaagggcgtggagaaaccgatcatgaacttgaaaggcttcatggtcgggaacgcggtgacggacgactaccacgaccaagtgggcacgttcgagtcgtggtggaaccacgggctcatctccgacgccacgtaccggctgctggacgccagctgcgtgcacgacagcggcgagcacccgtcgccgcggtgcaacgccgcctacgacaaggcgacggcggagcagggcgacatcgacccctacagcatctacacgcccacatgcaaccagacgtcgtcgtcgtcgtctacgccgaggaggatgaggctcaagggccgctacccatggatgagggggtcttcttatgacccgtgcaccgaaaggcactccaccgtgtactacaaccgcccggaggtgcagcgggctctccacgccaacgtcaccgccggcgccggcggcgccatgaactacacgtgggcgacctgcagtgacaccatcaacaacaactggggagattcacccaagtccgtgctccacatctacaaggaactcattgcagccggactcagaatatgggtcttcagtggagatacggacgcggtagtccccttgacagcgacaaggtactccatcgacgccttgaaccttccaaccgtcgtcagctggtacccttggtacgacgccaaggagcagaagcagcagcaggaggttggtggatggagccaggtgtacgaggggctgaccctggtgacggtccgaggggcggggcacgaggttcctctccaccgcccgaggcaggcgctcatcctgtttcgccacttcttgcgtgggaaacctatgccgcctaagaacggaactgttgtgtagtagtatttgttttctcggcataattaatgatgcaaaaataatttatcgcgcgccttcagtctaaggccatgtttggattcggtactactaaagtttagttggactaaactttagtgactaaattttagtcactaaaatctaccgtttggttccggtgactaaaactttacacacaactattattactggacataaagactgaattgcccctgttcaatgcccc

SEQ ID NO: 116587 - DNA, 929 bp, Zea mays
  Clone ID: MRT4577_37815C.1
ggaccctcgagtcgccggcttacccggcccgggacccttccggttcgcgcgtgcacccagccacccaccaacccctgcctccgtcgcagtgcctgccatcaccgtcgtgcgccattcccaatcttgctggcgtttcttatccacgagttttcttctctagtgactactttcttccatgctgtgctgtgtctaaccccggccgagctttcttcattgattctctccatgccgagctgacattgttgggccctgcgacatcatctttttcctaccactgctggttgttccctggttcaaaggacgacactggtggccgcgctctacccaagttcggcgagtgggacgtgaacaacccggcgtccgcggacgggttcacggtcatcttcagcaaggccagggacgagaagaaagctcccccgacccaaggccacatcaggaacaacaggtcggtgttggctgacagcaaggactccagggccgagaagatgacctcctacaacgccaggaccaacgcatcgaagaaatggttttgctgtgtctcgcccagccccacacaattttgaggaagctaacgacagagaaatggtccattgcatagctgcggttctgtgaagctctgtcgctggcagaccggccgcgagtgaactctccggatacttgccagtgacagtgtatagccgccgttgcaaatgacagtgtatagcgttcttagctgcctgtgcataccgtcagttcaggttaatgtctgcttgtaatttttcttttctcgcctcttctctacggtgtgtaacccttcctcagcgttaatcctcctgctgcattttgctgtaactttgggcgagggtggatttgtttcggctctgaccaaacctaaccaggtcacagcgaattctcagattgctgcagtgaccgccaccaacctgacaaac

SEQ ID NO: 116588 - DNA, 572 bp, Zea mays
  unsure (1)..(572): unsure at all n locations
  Clone ID: MRT4577_37816C.1
gcacttgcgcagtttancatgaccttaacattcaaacctgtcaccctcatcacagtacaaactagtatcatgaggctggtgtgggagttgttgctagcggtgactcgtaaaaggacatgcagaccatgtacttatatctggccatgatggtgacactggcagcttcaaaatggaccgcttcaacaatgctggactttcatgggaacttgagttggctgatacacatcaaactctagtatcaaatgggcttctaggtcgagctgtcctgcaaacacatggacagttgaagactggtagagatgttgctggtgcttgcttacttggggcacaagaatttggttttagcactgacccactgattacacttggctgtcttatgatgcgaaaatgccacatgaacacttgtcctgctggtatagctactcaagacccagtgcttagagaaaagtttgctggagaaccacagcatgtcatcaactttttcttcatgctagctgaggagctaagagaaatcatggcaaaccttgggttccgcaccattactgaaatggttggacgttctgatatgcttg

SEQ ID NO: 116589 - DNA, 1018 bp, Zea mays
  Clone ID: MRT4577_37817C.1
cccaagggagattcaagtatcatccatcagtgatccaatctcagctacgttctgtgaacgagttgagaaagctaactcaagccattccttcacagcaggacttgctcaaagtgtaggattaaggaatcaacctctgcgcgtgtacagcatggtgaaatatgctgcaatagcacgaggcgatgctgaaatcttcatgaaatttgcaagagctggatacaaagagaagatatgggatcatgctgcaggggtggttatcattcaggaggctggtggagtggtcacagatgctggtggccgcccattggacttctcaaggggtgtttacctggaaggtttggatcgaggcataatagcttgttccggagcattgcttcatcaaagaattttaaatgctgttgatgcgagctggaactcatcaacactatgaaccaaacaataaggtcttaggagagaatggcctcatgttggtcatagcatggtaaattggaaaactgatttaagtattcattgtggtgctgttgtgactatggggtaacaccgtaacagtgcagcatataggatagtaatagattgtctgctcatataaacaagaagtcgtctcttgaggctgacaaattgctggcttttgttcaacgatgccatatgtaattttgtataggtgtctgttgatgaaaagcatgtgtgcatgcttttgtttttactaattgacatgtttcttttcaacttgtgcctgtcaatcgtcaggtgtattggttaagacagtgcagcaccatttgctgacaatcataatgttaaaaccttcaactgattcatcaaatgagttattgtccgccagttttctgtcatctaccccttctgttccaaattataagacatttagttttttttcagatacatcgatttactatgtatcagacagcttttattttttcataatgtatcagatatagtgtatatttaagtgtatagaaaaaagctatgtatttggaatggagggagtattgagcactatgttaac

SEQ ID NO: 116590 - DNA, 957 bp, Zea mays
  Clone ID: MRT4577_37818C.1
ccggaaccggcagggtccggcccagagcgaccggtggttgtggccaatccttctcctatctcgtcccggagtcccgggggaaattttgccccagaaacactagcgcgtcggatcacaagcaagggcgaaaattttctgtggctccagcggctgaaggacgctgcggcacccatgtcggccatcgaccgatcaataaataaacatggacagaatcgaattggcaagcaggacgacactggtggccgcgctctacccaagttcggcgagtgggacgtgaacaacccggcgtccgcggacgggttcacggtcatcttcagcaaggccagggacgagaagaaagctcccccgacccaaggccacatcaggaacaacaggtcggtgtcggctgacagcaaggactccagggccgagaagatgacctcctacaacgccaggaccaacgcgtcgaagaaatggttctgctgtgtctcgcccagccccacacaatcttgaggaagctaacgacagagaaatggtccattgcatcgctgcggctggcagaccggccgcgagtgaactctccggatacttgccagtgacagtgtatagccgccgttgcaaatgacagtgtatagcgttcttagctgcctgtgcataccgtcagttcaggttgatgtctgcttgtaatttttcttttctcgcctcttctctacggtgtgtaacccttcctcagcgttaatcctcctgctgcattttgctgtaacttgggcgagggtggatttgtttcggctctgaccaaaaccaggtcacagcgaattctcagattgctgcagtgaccgccaccaacctgacaaacaaaaatgctgcgacgttttcagagctgtagaggatgttctcatggaaatacgttatatattcatataattcttataactttcactaaaaaattccaaaaaaaaaaaaaaaatttgcgggccc

SEQ ID NO: 116591 - DNA, 361 bp, Zea mays
  Clone ID: MRT4577_37819C.1
tgtggaacaactttcatctttgattggacccagtaaaaattcaccaaaacaattgtaaaataaagaacaatacaatatacagtacttattatgtaaagaaaggctgatcactgctgtattttactactacatgttttatttttacgtacatgtataaatgtaacaaagtataaactcaaacaaatcggtgagcgaagtatttgtgccagagtccagatctgggcaaggtgtaattgttagtggagcaggaacccgaggacttccttcacgcggctctgccaagccggcttcccggccgccgccggcttggcgttcaggacgccgtcgttgccggcgagcaccgtgtacttgtcctttcttg

SEQ ID NO: 116592 - DNA, 275 bp, Zea mays
  Clone ID: MRT4577_3781C.1
cagggcaaccgcaccacccccagctacgtggccttcacggacaccgagcggctcatcggggatgcggccaagaaccaggtggcgctgaacccgcagaacaccgtgtttgacgcgaagcgctagatcggccgcaagttcggcgacccggtggtgcagcggacatgaagcactggcctttccaggtgatcaacgacggagacaagcccaaggtgcaggttggctacaagggggagaccaaggcattctaccccgaggagatctcgtccatggtgctg

SEQ ID NO: 116593 - DNA, 1032 bp, Zea mays
  unsure (1)..(1032): unsure at all n locations
  Clone ID: MRT4577_37820C.1
ggatcatggctccagcccgcgcctccgaagcccattccggttcctacgcatgcgtgccttgccggtcgccgactccaacctcgccgtgagccagctctggtctccgcttgacctcgccctgcagctcggttcctggtcgtagccgtcttggactgcgtcgtcgcccaaatccaaaaacaacctccccaacgccctggcggtgagctcccagtcctctgctcaccggcgccatggacagctcgtggtcgctgcgttgcctgggtcccagtcaccatttccaagccgcccagctcctagcccgtcatccctgttccccacagccgcgacgttgctcctagccctctgctcgctggacgcacgctcgtccatcgtgctcaagccgtcgaacgctactgtcactgccacttatgtcagctcttcggacctatagtcctacacgttgtcgtcttgttcggtccccatgcaggcacccgtcactgctcgtccatttgcgagctcacggaggactcggtcgaagctcgcccctgctcgtatttctttcaagatgacgtcgcgctccttcccgttcatcgcacccagctcgcgtgcgttgccggagccactcgcctctccctcgcgttcactgaaaatgtcgaggcatcggtcgtcaagctctgctcggccgtcgactctcggcaccgggagcccatcttcccttgcgtatatctttacagaccccgcctcatcgcgtacgtgcgtcatcgatctcgccccgttccgtccgctcggtgccccatacttttgttcagtttgctacgcttggcacgttcgtgccatttgtgtgcgtctcggcatgtcccaaaagcggttgtttgtagttgctgggacaaacttctctgcttcggtgtgctcgccatcgaccgccgccagtgagagccgttgttcgtactctgtttgttccctacccaacatatgtattgtgatattaattaagtctgtannnnnnnnnnnnnnnnnnnnnnnnnnnnnnnnnnnnnnnnaaaaaaaaaaaaa

SEQ ID NO: 116594 - DNA, 575 bp, Zea mays
  Clone ID: MRT4577_37821C.1
atcctttggttctgtgatctttaattttgtctgccctttagattaatacgcaccatccaacgcttctttatgtggctataatttatcgatgattgaggcctttactatgaaaaatgatgtctaaatattgactttgttaacagtaaactgcaatagcggttctagaacttggcacactatattaattggatctttgaaattaaaaaccgcaaaacgaatgctctaacttattgagcctaaaatcatccaaaatcaagtttaattaaaccggatgacgatgtagaataccacgttggagcatactaattaaagtttgagaactcaaatgacacagatgttaaatttagggatctaagagcatctccaagaacgatgctaaaagaccctgaaaaacctttttagggagaaaactcgttctccctcctccaacagctcgtgcaaacttcccctatcgccgtcatgcatccgagccgatccatcccgcaaatttgcgcgaggtgaaatcccccaatccctccgttgccgcacatagcacctgtttctggtgcccattttcgccctcgcgcgcttttgtg

SEQ ID NO: 116595 - DNA, 630 bp, Zea mays
  Clone ID: MRT4577_37822C.1
acgccccgatagttgctatctgtagctagttgctaaggggggaaaaaatggctccgattgtcggtgctgacagtgagccacgcgtcgaaggcagtactggccttaggagccatatagtatgaccccgcatttagagcattatcaggatagccacctgtcatgttcttcttcacacgagcagcgagcgacgcgcgatacctgacctgcactagatgatctggatgagtaggaacatacacaggattgcaaatgatgagcccattggagatcccacaaacggactgtttactgtctgacttgaccttgggcgccgccagttcagagctccaaataggaagtgcttgcaaagcacatagagaggtagaaagcacgtgggctcacttgtgccacaatcatgctgtaaaggatcactggacggcagcaaatgatacattgcagcgaatacctaccatatgtacaaaacggacgtcagagtgctcaaggaaatgggcatggacgcatataggctgtctatctctcggaccagaatactgttccaatggaaccaaagaaggaggctttaacccgcatagcataaggcctacagagacctgatcaacttggaggtgcagaacgtgatagagccatatg

SEQ ID NO: 116596 - DNA, 361 bp, Zea mays
  Clone ID: MRT4577_37823C.1
acagcaccgagcaccaatgttcaaagttagtgtttcataaggtctattttcgttacacatgggtgggaactttgaaacttcagataccatgcaaacttaattctccaaatagcatataatactcatttaaaggttataaaaaaacgcacagtagaaagcttttctgcgagtatattcttcttctgggaggtacgatagatgtaacagggctcaagagatgtattatcgtactttactgaccgcctcctagtaaaattattgacattttgagctaacatcacaatgaatcttctacgatgcacctaggtatatcaggcttatctttcatcacatcgatcgtgcctgacataggtcagatcac

SEQ ID NO: 116597 - DNA, 602 bp, Zea mays
  unsure (1)..(602): unsure at all n locations
  Clone ID: MRT4577_37824C.1
aattcggcacgagggttaccaaagcctaataaatagaaaaaaataaaggatctaattcatctaaaaaaggagacataagatgggtttattataaaatataatcacatatcatctgaaattataggtttaatgttatccaaaaataaaatcagaccttcctacatttctttgggcctaacaattatttctcgcaccaacacacattgactttgatgatagtatatgtattgttcatttatctttgcatactaacatttcatccaatatttgtacgctattgcaacacacgagtattgtactatcatatatagaagtatgtacgctgttgagggttgcaatgtagtggtaaaatagctagattaaaataatgagtcgtcgaccttgacacattttttaagagtgatcgtagtttttatgcattctttacatgtttgtccttttcagattcagtataggtaagcttttttttgcttggacaatctatttctctttctttggacagtttcttttagatntaggtaggccacctttctttgcttaatgtgtggncgattntgacatgtttttcaattaatcatagttnttattcattcttggcatgc

SEQ ID NO: 116598 - DNA, 184 bp, Zea mays
  Clone ID: MRT4577_37825C.1
gccaacaggtttgggcttattttagggccgtgctttagacggtccgtttatacataccatacgttgggctgtgtagcagaaagcccaggctgccccataaccagcaatgtgttattcgacagataaacatactgtctctcgggcgtatgacgggagaccctgagaacacttaattgacaatgta

SEQ ID NO: 116599 - DNA, 1247 bp, Zea mays
  Clone ID: MRT4577_37826C.1
attggggcgcggtcggttcgtccatttgggttccaggcttgggatcgtcgacacaaggctgttgtgcaaaacttaagggggagaattgttatctgttgattaagtctcgccctttagaaggaccgcatgtttacttttcagttatctgcacttagtttgcatgcgccaagccccgttgtgtggtggccgagcgcttaggagatcatcccgaaaatcgctcggtcttacctgaactcgcggatcagtgcgccccgtgcgggcgtaaaaatggacacgaccaagggggtggcgcgaaactcccagcgacgttcgttctctcttttagttcatggcaataaaaggagcagagataaacagaaaacgctgcgttcttcaggcagcaccaaatccactgtactcgagtttgtctgtgcgtgtgagttcgggggcgattgtgttcgtcggtgttcactcgtcgatcctgacagagaaggcgagctcagcagactcctcgcctgctgtcacctcactcccgatggctgccactttcgccgtcccaagattcaagcttggcgggagaccggcgggcaccaggtcatgcctattgccatgcccagagagtccgagggcgtccttgtgcatcctcagctccctgtaccagtcgatcccggtcgccgctgcctcggcggcgccgggggcttccttggccgcgcagccgtccacgctcaccgaccgcttcccggagcaagtgcgcatgagcacgccaacccgcacgcagcacttgctgtcgcggcaggagctgcgccgtcgacggggcccgccgcggaagagcgccgcctggctgttggcgctggacgccgagctcgcggtgaagctcacggtcgacgcgcgagtccaggacggcttagccattaccacggcctccgccgccggcctcgcagcggccgtctccaccaagggctgcggcacctgccccgctaccgcgggggcggtgacaaagacaccttccttgcggtccccgttgccgtagtccattgcgcctctgaagtaccgctcggcagagaacacgtcgagctcgccgtcggcgtacgtgcgccgtcggctggccacgccatgcgccggcaacggccgcagcgccgcgcggccaccgtcggagtcccggaccatgtcagggtacgacgacaggaaaccgttccagcgcctccaggtcacggcgtcgtcgccgaaggttcctccaccattcccgtcgcgcctctccaggcgcgcgc

SEQ ID NO: 116600 - DNA, 447 bp, Zea mays
  unsure (1)..(447): unsure at all n locations
  Clone ID: MRT4577_37827C.1
ggtaccctncgcgggccgtgtccgggtgataaaaaaaccgcagaggcggagccggagccggccggttggctgcccggagcctgggcgcctacctccactgactgaaacttgctgctaagctttatctactccacgttcggcggtgcaccaccgatctgtgtctcagtgtatcctgctggccttggcgcacaagaaggccggttcgcatggcggtgcgcgcagcaccattggagatccggcctttcgatttctgcctttcgaggtggaggagatgggggcactcttgctgcaattaagcaacggtatccccacccgagccatgttgcagagtctcgtggataagttctcccgcctagtcccagagcgcccgcaaggtggccatccattccacgcatgagtggaaccggctggagaacaggcgtttgtggcatcaggccaagagcaccg

SEQ ID NO: 116601 - DNA, 541 bp, Zea mays
  Clone ID: MRT4577_37828C.1
actcattatctccctcgtccctgctgacgcaccagctgttccttcgtgcgactcttctcttccgttccgttgggatccctcctcctttttcgcgtggtctctctcagctgcctgtctgtcttgtgcggggaagcaaaatctcacctgggttcgtcttcctcctccgcctcagctgcctgcctttgggttcttcgccgctttggagctcaaatccggcccgcgggttcctgatttcgcgccgcgtcgaggcctcggcgggagattcgcgccggcatttcacggaacgcgctctctttctctctctctctctctctatctctatctatctcctccaccatttctcggcgccaaatcctgctccggggtttctttcccttctccccccttcagctcagcctagggttctcctggtttcccggaagcatccctttcggcagagtcttggtgcttttcttttttctgaaactagcagtcttggtgctggatgcgcggtgattcatatacatccgtcgcacatggaaagctgctgccgctgatgaca

SEQ ID NO: 116602 - DNA, 331 bp, Zea mays
  Clone ID: MRT4577_37829C.1
agattcagaagaaaagaccgaatatgattatcattatggcaaagtggatctatacgtgcataacaaacatctgaaaaaagggtcaattgcaaacgaatggtctttactatccgcaggtatcaaaaggatccatgcacactgaaaagagatcctatgaagacggtgacccaaagaacactgacccaatagcgcatgacgacctgtatgcgctgtcacctagggcctggccataggcaggcaaaggacacgattgtactaagtcaagcactggtcaacactttcaggtaagtagcttaagcctgacgagtagatgagctcgaacctgcactag

SEQ ID NO: 116603 - DNA, 2182 bp, Zea mays
  unsure (1)..(2182): unsure at all n locations
  Clone ID: MRT4577_3782C.1
aaagggtgctgatattttgccagatgcgaggcttccttgagacaacactcctattacatctgctggagacatctatagcatcgttgctctggagtagctgcaaatagaagataccaagctgcagattggagattgaggccccttcctgatgaaatgatcaaatatgctagagaggatacacactatctgctatatatatatgacctgatgagattgagactagtgaatgggtcatcatgtgaaaatgatcttcttttagaggtttgcaagcgcagcaaggaagcgtgggtgcaactgtatgagaaggagcagctgactgatacatcatatctacatatacatgggttgaaagaaaacgagctgaatgcaacgcagctgtcagttctttctagtctatatcgatggagagatggcattgcccgtgctgaggatgagagcactggctatatattacccaataagactctacttgagatagcaaaggagatgcctgtgacaagtgggaagttgaaaagaatgattaaatcaagaaattcgattttggaacgaaatctcaaccatgttattaacaatataagggatgccatagcagcttctggtgcttttgaaagtatagtggagcagctgaagaagggaaaactggaagagttaacattggcagatgtgaagaacagcagtgaggacactgaaatgattcctgctgttgatgttgataacattgaagatccgagtgatgaatctgctgtagttcctgcagtgattacaaatgtcggtgctgctccctgtattacacgcgaagcttccttgggtaatatgcatttagaggaccttgtgcctaaaacaaaggactcgggtgcttcatcagggtttactggactgacagacaacaaaaagctcagcaatgaccagcagcaagcagcaaaggctactgttcaagtatcaaagaggcctacagcttttggagctctgtttggaaagccagctgctggaagaaggccagatcttttcctaggattttcaaatgttcagggtaagactaaggtggacaagataacgtcttccgtggtacttccttttcatcatttctcaggtggtgcaaaacttccatcagccgtcctttcagcgaaagaatcgttgcattctgaaccagacagcatccaacacagtgatccagcttgtcagttggaagaagtgatacagttggacatgggaacagacgagcaacaaccaccagaaaatggcaacgaggatgatggacactgtgagactgaagacacggagatgtcaaagtccccttcaggtgacccgtctgttaccgagcaacgattccgatcactcaacgaagaaagaaacgttaagcagatccagaagacacctagagaattcgaatttagtgttccggtggtgccttttgattatgccgaagccagaaagaatctcgtgtctagtttgcctaaagctgagaggagaaaggacgatgccgttgccagggctataaatacagactctggagataagcagaggggttcaaaaaagccaccaggtgggggagagaacgagggaaatttacagcatccacgaagacggcaggctttcccgccttcaggcaatagaaatgctacgtatcaccagtagcaagttgagatgtataactggcgaattggattattccaaaattgtgataaaagagtaccctacgtgttgtatatttggactggggatatctcggactcatgagaaaccaccgagactgctactgcaccgcggtgccctgacgtgttgctaacacgtgctaggtgactgagaatagttgggtattgcgttttttttaatatgttctgaacatgagaatgccctagtatttcattaggatgtgtacattttacaatgttttatggacaattactgttgtatttttacttttgaactccagagccctgttttggtcacgcactacaattttcacctaaactcttttccgaacgtttactactcgaaggggtggttatatatatattgattggattattttacttcnnaaccaanaaaaaanaaaaaanaaaaaannnnaaaaannaaaaaaaaaaaaggcggccgcaagtacattattcctgcttttcagggcgttaaccaggccgcaacactgcaagtttaaacaatttacttgcaaaaaaacattcta

SEQ ID NO: 116604 - DNA, 422 bp, Zea mays
  Clone ID: MRT4577_37830C.1
gtatcctctataccggacgcccttcattctttttcattaaaattctcttttctcgaataccgacatctattttagcaagggggaagtactacctctatatgctactatcgccctacaaacccataactcctcccattttaccaccctactccaattacactcatgcattaccacctataaatctgacaaaaaaaaagataacccactcccctaaccatcgaaagaaaaactgactataacactactcacacacacagaaagaccgtttctctttcactgctgatcccctgatggaaacaccctttccacaattatacttatggacatatctttaatctgatacaagaggttttccttaaaccttaatccccaacataccaaccggaaccatcacctcctactgatgagcggcctaatcaacc

SEQ ID NO: 116605 - DNA, 342 bp, Zea mays
  Clone ID: MRT4577_37831C.1
caaccacgagtatttcccctgggttttaaaaaagttttgggaggggcccaaatccacctagcccacactaaacacacatttggggggcccccagtaagccgaggggaccaccaccaccccttacgctgaacccaaagccctagcaccatgatccttcctgaacacccgcactgaaacccagcagcaccctgacccaaaacagcactctgcccacaggcaagacaccatgcagcagcgacatcacacagaactacagaagcttccctttgctcagagcattccttcagactgatcatcggcatttctctttgctcaaagcattactttgctgcaggagctcct

SEQ ID NO: 116606 - DNA, 214 bp, Zea mays
  Clone ID: MRT4577_37832C.1
cccacgcgtccgcgccttcctcttcaaccgcttccccgccgtgtatgtgacggatgagcgccctcagcaggagattgacttgccttcattcgatcgcgtggcatttgaaagtggtggatctgtaaatgaagatgtgttcaagaagacttctgggagcagtagtgtgtcgcaccatgttctcccgcctccagaaattgaactagtcctcccccct

SEQ ID NO: 116607 - DNA, 791 bp, Zea mays
  unsure (1)..(791): unsure at all n locations
  Clone ID: MRT4577_37833C.1
tttctyacttcctcctttcgctctcgccgccgccatgtgcgtgcggcctggcgctgtcccccccacgcgcccctcgccctgccatgcgcgcacccttgcacgcyggccggaggctccggtkcggtctgcctctatacataggcytctccytgatkctgtstkcttcttcttggaccagtgcgcaggctgccacttgccagaggtgctcatscccgcctccgcsckcgctaccascgttgttgctscctccggggaackgcgcccgcccccccgccgcactcgcagcttgtgcgtsctsctkcttccgtgccgtgtcgggcgtcgcgytcggcgctcgtgcggcgaggcgccgttccaygccktggcscckctgccgcgcscgcttctctscsccaggcgggncgagctggccttcttckcygggctgctcctcgsctggcccatgcgcgtgcgttksgscgcgcgcsccgcatacgcagccacggctctgcggtggtgtgctcggggctctcgcgcacctcctcgcggcgcagcgctcgctcccggctccgcactagtccctctcctctagtactgctctcaccctgagcgtcytgtaggtcgacacgcgtctccctgactaccagcgtcangtcgccyagtcagtcgnctgctgcgccatctnccntagcctgctcctgctccttgtcagtcttactgtctstgnacctggtactgctgccctcctgcgtactgactgcgccgntcctcgcctcganctgctgcgcctgctgctcactgagcctgcatgc

SEQ ID NO: 116608 - DNA, 364 bp, Zea mays
  Clone ID: MRT4577_37834C.1
gacgcatgcgtgccggtgtatattatttcaactgcttattacgcagcctgtcgcatcggctagcgggcggggggttaggtacgctgtgctttgcacacgagctgcgctgcgcgctccgaccaggatcgacccgaccgccgatacacgggtgaactcccggcgcatatcccacagacgacacccggcggaggtgcatcacggctcctcgccacgaaatttatcctgttcgaccacacgcaggaacaggacaaggataatgtgcacatactgacgaaggaaggcatcgcgccagacgccaaaaggattgacgtttttaaccacttgccgtgggacgtggaccaaacgaggctcatgggagacttga

SEQ ID NO: 116609 - DNA, 356 bp, Zea mays
  Clone ID: MRT4577_37836C.1
cacgcgtccgcaaaagccacagggcataaaaagaattttacaacattacatcatcacgatgttcatgcgtcttgcgccttccctagctatataacctgccatcgcctcaaaaatccatatgcaatcaccctaatcgcgactttatttcatcaacaactctcacactcttctgacgactatgatactctctctctatctgtacccctacaattagtaccttatgcatacctatctcaacctcgttacaactacaccctaatacgcacagtttatgcatacaatcgccatgaaccactctctgcagaatcatttctatcatactgagattacgactatggacatacagaacaactatc

SEQ ID NO: 116610 - DNA, 184 bp, Zea mays
  Clone ID: MRT4577_37837C.1
cgtttttcggttgttacagattgatgggttgaaacgattactaaccagattgcttctctaatttatataaaatttgattagctgaaacgatttcgggtgcaactgagtacaaacaataaggtctacaggattgccgttaacggctctctgccgctgtcccagacttcccaaatctactccacca

SEQ ID NO: 116611 - DNA, 245 bp, Zea mays
  Clone ID: MRT4577_37838C.1
cccgcccagaatacccggggctacccacgcgcccgataaagcccgccgcggcgaccacgcgcaccggggagcctgaggagcaggaggcgcgggaggagcaccacccacacaaagaaggcaacccaaaaacaccagagggagggcccgggcccaccccaacgccgaggagaccgaccacgacccaagagacccaccagagggctccccccaggcacacgcccggggagagcagcccacgccgccga

SEQ ID NO: 116612 - DNA, 255 bp, Zea mays
  Clone ID: MRT4577_37839C.1
cggtcgcctgggcttcctccccctacctagctagccttccggttcctgcttcgagtcggagatgaggcgcctcgatgagctagctggccattgaggagttattgcttccgaagctgctctcgcagctcacaacagcagcgcgacacttgtcgatgttctcacactgatagaggacttaggctgacgcacagatgatttaacactattagttcatcgcacacggatgaacctaatgataagtatttcaagaggagt

SEQ ID NO: 116613 - DNA, 227 bp, Zea mays
  Clone ID: MRT4577_3783C.1
atgaagtaccaaccagaagtgattattattgtacaccctctaatgcaacatgtcccccgccgcaacctaacagcgtacggtaccctggataacaccccattcgcgactgctcatcacggatctcagcactgggcacccaacatggctccataagctagtcactagacgttactgtccatcaactgatgaggaaaagagagcacttaatgctggactgaaggccgcac

SEQ ID NO: 116614 - DNA, 318 bp, Zea mays
  unsure (1)..(318): unsure at all n locations
  Clone ID: MRT4577_37840C.1
ccanccanaacttttttttttttaagaaagcacaagacaacaacgtgcgagagttagatttactagtacaagcaacaccttcacctttattgcactaagaccacatcactatcattctaaaacaaattattaaaacatatcatgctactacaaaaaccataatcccataacttttacctttttataacaacctatgttatatattcccaatgcacatcaggtaatattcccatgtcaaatcattaccttcaacttctctgagttcaccccaaaactacaaacactagatatatcttactattactgtgctaatggccc

SEQ ID NO: 116615 - DNA, 605 bp, Zea mays
  Clone ID: MRT4577_37841C.1
gcgaatcagcggccatggatatgtccagaaggcccccttagctgcgggaattccgaaggccgcgcctgcctttctcatgtgtgtatctatgtggctggcttgggaaggataagaacttgcatgttggtgaaggaagaagtggggtggaagaagtggggtgggacgacagtgaaaactggacgggggccgctgactagttacctatagctagatcactcgtttagtggcgatgagtaacagagtgtcacccatcaacatgggaggcagtgtgagcaatgacctgaatgaacaattgaaaaggaaaggaaaaataatatggaactggcccaaggtgtgctgcataaatacatttgccctgcatgttttccgactgcacctttggctgcatttcctacaaattcctttatgtaaaaagaacaagtgtgtaaaacttgggaagacagtcgtgggccgagggtgttagtctgcagccggttctgataccagagtccgggcggctgtgggtgcaccggggctgcctgtggagccgttggtgttcaagccgttgtgctggggcgatgagcgcttcgagccgttgaagcttccatcaaggcccgggggcaggc

SEQ ID NO: 116616 - DNA, 841 bp, Zea mays
  Clone ID: MRT4577_37842C.1
ctcggactatagataagccttccagatcatactgaaccaagctgtcacttcacagagtagaacacttgatcactcacagaaagttcagatcagaaaatgcaggttgccgctactgccgtcaggttctcggccgtgctgcctgtcaagggccggccggcggcgaagagtacggtggtggtccgtgtccctgcctcaaggaggagcgtccgtgcagctgctgttgtcgcggccgaggctgcggagatcgactacaactcgagcttctcggtgtttccgatggaggcctgcgacctgctcggcggcgatgcgtgcagcgcgcagatgtacccagagaccaagctcgcctcggcggcggcggcggcgagcaggagggtggaggaggtggagagggactacctgtcgtacgacgagccaagaacggtgttcccgggcgaggcgtgcgacgacctcggcggcgagttctgcgaggcgccataccaggccggcgtctccagggagctggcgcacgcctgagcctgatgcaaattcccatccatatctgtctagaaccgagttggtctcggtagatgatgttagtcgggtagagatgttcacgccatgtaaggtatgtgtgtagcagtctagcagatgaccaagcaaggccaagggtgtatgtaatgtatataggcatgtagtagaaaccaagatgaaatggtactggtgttattccttgttttaagaagatggaacgtagagctatggaagtactatgctacaatcgatctgttccctgcacttgcaagccaatggatgaatagagggcgtactgcttaagctgaaaaaaaaaaaaaaaaaagcggcc

SEQ ID NO: 116617 - DNA, 214 bp, Zea mays
  Clone ID: MRT4577_37843C.1
gcagcctcgcaggggctcttggtctgctgcaccaggaagagtagtgtattagcgtggatcctggggcaaccacctttactctttttattcaatgccttatcatatttttatatcctgtatatctttcttttttttctgctcctttcctattacgcacaccttttgttttattctcatataaaaatacaccccctgatttcttcttaacatttta

SEQ ID NO: 116618 - DNA, 468 bp, Zea mays
  Clone ID: MRT4577_37844C.1
caaaggcaactcctatttccaaaaaaactggggggggggggggtttatgggcccccgggcgagaccctcgtgtttagaaatgggattttggaaactctaaaaaccctttgtcggaagaggcggacccctccaaaaaggggtttttcaaggtcatacccacccgcaccgggggtcccccccgtatttccggccgggtgccccgtgggaagccagttttccctttgggggggggggttaagctgggggggcttgaggggcaaggcctgttcctgggggaaattgcttcaggcttgagggttcctcagatgagtataaccctgggcaaaaagtgtaagaggggggggcccataggggggggcttaacgagcaaactggggcgtgcgatggctgccgttttcaggtcggaaaacctgttttgccccctgctttttataataagcccccccccggggggggagagcttaaaaa

SEQ ID NO: 116619 - DNA, 220 bp, Zea mays
  unsure (1)..(220): unsure at all n locations
  Clone ID: MRT4577_37845C.1
agtcttaagttccaagacaaggacgattctcaccaactgaacttatgacttcagaatatcgcattcgttcgtnnttgtgcgtgcttacattactgttaccctatgctagttcgtgggccatatagtgatccgtttccctgactccgatagctcgtggatacccgatttcgttcccttgccatacgaagggccagcttttgtatccatatcgtgcagcttg

SEQ ID NO: 116620 - DNA, 187 bp, Zea mays
  Clone ID: MRT4577_37846C.1
gtataattttggatggaggcctcgtacaaacggtccgagctgataattaatatgcctatcggcaatctaactgtatatcactatctgctaggatgatgcggaatttgtttggttggttagaaacatgcatgtaggagagccaatatatgaacaactgggctgatgtattagcaaatgatcagtgttt

SEQ ID NO: 116621 - DNA, 1463 bp, Zea mays
  Clone ID: MRT4577_37847C.1
cgcggcgtagcttgctcctatagggccggcatcatgctgggcatgtgatcccgactgcatcaaggatccaaacgtggcaaggtacaggggagaatcagaatgcatggaaagcggccgccaccagacactagcatagttctagtaaaaacacagcctaacacaacatcgttggcacaaggaacaaaacataaagaaaaaaaaacgactgaagaacacgtcgacgacacgtatgtccggaactaccaaaagaatccctaggatctctactaccccactagtacagagcaccaaaccacatggcacatggcagccaccaccactagcacggggaaggacaagagggtcagttgaataacagtaaaccccgtgctgctactaaaccacgccacgctacgctgacgacggctgatcgatcaaaacccagcgcaggcgcaggcacgcacgcacgccagacagcgggatccactgcgcgtgcccacgccgccccctccctcccacttacacctcctagcggaggagaggtgcggcggcggcggcgaggccgaggacgagggcggccaccacgtgcagcctggagacgcgcggcgccgcagcgtcgttgtagtcggtgctgcctgctcctgccgggccgtaggcgcccgtgccgccgaacggcgggctcagggccccgggggtcgtgatcccggcgccggtgccggtgccagcgccagctccggtgctggtccccgtcccggcgcccatgcccgtgcctgctccggttccagcgccggcacccatgcccgcgcccgtgcctgctccagtgccggcgccggcgcccgtgccaccgccgacgccagcgcctgctccgccggtgcccataccagcgccgccgccggtgcctacgctgctggggccggaggcgaacttgcaggtcccggagctggggtcggtgccggtgagggtggcgacgccgttgaagtcgcaggtggcgcccatgccgctgcggctctggtagtagctgttgcagatgtaggagcagacggccaccttgttgccgttgccgtagcacggcgcgcccttggtggtggaggcgcagtcggcccccttgctgcaggcgtagtcgatggccgactgcatcatctggtcggacatgcccggcttgcacacgcagaacgccgcatctgaggctgtgaacacggacagcaggaggaggagaagcaggggaaccgccatggctgcaggagctcttgagctctctggactggaccgtgaacggtgggagagagagtgtgtgtgtgcgcgcgatgggcagagctcggtgtggggactgaactgggggagtggtctgcagtgtcgtcaagccctccgcgccgtcctccctccttttatggacgaaacagcgaccgcacgctgaagcggcgcttgattttccccgattttctttgccgcgactgcgaacgaacaccgtcgcgtggcagtgcagt

SEQ ID NO: 116622 - DNA, 398 bp, Zea mays
  Clone ID: MRT4577_37848C.1
attccctcacctctctccctcgcgctatcattataaaaactcgaatgcgacgagactgacctctcccttgctgccgaagacgacatgactgcaccgactgccgagacgtcgctccatggcggccaacatctgacatccgatccccgatccacaccagggcgctcccagccactgaaatctccaactccaccccgatctcatcccaccatacctccttcctccagggaccgcccgcccggccccgagcgcccgcagtagccatctccgggcgggcccccactttctccgggcatcggcgtctccatcagacccacacgcgaatgaactcgtgccgcactacctccatccgaacgaaatagggccgctcggtcccggggccccgcatccgggattcggac

SEQ ID NO: 116623 - DNA, 203 bp, Zea mays
  Clone ID: MRT4577_37849C.1
gagcggtctcgtacagtagcgggaggatgcctctatccacgggaggagcacctaggaactacactatcatatacccttttgccacggggacactgtgcagctgagacaaaggggctgtgtgcgcgcgcgcgcggaactgtgcaaatacagagagaggggatttgctgaactcccagaggcctcgattgacctcctggctaact

SEQ ID NO: 116624 - DNA, 274 bp, Zea mays
  unsure (1)..(274): unsure at all n locations
  Clone ID: MRT4577_3784C.1
taaagatgtcgtacaatcatgttctctttattttaatttctggaatgcaaattgtatgcttgaaatttaatctttatgtttatttatgtgcaacaggtgtgatgaacagcttattttcagtttacggtaaagaaacaaaaaaaacttttccttattattccatgctagaataatccatgtgttactctcaatgaaatattctcaaattatatagatatttatgatgacttgatatcccgaagagttaacacnagtgatgctgaaaagtttgctg

SEQ ID NO: 116625 - DNA, 382 bp, Zea mays
  unsure (1)..(382): unsure at all n locations
  Clone ID: MRT4577_37850C.1
cggagagctcaaaatttttttccagctattttgaagccacaccccaacncagcgcgccggctttaaatttttactggcgcacaccagaccgaatcatgggtcagccatcttatcaaaataccccaccacgtgcagactctaatataccagctctattagggtcaacaactcaaggatgctgccacgagatatagatattacaaccctgtagatactaaagctatacagatcaatggtgcaaggaatacactctaatacgaccttgcatcaacccatacatatatcgatggtacagccccctaactccctagttctactgtttaataagggtcgtacttattttgccaccagtccattattggctaatgagataacaaacatc

SEQ ID NO: 116626 - DNA, 482 bp, Zea mays
  Clone ID: MRT4577_37851C.1
tcgggcgttcgggcagccgcctcctgaccgcaggtcgccactctctggttgctgcacacctttagccgggggggccatatatgcggaaaagggcacagatgaagttcggcgcagcggcctgaagcattgcgcgcgcgtccggcctgaatctggggggttccggcttctggtcatagtcaccggctggttcctcgtgtccctgaccttcgaggacttgtctcacagcccgggtccatcctgtgcagtctgaacggccagctgacggcggaccaggctccgacggccttactgatccaggataagctaacctctcccccagacaccgacttgatactctgccaccgcacgctactgcgtggagaccctaaagagggcgatgactgaagacagatccaccactcactgggttacaagggcgaggaggaagagagactgatgctgagcgagccgcacgccaccagggctatgacggagctcacccc

SEQ ID NO: 116627 - DNA, 429 bp, Zea mays
  Clone ID: MRT4577_37852C.1
aattaaaaaccgcctatcaataaacacaaggccttgattacgtacaaacttgtgcatctgacacataacaccacaacctttttatctttatctctgtatactactgaagttaccaactaagatcatagatcaaatgactaggacctcatgatccgcattctatacaaatatacggaatacgcgcccgtctacttcaattaatcccttcttatatgtgtaacgtatacacttaacatgctccctaatgataactaccgggatacccatctggtattagctcccatactattggatcatatactcactgccagagccccacttgcttgcccacataaggaatatgtatccatccaagctagatactatacgaatacgaccagtcggatgaatacttacggctccagttccatcgaacagggacttcgtccg

SEQ ID NO: 116628 - DNA, 1195 bp, Zea mays
  unsure (1)..(1195): unsure at all n locations
  Clone ID: MRT4577_37853C.1
gtgcggccgctcccgaggccggccggttttccngaaaaaaaaaaaaaaaaaaaaaaaaaaccggaaaaaaaaccccccacaccatgtgtagctagctgggccatgcgtcgtctcctccccattacaacaaggtcgagatggaaagcacccgtacctgctgctgcagcacatacccgttttaaaagggaatccaacaagagcgcgtgtggctcgtcgatgctgctgagagcgagcactcagttcatcacacccatttcagaccttgcgttccatatatatgtatgcttagtaggggatcatcgataggttgccgaggccagctagctcttgcgttgattaggaaggaaaacgtagctagccagccaggttgatatttagagttgagagggtacagaaatacatacagaggccagtccagaccatagcgctagctggctgagacggccgagaggaacgaagacgatctcgatcctgagctctgggcatgatgaagctcttgttccagtgtccctgctgctcctgcttctgcttcatgaagacggccagcagcaagacccaacacggcggcggcagcggcaacaaggagggagcagcagcccaccaccagcgcaccggtaaactgcaaggagtagtggtaggcaaggccatggagatggtgtagcttatcatgcatttgtgtccagtccagtattcagccgctgcttatatatagtagctattcttctttcgccaccccccacccccccacccacaggtaccggcagcttgttcatgctctccacaccacattatgatcactcatctgatcatcttgcattgtgcgtgccttcgggacaggttctttagtaatcttgtgtgctagctgcgtcgtttctccagcactgcagtacctccctgcaggctggctagtgaactactgctgtattattaggagttaggttcctcttagactgagtggtaccatcagctgctactccactcaacggaagcatgcagcaccgcttgtctgcaatcaccccccccccctgttttgtttgttcttctattttctatttttggctcgtccagtctcgccatactactagcttgtttctactgggtctcctttggaatgcggaaaattttccggcgcactactttagaactaaaaaaaaaaaaaaaaaaaaaaaaactcgaggggggggcccgcgtaccc

SEQ ID NO: 116629 - DNA, 660 bp, Zea mays
  unsure (1)..(660): unsure at all n locations
  Clone ID: MRT4577_37854C.1
gatcgggatgcattcggtgaacgcagtcttcctgctgggcgaggccgccctgaatagcttggtaaagcagcgcatactcaacttggtgatcagggaaaaaaaaagacagaggaagctgatgaatgttttcatggtttcgctgtctgcagaggttcccgtggttccgggtcgcctacttcttcctctggaccgcgctatacgtcgtcttccagtggatcgtccacgcagctacgccgatgtggtaggctctttgcagcttttgtttgataaacctcatgtaaacgaagcactttactgccaactagctgctgcatttttcatgtcattagtgctgatgacttgtgaatcgacgccttgtggcttcttggcaggtggccttacccgttcctcgacctgacatcgaacctggcacctctgtggtacgtacgtaatgccttccagtggatcgtccacgcagctacgccgatgtggtaggctctttgcagctattgtttgataaacttcatgtaaacgaagcactttactgccaactagctgctgcatttttcatgtcattagtgctgatgacttgtgaatagacgccttgtggcttcttggcagcccccctggnccgttatgatcatccccttgaagaggtacttgcagatctcattgcggttc

SEQ ID NO: 116630 - DNA, 389 bp, Zea mays
  Clone ID: MRT4577_37855C.1
cggggataaatcccaaccaatttttgggttttttttgggaaccccatgggggttggggggccccttgggcgggcccctttcattgggaatcaaaaggggggcccccccaacggggggttgttgcaggggggggttcataaaaaaaaacgggttgttgggcaaaatttttttttgtttttgcgggagggtcccccccaaggggttacccccggccaagggataaagaaactggggcccttgtggggggccccccccaaattttgccccaccccgttggttgaatggaaccacctgttgtaagtgggcagcagggtttgccacatttggctgggtaagagctggaccaattggtggcaaaacctgtggttgtgggccccggggggctttgc

SEQ ID NO: 116631 - DNA, 824 bp, Zea mays
  Clone ID: MRT4577_37856C.1
cgattgggtacctcgcggccggccggcgtggatgctgctgctgagagcgagcactcagttcatcacagccatttcagacctgcatccagagggttccatatatatgtatgcttagtaggtgatcatcgataggttgccgaggctagctagctcgatcttgcgttgattaggaaggaaaacgtagctagccagccaggttgatatttagagttgagagggtacagagatacatacataggccagtccagatcatagcgctagctgagacggccgagaggaacgaagacgatctcgatccagagctctgggcatgatgaagctcttgttccagtgtccctgctgctcctgcttctgcttcatgaagacggccagcagcaagacccaacacggcggcagcggcaacaaggagggagcagcagcccaccagcagcgcaccggtaaactgcaaggaggagtagtggtaggcaaggccatggagatggtgtagcttaccatgcatctgtgtccagtatcagctgcttatatatactagctagctattcttcttgcattaatattgtgcatgcgtgccttggggacaggttctttagtaatcttgtgtgctagactgctagctgcgtcgtttaatttctccagcactccagtatctccctccaggctggctagtgaactactgctgtattattaggagttaggttcctcttagactcagtgtaccatcagctgctactccactcaacggaagcatgcagcaccacttgtgtgtgcaatgccccccttgttttgtttgttcttctattatctaaaaaaaaaaaaaaaaaaag

SEQ ID NO: 116632 - DNA, 574 bp, Zea mays
  unsure (1)..(574): unsure at all n locations
  Clone ID: MRT4577_37857C.1
gagaaaccggtttgacaggggaggagcatagaaggcagataccaaggattataatatatgaaatggccaaatgaaaggatacatacatacatacaccgttagttctcccgtggaggagggccaaaggaggaaggacacattaaactaaagcgaaccgatcaagtgcnaaatcgaattaccggcgggaggcgttgctaccgcccgttantctctcccttagtcgatgttgagcctcgggcnaatgggctcnagnaatgtgtcccttttgctatctgttgccgatacntccccctggctgcccccgtgccgaagccnnccttcgatagttgtgtccnattgttgtatcggttcgcggccaataacaatcttatcctaaatttgtcttcgcgtctgcctgtggcggccctgcctatttccngctgttatgtgttgcaattccgtaggccctatcactgctacgactagtattcagcggcattagcactcttttaccttccccactcagcgttatttacgagctcgtcggtgctttcggcggcttcacctctattgctaccttcgttagcttcgttgc

SEQ ID NO: 116633 - DNA, 334 bp, Zea mays
  Clone ID: MRT4577_37858C.1
gccggcctttttttttttttttttttttcttattggtccaggggggaggcactggccccagcctatttccagcgttttataatgcaaagcctgaggcacgttacatccttcaatgggccgggctccgttgttcgccttttgcttttgttctgccacaaaaaaataaggggtcgcatggtttaatcccagctcagaaatacaaaaccgggggttttttacatttgcccctttgtttacaatgaaccactttgatgacccttgggcactggggacattttttggttacagtcccttgttatcacttccggcatgagttactggttcaagccttgcc

SEQ ID NO: 116634 - DNA, 904 bp, Zea mays
  Clone ID: MRT4577_37859C.1
gggtacctcgaggccggccgggaactgctgcccgggagctgagcacgccgaaaagctcatcagtgctcatcccctgctggcccgttctcagtcccagtgagaggctccatgaagatcctggtcgcggtgaagcgggtggtggactacgctgtcaaagtgcgcgtgaggccggacgggaggggcgtggagacggccaacgtgaagatgtccatgaatccattctgcgagatcgccgttgaggaggcgctgcggctccgggaggccggcgtcgccgctgaggtcgtcgccgccaccgtaggccctgcccagtccgccgacacgctccgcaccgcactcgccatgggcgccgatcgcgccgtccacgtgctccacgacccggaccctgcgcggcccctcctccctctcgccgttgccaagatccttcgcgccgtcgcgctccaggagaagcccggcctcgtcatcctcggcaagcaggcaattgatgatgattgcaaccaaactggacaaatgttagctggattgctcaagtggccacaaggaacctttgcctccaagcacggatttaagacttaaccagccaagatatgcaactttgcccaacataatgaaggcaaaatccaaagttattaagaaagtcgccgctgaagaccttggcgtagatattagatcagacatggaggtgattgaggtcaatgaaccaccaaaacgaaaagcaggggtgattctttcatgtgtcgacgagctccttgacaagttgaaaaatgaagcacgtgtcctttaaccatttgtatattattcctcgctgaatatggtctgacgttcatttatttaagttctctctccaaatgttcagacttcagaccatttacaaataaaataagtgttaacatgaaccaattaagac

SEQ ID NO: 116635 - DNA, 261 bp, Zea mays
  Clone ID: MRT4577_3785C.1
cccaatcccttctccgtccccaggttcacacacgtatgtatatatatatattgtggacaaagtacaaactcgcaatgtgcagagacatttttttgaagcaaagacaagaccatttaaggagcatacacctatctgctgtcaccgattcatattgaaataaggtacatgcccagcagcaaattgcgctttaaagaagtgactgaacatctaaacatatatactaataccgctactactacacgcgtgcctggatgcacgccc

SEQ ID NO: 116636 - DNA, 1085 bp, Zea mays
  Clone ID: MRT4577_37860C.1
ggccggggatgaggccggctgcttagtcagaaatagtgagaggctccaactcgcaactccgcagctgagcacgccgaaaagctcatcagtgctcatcccctgctggcccgttctcagtcccagtgagaggctccatgaagatcctggtcgcggtgaagcgggtggtggactacgctgtcaaagtgcgcgtgaggccggacgggaggggcgtggagacggccaacgtgaagatgtccatgaatccattctgcgagatcgccgttgaggaggcgctgcggctccgggaggccggcgtcgccgctgaggtcgtcgccgccaccgtaggccctgcccagtccgccgacacgctccgcaccgcactcgccatgggcgccgatcgcgccgtccacgtgctccacgacccggaccctgcgcggcccctcctccctctcgccgttgccaagatccttcgcgccgtcgcgctccaggagaagcccggcctcgtcatcctcggcaagcaggcaattgatgatgattgcaaccaaactggacaaatgttagctggattgctcaagtggccacaaggaacctttgcctccaaggttacattggacacagaaaaacaaaaagctactgttgagcgagaagttgatggtggaattgaaaccatctgccttgatctgccagcagtgatcaccacggatttaagacttaaccagccaagatatgcaactttgcccaacataatgaaggcaaaatccaaagttattaagaaagtcgccgctgaagaccttggcgtagatattagatcagacatggaggtgattgaggtcaatgaaccaccaaaacgaaaagcaggggtgattctttcatgtgtcgacgagctccttgacaagttgaaaaatgaagcacgtgtcctttaaccatttgtatattattcctcgctgaatatggtctgacgttcatttatttaagttctctctccaaatgttcagacttcagaccatttacaaataaaataagtgttaacatgaaccaattaagatactacccctgaaacatttacctggtggattccttccaaatagcgatttacttgattgtgt

SEQ ID NO: 116637 - DNA, 274 bp, Zea mays
  Clone ID: MRT4577_37861C.1
gctgcttcttataacctggtctcccaaatgggagggccccgtcgcacctgctgttggatctcacatcggcgctgcggtccctcttttaattagtttcccatccgattccgtttgcgccgactgatcgtctagtcatatcttacaccctatatatagtctcatgtagccggcactagtgagactcgatttcattcgtgccactgaattaagcgcttttagcgcgctaaattcgtgtcatatcacataaacaatggtgtatgctgaaactgtgctt

SEQ ID NO: 116638 - DNA, 196 bp, Zea mays
  Clone ID: MRT4577_37862C.1
catcgacgtaagtcagtctgcagctccgctcgacggtgctcatcagaactggataggccccgatgcatcgtgacgatccgtgtcagagattagatggtcctcctctacagcattgcgcgatgctgcagagcacccttatggtctccctgttgagattgacgtggatcgatggctcagtagtagatgtctacaacca

SEQ ID NO: 116639 - DNA, 599 bp, Zea mays
  Clone ID: MRT4577_37863C.1
cattgggtacctcgaggccggccgggatgcctgatccctgatcttgcgtccacccactccacccgtggaatgtcctaggtctatgttgccgtcgtccactgcgatgtcctcggtgcggagattgctcgtcgtctccatgccctgggtattgctggtggactgctcgactcttctccggcctcgtaacccgggggcctgccgcaccagcataaatacgtgacatggctctttcttgcacactcatccacgtacatggatagcctatggaaggtgcaactgtgtctgtggtggagacacgcctcttgctaagaactattgaatactgcctttatccatccccttgactgatgatgattgtcgttggatgatgctccgcttgaatagtacacaggcatatgctccgttgggcggaacgctgaggacgtcttgaaaggctatgtgttcctgcgcaaccaggcaaggatagcccaactttctgcacaggattgatgaaataagacgagaagcctgccgtcaccagaggttctaccgcgggatagagccattactgcaatgccacccatgctatgtcctctgaaatgacataaagagttgtttgt

SEQ ID NO: 116640 - DNA, 138 bp, Zea mays
  unsure (1)..(138): unsure at all n locations
  Clone ID: MRT4577_37864C.1
ntttgttgtacccatggtancacgtctctaggctcagaattcggctctaggaggccgtcctcagttggggacctgggagcaggcaaccattattcagacatccaggttgtagatgagattgtcaatgagtatgctgct

SEQ ID NO: 116641 - DNA, 192 bp, Zea mays
  Clone ID: MRT4577_37865C.1
tttcttaaaacagaggcattaaaaagttaggggggagctttaaactgaaaaggagaagacacctacataaaatgaagcggccttccgaactcagactttctttattgaaccttgcttcaatctacatttaccttatatggagttctaatacatgtctgcgttagcatgaatttaatctgttcctgcgtaaaa

SEQ ID NO: 116642 - DNA, 595 bp, Zea mays
  Clone ID: MRT4577_37866C.1
atctttcgtcttccgtccacctaccccaatccgggctcaagagctgccgccgtgccctacctctccccggcggcgcccccgccccctccctcacgcgcgtcgccgccgtcgccgttccctgttcatcctcggcgcatccatgctgtctcagccccgtcggcaattttggccattggcttccgaggtgcatcagccctaggaggggagaaaatttcagaagccaagaaaggtctcacgagcagagtaggggaggactttttgttagtggactcagagcattgcacgtgcttgtagatggagaggataaccaccaactcgttctatactgctggaatcccagtaactgtgccatcacctctgccttcaaccaccatggatgaaagctttgcaaggcttccagatgcgcagaatgttttgctggagagggaactgagaagaacccctctcccgcctcatcaaagtactgttgctcctatttgcgggcagtttcaccccagtactggatctgtcgggcctttgcgttcgcccccggctgtaaggttctcttcagttccgaaccctgagtaatacaacggtgccaatccttacatttctc

SEQ ID NO: 116643 - DNA, 440 bp, Zea mays
  Clone ID: MRT4577_37867C.1
ccggccggaggaccgccaccccccgcggcgccgacgatcacctcaggcgtgcgcggatatggggcgccgcggctcctccgaccgcctcgaggcgctctccctggagatcgagcgcaagctgcacaaggtaacccaccgcttcccctaccgtgcgccggctggcgcccgtcaattcgtgttcgtcgcgcttaatcgaggaccaatctctgtcgcgcgcacgcgctcacatcgcttcgcgagaaattcgagggcggcggcggcggcgcgattgcagaggccctagattgtagtcggcacgcgtctgggtcctttttcgctgcatatatggtggttttgatgtaaaaaaggccgttactatcatctgaaacgatttaggcaacaagagtaatttcactcataggtgccacatttgtaagaaaaaaaaaaaaaaaaaagcggcc

SEQ ID NO: 116644 - DNA, 136 bp, Zea mays
  Clone ID: MRT4577_37868C.1
tcgtatgcacttcccatatgccgcgtcgaagctctaattcgctctagaaagttcatcacgcatgttgcattcacttggcaggctatgacacactcatcacaacattgtatctcaagagaatagtgcaccaccattt

SEQ ID NO: 116645 - DNA, 172 bp, Zea mays
  Clone ID: MRT4577_37869C.1
attcggctcgagggtgattgaggcatgaggggtatcaggcatgggatgcacggcactgataggggtggatcccaccctgagtttcctggcgaggcatcaacgcatgttacacacgcatgtctcagacggtttccttcaattgaaaaatcggtagccattgcatccctcgctg

SEQ ID NO: 116646 - DNA, 125 bp, Zea mays
  unsure (1)..(125): unsure at all n locations
  Clone ID: MRT4577_3786C.1
gacaaanncgtcagcncctctcgtttttnatccgccttcggctccaacgcgtgcgctccacgcntnctccaggaaagcgagancttttgcataagaanaagaaatcaaaagcgtgatcantgggg

SEQ ID NO: 116647 - DNA, 302 bp, Zea mays
  Clone ID: MRT4577_37870C.1
aacaccctgacaagctaacaacacacgcagcgccgtgcgccatgaggacaaaaaccaaccatcgcattgtgcccctgctgctggtatccatcacactgatcacacaggccgacgtctgcccatacagcccgacgaccgatgcactgtgccactccgccgaacgacatccttcaacaccatgccatgcaagggaatatctatgtcggcgtgaacaaatacgtgaaactgccccgcgaacacgcataagctaatcgcgtacatggacgcgctcaaagaactaacacacgccataatctggacca

SEQ ID NO: 116648 - DNA, 455 bp, Zea mays
  unsure (1)..(455): unsure at all n locations
  Clone ID: MRT4577_37873C.1
atagtatcttttttttttttctttttaaccacaaaaaaaaaactaaataattaaatacaaaaaaaacacactcattcaaaaaacacttcctataaattacatgaactgggggggagaatacaacccacgggaaaactaattataaagcataaatactacatcataaaaacactataccaaaaaaaatttaccttgagaatacctgaatcaatataaaaaaacccaaaatacatcaggaattaataccccataaaggaactgtttttaaaccatcaaaaaaaatgaacaaggacccattcatgactntctacctggcccaatccactctacgatctatactttttatttcccagactgagaaaagaacatcagaataaaatgaagaacaaacaaatgtcatagcaagtacctcgctaccaaaacctgcagccagaccaaccctatccaggtatgga

SEQ ID NO: 116649 - DNA, 398 bp, Zea mays
  Clone ID: MRT4577_37874C.1
ccaaaaaaaaaccgtcccagcgggctccatttttccgaggggcaagtccacgggtccaaaatttaatatcccccaaggccgttttggggcccgggtcccaaaaaggggggggccccccagttggcacccttggggctggaatttggagggcccaaaatacctggcgaggcgacccgcaaacccaaaatacacaagagcgggtggggggggggcagcccctgactacggttagacctaggggggaacagcccccccgggctaaacatcgggggggaaagccctaatctataatcagagccgggaagggtaaacggggcatgcccatctttaagggggggccccccgacatagcgctaaccttcgaggggccagcaaagtggtccctgcaattccggccc

SEQ ID NO: 116650 - DNA, 786 bp, Zea mays
  Clone ID: MRT4577_37875C.1
ggttatctatcccttagatctataggttggcatgttttagtggaaaagtttttccgtagaaattcgtatttataaaaatccaaaaatgatgaaacttgttttgttagttagatgttatcatactccatcaagaaaaaatataaaacttatatgttgttcactgttttcttgatgtgttaattaaatcaagttaaatagagaaaagaagatttattttcttgttatttttggatctgtagctctagtgctccaaatggattgaaatctttacagtagaccctctgtgtgatgctcagtgactggtaaaaatttcatgaattgtggtgcatgtatgattaagttagtgattttacttgtttgatgcatattaagtagttttaaatgatttataaataatgtatgagtgtaaaaatggaaaatagtgttccactgtccttgtatgatattatattgaacttaatatggtcatgaatccacagaaaataattagttttagatttaacttgctctcacatgctttattgcattaacaatttgttatttttgtattaaataaaatataaaagttgggcatgtgaaatttgtacattagtcataatttgttattacctatacctcataaaaatttcagtaccagattagatagttttatatggtgctaaaatggcacatattttataattataacaagaattagtgacaaattagaagtaaacaaaagcgtgcatgtttattgaatggttaagtgtcttcatataattgaaacttgataactaaatcacaatg

SEQ ID NO: 116651 - DNA, 574 bp, Zea mays
  Clone ID: MRT4577_37876C.1
aaaaaaaaaaaaaaaaaaaaaaaaaaaaaaaaaaaaaaccaaaaaaaaaaaaaaaaaaaaaggaaaaaaaaaaaaaaaaaaaaaaaaaaaaccccgcaggcgacgggggaagggctaaggctcggcctttaagggacgggggggcagccccatactcggggtggtcgtaaggggttacctttcccgtttttcgccaatcgcctggggccctgaattccggttttccgaacaccggcctgggaccttgccaatagggtataactgggaaatatggatttgcaagaaaagacaaccccacctcataagggaaagggaatgaaaaaagaaagcgcaaaaaaaaaagaaagagcagggaaaagaagggcatctgttttggattccactaatgacacagtcataagcgaggaaatgccagagtataatcttgacgaacctactatggaggaaaaactggcacccctgaatttaatcaatagagagaaggaaatccttggtcctgaaaagcaatcgctctttgtggcaccaccaagggcagattcagcccatatcttgctgaagcaagctcttcgggctg

SEQ ID NO: 116652 - DNA, 697 bp, Zea mays
  Clone ID: MRT4577_37877C.1
ctcgagttttttttttttttttttttttttttttttttttttttttttttttttttttttttttttttttttttttggggaaaggagatttttcttttcataagaagggaaaacgggcatcgttcatatgcgggaaaaaacaaagttttgcccccaaagggcttttgggttttgcccaaaaaaaagtttccaaacccaaattatcaaaatcaaattaatcaaaacgggttgggggaccaacaaaggtttagctggaggggcccaaacagggggttcttccccccagaaaaaaacatttggggccatcggtggagcccccaggtataccttgcccgcccccaattttggggggcccatccaaagtaaaggggctttttttgaaaaaaacttcatgaccacggggaagggggggattcagggggggatacccctcaaaagaggccctcagggccccctcactaagttcccacccctccgtgaacaaaagttagcggaccggcccaaaggggcagttttaaaagaaaacccttcgtttccttttttttttttggaacccaacatgctgccaggttttgggggcccaggcattcctggaagccccatgctcccgaacccaggagccatggggcgcatttgatactgcaaaggttcgggaactgggggcggcatcgggtttgttgcatccctggggttaggg

SEQ ID NO: 116653 - DNA, 336 bp, Zea mays
  Clone ID: MRT4577_37878C.1
tcttatctatccctgatcctttacaacccgtgggggcacttcttggtctcaggctggctacaacgactatccaattaccagcttcaacctctaattcacccacttaaccatcctcaccatgcccgttttctaccaagacctgtctactagataatgtatcaagttccccatgatttaccagaaggatcctcaggaccttctatccactagcgaacgatcatctcctggatggtgaacagcgtgctcacagcctttatcatcttcttcctgtgcacttcatcattgcataaccacacgttactgcaacactataagatgtcgcacatggctacactg

SEQ ID NO: 116654 - DNA, 441 bp, Zea mays
  Clone ID: MRT4577_37879C.1
tccgccgcccggcgcagccaccaccaggaaggaggcaggaagaaaaccatcctggcgtcacaaacgacgtacatcccggagggcgacacactgacggtggcaaccaagctgctgacggtggacggcccccgaaggaagctcacccgtaacttcaagtaactctacctttacttctagctgaaggagggcggacgcacgctgaaggcgcacgcatggttaggcacccgacgaagcatggcatccatacggacatccatctcccacatacacaacttaatgaagggagtaaccactgcctacccatacaaaatgaggtttacctacatccatttatccatcaacgcatccataactaactccaacacctccatataaataacgaacttggttagagagaagaaggaaagaaaggcgtgcttgattgactgaccgtccttcctt

SEQ ID NO: 116655 - DNA, 387 bp, Zea mays
  Clone ID: MRT4577_3787C.1
gggtggggtttttttttttgggggtgggtgttttttttttttttttttttttttttttttttttccgggacccccggaggcggaaaaacttgggggggtgttttaaaccccccctttttcttggaaccattttttttcccctcttttttgaaaaaaacaacattttttggcggggccttccccatttttttcaacccgggcagcgggtttacccctttcttttttctgccccaggcttttttttttgggggaaaaattggtcccatttcgggcaccggggtgggcttaaccttcttccacctgttaaggggggagaccccaatcttccttaggccctatatgagctccccccttttttccccctaaaaaaaaatttttttctgccca

SEQ ID NO: 116656 - DNA, 494 bp, Zea mays
  Clone ID: MRT4577_37880C.1
gggggaggaaccgtggggacacacccacgccgctcgagctaacgagcaccgaaaagacagaggggggggacataaaggacgccccccacacaggcccgcaggggggcgggcagcaacaacagcggcaacaacggggaggcgacgccagggcagagggaggaccaaggcgggccgaccgcgggaatggcttcaggcgaccagggcggggccgcacgccacagacaagagaggagcacggagagcgccggagagggggagacgagcgacccgaagccgagcccgggcgactggaacggcgccggcgcgcacaccaactacagcacggagccgaggaggaaggagggcggggacaaggagaacaaggcgggcaccgagaagccgaagccgcggcacagggagcacaacgcggaccacggcgagggcaacgagcgccagcgcaccggcaggcacgagacccgccgcaacaacacgaacagggggggcgcggccaaccg

SEQ ID NO: 116657 - DNA, 2713 bp, Zea mays
  Clone ID: MRT4577_37881C.1
aggtggtaagctgttgtacagactagtataactattaaataacagatattcacttcgcagttcagactagcataactgcactccacagttcacttcttgatctacatttggctgaaatgtctgttactgatacatacgctgatattgatatggtagactagtataacaaattttcatgtttgctctgctttttcatatggtagacgggtgagacatttgataaggcaaattggacggatccatacaacaatactacattttgtgacctttgtgttgagcaaataaaggcgggtaatagggttaatggcttcatgactacccgaggttaccatgtcataactgagaagtattatctaagaaccggtttaagacattctaaaactcagttgaaaaatagatgggatctgttgaagggtctctttagctttcgggtcttggccgggcaaatggtactgttgttgctaatgaagctttctggagcgaaaacacaaaggtactcatgaagcgtgccttctgtttgtgttttttgtgacacacaaaggtactaatcattctgaattttgccaggatcactctgaatggaagaagttacaatatggaccacctgaaaatcatgatcaacttcaacaaatgtatgagcacaatgttgttgttggttcatcgtcttgtattcctgtagagcatatgaatgaaggtaacgaaggtgatgacttggatgaggatattgccagtccagctagtggagcaagaaagaagaggacatgcaacactagtactgcaacaagtccattgaagagaggacaaagccctatgttgaagattatgaggggcatgtggggaactttgcagtctaatagtgatgctgcaaaaagggtcctagagggagaattaaggataaagtcaatcaagaaggcgatgaatctggttaaagaatgtggtgcacctgaaggaagtgttgagcattacatggctacaaaattgttcgtgaaagctgaaaaccgagatatgttctttacttttgaatcaaatgaaggaagattgtcttggttaaagagaaattgtcaggactatgggttgtcttgagttggtagtagtcatgagtgtgtctgcctattatgctactgtcatggaccattttatgtattgatgtcgtgaacattctatgtgtgtctgctgtcacaaaccttttatgtactgctgtcataaacctactatcatgaaccttttatgaatcttctatgtgtttcaaatcatatgtatgtgccttgaatgattaagtttgttgatctcttattattgtctatgtagattgattttttcccaaatgatgaggatgagacagatggcatagttgaggtggctcttggtgaacttgagatgatggaacaatatggtgccttcatgtctacatttggtatgtactatgatgctaccttctttaataaaagaagtcgtagggaacctcaagtcactggatatgattgggtagtgaggacacttaatgatcctagagagtgctttaatatgtttagaatgagtaagcatatatttgaaagtcttcatgatgtccttgcatcaacatatggattgcggtcaacatgtcagatgagttccatagaagctttagccatgtttttgtggatcattggtgctccacaatcaattagacaagttgccaatcgttttgagaggtcaaaagagacgattagtagaaaatttgaagaagtgttacattgtgtttataagatgtctgctcatatcattaaaccaaaagatccagaattttctattgtgcacccaagagtacaagctccccaattttcaccgcattttgataaatgtattggagctatagatgggacacatgtgcgtgttgttgtcccatcatcaaaggtgctgcaacatatagggcgtcatgggtatacaactcagaatgtattggccatatgtgacttcgatatgaggtttacctttgtggtcgccggatggccagggtcagttcatgatatgagagtgtttaatgatgctctgcgcaaatatggtgacaaatttcctcatcctcctcctggaaaattttatcttgttgactcggggtaccctaaccgtgatggttacctagctccttacaagggaactaagtatcatgtaccagagtttcgacaaggccctagaccaagtgggaagaaggagttattcaatttttgtcactcatctcttcgcaacgtcatcgagcgttcgtttggcgtgttgaagatgaaatggaggatcttgttacacttaccatcgtatccaatggtaaagcaaacaaagattatacttgcgtgcatgacccttcataatttcattagagaaagtgctatggcggacgtggattttgaaatgtgtgacaatgatgagaactatatatcgattcagagcaacaatttgtttgaagaagatggtgatgaagaacaaggcatgaacgctttccgtgacaacattgcaaatgcgttgttcatcatgagagggtgacaagttggagatactatttgtgttcacaaagtagttcagtttgtatcgctatgagacaagtttctctacatttttataaacagatgtacattttcagaatgactgtttttgtttgaaaaaagatgaggttgagatgggcagttgaaatgaacggttgtaaagctgaaattgaatattgattagataaaaaatggttgaaatc

SEQ ID NO: 116658 - DNA, 191 bp, Zea mays
  Clone ID: MRT4577_37882C.1
gccgtgggttgtttttttttttttttctcagctccgggctcgggttgtccaccagcaccgcctggagggtttatccacggccatcgcgtcaccaacaggccttggcttgcggcctgggcgttttctgcgctttctcttgcctagacgcataaggtcttgggggggggggggggggtgtccattgcaggcgc

SEQ ID NO: 116659 - DNA, 411 bp, Zea mays
  Clone ID: MRT4577_37883C.1
agccatgatacagatctgtcgaaagcttgtagcctgacgggagtgactcagtcagagaatctgttaatatacatctcaccctgcgatacctcaactcaaaaaatacgatgagcaccttctcactccatcgtccatgactgggtcacgaccgtaccccagctgactcgagagcctacactgctgttcccaccgctccatccccacgccacttcagctgaataaggcggaccctccacattgctgccatcgggagagtgaccggaagtactgtaaaaaagatgacggctcccccggaattcctgctattatccactcagacacaactcgcagatgcgatgaaacacatacccacctgctgtcgcaggacgacaacgaagatggagaccttttccaagcccagagcgagtacga

SEQ ID NO: 116660 - DNA, 1515 bp, Zea mays
  Clone ID: MRT4577_37884C.1
gtttaatcacaaaaaaaaaaaaaaataaaccgatatacttaaccctttctcacactctccgtcgcccgggatcccaccccgaagggcgtcgccgagctagccattgccgcctcccggctcgcgactcgcgagtcacaggcgcagccgagcgttccttggggacgaggctacatcgcgatgtggtggagggcggtgaggcgccggtgggtcgcgacggcgcggcccgcgtcctccgcggcggcgggggcggagaagagctgccgcgccgtggtggtgccgcgtttcggtgggccggaggtgctcgaggtcaggcagggcatgcctgtgcccgatctgaagccgcaggaggtgctcgtgcgcgcacgcgctgtctctatcaaccccctggacctccgaatgcgatgtggctatgggcgctccatattcgaaccactcctacctctgatcattggtcgggacattagcggtgaagttgcggccaccggaactttggcatcgtctttttctattggccaagaagtgtttggttcgttgcatccaactgctctcagagggacatatgctgattatgctatcctgtcactggacgagcttactctcaaaccatctacactcagtcatgtggaggctagtgcaatcccgtttgctgctttgactgcatggcgcgctttacatggtacggctcgtatttctgaaggacaaagagttcttgtgattggtggaggaggagcggttggattagctgctgttcaacttgcggtggctgctgggtgtgtggtttctgctacctgtggaacacaaagtattgagcgagttatgggagttggtgctgaacaagctattgactacactgctgaggatactgaagcagcaattaaaggaaagtttgatgctgttttagacaccataggagtacctgagacagaaagaattggcatcaatgttcttaggagaggtggacactatatgacccttcagggagaagcagctgccctagcagataggtatggattggctgtagggcttcctgctgctactgctgttttactaaagaaacagatgcagtatcgttattctcatggaatagagtattggtggacatacatgagagctgacgccgaaggccttcacgagatccaaaggctatctggagctgggaaactacagatacctgtggagaagacctttcccatcagccatgtaagagaagctcatgcggccaaggagaaaaagttggctcctggcaaggtggttctggaattcgattaatgttattaagattttgtccattgggacctgaagggctgtgcgtttgcaaatcatgatagttttttttgtaaaaaaataaatctgaatctctctgccgacttcaggttccattttatcgttccgtttcagtagaaatacggtaaataatcatatcagctatggcctatgggcacgattttcctgatgaacttcaggttccattttatcgttccgtttcagtagaaatacggtaaataatcatatcag

SEQ ID NO: 116661 - DNA, 402 bp, Zea mays
  Clone ID: MRT4577_37885C.1
gggggggaaaaaaattcccaggggaaaatcagccgaacctgaactctacactctaaaccaagcgactggagaccgcccacccgtacggtgcacggaggacctacccccggcgggttcaaaacaacccccgcgctggaaccaatcccgcccgaggcaggccggaccagggcacggccggtggctcggcgagccgggacctgttgagttgcaaccaaagcaggtggggttgcagccgatttacgtgatcctgacctagccgggcctgaagacgcccgggccgaagaggcccccgccgaggaggaccccgaccaggaggcccagaaggtggcaccccacccattgtttggggcaccttggcttgggcatggctttcccccggacctggcccgacgggtggtttga

SEQ ID NO: 116662 - DNA, 1137 bp, Zea mays
  Clone ID: MRT4577_37886C.1
cattgggtacctcgaggccggccgggcgtggtgggaacctcgaggccggccggggccccatccaattccaaacaactcttctcgccatttcaccaccgcctcgccccatcctctccccctcccgtcgcgccagtcaacagcctgtctgcctcttccctcgccacccatggccaccgtagcgcgcaccctcgtcgccgcatgcccggcacggtctctcctccgcctccggtctcggcgcctcccgtcctcctcttccatccgtcccgcgcggcaacgtgccggcgtcgggtctgtccgctgcatggctcggcgaccggattcctcctattccccgctgcgttcggggcagggcggtgaccgtgcaccgactgaaatggcgccgctgttccctggttgcgattacgagcactggctcatcgtcatggacaagcccgggggcgagggcgccaccaagcagcaaatgattgattgctacatccagacccttgcccaggtgctagggagtgaagaggaggcgaagaagaagatatacaatgtgtcctgcgagcgctattttggattcggatgcgaaattgatgaagagacctccaacaaactcgaaggtcttccaggggttctttttgtgcttcctgactcttatgttgatgctgagaacaaggattatggtgctgagttattcgtgaacggtgaaatcgttcagcggtcgccagaaaggcagagaagggtggagccagtgcctcagagagctcaggatcggccacggtacagtgaccggacccgctatgtgaagcggagggagaaccaatcttaccagagatgatgtctccgtttctggagatggaaaatgccagggtttccacaggtgtgccatactggagatgcaggagcaacccccactacccacatgagaatgacatccgttgtgtttgctgcgctttctaagcttgacaagttgacattgcttatgcgtttgggcttgtacctctagttgatatgacggtgtatccttttaactccgcataacattgtgtttgaagtcttctttagtcagaaaatattgacgattatcagatggcgtactgctactgcattgggccatcatctcggaaggggcccgcccgttcgaccgttcccccc

SEQ ID NO: 116663 - DNA, 734 bp, Zea mays
  Clone ID: MRT4577_37887C.1
gtccggaattcccgggtcgacccacgcgtccgcgtggaggaagctgctccctccgaagcagtaaaccagcatttctgtttgtttgtttgttttgcccttagttccgtcactccaaatctacccaccaaggaccctgaccctgtccactccaggcgaatcgagaccgtccggctgggtccccccaatttgggccgactttgcgcctccaaacaaccttagcatgatgtcttatctaaagcaaccgccttacgcagtcaatgggctgagtctgaccacttcgggtatggacttgctgcatccctccgtgggctaccccgggccctgggcttcttgtcctgcagccaccccccggaaacagcgaagggagaggacgacttttactagggcacagctcgacgttctggaagctctgtttgccaagacccggtacccagacatcttcatgagggaagaggtggcactgaaaatcaacttgccagaatccagggtgcaggtatggtttaagaatcgaagagctaagtgccgccaacagcagcagcagcagcagaatggaggtcagaacaaagtgaggcctgccaagaagaagagctctccagctcgggaagtgagttcagagagtggaacaagtggccagttcactcccccctctagtacctcagtcccaaccattgccagcagcagtgccccagtgtctatctggagtccagcgtccatctccccactgtctgacccct

SEQ ID NO: 116664 - DNA, 410 bp, Zea mays
  Clone ID: MRT4577_37888C.1
ggagggaaaaattatttccatctatttttctataaaaaaataattccccttcgagatgaaaggaagttggaaaaacaactaaagccctatgaccttatttttaaaagggtatttattttgaaaaaaaatttgaaccctaaatataacctttttataggataaagcgagtccctgcttgatgctataaaacacaaatcaagccccccgggccccgtggtctttggccggccccccccccgcaccgaggatttcaactacaggcctggcccgggtgtgcatccccgggaccttcacggtcaacaccccgtgggtgtacccccccaaaatgccttccacgtccaccatccccggaaaccaaaacttccggtcgaatctcctcccgtccgcaacggccccccccgtgccggtgc

SEQ ID NO: 116665 - DNA, 1017 bp, Zea mays
  Clone ID: MRT4577_37889C.1
ggctggccgggaaaaaaccccatccaattccaaatcccacttctcgccagttcgcctccgcctccgctccgctcctccccctcccgtcccgccatggccaccgcagcacgcgccctcgtcgccgcacgcgccctcgtcgccgcacgcccggcacggccgctgctgccgcctcggcgcctcccgtcctcctcttccatccgtcccgcgcggcaacgtgccggcgtcgggtgcgtccgctgcatggctcggcggccggattccacctattccccgctgcgttcgggccagggcggtgaccgtgcaccgactgaaatggcgcctctgttccctggttgcgactacgagcactggctcatcgtcatggacaagcccgggggagagggcgccaccaagcagcaaatgatcgattgttacatccagacccttgcgcaggtggtagggagtgaagaggaggcgaagaagaggatatacaatgtgtcctgcgagcgctattttggattcggatgcgaaattgacgaggagacctccaacaaactcgaaggccttccaggggttctttttgtgcttcctgactcttacgttgatgctgagaacaaggattatggtgctgagttatttgtgaacggtgaaatcgttcagcgatctccagaaaggcagagaagggtggagccagtgcctcagagagctcaggatcgaccacggtacagtgaccggacccgctatgtgaagcggagggagaaccaatcttaccagagatgatgtttccgtctctgaagatgtaaaatgtcacggtttccacaagtgtccaaatgcggtactgaagatgcagcagcaactccccactactcatatgagaatggcatccgttctgtttgccgcgcattttaagctgtatatgcttattatgcatttgggcttgtacctcagtcgatatgaacgatgtatcctttgaactaacgcattataatttttgaaaccgttttagccagcaaaaaaaaaaaaaaaaaaaggccccta

SEQ ID NO: 116666 - DNA, 172 bp, Zea mays
  Clone ID: MRT4577_3788C.1
ccattgggttgcgcgggaggttaattaaaggagtgcggggtttaatacaatctgaaaccaccttaaaatggttcatcacctgagacactgagtgccacataatcaattatttagatggacggtccattcaaacccgaacatgatacctagccataattccccggattttttt

SEQ ID NO: 116667 - DNA, 1206 bp, Zea mays
  Clone ID: MRT4577_37890C.1
gccggccggtcaccgaaatgagccgctcgagccgcgcacccacccggccagatctgagttctgagttctgaaccccacgacaaggcgagagagaggggaaggaaaggaacgcaaaacatctatcaccagttcacgacgccaccagccacctccaacatttactccgctacccacgcggccccgattccacccagggcacccagcagaggcaccaccaccgtgcgcccgctccgccaatgccattccgccgctccctaccgcgatgcccctcctctcctcgctctccaacctgggcctcggctactccatcgccatcgcgctcggcttcatcatcctgttcgcctccttcctgctggctttctacttctgcttcggccgcggcggggactactgggccggggaagcagtcaccacggcgtccagctccggccacctctccatcaccgtcccgcgcgtgctcttcgtcgcggaagggtctgagtcccccgaagacgacgcttacccctcctccgccgccgccgcggcctgctcccccgtcgggctcgacgcggccgccatcgcttcctaccccaaggtcgccttctccagcagggccgccgaggcagacgccatgtgctccatctgcctcagcgagtacagggacggcgagacgctgcgcgtgatgcccgagtgcaggcacggcttccacgtcgcgtgcctcgacgcctggctgagccggagcgcgtcctgccctgtctgcaggtcctcccccgtcccgacgcccaactccacgccgctcgcgacgccgctttccgagctcgtcccgctctcgcagtacgccgccgaccggaggcgccgcagcttttctggtcgccttgcacagaaccacctgacctgatgtggttagcttgcttctctcgtgggtttgttgttaaatggttcttggcgtttggtttactttttccatcattctcacctgcccaagtccaaggaaacagccaaggagtggacgatggagtagaagaagatgcggtcatttatcacgctggagaaatggcgaccagtatgaggatgtagggcactgagcgtacatgcgtacggtgtagtactgcatccccttgcgctcgctacgtccggaatacgcgtcttcatccatcaggtacagtcagagcaggtcggcactccactgccaaccgcacatggacactctcaagagcattttctagt

SEQ ID NO: 116668 - DNA, 993 bp, Zea mays
  Clone ID: MRT4577_37891C.1
actccatagggcgattggtttctcggaggcccggccgggaccaaaagttcaaaaccccatccaattccaagtcccacttctcgccagttcacctccgcctccgctcctcccctccccctcccgtcctgccatggccaccgcagcacgcgccctcgtcgccgcacgcccggcacggccgctgctgccgtctcggcgcctcccgtcctcctcttccatccgtcccgcgcggcaacgtgctggcgtcgggtgcgtccgctgcatggctcggcggccggattccacctattccccgctgcgttcgggccagggcggtgaccgtgcaccgactgaaatggcgcctctgttccctggctgcgactacgagcactggctcatcgtcatggacaagcccgggggcgagggcgccaccaagcagcaaatgatagattgttacatccagacccttgcccaggtggtagggagtgaagaggaggcgaagaagaggatatataatgtgtcctgcgagcgctattttggattcggatgcgaaattgacgaggagacctccaacaaactcgaaggccttccaggggttctttttgtgcttcctgactcttacgttgatgctgagaacaaggattatggtgctgagttatttgtgaacggtgaaatcgttcagcgatctccagaaaggcagagaagggtggagccagtgcctcagagagctcaggatcgaccacggtacagtgaccggacccgctatgtgaagcggagggagaaccaatcttaccagagatgatgtttccgtctctgaagatgtaaaatgtcacggtttccacaagtgtccaaatgcggtactgaagatgcagcagcaactccccactactcatatgagaatggcatccgttctgtttgccgcgcattttaagctgtatatgcttattatgcatttgggcttgtacctcagtcgatatgaacgatgtatcctttgaactaacgcattataatttttgg

SEQ ID NO: 116669 - DNA, 857 bp, Zea mays
  unsure (1)..(857): unsure at all n locations
  Clone ID: MRT4577_37892C.1
ccgggtcgacctcgcgtccggtccgctgtatggctcggcgaccggattcctcctattccccgctgcgttcggggcagggcggtgaccgtgcaccgactgaaatggcgccgctgttccctggttgcgattacgagcactggctcatcgtcatggacaaacccgggggcgagggcgccaccaagcagcaaatgattgattgctacatccagacccttgcccaggtgctagggaggtaatggttactcctcaggtttatttgtttggcggtatgagaaacaatttttgataattcgctatctgttgttgcagtgaagaggaggcgaagaagaagatatacaatgtgtcctgcgagcgctattttggattcggatgcgaaattgatgaagagacctccaacaaactcgaaggtcttccaggggttctttntgtgcttnctgactcttatgttgatgctgagaacaaggattatggtgctgagttatttgtgaacggtgaaatcgttcagcgatctccagaaaggcagagaagggtggagccagtgcctcagagagctcaggaccgaccacggtacagtgaccggacccgctatgtgaagcggagggagaaccaatcttaccagagatgatgtttccgtttctgaagatgtaaaatgtcagggtttccacaactgtccaaatgcggtactgaagatgcagcagcaactccccactgcccatatgagaatgacatccgttgtgtttgccgcgcattttaagctttacatgcttattatgcatttgggcttgtacttgtacctcagtcgatatgaacgatgtatcctttgaactccgcattatatttttgaagccgttttagcc

SEQ ID NO: 116670 - DNA, 198 bp, Zea mays
  unsure (1)..(198): unsure at all n locations
  Clone ID: MRT4577_37893C.1
aatagatacaggaattattaccacaacaaactaagggggtgtttggttttaaagactaatttttagtntttagtaaccaaacactacctaaacttggaaactaaattacagacagacagacataggtccatccgcgggcttattatttggaagtattaattacagaccactacagatgaaacgacgaatctgacacct

SEQ ID NO: 116671 - DNA, 1194 bp, Zea mays
  Clone ID: MRT4577_37894C.1
cctggaactcgctcactggcaatggctaccaataccaagctcgtggcccttggcttggccgtcctcgtgagcgttgggttctccgatgcagcgagggtagttaggcttgggagctatgcgtctgccggaggaggcggcggcggtggaggcggcggctccggatcgaccggggctgctgggtacggcggtgggtctggcggtggcggtggctacggcataggcaagggtggcggggactggtggaacaatttcgtctccagcgtagcgggcggtggtggtgggggacagggcggagggggtggcaccaacggtggatccgggtccggcggtgggtcgggctatggttctggcaccagttccaccgcagcctctggccccagcagtggcaactacgccaacgctgagggcaagggcgccggtgggggcatgggcggcggtgccgatggcgcctacggttctggtgccggtggaggcgttggcaagggccagggcgagagtggcgtcgcattggcaccgtcgtccgatggctactacaatggcggcgccgctgatgctaccggtggtggttccggcgctggcggtggacatggcggtggcgccggagctccaagctacgggactggaggtggccttgcggaggcaagggcgaggcggcagcgacggtcctggggttcaggttacgcggcgggaatcggtgctggcactggcggcggcggtggcggcggattccaaggcgcctctggtggtggcggtggctctgggtccggatccggcagcggtggaatccactgagtttccctgcggcatgcagctggacggagcgctcggcgtgtagtgtcagtccattttggagtcggttcgtgtacctgagttttccttgaggagatgctggttttcgcattctttgttgcaagaattattagtcaggaataatgggcttcgttcgtgattgtagttcgagtaggtaggtagtccagcatgcaactgacatgtaatggctacaggctactacgagtatatgcttgcatcgccatcttttgatgtgccccttgttgttactctcatcgatctttagaggtcgttgctaccggtttttatcttccaaaacacaaaatatactgggacgactcttgcagtctcttgctactgttgaatgtgactattgactagctatagtagtatttaaaaaaaaaa

SEQ ID NO: 116672 - DNA, 808 bp, Zea mays
  Clone ID: MRT4577_37895C.1
aggccggccgggccggggttacttacatatggcccagtggtttgtgttagtagttaggtgtttgaggtgctgggttcaatccttccttgggcctttttttaaaaaaaaaaaaaaaaaaaaaaaaaaaaaaaaaaaaaaaaaaaaaaaaaaaaaaaactcttgtctcccagtttctaaccctagctgccaaggtcaagctccctcccaagtccaaagtcccaaactgcccgtctgcggtgcagggctgcaggcatccacctccatcaggcgctgacccagtttccgccatccaccaggcgtcctcagaatacggtgcagggctgccgagcagcgagcagcaagcactgaggaccgtcgagcaccgagcagccaagcagcgagcagagggcagcgaccatcgagcaaccgagtcgcgagtcttctctgggggtgaaaaggcgctcaagaactttccgaaaatggacagggagacaaaactatatatcgatcgtgtggacacctgtcgatccggtggaataagttgggcagagatgacaacaatataatgtgtgaggtcgaatgtcagaattatttgtgcttgtccgttgagatggagatacgttagctggcatggagatttttcagttattcgggtgatctttggtggtgcagctacgttttctttttgagaattcagcaggggaacccctctgtgtttttttgtgtattttgggcatagaaatatctagaactaagtgtcagctttatatagaatatatgttcactcaggaaagaatctaagtcattctgtataaaaaaaaaaaaaaaa

SEQ ID NO: 116673 - DNA, 1872 bp, Zea mays
  Clone ID: MRT4577_37896C.1
ttgggaccctcgaggggggccgggacacccgcccccagtcaccaccagaccaaatcgcagtcgcgctcgagctaagccccgccgccgacgccgtcatctgcgccccagaaccccgtatttccctccgccgccttccgatctctcgctcctccccatgtcggagaaaaagcgccgcgccggtgcgagcgcggccggcgccgcatccagctccaagaagccgcgtgcttcctcggctgcgtcgtacgccgagtccctccgctcgaagctccgccccgacgcctccatcctggccaccctccgctccctcgcttctgcctccgcttccaaatccaaggccgacgccaggtccctcgcggaccacgacccgtgcgcggaccccgcctcctcgtacatcgtggtggccgaccaggactccacctccgtcacctcccgcatcaaccgactcgtcctcgccgccgcgcgcagcatcctctccggccggggtttctccttcgcggtgccctcgcgcgccgcctctaaccaggtctacctcccggacctcgaccgcatcgtgctcgtccgccgcgagtccgcgcgccccttcgccaacgtcgccaccgcgcggaaggccaccatcacggcgcgagtcctctccctcgtccacgccgtcctcggcaggggcatccacgtcaccaagcgtgacctcttctacaccgacgtcaagctcttcggcgaccagacccagtctgacgccgtcctcgacgacgtctcctgcatgctcggatgcaccaggtcctcgctccacgtcgtcgcctccgagaagggcgtcgtcgtcggccgccttgtcttcgccgacgacggggaccggatcgactgcacgcgcatgggcgtcggcggcaaggccattccgcccaacgtcgacagggtctcgggcatcgagagcgacgcgctcttcatcctcctggtggagaaggacgctgcattcatgcgactcgccgaggataggttctacaaccgcttcccctgcatcattctgacggccaaggggcagccagatgtcgccacccggctgttcctgcggaggctcaaggttgagctgaagctgccagtgctcgcgctggtggattctgatccatacgggctcaagatcttgtcggtgtacatgtgtggttccaagaacatgtcgtatgacagtgccaatctgacgacgccggacatcaagtggctcggtgtccggccgagcgacctggacaagtacagagtgccggagcagtgccgtctccccatgaccgatcacgatatcaaggtggggaaagagctgctcgaggaggacttcgtgaagcagaatgagggctgggtgaaggagctggagacgatgctgcgcaccaagcaaaaggctgagatacaggccctcagttccttcgggttccagtacctcaccgaggtctacctgcctcttaagttgcaggagcaggattggatttgagaactctccaatgctagatatcagtaatttccctagccaagataatgccctcctcgctcagtattttcaaggaccaaattggcatgaatgaagacttcgccatctagttaatcacatgtatttttgaacaccagctgttgtattatttatttctgctggagaactgttctgtggaaaacattgctgccagatatatgtgctggaatttgatacataacacaggtgatttagattggttgggcctcttatctggtcgaactttggttgttctgtgtcctatatttctgtagggcttattagttccgtgtttgacatggaaatgggataacccggattgaatgaaaatgtactggaaattgatatatagcagtatgaaaatccatgcatgaaaatttagaaaaaaaaaa

SEQ ID NO: 116674 - DNA, 788 bp, Zea mays
  Clone ID: MRT4577_37897C.1
cattgggtccctcgaggccggccggggtcatctttgtttcttgggttttcgtcggtcaaacctggcatggtaaccatggtgcaaacgactggcgttgtcgttgcaggtgcgtccatggcagccctcgtggcgcaaccggcatggagagacggcctgctggtcgcgctggctcgctggacaggctataatgcgcctggtggtttgtggaggatagctgcgattcttcttgccgcggccaacttgaagaacctgccctttgtctggcatatacgtgtctttcgcgccatgctttaccacatttacgtccagcctacgcccattcctcctcatgccctgtttcaacccatgatctcctcgactcggaccaccctcgtcgaaacagattacaacttgcacaagtccaacagtacctacttcagcgacatggacgtttcacgtacccacctcttcaccgcgttgatgcgtaacgccatccgaaaacagagccgccggtctggcgccaaagtggctggagctatgggagccacagagggtacaccaggcaggcatatcatcgcgctaggcgggataagttgtctattcaagagggagattccgccttatcaaaagtttgaaatgtggaccagactactctgctgggataggaagtggttctacctcgtcactcatctcgtcaaggccggcgtagcccagccagagagctggacactgcagcctttggaaaagtcaaagagccgttctgcaaacgttgatcccggaaaagttgaaaggcgcagtttacgcgactg

SEQ ID NO: 116675 - DNA, 1124 bp, Zea mays
  Clone ID: MRT4577_37898C.1
atcacacattagagaaatataccatctgaagaaaatttagcatgtttgatacttaggcaagaatttgaagttaaaaagaatgatggtagtagcatagattatacaccttagcttcaacatatttccactttataaagagccggtgctttttaccccatccatcagagataggaagctctggaatgctctcttgaacttgttgccaatatttgaccatctcacaggctaagcgccgttttactgctaaagtggcctttggactatcaatagccaaaccaagctgcatgtcaaccccctgacccagggcttggaggcttagagctttgagatttccttcagccaggtctactggaagctctctcctgctattcactggcatcttcgggagtaccagccgaactgcccagtcttaagtatccagctgccttcaagaagacatcaacagtggggccgtcgactctcttcagaaacccttgggggcatagccatcgccgtatgacctcgggagaaagcagggcgttggcctgcagcaggcagaccatggccatcagatgcagcatggacagcacctcggtacccaggcgtctggcatggccgtctcctcagccattatcctcctggttactccaggtgaagtgcactttgttcctcaagacgctaccttcttttaccagtcctagcagagccggcaagtagtcttcgagggcctgtagaagattggctgtactagacccgtgccgtgccgccgctctccgcctgggcttgagcgccgccgccgactctcgcattgccatgtcgacgacccgcgatcgcagagccgagagccggtccacggcgctcctggccaggcagccgccgagcgcctgcgccaagtcgacggccctcggcacgcggaggcccgggaggaagatgaccacgtcgccgacgctgaccggccgcctccgcggcgccccggcgtccttctggctcgacgccccgcaccccatcctcgtgcagcgccctgcttagtttattgttcagagtgtggatgtggatgcagatgcgcggctatgcaacttcttctcctcctggtcctggtgagctggactgcaggctgtggaggaggagagccttgagagggggaa

SEQ ID NO: 116676 - DNA, 3530 bp, Zea mays
  Clone ID: MRT4577_37899C.1
gtatgctgcagcctgggataaacatgtaaaatggatgtcatacagtagaaatgattaaaagatcacacattagagaaatataccatctgaagaaaatttagcatgtttgatacttaggcaagaatttgaagttaaaaagaatgatggtagtagcatagattatacacattcccccgcggctcctctcttcctgtcttacgtcgctcgccgcatttcgccatttttggggagggtgtgttccagccttgcaggccgccgagatggtgggaggcagcaagccgctgggggaaagcgtattcgcggtccacgcggtcgccggtgcggcggcgatcagcgcctccgccgtcgccgtgtaccccctcgatacggtcaagacactcctccagctaggagcgacggggcagaagcagaagatggggctccggcaggtggtggaccggctcatggccgcttccggccctgcaggtttttacaatggcattggatggtccatattgggtaaacttcctggattgggagcacgttttgggacctatgaacttttaacagccttctattaaagatggaagggaggacaactatgtctattattctgaggctatgaaggctggcatagctgctggtgctgtagaggctgtattctgcacaccatttgaacttttcaaacttcgaaacctggttagtgcggggagcccttcaaaagctatcgggcctgtacaggtcctgtttgattcggaccttgctggaagcatctcttgggatcttgtcaaacagatattttgctgttccgaatgcattcggactcctcgatgttggaggagttgcatggaaggcttccgaaaccattttgctttctttcagaaattcttctgaagcttgtagtgcagctattgccattccatgggatttctcggtatttccctcgtcaagaatcaaaccgtggaaatagtatgctgcagccttggcttcaacatacttccactttacaaatagccggtgcttttttccctccatcagcttttctacttggcaattcctacacacagtgatgctcacctggaaggcagttaatatgagccctaaacctagaaatctagaagcagcaggacctgtacccccttttgcctctagtgttgctgcaggctttgcaggagcgatagcagctgctgcttcacatacatttgatactgctaaaagtcgttcagagtgtactgtggtgcctaagtatatcgcaatggagaggaagtttcttaagtggaaagcaccaggaacgtggatagagaggaagacaggaatatcccctgctgataggaatgttttgttccgtggcattggcctacgaaccgcccgtagtggaatcgcatcatttgtgttagtcggctcatactatttagctgtgaatcacctctcgtagttgatcaagagaaatcatatggagatttttttttgcattcagaagttcaaaactaaaattttatgactgtatatgcatgcactgaatggctggaagctgactttgccacagtatccactgattatttgaaaatcctgttcacctaagtgctcagatgaaactgattgtcccacggcatgttttaaggtgccgatgtaaatgttttatggcaaaaaaaaaatttgaaggctgccactttcgatcagaggctagtttacagttctacataaattgctgaaaatctgtttttgacaaaatgcaagcatcaagatgcacaatgatcaaggaaccctttgacatagcatttcccttgtcagaagaagaatcgcctgtacaaagctcttcagattgtcttcaggccttgcgtaaatttgtgaacatgtatttttgtttgaaaatactttgtacacttcattcattacacatcagctcttgacatggcagatcttggtccttcctttctctccagagccaatatttttgccagaagcaaccattctgctgcatatacacttaatggcttgtgtcttctttgttccaaagtggatctagtggaggaagatcatattcttcaggtgttagcgccaatgcaaaatctggtaatgggggtggcgctccaatgaccttttcttgagtatacaggtcctggttgattcgaaccttgctggaagcatctcttgggatcttgtcaaacagatattttgctgttccgaatggattgggactcctcgatgttggaggagttgcatggaaggcttctgaaacccttttgctttcttttagaaattcctctgaagcttggagtgcagctattgccattccatgggatttttcggtatttccctcgtcaagaatcaaaccgtggaaatagtatgctgcagccttagcttcaacatatttccactttataaagagccggtgctttttaccccatccatcagagataggaagctctggaatgctctcttgaacttgttgccaatatttgaccatctcacaggctaagcgccgttttactgctaaagtggcctttggactatcaatagccaaaccaagctgcatgtcaaccccctgacccagggcttggaggcttagagctttgagatttccttcagccaggtctactggaagttgtctccttagctccagtggcatcttcgggagtacatgccgaactgcacagtctaggtatccagctgccttcaagaagacatcaacagtagcccgtcgactctcttcagaaacccttggggcatagccatcgccgtatgacctcgggagaagcagggcgttggcctgcagcaggcagaccatggccatcagatgcagcatggacagcacctcgtaccaggcgtctggcatggccgtctcctcagcattatcctcctggttactccaggtgaagtgcactttgttcctcaagacgctaccttcttttaccagtcctagcagagccggcaagtagtcttcgagggcctgtagaagattggctgtactagacccgtgccgtgccgccgccctccgcctgggcttgagcgccgccgccgactctcgcattgccatgtcgacgacccgcgatcgcagagccgacagccggtccacggcgctcctggccaggcagccgccgagcgcctgggccaagtcgacggccctcggcacgcggaggcccgggaggaagacgaccacgtcgccgacgctcaccggccgcctccgcggcgccccggcgtccttctggctcgacgccccgcaccccatcctcgtgcagcgccctgcttagtttatctaatccctcggcgacgtacggtgagaagaacgtcacggccggtagctggtcctttctcgctgccggcgcacgcaggtatggttgtagctaggacgtgaggagataaggcaactgggggggatagggagaggagggactcaactgttggagtgtggatgtggatgcagatgggcggctatgcaacttcttctcctcctggtcctcgtgagctgggctgcaggctgtggaggaggagagcctatgagagggggaaggaggaggaggaggagaggcccggcccggccggcctcgagg

SEQ ID NO: 116677 - DNA, 178 bp, Zea mays
  Clone ID: MRT4577_3789C.1
tttgtaaaaacgcggtatatttagtgggccagcgacttattaggttcatcttcgtccatctccacgcaaggagtcaatcatgaatgtcggtcccatcgccgctacggatggaggaatagtgataggtaaaggatcgaggcctaaatggaagctgaccactgtccttggacttgggaca

SEQ ID NO: 116678 - DNA, 2566 bp, Zea mays
  Clone ID: MRT4577_378C.1
gcacgaggcggcatggttgatgaattatggggtctcgggacaggggttcggattgttaagtaaccctagttagggttatgtggacaaatactgactctgtccctgaggggtctcacgtctctatataaaggaacatgtacccctcataagatacgtaagagaagagaaagaggccaaaggcccaaccctaaaaaaaaaaaaaaaaactcgagaggcgcagagacaggcgtcttcgtactcgcctatctccgcgactcaaagcttcttccatttcctaccgccgccgctgcagctccaccccattccgtcgacaccatgagggagtgcatctcgatccacatcggccaagccggtatccaggtcggaaacgcgtgctgggagctctactgcctcgagcatggcattcaggctgatggtcagatgcccggtgacaagaccattgggggtggtgatgatgctttcaacaccttcttcagtgagactggtgctgggaagcacgtccctcgtgctgtttttgttgaccttgaaccaactgtcatcgatgaggtgaggactggcacctaccgccagctcttccaccctgagcagcttatcagtggcaaggaggatgcagccaacaacttcgcccgtggtcactacaccattggcaaggagattgttgacctgtgccttgatcgcatcaggaagcttgccgacaactgcactggtctccagggcttcctcgtcttcaacgctgttggtggaggaacaggctctggccttggttccctcctcctggagcgtctgtctgttgactacggcaagaagtccaagcttggtttcactgtgtacccatccccccaagtttcgacctcagtggttgagccatacaacagcgtcctgtccacccactccctcctcgagcacactgatgtggctatcctgctggacaacgaggccatctatgacatctgccgccgttcccttgacattgagcgcccaacctacaccaacctcaacaggcttgtgtcccaggtcatatcatccctgactgcctccttgaggttcgatggtgctcttaacgtggatgtgaatgagttccagaccaacttggtgccctacccgaggatccacttcatgctttcctcctatgctccagtcatctctgctgagaaggcctaccacgagcagctgtctgtggccgagatcaccaacagcgccttcgagccatcctccatgatggccaagtgcgatccccgccatggtaagtacatggcctgctgcctcatgtaccgtggtgatgtggtccccaaggatgtgaatgctgctgtggccaccatcaagaccaagcgcaccatccagtttgtggactggtgcccaactggctttaagtgcggtattaactaccagcctccaagtgtggtgcctggtggtgacctggccaaggtgcagcgcgctgtgtgcatgatctccaactccaccagtgttgtggaggtgttctcccgcatcgaccacaagttcgacctcatgtacgccaagcgtgccttcgtgcactggtatgtcggtgagggtatggaggagggcgagttctctgaggcccgtgaggatctggcagcgctcgagaaggactacgaggaggttggtgctgagtttgatgagggtgaggaaggtgtcgaggccggccgggccgggcttcctcccctcttacagccgccgccgccgccgccgcatcccagcctccatcaccgtttccgtctcgctgccatgggtaaggtgcacggatcgttggcgcgcgccgggaaggtccgcgggcagacccccaaggtggcgaagcaggacaagaagaagaagccccgcggccgcgcgcacaagaggatgcagtacaaccgccgcttcgtcaccgccgtcgtcggcttcggcaagaagcgcgggcccaactcctccgagaagtaggcgccgctcggctcgtaccggttcctcatccttcccgctctccgtatgcttatgctcttgatggtactagtttcgttgttcgcaagcagaggaagaaccttctgtagattcggttttgttgtccatgtgctcagatgggaacttgagattgtatgaatttgagatatggtgatatgagctgatgatttttattatgcttaaaaaaaaaaaaaaaaaggcccctaggccgccatggtggtggtcacggtggccgaggacgtggacggcaccgacgacagcaggtcgaacgactcccagccctgcgtgggcggcgctggcgccggggagggctgctggaagttccgcctctgcgacacgggcggcgggcgcggcgggagttgcggcgcgcgggccttggcgtgcccattcatgtcgccgttggccttggccttggccttgggcgccgccgcgttcttggcgcggatagcgtccagcgtctccacgtacttctgcacccgcttctcctgcgcaatcatcgcatcggttgggttgggctgggcgggcggttgagctctcgagcgcgcgcgaattcgtccccaagaagcggcaaggaattaaggctaccgcgtacgcactgacctgcatcggtcgctgc

SEQ ID NO: 116679 - DNA, 219 bp, Zea mays
  Clone ID: MRT4577_37900C.1
cgtttttattcttttttgcttttcttttcaaggaagaaaacaacgatgccctatatacccgcctggggagcatgctccaaaaaacgaacagaatggtacacttgcctagacaagggtgctaacagggggagcgactttaacccccggcatcatattttggcttgaggagaatgccgatggctgacaagcaaatctcgggcacatatgaggggcccttct

SEQ ID NO: 116680 - DNA, 459 bp, Zea mays
  unsure (1)..(459): unsure at all n locations
  Clone ID: MRT4577_37901C.1
atggacaagcccggnggggagggcgccaccaagcagnagatgatcgactgctacatacagacccttgtcaaggtcctcggaagtgaggaggaggcgaagaagaagatctacaacgtttcgtgcgagcgctatttcggattccggtgcgagatcgatgacgagacatctaataagctcgaggtgctccctggcgttctctttgtgctaccggattggtatgttcacccccccccaaggactatggagttgaaatgattgttaacggtgagattgtgtagaggaaataaaagaggtagagaagggttgagactgagccacagagggttggtgacaggcctaggcacaatgacaggacccgatacgcacgcaggagggagaaccagtgatgagatgaaaaaagttttagtaccaggttgaggtggtcggaggtctgtacttcaaggatagtgagccttggat

SEQ ID NO: 116681 - DNA, 231 bp, Zea mays
  Clone ID: MRT4577_37902C.1
atcacataggacggtgcctgtgtcccttacccgcatccatttttggtgcagtcccttgtctcttctctattccctcccatagtaatagtgggggtgcgatggtgacgacagaaatgcactttgattggagttattgctaatgatttgctataaacctatcccttaattgtcgatgtcgatgtaatttttatggatgatgtagccccacaaaatttgaggcaaaaaatttta

SEQ ID NO: 116682 - DNA, 571 bp, Zea mays
  unsure (1)..(571): unsure at all n locations
  Clone ID: MRT4577_37903C.1
cgtccgtagcttacttgggattcagcatgagctttgagtatataatgaactacgatacgatgcgggcttgtatcaactgagatggattgtacgcaaaatcgactgcttggtgctagcggaagatcggtcttgtgtctatcacatttgacgagggaacaggttgcgatgatgatgcggtgccaacggaagactagcgttctgatctacacaacaacttaatatgttaatgatgttgaatggtgcatacagaaatgttgtatagtaataaggaaatcctaatcacatgggcatctttgtatactgaagcttatacgtttaaacatttatgtgatatgggagatcatgcatcaaagatgattgtattcaacctctggatcaatgatgatggggatatggatgcttgattcataactctagacaaaagcgatatactcattactggggcccacactaaggtgaaaactaactagttcggacaaggactgctatctcagnaactacatcgtcaactccggttcggtattctgttacaggcatatgcatgtatcttggatgttcatgtacctgatac

SEQ ID NO: 116683 - DNA, 255 bp, Zea mays
  Clone ID: MRT4577_37904C.1
tcagaagtccaatgcagacagcgatggtaggagcgacggagctctagatcctatgcatgaatttagggtgcttcatcgcagctctgtcggacgccaaaatctccgacaagggctgtctggtcacgctcatcgcgaaactgttctggtagtcgaacgtcgtgagatccaccagggtggaacttcgatacgtattgctcagtttgaaggatagactggttacaggactaagtgtggtagcctttgagtttgacgttg

SEQ ID NO: 116684 - DNA, 393 bp, Zea mays
  Clone ID: MRT4577_37905C.1
gtggggggttttttttgggtttttgttccgtactttgtggggcggggggggggggcaacctttttgctatcttttttgttttttttttttttgttgttttttttttggaaaattttttctccaaaaataacacccagaaaaataaagggggaaattatgggggataaatgggggggcgcataaagaaaaatttccatttggttaatggggggtttctaacgggttaattattcgggaaaactccttttaaagattgtttaaaaaaagggccaaccccccttgaaaaaaggaagcttttttggggcctttttcattggttcgttgatttaggaattgctgctttggggcggggtttcgggtctcccataaacggcctaaaaggggggggaaaaa

SEQ ID NO: 116685 - DNA, 275 bp, Zea mays
  Clone ID: MRT4577_37906C.1
catctctggaaatgtacaatttactattacactattgttacttagggctgacaggacaactggatcagtttcattataaagggcaaacttgtagataaatcatttgactccagctctttagaggatctaaagtgaccttgatggacagtggaatatctcacaacatggagttcctcgaataacaatttattgactttaaataattttgtctaatgctacatatacacaattatgaagcctatacactacagaaggagagcaccctccaccttgtg

SEQ ID NO: 116686 - DNA, 105 bp, Zea mays
  Clone ID: MRT4577_37907C.1
attattgtgtcttatgtggaaccccagatgtcttgtggatgaagtctgagcattgcataggccactcgaaagttcaacaatttaatactacccaaagggcctgga

SEQ ID NO: 116687 - DNA, 330 bp, Zea mays
  Clone ID: MRT4577_37908C.1
aaaaaaccaggggccccctggggaaaaaaagccccttaatcccatccctttccacctaaaaaaaaaaaaacctgggggggttttttttctcccccgggggccccttaaaggaacaaaaaacccaccgttccttaggggggcccccttgggcccaaaacggagggataaaaatttcccggggcccgaccccttgggaccgggaaccaacctggggagcccctggcggaaaaaaaagaggggggccaaaaaacaaaactttcgatctaaaaaggggccccaaggggaaacttggcgggccacaggtaaaaaccagtgccgggccctgggaaa

SEQ ID NO: 116688 - DNA, 691 bp, Zea mays
  Clone ID: MRT4577_37909C.1
gcttgattcggaattattaggccaggagcaaagcaaaagctttgatatgtactcctctctttcccatcttttcccgtctgtccccactcagcaccttgccaccttgtgtggtgtgtgactagaaagccacagctgccgagttggaactgcaaggaacacatgagactgagggttgcacacacacacctgttgcttagattaactttatttacaagttcatgctttacaagattaagcatcttcatctttcttttgacatttttgcagcgacagatccaaacattcatctcggaggccaagccacgagcaactggaagattcagtgtggcttgcatccttgaaggcaagtggcgccagttctatgaaaataacgtcatggtggtcggcgcccactgtgttccgatctgcattagcaattgcagtggcgaccttgcttggtgcacaaattgcaccggatcatcctgtggtcggcttgctatgattcggcaaggttgcggttcttgattcttaggaggcatccaagttattttcagaccggaagcagattagagcagtagtagatcagcaatggggagagaattctgtgtaggttttttgttggtggataggtgctagcgctagagaaggaacgatgtgttacaagttggcaatcggaattccatgaatgcattacataagcacattgcctttc

SEQ ID NO: 116689 - DNA, 372 bp, Zea mays
  Clone ID: MRT4577_3790C.1
gttgttgcgcgtacgcgttcacagtctgctttcgcaatggacaacgcgggagcccagcccaatcttaactgcggtggcgtcaataaaggacgcacacttttgctaaaacactaaaactcgagactatcacacatcaagcgcaacctggtgtcacaactcacaatcacgaggatgcgatccaggagcacgagggtatgcctccccaccagcatcaccttatattacctggacaagctcttgaggtccgtcgaacacttgttgacttcaacatccacacagagtgaaccctgcacttgctgctgcgccttaggcgaggggtacagatttttgtaaacaccttgactggtaagacaataatacttgaggcagagt

SEQ ID NO: 116690 - DNA, 460 bp, Zea mays
  Clone ID: MRT4577_37910C.1
gggaccccaaacataaaaaaaaatatttttaaaaaattggttaaaaaaaaccttggggttaagggtttgggggggggaaaaaaaaaaaaagggggccggaaaattttaggaagttggggtaaaaggggacctccgggcaaaattggtttaaaaaaaaaaggggaaaataaatttctgggggggagaaaccttgggaatagcctaataaccctggaaggggctttaaagtttaaaacaaaggtctttttggggggggcaagaaacctcaataaatttccggaaaaaaaattggggggcctggagtattttaacctgggggaaaaaaacgttttaaaggggaaaaatgctgggggaaaatttttaaattttttggcaaataacttggggaatgaactaaaaaaaaagttttttaagggaaaatggaaaagccgggttgaaataatttaaacaatttgggggg

SEQ ID NO: 116691 - DNA, 270 bp, Zea mays
  Clone ID: MRT4577_37911C.1
gtaggtttgaccagctcccagattttcatatggagacgcagtgaaccaagaagcagtatggaatctggtggagcctcattcaatcatgggttatgcatgaggtgtggattctgtttttattattagttaaggtagaagagctgaaccatacaaacaacacacttgcaagcctataggagatcaataggaaggcagccggaggttagaccattctagcatacgaaaagaagttccagtattacaagaatggtatgcaactaagatatgcac

SEQ ID NO: 116692 - DNA, 221 bp, Zea mays
  Clone ID: MRT4577_37912C.1
gagactatttgcatgcttctgtataaatgataattagaaggaaatttcatggattaaaccatgggtttaatgcagtaaggaaacttacaatatccctttatatataacatgcatcttgttttggatttgtgtcattttttaatatagctgattgacttcacaggaagcagcttatttgaattctaatacataggtgtatatttggtattagttattttgag

SEQ ID NO: 116693 - DNA, 275 bp, Zea mays
  Clone ID: MRT4577_37913C.1
ccgggccgacccacacgtacgattttctttgaaaacattttctctcttacttattgcaactgccttgctttcctagtggcggtcattctaaactccactgcaagtctcctctatctatcaacaattttattatttttacctactaattaacccgaacatcaacccaccaccttttatgcattcctatataaaataattcgactacatcccattctctcaccatctactacacttccaaaccaccatagctaagattgtcactgtcacctcactcc

SEQ ID NO: 116694 - DNA, 561 bp, Zea mays
  Clone ID: MRT4577_37914C.1
gccgtgtatgttaaagtctgcatagcatatggagggagctggtatcagggggacagggggtgagtttttttgctttgcgtcggcggcagcagggcaaaggcaaaggcaggatcttgttccattcaccggtcgccacgctcgtgctcacctcaaccagcactgcagataactttttactactaggccgggatcacgatgatctaccgctgcgctgcgcgatcggtactagtatttgccatcttggcaatgcatgcgacgacgttttaggcgctgacgtggagagtgtatgtatatcactgacctatcgtggcggagcggaaggtggtggagttgtcgaccacgttccggctggccttgatcaccgtcctccaatgccgtcgccgacgaacatcaggttcgtcttctcgctcccgacctccacgttctcgaagtagccgcccgccttgatgtagatcacgaaccgcgtctcgctttgttgggggccgcgcacgctccccacgtgtgaattgcgctccgtcttgccacaccagtccgccccgggacacctgctgctgctgcagc

SEQ ID NO: 116695 - DNA, 444 bp, Zea mays
  Clone ID: MRT4577_37915C.1
gggagatgattccagagcgtcgtaacttgatccgacagccaggagagctcatttgccaacgcattatagtatgatttttggtagcgttggatacgaaggatgcactgcggggtgcacaagattgacccctgttacctcttgcgcacccgtaagcttcctgagcatcatctagcgctatgtgcgctctgtatttatcagggacaactcagaagagctgatcccatcgtgactgacctctgtcaagggcatagacgactgtgaggacgctacccttaacattttccgtgagaccgttcatccgaacaggatactcacggctattcgaaataaccaggcgaaaaagtgcatttgagctcgccctttgagattgctgacaacaatggggactacaacaagttctatgaggccttcccgaagaacctgatgcttggtattcacgaggat

SEQ ID NO: 116696 - DNA, 378 bp, Zea mays
  unsure (1)..(378): unsure at all n locations
  Clone ID: MRT4577_37916C.1
cccttcnattttttttnannnannnnnnnntggttgttttttttaaggantcggtcgtttatttcagcaggacacattccattcattacccgctggcaaaacatgcatatggagaaaagataggacaggactacacataccaactaggcactactatatactagggggggcgggatatatatatatcacccactccataacaaagggcaacttaaacggggggggctttatcctcaaacccccgccgaacaaggacaacaatccccaaaccccagcatttatttatatataggggggactagctataatagagcatgcctgcgttttagataaccacaagggccagcaaacatggcctgacaaaaacaccgggccttt

SEQ ID NO: 116697 - DNA, 718 bp, Zea mays
  Clone ID: MRT4577_37917C.1
ccggccggggggaccgggagcgaggacgagcgtcctgcgtcgacgggatcggcgtgccggggagcgctgaaatctgcgcttccgtctccggacggccgatgccaggccttgctcgggagaggtagcaaacgaaacatggagctgaggcggctgctgctgcttgcgctcatctgcctgcgtgctccccgtttggcttcggctcagcagccggatgaggcgacggtcatagttaagggctccactaggattgcggaaacggatgacaactacgtctgtgctacaattgattggtggccgccggaggagtgcaactacaatcagtgcccatggggccaggcgtcaattcttaatctggatctggatcacccgtttctggctcaggccattcaagagcaattgtcacatttggtgtgaatgcactctacgggaggtataatgttcgacgttccatctgggcaggcaaatggaattccactaatgcatatgattttgtaaaatacacaatctcaaagggatacccagttggctcttgggaatttggcaatgagctgagtgggcatggaatcggagcaaaagttgatgctaaactttatggaaaagatgtaattgaatttaaatccatccttcggcaattgcataaggcaccactgtcccagccactcctgttagccccgggagggttctttgatcaacagtggtattctcagctacttgagac

SEQ ID NO: 116698 - DNA, 2159 bp, Zea mays
  Clone ID: MRT4577_37918C.1
gccggccgggttgggatacagtctctcgtggtcggccgcgtcgcggccgcatccgcgattccgcgaggcaaagcaacgagccgctttcggtgttctactgccgcgtagcagcggcagcggcaccgacggcatcccaaaaggcagcgacgtctgggtcggacttggaggccccggggatcggtggccaggctgagctcctcccagagtcccagtacgcctccggagtccggatccgcggagccaggctgagctgctcccgtggtctactctccagtacgcggctcggcagggaccgggagcgaggacgagcgtcctgcgtcgacgggatcggcgtgccaggggagcgctgaaatctgcgcttccgtctccggacggccgatgccaggccttgctcgggagaggtagcaaacgaaacatggagctgaggcggctgctgctgcttgcgctcatctgcctgcgtgctccccgtttggcttcggctcagcagccggatgaggcgacggtcatagttaagggctccactaggattgcggaaacggatgacaactacgtctgtgctacaattgattggtggccgccggagaagtgcaactacaatcagtgcccatggggccaggcgtcaattcttaatctggatctggatcacccgtttctggctcaggccattcaagcatttgaccatttgaggattaggctgggaggctccttgcaagaccgagttgtttatgatgtgggaacagaaagtccatgctccccatttacaaatgtatccaatgccttgtttggtttctcagttggttgccttggtatggataggtgggacaaactgaatgacctattcgagagaacaggagcaattgtcacatttggtgtgaatgcactctacgggaggtataatgttcgacgttccatctgggcaggcaaatggaattccactaatgcatatgattttgtaaaatacacaatctcaaagggatacccagttggctcttgggaatttggcaatgagctgagtgggcatggaatcggagcaaaagttgatgctaaactttatggaaaagatgtaattgaatttaaatccatccttcggcaattgtataaggcaccactgtcccagccactcctgttagccccgggagggttctttgatcaacagtggtattctcagctacttgagacttcaggtcatggtgttgttaatgccttatctcaccatgtatataatcttggtggagggaatgatgttcatcttataaggaagatcttagacccaaagtacttggatcgtgctgaagatacttacagagacatgcaacttaccatccaaaggcatggaacatgggcttctgcttgggtcagtgaaagtggcggtgtattcaacaatggtggtcaactggtgtcaaatacattcatcaacagtatctggtatctagatcagcttgggatggcatctaagtacaacacaaaagtgttctgcagacagactctcatcggtggcaactatggactgctcgacacgcaaacttttctgccaaatcctgattactacagcgctctactatggcatcggcttatgggcaatggagttctttcagttgatataaacgcaccgcgtcaaatacgcgcttatgctcattgtaggaaacaacagcaaggcatcacgattctgttgatcaacctgagcaacactactggatacaacgtcactctccagaacgacatcaacgtcagcttgggcaaaagacctgaccttgagaagcgcagttctttcacgcacaggctcaggaaagcagtctcatggctggggaggaaaccagcaagcaacaccaggaggcgggaggagtaccatctgaccgccaaggacggcgatctccagagcaaaacgatgctgctcaacggggccccgttggaacttggagacgctggcagcattccagctatggatccggtgctcgtcgccgttgatttgccggtgcagctagcaccaacatccatcgccttcgtagtcctacccaagtttgaggccaaggcttgttcttgacacatgagctcttgaaatcagtttttttttgtgtgtgccttgaaatgttccatagacctatttcgtgaaagaaatcatacaacgcggcacaaaaacggcaaagcgttgttgtgtgagc

SEQ ID NO: 116699 - DNA, 485 bp, Zea mays
  Clone ID: MRT4577_37919C.1
ggcagaaagatgtgccctattcttaaatagcggatgggttctggacaatgtgaaccatctatagtgtattttcttgcacaaaggcaccagttgttactctgtgctggatacaatggttgcaagaatgcgccatcatgagatcacatggacctgtaactgatcaaaacatcttaccagtgccatctatccatggaacacaatctgtaaatagccattatgagccagctccctgccacagatgacaactggacagccttatcatacaactccagatgaccacctgagtggataaacagaacttttctacctttccatgtggatggattgcacagcatgtcttttagcaaacgataaaccgccttgccactgtgaactgtatcaaggacaatgcctgtttatgcacttatgtctttgacaaacttaaggtgctgcgttgtgtacatggcataccctaaccccttaggatttgccatgctaactatatt

SEQ ID NO: 116700 - DNA, 579 bp, Zea mays
  Clone ID: MRT4577_3791C.1
gctttcctagacgagaccggcgattctcccaaacctcccttccgcttccaccatcaagaagccgcccgctcgtgtcctccatgctcctttcgatcttactatcgccgagctgtagactgtaccccggcttggtcgatgcgctactgtagtcacactcctcgatcgacatccctaacacatcgcgttcactccgcttgtccttgctctgctctgctaaataaccgacaataaagtagcatcatgtcgcgcggaggaggactcctatgagcctgctcgcacttgatggaaatcctcgacctacggaccagtctgtacacaattctatgccctcagcacagcaacaggaagatacgatctagaagaaccttagaaggactaatggccaaaaagcccccactattctcaaagagatcatagaacagggcctactttgattctgctgactgccctctagagatagaaggcgttagcaaacccaaaggaccgcctgagagcacttataccctaccttcaggctgcacgccaactacagcatcaccgtgcgaggcgccctatttacacttcggcagaaaaccagga

SEQ ID NO: 116701 - DNA, 384 bp, Zea mays
  Clone ID: MRT4577_37920C.1
gccggtggcatgcaaagccaatggaggtggcggtgcagatacagatgaacaagaagctgaaactgtaaacaccgatggagtggcagttacacgcagcggggccacaagaagcgtcatcttcgtgtgcaagcaaagccaagggagtcgccggcacaacggaggatgcacaagaagcggtaacagtaaacaccgtgggagttgcaggtgttggatcatattgacattggggacaagcacaagatactgttttgcgcatccataactagatgattaccaaacgtgattaaggcaacaatgtgattggatacaaatcctcaattatcacctaattgtactggaatggaacactaagcatggagaatactaattctttagtacatgttt

SEQ ID NO: 116702 - DNA, 463 bp, Zea mays
  Clone ID: MRT4577_37921C.1
gggggggggggggaacccctgatttccccaacccttccttgatgggggtttcccgatctgtcccgtatacggggaatacaccctttgggttgggttaaaaaaaactgaaaaaaataaggggctgggctaaccattgccctaaaccaccaaactaaagggggggagcttggaactgcccaaatttataggtttttaacaacttgttgctacccttggcacgggaaatttttgtttttaaacttgcgctgggctttcaaatcacctcccacgagggggggggggtttttgctccccttttaaaaagcaagttttaacaagctttcaacacccgtttgagcggttaagtctgcggagcccccaacccggggggctaaaaaaaacctttgccttttttttttgggccacaaaattatccgtttgggagcgatttcacataccttttattttgacattacatcccaaa

SEQ ID NO: 116703 - DNA, 671 bp, Zea mays
  Clone ID: MRT4577_37922C.1
cccaggtgtacgacccgagggcggaccggtgggaggcgatgccggcggggatgcgggaagggtggacggggctgagcgtcgtcgtcgcgggacgcctgttcgtcgtctcggagtacgagaggatgaaggtcaaggtgtacgacccggagacggactcgtgggacgcggtcggtggcgcccccatgcccgagcgcatcatgaagcccttctcggtgagctgcgtcgacagtaggatcgtcgtcgtcgggcgaggcctccacgtcgcgattgggcatgtgcgggaggagcccgctggcggcggtcctggtagcaggggagcgccaggctactccgtttgctggcaggacgtggacgctcctaaggagttcagcgacctgacaccttcgagcagtcagattttgcatgcttagctgcttgttgagccagccagcccctgccccctgattagacgcgcaatcgagtaggatcttttcgagtctctattataaggagggagctggagatgtaaaaaaataaaccgaggcttttcaaatcggggagagatgaattgaggctcttctgcctggttgtaagtaaatttgcttgtccagtttctccaacaaatctgttgctgtgtttcgctctttggtgtttcattggtcagaaaaaaaagaactgttgctgtcttgctg

SEQ ID NO: 116704 - DNA, 228 bp, Zea mays
  Clone ID: MRT4577_37923C.1
ggggagttttagccgacgtgcccgcgcatgccccgtcaaagactaggtatagcgacaccaaaatctcaattcgctggccgaaggttaaaaacgttgggactgggcaaaccctcgcgaaacccaactcactcgcttggcagcacaggaccctaccgccagatggcggagaacccataaggcccgtaccgaccgacctacccaaaagttgctcagccagaatggacaacg

SEQ ID NO: 116705 - DNA, 171 bp, Zea mays
  Clone ID: MRT4577_37924C.1
tctcttcagtcctatcctcctgtccgatggctgcaagttcctccccttccagccggagccttctcgccacccggccccttttcttgccgttgaggacgaggaggtcgctttcacccacgttcatcccgacttgtctcatctgtcttcgatctccttctgcgtcctcctccc

SEQ ID NO: 116706 - DNA, 891 bp, Zea mays
  unsure (1)..(891): unsure at all n locations
  Clone ID: MRT4577_37925C.1
ctcgaggccggccgggaaaaaattggggccgccgcccgcacgcagaagcaaagcaaaacacagagaggagagggctcatcgattcattcaactgaacagcaagcgcacctaccctacccgccgccgccgaaggcgaaggcctagctcccggtccggcgcgatggctgccgcggcccgccgcggccccggggcgctcctcctcgtggcgctcctcctgctggcgctggtcgtctccgggcactgcctggacgcgcaccaccgcgggctgaagcgccgccggcggaagcacgagattcactctccgatcaagacggtggtggtcgtggtgatggagaaccgcagcttcgaccacatcctcggctggctccgccgcacccgccccgacatcgacggcctcacgggccgcgagtccaaccgcctcaacgcctccgacccctcctccccggagatcttcgtcacggacgaggccggctacgtcgactccgaccccggccacggtttcgaggacatccgggagcagatcttcggctccgccgacacctccgcggtgccgccgcccatgtccggcttcgcccagaacgcgcgcggcatgggcctcggcatgccgcagaacgtcatgagcgggttcaagcccgacgccgtccccgtctacgcctccctcgccgacgagttcgccgtcttcgaccgctggttcgcctccgtgcccacctccacgcagcccaaccgcctgttcgtccactcggcgacctcccacggcctcaccttcaacgcccgcaaggacctcatccatggcttcccgcagaagactatctttgacagtctcgaggagaacggcctgtcgtttggcatatactaccagaacatcccggncacgctcttctaccagagcct

SEQ ID NO: 116707 - DNA, 3055 bp, Zea mays
  Clone ID: MRT4577_37926C.1
cacctctctccacaaattgcaggggggggggtgagaatgaccaataatatgcaatggtgggagagaagagaaggtgggtgagtgaatcaaaggccggaccagcacgacggcgattaacttaatcaatcaatgcccacccgcaagcatgcattaatttcttctctagaactagaactagaaccagaaccagtactagcagacacaagtgtctaatcctgcgactaactcaacatcatcaattgatagtaatcatctacagacactgctacaatgtaaggtaaggtacagtacagtgctactacgtacgagtgggtttcctctaccctctccatcaccactacagcagaagccgccgcaaatggaggccgcagagcaatgtcgccaccacgaaccgagccgaagccaccagcggggcgcccgcggcggacgcgtcgccggtggccatgttggcgagccaagagacgccgccttcgccgctgctggctccgagtagcacgctgccttgttccccgccctcgatgcccaggccaccaccaccacccatcggcatcccgctgtccggggtggcgtccgtgaacgtagtgcccggcatcatggtccccgtcggcaacgctggggtcgcgcccggcattggcatcgtccccggcaccgtcgtgggcgtcgcccctggcactgtcgtcgttgtcccccccggcaccgtcgtcggcgtcgcgctcggcatggtcgtcgacttctggcttggggtggcgccggggcagaatgtcacggtgtagtccgggccgccgccgcaggtgaatgtggaggtgggatcgtcgaatgcgtagctgtaagagcgcgggcacgcggtcttgaacacctgcgagtaggccgtcggccggcacgccgccggggacgcgaaggcgccgctgcagcagtactcgggccgcgcgaacgcgtcgcacgcgctccggcacgcgccgccgcccccggctcggagctcggcggggcacatcgcgttcaggtccgccgcgcacccggccgcggcgcacgaggctggcccggtggagcctccgccgccggaggtctccaccagcacggggaggttgtagccgtccacgaggctgacgtcgtagaagtccagcccgccactgccgtcgagcgtgaactcggccagcgtggccggcggcgcagcgcccgcgcccgcgcactcggctgagccggagccgcagtcgcccgtggcacagacgagccgccccgtgccgccatcctgggagcagcccgtgcgcgcccacattcggcctgaccagcccgccggcgccggcaccgcgcgcgccgcgcccggcgggagctcgaaccccgtgggctccagccttgggctcccggcgttggacaggacgcccggccacaccgtgtccgtgcaccggttcacgaacgtgaacgtcgccgcctcccccactcggcacaagacgacgaacacgagcacaagaacggccatggatcttggcaactccatttctgcttcttgagactatgcagtggccgagactgacggggtgtagtgtgggaacagctgcactgcgactgcaagcacggggaagaagcgtgtgcctgccgtgtcgctatgccagtgcagttactactgcgtgtagcgatggcgtggcagtgtgaccatccggttgacgaggggctgagagagacaccggcgcacccgccaccaaccttgaatggagggatggggcatccactgagcggggacgagaagccaggcgtcgccggagccgccgcacacgtatctaatcctgggaccggggctaacgcaacatgatcaatggacagtaaaatcatctacagacacggcaatacaaaggcgccaccgtgcgaatcgccaacagattcctctgctccctccatcaccactactacagcaaatggaggccgcagagcaacgttgccagtggcgccaccaataaccgagccgaagccaccagcgggacggccgcgtcgccggtggccatgttggcgagccaagagacgctgccttcgctgctgctgccgcccaggagcacgctgccttggcccccgccctcgatgcccaggccacccatcggcatcatcgcgctgtccggggtggcgtccgtgaacgtcgcgcccggtgggatcatggtccccgtcggcatagcgggggtcgcaaccggcatcggtgtttcctcgaggctgtcaaagatcgtcgtcatgctgcaagccatggatgaggtccttgccgggcgttaaaggtgaggccgtgggaggtcgccgagtggacgaacaggcggttgggctgcgtggaggtgggcacggaggcgaaccagcggtcgaacacggcgaagtcgtcggcgagggaggcgtagatggggacggcgtcgggcttgaagccgctcatgacgttctgcggcatgccgaggcccatgccgcgcgcgttctgggcgaatccggacatggggggcggcaccgcggaggtgtcggcggagccgaagatctgctcccggatgtcctcgaagccgtggccggggtcggagtctacgtagccggcctcgtcggtgacgaagatctccggggatgcggggtcggaggcgttgaggcggttcgactcgcggcccgtgaggccgtcgatgtcggggcgggtgcggcggagccagccgaggatgtggtcgaagctgcggttctccatcaccaccaccaccaccgtcttgaccggggaatggatctcgtgcttccgccgccggcgcttcagcccgcggtggtgcgcgtccaggcagtgcccggagacgaccagcgccagcaggaggagcgccgcgaggaggcgcgccccggggccgcggcgggccacggcagccatcgcgacggaccgggaactaggtcttcgccttcgacggcgggcccgggcgcggcgcgcgcggtgccggcgccggcgggctggtcaggacgcccggccacaccgtgtccgtgcaccggttcacgaacgtgaacgtcgccgcctcccccactcggcacaagacgacgaacacgagcacaagaacggccatgatctggcaactcc

SEQ ID NO: 116708 - DNA, 391 bp, Zea mays
  Clone ID: MRT4577_37927C.1
gttttgtgtcgccagagggggtgtgggaggcgcggccctgtgtaatgctattggcgagtctgagcggagacgcacgacgacgagctcgtctcctggggccaagccggtgcgcaccatacgggtcaaggccaggcactgccaggtcacgcacgagatctacgtgaggtacgatgcctctttcggcgagctgatgaagatgatgtcctacaagacggtgctgcaccaggtccaccagatggtgctgtccaaggacaaggtacgcgactccaaggggaacctggacgttgcctgcatcatggaccggtccaaggtggagtgcgtggaggacccatgagaccgcgcgctcctgctcatcgaggagggtagcatctgccaccttcagaaggccgtc

SEQ ID NO: 116709 - DNA, 280 bp, Zea mays
  Clone ID: MRT4577_37928C.1
gcgcgccaggcaagtcttccggccggccgcgaatagcggagtcatcgcagcacacgatggggaagctcgccttcggaagcgtccgcgactccttcagcgccacctccatcaatgcctagctagccgagttcatcgccaggctcctcgtgatcgtcgcctgggtcggttccgcgatcggctaacggcagactggcaatgggggtacactggactacgagggcctggcggggatcgggatagcgcatgcgctggggctgttcgtgggcgtgtgcgtcccggg

SEQ ID NO: 116710 - DNA, 274 bp, Zea mays
  Clone ID: MRT4577_37929C.1
gcgagcagcggcggcggcgcggagagacgcagcggaggtgttcctggtttcggaccccagcggccggatggtgaagtcctccctgcagcggatcctcaatagccactgcttcgccagagagaaggaagggggtaaacccagcgccaccatccacgccagccgcaccatgccgctcctaagcctgcacagccgcggcggcagcggcagtgagagttcccaggggctccctccactgctgtagtaacccgggtccggggcctcggtggtgctcctg

SEQ ID NO: 116711 - DNA, 374 bp, Zea mays
  Clone ID: MRT4577_3792C.1
gaaaaaaaaaccctcgtttggtcgccggcacacaagacggtagtaggcggcgatcgatcggtggacgacggacggaactcagctaagcaatctcgcctcgtcttctccggcggcgacacacacgcgccccttctacgtcgagaaatcagttccccatcctccatcatccattccgattctccatctatcgctggtgcggcaggatcgcagtagctagcacgcgtccgtcgtctcgggtccgtccggcggcgcaatggccgcctgtgccggcgtaggacctgttgtggggatggtggtgttccagattatctttgcatttgtcaatatcttctataagctagctgtgtcggacggcatggatctgagggtactca

SEQ ID NO: 116712 - DNA, 242 bp, Zea mays
  Clone ID: MRT4577_37930C.1
ggaatggccggcccaacccacccgtccaccacataatccctcactcctctttagttcttacaccctatcacgtgcacaggagagtggcaaagatttaaccatcatggttaaccccatcaacatggccatgttcaccgtcgtgttcccattctagaaacccatgttcgcctagccttaaaccgaccatctttttcacaacgtgttcatctcattcggcgacgtcctccagtgtaacatcatcc

SEQ ID NO: 116713 - DNA, 1195 bp, Zea mays
  Clone ID: MRT4577_37931C.1
catggagaaaggcatccttaacatccatctggtgaattttccaagaacgtgtagcggctacgacaatcatagtacgaactgtagtcatttgggcaacaggagcaaaagtctcgtcaaaatctcgaccctgactttgctgaaaacctctagcaacaagacaagccttgtatcgctcaacagaaccatctgatttggtcttgacggtgcggtcaagtgcagcaaactcctcaatcatagcaagttgccattcatgaatactagcagcttcctgataagtagttggttcaacaattacggcaacagaacgtggataatgataacgatctagaggtgctattgtagtacgatcacgtaaattatatccctcacccgagcatttgttggctaatttagttgatggttgtctgttgattagataaataggagtagacacagcttcaccataagtggccaagacgatgatgccattgagcaaaagatgaagtggacacatcggatgaaacactggcagtgtagacaggaggtagacgtaaagagtccagagtatagagtcaggaagatctctatggcgatggccagtcccaatcacagtcccgcttcgacgatccatcaaccatttgaacagaagacccattagtgactgttgcacatgtatccaactgagattgattgaacccttggatggcccatgcccttgattagtacggtgagaacgaaactccgctaacttctctggatacttaagaaaacattgatcagaccgatgtgtagtcttgttgcaatgcttgcaaggctcaaagtagccaccttttccaccatacttgtgagaagctgctaacacattatggaacacaggtgtatgaggtacaaacaaagatgagaggcgagtctcctcaacaagcaaatcagataaagcctctgtcatggtcagacttgtagatccatgaagcaatctggtacgaatagcctcaaaatctgtcttgagacccataacaaatctgtatgtgaagaatttttcaatgaacttatgtgcagtgcactcatcagcagtgcatgaaggaaccatagacattaaaggacccatcaggcgatcaaaagtagcactgaaggttgtttcaatcaaacttgtagggaaggaaaaacccagcagtatccaaactgaccagaggaccagcttgatgcagacaggagccat

SEQ ID NO: 116714 - DNA, 663 bp, Zea mays
  Clone ID: MRT4577_37932C.1
gagtaagaagcactagataaatatggaagttgtatttgtttaccaagcttacaacccttacaatgaaaatttgactcaatgttggtatgacctaaacatcctttatgaactagagtagataacctagacccacataagtggccaagacgatgatgccattgagcaaaagatgaagtggacacatcggatgaaacactggcagtgtagacaggaggtagacgtaaagagtccagagtatagagtcaggaagatctctatggcgatggccagtcccaatcacagtcccgcttcgacgatccatcaaccatttgaacagaagacccattagtgactgttgcacatgtatccaactgagactgatctaaagttacatgaaatgaggcaccagaatcaacaacccaacccatgtggacggagaagcactgccagagatagcagcaactcacactgaacccttggatggcccatgcccttgattagtacggtgagaacgaaactccgctaacttctctggatacttaagaaaacattgatcagaccgatgtgtagtcttgttgcaatgcttgcaaggctcaaagtagccaccttttccaccatacttgtgagaagttgctaacactttatagaacacatgagtatgaggtacaaacatatatgatagga

SEQ ID NO: 116715 - DNA, 326 bp, Zea mays
  Clone ID: MRT4577_37933C.1
ccacctagacccacgcatccgcgttacctacccggtatccccactccctttctagtttctaccaatctcatcaagagtggatttatactgatgccctccagcccacccatccatcctcctctacagaaatcatgaaattaacaaccatcaaaactacactgcgacctatctgacaccttgactttacctctcttccactatcgctacacacagcccaagtacattgatagcgttagactcgcctgatatgaagtctctcatactgaatagctacttaaacattccacaccctatcatggatataacaaagaaaatacatacatgta

SEQ ID NO: 116716 - DNA, 523 bp, Zea mays
  unsure (1)..(523): unsure at all n locations
  Clone ID: MRT4577_37934C.1
agtctagattacaatttacaacacagtacaactagattttacaacaggtctgacagagacacgagatcagcaagggcacgcagctactcccagctgctagctagctagctaggagcagtaggctgatccatccacgttatttgtactcaaacgcgtgtgtcacgagagggcacacgcacgaaccacgaagctgctaagcacgttgcatacaacaatgcatgattattctactcccactctcgtgggtcacgagaggacacaccacgaacgaagctagctaggtagcgcacatgtactccctgctgcgcgctagaaaccagtccccgctggctatggctagcatggcatagcatagctagctagaaacggtggcccctcgcgagcctccgcgccggcgaccactccccaccatcgtcctcgccgtcgccgcaccttggccccgggtcgccgcgttgcgtgtcgtggctgcggttgcggcggttgccgccctcctctccctgctcgcngtgctggctggtgctgg

SEQ ID NO: 116717 - DNA, 394 bp, Zea mays
  Clone ID: MRT4577_37935C.1
tttccttctagcctagtgggggggggggcgggagcaacctataaccgcacatgtctccctcctaacggccttgcgcatgatccagcactctggacctcgaaagcgacctctcctacatgcgtgccattcatccagggcgatgagacggtaccctacaggtcagaagagacctatctttacctcagatgccctagcgcccgctatttgcaaggaacacccctttcttcctcaccctggaaggacggttccttccttagctgtaacataaagggctccccttagggttccgtatataagatgctcggatgctatgctaggatatactctggcccggggaactgtcacaataaggggcagcttccaggctggcggtagaactctcttactacttgga

SEQ ID NO: 116718 - DNA, 1437 bp, Zea mays
  Clone ID: MRT4577_37936C.1
ccgggaagggccatgtgcggcgaagactcgagggccaattcggcacgtcggcagggcactgcactgcacgcatgcactgacctgacgacgacgcgcgccacagtccacagctcctcactcagacatggcgatgggcgccgcttccatcctactgatgatggtttcgctggagaccctgcttctcgccgccggcgccggcgccggcgggaccatccgtctgtccagcgatgtcggaggcgttgctgcagaccttgtcacggcgatggcgagggcgagggcaagggcaaagcatcagcttcgcgacgaggagaggccgtggggggaatgctgcgacttggccgtatgcgtcaagacgtacccgctaacttgctcgtgcttcgatcgggttgagcgctgctccgacgcctgtaaggagtgcgtggaaacggaggactcgcgccacgtctgcgtcgacaggtaccgtggcgaccccgggcccaggtgccacgacgaggacgggaggagcggcggacccgctgacgacgacgctggtgggcaagcgacgccgacggcagtgatggcagatgacaagaaagcaggcggcggcgacgacgacaagaagaagaggccgtggaaatgctgcgacgtgcccatctgcaccaggtcctggcctccggtgtgccgctgcgcggacacggtggagcggtgcgccagcacctgccagcactgcgagcaggtggaggagggcggcccccgccgctaccgctgcctcgacacgcaccgcggcgacccggggccaaggtgcggcgacggcgaggacgatggtggggagtggtcgccgacgccgaggctcgcgaggggccaccgtttctagctagctatgctatgctagccatagccagcggggactggtttctagcgcgcagcagggagctacgtacgtgtcttttattttgtgacgctgatccatcggtcagcctgtgctgattgacgcgaccgctacctagctagcttcgttcgtggtgtgtcctctcgtgacccacgagagtggagtagaataatcatgcattgttgtatgcaacgtgcttagcagcttcgtggttcgtgcgtgtgccctctcgtgacacacgcgttgagtaaaaataacgtggatggatcagcctactgctcctagccaggctgctagctagctagcagctgggagtagctgcgtgcccttgctgatctcgtgtctctgtcagacctgttgtaaaatctagttgtactgtgttataaattgtaatctagttgtactgtgtgctatcctgatcggatcaggctcctctgaataaataataaagtgggtatggcactaaaaaaaaaaaaaaaaaaaaaaaaaaaaaaaaaaaagacgaggggggaaagctaggaatcgaaactgttatgccaccggggaacgtaactggtcgctttctatca

SEQ ID NO: 116719 - DNA, 611 bp, Zea mays
  Clone ID: MRT4577_37937C.1
gggtaacgggcccctctctcgagttttttttttttttttttttttttttttttttggaggaaaatctgtcggccaccatcaccatttacagattagattagcaccaaaatttcgtttccctaattacaaaaccagccactaaaccaggacgacgggcccggccggcaacgccgccggcgggcgccggctacctgaaaaactacccctaccggagggatcgagagcgctacgacccgacccttgctccctagccggagcaggcgacggcgctgcaggcgtcgcggcggcggcggcggcggccgaggcgggcgaggaacggcagcgcgcggttgctcctgccgcgcccagcgctgggcggcgcggaatcggcggcggcggcgggcgccgccagctcctggatggtctccagcttgggcgcccagcggggggacttgccgtacccgaccagctcctcgtagtccttggcgaggcgttcgtccccgcggagcagcacggcgggctgctgctgctgcggcggcgcggcgaccttggcggcgtccggcaggaggaagtcttcggaaaacttggtctgcggggggcccggcgccgggcgggggggctggaacgggggg

SEQ ID NO: 116720 - DNA, 1358 bp, Zea mays
  Clone ID: MRT4577_37938C.1
aagggcctaggcaaggcactggcacgcttgcatgcacacagtccacactcagacatggcgatgggcgccgcttccatcctactgatgatggtttcgctggaggccctgcttctcgccgccgccgccggcggcgggaccatccgtctgcccagcgatgtcggaggcgttgctgcagaccttgtcacggcgatggcgagggcgagggcaagggcaaagcatcagttacgcgacgaggaggagaggccgtgggggaaatgctgcgacttggccgtatgcgtcaagacgtacccgctaacttgctcgtgcttcgatcgggttgagcgctgctccgacgcctgtaaggagtgtgtggaaacggaggactcgcgccacgtctgcgtcgacaggtaccgtggtgaccccgggcccaggtgccacgacgaggacgggaggagcggcggacccgctgacgacgacgctggtgggcaagcgacgccgacggcagatgacaagaaagcaggcggcggcgacgacgacaagaagaagaggccgtggaaatgctgcgacgtgcccatctgcaccaggtcctggcctccggtgtgccgctgcgcggacacggtggagcggtgcgccagcacctgccagcactgcgagcaggtggaggagggcggcccccgccgctaccgctgcctcgacacgcaccgcggcgacccggggccaaggtgcggcgacggcgaggacgatggtggggagtggtcgccggcgcggaggctcgcgaggggccaccgtttctagctagctatgctatgccatgctagccatagccagcggggactggtttctagcgcgcagcagggagtacgtacgtgtcttttttttttgtgacgctgatccatcggtcagcctgtgctgattgacgcgaccttcatgcagatgtgcgctacctagctagcttcgttcgtggtgtgtcctctcgtgacccacgagagtgggagtagaataatcatgcattgttgtatgcaacgtgcttagcagcttcgtggttcgtgcgtgtgccctctcgtgacacacgcgtttgagtacaaataacgtggatggatcagcctactgctcctagctagctagctagcagctgggagtagctgcgtgcccttgctgatctcgtgtctctgtcagacctgttgtaaaatctagttgtactgtgttgtaaattgtaatctagactatctagttgtactgtgtgctatcctgatcggatcaggctcctctgaataaataataaaaggctcctctgaataaataataaagtgggttaaaaaaaaaaaaaaaaaaaaaaacaaaaaaaaaaaaaaaccaccaaaaaaagcctaaataaataa

SEQ ID NO: 116721 - DNA, 203 bp, Zea mays
  Clone ID: MRT4577_37939C.1
aattcggcgcgaggagaaccttaccttcttacctttgtcgaggggcccagggacttgctcgaagaccgcccaaaccctagatgtcgatagcctcttcctcggccggcagccattgacagtgctaccaccagagaaagcgcagctcgaagaggcagtcacaggcgccgcatgaaacatttacggggatgaacattgctgagagt

SEQ ID NO: 116722 - DNA, 599 bp, Zea mays
  Clone ID: MRT4577_3793C.1
gcaaaaacatattctgaatgttaaactggatttagaatttttagctattttgatatttttggattggaacggtttttgaattatttgctccattggtaatcatcctgagaactctctgttgatttagcgtcaggactgttagctattgcatttgtttgttttcgttagtcatcgtcttgtacaactgtttgttccgttgccttcaatgtatatatggtcaatgacaactctaatattgattccattgtgatgctgcaatttacttgtaatgcagagggacacctctggtttaaccactgagaacagggagctgaaactccggttgcaggccatggaagaacaagctaaacttcgagatggtatgtccttgtctttctttggaaggtctaaagccactgtcatataaggcccagaaagagactccacttttcctgtttcaagaacattacgaggcaaatggtatcaaccgatgagttatcccctgaccaatttattctcctaaaaaacgttatcttctgagcagatatgcagatattagttgaacaagcgtatcaagcacccttgttaataaaaccctggttgtgttttgatgcagctct

SEQ ID NO: 116723 - DNA, 590 bp, Zea mays
  Clone ID: MRT4577_37940C.1
tgggaccctcgaggccggccgggccgggatcttctcatgttcccccgccgtgcgtgcgtgccgccgcggcgacgaccgcgtgatcgacgccgacctacgacaggagccaagccgttcctcatccccatcactaggtcttcgacgaagctttcaacggcaacaaaaacatctaattctcccatgcccgcttcctcgacttgctgtatcgactctcccaagaacaaccctcgacctcccccctactccaacatagcatggaagcacacgacccattacgtcctgatcgattcttctgccccgatcctcagcggtaagcgaagatggactgcgagacctgcctgctgaaagagctggagctggaactgacgaagatcagggatgcgatgcgctggattttgcacaccatatttttccatacaaccctgaggctgtctcgacccgaagatggtgactgtgatttcctcaacattacttatgtacacaagcgcaccaccggtgctagatatcggagctgacgaggagatataccactgcacctgcatgagtgtagatcacctcataccggagaagacagatctgcctctcctttt

SEQ ID NO: 116724 - DNA, 532 bp, Zea mays
  Clone ID: MRT4577_37941C.1
attatctactacacgagcgtcacaagaacccgatcgacaccatgagggtgctgctcgttgccctcgctctcctggatctcggtgcgagcgccacctccacgcatacaagcgggggctgcggctgccagctcaccgtcgccggttcatataccgccgccggtgcatatgccacctccggatgacctgccacctacggagcatatcccaccggcggcacaactgccgccgacggtccacctgacaccggcgagccatgagccgccgacggctaatttgccgacggcaccatgccactacactactcaaccgtcccggactaagcctaatacacagacacacccatgcccgggccaacagacgtattcaagcccgtgccagctgcatggaacctgacgtgtatgaacaaccccgattctgatccaatgcgtagaggtcctgaagccatagtgcagactgacggggacaacagtatatgtatcatctaagcgccatggcgttgcaggcatagtgtcttcagattgctaagagcagt

SEQ ID NO: 116725 - DNA, 261 bp, Zea mays
  Clone ID: MRT4577_37942C.1
gcgagccacagctatcagccgaggttagttctcgacttccgcacatggtggataagcagcgccaggggtactagcattaaaggcccgtagaccgctaggacgtacacgtggccgtctcgcacaatacgagtacaatgcgatgcctggactacgagaggaacctgctcacgtaaaccgaggtggacgccatcggactcctctagatgtagtcctacatcttcaagcacacgaaccgtgaatatgcgactgtgactgtgtttt

SEQ ID NO: 116726 - DNA, 499 bp, Zea mays
  Clone ID: MRT4577_37943C.1
cattgggtacctcgaggccggccggggtggccgccgcggcctcgctcctctctgcgccgcgccacctccacgaccaccctttcgcggcgtgtgtactgtaccgcgtcgcacgcgcgcgcctcttcccgctcctccccccgctcctcgccgcgctccgttccctccgcgtcccgctgcagcccaccgcgttcgccgcgctcatcgaccacctcggcgccgcctcccggcccgacgccgcgctactcgtcttccgcgccgtcccagccttctgctcgcactccaacgccacgttccacgccctcctccactcccttgtctgcaacggccgtgtggacgccgcgcgggacatgctcccggaggctcctaagctaggcgtccggaccaacgcggtctcctacaacatcatcctcaaggatgtttgccaccgggacgggttctcgggcgcccgtgtggtgctcgacgaaatgctcgcccgcggcgtgcgccccacggtggtgac

SEQ ID NO: 116727 - DNA, 423 bp, Zea mays
  unsure (1)..(423): unsure at all n locations
  Clone ID: MRT4577_37944C.1
ggggcgcacacatccggttcacttatcttccacagattgaaaagattcacaagaanaacgggaagtggctaaaggggcaacaaatagaagcgcgtcgggcttaacanctncttnacantgaatggattgacatctggccgctctcgacgtgaaaaaaaacatgtgacttatacttttgatgattatgagcggtcaataaatggagccataaaaacaataagggaaaatgagaatgctggtgagggtggcccctccccattatgcaaaggattttatggagaaactccacagaagtttgattacaaagcaaaaacaaatgaaaggaaggctgaaactctccatcgcagctacaggcagagaaaaagatcccaaaggtacacaaaggactatggtgaggccatatcagatattggcctagatttt

SEQ ID NO: 116728 - DNA, 212 bp, Zea mays
  Clone ID: MRT4577_37946C.1
ggaaaaagagggttatggagattaaaactttcatgtacacctccttataatagctttttcattttcccacatccaacagggcgggggacaaataatgggcttttggccccaatgaagtttcgtaatttttgtaaaagatgagggccgggggtccgccaccaatgaagttttgttaaagtaggagtaaacaaccatttatgcgaatttggggg

SEQ ID NO: 116729 - DNA, 390 bp, Zea mays
  Clone ID: MRT4577_37947C.1
ggacccaggaaggggttaaaacaagccaagccaaattgggggggggggggggccctggggcaggggattggggacccacattttcccataaggggcggctaatttttggcccaaaatctaaggggcccggaaccctgaagaagcaacccctttcaaaagccaaattttgggccctttttacgaaacaaaaaaaaaaagaggggccggggggagttttcccaccggggggggacaaaccaaaggttgaagggggcaaaggcggccttggggggccaggaaaaaaacccccttaggggaaaaaggggggcccccccgaaaaacgggggggagctgggggatcccgggggctggggggggggggcgacccccggggggttcggccaggggggg

SEQ ID NO: 116730 - DNA, 228 bp, Zea mays
  unsure (1)..(228): unsure at all n locations
  Clone ID: MRT4577_37948C.1
cgccccaagaccgggaaggacgacnnagcggaccagaaccgccggccccaagcacggggagaagcnggaggggaggggaggcaacaacgggnccacgcggacggccgggggcagagccaacagggaggggancacaggggggggggggacaaggngcagcaagccaaccacnacggnccccncacccaggcccgcaccagcagagacggcagccacaacggggaggag

SEQ ID NO: 116731 - DNA, 252 bp, Zea mays
  Clone ID: MRT4577_37949C.1
ccacaagctatatttacagaataatggccacgatgcacaaagatattagcacagatgtaaccccaacattaatttaccaatgcataaatctcaacagggagaacatcagggacccgcgtcctattaaaacatacgcagcgatggcaaggagtttctagagcgcatgccactgaaaataatccctggcatacgaaagatccctctagacaagcccagtcacttttagcttcccatttgagaattatcataggg

SEQ ID NO: 116732 - DNA, 407 bp, Zea mays
  Clone ID: MRT4577_3794C.1
ggcgtgagttttgaattcaaaatcggggctggggacaacatattcaggtgggccccactttacaccaacaaccttggagtcgggtgaccttattggcctaaaaaagaaacactggcaaaggccataaaagggcaccttcaaacaacaaaccttggcctccaaagattacactggaaccgctcaaatacccccccttgctacccctttgtccaaactaaccggctcatgcttgctaataagccgcccaccctggtcaacaattagaagaatcccgtgctctggcgttcatccggttgattccagaaagatcgcctctgttatgtgagcagattaccttgcgcttccctttccaactggggtcaccctggaccttgtgttaaccggaatcttgccttttttacccaacg

SEQ ID NO: 116733 - DNA, 641 bp, Zea mays
  Clone ID: MRT4577_37950C.1
ggccgcttttttttttttttttttctcattcagaatctttaactcttgttggtatcactaagttacacacacactctactctacgtcattataaattagtacctagtcagctcagggctgcacttggaagccgggaaactccactttgtctcgacaaagaccttttgcataccatcctccttcttctcaaatttgtagtagaccttgtcgagatcctcgagacgcacacggtgggtaaccatcttggacgggtcgatgcgcttttcctggatcatctggagcagggactcccagtacatgtggacgggggcttgaccgttgccaatgaggcggataccgcgctccatgagcgaaccgatgttgaagtggttggtgtagccgacgtatacaccggtgataccgcaacgacccatgttgcgtgtgctggagatcatctcgttgacaatttcgctggtgtcggtctcgaggccgagcatcatctcaaagtagtgtgcccagccctttgcatattctccggcggcgcactcgatgctaacatcaggtccggcggttgttgcacatctccttgagcttgcttgttaccgactctcccttgggcagagcagagaagtcgaggatatcaatgtggggggtatttatcc

SEQ ID NO: 116734 - DNA, 243 bp, Zea mays
  Clone ID: MRT4577_37951C.1
catctaaaatgaagggatccaaacgccccgtcattagaattactattattagaatgaaattctattccatgaatccaaacgagatgaatccaaacgagacgtaacggtaattttcgcttgtaatcatcgcattcaagagcagtcacgcatctcacatatgcgcaccggttttaaaagttccggccgccttgttccaaaaaaaatccctaaaatatggttccaagccaataaaaacacattatt

SEQ ID NO: 116735 - DNA, 1202 bp, Zea mays
  Clone ID: MRT4577_37952C.1
ctcgaggccggccgggacagctcttacgctcaccgacgccacagttgtgtgcgcacgcaatgagactcgtgtccgcctcctcgtcctccccaccgccgtcgcggagctccccaaaaatgggcagcagcgtgggacgtcatcattgatctcctcctcctcctcttcctccttcctcgtagtgaagacgctgctgaggcaagccgaggcagcccgtccgtcgttcaccgtgcgcgccgcggcggattccgacaggccgatctggttccccggaagcacccctccaccgaggctcgaggcatgcttaccggcgacttcggctttgatccctgtggactcggatctgacccggagagcctgccttggaacggtggatgcggagctggtgtcactgccggagtgcgatgctcgggcgcgttggacatcttcatcccggagttcctgaccaagatcggagacctcaacacgcccttctggtacaccgccggcgagcgcagcagtacttcaccgacaccaccaccctcttcatcatcgagctcatcctcatcggctgggccgagggccgccgctgggctgacatcatcaagcccggaagcgtcaacaccgaccccatcttccccagcaacaagctcaccggcaccgacgtcgggtaccctggtggcctctggtttgacccgctcggctggggcagcggctcgccggagaagatcaaggagctgcgcaccaaggagatcaagaacggacgcctcgccatgctcgccgtcatgggcgcctggttccaggccgagtacaccggcaccggccccatcgacaacctcttcgcccacctcgccgaccctggccacgccaccatcttccaggccttcacccccaaatgaggagttgaacttattattagcattttgaggagtgctaccacacatgcatcgtcaggttgatggccgatatatatgaaacttcacattttttttggtggggaaggactgctgagtagactgtcaatgatggaatgctcgtggtgcgagtgcgatgcatggtgtacttgtactatgttgtaaccagtgtaaaaaggggatactcgttagatgttatgccatgttctctgaatcaacggcttgatgatttgtgcaaaaaaaaaaaaaaaaaaggcgcctaggcggccgccagtgcaacgcaaaaaaaaaaaaaaaaaggcccctagggcc

SEQ ID NO: 116736 - DNA, 583 bp, Zea mays
  unsure (1)..(583): unsure at all n locations
  Clone ID: MRT4577_37953C.1
ggccgcttttttttttttttttttcctttntttttttttttttttttttttttttattnnttttttttttttttttttttttttttttttttttttttccgggaaaggaaactttttatttttggtgggccacttactttttccaaaaaattttttttttgatttcccactaataagcattttaaaagagggcccccccaattttttttttttggtaggagccccttgtttttttcaaaacaagttggacaaagggcaacattttttgtatttttaaaagggttgggggtttagccccaaactgttggtaaaaaggcaacaactttttttttttaaaaaaggaaccccggtttgttgcacctagctggttaaaggggagtagtttttgttgttgaaaataaccaggggggttcagggcggccaattgtttaaatggaaaaattttttttttttgaaagtaggcaacacctacctggctaaagggaaatagttgttgctgcaaataaccaccaggtttcattgtaaacagttggttaaatggaaaaaattttttttttttaaattagggaaaaaggtttcccaa

SEQ ID NO: 116737 - DNA, 388 bp, Zea mays
  Clone ID: MRT4577_37954C.1
gcagccccagctgtttccacgatgcgttcccctcccccctcaactcacttacgtgtgggccctcccagctctgcttgtcttccagccccttgcccgcatgcacgaatcggatgacgacgacgacgccatgagaaagctgaagcgccgaccgccacttcgtgtctgctgctctgctcctcgactcccggctcctgcgccgtagagaagtcgaccgtccgtcaccctccccactcgcgcgtatttccctctcgtctttcccattgttgctcgccatcaatggcaggtgtcggccatcgcctgctcgtctccctcgcccgacgctataaaaccatcgtcgccacgaccgtcttctcccagccatcatcagctacgtaccgtcctgcaacag

SEQ ID NO: 116738 - DNA, 137 bp, Zea mays
  Clone ID: MRT4577_37955C.1
ggcagaacttttcaggccgatgattgtgaatgttttgtggttaccgtttccgggttagccttttttccattgttttcaacgggggacacacgcaacatggatggatcacgcgccacgagcgattggtaatggggggg

SEQ ID NO: 116739 - DNA, 545 bp, Zea mays
  Clone ID: MRT4577_37956C.1
ttgggtacctcgaggccggccgggtaagtctcccaattcccctcccccgtacctcggcatcctctcccggtagactcctcacacccgtcgctcgccgactcctcagcccatggaccagagcgaccatccggccccgaaggcgcaccacatgaccgcctgtctcccacggacgccctcactcatacctctatcgcgaacccctcggatgcggcatgcaccttcatacgcgggtccgcctccgtatctccgcctccatccgttggcatcgaaatccgcggaggcccgttcccagccagctttcgaaagggtatattccgcgactgcagggcaatccatacactaggctttttacgagctgtgttcgggggaccttcttctacagtggagttaatgtacatgttaacatctccgtcgacgaggggtggggtaaggatccaatttgcctggatttattggacccgagaaaaaccacgaaggtggcgcaaaccttgctcgtatattcagagcctagggcttctaacaaaaactaggggagggatacaaca

SEQ ID NO: 116740 - DNA, 821 bp, Zea mays
  unsure (1)..(821): unsure at all n locations
  Clone ID: MRT4577_37957C.1
cagttctatcgccgcctccgcgctcctcaatccgatcgcctcgacgccgcctggaatcttgtttgataacccataaaccatgttcaagaagaatgttgatgcaaaagctctacaacgtttgtcaggcgctgacaaaaagaagctgagaagaaccgccaagcaaaggtttccgcaagcatctgatgatgatctggatgccattcttcctccaaaggttgagataacagtcgctaagtacccaagccggactcttgtttatggcatagagggcgaactgccaatgctattcgacattgatggaagaggccatgagctgtttccaacagtttatgcactctggaaggttccttatctgttgccagcttttacacttanagggtggtgaagtttcacacttcattcttggtggcgccgatcttatgtttcctggtatcagcgtacctccagaaggattaccttctttccaagctggccagccatggtcagttaaagtccctggtaaccctgctccaattgctgttgggaccacaactatgagcaatactgaagcactaaaggcaggattacgtggcaaggcctttgcggattgcacttactataaagatttgttatgggcttctgctgatggtcgttatgtccaaatgaaggattttatgatgacagggnntattgaagatcctaattttgcttccgcttctcaacttattgaactcttccgaagatccttcagaaggaaagcagacaagcnagctgtgaatgggctcggagtgtcttactgaagatcatgccattaacagtgaaaccatagagaatgtaacagc

SEQ ID NO: 116741 - DNA, 731 bp, Zea mays
  Clone ID: MRT4577_37958C.1
aaaaaaaactatttttccttaattcgttgcctcctgatctctttcgtttcttggctaaatccgtccgcctccgtaggtgaaatctggggagcgaattgtcaacccacctgtcctcaaacgcttgatttcctgggtggctgtggctcgcgccccaactgctcgacgcaattccactgcagatcctctctgccatttggagtcgcgcaggcggtggcgatgtttcttatggcatgtgctccaaattatattgccattggcctttccaactatggtttatatacggggacaagggtactctcaccgagctacaagaacttcccacggaaatcctcctacaagtttctcaaggtccgtgctctgcagggaaatgatggccgtagaaggctgattgacataatccgaatcatcccggagctgtcaagaaactatttcaaaagcgggtccaggagagctcttttcggcggcatcgcgctgctgggtggcttttatgttgcgcagacaatatccctgtcgttcggtgctttggccgtgaacgatgttatagcagcagttgtgtgtgtcctcctgaccgagtacgtgacaaagttctactacagccggcctaaggttaccttcgccgtcgcgctcctcaacaatttcaagatgggtttcacatatggcctcttcattgatgctttcaagcttgctagctgatttacattgcctcctaccgatgtttcacatgcacttca

SEQ ID NO: 116742 - DNA, 450 bp, Zea mays
  unsure (1)..(450): unsure at all n locations
  Clone ID: MRT4577_37959C.1
cntggggggaaaacacccgggagggagtttaacaccttttacttttacaactgttcagggggactactatactctaacaacaaaacgattaacactccaagaataaaaacaacgttttacttgtcggcaccaggggcactttctggcaccctgctcacaaaatattcgagttctaacataaccattacacccacgtaccattcatattacatcaagggttgggcaggacatcactgtgtcaaaacatctttgttagcatgtctttcacaggagcgacggaagaggaaggacgtctcgaagcatcgggcgcaaccttgacgtcagcgacaatgtcgtcaggaaccactacgccgggccttcttattaaaatttgcccaccgggaatggctttgtccatagattggcgggccgagcctttaaaacggcgcagttgtcctctgaagctttgac

SEQ ID NO: 116743 - DNA, 1931 bp, Zea mays
  Clone ID: MRT4577_3795C.1
ctctcctcccggtgccagccgccgtgcgcgctctcttcgccctacggaaggtgcggaggtgccgagatcttgctcgatctcttcggcggcgaagagcgccaaccagatccgccctgtttgttggtgtggcgccggagcaggagtaggtcgcggccacagaaccctaggagcgaccatggcgactttcgcgaagcctgagaacgcgctcaagagagccgaagaattaatccatgttgggcaaaagcaggcagcactgcaggctttacatgatctcattacctcaaaaaggtacaggtcatggcagaagcctctcgaaaagatcatgatgaagtatgtagaactctgtgttgacctgaggaaaggcagatttgcaaaagatggtcttattcagtataggattgtgtgtcagcaagtaaacgtgtcatccttggaggatgtcataaagcactttatcagctttccaatgagaaagctgatcggcacgagagtcaggtagaagccctggaagatgctctggatgtcgaagatcttgaagcagacaagcgtcccgaggacctcatgctcagttttgttagtggggagaaaggaaaggaccgatcagataaagaggttgtaactccatggtttaagttcctctgggagacatacaggactgttctagagatactgaggaacaattcaaagcttgaagcgttatatgctatgactgctcatagggcttttcaattctgtaaacagtataagagaacaactgaattccgtaggttgtgtgagatcatcagaaatcatctcgctaatctgaacaaatatcgcgatcaaagggatcgtcctgatctgactgcacctgaaagtttacaactatatcttgatacacgtgttgagcagcttaaagttgctacagagctttgcctttggcaggaagccttccgatccgtggaagatatccatggtctgatgagcatggtgaagaaaatgccaaaaccttctatcttggtggtgtattatgcaaagctgaccgaaatcttctgggtatctgatagccacctttatcatgcgtatgcgtggctcaagcttttcaacctgcaaaagaactacaataaaaacttgtctcagaaggatctacaattaatagcatcttccgtcttacttgctgcactatctgtggcaccttatgacaaaaaatatggtgcatctcatcttgagacagagaatgagaaggagcgtaacatgaggatggccaaccttgttaacttctcgcttgattccaagcgtgaaaatagggaaatgccttcaagagcatctcttctatctgagttggcctccaaaggagtcctttcatgtgcttcccaagaagtgcgagatttgtacaaccttttggaacatgagtttctacctctggaccttgcatcaaaagtgcagccacttctttcgaagatttcaaagatgggagggaagctttcatcagcttcttctgttccagaggttaagttatctcagtatatttcagcattggagaagctgacagcattgagagtgttacaacaggcctcttgtattttccagtcgatgaagattgatatgctctcaagaatgattccgttctttgacttttttgttgtggagaagatttctgttgttgctgtgagacgcaattttgttgctataaaagttaaccatttatcaggagctgttcattttggtactgtggacatagaatctgatggcttaagtgatcaccttagtgttgttgcggattcattaaataaagcgaagattcatatttgtccaccagttaaaaagccatctaaactcggtgaaagttttattagtttggctggaatagtggagaatgagcatcaagaggcttcttgcaaggaagtccataattgaaaaacgcaaagaagagcttgagcgtcaaatattggagaagg

SEQ ID NO: 116744 - DNA, 1505 bp, Zea mays
  Clone ID: MRT4577_37960C.1
agcctcgtactcaccatcaccaagtacactacaacccaagcgatccctgtattcctgatctctctctctctctctctctctatccctctgtttctttgggctttgcagcaatatctgaggcctttgctttcttctacatcgcgttaagttctcattcagggtctaacgtacgtgcttcgtgcgttgcctccaaggaaaaaaccctctccatcgtcgtggcattggcaaccggccgatggcgtctcgggaaggaggaggaggtccgccggcgggccgcgtgggccggacgcgggagtaccggacgggcatgcagaccgagctgctgtccatcgacgccccgccgtcggtgagcctcttcgtgctctgcggcgaccgcttcgaggccgcgcacctgttccggtcgggggccctgtcgctgcacatggcccgcgtggagggcgtcccggtgtccatggccacctgcgccgtcggcgaccaccactggatgctggcgcgcgacgccctcgtggcgcgcatcgacgcgcgcgccttcgtcttcgagctccccggcttcttctacgccgtcgtcgtgccgccaggcgccgcggcggacaggaagtgcgccacgatggccgacatcttctcgcgcttctgcgcgtaccacgatcttgccaccgccgccgatgatggaaacgaacttgctggcgaggcggtgagcacaaacccgtgggtccgtgcccacgccgtgatacagcgcctcaagaggcacgcctcgcccgcaggacgacaggccaccgccgatgacgcgccgccgccgtccgaccgtgccaggcagatggagcgcgccgtccgcacgtccgcggtcgtcaagctacttacccgatccctgctggctggcgtgctacagcccggccgccacctgaccatcaccaccggaggcggcgccgccgccgccgccaatgccggcaccagctcgcggccctccaccacagcagcgctgccaagcaaatcggccgtgtcagacctcctcgacgccatcgagacgaaccgggccgtgccgcgctgcgacacccgccgtggatccggcggcggactggggtggtggagcctcaacgtggagggtgtaatgctgctgctcagggtcgtccaggcggtgcggggaaggaagaacctaacggcgccggcggcaggggagaagaggccacgggacgcgggacctggtcgcgacaccatgagaggtggcgttatgggtggcggcggcccggctcggcggtggtgcggcgggaggcccaggaagattgggaataccgttggcgcctgcgggagctcttagaatcttcggcgcccaaggaatatagtagtacgagattactgctagtaactagctaggggtttagggtaaatagggaacggtggtcgatttcctgatctacttctgtttcctgccatggacgccatccaaaaaaagccaagggtggagatcgggaagccttcagaaatcaaatattttagtagttctccccatc

SEQ ID NO: 116745 - DNA, 224 bp, Zea mays
  Clone ID: MRT4577_37961C.1
gaaccgttcccttaagccttcccatttttccttatagtaagtctttttaaactttgcctaaatcatgccaataacttttccctttgaaaaatttttttcctttaacatttccacaaaacttacaacccgaaaccttaaattttaaaccctgggttccctaataattaacctaactcactttaattccttttccctaattgccctttttccattcgaaaaacctt

SEQ ID NO: 116746 - DNA, 789 bp, Zea mays
  Clone ID: MRT4577_37962C.1
gactgcgcaagaaaccacacccacaccaactttccccgtctgtctttcttctcggcggaggcgaacgacgaaccctagccgcgcgaggaacgccaagatccccaaggccggcgacgatggcggcggttcggtgcgcggcgaggaggctcggcggctctctgctccagcgaacgcaggcggcggtcgcggaggagggacgcctgctcgcgccaagcaggctcatgcgctcccgccagctctccaccaaggtctccggcgagcgatcgcaggtggcggagcgacacctcctcgagccaggcagcctcatgcgctcccgccagctctccggcgagcatgctcgcaacatccagaagaaagaggatgactgctgggcggggttcaatgagacgctaaagaggttggacgagcttcaaaaaaagaagaaaccaagtgtctttcagcagcgcatgatatccatcgaccgtgcgttgaagagtttggtctatggatctttcaaggtgacagttgtgtatgtggctgctgctactgctttctctggcagtgggctagaagcgtagcccaggccgttaccaaggaaaacgtgtgaagacgaggtggaaaaatgagaaccaaagatggccgcccagcttgttttatgtttaattatgacccctgcagtttggctagctagtactatgctatcgtacgctgtgatattgtgtgacatggtatcatgttattatatctctacctatctatctattcgagtagattctgcatgaaactgtagcttgaagtgaacatgcttgc

SEQ ID NO: 116747 - DNA, 326 bp, Zea mays
  Clone ID: MRT4577_37963C.1
ttggcgcatcatgatctgtgcctatgccccgtttctgtaaatcaaccaatcttcgggaatatcccgaactttgctttgacaactcttctttagatatagattcatcccgaccgatgggggtggagcccactctcgtatttatctacgcgtgctttgaaagggagcctatccattagattatggcctccaggtgcaatccttgaagactggtggccacactacctgccaggactacaatcgtaatacctggcactacatgactcggccacttcatggcagggctgttcaacaatctaaccacttatccactgattattggcttggat

SEQ ID NO: 116748 - DNA, 261 bp, Zea mays
  Clone ID: MRT4577_37964C.1
gggtacctcgagccggccgggacccttctcatgggggtggcccatctcgtcggcggcacccccccagtgggcttctctctttagcgtctccgagtccacacaccatcccctgttacaactcgccgccgagagatcaggaagcgacataagcgtacatggcagggccccaccagatgtgctcggcagcgtgccgggccgcgggacacgcacgcgtcgacgagccgcgcacccgcgagcaccgccggggagcccgaggcaccg

SEQ ID NO: 116749 - DNA, 361 bp, Zea mays
  Clone ID: MRT4577_37966C.1
cacgcctgcgtgtaccgggccggctatacagggtcgagctcgctatctgctgtctaccaacgcactttcttatctttaggcaagtgacagactttgaactctactgtttatttacggactctacctctactaacattcaaacaggtggctggcgtgagccgtgctaccttctagacgacgccacatttgttagaacgctgtaccacgagctgcgcctaacgctggcaccctataacaactgcaacaattgctgacattgaaccaactagctttgcacaaacccgacaggattataccgacaaccgattattggcggcgccctgttttagatgtacttatgagtgatagttcaataataaag

SEQ ID NO: 116750 - DNA, 367 bp, Zea mays
  Clone ID: MRT4577_37968C.1
gggtgggtgctgttgaagaagctctccctaacttccatgggaatacccaatttatgaaagaccaaggggcatcaggccctccatgcttttcaaacattacggcatgcagtttgataatcagccaacaatacgatggtgccagagagttacatttacatatccctcggccattagaaacaggcgtagatgatacaacagctgccttatataggtgtcctaagagattacagggttctgactggttgctcacaatccgaagaatgtatcagcctttgggtataaaaaacagcattgccatatatgccgggtgaatagttaccttaaacaaataatttacctttaaacaataagccaccccgtttaaaaa

SEQ ID NO: 116751 - DNA, 309 bp, Zea mays
  Clone ID: MRT4577_37969C.1
gagttagcagcaacacacaatatttatggacaagcacaatttccacattgccaatgaagtacctctgcctggacggtacgagtgggtcccagtactccactaggagtgtcatatggtgataatatgggattacaagagccattagactggtattttaaatctaacaactagaagaagctttgactaaccatttagattgcttgaggctcttggttaacaagcttcaaaggaaacgaactgtttagaaatttccaatattcgattagtagaccagtagtgtctttctgatctgaaaggtgtaccgggggg

SEQ ID NO: 116752 - DNA, 736 bp, Zea mays
  Clone ID: MRT4577_3796C.1
attatatatcccctcaagcggtcggcggcgaagccatcaggttcagtggagaccgagccacccgcgagtcatcagaaaacacatccggcgacggagacctccctcgctcctcctcttggtcatcggctgatctacaccatggagcggaggacggtaatcgagaagacatgcttagcaacttgcctgatcatattttgctcaccattcttgaccggctcaatgttcgcgacgctgcaagaacctgtgtcctctcccgacggtggcagcagctccctgctatgctctctcaaattaagatagacgttttggatttcctccctgagggaacaactgcatgctaccaacgcgaaatcgttcgaatcaatggagctgcggttgaagcaacaaagagcatcatgtcacgcagggatccaagccgaaacaccatccacctcctgtccatgaagttctttttgagagacaatgacaccatatccattggacatgctcttggacagatcatggctacccacaaggttgagatagcccaattcgcaattttgacagaggcgcattactcccgccgcggcgatgatgatctggtctactatgggagaaattttatgttgttctttgaagcttgcccgggtggcatttggtggtctcacgtgcctcaaactgcagggatttgagatttggtaaatcagacatctgtaatgtcctccttatctgcaagcaactaaaacacctacgcatg

SEQ ID NO: 116753 - DNA, 219 bp, Zea mays
  Clone ID: MRT4577_37970C.1
ggaggtggatatatattccataaaatcagctcaaaacatacacgaagattcacttctccttataacatacaggaagacattttaaaccaccagcagtttctcaaagtatacaagagcaatgcgtaatccattggtaagctcaaaatattcaggttttcaaaggttcaatggcaaaattaattcaaatggtgccttttttttcttgagtcttgacttttg

SEQ ID NO: 116754 - DNA, 378 bp, Zea mays
  unsure (1)..(378): unsure at all n locations
  Clone ID: MRT4577_37971C.1
natggttctagatcgcgagcggaacgcctccgggctcactaatcccagagagggggcatggctactcaccgtcactgccttccactccttctcgtggccgccgccctcgcccttgccggcggcatggtcacgcggctctaagcagaggacactgcccgcttctatgcggtttgaacccaatccctggcgtgagcgactcgcacataacaggagctaggcacctgggcgcttgggcatcctaagcaccaaaacctgttcttcgaccggcccccgttccaaacttttcccctaaaagagccccccctttacccccccaaaaacctccgggaaaacttctacctagtccacaacacaaaccgacatttcccctggggcatt

SEQ ID NO: 116755 - DNA, 285 bp, Zea mays
  Clone ID: MRT4577_37972C.1
atatttattttggatcggttttattttcatgctttgcgctactgactaatccaacatgaccacctactcgactgaacaggccacgctcatggaccaacacctacgcccgcgctccgacgccggcaccagctgcttcgccgcgccggacgcaaccttctgccgctaacaatccctctccatcctgctattcacctcaatcaacgagcgcctcatcgtgcctatggacgcccgactcaccggccgcccggactggctcaccacactgtcacgcattgcctccaacct

SEQ ID NO: 116756 - DNA, 295 bp, Zea mays
  Clone ID: MRT4577_37973C.1
cgtcgctgacgtcgtctatattgcgacgtcgaggagatacaaggccaggatccagatccccggcgagaggatcgccagagccgtcaaggcgcttcagaacgaggagagctgaggctacgcggcccccgtgtacctcgccggagacaacgagtgcctctggtgtgaaggtctcgaagttggcgatccacgcagctaggcacaacaaaaacacccgcatcgggccacgtcacatcgagattgctgggggccacgacgaggagctgaccaaagtgctgggtggagacagcatccttca

SEQ ID NO: 116757 - DNA, 694 bp, Zea mays
  Clone ID: MRT4577_37974C.1
ccggccgggaatgcaacggcaaacctgcagacatctcctccatcaccaccaaactcaacatgggccaggtcgtgaaaataatcgaagagccgcagcatggtatcatcggccgcgctcttggtgctagccctcgagctagcggctgccaccgccccacaggtagcgtaggcaaagaagaagagacgccggcgacagagcggcgaggcggctggaaagcgaacaagatccaggacgacttctgctcgacgctgagcgacggtaagaacgcgactgacctggtctcgtgctaggagtcctgcgcgctctcccagcatacctacctggcgctgtacggcaggatccagtgtaagggacagtgctaccgagcagaagggcatctacggcggcggccatgaacgtctgcacaggagcgagtgctgtacaacgtcgtacgtcggagaagtgaggctgaggtcaccaaggcgctgcaacgtcaccttgcggcagggcacaacaacccgacgcctccgcgagaactgcatagatgtcctgcacccctcctccttcttcgagggaagccccttgaaatgaatgaaccatgcatgcatgcatgtatgcatgttccggtgtgacgtggagtctcacttcacgcgctgatcgagtctatacgtacatcctcaccgtgtggccacgcatgggataaccacctgatatg

SEQ ID NO: 116758 - DNA, 407 bp, Zea mays
  Clone ID: MRT4577_37975C.1
gggggggttaaactttaaaatggaagcaaccgaagcaacaggttttcccggggtgttgacgttttacaaaatttttttttttacaaaggtgaccattggatttggatacatgcgaaacgggattggttttcaaaagggccatgccaattctaggtggggagatcccttggcctttttgtgggggttggggggcttggccttttcggaattggcctttttctggttgagccttttttttaagtttttctggcggtcccttttcattttttggaaggaaaagcttttcttggggcgcttcttcttgttgagaacacccccctttccgttttttaggaggggccggccccccttttcccgggggggcccaggggcccccaagcccccggggagggaggtaaaagctttcc

SEQ ID NO: 116759 - DNA, 168 bp, Zea mays
  Clone ID: MRT4577_37976C.1
atggccttgctctcccgcctcacctggctctacgtctccggccaattgtggcaggacgcacagacccgagctatcctgtacggcctcctctagaagagctctaccagcgttccgaaagtgctctctgtggaggacaagcttatgaacctcttgtgcaaggcaatttta

SEQ ID NO: 116760 - DNA, 315 bp, Zea mays
  Clone ID: MRT4577_37977C.1
aagaacccagggattttcttcgctggtgtgcccaaggaaattcttttgtactcccaccttaaattcacagaacctctggcaaaacatctttggaacactccaggtttttacaggttaaaccggtcccaccggttttttttaattagtaggaaagggccagtctaatttgcaaaggaggatgggggcaacactaaaattttaccacatgccataaaacgggcttcagttgtagattataaggctgcaaaacttcaaaaagggacaccggggggggtgatgcattgactgaatcagccttatgaatagggcgggggg

SEQ ID NO: 116761 - DNA, 613 bp, Zea mays
  unsure (1)..(613): unsure at all n locations
  Clone ID: MRT4577_37978C.1
accatggcacantcgaatgggcaaattaacatagcattcaaaagtgcttnnnnnnnnncattcatcgttctagtcctgatttaataacaagaagtattacaatcagaggtgcttatggcaaattaaataaacatccatctttgtagtcttgatttaatgacaagaaggatcacattcagaggtgcttatnnnnnntgaagatttcacaagtgctatgacaggttccaactgaaagttcgcttactagattgctttcaaacaattgctagtaataatttcaaggtcttccaaattcttcgttgcattttctttgatccctcaagtttcaaannnnnnnnnnnnnnnnnnnnnnnnnnnnnnnnnnnnnnnnnnnnnnnnnnnnnnnnnnnnnnnnnnnnnnnnnnnnnnnnnnnnnnnnnnnnnnnnnnnnnnnnnnnnnnnnnnnnnnnnnnnnnnnnnnnnnnnnnnnnnnnnngaaagctcttccattccatccacaatagcaatgcatgttgtaatagggaaatcatcctcatttgcattagttggcnnnnnnnnnnnnnnnnnnnnnnnnnnnnnnnnnnnnnnnnnnnncctttccatcatctcaacc

SEQ ID NO: 116762 - DNA, 158 bp, Zea mays
  Clone ID: MRT4577_37979C.1
caccttgtagatccaacgggttcacagccttcggtagaatgcttgcaagtgacccacactgatggctaaacatttgccagctaatatgacccacacaaggtgcctggtgtgacctagttgaagacaagattgaatagcaacctgagtatacgggagtt

SEQ ID NO: 116763 - DNA, 3422 bp, Zea mays
  Clone ID: MRT4577_3797C.1
cccacgcgtttcctctcctcccggtgccagccgccgtgcgcgctctcttcgccctacggaaggtgcggaggtgccgagatcttgctcgatctcttcggcggcgaagagcgccaaccagatccgccctgtttgttggtgtggcgccggagcaggagtaggtcgcggccacagaaccctaggagcgaccatggcgactttcgcgaagcctgagaacgcgctcaagagagccgaagaattaatccatgttgggcaaaagcaggcagcactgcaggctttacatgatctcattacctcaaaaaggtacaggtcatggcagaagcctctcgaaaagatcatgatgaagtatgtagaactctgtgttgacctgaggaaaggcagatttgcaaaagatggtcttattcagtataggattgtgtgtcagcaagtaaacgtgtcatccttggaggatgtcataaagcactttatgcagctttccaatgagaaagctgaacaagctaagagtcaggtagaagccctggaagatgctctggatgttgaagatctggaagcagacaagcgtcccgaggacctcatgctcagttttgttagtggggagaaaggaaaggaccgatcagataaagaggttgtaactccatggtttaagttcctctgggagacatacaggactgttctagagatactgaggaacaattcaaagcttgaagcgttatatgctatggctgctcatagggcttttcaattctgtaaacagtataagaggacaactgaattccgtaggttgtgtgagataatcagaaatcatctcgccaatctgaacaaatatcgcgatcaaagggatcgtcctgatctgactgcacgagatcgcgtgggtctgactgcacctgaaagtttacaactgtatcttgatacacgtgttgagcagcttaaagttgctacagaactctccctttggcaggaagccttccgatcggtggaagatatccatggtttgatgaccatggtgaagaaaatgccaaaaccatctatcctggtggtctattatgcaaagttgactgagatcttctggatatcggacagccacttatatcatgcgtatgcgtggctcaagcttttcaacttgcagaagagctacaataaaaacttgtctcagaaggatctacagttaatagcatcttctgttttacttgctgcactatccgtgtcaccttatgacaaaaaatatggtgcatttgagacagagaatgagaaagagcgcaacatgcgtctggccaaccttgttaacttctcgcttgattccaagcgtgaaaacagggaaatgccttcaagaccatctcttctatctgagttggcctccaaaggagtcctttcatgtgcttcccaagaagtgcgagatttgtacaaccttttggaacatgagtttctacctctggaccttgcatcaaaagtgcagccacttctttcgaggatttcgaagatgggagggaagctttcatcagcttcttctgttcctgaggtcaagttatctcagtacatttcagcattggagaagctgacagcattgagagtgctacaacaggcctcttgtattttccagtccatgaagattgatatgctctcgagaatgattccgttctttgacttctctgtcgtggagaagatttctgttgttgctgccagacgcaattttgttgctataaaagttgaccatttatcgggagttgttcagtttggtactgtggacatagaatctgatggcttaagtgatcaccttagtgttcttgctgattcattaaataaagcaaggattcatatctgtccaccagtgaaaaagccatctaaactcggtgaaagtctcattagtttggctgcaatagtggagaatgaacataagaggctgcttgcaaggaagtccatcattgaaaaacgtaaagaagagcttgagcgtcaaatattggagaaggaaaaagaagaagaaaaaaagagaatgagcagtcaaaagaaaactgcggatgaggaaagggtgaggcttctcaatgaacagaggcagagggagcaggaccggattcgtagagagatagaggaaaaaaataaagcagaagcaaaaaagatgctagaagatttgaataaggcagggaaaaaacatgtcgttgttgaaggggagcttactaaggaggccatcatggaattggcacggaatgaacagttaaaggagcgccacgaaatggagaaaaaactgcagaagtttgcaaaaacaatggattatctggaaagggcaaaaaggcaggaagaggcaccactgattgagcaagcttttcaaaaacgtcttgaggaagagaagatccttcacgagcaagagcagcttcgggagattgaactcagcaagcaacaccatgccagcgacttgcaagagaaaaatagactttcacggatgttggagcacaagaatgctttacaggagagaatcatccaagaacgtgcagctgagtttggccgtctgaagaaagagagagatgaacggatgaatcggttgatatcttcaagaaagcatgaaagggagacagtaaggaagttgatgttttatctgaacctggaggaacagcggattgaaatgcttcgtgaggaagaggaagctagaaaacgtgaagcggaagagaggaggaagagagaggaggctgaaaggaaagctaaacttgatgccatcgctgaaaagcagcgattgagagagatagagctggaggagaaggcaaaggcaacaagggagaagctcttaaagggatccgaggctgtgcgcgctccagattctgcacctgttgcacagccacctcgagagtcagcagcagcgcctgcagctgctgcggctgctcctgctcctgctcctagtaaatatattcccaagtttaaacgcggtggtgatagcagcagcatcccttctggcagccgcgatgaagatcgctggggttcacgtggtccgctcaggcaagatggtcctcctgcacgactggatgcaccctcatcacgccaagatactgatcgctggcgtggatcaagattttcctctaactcaacgtcctcttcatcaacctggagccgttcacggaactgatcctatgctgcaggacttttttctagccatgtgtcgacctccgtgcacaatgtctaatcgtacctttccaggcactgcactacatgcatattattgctgttttgtacttttgtagtaatactctacaatccatgattattgtccctgtttgttagtaatgctgttttgtctgtgcatgaaacactctatacctacatatagccaagaattgcaggactatgtatgcatgtaaaacttgcaagattatcaatttttatgagctataaaattaaaaaaaaaaaaaaaaaaaaaaaaaaaaaaaagggcggccgctctagag

SEQ ID NO: 116764 - DNA, 173 bp, Zea mays
  unsure (1)..(173): unsure at all n locations
  Clone ID: MRT4577_37980C.1
ggcctatgccaatgaanaatgggaagcctggaagtatatgaattctcattggtttgtaggctttgttgggttatgattgtaatttttaaataggtntggacgctgccacctncacctggtaaaatttaaataggtnttgaagatgnanaggagtaagactataggatgatgac

SEQ ID NO: 116765 - DNA, 262 bp, Zea mays
  Clone ID: MRT4577_37981C.1
gccgtcatcgtaccactctctctcgcttcttcttcttcaatcgtccctccccgcgccggaattggaggaaggagaggggacaagctttccggcgccgacgccgacgcggacccggcgccgacacgatacggtgcatcacgtgcatcacaccgttacggaggccccttggacatcactttgtgctgcaacttcgatataactcagttgcagcatggcctcagtgggcgtggcaagcacatccttgggatttcagagtggcaca

SEQ ID NO: 116766 - DNA, 572 bp, Zea mays
  Clone ID: MRT4577_37982C.1
gagaaccattctagagcagcaagaacgcaatacatgctccaaaaacataagtttgcccaaataacggtgatcaaactgacgtcgcaagataacattccatgcttcaaattttcaaggagaatcaaagccaccaaatgtctcactctcgaaaaaagtatttctaagagtttacggaaataaggcagctccaactccgaagttcgtcttaacatcaactcatactaaacataaacagtgagactaatcactcagctgcagcaacctcctgtcctcccatggcctcgtcgccttcagccggcctgtccatcttgacaccaacatcctccttggcatagtcaccgtggacctccatgagctttccgatgtcgaactttggtgcttttaggatcttcaccttgcggatgaagacattttgcaaggggaatatgctagaggtggctttctcgatttcctttccaatgacctcagggatgaacttggacacgagttctttcagatcacaagttgaagcttggttgctcatgatttcagtcatcttccgacgaatctgtctgatttggcttgcttgacat

SEQ ID NO: 116767 - DNA, 275 bp, Zea mays
  Clone ID: MRT4577_37983C.1
gacgtacgcgtccggtctcgaacgccgacattgaagcctgttggccgtgctcaccccggctagcaggctacgcgccaggtctccaactttggttcactcatctggcactatactgacgctcgccatcgccagcgactaactaatcaccctcagtgaacatctcacgctggtcagatgatcgagggaatgacagtcccagaagcaccgatcaagtaggctatcgaacatatacagacacatttgcacgggaatgactatgaaggcatacacctatt

SEQ ID NO: 116768 - DNA, 578 bp, Zea mays
  Clone ID: MRT4577_37984C.1
tggccctcggtggggcgtcgccacggcggccgccgggtcttataggccaatacttcacatcgactgtcctaggctgggatgacggatctggccgtgctctacctgacaaggtgctgtgcgagcgcgtcctggaactcgaacccatggctgaaaggctggtgcaacagcgccaccatgtctcgcgagaagaccaaggtcaccactgcctttgacgcaccctgtcacgagaggacccggacgctcgcgaccgaagatgatgaccggactcacatcgcgtgtgattgactgctcatgagtgactgccaactcgggccccgccctcaatgatctgcgactactgaaacattgcggatagcgagggctactaaaaagattactacgcgctactactatatcagaatgttgaacacgatgcattctgataccagtacgcgcaggttgttatatgagccatgcaatggcggggggtgtctggaatgctctcacatgtaactacttagtgcctgtccatatagttcaatgctatgttagaggacccagaacgtaccgtgccggatgtggtctcactattagtttca

SEQ ID NO: 116769 - DNA, 383 bp, Zea mays
  Clone ID: MRT4577_37985C.1
gaataacttcagtagtgatatactatttcttttcatattcagtgtctgaagctcgtataatcaagaagaaaaaaataataacaataaacacctcacattaggagaccatccaaaaccggaatatcaaatggtaaccttataactccaagggcaataaatagaagcaagaaccacgcaggaaacgtcgtcatgcatagcactaagaaagatttctgtccttcgcaagcgcgcgtctcagtggtgtcgactacccactcggcggcctcgcggaggcggcgctcgggctcgctctccggctgcccgatgggcgtgctagcgacgaggtccatgaatgcagagtttttcgcctccatggatgcggcggcagacgcggcgtcgtcgga

SEQ ID NO: 116770 - DNA, 994 bp, Zea mays
  Clone ID: MRT4577_37986C.1
ggcacgggcacggggcaccgaagtgttggtatacgcggcagccgggatagcgagcgtatggccacctacttcgtcctcaacaccggcgcgaagatcccgtcggtcgggctcggcacctggcaggccgacaacgggctcgtcggcgacgccgtctatgccgccgtgaaggcaggttacaggcacattgactgtgctcaagcatacaacaacgagaaagaggtcgggtttggtctcagcagatgattgatacatctggacgtgggccgcgatggaggagctgtacgacgccgggaaggcgcgcgccatcggcgtcagcaacttctcgagcaagaagctggaggacctgctggccgtggcgcgcgtgcgccccgccgtcgaccaggtggagtgccaccctgtgtggcggcagggcaggctccgcgcgttctgcgcctcccaagggatacacctctccgcctactcgccgctgggctcgccgggcacggcgacggtgaaggcgggcgcggtgctggagcacccagccatcgtctcggcggcggagacgatggggaagacgccggcgcaggtggcgctgcgctggggcgtccagatggggcacagcgtgctcccgaagagcaccgacgaggggaggatcagggcgaatctcgacgtctacggctggtccttgccggaggacctgctcgccaagttctctgagatcgagcaggagaggctgattcgtgcgggcttctttgttgatcccgaacggcgtgttcaaatccatcgaagagttttgggatggcgagatctgaatgggaggagctgagtgacggaatttggccactggcaaggcgtactgtgcctgtggaagaataaatttatgcgtatgaaactgtgaaagacagcgtagttttcgggtacttggtatttggtactacttggtacttggcatactttgtactccaataattttcggtcgtctttaaataatactaatactaatattcaatttgac

SEQ ID NO: 116771 - DNA, 508 bp, Zea mays
  Clone ID: MRT4577_37987C.1
attatagttcataacctagattatgataatcatatgtatatttcatagtataataatacagtggtgatcaaatatgccctgtatctaggaatcgaattacaagttcatcagttctcgattgatacttgaaatgacatgtacattctaaaattgtggataccatgaagcatttcttatacacaaaatatgggtatttctgttaatcaatttatgatacctcgctctctgaaatcagtctactactggcaaacttagggcttgttcggttattcctgtcccatgtggattggatgagattagaaaaaatatgaaggattttgacttgttcaggatttaaactcattcaatcccacccaatccacatggattgagatcacatggattgagaggaaagcgaacaagcccttatagttgaataaggtgagtctgcacactggatgaatatcactatcagttaataccaagcaatctcaaaccttaggtttggattctctgaccatgatggagc

SEQ ID NO: 116772 - DNA, 264 bp, Zea mays
  Clone ID: MRT4577_37988C.1
ataattttactggcccataactcggaatggcccggaacttttgcgcagtctctgaaacaattggcccggatggatggccaggcggggtacggcaacaagcagggagcgctcgctgaaagaagaacggagctccccgtgacaaaaaaagggaacatatgtaaacagccacgaatccctgctccgaagaccggcgggatcccacagctgcaggcaggatcggttccctgacagacctactcatggactggagcgccctggtgaaca

SEQ ID NO: 116773 - DNA, 1075 bp, Zea mays
  unsure (1)..(1075): unsure at all n locations
  Clone ID: MRT4577_37989C.1
ggcgcaggtggcgctgcgctggggcgtccanaggggcacagcgtgctcccngagagcaccgacgaggggaggatcagggcgaatctcgacgtcttcggctggtccttgccggaggacctgctcgccaagttctctgagatcgagcaggaaaggctgattcgtgcgggcttctttgttgatcccgacagcgtgttcaaatccatcgaggagttttgggatggcgagatctgaacactgtgtcctgactgggaggagctgagtgacggaattttgccactggcaaggcgtactgtgcctgtggaagaataaatttatgcgtatgaactctgaaaggcagcgtagttttcaggtagtttgtgctcggcactccaataattcctcgacgctcaagtggtctatctatcctctaaaggccatgccgctcaagcggtcttttaagccagcatatgcacaatggaaacacaggtgctgaatagattcatttctacgacagaacgccagggacgtgatgtatatgctactagaaattcacagtggccacaggaaacggtatttcgagggtacactctttcctacgggaaacgctaggagatagcatcggtggtatgaatataattgaaaataaataatataatatgtggtagttgatatagagttaagatataaagtaaatatagctgtggagtattgtgatatagggtaaagaattttaatgacgaggacatatattctttttaaagtagaaatttagaatattatgaatgcagatagtctaatattcagagaattgttggagaagaggaatattttgcttcctatattatttgacgacttcttaaatctagaagttagagagcataaacatcgcgcttcgtagttttgccatccgagactccgaacatcttccatttgaatacaatgccatttcatgtatttgctttatttattttttttatttttcccttgtattcagatcctgaatagacaaacacaaatatagttgactacgataacaccttgtagctatactctgaagtcgaactgtagtagtatttgttaagcaagcagaagtcac

SEQ ID NO: 116774 - DNA, 4127 bp, Zea mays
  unsure (1)..(4127): unsure at all n locations
  Clone ID: MRT4577_3798C.1
ttccggtaggggaattcagcaagcaacaccatgccagcgacttgcaagagaaaaatagacttttatgtactttggagttctagaatgctttacaggagagaatcatccaagaacgtgcagctgagtttggccgtctgaagaaagagagagatgaacggatgaatcggttgatatcttcaagaaagcatgaaagggagacagtaaggaagttgatgttttatctgaacctggaggaacagcggattgaaatgcttcgtgaggaagaggaagctagaaaacgtgaagcggaagagaggaggaagagagaggaggctgaaaggaaagctaaacttgatgccatcgctgaaaagcagcgattgagagagatagagctggaggagaaggcaaaggcaacaagggagaagctcttaaagggatccgaggctgtgcgcgctccagattctgcacctgttgcacagccacctcgagagtcagcagcagcgcctgcagctgctgcggcggcggctgctcctgctcctgctcctagtaaatatattcccaagtttaaacgcggtggtgatagcagcagcatcccttctggcagccgcgatgaagatcgctggggttcacgtggtccgctcaggcaagatggtcctcctgcacgactggatgcaccctcatcacggcaagatactgatcgctggcgtggatcaagatttccccctaactcaacgtcctagttcgcggccgggccgggaaccttcgcctctcctcccgttgtcagccgccgtgcctgttctctctgcctttctaaaagtgcggcgactggttgggctgccgccgactgccggggccttcgccgacctcttcgccggcgaagaggtcccatcaggagaaggagtagatcgtcgacccagaaccctcgctgatggcgactttcgcgaaacctgagaacgcgctgaagagagccgaagaattaatccatgttggtcaaaagcagtcagccctgcaggctttacatgatctcattacctcgaaaaggtacaggtcatggcagaagcctctcgaaaagatcatgatgaagtatgtagaactctgtgttgacctgaggaaaggcagatttgcaaaagatggtcttattcagtataggattgtctgccagcaagtaaacgtgtcatccttggaggatgtcataaagcacttcatgcagctttcaaatgagaaagctgaacaagctaagagtcaggtcgaagcactggaagatgctctggatgtcgaagatcttgaagcagacaagcgtcccgaggacctcatgctcagttttgtcagtggggagaaaggaaaggaccgatcagataaagaggttgtaactccatggtttaagttcctctgggagacatacaggactgatctagagatactatggaacaattcattgcttgaagcgttatatgctatgactgcctcattggagccgttcacggaactgatcctatgctgcaggacttttttctagcccatgtgtcgacctccgtgcacaatgtctaatcgtacctttccaggcactgcactccatgcatattgtcgctgttttgtacttttgtagtaatactctacaatccatgattattgtccttgtttgctagtaattctgttttaactctgcatttaacaggaaatacctacatatagccaagaaatgcaggactagatgaccatggtgaagaaaatgccaaaaccatctatcttggtggtctattatgcaaagttgactgagatcttctggatatcggacagccacttatatcatgcgtatgcgtggctcaagcttttcaacttgcagaagagctacaataaaaacttgtctcagaaggatctacagttaatagcatcttctgttttacttgctgcactatccgtgtcaccttatgacaaaaaatatggtgcatttgagacagagaatgagaaagagcgcaacatgcgtctgtccaaccttgttaacttttcgcttgataacaagcgtgaaaacagggaaatgccttcaagaccatatcttctatcagagttggcctccaaaggagtcctttcatgtgcttcccaagaagtgcgagatttgtacaaccttttggaacatgagtttctacctctggatcttgcatcaaaagtgcagccacttcttttgaagatttcaaagattggagggaagctttcatcagcttcttctgttcctgaggtcaagttatctcagtacatttcagcattggagaagctgacaacattgagagtgctacaacaggcctcttgtatttttaaatccataaagattgatatgctctcaagaatgattccattctttgacttctctgtcgtggagaagatttctgttgatgctgccaaacaaaattttgttgctataaaagttgaccatttatcgggagttgttcagtttggtactgtggacatagaatctgatggcttaagtgatcaccttagtgttcttgctgattcattaaataaagcaaggattcatatctgtccaccagtgaaaaagccatctaaactcggtgaaagtctcattagtttggctgcaatagtggagaatgaacataagaggctgcttgcaaggaagtccatcattgaaaaacgtaaagaagagcttgagcgtcaaatattggagaaggaaaaagaagaagaaaaaaagagaatgagcagtcaaaagaaaactgcggatgaggaaagggtgaggcttctcaatgaacagaggcagagggagcaggaccggattcgtagagagatacagggaaaaaaacatgtcgttgttgaaggggagcttactaaggaggccatcatggaattggcacggaatgaacagttaaaggagcgccacgaaatggagaaaaaactgcagaagtttgcaaaaacaatggattatctggaaagggcaaaaaggcaggaagaggcaccactgattgagcaagcttttcaaaaacgtcttgaggaagagaagatccttcacgagcaagagcagcttcgggagattgaactcagcaagcaacaccatgccagcgacttgcaaggagaaaaatagactttcacggatgttggagcacaagaatgctttacaggagagaatcatccaagaacgtgcagctgcagtttggccgtctgaagaaaggaagagatggatggatttggccgtctgaagaaagagagagatgaacggatgaatcggttgatatcttcaagaaagcatgaaagggagacagtaaggaagttgatgttttatctgaacctggaggaacagcggattgaaatgcttcgtgaggaagaggaagctagaaaacgtgaagcggaagagaggaggaagagagaggaggctgaaaggaaagctaaacttgatgccatcgctgaaaagcagcgattgagagagatagagctggaggagaaggcaaaggcaacaagggagaagctcttaaagggatccgaggctgtgcgcgctccagattctgcacctgttgcacagccacctcgagagtcagcagcagcgcctgcagctgctgcggccggctgctcctgctcctgctcctagtaaatatattcccaagtttaaacgcggtggtgatagcagcagcatcccttctggcagccgcgatgaagatcgctggggttcacgtggtccgctcaggcaagatggtcctcctgcacgactggatgcaccctcatcacggcaagatactgatcgctggcgtggatcaagatttccctctaactcaacgtcctcttcatcaacctggagccgttcacggaactgatcctatgctgcaggacttttttctagcccatgtgtcgacctccgtgcacaatgtctaatcgtacctttccaggcactgcactccatgcatattgtcgctgttttgtacttttgtagtaatactctacaatccatgattattgtccctgtttgttagtaatgctgttttatctgtgcatgaaacactctatacctacatatagccaagaattgcaggactatgtatgcatgtaaaacttgcaagattatcaatttttatgagctataaaattaatatctatgggcaccaagagttgtcccgccgctcgtttagaggtanccaagtatacgcacgcgt

SEQ ID NO: 116775 - DNA, 953 bp, Zea mays
  Clone ID: MRT4577_37990C.1
ttgggtacctcgaggccggccgggaaaaaaaaaaaaaaaaaaagcagcttcagctccagcttcttgtcccctcccagcccttttcctatcactcgagctcgaggtcaaggaggagagggagggagctcagactcttgcctgcctggtgcctgcagaggagagaggaggaagaggagggaagggagctatagattagctccttttttttttctttctttctggagctgttattttatccggggaaggatctggttttgttttgtcccccgtattgggaggatttattatctttctccttcttccccctcccctcgaccctctcagcctcaccaggatcatctttgttgctgcggaggcaatccctgtcgcctgctccctccccatgagagtaccacgccacgcacacccttcaggaacgccgtaagctgaagctttcagtcggctgctgaaacctcgatcgttcatcagtcagtctccaaggcggttcgatcgtggccatcatcaaccgagctgcacgatggctacctactacacgagccagggcagtgaaagggagccgtcgcagaacatgtactccagagaccccggcaatggcaccgcgtcctaccctcctctgccgtcggctctggggaacttgctctacttgaacagcccggcttctggcgggccgtacacggatttcggcggcgtccagcaggactgcatcgagatgcctgaacctggacatccttcggtgatgtcccatgactcgtctgccagggagatcgagcccgacatgctggggcagcagcggcgctccttcggcctagccagaggcatgaaggacgaggtgctgatgcgcatgatggatggatcaggatcacatagcagcgcagccgatgccatccatgacgacgccccgaatggcatacagctcgatttcggcgttctgagcagccacggcccgccggcgc

SEQ ID NO: 116776 - DNA, 1414 bp, Zea mays
  Clone ID: MRT4577_37991C.1
cattgggtacctcgaggccggccgggatcgtccgacgcgactgctttccatttggcactgtcggtgtcgacggacgcagatattctgtggctcaaacctttggaggcacgggcacgggcacggggcaccgaagtgttggtatacgcggcagccgggatagcgagcgtatggccacctacttcgtcctcaacaccggcgcgaagatcccgtcggtcgggctcggcacctggcaggccgacaacgggctcgtcggcgacgccgtctatgccgccgtgaaggcaggttacaggcacattgactgtgctcaagcatacaacaacgagaaagaggtcgggtttggtctcaggagagtgctggacgagggcatagtcaagcgtgaagatctcttcatcacctccaagctttggaacattaaccatgcggcggaggacgtcccggttgcactgaacggcacactgaaggacttgcaaactgactacgtggatctctacctcatgcattggccggtgaggatgaagaaaggcgccggcttcggcccgcacgccgtcgtcccgtcagacatccccgcgacgtgggccgcgatggaggagctgtacgacgccgggaaggcgcgcgccatcggcgtcagcaacttctcgagcaagaagctggcggacctgctggccgtggcgcgcgtgcgccccgccgtcgaccaggtggagtgccacccggtgtggcggcagggcaggctccgcgcgttctgcgcctcccaagggatacacctctccgcctactcgccgctgggctcgccgggcacggcgacggtgaaggcgggcgcggtgctggagcacccggccgtcgtctcggcggcggagacgctggggaagacgccggcgcaggtggcgctgcgctggggcgtccagatggggcacagcgtgctcccgaagagcaccgacgaggggaggatcagggcgaatctcgacgtcttcggctggtccttgccggaggacctgctcgccaagttctctgagatcgagcaggaacggctgattcgtgcgggcttctttgttgatcccgacggcgtgttcaaatccatcgaggagttttgggatggcgagatctgaacaactgtcctgactgggaggagctgagtgacggaatttggccactggcaaggcgtactgtgcctgtggaagaataaatttatgcgtatgaactctgaaaggcagcgtagttttcaggtagtttgtgctcggcactccaataattcctcgatgctcaagtggtctatctatcctctaaactctaaaggccatgccgctcaagcggtcttttaagccagcatatgcacaatgggaaaataggtgctaagactctctccagcaagatccggtaaaaggtccggtcctctaaatttatcgtttctttggctccc

SEQ ID NO: 116777 - DNA, 381 bp, Zea mays
  Clone ID: MRT4577_37992C.1
aaaaaaaaaaaaaggtgggggccggtgaaaaattttaatttatcccaatggggtccccggggggggagcccaaccaatcatttgtggcactttttttggttttttaacaagggggggcttttttttaaggacaaacaaactaactttaaccctatctatttgtaccccttaaacctggcaaatttttttcccatattaggggccccccttggtgggaaagggccctgtttttccaagcccgtatttaatgcccttgaaatggatggggtccccccccaaccggtttctaaaacccggttttttccagaaaaaaaaaatccggggaaaaaaaccccagcaatttcttttgcccagacttttttccatggaaggggggggggg

SEQ ID NO: 116778 - DNA, 343 bp, Zea mays
  Clone ID: MRT4577_37993C.1
gccacgcgtacatatttatgctggggaaagaaagtgactggttgagaacccacacatatatctgatcaccatcatacagagcaccgtctacgatctttgatactgtccattgcttgacgacattatgtgaggaagctgtagacatcctgttgacataaatcatccagcaggggatggtacattgtggctatatgctgcattgggagaggatatagctgtatcggagctgacactgatgatgtggacgctaagctaccattgatttcacagtgactgcgttatgagatggtgtgaatggctccaacatcgcgtcacatacacactggagcccaatactgtatct

SEQ ID NO: 116779 - DNA, 297 bp, Zea mays
  Clone ID: MRT4577_37994C.1
atgcaagagatccgctgggcacccgttgcattgacatggaaaagatccttacgagggctgattcaaggaaactgatcgtactacctttcaacaaaactgatctggttactaacgaggagtaagacataaggctaaaatctctgaaagaagaaatgccaacagtacagtttaagtgcaagacccaagaacagctgaccaatctcggatagaaatcttcaaaactagataaaacctacatcaccccacaaaggggtgagtcgcctgactccagacaatctagtccaattgcttcaagaa

SEQ ID NO: 116780 - DNA, 342 bp, Zea mays
  Clone ID: MRT4577_37995C.1
gcgttcgcccccgcgtgcgcgcccgcttacgcggcgtacgaggggacgtccctaccgcagatcacgacagcgtatgaggcaaggcacgtatcgcgatggtgattgtaatcttgcgtgcttgcttctgttctcgcggttgctaccgggatgggcaggggcgccagcacgcgcgcccacccggaggtggggggggggatcgtcttcgccgacctcttggccgtgctcgagacgcttaagcacgaggaacaagggggccgaccccgcggccaggcccgcccccagggcggaccccttgtgcgcggtcttctgggtgcccgcctcgttctgtggtttgctccgggg

SEQ ID NO: 116781 - DNA, 298 bp, Zea mays
  Clone ID: MRT4577_37996C.1
gaaaccaagggttttaaacacagggggctgccacccaagggttacagaacaaaatcagacggggcaacacaaacaaaccagccgcatcaacagcaccctaaacccctttaattgacccccagggtatataaaaaaatgaaaaactggggtgtgggctgacaaaacaaaatgctttgggggttaacaagtcttggggggggggaaagcactgggagaggttgtttttggaatgctcccgctccgcgtgttttttgacatgggccccgcggggggcccaaagaaaagtctccatgcaaaa

SEQ ID NO: 116782 - DNA, 356 bp, Zea mays
  Clone ID: MRT4577_37997C.1
ttttttttttttttttttttttttattttttttttttttttttttttttttttttttttttttttttttttttttttttttttttttttttttttttttttttttttatataaaaaaaaattttttaaccgggttttgcccccttttttaaataataaaaaaatttcgagaaggttgccccaattttttttaaaaaaaaaaaaacgtatattttttggggacaattttgttaaaaaattcttccaatctggggggttttttgagagagaaaacccaaaaatgtggggcacccaaatatcgggatttttcaaggggattttttgaagtatttgtacccccataatttgtggggttat

SEQ ID NO: 116783 - DNA, 423 bp, Zea mays
  Clone ID: MRT4577_37998C.1
ataagaaaaaaaccgccccccatttccctgggataaaaaaaaacttaaccaaatcaagcggggggggctacagaccaaaccggagggccatttagaaaattggaaactacaggggaccccacacaaaaaattggggggaaaaaaaggggcgacccatcggggggggaacgacccggccgggggaacttttttcctccccgggggggcctttttaaggtgggaacgacgaaacaaaccaaatcctttaagggggaacttttttaaaacgaccggagaacgggggggtagctaactccaaaacccatggtcacggaaaaaggggcccatgaaccggggggtgccaatttgtccaaaaaaaacggggcaggggtaacccggggggggggttttgccccaggggagggggagttggagccccagggg

SEQ ID NO: 116784 - DNA, 443 bp, Zea mays
  Clone ID: MRT4577_37999C.1
tggtcttcgtccggacgactacgtgcttgtctacgggcctgcttgccgtctggctggtgatatctacaagacttctgacgaggctgctgcctattacgccttttatgatctgaagaagacacttgccaatgcagattacccgataaactacctggggtcgcgctggggctcgcacgagaactcccttggctcggacacgttcgatggcgtgaacataccccatgacctgtacatgaagctgcacatcctcgtgtacaacctggacttcacgggcgaggccaccagcggcacgtacaccggcacggtgcacagggccttcttcacgggtgtcatggccgccatgcagtgcatgatgcgggttctggagctggtcatacagctcatcatgctgcatatcatccaccatgacatgggcgatgacagccctgtgtttgtcccgctgc

SEQ ID NO: 116785 - DNA, 717 bp, Zea mays
  Clone ID: MRT4577_3799C.1
ccggccggggactccatcccggcccatccatattcgctctccgaccagcgaatttcaatcaacacaacaccgcgacaatggctgacgaatacgacgccgagcaggctgctgagctcaagagaaagagagcgttccgaaagttctcctaccgaggaatcgaccttgaccagctcctcgacctctcctccgaccagcttcgcgatgttgtccacgctcgtgcccgccgcaggatcaaccgtggtctgaagcgccgccccatgggtctcatcaagaagcttcgcaaggccaagcaggaggctcagcctaacgagaagcccgaccttgtcaagacccacctccgagacatgattgtcgtccccgagatgattggcagcgtcatcggcatctactccggcaaggagttcaaccaggtcgagatcaagcctgagatggttggtcactacctcgctgagttctctatctcatacaagcccgtcaagcacggtcgacccggtatcggtgccacgcactcttctcgtttcattcccctcaagtaagaaggttgtggtcttgggtggtttctgcattcacggacattttgggcgaaaaggactggttctggtagatgggcttttaaaacatctaccaaaattactgatgacaatgggtactatgatagtacaataaaggggcattgtccgcttgatgaccaaaaaaaaaaaaaaaaaacccgcggcc

SEQ ID NO: 116786 - DNA, 146 bp, Zea mays
  Clone ID: MRT4577_379C.1
cccactcgtacgcggacgcgtggggctagctgagagcctgcagctcagtgtgctagctagctcgaccaagagactggctgtccgcgaggagatcgatccagacggctttcctcaacatggagcagcacatctgtgccttcaccttt

SEQ ID NO: 116787 - DNA, 301 bp, Zea mays
  unsure (1)..(301): unsure at all n locations
  Clone ID: MRT4577_37C.1
ntcaacctncctgattacatattaacatacattcatttgcttgcactaaaagtatgctgatgttaggctttccggctggtggggcaagggtacggttctagtgctttttagggtgctgcaaaaaatcatcttatcgacatagggaaaaaaaccggcaaaggacgagcacatatgaggtgggaggcgttttcggaatgcttttttgtaatacccaagactttggctgagaactctggtttagatacatcaatatgggatagtttcttttcagaatgagcttgaccgtggattatatgggggg

SEQ ID NO: 116788 - DNA, 1099 bp, Zea mays
  Clone ID: MRT4577_38000C.1
cattgggtacctcgaggccggccgggtcgctcgctgagcttccgttgttgcacagcacatcgatcgacgacgatatcgggaagcaatatggggttggccttgtcgcggctggaggagattaggacgcagtaccgcatggcagcggaagacggcgaggctgacagtccggcaccggcgccagtgccgccgaccggtgctgctgctgcttccggcggcggcactgaaaagaagaagcaggcggacgactcgtcgtcgtcgtcaaagacgacagaatgggttcctcataagttctctgagatcgtcggtcaaagacgacctggtgaggatatgttccgagggatctaccttccacgatcggatcagcagccgaaaacaaagaagtactgggtagatgggagaaatgccaactgcttcatgctgttccctaaaggattcagcatcacctggggttcggacgaaaggtactggagttggcgcaagctcacacaagaagagaaaagagggatcgacgacgaggaggccaacatggaggtggcgtacctcaaggacgtgtgctggctggagatccgtgcgaagctggagatgtcccacctcactccgggattcacctacgtcgtcgcctttgtagccaagctcgaaccgaacggctacggctggtccgagccggtcgacctccagatcaagtgtcccggcgacatcgacgggaagcctcgtcagcagcggaaggagagtctatggaagacggttgacgggaaaaagtggacggacctcaatgtcggggaggtgaaggcggaggccgggcaaaagggggagatggagatcgccatgctcaggttaggtggggactggaagagaggactctccctcaggtacatcaagattgccccccaaaaaccctagctagctagctagctaggttcaccggccataaacgacgacgacgacgatctacgtactccgactgcatgcatgcgcgcgtctctgctgccgtagtacgtgcaccgtaataatatgcactcaccctgtctactcataagatgaatgaatgccatattgatggccatgcatggaataatatgcactcaccctgtctactctc

SEQ ID NO: 116789 - DNA, 213 bp, Zea mays
  Clone ID: MRT4577_38001C.1
actaaaggagcaaccatggcttgcaggtaatcagaccgccgtgcgctatgaagctcccctacacagctctgccagcacatcctttgcatgcgtatccattatcatatacacagtcacctagcactatgccttatggccatcgcttgagctcgttgcgtaggataaggagctgtctggttggctgaagaagcaggtgggactgggctgctgcga

SEQ ID NO: 116790 - DNA, 814 bp, Zea mays
  Clone ID: MRT4577_38002C.1
ccggccggatctatattttcatcgctcgctgagcttccgttgttgcacagcacatcgaccgacgacgatatcgggaagcaatatgggggtggccttctcgcagtaccgcatggtggcagacggcgaggctgccagtccggcaccggcgccagtgccaccgaccggtgctgctgctgcttccggcggcggcactgaaaagaagaagcaggcggacgactcctcgtcgtcgtcgtcaacgacgacaaaatgggttcctcataagttctctgagatcgtcggtggcgcttcagatgctgagcctggtgaggaggtgttccgagggatctaccttgcactaccggatcagcagcagaaaacaaagaagtactgggtagatgtaagcaccaaggccaactgcttcatgctgttccctagaggattcagcatcacctggagttcggacacaaggtactggagttggtgcaacctcacacccgaagagaaaagaggggtcgaccccgaggaggccgccatggaggtggcgtacctcaaggacgtgtgctggctggagatccgtgcgcggctggagatgtcccacctcactccgggattcacctacgtcgtcgcctttgtagccaagctcgaaccgaacggctacggctggtccgagccggtcgaccgccagatcaagtgtcccggcgacatcgacgggaagcctcgtcagcagcggaaggagagtctatggaagacggttgacgggaaaaagtggacggacctcaatgtcggggaggtgaaggcggaggccgggcaaaagggggagatggagatcgccatg

SEQ ID NO: 116791 - DNA, 740 bp, Zea mays
  Clone ID: MRT4577_38003C.1
ccctcgaggccggccgggatcgctcgctgagcttccgttgttgcacagcacatcgatcgacgacgatatcgggaagcaatatggggttggccttgtcgcggcgcatggcagcggaagacggcgaggctgacagtccggcaccggcgccagtgccgccgaccggtgctgctgctgcttccggcggcggcactgaaaagaagaagcaggcggacgactcgtcgtcgtcgtcaaagacgacagaatgggttcctcataagttctctgagatcgtcggtcaaagacgacctggtgaggatatgttccgagggatctaccttccacaatcggatcagcagccgaaaacaacaaagaagtactgggtagatgggagaaatgccaactgcttcatgctgttccctaaaggattcagcatcacctggggttcggacgcaaggtactggagttggcgcaagctcacacaagaagagaaaagagagatcgaccccgaggaggccaaaatggagatggaggtggcgtacctcaaggacgtgtgctggctggagatccgtgcgaagctggagatgtcccacctcactccgggattcacctacgtcgtcgactttgtagccaagctcgaacagaacggctacggctggtccgagccggtggacctccagatcaattgtccccggcgacgtcgacaggaagccgcggaaggagagtctatggaagacggttgacgggaaaaagtggtcgtacgt

SEQ ID NO: 116792 - DNA, 437 bp, Zea mays
  unsure (1)..(437): unsure at all n locations
  Clone ID: MRT4577_38004C.1
cccacgcgtccgcccacgcgtccggacccacgcgtccgcccacgcgtccgcccacgcgttcgtgttgaccatgctgttgagcttgcgcactttgccctgttctttaaccagggacaatgctgctgcgctggatctcgcacgtttgtacatgagcgtgtttatgatgagtttgtggagaaggccaaggctcgtgcattgaagcgcgtcgttggtgatccgttcaggaaaggtgttgaacagggcccgcagattgacgacgagcaattcaaaaagatcttgcgctacattaggtatggtgttgacggtggagctacccttgtgacgggtggtgataggttgggtgacaagggtttctacatccagccaacgattttctcagatgtccaggacggcatgaagattgctcangaggagatatttgggcctgtgcagtcgat

SEQ ID NO: 116793 - DNA, 779 bp, Zea mays
  unsure (1)..(779): unsure at all n locations
  Clone ID: MRT4577_38005C.1
ccggccggaaacccgccacccgacaacgatcgagcacaatgctgtccacgagaacggcgcccaagaaggtcgtcggcctctcacggaccgccgtgaggggtctggctactgtccaggatggtgccccgaagcgaacatacggaggtctacgagaccaagatcgcattttccagaacctctacaaccgataccccgtcgacctcaagagcgccaggaagatgggcgactggtacaagaccaaggggatcatcctcaagggtcacgattggatcatcagcgaggtcaaggcctcaggtctccgaggacgaggtggtgctggtttcccctcgggtcttaagtggtcgttcatgaacttcaaggattgggataaggacaacaagccccgttacctcgtcatcaacgccgatgagggtgagcccggaacctgcaaggaccgtgagattatgcgaaaggacccacacaagctcatcgaaggatgtcttatctctggccgagccatgaacgcgactgctgcctacatctatatccgtggtgaattcgtcgaggaggctgctgtcctccagcgagccatcaacgaggcctacgccgctggtctgatcggaaagaacgcctgtgaatccgatacnnnacttcgacgtttacctggcacgaggtgccggagcctacgtctgcggtgaggagacttctcttattgagtccctcgagggcaagcccggaaagcctcgtcttaagcctccgttccccggctgccgncgggncttttcggatgcccttcaact

SEQ ID NO: 116794 - DNA, 358 bp, Zea mays
  Clone ID: MRT4577_38006C.1
gacaagctcgattttttttttgtttttttattccatcctggagcagcagtcgcaaagcggccaggttgaggggctgttaggcggtgcatatagcgcagcaactgacggcgatgtagcggactgcaacaagccgactccatgcctcctacgctgctgccggcagtgtaccccactgaagaaactatgtgctgcactatatgacgctggctagctagctaatttagaaatttagcggcgatcatagataaataaaattttacgcatatccatgggtgttactgtgggtccaagctacgtcctgaaggaccaatttacaatataatgagcgggtttataatacacatgggcgtgggaaaac

SEQ ID NO: 116795 - DNA, 345 bp, Zea mays
  Clone ID: MRT4577_38007C.1
acccaacgtttcatttcgaagtcaacacaaaaaacgggggcgttgagctaattatttggggcgtcaaaaaaaatcaacgcacaaggcacctccaccacaccccaagcacaaccggtcgcatttaaggccactgaagacaagaaggacgagtccacatctagtaaacaacccatcgacgcttccaagctcgacaacaaggagatcacgctcatcatcaagagcttccgtcaaaacctcaaacaaaggagggggaaggactataaaccccactccaagaaagtgtgctacaaatgacgtaagcccccccattttattgcaaaatgtccaatatctaatgacaatgac

SEQ ID NO: 116796 - DNA, 173 bp, Zea mays
  Clone ID: MRT4577_38008C.1
ggatttccatttcaatcaggctaagctttacgagtggttctggttgcagtgaatgagatatttagtaattatacgaataatacctttttaacagaaggtgatcataatacaagagggaacagagaatgctcaggtttattccttgcaagcaaaggtacaacgtttaatagtaa

SEQ ID NO: 116797 - DNA, 180 bp, Zea mays
  Clone ID: MRT4577_38009C.1
gtcaagatcatctactcccattgcactttcttttaacgcgaccaaaaaaacattgacggcgtgctaagtaatattgtctccatccccctcaacacagccaacaccatagccaatcggggcctgcatctcaatgaagacggacttggaagctagtggtcaggggccaaaactatggtaaga

SEQ ID NO: 116798 - DNA, 742 bp, Zea mays
  unsure (1)..(742): unsure at all n locations
  Clone ID: MRT4577_3800C.1
gtccgtctcagcagggccggtccttagctgttgcagcatgtcagtcgagagggcctccgtttatccaaattagcatgtgcctattatagattaagtatgtggtatagacttattcctcttctagcctctgtttcatcttcttaatggcatggacgtcgtcgacgtatgcgtatgagactcatggaggaatttgtgatctagacggcgagccaaggctaagtcgccattgttgttgacaaactcatacatgtttttggcttcgtgtctttctggaacctggatccttaatttcccatgtatttccttgtaattgttccatgattttatttaaaatattgtttgatttatcttgtttaaaaatttatttaaatttaaaaatttagtagtgaccaatgctataaacttatggagtgtttaatttcaggaatgagctagtttatcatcttctcacttctcactcttttgtttggtttatgaaatagaatgagttgatttatcatcaccttattttttatagttagttagtactaatatgaggaatgatgtcatcctaccaaatttgagaaatgggtctataatgcatcacctctttttggatagaatgatttctcaaatcaaacaccccttccncttaatgtcttgtacatatagggcctttgtgtagntntttntaacttttctctcatttcatctccacttcgacatttatcttatttagctccctctttatttttaactaggc

SEQ ID NO: 116799 - DNA, 362 bp, Zea mays
  Clone ID: MRT4577_38010C.1
tggtgctcctcaggtagcagatgtttctccaggccctcctcctctcgtgaacgtggggcctggtgagcatctggctgaagaggctgcccgtggaccagaactggcggtgctcgcgcgcctctcctccgaggagaggatcagcctcctcctccggggcgccaacatcctgggctgaagcggctacgaccactccgacggcatcgagctctacacctacatgctgcgcggagtatctttggggagatcgacgccggcctccccacacgacgaacgccgcggcatctgcaacagcgtcagctccaacctctgcgtggcgaccgccatccgctacttcacaaccgctagctaccccccactcgcgc

SEQ ID NO: 116800 - DNA, 537 bp, Zea mays
  Clone ID: MRT4577_38011C.1
catataatatgcattttgattaaagaaaggcatgctaagatcatttctttaatcagttatagacaaaatcaagctacaataatcgagcagagcttgaaacgcaagtttcttcagtgcaggttgcaaccagtgtgatctgttgctgtaaatataaataaggcaatttctgtctgcaaaagctcacagtgtttgtggttgataactaataaattgtaagcaggaagcaccattttttcctttccttaagaaatccatctctacgccaagcctgcagcctttgtgaggtctgaacaccacaacatctgtgagaacttagaaaagcggagacaagaactgagtcagatctgtccactcccttttctcccaccggttccctcgaggcggatataaacttgagcttgctccacttcccagcagacagcaagcagtcttgttatccagatctggttggatctctgtcgccgtacaccgtggttaccgcgtctgtaacctggtggcgttgggcgatagagatggcgacggcggcagcgcagcccc

SEQ ID NO: 116801 - DNA, 362 bp, Zea mays
  Clone ID: MRT4577_38012C.1
ggggggacaacaacccttgttagctgggccctgctttaccattcaaccaacaaactggtttctttcaactgggcaaactacccaaagtttgatcaccgaaacacaaatcaagcagcttctgggcctaaagaacaaccttaacccggggctgggggcattacaagccctaccataatacaacatggatacctggtgatgcccagggcattgaacggggaaaccaccaaacggggcttgcttttgttaacccagggaaaaagttgcccttttggggcggcaacatattttttgccacaacaatggagggcaacaatgcccctacgggggttttcctcttggtgggggttacaacaccccttttt

SEQ ID NO: 116802 - DNA, 368 bp, Zea mays
  Clone ID: MRT4577_38013C.1
cccttccgcggaaaggccgtccccggtgccaggtttccttatttcaccggaagaatgttcctggtagggttggcccaaggccatcaggggcggaatctcttaaaagggactccagccctgaaaaacccacaggcggtaattcgccccgccccctccaaaaggtgaaaaagggtttgggcaagctagctgaagcagtgttccaccggagcccaaagaaggggattgttgccgaaccttcaccatgtgtaactcctaaccaaaacattcaaccggccggggaaagcagggtttcagtaccatttgtggccgtccaaaatccaggggtcgacggttcggggtcgaaaccagtttaccaccaccaaagccct

SEQ ID NO: 116803 - DNA, 276 bp, Zea mays
  unsure (1)..(276): unsure at all n locations
  Clone ID: MRT4577_38014C.1
atttnttnagtgnnnttnnttttttaggggtttggtttttttgaaggtaaaaaaaataagctactgactgataccatccatgtgtttttcgaacctattaggaactattaagttcatgttctgcctcattaaacgcagagttncngatggtatttgcaaatttagaaccaggagttgcctatgagtaactctcggaccattcatttaaaatggtgtggaggctgcctaaacataatgctctatgacatacacgattagaggttaggttctaaagtt

SEQ ID NO: 116804 - DNA, 205 bp, Zea mays
  Clone ID: MRT4577_38015C.1
catttatttacttatctatgggctttgaaactagaaacaatgcaacatatatcgactaacagaataaagcacaccatagcagatctatgttgcattgtttctagtttcaaagccatttatttacttatctatgatttctacacacggcctaataatcttgctaaggccctgattgaatggaaaatatttttttgggagttttagg

SEQ ID NO: 116805 - DNA, 369 bp, Zea mays
  Clone ID: MRT4577_38016C.1
cacgcgaggtgtctggcgggatgtacgaggggcattacaatggggtgctccctggatgaccgactggcgaccatagctctgaccatgacttccgcgtaacttttccagcatcgctgtgtgcattgcagctcgctatgcaaaatgctaggaaagatataacgaaggctagaagagacgaagctgaatcgcaggctcactagcaaggctctaaacagggatttgaacgccgtattaatagtatgatacgtactgtttaggggactgctgaggcggaagatgacacggtcaaggccctcgtcacggaggttgaccgcgaggcacttgatctgacacatgatccgaacctttttgccacactttgcaaggaag

SEQ ID NO: 116806 - DNA, 308 bp, Zea mays
  Clone ID: MRT4577_38017C.1
ggggaaaataggaggcttaattttttaaaagccaaaaaaggactcaatttttccacaaagggaagggataaaacaccctcaagtgccgcgaaaaaacaaaaaaaaagctgggggcagaaattccaaaaaaagaaaaaattttggcttggagcaccctatgggcccccccccatgggaattggttcggctgcaactcctttattgccttttctttttttcccaccaccccttttttttgttttgggccccaaagaaaaccaagcctttaaatttgaaatgacttaaaaggaaagggggggcttaaaccc

SEQ ID NO: 116807 - DNA, 658 bp, Zea mays
  Clone ID: MRT4577_38018C.1
tcggccgggacagtaccgagccgtcggggcccaaaaccccctctccccattgcacccacctcgtcctcggcgtgtgcagaattgggaaaacgggtgagctccagccgccgccctttggccctgttatttcaccgtgtttggttccggggaaatgctcgtttggtgtcgccggagcgtctgggtgatttccgtggcatcgtcgagcgaatagggggctctgacggtgagcaattcctcactggcgttggtgtcacgcgacaggtcctccgcacatcgtcaccggggccttactgcttcataatccacgacatgttactattcactgtcagatgcctactgaatctgaatgtaagttggaatccaaagacgcctctcaaggatctgctaaagacaacattgacgtatcagcacaagacatacaaagaagttgtgaagagtcaaatgtcataggcttcaacaacgagttaatcccatattccctgcctcgaacctcaaggtggcggtggttggggtggtaagacagctctcgtctagagccctagtcgtagatgtattggaagtcagaatacatatgtaatcgttttgaggccctagatgtccttgctgctgccaaggaatgttaatatctgtatgtcatatgtgtgggttgggttggtgc

SEQ ID NO: 116808 - DNA, 501 bp, Zea mays
  Clone ID: MRT4577_38019C.1
gtcagcttcgtcccgaagcgatcttggtaaaagacttattcgtgttgccaaaaaaaaaaaaaaaaaaaaaaaaaaaaaaaaaaaaaaaaaaaaaataaataaaatatatatatataaaatgtaataatgaaaaaaaaaaaaaaaacattgtgatgtgggcggtcaccaataatatatgaatcataaaaaatctttgattttaaagaacataaaaaaaaaaataaaaaagggccaaaaaaggacctaaaatgaaaaaaaaaaaaaaaatatttggccttgcctttttcaacgtctcgaaagggaaaaaactgattatatccacaacattggcggcctttttagcatgctttttaagggccctaatcctcttatggggagatggtttcaatttcactggccctagtttgcccactctgggcttgataaaagcctgccttttcctttttaaattcatttggggacatccttttttaacctgttagagtttctgataaaaggccc

SEQ ID NO: 116809 - DNA, 262 bp, Zea mays
  Clone ID: MRT4577_3801C.1
ggcaattgtaataaactatcaagaaggccataaagcagcagctgttcttccagtcctggatttagcccaaaggcagaatgggtggttgcccatctctgctatgaacaaggttgcagaagttttacaagtacctccaatgagagtatatgaagtagcaactttttatacaatgtatatacgaaagccagttggaaagtatcacattcaggtctgcactactacaccctgcatgcttcgaaactctgacagcatactggaggcc

SEQ ID NO: 116810 - DNA, 355 bp, Zea mays
  Clone ID: MRT4577_38020C.1
agaacaaacagggctttgtttttcaaaaacccccaatataaattattggcccaattatgtaaaagacaggggcgacaaatccccctcattaactccaaaatgaccggctgttttctaacaacaaaaaatttataaaaagaacctgctggtgaattaatcccttttccctctcaaaaaaaactttatctatgggggagcctatggtggacccaaacatacttttttttcacttaaccagggaaactaatgcccccccagggactcccatatacttggccttgtctttcccagcccgggggccagccgggtttacataatcccaggcccttaacctttagccgtttgagccaaattt

SEQ ID NO: 116811 - DNA, 406 bp, Zea mays
  Clone ID: MRT4577_38021C.1
attcggctcgaggcgcgtgccctgcatcgatctttgcccggaataactagattaggcgcgcacttactgaacgatcatcatctgcacatgcactgctactgtgtatatatatgatgatatacggactaaattatatacatcatatatgcacacgtacgggcaagttatatatacatgcatatataacacaaacatatacataagcgtgcatgtgcaacttaatatgcataagctctggccgattgtgatatacatggaactgcgggggttgtgcattattttgtaaccatgtaccagcattataggatgataaaccagggggagagttgtggccttggtggggtctaccgcttgaagaactgactaatgaaactcatgaatagagtgcctgtgtcctaacctgcac

SEQ ID NO: 116812 - DNA, 485 bp, Zea mays
  Clone ID: MRT4577_38022C.1
cgctgtatgcctacgacgaccaacaccaagccttaactgataactggtcaacgtacagtccgcggaccggtcatctcacaataaccagctgcactatagcacataagtctcatagctatgagtatggtttagcagaatcgagggcgtgcaccacgagcccctaggaaaacagggctaagtggccctattcagaaggccctcgtaacaggtgcccaaaaactgaacagagctgaactcgaagtagcctgtgaagattttagcaacatcatcaatactattcctacctgtactgtattcaagggcatattgccaagcggggttgagattggtgttgtctccactaccatatcgtcgagcaaagactggtccatgagtgcggaatcatgctttaagaacaagatagatagactgtcaagggtcaaccacaagaacttcatcaacctccttggctatcgcctagaaaatgagcctttcacgagaatgat

SEQ ID NO: 116813 - DNA, 434 bp, Zea mays
  unsure (1)..(434): unsure at all n locations
  Clone ID: MRT4577_38023C.1
agcgtactccgtggcgctcctccgggggcccccgcttcccgccggtccgccccccggcctcctccctccgggcaaccttcggcaacctccccttcaaaaatcaaccaaggtcctcccggccccttccaaaggccccttccaaggacaaaatcggcccccgggaacaatttgttcgaggacctcaaaacgaagtgggaccccgttgaggacaacccaaccgtcctcttgtacggccgcngcgccgtcgtcgccctatggctgacgtccgtggtcgtgggcgccatcaacgccgtgccgctgctccccaagatcctggagctcgttgggctccgctacaccgggtggttcgtgtaccgctaccttctcttttaaggaaagcangaaagagtttggcgccgacattgagaactttgaagaaaaaaattaactggaac

SEQ ID NO: 116814 - DNA, 468 bp, Zea mays
  Clone ID: MRT4577_38024C.1
tggggttttttttttttttttttttttttcttttttttttttttttgggtttttttttttttttttttttttttttttttttatttaaaaaaaaaaaccgaaaccccgggctaggggaaaatttataaaaggggaaattaaaaacctttttttaggggggggaccctttaaggggggcgggggcgggaaaaaaaaaaagaaacccccggggggacgggggggggaaaccccagaaaagggaaccggagcccggccccgtaccaaaattgggaaaaaggaggcgcattaaagcggggggaaaacatggtcataaagggggaaaggggaaaatgggtaaccattaaagaaaccacacaacccgggggccaaaagcaaaacgcgtaaaacccggggagacaaaaagaggggaaaactaaaatgaaaaggccccgcgccccctgacggggggcaaacccggaaaccgggggg

SEQ ID NO: 116815 - DNA, 484 bp, Zea mays
  Clone ID: MRT4577_38025C.1
ggccgcttttttttttttttttttatttatgtttttttttttttttttttttttttttttttttttttttttttttcttttttctttattttttttcatttatttttttgatcgtacctcctatcatattggatgggcccacacaacgagggggtgccgccacacacagggaattttttgtcagggagaaccggatgcatgaaagcaacgggtgtttctgtgcgaagggccggacgaacgggctaaaacccgctaagcggataagacacgcggggctcctgttctcccgcggagcagatggccgcccagtcggctgcgataatggtgccagcagctggccgggggcagaccggcctgccgaatgaagctgcgctggagcggggacaacctgccgtatgaacctggtgtgcaacagccgttggggctgggctggaggggccccccccatagccgaacgggccttgggaaggaagaagcttctgat

SEQ ID NO: 116816 - DNA, 341 bp, Zea mays
  Clone ID: MRT4577_38026C.1
cccgggcacgcgggccgcctgtatacgtgtacggacgtagtagatgttgcgtatatgcgcgtacgcaccgtatctttttaattctccttttatgatttgccgcaagtacatacatacagacaaaaaggtgtagtgttgacaagtactgtgcggagcggagtagtagggatcgatgagcgcggaggcaggcatgtgtgtgtgtgcgcgcgcgcgcgctagattgctagtgaggtggtataccgtacgtgataggctgatagctaggcgttgattctcgatcgtgtggcacgacgtgtcgtcgtgacataacgtgcatggtatacgcgcgtatatacattccc

SEQ ID NO: 116817 - DNA, 836 bp, Zea mays
  Clone ID: MRT4577_38027C.1
agatatgcagcgccatacccgtgcagtctactccatttttgttcccctctccggtggcggcctagcgggggtgtggtcttcctcgcgtcgcctcccctcgctctcatccggtcatcagtttgaggtttcaacctatttcaccagagctgattggactcatggatgggaacaaagatgaggcattgagatctgtcaagcttgcaaaatctgcatttgcatctggggataggcagcgcgcagaaaaattaattaaaattgctcaaagattggaccctggtcttccacttgatgatttgctgagcccagttgagaaggttggcatcctgaatatttctacttgcaaagacaagactgaaagaggacaagctcttttatacccaaaaacaacaaaagaatctgttggtcctttaaatgttgataaggcttacactgaggagaatattagagtggttcaggatatcaggaaaaagaaggattactatgcagttctcggagtagagagaagatgcactgtggaggaaattaggaaggcatacaggaggttatcactgaaggttcatcctgacaagaacaaggttcctggggcagaagatgctttcaagatggtaagcaaggctttcaagtgcctaagcaatgatcagtcgcggaggacttatgatcagacaggcaccactgaggaccatgaattcaatgagcaacatcccaatgtcatgaggcggggaagctgctaggcggagaaggccagcaagaagtggcttcataactatgaagaagattttgatccaaatgagatattcaggtccttttatggcacccatgataatatgttccatccc

SEQ ID NO: 116818 - DNA, 1796 bp, Zea mays
  Clone ID: MRT4577_38028C.1
ccactgtgaagcatcaccttttgttttaaaacgaaacattctgtttttctaaagcaaggctaagcatcataaaaatcctttttataaaagggagtcaaggaatggtgatcaattttcgaaggaaggaaatgcatcaattgtttagcacacaactcctatcacctaatgcatcatataaggtgataaagattttaaaacacaagggataatgcaccggggcttgcttggaataaacactacgttagtgtttgttaggtgacgaccacttggcgaccatcctttgtcttggcatttgtcagattatccatcttcaggttcgtccgactaacgatatcgtcttgcggagatgtccaatctctcattatcctggggttgacttgggtcgtcttccgcatcacgtgatcaattaacgtacctaaaagaaatgcattatgcatatgaatgcatataaacatgaatattacaaacctaaatagtgctatgcgatagcgaattaaacacctaagggcgagttgttgtacaatcttacgaaaacactagttattactatacgactacgcgcaataattacgcttctcgaacctaacgcaaacatcacaaacaacaaactatacaaatgaaatataattagcctacacaactcaccagctagttaattaaatgctaaccttatctcttgctttataaattatactacatctttacaagtgattaaaatattccttcaccacacaggcctactaatattctactcggtacattaattcagctaattgactggaatagcgaaataactcactataactgaacctggctcgataatcgcaagaactgcgaagtcgacgagagtttcgtgacttacgcaatttatcgagcaccttaatgagcatcgcactagcacattaatttattcatcgatcgaactgttctaaataattcatcagcttaccgtttcaacagctgacacgaatccgcgagatcggtagcgattttccgatccagccaatttgtcgagcgcttggcaggtgtcacacgaacttcatgccgctaactttgtcttcacccgattcttgggattctttgatgacgcacggaatgatgacgatcttcgattgaagtcttcgaccgagtacttgataagcgatgcacagagacctcgcttacttttgtctacgagatcgacgatgtagttgggaattaaagttgagcaaaccgatagagcgcgcagcgagctggagctgaagcgctgcgatgggcaaagtggagcacggccagcgcacgtccaccaaagaactcgcacacacaggagctctgcggcagggaatagacagagggagcagacgtggaacatagggaacttgcggcctgcgcgagggactcggctggagaaggaagatcacggcgaggagacgcaggggacgcttcatggttgaatccagagcacgctggcgagcagggattcgtgcgcgcagccacagacgaactttgcgcgtaggaggccgacgcaggggaaactggagcagggagttggccgggcacgagcgagcagaggaagtcggtcaggccagggaactcagggtgagctcgccgataccgatgtccatggccagggcgcgacacgcccagggagcgaaggggccggggcgagcagagagaaagaagcacggcgcgcgcagtggccatggatgcagggagctgggctggagctgagcgcgcgcaggggcgagctcggggagcaggagcgccgcgtagaggaagctccgcgagctgagcgagcgccagggagcgaaaggctg

SEQ ID NO: 116819 - DNA, 278 bp, Zea mays
  Clone ID: MRT4577_38029C.1
catctccccaccacctcccctctcatctccctcacgccctctctctggtgctgcagctcgcccccccctctgctcaccatctcctccctggttcccatggtgccctccccttcttggtggctgacgcccctccctccatggagctcgcctctgctatgtgttcatgctgcaaccctgtctttccttcttccatttccacaagacccttgtgtgctctctctctctctctctcctcttggcgacgactgggtggcaggtgcccaggtcttcttgggacc

SEQ ID NO: 116820 - DNA, 386 bp, Zea mays
  Clone ID: MRT4577_3802C.1
gccggttggggcggggcctttactggcccttgcccccggttttgcggcggttgcggtcggagcaagccagccccggcaggaggttaactttcaattacaacccgctaagttaccccctaaacttcaacaacggccgggccgcccccgcccgggccccggccggggccgactttgtctttgcccccggcaacaacaaccccctacggtaaatcggggtccaacaatccgttgccaaaagccaaatggggttttttttccttgttccggaccccgttggcttttttcaactctcctggggtctggctttttcgataaataggagtgggtgtaatgaaaaaaaaggaagttggtaaaaaaaaaaaaaaaggccggcccttttaaaggat

SEQ ID NO: 116821 - DNA, 761 bp, Zea mays
  unsure (1)..(761): unsure at all n locations
  Clone ID: MRT4577_38030C.1
agggtttccgaggtttctcggctcgcgtttccctgtctggtcttccccgatcgccgcgaaagcagtaaagagtccgcaatctttgccgcccccaccctcatcctctgctctcgtatcgtctcctctccacttcctctttctctcctctacaagggtatccactatccagaatcacctctatcatcaggatgcgggaggcacagttgggctcccacacgattcagacgcacggagtgagactggccagaaagcacacacacgactgggttgttctgattcttctggctgcactggtggttgccgtgcatcacgctcccccgttcagtcgatttgtcgggaaggatatgatgactgatattaggtacccggtgaaaccaagcacagtaccagcatgggctgtccctatgatctctatactctgtccctggctcgtcttcatatccatatatgttgccaggagagacgtttatgatctgcatcacgctgcactaggtgttcttttcgctgtgctgataactgcagtttttaccgatgtgataaagactgcagtagggagaccgaggccagacttcttctggcgatgctttcctgatggaaagcagtcatacgatcaggtgattggcgatgtgatttgccatggtgataaaaacttcttaaaagatgggcgcaagagctttcctagtggcccactttcgtggtcttttgctggtcttggattttggtcactctacctgtcaggcanaattaagccttcatcgcca

SEQ ID NO: 116822 - DNA, 147 bp, Zea mays
  Clone ID: MRT4577_38031C.1
gggaaaaaaaccaaaagtgtgggtccaaaacccacccacccctttacttgaacattgggtaacgaggaacaaaaatccgctgaaaaggggccaaatgcccaacagggcacaaattacaaccccttaaatttggggcccggggggcgc

SEQ ID NO: 116823 - DNA, 317 bp, Zea mays
  Clone ID: MRT4577_38032C.1
ttaatcgtcatttcgtgaagtttgattcatcgattatcaaggttccttatcgagacttttaaatccctgcacgatctcaacttgtaacactttctactgttgaacggattattatgcgatctgtttatgatctgcattctcttcaacatgaacttaataaagtctatcctcataatgcctaatctatctatcaatttttactgaactttacatctcttggatcaagatattcttcattcacttttattcttgattatccttcatgaaacatctttatctaaaatccgcattctccgcttttatatcctatactatct

SEQ ID NO: 116824 - DNA, 596 bp, Zea mays
  Clone ID: MRT4577_38033C.1
ctcttcttctccttgattttttttcctgcagccgcatggtcttatctcgtcgatgatttttccaaatctacagcagagcaccgccccagccttggatctcgtctccttccctgggattttttttaccagccatcttcctcgcactgctcttctccagcatggagcttgtgtcctccctgctcgtccctgcgcacgcgcgcgtggagcttctccaaccgcgtcgccctcttccccaagcgccagctctctgattttttctaagtcgcgtgcagtccttatctcccccaccgctcaaaactctccctgatattaattgtttcgctcggctgctttcctcgtctgctccccgcgcctgactgcagcccagccggagctaggctccctcgtcttctccccctgtcgcggcctcccagctaggcccgcgcatctctgctctatctcccacacgcgccaatcgctcctcttctccattgcgtcgcgcgctgcggtgctccagccatggccaccaagctccgtccagtcctccaatggtgcgcgcccgagtcttgctccttccacttctccctcctggcgctcggccgcttctggtttcctgc

SEQ ID NO: 116825 - DNA, 592 bp, Zea mays
  Clone ID: MRT4577_38035C.1
gggcttgcctggtacacggcaggctgtatttgcgcggcaacggcggtattaggaggctatggggctctccaacgagttggaactcgcaccccaagaactgcgggcatcagatctccggggtatgccgtgctggggagaacgcctagtgggactgcccaagaagtccgggcttgtgtgctagccgcgcagagggtgtgggacacccctgcctgccacagtgtttgcgccaactgccactaaacttaagcttccatggaccatgtggtcaaggagaggctctgcttttcttgccagctgtttggacatatgcctcagaagtccgtgagtggagcctgtatgagtcttccacaaatagcgtagccgcagccacatgatattagtgagagtacacttaggcagagtcatgaatctcttgcgtcctagcagcatttgaaggaaggacttacctaagagctgcagatggaatgttcggtaacacaaccatttatatctggaagcacctgtagagccctgctaatgtgtattcctaaacccgagaggattataaatatatcaaattgatgggtcggcagagctatcactaattctggat

SEQ ID NO: 116826 - DNA, 283 bp, Zea mays
  Clone ID: MRT4577_38036C.1
tggacagctacgggaacggcgactgccgcgcgcgctacgacaggttcttcgccgagcgcaccaacatcacgatcgagcactggcgcaagggcgcgcagtggttcgagatggaccgggccctggcgctcgaggtcgtggccgacgagccatacatccagatgttccgcgacttctgcgtcgggcggtggcgctgcctcaccgacgagcactacctgccgacgctgctcaacctgctggggtgggcgcgcaacgccaaccggagcctcacgtacgcggactggaa

SEQ ID NO: 116827 - DNA, 475 bp, Zea mays
  unsure (1)..(475): unsure at all n locations
  Clone ID: MRT4577_38037C.1
ggttcnnnattgaatgggggcttcaacttcnncatgcnagcaaccggnngcaccgcgtatcccgtgctggtggcgttttgccggntttcttttcttcccctgctggccctcgggttcgggtcctgcgaaacggggggggggggcaacagcgccttgcctttcctagctgggtggatccctcggccttcttggcggcgtcggcgggcttggccttgtcggggtcggccttctcctgctcgagcctcttcttcagcttctcctgccgctccctctccatcttctgggtgtgggtgctctccttggcgcgctcctcctggctgggcccacgccccttcccgtcgctggggaggcgccggccgcccggcgccgcggggggcgccngggcgcgccggcgcccggggggggagggctgcgctgtccgcgtcgccttctcgtgctctcggcgccncctcgggttgnctctggctggggtgcg

SEQ ID NO: 116828 - DNA, 762 bp, Zea mays
  Clone ID: MRT4577_38038C.1
gccgggcttggccgccgcccccctgcccatctcctcctctctcaattcttgcagccaccaaaccctagccccccccctctcaatcccctcctcccaggtgccaatccttgccgctcggatcatcgtcgtcgtggtgcgagtcttcaatcgttttggtggagggaagaagggaggaaggaaagggggagaatccaaggtggtggacttccggatcgtacttagggatttgcccgaacttccggtaaagatttgacaccatacttgggagagaacgacacgtttgagtcgaggacgactttgttgcaagaaggggaagatgatgaggacatcactattattgatacaaccacaccagtgacccctacaccattcgtagctaatcaaggaccaatgacacgagctcgtgcacgtttttgggaggtgaaccatcttggagtggagaaaacaacaaagcaataaaagttgttgcacccgagataatttcgtaactgcggcaagtgcatgttaaagagggcatatctttcaactcccaaggttgtttaaagcaaataagcacttgttggaaagctctcttcgtctactctctagtggatcaagaatcaatgagagatcagacacgaagcgtccagaaactgccgagtgaactgctctacccaagtcaattttcgtaactgcagcatgcaccaaattaaatggagcataactttccactcccaaagttggtttagtgcaaataactacttgttggaaagctctcttcgt

SEQ ID NO: 116829 - DNA, 399 bp, Zea mays
  Clone ID: MRT4577_38039C.1
ccggggaccgaagcctgacccaccgtgtttaaagtcaaatttgtccaagcttgctagtgcgggttctttgatctcgaggagcatggcccaccataaggaggagctgtctgtgatggacaagatcttcgagaagtaccacggaggtgactcctcggcgtcgtctgactcggacgacgagaagaagaaggggtcttccttggcgtcgagcacggaggccatgagggccaagatctaccgcctattcggtcgcgagaggcccgtccactctgtcctcggcggcgggaagcccgccgatcttggcctatggaggaacaagaagatctgaggcggggtacttgttgaggacacatgcatctggctcctgagcgagggtatggagtacgatctgcttaccttggt

SEQ ID NO: 116830 - DNA, 176 bp, Zea mays
  Clone ID: MRT4577_3803C.1
acgggttctccggggttcgggatcgtgggtgagctgatccagatggacgcgtctgatgtctaggaccgctgattccacggtggtcatagcctgggccacggacgaccactgcactacacaacgactttagcacctactgtgaggttcttgaatacaagatcatgctcgatcgggag

SEQ ID NO: 116831 - DNA, 275 bp, Zea mays
  Clone ID: MRT4577_38040C.1
attcggctcgaggacaactgatctttttacatatttaccaagtctgcagcggtggcgatggcctactatagcatgaatgccatggggatacagtctacgcacagggaagcgacacagattgtatatcattcggctccctggagcattacatatgcagggctggtcaccaacaatgatggcctgaatgtgagactcactggtgctgctgcgattgccataaaggatggaatgtcatttcacaagaaggaggaccaatgcatgtatcacgcgaacta

SEQ ID NO: 116832 - DNA, 728 bp, Zea mays
  Clone ID: MRT4577_38041C.1
gtcctttgacccggcgcggcggtgcccaacctcgctgctcgtccgacgcccgtacgtcgcccttcgcgtcctccctccttactccctcgccaagtcgcccgacgatggatctgccgcgaccccaggctccctgttgtcggcgccctgcagacctacgtcctgccccctgctgcatcgatgcgcccaggcccagcgacctgcgcggctgcgccccggcagccggcgccctatggaaaccctccgcttcgtatccccgtgctgccgtgccgccagcctccgtgaggctccacgacatcagtgtccgcggagaggaggatgagcagaaagagatgctgcagcaaatgactgacggagtcagagcaatgctgggctcaataggtgacggtgcgatcaacatttctgcctacgacaccgcatgggttgcccttgttaagagcctggaaggtggcaatggccctcagtttccctccagccttagatggatcgttgagaaccaactaccagatggctcgtggggcgacgaggagttcttcctggtctatgaccgcatgatcaacactctggcctgtgtgattgcacttgagtcgtgggaaatccatgctgacatgtgcgagaaaggtttgtcattcattcgagagaatttgtggaggctagagcaccgtggttcagatgactggatggtcggtagttttcgagataaccttcccccagctgcttgaaatggcaag

SEQ ID NO: 116833 - DNA, 566 bp, Zea mays
  Clone ID: MRT4577_38042C.1
ctcgagccgaatcggctcgattagtctgttgtttccaacaatcaacctcctcagtcgccgccatcaacacagcagcagcgatgctaaatagtagtggtggatctggttctaactactctggtggcgagatcctacctccaccatttttttatctttattatctgtgattctgcaatccacatgtttgattttttacttagtttctctttgagaccggtcgccatgtttggttagcacatctagaatgcattacaattggaggcaatagctgttcactatccactataacctgaaagcttagctgttcaactgagctttctgattcttccatttttttccattcaagtatatgatattcttgtgtgctattcaatattacaaataacaaatttgcatatgagaataattaagtaaatttggccacctaatcagtaggattgtttggttggaggaatttttgtagcatgtgaaacttgagctaattagaaagcaaccactaccttctcttcagcatgaaaaaatagcttagccatttcttagagttaagcccttagccacttgctggc

SEQ ID NO: 116834 - DNA, 241 bp, Zea mays
  Clone ID: MRT4577_38043C.1
gtcgccatgaaccccatcaacatcgtcttttatgccacgcgtatcattggcaggaggcttgttgactactatgtgcggagtgatattaagctgtggcccttcaaggtcattcctgctcccgatctgaagccaatcatagatcttcagaacaatggtcaggagaaactgcttgcattctaccagatcccctttacggttctcatcaacatgcgttacatctcttaagcttacattgacagca

SEQ ID NO: 116835 - DNA, 887 bp, Zea mays
  unsure (1)..(887): unsure at all n locations
  Clone ID: MRT4577_38044C.1
gttttcttttacagagtggattgtgatacggttagcatcttgtatctagctagctagagttgggaatgcaggcgtgaccccaacacgttacggtgctccgggcatgggaagaacagtccagcccagctggtgccgttcgcttggtgcttcctccctcagcgccgttgtcctctgacccggcgcggcggtgcccaacctcgctgctcgtccgacgcccgtacgtcgcccttcgcgtcctccctccttactccctcgccaagtcgcccgacgatggatctgccgcgaccccaggctccctgctgtcggcgccctgcagacctacgtcctgccccctgctgcatcgatgcgcccaggcccagcgacctgcgcggctgcgccccggcagccggcgccctatggaaaccctcggcttcgtatccccgtgctgccgtgccgccagcctccgtgagggactcgtcgtgggggtatcatacaataacgaggcacccgaagcaccaccatctatcaaacaaaatggggtgaccgctgtacagggagaaaagctccacgacatcagtgtccgcggaggggaggatgagcagaaagagatgctgcagcaaatgactgacggagtcagagcaatgctgggctcaataggtgacggtgcgatcaacatttctgcctatgacaccgcatgggttgccctcgttagagcctggaaggtggcaatggccctcagtttccctccagccttagatggatcgttgagaaccaactaccagatggctcgtggggggacgaggagttcttcctggtctatgaccgcatgatcaacactctggcctgtgtgattgcacttaagtcgtgggaaatcatgctgaatgtngcgagaaaagtttgtcatcatt

SEQ ID NO: 116836 - DNA, 290 bp, Zea mays
  unsure (1)..(290): unsure at all n locations
  Clone ID: MRT4577_38045C.1
tnntttttttttttttttttttttttttggggggtggggtttttttttcttggagcggggaggaagaccagtttggctgatatttgatagctaaattggtcatgaccctattacacaaggggtgggtttttatataggactactcgaacatcaagggagccatagataggtgacacactacttggaccatattgggtcagtaaccttggcggttggacgatagactcttacgtgccggggcttggtttcggtggctggtcattggtcctggctgagatgctggcattccc

SEQ ID NO: 116837 - DNA, 331 bp, Zea mays
  Clone ID: MRT4577_38046C.1
gccatatatcacttctgcctctctcaaacacctccgctgcgactaatggggcattgcggccaccgaggcacgagaagcgaggcgctggcgctaccgcggcggccggatcagagccagcgcacccaccaacatagggagagcctcgcacgcaaccttgagatgcctcctaagagggacgaaggactctggagcgactactaagaagaagggcccatggatcctctggatcctgctggaccctgctatttgaagagcagatctactgacacatattactacggcaacatgcgccgcgtcaacatgaacgagaacaagctccagatgctgcacc

SEQ ID NO: 116838 - DNA, 216 bp, Zea mays
  Clone ID: MRT4577_38047C.1
gactctggggctctggcctctggtctagcctccactgtctcccagaccccaggtgctgatcggcctgcggtcttcactgtctccccagatctcccaccggggaaccctacccgagcatcagccatggcgatcgcggcgcgcgtcctgcgccgcttgccggtacacgtgtacccctcgctcgctggcgtctttctgggcagtttccccgggcggcgg

SEQ ID NO: 116839 - DNA, 601 bp, Zea mays
  Clone ID: MRT4577_38048C.1
ctcactgtcatatgttccacacagatttgctccacaggcctatgctttaacaggggagctttttacatggccgattccctcgcgagcatgatccaccgtttaataattcgccataaactatcgcaccatagcatgcacagaccttcactgacccgcgcaccaaaaccggacccccaaacaagtgacatccaaacaccaccgcgcccaagacgcctacaccaaaactccatttcacacgtatgatgcaagaaacatgaatgcctggatcatgctgtactgcacaaggttggcctatacaccgagccgcactccaacaaacaggctctcgggaacacggctcacggggatcccgaacacctgaccctgcaagtcgttttcctgccgattcttgctgtccgcatgcacgctgtccacatgatcaaagtccgcaggctcccgaacctccgagaaccctccatcacacgagaaccgtctgcaccggatcgcgcctatcgtgcgccgcgttaccaaatgcgaggtgtccaagatgcgggagtcccagatacggcaggctttgtcctgggtcccggtctccaagggccatgtctccgggtgccatgcc

SEQ ID NO: 116840 - DNA, 825 bp, Zea mays
  Clone ID: MRT4577_38049C.1
atggcgacatatttttatgtcgccttgtctgggcctacccggacttggctcatgaaccttgccccaagatcaatctattcctgggaagagctctgcgcgcggttcacagcgaacttcgccagcgcttaccaacagcacggcgtggaggcccacctccacgcagtaaggcagaaacccggggagactctccggatgtttatctcccgcttcaccaaggtgcgaggtactatacctcgcatttccgatgcttccatcatcacggccttccgtcaaggagtacgtgatgaaaaaatgttggagaagctggccacgcatgacgtggagactgtctccacactcttcgctctggccgacaagtgcgctagagccgcaaagggccgggcatggcactcggccccacaaaccggggtcgtccagacgggtggctcgggtgtcgtcccctgggatggtaaaaagaaaaagaagggtcgcggccatgagaagctgcagtccaccgctctagtcgtcgcagccgcgactaggggccggggcgaccacaacaagcgcccacggcagcagaggggtaacagcggctcatgccctgtacaccccaacagtcaccacagcgccgcggagtgtcgtgagatcatcgacctcacgaaacgcgtcagcgagcagcgcaagcagtcttccagggacggctccccacctcgtcgccgacctggcaaggaaagggtcgacgacggcgaggtggccgcgtctgaacgggacctcgggtatcattcacccgagggggtcctgaaggatgtaatcaccggagactcctactccggtggcgacagctag

SEQ ID NO: 116841 - DNA, 1489 bp, Zea mays
  Clone ID: MRT4577_3804C.1
caggccggccgggccgggaacaaatctattcttcttgggcgacaagcctaaaacctctagagccaaaaagacataaacaccataaaaaagagctcatttaccatccgcaggagctcccttccagacgcttccgctcttctctctctgcttccggcagaaatcaaggcagtattaggatggtgaccccgcgcctcttcgcgcgactctaccggcattgcgtcggcgcagcggctgcgtcatcagccgcggggcggcaccggggggccctggcagcggcggccgtggagcagttcgccggttcctccctgcctgtcggggttccaaatattttgaatcatcatttcagatactcaaccagcatttttcaaaagattggtttctcgtctgtttcaccacaacaaagtgatgatgatgttaatgagctgaaagaccacgaaagggccttagatggatcaagtgaagattgtccatctggaagtattgaaggccttgatctgtcgagagatgatttggtgaagctagttcgtgagaaggatggattgttgaagtccaaagatggtgaaatcaaagatatgaaggataaggttttgcgcagctatgcagaaatggaaaatatcattgctcggacaaaacgtgaatctgagaactccaaaaaatatgcagtacagaacttctctaagagcctgctagatgttgctgacaatttggctagggcatcatctgttgtcaaggaaagcttctcgaaaattgatacctcaaaagattctgctggagctgtcccactactgaaaaccctgctggagggtgtggacatgactgagaagcaacttgcagaggtcttcaagaagtttggagtcgaaaaatttgacccgctgaatgaggaatttgatcctaacaggcattgtgcagtttttcaaattcctgatccttcaaaaccaccggggaccgttgcttctgttgtaaaggtgggctacatgttacacgatcgcgtcctccgccctgccgaagtcggcgtcactgccacggagggaggtgcgcatgcaactgaagaggcagagaagccggaggagaaaacagcgagggactaaagttagccgtggtttagtcaaggaggattgaatgccgtttctgtttagagtttgagaaacatgaatgaatgcagaaaacttttggccgtgttcgacacggggagaaagtttagcaagcaggctggcgcctttttttttttcttgtttggaacttggaatgaaatccattttggggtttggagcaaccctgcatgtcgtacaacaccttctgcctgctagtatgaccgttgaccttgagggatgggcatgaggcccttggccgatactaaagagctgtgctgccgtgatcggcttactgtggcttaaaaaaaaaaaaaaaaaaaaaaaaaaaaagtctcgccggtgaccttgagggatgggcatgaggccctggccgatactaagaaaaaaaaaaaaaaaaa

SEQ ID NO: 116842 - DNA, 386 bp, Zea mays
  Clone ID: MRT4577_38050C.1
acgaagctcggaattcggctcgagaaaactggagcggtttacctggctaccaacggcgtgagacgggctagcaaggccatgaccgagcgggaagcccggcaaacccccggccacagcgaaaaatcgaccagggaagagagtgtccagaagcaccacacaatgcccgagaggactaacaaagacggcggcatatatagccaggcaaagggccatagagcgaaagaatgcctggaacccagacaacaaaagcctgacgcacagaacagagagatcgcaaacgccctaaccagagaaggaagcaggaagcccaaaggagcgatacaagagcgagcccagagagcaacgcacaggacattgaacggtgcgccaacgcgcccagagaacaa

SEQ ID NO: 116843 - DNA, 391 bp, Zea mays
  Clone ID: MRT4577_38051C.1
tggacctttgggctgatttatgtgcttgtttatgtgcttgggatgcgttggttaatgatgagctggtgtctaagaaggtggcggtgtattagtttgcgcttgctgttactgaggttagtggtctgtatccttagcctcatcttgagggggctcctcttggtaggcgtgggatggagtcggattatggtgctgtggtggctggtcatggggctattgtggatggtattaagcatcggtcggctaagaatctgcggggttttgagcggggtgagaaggggcatacttgtacggtgtgtgatgcggttgttaaggagggatatcgtggtactgttacggaggtacctcatcgtgctaagattccgtttaattttaaggcttatgttgctgctca

SEQ ID NO: 116844 - DNA, 508 bp, Zea mays
  Clone ID: MRT4577_38052C.1
attcggctcgagctatggccaagagcttcctggcgtcgagagtgcacctgatgcgctccgcaagaccggattggccgacaagatcaagtctttaggtttccgcgtggaagatgcaggaaacgttgatattcctgttggtgtagctacgagaaaagctggagagcgccttatgagccccgaggagtgcaccaccgcatgcaagaaaatccacgacgcatctacaagcatgcccgagaccgcgataactttgttactattattggaggagaccatagcattgctcttggctctatttcaggaattatgaaggcacgtcctgatacttgcgttatttgggtcgacgctcatgctgatattaacacacccgagacttccggatcaggacacatccacggcatgcctgtggctggtttggtcggcgaatttgatgcaaaatcagttcctggattatcttggttagagccttgtttgaagcccgatagcatcgttttcattggtttgcgtgacg

SEQ ID NO: 116845 - DNA, 463 bp, Zea mays
  Clone ID: MRT4577_38053C.1
aggagtttaagaggtttaagtttctacagactgaaactgaggtagatggtcgagttttagctgaggcaaaggctcacttaaatcgatgtcttgaagaactacgaaccgaattagaccgatatctagcagaagagtatgagctaggtttatcgaaaaaagaaaaagcttttcaagagtggaaagaaagtcatcagccttttcattggtttgtagagttttacggaattattcattctggtggttttgatgtcattattggcaatccgccttatgtggaatatagcaaaattaagaaggaatacactattaagggatatcaaacagaaagttgtggaaatttatatgcttattctatggaacgagcttccagtatattaaaattatcaggtcatataggctttatcattccagttgcttcagtctgtacggatggttatttacctttgcggaatatcttagtaac

SEQ ID NO: 116846 - DNA, 124 bp, Zea mays
  Clone ID: MRT4577_38054C.1
atgcgctcgtactcgattcgtcaggaggatatcttcattgctctcctgggatgaactatcttccatgccaatagagtctctgcattaagatacttctgcctcttcgtgcacacacacggcgcat

SEQ ID NO: 116847 - DNA, 255 bp, Zea mays
  unsure (1)..(255): unsure at all n locations
  Clone ID: MRT4577_38055C.1
tccggatgggcctcgccgctgccgaccgcgcggtccttctcctcctcgccgtcgccggggtcctcctacgatcggcggccgcggnacatcaagcaggagtccttcaggccgactcccgcggttccattctcttcgagaagttcggcttcggcccccacggcatggtgtcaatattccgtcaccggcgccaaggcctcctccgcgctcgctaagcccgatccgggacagctgcggctatcttccttctgctccgac

SEQ ID NO: 116848 - DNA, 415 bp, Zea mays
  Clone ID: MRT4577_38056C.1
ggggaaggaagaagcccctttttttttggaaaaaataaaaaggtaaaaaagggggccggggggttcacagccaaaaaaaacaatacccggccttttggggggtacccaatacaggcccaaaaagatttaccccggtctaacctttagtttttttcccccaggtggaaaaaaaaccttttagggaaaaaaaaaaggggtaaagcccctaccaattttcgggcgggggaaaagcccccccaaaaggtaaatcaccacaggtccaaaaaaaaacaaaaggggggggcaatttaagaaaaaaccccccttttttaccgggaaaaaaaaacctttaaggaaaaatttccgcccttgccaggcccaaatggtggattttggccaggttaaaatggttttttggtccggaacccggggggca

SEQ ID NO: 116849 - DNA, 615 bp, Zea mays
  Clone ID: MRT4577_38057C.1
cttaaactacctataggctttgcttgagagtaatcaggctacaaaggatgccaatgatattgctgctctctatattgttcttgttctaatgtaaaaactacaacacaactctttacttgatcccagaaattccttctgcctcaaatggagacaatgacgagtggtcagaagtacagagattgcagacaagcctgtaggtcattatatgagccatcaaattgcgatgacagctgccacaaatcccccaaatcagttagtttaatatgaaggtattagctgtgtaacaagctaactactgctctctgcccaataagttattcaattggattagtaggttgcatccaaggttattcaattggatcagtaggttgcatccaaagtatactgctgctctctgcccaataattttttcaattcgatcagtaaattgcatgttccctgcgtaccattaaaatgggtagtgtactatccaaaactgtatgtagctagcaaaatattctcattcaaaaatcatattttttcttgtgtggttaatactggcaaaggtgtaagagtttttttagtattgatttgtgacgtggagctcctccttgtgcaaaaaaacctaaacaagaa

SEQ ID NO: 116850 - DNA, 614 bp, Zea mays
  Clone ID: MRT4577_38058C.1
atggcgcctggccccggctcggcctccttcagccatggccgcgcctcccggctccagtccgcccactcctcacgacgccctccctctatctcctccctccatctctcttctacgcactgcgcggccatctcccatggaaactacgcgcccagccagcgtccctgcgcgccgcgcgctcctcgtcttccacctctgctcctccagcgcttagctcttggtgcggatctcctggccggttcacaacttctagccagtcaagctcgtccccatggcgccccagctcggatctccctccctggcactcggccttgccccctgctcgcccctgcaaccttgccagcaactgcacccagccgagtgtcagctccaacagccagggcgtcggtcgagcagacaaagacgtggagggcgagtccgaggaggaagccgctgtgcgtccacaaagagtaaagcgccgtagcgtgaaagtgtttgggccggagtgggctgtgtaggcctgtgggctgtgttgtaataagcgtataaacctgagaacgctgagggacaagggatcgaagaacagaagagaatacgaatacctgggggctggctgttctggccgccgccatctcccc

SEQ ID NO: 116851 - DNA, 315 bp, Zea mays
  Clone ID: MRT4577_38059C.1
gacgtccctcccgacacggggaaccccgctccgcgcgctcgcattcgtcgcgccgccatccaggtcccagccggccgcgcgcccgcgcccccctgccggcggccgtgccatgccgcagcggggctatactgcggtggtccccattgaggtggcgtgcgccggcggccgtcgacgccatcagcggcgcatgagacatcgacacccgaggtcaagggccggacgtcaccgtccggatcggtgtcgcctgtcaccgcgtccctcgcgggcgttaaggtcgtgctggagttcggtcccgtccctagcgccgcgcttcag

SEQ ID NO: 116852 - DNA, 521 bp, Zea mays
  Clone ID: MRT4577_3805C.1
aaaaaacaggataataactgagttgccacaagattgtcatcaatcaatttacagtaaaacacatactgtgcattcaagatgcactagcttctccatctgtttctaaggtgaatggaagcattctcattattttggttcaagtgagcagcttttttgatattgccaacactcaagaatgttgcttttctgatcaaatctcatgatgataaccagtttagtatgtctataaatcactctggcattcagaaagaagagaggcttgtccatccttgaaaaccttaacatggcagagcattcctccagcttcatctgcaaacgttatttttctttgtttccttggtgcttcaggatgagaaacatcgttcttctttgctaggctctgcaattgaaatttcaatacatacatgacgaaaatcagttcagggtcatttttactaaaaacaaggatgaaaatgagtatctaaattgtttaaataaatttaatatttaaaatagatatgtatgaaattttatgataatgt

SEQ ID NO: 116853 - DNA, 279 bp, Zea mays
  Clone ID: MRT4577_38060C.1
cacatatgaggttttcatgttcccgaacccaaaaaaattaaacgaaatttttctccaatgtttttacaaacaacccccccagcccccaaaaatccttaaataatggggagggggagggccaccccatcaccaccttgaataattttgggggaagggcgggtttaaaaaaaactggagggcacctgactgtcctcaaaattttcctaagttcctttgttctcaagaggcaccctggttccctaaactgggctagggggggcttcccgccaaaggctaaag

SEQ ID NO: 116854 - DNA, 685 bp, Zea mays
  Clone ID: MRT4577_38061C.1
ccctcgaggctcggccggggtgcaggcgccccctccccacacagatcctggcgctgggaaccctccatccggcggccgtgctcctccagcgcgctctgctcgagctctgccgaagcttcaacttccttgcgcgcagccgcgacacatggccttgcgctcccccaaagcgtagcagtaggcctcctctcctccactcggcgaaccctgcagctgcaacaaccgagctctatcatggtgctcttctccctcgggaccaagacgcgcgacgcctacatctcgccgaggccctcgcctctaggccacccctcagtttgccgtccgagcagggagtaggagctcttcctcccatggcttgggctccttgtttcttcctgcacgtacgctgcctctcccaagtcgtgtccgaccccctgctcctatctccagccctctcctctatgttccttgcgtagaggaagttcttccccaatggccgacgccctactcagggaatgaagccaatgctccagcggcccccatgtccaggagctcgacgccggccttcttcctgtgtcccttgccgcaggagcagcaactcttccctctctagcgttcccccttcaagcatggcgacaacaacttctcctcccctctgttttcctgtgcatgcgcgccaggaacgcccagctccctccctggccgagct

SEQ ID NO: 116855 - DNA, 239 bp, Zea mays
  Clone ID: MRT4577_38062C.1
ggcaaacctcttttttaattattttttataccatggatgaaccaaatttcattacacggaagcaacaaaaacatagaagtttaatggtacatagtgtgatcctccatcgtgttaatggcctgccagattgaactgaacacgtagggttcagccaacaggcaaccaaacacttgtgtagtggtttatcaaacttcctttaatggtttatcactagtttgaataacattggttcctgcttc

SEQ ID NO: 116856 - DNA, 184 bp, Zea mays
  Clone ID: MRT4577_38063C.1
caaccaacccattccaactagtacttagcgtcaatgtcctcgtcccaagccttcgtgcgcagcaagctaactgtaacggttaccactgtaacctaaacaccactggttctggtagtcgcggtaacagtaatcacaatcgctactaccgccgccgccatacctgaccccacttacctcacactga

SEQ ID NO: 116857 - DNA, 604 bp, Zea mays
  Clone ID: MRT4577_38064C.1
gacttctatacgcccagctactatcatctttcggagacgtatctcaaaaccctatctaggtactgggctcgtcgtctaaactggatgccgatgtgaccttgcaagcagaacggaaggctctgcctgattatagtaatcacgctctcgacttcccgccctgcgcttccggcgtgtgcatggacagacctctgtgtctaaccgttgcgaggcgcacactaagtatcccagcgcgcgccgatagcgcgcgattgtgcactgccgaacggtcgggtgtcgtcgtcgccttatcacaggccgtgcgtagcatcaacatccgcatctcgtcaatgataaccgtcgggagcccatccatctttgatcaccttcaggtctgcgtcaacagctaccaggcgaaatgaaccgcacatcaagctcgctcaggcattccattggactgtgggcatctgcgacctgcgtcccggagatggacgtgatgcggatgacgtatgcttcaacatgagcgatactcttgtgatggacgtggtgaataccggtcacatgcgaccaactacgaatacgtcatgcggctgctactcaggacactcttgtgtcgtgctagtggaat

SEQ ID NO: 116858 - DNA, 321 bp, Zea mays
  Clone ID: MRT4577_38065C.1
ggatatgtctcccctccactgcgcctctccgtttccaccatggctccggccgccgcctgcctgtgggcgtgcgccgctggttccattccccgtgcgcccttcctgatccgaaggcctcgtcttctcccaatatcgctgtatcatgcgcgccgggaccgctcccgcagactgaacctctgtggcgtatgcgccaacactcgccgcacgccaacccttcgacagaacgccttcaccgagacagtgcttccctacttgccagactctggcaagtacatattctccggactacctcctgaagaaggtgtcagccggggaggtgca

SEQ ID NO: 116859 - DNA, 259 bp, Zea mays
  Clone ID: MRT4577_38066C.1
attcggctcgaggcgcatagtgcgctattcaccggcatggactccatcgcagatctctggcataaaatgctactccagcgccagagccaccaccatactgcatgatcatcatcatcagcttgggctattaccacacctaggatcgggcgacacctggctactgcatcatcatgctccagcgccctgttactcatcacgcagagggcgaccgcggcatcacggccttcaccggcatccggcccgccacagaaagagaacg

SEQ ID NO: 116860 - DNA, 318 bp, Zea mays
  Clone ID: MRT4577_38067C.1
gctaggacaagctgggccccctgccggaaccgggccagaattaatgagcggttcggcgagctcactagtcgacgggcgcgcaagaggcttgttcgtctggcctgaccgagcgagctatggtggatataaataagggcaaccttactgtacaggtatataaggaacatcggaccactgactgcttaaacagggggcaatcgggaacacatatgcaaggtatcagggtcactgttcaccgtagaacatctggagatcggaaaatttgtaatgaatgctcatgggagctcacgtaggactaaactttctatgcgtcgacac

SEQ ID NO: 116861 - DNA, 509 bp, Zea mays
  Clone ID: MRT4577_38068C.1
tcgcgatctagaactagtccctttttttttttttttttttttttttttttttttttttttttttttttttttttttttttttttttttgactggagtctggagtaaaaattacaaaaaaaaagagatttttcgtactcaattgctgaaaacgtttttaatcacaatgcatgcactcctttgtttgaagttacttatgacaagacgcgaggaacaagacaattagctggacagttttttgctgtctgggtccaaaaccaacgaccaaagttacatgactccagttgctcaacagcagaagaaaacagaagccattagcctgaatggaccccatgaaagttacccgttcttccgcgcttccggcgagggacggggcaacggattttgtgctttccaccggtccttttcattttcttgaggtgggcgaggtgggccccctcccagggcagattgaccaaattggagaagatcattccttccatgcaaacctggtaaaaagggtcccgcgagc

SEQ ID NO: 116862 - DNA, 130 bp, Zea mays
  Clone ID: MRT4577_38069C.1
aagatggccgacgacgaattctgctcgcaccgatcgatcaacccacacgcctgcggcacccacaccttcagcaggcacaagcgaaactcccaatcctccaatacggacacctgcccgggcggccgctcga

SEQ ID NO: 116863 - DNA, 202 bp, Zea mays
  Clone ID: MRT4577_3806C.1
catgcccaactgattggcatatccgagatctaaggttggcataaaaaagccctatctcgagtgccgacttgaagcccaggagtctcaagctcgcccatcatagacaccaataccatgtagtcagtactatgaaaactctgaacaaatgtttcatatgcctaccatatataatggcatcaacatatatttggcacacaaataa

SEQ ID NO: 116864 - DNA, 203 bp, Zea mays
  Clone ID: MRT4577_38070C.1
gcattcgtatgctagctcgcgtgtgcacagtgaagcgcacgcgcggttgatggttgtcgtctggaccctcactaccatcgttactatcacgatcattgacaatgttggctgataagaagagcctcgccattaaactggaaaggtggtcgctaccaacctggtacaacgagcaggatggctttgtaactgctctgttaagtgac

SEQ ID NO: 116865 - DNA, 292 bp, Zea mays
  unsure (1)..(292): unsure at all n locations
  Clone ID: MRT4577_38071C.1
tctttcacnncttcgcccacgcgttcgccaacaagcaacatataaagtgggattcagttgcaacaacagagcaacattggcgaccaatatattttcccttcttatgctccttgctttttttgcatgtgttgctaacgcgacaattttcccttaatgcttacaagctcctatagctttccttctttccccatacctttcattaatgatagcgttagtatgtgaaaacccagcttttcagtcctattgggttcaacaagcatttgctgcaagtaacatacctttatctcccttt

SEQ ID NO: 116866 - DNA, 277 bp, Zea mays
  Clone ID: MRT4577_38072C.1
cggacgcgtgggccgggactggggggtcgcgggggactacgacgaggcactgcggctcatgctgcaacaggaacagccgcgggattacgcccccgccactgaggagtcccacaccgcccacgagcacctgccggcttttttcggctacgccggactaacctggaaggatcacgaggtcattgacaagacgtacttccggcctgcaaaactccacagcctcaagggggacgccacccacgcaaggaaagtgctcaagtggaagcccaaggttgggctc

SEQ ID NO: 116867 - DNA, 486 bp, Zea mays
  Clone ID: MRT4577_38073C.1
gcctcgccagagcggggggagaacttgttttgatcatagcgtaggcgtggacgcctcgaggactttgcctctgacattgccatgagccccttctcctccaagacgagcctccgatgagaccccagtaccccacaaatctgagacttgcacggggcctgtctggagcggtggctcggtgtgcacgacaatgattcagaattcttgcaatttcccattcaataaaatatcttcatttcacccttttttggatctggcgggaagagccgctgcaaggaacgaggcagcgaatgcctggctgccacaatggtggtgctatgaattgatgatggaggaagcgaaccctcgctcttggagttgttgcctgatcgccaccgctggcgaggccagttcgtcgatgaaattcacagcattttcattttcaaccaggggttcacaaggacgttagatctcatactatgtacaaggctggagtaaacttctggcgtt

SEQ ID NO: 116868 - DNA, 1040 bp, Zea mays
  Clone ID: MRT4577_38074C.1
gggggggggggggggtgtttttttttttttttttttttttttttttaaacaagaacccaaaacgtaagtttttctggggctgtttttctttacaattgcttcagcacccacccttccctttcctcaaatggaggtggcagtcaagtattcgccggggggggggggattattatcaactgttcaggcatgtctggcaccaagggaaatggagggggttggaggggctaaattcccctccccttgctgccaaacaagcccttcatgtttaatacacctgaaaggaaactagcgttatgggttttgatcctgggcttggacctcatgccctcacaatatttcctcctttgcttggagcctttgaagggctttctttgcataaatagggatcgcagcagtagaagctgcagcaactgtaaagccgattccattgtagatgatctgatccaccgacaagaatgacccttggctagttgctacagccaagctctgtagaagtttcccactgtatattgcaaggaaagtttcatgtatggttccagccatggaaccagctatgtatgggtaatatttgacgttcgtagccacagaagcgtagttaaaaactaaatatggaaatggagaaatcctgagtaaagcaacagccttaaattgatgatgccaatctccctcgccagcaagccttacaaaagctgctttctttggccacttctccagccatctatgtatcctgcagtggaatgcagaacctataaaatacggcaacgacatgcctatgctcatccccacttcttaataacgagcgggccgaggaagaccacggcagcagctccggcccctgcaaggaagatcccaagcacggcgaccttggcccaccaccggatcgcgcggcaccgcagcaccctcgggcactccgctgccacggccgccttgatggccgccgcggcatctgcctcccccttggacgccacctccacctcctcagggatcctcacgtactcgccgcgtctgccattggcggacccgggcgaacccatcgaccg

SEQ ID NO: 116869 - DNA, 1138 bp, Zea mays
  unsure (1)..(1138): unsure at all n locations
  Clone ID: MRT4577_38075C.1
ccctttgatgtaatatatttcgacgcagccagcataccttggtagacttctcaagataaggaaacaactttcaacttggggatttacatagcgcaattgcaatacacnagagaggttggtaattctnnnnnnnnnnnnnnnnnnnnnnnnnnnnnnnnctgggcctctattttctttacaattgctgaannnnnnnnnggctagttgctacagccaaggtctgtagtagtttcccagtgtatattgccaggaaagtttcatgtatggttccagccatggaaccagctatgtatgggtaatatttgacgttcgtagccacagaagcgtagttnnnnnctaaatatggaaatggagaaatcctgagtaaagcaacagccttaaattgatgatgccaatctccctcgccagcaagccttacaaaagctgctttnnnnnnnnnnnnnnnnnnnnnnnnnnnnntcctgcagtggaatgcaaaacctataaaatacggcaacgacatgcctatgctcatccccactgtgattatcnnnnngccataaagatatccaaaagtcatcccagcaagccacatgaagggcgaagaaggtaacaaaacacttgggaataaggcgattgtgccaaaacatattagagcaatagctggtctgctgaaagttattgattcccagtgaagaataggtgcaacaaccttcttgataacgagcgggccgaggaagaccacggcagcagctccggccccagcaaggaagatcccaagcacggcgaccttggcccaccaccggatcgcgctgcaccgcagcaccctaccgaattnnnnnnnnnnnnnnnnnnnnacggccgccgcggcatctccctnnnnnttggacgccacctccgcctcctccgggatcctcacatagtcgccgcgtctgccattggcggacccgggcgaacccatcgaccgtggggacccgatacagaatagcatccgcggggtaccccggattgtactggtgaggagccgccggatcgggtggggcccgagcgggattgggctcgggttgggcttgttccggcgagctcggcgtggttgaatgctagggtttgtgtccgggtctccgggaggccggaagcgtttatgagaagaagcaggtgg

SEQ ID NO: 116870 - DNA, 425 bp, Zea mays
  Clone ID: MRT4577_38076C.1
cggacgcgtgggctgagccgctgtaagattgtattcactttatcttgcatcggtcaggagaaactaatgccaatttttgtaaacagtgggaaacttttacagagcttggctgtagcaactagccaagggtccttcttgtctgtggatcagatcatctacaatggaatcggatttacagttgctgcagcttctactgccacgatcactatttatgcaaagaaagcacttcaaaggctccaagcagaggaggaaatattgtgagcgcatgaggtccaagcccaggatcaaaacccataacgctagtttcctttcaggtgtattatacatgaagggcttgtttggcagcaaggggaggggaatctagcccctccaaccccctccatttcccttgctgccagacatgcctgaacaagtgctactaatct

SEQ ID NO: 116871 - DNA, 2013 bp, Zea mays
  unsure (1)..(2013): unsure at all n locations
  Clone ID: MRT4577_38077C.1
cttatatatatggcatgctaaggtttatgatatatgtttttctgtacacatccgggttttgtgtaatttgtaactttcacgcatgaaacttgaatgatgntatgcgtcctatacgggctatgttgatgtgagcggttgagcatnaaactattataattcaaacaagaaatgtatgagctgctgtaaggttatattcactttatcttgtattggtcaggagaaactaatgccattttttgtctggaaaaatactcgtctctctcctgttctctctctcccattcgggtccgctctcccctccaatgccgttgcctatctcccccacctgccgcttctcataaacgcctccggcctccccggcacaaaccctagccctcaatcacgccgagctcgacggaaccagcccaacccgagcccatttctgctcgggtcccggccgatccggcggctcctcatcagcacaacccggggcaacgtcccccagcggatgctagcctgatcgggtccccacggtcgatgggttcgcccgggtccgccaatggcagacgcggcgagtacgtgaggatccctgaggaggtggaggtggcgtccaagggggaggcagatgccgcggcggccatcaaggcggccgtggcagcggagtgcccgagggtgctgcggtgccgcgcgatccggtggtgggccaaggtcgccgtgcttgggatcttccttgcaggggccggagctgctgccgtggtcttcctcggcccgctcgttattaagaaggttgttgcacctattctttactgggaatcaataactttcagcagaccagctattgctctaatatgttttggcacaatcgccttattcccaagtgttttgttaccttcttcgcccttcatgtggcttgctgggatgacttttggatatctttatggctttttgataatcacagtggggatgagcataggcatgtcgttgccgtattttataggttctgcattccactgcaggatacatagatggctggagaagtggccaaagaaagcagcttttgtaaggcttgctggcgagggagattggcatcatcaatttaaggctgttgctttactcaggatttctccatttccatatttagtttttaactacgcttctgtggctacgaacgtcaaatattacccatacatagctggttccatggctggaaccatacatgaaactttccttgcaatatacagtgggaaacttctacagagcttggctgtagcaactagccaagggtcattcttgtcggtggatcagattatctacaatggaatcggctttacaattgctgcaacttccactgctgctatcactatttatgcaaagaaagcgcttcaaaagctccaagcggaggacgagatattttgagaggtccaaggccaggatcaaacccgtaacgctagttttctttcaggtgtactatatatgaacagctgctactaatctggtttcctgtgtcgactaccggactgctactaccatccatctgaggaagaggagggggggaggtgcttcagcaattgtaaagaaaatagaggcccagaagtttttcgttcttgttttgttttctgtagagagaattaccaacctcatctgtgtattgcaattgcgctatgtaaatccccaagttgaaagttgtttccttatcttgagaagtataacaaggtatgctggctgcgtcgaaatatattacatacactgcagccatgatttgcgtgttgtatagtaatgcatcttaagctaatatatatacgacgaaatcctatggggctattaggaaacatcatcgttgatgctgatatatggacattctgaaatgccagaagtgttggttgcgtttggatggttaaggaagctatattttagcccctccaaccccctccatttcccttgctgccagacatgcctgaacagttgctactaatcttgtttcctgtgtcgactacctgactgccacttaccatcttagagaggaaagggtgggtg

SEQ ID NO: 116872 - DNA, 669 bp, Zea mays
  Clone ID: MRT4577_38078C.1
tcgcgatctagaaccttccacgtatagaattgataagtaacatgataatgaatgtcaaattattacagcaaaacaactatattgctcctgcatcgtctccaaaaaactcaaactctatgatttatacgttttcgctaacctactaattgatttatactcttcacactaatttagattattaaccaagagaactagctatcaccatttctaaatccactatttttttacttttaaaactcaatgctgaaaggagattaacagagacgacatctatggcaacttatgcgttctcctgcagatgtaatacgtgctcacgttcggcacccaaatgcccgtagaccatggtcaaggtgagggacgacgtgaaccttcccatctatcagggtgaaaacatcaatgacaagacattcgacgagaagagtcatgtcttggacccatacaagatgctttaggagtacacccaattcattgtcatgctcaacctactctacgccttctccaccggcagctactccaacattcagcgtgtcacgccgtggaaacttgatgtcaccgaacatagcaagtagggtgacatgtgaaataaaattttacattcaccgagttgatttattctataaaaaaaaaaaaaaaaaaaaaaaaaaaaaaaaaaaaaaacccacgcgtccg

SEQ ID NO: 116873 - DNA, 323 bp, Zea mays
  Clone ID: MRT4577_38079C.1
cccacgcgtccgcccacgcgtccgcccactcgtccgcccacgcgtccgaaaaaaagaagggaaaaaaaaaaaaaaaaaaaaaaaaaaaaaagacaaacaatataaaaaaatccagccttacctcttagtgcatccaacctcatatctcttttattgcgacaccttaattcttttcactggccacctatttacaacttactgactgggaaatcccatcctttacccaactaaatccctttgcttcccatcctcatttccccagctgcccttctacctttcagcccctgacctatctcccttcacatcagttccgctcccttttt

SEQ ID NO: 116874 - DNA, 686 bp, Zea mays
  Clone ID: MRT4577_3807C.1
acttccgcaggaaatcccacattttctcccactaaacgcgaaattcctcgaggcgacgacatggccacgaccgagaagaagctgcacgccgtgctcgtgccgttcccggcgcaggggcacgtcacgccgatgatgaagctggccaaggtcctgcactgcaagggcttccacgttaccttcgtcaacaccgagtacaaccaacgccgcctcgttcgctcccgtggccccgacgccgtcgccagcctcccgggcttccgcttcgccaccatcccagacggcatacccacctccggcgccgatgccgacgcagactccacgcaggacccgccgtccctgtgctactacaccatgaccacctgcctcccccacttgaagaacctgctccgcgacctcaacggcgtggttggggcaccgccggtgagctgcgtcgtgggcgatggcgtcatgagcttctgcgtggacgcggccgcagagctcggcgtgccgtgcgcgctgttctggactgccagcgcctgcggcttcatgggctaccgcaacttccggttcctcctaaatgagggccttacccctctcgaagacgaggagcaagtgaagaacgggtacttggacacgccggtgacgcaggcacacgggatgagcgaggacatgcgcctccgagaatttctcctccttcgtccggacgacgg

SEQ ID NO: 116875 - DNA, 2001 bp, Zea mays
  Clone ID: MRT4577_38080C.1
tgaattcggcacgaggaccgcaactatttctgctggctgctgccgctgccggccgggattccattccctgcgctagcccggcgcccgctcgccctgcctgccactcccgccgcgtgctgcctaccagcaggccaggccaggcacccctgccctgtccgccaccagcacaaccgcgtgcgccggtccggtcggtacatgccaggatggagaccccttcgtcgacgtgcgacgagggctccgagctcgacgcgcgctcgcagtccgactacgccgacttcgacgacctggacctcccgccgcggggccgccaccgccgggacccgtcctccgacgcgtcctccgagtgcagcggggagcccgggagcccgtacgcctcctcgccgtacccgcgctggccggtgtgcacgcttcctgcgagggtgccgccgccggccgcgccgctgctcaagaggctcggcacgacgcggcgcggcgcccgtgtcggcgcgtgtgacgggaaggccggcgacggcgagctgcagctgatcaaggagaggttctccaagcttctcttgggcgaggacatgtcggggagcggcaagggggtctcgacctccgtggccatctccaacgccatcaccaacctctacgcgactgtctttgggagctgccacaggctggagcccctgccgccggagaagaagtccatgtggcggcgggagatggactgcctcctctccgtctgcgactacatcgttgagttcttcccttccaaggagatcttgcccgacggcagcatacgagaggtgatggcgacccgaccgcgatccgacatctacgtcaacctccccgccctcgagaagctggacgacatgttgctcgagattctgtacagctttcagaagactgaattctggtacgtcaatgacaaagggcagaaagacgattccgtcgcgacgccgtgccgtccggtgagccaccgcggcgaggagaagtggtggctgcccgtgccgtgcgtcgccaagcccgggctgacggagacggcgcggcgagacctgcagcagaagcgcgactgcgcgagccagatccacaaggcggccatggccatcaacaatgccgttcttgcggagatacggatccccgacctgtacaaggaagcactacccaagtgcgggcgggccagcgtgggggatctgatctatcggcacatgtcgttcccgggcaagttctcgccggagtacctgctggactgcctggagatctcgtcggagcacgaggccctggaggcggcggaccgcgtggaggcggcgatgcacgtgtggcggcggaaggcgagccagaggtcaccctggatcgcggtcaaggacctgatggagtccgacaagaacgtgatgctggcgagacgcgccgaggacgtgctgctctgcctcaagcagcggttccccggcctctcgcagaccacgctcgacgccagcaagatccagtacaacaaggatgttgggcaagcaatactagagagctattcgagggtgctggagagcctggcgtacaacatcgtaacatgtgtagatgacgttctcttcgcagatgaagccgccagaaagatagcatgagtgatcatttgttcatccttcctgcctgatccgggaaaccaaaaaataaggggtccatgtccatgatccatccacagaatgtacattatgccataacttgtagcagtagtaccatctaccaatggatgatagcacgagcagttaactctcctaggcagccatgtcttggttttcatcacaatggtccctcagtgcctttgcatcctctttttctctttcaccaccaattcaccatggatgtcagttgccacagctgtgtgattggctggaggtatcagctgaactgaagtagtagtgacttgtgaatcttttgatacagggcatgggcaacgcctgacagagtgaccggcacaagttcacagctgatatattcacaaaatgtttcaagtaattcttgaaacagagaagc

SEQ ID NO: 116876 - DNA, 643 bp, Zea mays
  Clone ID: MRT4577_38081C.1
gggtacctcgaggccggccgggaaattgatcactaccactgaagaagcgtctgacatactcttgctaccgtcgatcgctcgccgagaagcaatggctacgcgcggacgcttcgcatacggtcctctcctgcagcttaactcggccatactacacaccgccgactgagccgaaccgcctccgcgtcgccgagcgcgctccgcctcgcgaggggactgcgcgtgcatcgccacaagagagacaaacaaaataagcaaccgctcgccgcgctccaggcccaagagcatcacttcatgtgcgagcgagacgaactctgccgacccaacatatggaatacaacccgtcatcataagggtgcagatcatggaactaccaaaaatacatgtcatgaaggtgatgcaacatacaacagcctatacaagatatgatccgccatagcatgacatatcaagggaaagaaagaacccacttacactcccaatgcatacatgtcagcttgttgtatcgcgcccaatgcagataacgtcggtgattatgatatcaagcggtgacgaaagctttataggaggcactccgaaagggctggatgtatgaaagactacactcttgaccaacttcagagcatcattcctgagagaatcattg

SEQ ID NO: 116877 - DNA, 209 bp, Zea mays
  Clone ID: MRT4577_38082C.1
acatggacaacacaacattcaaaggaaacgtcatcgaagacgtttgtctataaacggttggattaggcagtgagccactaacgtgacaactcatttttatgctatgtggtctgagcagcatataatccgtacgctggctacaagcccttataggaaatactgatgcttgtacaccacgccactcttagttggcccctggtgagaaacat

SEQ ID NO: 116878 - DNA, 245 bp, Zea mays
  Clone ID: MRT4577_38083C.1
cacccatggcgtcgctcaaatgtagcatcgtcgtctgcgtgatctgcttggagaagcccaaataccgctgtctagcctgtcgcgtggcctactgctcggtagtctgcttccggaagcacaaagaacagtgcaaccctgaaactcgtcctgttgagataaaataagatcagctcttcctaccaaaaccgtaaagcctgtggaaaacaaagatgatgatgactctatagctgattttctcaatagtg

SEQ ID NO: 116879 - DNA, 557 bp, Zea mays
  unsure (1)..(557): unsure at all n locations
  Clone ID: MRT4577_38084C.1
ggcgctgcggcaggagggaagatggcggacgaggagaagctgccgcccggctgggagaagcgcatgagccgcagctcaggccgagtgtactacttcaaccacatcactaacgccagccagtgggagcggcccagcggcaacagcagcagtggtggcaaaaacgggcagggggagcctgccagggtccgctgctcgcacctgctggtgaagcacagccagtcacggcggccctcgtcctggcggcaggagaagatcacccggaccaaggaggaggccctggagctgatcaacggctacatccagaagatcaagtcgggagaggaggactttgagtctctggcctcacagttcagcgactgcagctcagccaaggccaggggagacctgggtgccttcagcagaggtcacacagtgctggaggcagactcgagggccgaattgtttctagttaggccacgctcctctgttcagtcgcaaaggtgaacactcatgcggcccagccatgggccctctgagcaactgtgcagcaccctttcacccncaattaaacccagaac

SEQ ID NO: 116880 - DNA, 495 bp, Zea mays
  Clone ID: MRT4577_38085C.1
agcccaaagcaagggtgtcatctcatggctcccaaaatccatcccacaaacctccctttttgggggggggaaagaaaaagtgaaataagggaaacccccccccccaagccgcaagcagccaatgcaggcttatttgacgggggggcaaacccggggtttttccccctcggccccggtcttgaggcccatcctgcccagcttggccatggggggaacaaatgcctcttaaaaggcgggggccttggccgcaaaaaggtttaccgggggtccggagccgcggtccgtaaaaaacccctggtcggaggccaacaggccctttttgtaacggaggttgttaaaataggccttttcaaaaaccccgggcgtggggacccccaacatggccaacccccgggggctttaactgagggggcccaccccccccaacgagcgcaggaagtccaggttcattggggggttccacccccccccctgttttaacgtttaaatcccccc

SEQ ID NO: 116881 - DNA, 265 bp, Zea mays
  unsure (1)..(265): unsure at all n locations
  Clone ID: MRT4577_38086C.1
gtctacgcgtccgcggacgcgnggaccgaggggggggggggggcattgcatgaggagccacggcccgactggagaccccaatatacgcctacgggagaagagaaggcgggaagaaagggaggagatgaaaggaaaagcaggcacaaacccgagaaggattagacaaagggcaccaacgggcgcctagaaaacagaagccatgaacaggcgggggggagtaccaatgatacctccgtcggcgaacaagggcaccaacttcagccag

SEQ ID NO: 116882 - DNA, 637 bp, Zea mays
  Clone ID: MRT4577_38087C.1
cattgggtacctcgaggccggccgggaaaaaaaggaaaagccgcccgcctcgatctacgcccgctgcagaaaaaagcggtaaagcttagcggcgaaggcgatccccaaagccaaagcgaggagataaaaactgagtgatcgcgatggcgttgctgaatgctggccctgccgccgcactggcctcctcgtcctcctcctctccccctccatgccgcgcggaacgatggagctggagatcgtcgaggtgggcccgtccagccgtccgctgcaatacgtctctcgcccgccatttccacctccaccgccgccgccgccaccgccatcattgcagcagcagcagcaaggggaagcaggggacgcccatgcggcgccgcccctggtgcagcatttcgacagcgagaagctcccgcagacgctcgtctccgagatccgccccttcctgcgcgccgccaacgacatcgaggccgagaatccgcgcgtcgcgtacctgtgtcggttccatgcattcgaaaaggctcatacaatggataaactttcggcagggaggggtgttcggcaatttaaaacagcacttctacggagacttgagcaggatgaaagcagcactaaatcaaaaatgacccaaagaggtgatgcc

SEQ ID NO: 116883 - DNA, 1010 bp, Zea mays
  Clone ID: MRT4577_38088C.1
aaaaaaagaaaaaaaaaaaaaaaaaaaaaaaaaaaaaaaaaaaaaaaaaaaaaaaaaaaaaaactatagggcgattgggggatcatcgggcggcggtcggcgcgcattgggtgctcgccggccgggccgggatagcacagcacaaggagaggccgagaagcgctttagccgtagccgtagcgataagagtgagctagctggtgcacaccggcatggcggccacggcgtactccgtggcgctcctcggcggcgcgcgcctccccgccgctccgcgctccgccctcctccctcggcgcagcgtctgccagcttcgcttccaagatgcaccgaggctctccctgctccgtgcgaaggccgcttccgaggacacatcggcctccggcgacgagttgatcgaggacctcaaagcgaagtgggacgccgttgaggacaagcccaccgtcctcttgtacggcggcggcgccgtcgtcgccctatggctgacgtccgtggtcgtgggcgccatcaacgccgtgccgctgctccccaagatcctggagctcgttgggctcggctacaccggctggttcgtgtaccgctaccttctcttcaaggaaagcaggaaagagttggccgccgacattgagaccttgaagaaaaaaatagctggaacagaataaacgctcatggaaagttttagagcgtcctttcttctttggaaagagatctattcgatcggagaaccaatgcaactacttgagtactattattgcccatgtattgtgtgctgtatatcttctgtatacaaaggaaggttcgtttgttatgtacgtagtagcattgtagtttaaatgtatcgtattatctatctgctaaattcttctttttgatttagcaaatttattgtacgtaaacaaaaataagggtaaaacaaatagagtgtgtaatctataccaatattaagaacttattcgataacataaataatatacaattgtaacatgaataaaaaaaaaaaaaaaaaagcggcc

SEQ ID NO: 116884 - DNA, 438 bp, Zea mays
  Clone ID: MRT4577_38089C.1
cccggtcatgatccacatctttccgagcgatttattggctggccttttcctcttctgaccggggggaaggctctaggggcacctcgccactctcactaatcaagtactaatgcatgatctacacattcagatcccaactgccttcgaccccttcgctgacgccaatgctggagacaatggtgcacgatcagactccaaggactacatctacgtgcgcatccagcactgtaatggccataagagcctgaccaccgctcatggatagcagaatgatttcagctacaacttgatcctcaaagatatcatgatagagcactgctgtaatggcacactgctccatgacccagaactagtacaggtcattcagctccactgtgatcagaggaacgaactctccaatctactagcacaggccgtcattgtgcagaacgatcacat

SEQ ID NO: 116885 - DNA, 170 bp, Zea mays
  Clone ID: MRT4577_3808C.1
ctcgagccgcgaaccgtctccattccattctccacttcttcagatcacctccgcaatctacgttcgcgccggtgacgaaagccagcgaccgtggccatgcagtcgccggagctctcctcttcctccccggttctcatcaatatagggggcaaaaagtacgcgacaaccgt

SEQ ID NO: 116886 - DNA, 466 bp, Zea mays
  Clone ID: MRT4577_38090C.1
gggcataaaaagactttgggataattaattaagggggcatgctttgcataagcctatagcctatataccccctggggggtgggaaacgggcgggatacctcgtactggggttttgcaagcgacatgagggggatacacaaaacacatgcatgaaacgtaccacgaggagcattttttaactatacacggggggggggggatccttaaacggggggcatgctcaagggcaatcggtactttttttttcccagggcacaaatgaatttccacaaggggtgagggggaaatgcttttaacctggggaaaacgaggctgatttccctagggggaaaaggtatcaacttttgggaggaaaatgggacaactccatgtagtctagggggaggggtggccatgaccaattttgctccattacccttttggaaagggaattgaaccaagcgcgggcatcaaaaaatgggggtat

SEQ ID NO: 116887 - DNA, 580 bp, Zea mays
  Clone ID: MRT4577_38091C.1
atacatgtatctgtcaggcctaccacctcggctcagcgatgccgtggctgtttcatctgtctttgatccgcttctcgctcggagattagctatagctcatttccctaagcatagggcaaggatcgagggcggtagacggaaagagcaatgcaggtgcaagcaatcgacaagaaggccacggccacgagctgccctgctggcttccacgtcacctcgaccaaggatgcgctcacttgccatcagaggaccaactgacgtgtgaccgcgagaggaagctgggcagtccccggccgccgccgtgggcgtagccttccacatggccggtgcttgcgtactgatctatgcctgcctgacctcgctctgagctggcctggcattgcactatttatgcaacatgacgactggcattatatattggcactacacctacttggtgaaggacgacgaagaggtatatcgatggctggggacgcttattctcgatagcgttgtcgctatgttcaacctttatctgctgtttcgcactataaaagacagtctgggtcacttctgagaagctcctgtggagcacatactatgc

SEQ ID NO: 116888 - DNA, 196 bp, Zea mays
  Clone ID: MRT4577_38092C.1
ggctaggagagacggagctccgggggtgaaataagcaacactaccttccaaccatcctccatgatgcccaagtgcgactccccgccattgccagtacataggatgctgcctaatgttccgaggatgatgcgttttctaaggacgaagaacgactgctgtgtgccacaatacaataccaagcgcagccatccaatgt

SEQ ID NO: 116889 - DNA, 545 bp, Zea mays
  Clone ID: MRT4577_38093C.1
gcaaatctttcgtcatctcttctgcggtgaataacccccagtcgcccaccagatcacttgctaaactttgttgaggggtgatggcgggttctttcgcaaaccttatcaccgacgcagggcttaaaaagcttgatgagtaccttgttactcgcattttcattactggctaccaagctggcgaggatgacttggctgtttacacttcggtttactctgcttcctcgtccaagtctctcaacgtagcaaggagggttaatcacattgttgctctcgttagggctctcgggattactgccgagggccatagtgtgaaggctgaatcctcagcagtttcttcagccccaacttcagatgttgctgaagcacatgccccaactcctgccgcagatgacgatgatgatgttgacctttttggtgaggatgaccgtgatgagaacaaagctgctgaagagggtgctgcagatgccaatgcttctggcaaggataatgaatctggggaggcatcacgtttactttatgtgttaacctggggcgatgagactgac

SEQ ID NO: 116890 - DNA, 361 bp, Zea mays
  Clone ID: MRT4577_38094C.1
ctggccggcgcttttcgctaagctcctggagacgcgcagcgttcaggatctaggcctctgggttcgatctggtggtggcgctgctccacttgctgcttcccgcccagctgggggtgctgcagctgctgctgcccctgctgcacaggagaacaaggaacagcccaacgaggagtcttgacgaccacatgggccttaacctgttctactgaaagtctgagaccctcgctacccagccattatcacattcccttatgctggccaagacttatcttacgttatgtctgtaggcttcttgttatcacaaagcctcaacgcttgagtttttcgagaagtggctatgacaatttgatgccttacccta

SEQ ID NO: 116891 - DNA, 397 bp, Zea mays
  Clone ID: MRT4577_38095C.1
ttttttttttttttttttttttttttttattttgttttttttttttttttatcgagaacaaattaaagatcagctcaagttaattaccacggcacacatatttaattacattcttattcagagatactcacacacaacacaacacacctgacaactgaaaatacgacactgactcacactgacaaaatacaacgcagggtttactcacttacatttgaacacactcttacacgctttcactctgaactggtcatttttctaaatggaaatcaacacggatggggcgcactcacacacacagagacatgtccgttaggtatggaaaccatttagtatccatcgattgcccccttcttcaaacacataaaatgatttagaaggactgagggagacctgt

SEQ ID NO: 116892 - DNA, 2323 bp, Zea mays
  Clone ID: MRT4577_38096C.1
gctcttcccccagcgccccacctcgctacgcacctccaattcccctatccccaccaacgccacgacgcagcaatcccatcaggccaccaccaccatgcccccgcctctcccgccagatccgatcgacccgtgcgcgccggcgccggcgatggacgtggcgttgccagcagccgtcgtcgccacaatcctctcccgcctcgacgtccgctccctcctcctcgccgccgccgcctgccgcggactccgtgcctgcgcctcccacgcgctcgtattcctcccctccttccacctcctcgaggtggctcttacgcacgaactgctgcgcccgctgctgccgccgaacccgagcctgcggagcctgcgcctcgactgcgctcgcctcgaggacgctgccatcgcctgcctcgcgcgcgccggcctgcacgagctcctcctcctcaactgcgacaacatcagcggccgcctgctctgcgaactgggcaccacctgcagagatctcagggtgctttctctcaactctcttggtgcacgtaggggactggtggtaaatttctctgatctacaggaattgctcaatggatgttctcagctagagaatctgagattggcacttgatttctcaacttttgatgaccccaactttggtcgggtatgggcatctgcttctgaaaggctatcatctcttgagattggttatattcctatgacaatgttacttgaacttctggtagcagttacagaaggacaacaatgcatggattatgttaagacaccagttttctttcctagccttcaaaagttatgcctaggctgtggatttcctaaccgaccatctaattggttccatatcagccgcacttccatcactgaaacatctggacctgcaagatgcaccaattgtagagcctaattcgtcatcagatctcaccaatgctggtcttcagcaaatcaatccgcatggtgttcaaatcttgaaagtgtatgtcttggtggcttctcccgtgttacagacactggttttagggcaatcattcactcctgttctggtcttcataagcttcgggtttcccatggaagccatctaactgatttggttttccatgacattatagccacttctctttgcctaacccatgtgagtctgaggtggtgcaaactcctaactaatgttgggattgagagattatcatgcaacaaggatctcaatgtactggatctcagggactgccgcagtttgggtgatgaagctgttagggctctgagctgccttcccaagttgcagactttgacattggatgccactgatattagcgaccaatcattgaaatatctaggacttggaacatgccctctaacttccttgtctctgaggggttgtcggaagcttacaaacgattgtatcaccttattatttgctggtcatgtgaaacagagcctacagatgttggatctctccagaattccaagtatcacggatgatggtatcatgttattagcaaggagcagaactcctcttattgagctcagaatgcgagaaaatccgaaaatcggggatgcctctgtgatggctcttgcttccatgcaaatagatggtggaacctacggtagtaccttgcagctgctggatctttttgactgtggtgggattacaccccttgcagcacgttggtttaagaaaccttacttccctagattgcggtggctgggaattacaggtagcttgaatagggttatggtggatgcactgtctcgaagccggccattcttacatatggcttgccgtggtgaagaattagggactatgctctgggacacctcctctgactggtatcggcataatgacgacgatctcgacgagcttgaacagtggctcttggaaggtgaaccggtttcagatgatgacaccatcatggaagaatgaggaaactgtttggtaagctggtgtcatgttcctgccatagttgcttgaccaaatacgatgtcaccaagctcgaattagctatgcgatgatctgttgtactagtagtgaagatattctcaatatatatgtatcattccttgggcagccattctgtgtgcatatggcaacctgacgttatgtatgtttgattcagatttttgttctggtccagttctcacgtgacattgacacattgaggagtcgtgctggccattccaagcataaagctagtgtgctgttttatgattttaacatattgatatttctactcatacttggcaaaattaaaaaaaaaaaaaaaaaaaaaaaaaaaaaaaaaaaaaaaaaaaaaaaaaaaaaaactcgagagagggcgccggtacc

SEQ ID NO: 116893 - DNA, 660 bp, Zea mays
  Clone ID: MRT4577_38097C.1
atatctccacatagagacagatagtcgatccttaacctcgaaataatcaaccgcccaggtggtgatggtcatactgatggatctgcaggtcatggtagctccaccatactaccatgagaccccccctcgccgacgtccagcagaggcagtggtccctctgcctacaccatggtgaatatgctgccttgcactcgtgtgctacacccaagacacaccatgcaatatagctctccgctgcattcactacctagctctcctcgctgcatgatttaggcgatctgcctgctagctacatgcatacttactcctagggcttgagctaagagcgttccgctgaatccgcagctcttacatgatgtgttcctcgcctagaacgacgactgtgtctctcgtgagcgtctgaacacgtgatgcatgtgtcagacatccagtaggatgctgtacttatatgtggactgactacttctgcctcgtgaccggacataaaggagcgtatgcgttattgacggcgtcgggtgatccactaaaggggatatataaggtggatgcgcccaaagaaataagaactaaggacccaatgtgccacgagatacgctttatggaacctgtatggtactgaatttgcgaacttctttgaatcatgctatataatgttgcctg

SEQ ID NO: 116894 - DNA, 370 bp, Zea mays
  Clone ID: MRT4577_38098C.1
gggggggagacgggggagtttaatattaaatgttagagagatttaaaagatgaaaaaaatgagaaaactacacctgaatgcttaattcgctgcagaatatagacatagagccaaataattacccctcaatagatagaacaaaaagatgaggacaattatggggggaggggagcctttaaaagtggatggtcaataatacgcccatagccgaactctgtattggtgcactccttgatgaagagggtgacctagccagtgagtgtggcacaccttatagaacgctaccaaggagagcttcaccttcagtgaacttgggcctgatcttcttgggcttggagaacgatattgttcttactcttcttggtcccac

SEQ ID NO: 116895 - DNA, 446 bp, Zea mays
  Clone ID: MRT4577_38099C.1
accacgaggggaaccacgcgtctgcaagacaagcgagcacttccataattaaaccgacagacctcagccctcacgtaatgcggagcgacgtcggaccagcgggcgcacctggagagaggatggacatgatctagaggatcctaagcgccgcgctgcatcgtagtcgtcgtcgaggcgacctcaatgctggccttcaccgaggacaccgtctgcgaggccctgaccagttagggctacgccgaggacacgcgaagtgcgcgattgcaccgtggggaccggagccgccgcgagtactgacgcggtgctctctgagagtgacgccaggaaggtcctggagaacgggcacgccgtgcttgtctgcatcgtcctggatgagtagctgaatgaggcgctgtagtgactgactcccgcatggagatggattccatgctatgcaggacctctat

SEQ ID NO: 116896 - DNA, 378 bp, Zea mays
  Clone ID: MRT4577_3809C.1
aaggggggggaccccgaatttacattgggttttggggaaatttaaaaattcccaaccccggcttgggattcgggggttttttttgaggcccctgaggacaaaaaagggacccccgggtaatttgcccttttcctaaatggggggagctcttgtgattttttggaaaatgcatttcccccttaaattggatgggaaaattttgaactggaaatttaaatcctccaaaaaagtggccaaaaacccccagaaccttttgaccttggaataaaaaaggcttttaagtttgccaaaaaaaatgaatgggccgacgtctgctaaaaaacagaggattttttttttgaaaaccagtttcggccaaaatttctggaaaaggttttt

SEQ ID NO: 116897 - DNA, 2093 bp, Zea mays
  Clone ID: MRT4577_380C.1
cggcccggccggggagctccaacctccaacctccaagcctacaaccagatcagccggtctggtactgtgcttctgtggcacgaaaaaaccgaccgttgcacggacgagaaacccgaaccgtcgaaacaatcgtaatccccaggggctcaaacgcaaaacaccgtccgctcccctcgctttcgcttcgccggcactccatccgtccatcgtggcccaggctgtcagttccgttctataaagggcgccgagaggaaaccggtggaaccctacactgagaaccgcagagacaggcgtcttcgtactcgcctatctccgcgacccaaagcgttcccccttctcccattcttctctcatttctcaccaccgccgccgctaccccctttcgacaacaccatgagggagtgcatctcgatccacatcggccaggccggtatccaggtcggaaacgcgtgctgggagctgtactgcctcgagcatggcattcaggctgatggtcagatgcccggtgacaagaccattgggggaggtgatgatgctttcaacaccttcttcagtgagactggcgctgggaagcacgtcccccgtgctgtttttgttgaccttgagcccactgtcatcgatgaggtgaggactggcacctatcgccagctcttccatcctgagcagctcatcagtggcaaggaggatgcagccaacaacttcgctcgtggtcactacaccattggcaaggagattgttgacctgtgccttgaccgcatcaggaagcttgcagataattgcactggtctccagggcttcctcgtcttcaacgctgttggtggaggaacgggctctgggcttggttctctcctcctggagcgcctgtctgttgactatggcaagaagtccaagctcggtttcaccgtgtacccatccccccaggtgtccacatccgtggttgagccatacaacagtgtcctgtccacccactctctcctcgagcacactgatgttgctgtcctgctcgacaatgaggccatctatgacatctgccgccgctcccttgacattgagcgcccaacctacaccaacctcaacaggcttgtgtcccaggtcatctcatccctgactgcttccctgaggttcgatggtgctctgaacgttgatgtgaacgagttccagaccaacctggtgccctaccctaggatccacttcatgctttcgtcctacgctccagtcatttctgctgagaaggcctaccacgagcagctgtccgtggccgaaatcaccaacagcgccttcgagccatcctccatgatggccaagtgcgacccccgccatggcaagtacatggcatgctgcctcatgtaccgtggtgatgtggttcccaaggacgtgaacgctgctgtggccacaatcaagaccaagcgcaccatccagttcgtggactggtgcccgactggcttcaagtgcggaatcaactaccagcctcccagcgtcgtccccggcggtgacctggccaaggtgcagcgtgccgtgtgcatgatctccaactccaccagtgttgtggaggtcttctcccgcattgaccacaagttcgacctcatgtacgccaagcgcgccttcgtgcactggtacgtcggtgagggtatggaggagggcgagttctccgaggctcgtgaggatctggctgcgctcgagaaggactacgaggaggtcggtgctgagtttgacgagggtgaggacggcgacgagggtgacgagtactagacgctctactggcgcggcgtcgtcgggcttgtgtgccactgctatcctgtgatctgccctgagtggctcctatcgtgttatgtttctgtcggttcttatctatctgtcgttgtgtggtttacaacttacgttgtaagactttattcccccgctttgctactgggttattaagtttggcgttattgttttcttgatctctgagatgctttgctttcaccacctgtttttttgtcatctgtgtaattgagtcgacggacaatcattttcttgcttcgagcaggcgagagcagcacacgagttgcagacagatcttactgtggcagaacagtgcacacttgaccctc

SEQ ID NO: 116898 - DNA, 1334 bp, Zea mays
  Clone ID: MRT4577_38100C.1
attgacgcctccgctgggggtgcaaaaaaacaaattagatagagctcgccgagcaagcaagcaagccaactcggccgtccgaacgaaagcgaagcgcggccaaactcactcgctaaacgctcccgttctcctccgcctgcccccaccggctccccttgtacacgagcgccggagacgccatggcggcggcgcagccgaagccggccaagaggctgggcggcatggcggaggcgctcgccatcgccgccgacctcggattccccgcctctaccacgcaggaagatcagactagctccgacaaaagcgatgatttggtgaaggttttgagggaactgactgtcgtgcagaggaacattgccaacttgcaagtggagctacagggaagaaaggatgataaaaacattgctcatttgactcatgtgagtgagatggaaaagaagtgcgagtctttggccagaatgactgcaattttgaaagatgtaattcagaacaaggatcgtattattgctcggctgcaacagccttattcccttgactgcataccagttgaagctgaataccagaaacaattctcggagctacttctgaaagcagcaagtgactatggggcattgacagcatcagtcggcgatttccagtggagccaaaactttagggaatcaccagctgtctgggggggaaatgctgcgaccgattcctgctgcacttgcttcctgcacccggttcttcgaggcaatgtctgcgatgagggaatccttttctactcttcagaaactacgcgttggccattcctctctgtcaataaccccaagtgactccagcgacgattcaaagttcttgacgccacctcagtggagagacggctcgatactcgatagctggaagcaaatggatgacatcaacctggagagcagtggaattgacgccatgaatcagaggaggttgtcttggccctccatcaagagggacccgtaggtcgcaggtcacccattggatttaggttcccatgttacataaataggattccaccttgtgtagttggcattgattctctgtgtttttaatccgatcacctgcacccatttggcatgttcgacttgtgagaaatggtctataagttccttaaatcaatgtcgtggcaaaatttgatatgttttaggcccctttggcagggcaacttttgctctaactttgttattgtttacataagccgtactaaacagtatttttaaaataacttttcattaattatattttttgttaaaaaaaaaaaaaaaagactagttctctctctcctcgtgcgatccaatgcttacggacagcgtgcatgctgt

SEQ ID NO: 116899 - DNA, 375 bp, Zea mays
  Clone ID: MRT4577_38101C.1
tcgtcccaggcctctactctacagcaaacttaatacgctcccagcccatcccatcatccactcctccgctcccctcacgggccctccatctggtcattcctgactccaacgctcctcactctctgccgcctctcgccctccgccatcatgacacgcatcgctctcttcaccctcttgctcgtcgtgatcctcgccctgttctcgcaagccgacgctcagtccaggtcaaccgtcaagccccactgtgctcctctgcacaccctcttcaatgacgctgttgctgtctttaaccataacgggtataacattcccaactcagattccgaactacgatgcaatgcatgcatctgcacagacggtgtcatcactctcgct

SEQ ID NO: 116900 - DNA, 278 bp, Zea mays
  unsure (1)..(278): unsure at all n locations
  Clone ID: MRT4577_38102C.1
ggtcgttctttttttttttttttttttttaatgcaaatttttattatttttgttagngagcaaagtgtcccgaggccgcggggcaattgtggacactttctgacacaaccatcgacggaacgggagtcaaatagaaagactgcccaaaaaattcctacagcacatacgattaaacacggggggcaccgtggagaccaccgactggactaggaggcacatgttgcaggctagacagggcaagaaggtgacgaaaacaacctgcacgcaccaagaaccgc

SEQ ID NO: 116901 - DNA, 392 bp, Zea mays
  Clone ID: MRT4577_38103C.1
tttgatgttttttccaataaggaaatatcccgcacatggacactttattacattgagcatggcttggctctaattatatatcatacatcggactaaaatgtcagatctcagtaggctatggcgaacaagaattttaaagggtatattaacagccattctgccaaatggcccagagttttatggatctcaatacaaaaaggggttcagtttttgtctacccggaggaacactggactgatctgcccccctgtagaggctctgacaaaagagcaggacacttatatgcactgcgaagatgatatgagaaccgagctctatgacatgagcctaggactatatggccgccacaacgaatttagccaaaaagaaacctttcctgcgaaccgtgttag

SEQ ID NO: 116902 - DNA, 394 bp, Zea mays
  Clone ID: MRT4577_38104C.1
ccccgggtagacctacgcgtacgctctggacgctaggatccactgcgactcccccgcgatacccaagagacacagtttctatgacgacttctgaagttttgactcgtgatgatagagtaggttacaaagatcataaacgtttgtagcgaaaaggcccaagtttttgaagcctaacacttgtctttgtaccaagtggggctatactaactgaaagtcaatggtggttactgaggagctgggtagattgaaactgatgaaaaacttgggacgccctgcaaaatttgggcgctttgatgcttcaccacccgcaccaacgctggtgcgcgtgccaatcaacgggggggggtctcttttaggggtggacaaatcctcttgagctcgggctaggtctttt

SEQ ID NO: 116903 - DNA, 745 bp, Zea mays
  Clone ID: MRT4577_38105C.1
ccgggaatttaaaggccttttatgggagagattaaattggaaatcagatttgcttcaagtggaaggttgtggacatacagcgccacctacttgacatgatgaatggttcgtgacattcaaacacagacagacaagtctggttctacctccttaactttattggctggtcatcttcgcgtcacaagggcaggagagaacaataattttgtcgagtggtgggtcaaaatcaacaaatgggtgccttcaaccttaaaaaagggtctaattccttgataatcctaggctcctggatgatttggaaacaaagaaattagattgttttcaattggaccacacgagtatcctgaggattcttgtccggattgaggaggctcatctgtggtgtcttgcaggagccaaagagctagcccgccttagaccttgttcggttacatgggcataggaggggattgaaagagattaaatcttcttctattcaattttgactagcaagggatttaattctcttcaatccagttcaatccactcctaaccgaacaagcccttaattggattacagcatgtactcatgcagtgcatttgcattcagttgtatgccagatatgctacagtggggcctgacacctgcatgttttagcttctgtggcaggcgaaagccttgcttgacaacgttgtaatccttctcggatctggcattaacaatcacttgagcagcagcagaagcactgccgttctttacaaaact

SEQ ID NO: 116904 - DNA, 186 bp, Zea mays
  unsure (1)..(186): unsure at all n locations
  Clone ID: MRT4577_38106C.1
cgtctctgctcgtcccctcggtttctcagactgnnctccctcgnngtctcatacgaaaacctctcctcgtgtttatattccctctgcgtctcctnnctccgcttctcttccacataantcctaccacggcaccaanctcgcatcgtgtggctcacgtcaagatcccccgtccccgcatattcctaa

SEQ ID NO: 116905 - DNA, 180 bp, Zea mays
  Clone ID: MRT4577_38107C.1
agggtctgtgaacccattcaatgcgtacttgaatgctgatctggtacatacaattagatgctaacacagtggattcaatggaccttacagggctgactctggacgatctaccgttttaacgggtggaaaaaagcttactataccttttatgcccttagccttatttcaacacaataccat

SEQ ID NO: 116906 - DNA, 260 bp, Zea mays
  unsure (1)..(260): unsure at all n locations
  Clone ID: MRT4577_38108C.1
aatgggagggaagggcgggttcaaccccaacacttttaaaccgacaataaacgtacgaagnttggaggcttccaaaaaaaacccccccccccaaaataagacccgatttccattcagacttggggacctcctccattttggttttgccgggggtattcttcaaaggggggttgttggggttggccttcgggggcttgtccttgtnaatggttgggccccatttgagcatgcggggggatgccgctttccaagggggtggg

SEQ ID NO: 116907 - DNA, 1280 bp, Zea mays
  Clone ID: MRT4577_38109C.1
caggcctggagggtattacattattcagaggacatatgatgtgcgtgcatgcccaatagagattgatgtttggaatgcggtggtttctcggactaaatcaaacagctggttcatagtggtaaggtctcgaaatatatataagatcggagttgttatatacctgaagccgacttcaaattcttgctcacttgtaagggatactaatgaaccacctctgtgctctgagagtgatggatcacgtttcccttggtataaacctctcgatagttgcctctttcctgcagttccgagttcaggtgaagggaatagttgggccgtctcgtggcctgaaagacttaatattaagcactcggctacatctaacaattcttccattcagtttcctcaagaaaaaattgattctgatacaagttattggaaggaccttgtttcagaaatatatctcaacgaatttgcagttaattggtctagtgttcgcaatgttatggacatgaatgcgggttttggaggatttgcagcatcaattatcaatcgaccgttgtgggttatgaatgttgtacctgttgatcagccagatacattgcacatcattttcaacagaggtctgattggggtatatcatgactggtgtgaatcttttaacacatacccacgaacttatgatcttattcacatgagttatctcttagggccccttacgaaaaggtgccacatcattgaagttgcagctgaaattgacagaatacttagacctggtagatggtttgtgctgcaagacactatagacatgataagaaagatggaccctgttctcaggtctttgcattacaagactacaattgtcaaacatcaatttcttcttgccaccaagggtttctggcgccctggcagtataggttcttagtcatgatgattccggcttccacccaaaatggtattggctccatggactcattgtgttgattcttcttattctttttacgtcgattcttctcatagcatagattagatgcttcattgaagccccatatcaagttgagtttcatgttccaattttcccgctttgttttactattttaaaaatgttttggccttggtcatgcaaatttctgtttgttattgcaaacaggttaaatcaataggttagtgctaaaaattctgttaggcgaattctattttttttcaatatatatttagctataaacttctactgtatgacatcaatattgtccatttagccatgattcttgcctcttgcaaaagaacaagtataacctttg

SEQ ID NO: 116908 - DNA, 895 bp, Zea mays
  Clone ID: MRT4577_3810C.1
ccgggaccagcagcagcatatacatatgttaatggaagaaggcatcaaagagggggcaagcaaagcagcgggagcggcggccaccgaagcaggcgaggcgaacaagagcacgacggcgatgtcggacgtgacgttcaagagcatcggcgacgtgctgaagctgctgccgacggcgacggtgatcgtgtacgaggtgctgaacccgatcgcgaccaacgcgggcgactgcggcggcgctgccgccgggtacaaggtcgccacgggggtgctgctggggctctccgccttcttctgcgccttctcgaccttcaccgacagctacgtgggcgccgacggcaaggtcaagtacggcctcgtcacgccccggggcctcctcccattcaacgtcgccgtgttcgcggcggtctccctgctggccgacgccaacaccgtggcgtgcttctacccgtcgctcagggaccagcagaagaaggtggtcatggcgctccccgtcgtcgtcggcgccgtcgccagcgtcgtcttcgccctcttcccctccacgcgccacgggatcgggtacccgccgtccaagcccgaggcgagcgcgctcgtcgcgtcgcagtagcgcgcggcgccgacgagagtcggggtcgagagctccattggtttcgcgcgaagttgtttgtatctataaatacgtacctctgtgcatacgtcatgcgtgtatcagtgtatgtatgcgtgacgttttcccacgcttgctttcatcgtctgacctgaccagtccctccaaaatcactgtgacccagagcaaggcagccagcttcacctggttcggcttaatacacttttgtatggattttcttttctatctttatctattacattaacatacagagtattaatacacttttgt

SEQ ID NO: 116909 - DNA, 779 bp, Zea mays
  unsure (1)..(779): unsure at all n locations
  Clone ID: MRT4577_38110C.1
ccggccgggctacgccgccgccacctaaacctcaggctcctctccgcacaccccaccttccctacaccgccgccgccgtcgcacgcagccgcatccgccatgggggcgtacaagtatgtctcggagttatggaggaggaagcaatccgacgtgatgcggttcgtgcagcgcgtgcgctgctgggagtacaggcagcagccggccatcgtccgcctcacaaggcccacccgccccgacaaggcccgccgcctcggctacaaggccaagcaggggtatgttgtttaccgtgtccgtgtcaagcgtggcggcaggaagaggcctgtgccgaagggtattgtctatggcaagcccaagcaccaggatagcacctacaagtacttcgagatcatcctggttgatgtggctcacaccgccatccgcaacgacccaagaatcaactggctatgcaatcctgtgcacaagcaccgtgagctccgtggtctcacctctgcaggcaagaagttccgtggtctgcgtggcaagggccacactcaccacaagaacaggccgtccaggagggccacctggaagcgcaaccagaccctttccctccgccgctaccgttgagcacacacatcttgatgctctgctactgtggaacccgccccatgcaggctctctgatagnatttgggatatttggttcatttggtaattttgctacatgtgttacttttgagccccttgaaactcgttgtctgtaccatggagcaagtgacgcgtacgagtcgatgaaaatga

SEQ ID NO: 116910 - DNA, 204 bp, Zea mays
  Clone ID: MRT4577_38111C.1
attataacacgtttttattaaaccccgacgacatcccgaatagcgggggggtattttttaaaagattattggcgaaatgccaacaagctaccaaaagaaattccataacaaaaaaagggaaaagaattcctgaggcaacgcccggggcttgaaaaaaatataaaaaggggtaaacagggaaaaaaattggaaaaatctgggctt

SEQ ID NO: 116911 - DNA, 271 bp, Zea mays
  Clone ID: MRT4577_38112C.1
cgctgggacacaaggtgctggcgagggctgcgatgccagggaagccctgaggttctggcatagctgagcagtgtacgagcactgtgtcgtgcgcgtctgtagtgtgaggtcaccctcaaactgcaccgccggccagataccctcctgaccccgaggacttggtctggtctctctggtggctacaaccccagagtgttaaggacttggaaaggaaagcactatcagagaagataacagcccgcgaacgatcaggagtggcctgcacatggac

SEQ ID NO: 116912 - DNA, 350 bp, Zea mays
  Clone ID: MRT4577_38113C.1
cggggggaatcccccccgggggttaaaaacttttttaaaatttcaaacccccacccattttttccaaagggggcctcccccccccacggaaaattgccaaaaccacattttcccccattggcccggggccccaagtttttccccccgggaaacccgttttttttcccttttcccggcgggggcccaagggttttcccccctttaattttccccccaaaaggaggggttgcccccttttaaacccccatttaggggccttaaaaaaaaaaatttttggggggaaaccccacccctgggggtcaagtgggccattttaacaagaaccccccggaaatgggttttcaatattg

SEQ ID NO: 116913 - DNA, 1129 bp, Zea mays
  Clone ID: MRT4577_38114C.1
atccgtcctggacaattccgaaaccctagcaccatccgacggccatgataatttcatcgcctcggtataaggtcactcctacgccgccgccacctaaacctcaggctcctctccgcacaccccaccttccctacaccgccgccgccgtcgcacgcagccgcatccgccatgggggcgtacaagtatgtctcggagttatggaggaggaagcaatccgacgtgatgcggttcgtgcagcgcgtgcgctgctgggagtacaggcagcagccggccatcgtccgcctcacaaggcccacccgccccgacaaggcccgccgcctcggctacaaggccaagcaggggtatgttgtttaccgtgtccgtgtcaagcgtggcggcaggaagaggcctgtgccgaagggtattgtctatggcaagcccaagcaccagggtatcacccagctcaagttccagaggaacaagaggtctgttgctgaggagagggctggacgaaagcttggtggactcagggttctcaactcctactgggtgaatgaggatagcacctacaagtacttcgagatcatcctggttgatgtggctcacaccgccatccgcaacgacccaagaatcaactggctatgcaatcctgtgcacaagcaccgtgagctccgtggtctcacctctgcaggcaagaagttccgtggtctgcgtggcaagggccacactcaccacaagaacaggccgtccaggagggccacctggaagcgcaaccagaccctttccctccgccgctaccgttgagcacacacatcttgatgctctgctactgtggaacccgccccatgcaggctctctgcctctctgatagtatttggtatatttgtttcattgttaaattttgctacatgtgttacttttgagccccttgaactccgttgtctgtaccatggagcaagtgacgcgtacgagtcgatgaaaatgattgtttagtagtgcattgctgtgtattctgtctggcacgattgatttagggcatgtttgggaacacttctttcaaaaccacggtttatattaccatagtttaccgtatgttatgacatgaacatattgtattttacatcattctaattcaacatctgtttggagc

SEQ ID NO: 116914 - DNA, 944 bp, Zea mays
  Clone ID: MRT4577_38115C.1
cctcgaggccggccgggccgggccatgtctcctctagccgtctcgcgcgcttcaccttccccaccccgccgccgccatcgcacgcccgcagccgcatccgctatgggtgcgtacaagtacgtctcggagctatggcggaggaagcagtccgatgtgatgcggttcgtgcagcgcgtgcgctgctgggagtacaggcagcagccggccatcgtccgcctcacaaggcccactcgccctgacaaggcgcgccgcctcggctacaaggccaagcagggttatgttgtttaccgtgtccgtgttaggcgtggtggcaggaagaggcctgtgcctaaaggtattgtctatggcaagccaaagcaccagggtatcacccagctcaagttccagaggaacaagaggtctgttgctgaggagagggctggacgaaagcttggtggactcagggttctcaactcctactgggtgaatgaggatagcacctacaagtactttgagatcattcttgttgatgtggcccacactaccatccgcaatgatccaaggatcaactggctatgcaatcctgtgcacaagcaccgggagctccgtggtctcacctccgcaggcaagaagttccgtggcctgcgtggcaagggccacactcaccacaagaataggccgtcgaggagggccacctggaagcgcaaccagaccctttccctccgccgctaccgttgagcacatacatcttgatgttctgctactgtggaacctgcctcatgcatgctctgatagtatttggtatttttgttgcatcgttaaattttgctacccatgttacaagctccttgaactctgttatcagtgtaccatggagaaattgaagcgaactatgtttgtggttatcctgtgttatcggtcgatgaaaatgatggtttagttgattattatctatcgcttctgac

SEQ ID NO: 116915 - DNA, 1216 bp, Zea mays
  Clone ID: MRT4577_38116C.1
tagtgtcaaagtatcatggaggaacacgctaacgcacggcatcgtgaagataacatgcgtgagcactgcccggatgccctacattaagaaacatgacaggacgttcaagctgacggaccctttccccgagcactgccctcccggcgagtttgtgagagagatccctctggccacacggattccagaagacgcgaagatcgaggcgtattatgacgagacaggaactgggctggaaatcatggtccccaagcaccgggttggaccagaggagcatgaagttcaggtgtgcatgaggcccccacatcttggtgacaacgatctcgtgctctcctagaacaggaaaacagctagcttttagatgttccggtgtcatgctcatgccatgagatactggaacataaacaggtggtgccatggctcagtaagagccgtcgtatttgctgctaaacatgtagcttgtaagttgagaattcctttccccccataaaagtttgtgatttaggcaaaaggttacctcctccctctgttaatttccctctgtacctctgctacacaagtgcatcactattggtgatcttccttgactatctgaaagctgactagtcaagattctgtgtatattcagataaccaggttcgtaataatgttcatggctaaaaacgtcgtatttgctcctaaacatgtagtttgtaagttgacaattcctttcccccataaaagtttgtgatttaggcaaaagggtcccccctccctttgttaattcccctctgtatttttgctagacaagtgcatcactggtgtattggtgctcttccttgactatttgaaagcgcactagcaaaatgattggtgctttgtgtatagtcaaatactgacccatcttcgtaaaaatcatttttctttgctgcttctggttggaatcctgggcgattcgtccgaaaaagaaggagcaaagaatggtggtgctaggaagcaagttaatccgaaagccggcaagtgaagctttcgggagggccttggggtggtgtcctcttgacaggcggatttctggatgacaagatgattgaagctgtgaagccttgttgggatagttgtctgtcttttgctggccaaactgttcaggtcttttgtggcttctgcctgtcttgttggatgtaaataagaaagtcttatgtagttcttcgtaggccaaaactttccctgttatcgtaatcaa

SEQ ID NO: 116916 - DNA, 399 bp, Zea mays
  Clone ID: MRT4577_38117C.1
aaagccaatctcagggcccattttaacgagcggatttttcacaaatgggggccggaagggaaacaaaagggcaaaacatgtccaaactcaacatgaacctggcgacccaaaggccccccccatccacatttttttttgggatacacaagccgcaacccttcatgaaaagcgggggggaaaaacccctactgggtcttgaacatgggggggatcagggccaccacccggttgctgtacccccactcgttgtcgtaccacaaaaccaacttgacaaaatggtctttcaaaacgatccccgccttggcgtaaaaaatgctccacctgctgtcaccaaggaagtcggtaaaaaccaaatccttttccacataacccatgatacccttgagtggacccgacccc

SEQ ID NO: 116917 - DNA, 222 bp, Zea mays
  Clone ID: MRT4577_38118C.1
gcgacccgttacaactaccacaaaaggcgcactagggcaccatcactggcgaacacaacccatcacgcttctgtatgctccacatcattggtgcaaccgttgctacacaagccatttacccacaatgctcacatgctgctatagcgtacattcatgcgccatacctataaccagcagtgtctttaatgagtgaaaccccaattgttcaaccctacaggatcc

SEQ ID NO: 116918 - DNA, 160 bp, Zea mays
  Clone ID: MRT4577_38119C.1
gttaccctgtaccaacatttacttcgggatagaaaggggggggcttattaactaacataataaccggggataatccctcatttctagcgcaaagaaagacaattttcaggtcaaagtccggaatatgggcaaactcacttgagccagggattgattgaac

SEQ ID NO: 116919 - DNA, 618 bp, Zea mays
  Clone ID: MRT4577_3811C.1
gtcccgagaaggcaacaaacaaccacactgattgaggcagttcgtgaacaagccgtcacacccactcgctgctgaaccaggagttccatccatcgccgctcactcccacgatcagcgtcgtcgcttatccgcaaatatctctcttcctctttgcagtcggcaccatgggttccgacttcaaatcgatccccttgatcgaaaggccatggtattgatgagtcactgatgagggaagtcaggaatgtaacccgtgaattctttcagcttccttatgaggaaaaattaaaaattaagatgacacctcaaagtggatatagagggtatcaaaggataggggaaaatattaccaagggtaagcctgatatgcatgaagcaatcgattgttatactcctattagacctggcaaatatggagatctcgctaaaccaatggaaggatctaacttatgaatacccatcaaattttgaagtactgctggaaaattatatcaaattatgtagagaatacccatcatttggtactgattatatcaattacatttcaagaaagataatgcgaggtatagccttggctttgggaggggcaattgatgctttttgaggggatacagctggaga

SEQ ID NO: 116920 - DNA, 296 bp, Zea mays
  Clone ID: MRT4577_38120C.1
actctgttttttccaggcttatagaaaatcgttacttatgagatggagaaaagctactgccgcgtatgatccaaccttgagctacatcacgcactcatacatcacactatatacacaaatacgacgctgaagctctacactctactaatagcatgactttatggcatagatctcatacttagcagatataacagcagagctctagcagaacgacagtgaggagctgtatgacaggattctttgttaggagatccagacaaagctcgtatgactgaagctcttgcaatagaatattg

SEQ ID NO: 116921 - DNA, 245 bp, Zea mays
  Clone ID: MRT4577_38121C.1
tacagattgggggcgccaaactaggcctatactaaaagttgccatttgaggaaaacatggttgatagccttcattgggtgctttatttgactagactactctggattacattatttgctcccctttaacggttcccatcgattagctagcttcatctcaccttcaagaaaaagagtgcccctgctaatttgcagccagatctgaaggtgccgacacatttgttaaaaaaaaatacttcttatacc

SEQ ID NO: 116922 - DNA, 272 bp, Zea mays
  Clone ID: MRT4577_38122C.1
cggggcccctatagagggcgcgcccttttttatcttttgatgtatagcgaaacgtggcagaacgcgcccattggggggtccatcacaccggatatagggcgcagtcctgttgaactgcgcaagcaaaagcacgaagaaaacaaattggatgcaaacaacagcctgcaaaagcccaaggtggcatagtatccataaacaacctgaacccatgtctgtataagatatctacggcataaaaggaggcaaagaaatggccgagaatagaaacatac

SEQ ID NO: 116923 - DNA, 837 bp, Zea mays
  Clone ID: MRT4577_38123C.1
cctcccccttcccggattcccaccctccacctccaaacgcgcacgcacgcgtccacgaataaaggccgagggcggcgagccaggcccaatcgccaaaaaccctagcgccgatccgatccgatcgagctctgcctcccctcccatggcggcccccccgagccaggcgagcctcctgctccagaagcagctccgagatctagcgaagaaccccgtggacgggttctcggcggggctggtggacgacggcaacgtgtttgagtggcaggtcaccatcatcggcccgcccgaaacattatatgatggaggctacttcaatgcagtaatgacctttcctcaggattatcccaacagtcctccatcagtaaggtttacttctgagatgtggcatccaaacgtctatcctgatgggcgtgtgtgcatttctattcttcatccacctggtgatgatcccaatggttacgagcttgcaagtgaacggtggacaccagtgcacacagttgagagtatagttttgagcattatttcgatgctctctagtccaaacgatgagtctccagcaaatattgaagcggctaaggactggagagaaaagagggccgagttcaagaaaaaggtgaggagccttgttcgcaaatctcaggaaatgctctgaaaaaggaggatcatatgggggagtccacaagcgctgcaattctcttgctttcaccaaatggggcacctgatgccagcacttgcacttctcccctgtttattttccgttcagcgtcggtcgaatggtgatgttggtcttgtctctcgagacactttgggtgctgcctattatgaactctcgattga

SEQ ID NO: 116924 - DNA, 455 bp, Zea mays
  Clone ID: MRT4577_38124C.1
gcccgaaaacaaaaggtgcatccacttcgtgtgccggttacaagattatgttaggaattaacttagggatgccttgtcctttgggcaaacaaagggccgtttcaggggagggtttcacaccttccaaaaggaagggacccccttcagagtaccttgtattcccggaatattgactgggcttttcaccttaagccttttgggacgaaaacgtggggcttttttttgtactccaccttgtcccttttatgcatgatcaaaagggttttttgacgatggatttatttattcccatccgggttagatcattaatcagccgtcgcttggatatttgggtgccgatgcccaaacttctctttatttgggcctccgcttgcttgatttcgtttgcgaactccggtgacagggtcaaatgctcattggtttccgggacttgcagcatcaacggggggaaacat

SEQ ID NO: 116925 - DNA, 220 bp, Zea mays
  Clone ID: MRT4577_38125C.1
ctcctcgctcgacccactcctactcccacgcctaccagttttaccataaacccttactaccactaatcacgggactataacattgcgagcactagcccaacatcacattgcatcaccatactaaaataccgtccaacttcttcctcataatcaaccacacgcattccaatagcacctaccacttctaaatcagctattccactcccgacaaacgcaccct

SEQ ID NO: 116926 - DNA, 291 bp, Zea mays
  Clone ID: MRT4577_38126C.1
agaaaaaaatgggcagacattaatttaaaaaatcaaatgcaaagacagttaaaaacacggaacaaaagctgtaagaaacgcaaaaggtagtaatggagggagaaactagacaccactaaaaaggaaaaaaaggtgaaagagagaggaaagctctcgttcctagcttccttctcttcaactaagcgagcgaatccaacccatcccatccatttctcccttccctgttcacggattccaatccttcctccacaccccaccctcggacgctgggcgacccggggggtccggacc

SEQ ID NO: 116927 - DNA, 282 bp, Zea mays
  Clone ID: MRT4577_38127C.1
aatctttgctgcaactcagaaagcattcgtcccttggcggcgtaacaagcttctaggtttgtggggctagagggggcgggggggaaaaaaaaaaggaaaccattttgaattgcctcatattttcggttggttaaacccgcccaaaaaggcctgggttcctattattgggcgggcaattctttgggacctcttcggggaattgtttggcccttgtccctggggggcccttaaactgacctttggcaaaaacgcttgttataccccttgatgtttgcgtatatt

SEQ ID NO: 116928 - DNA, 368 bp, Zea mays
  Clone ID: MRT4577_38128C.1
cctgcacgtggcccggccggaatagcttgctcgaccggctctctcactagtcggcggccttccttacttcatggtcgtggatgtctcgcaactgcggtggcaactgcaagagcgacccctgcaactgctgatcacatcgatcgaccaccatggatatgactattatctatctagcttgggggggaggctgaacaacaataagccagggcgcgctggctgccatacatagggattgcgcggcgtgcgagagagagagagaaactatgttcttcaacctgctatctctttttgcatgtatggcgttaggccttgttctcatgtgcttacgcgcgactaccagcatgatggatgatcctgatgcacatggt

SEQ ID NO: 116929 - DNA, 110 bp, Zea mays
  Clone ID: MRT4577_38129C.1
ttttgggtgtgataccgcgatgcacgtgctatctcatgagggtggaatcagaacacaaggcgctagggattgccgcagtcatccaaccagacaccgttccggacggtaca

SEQ ID NO: 116930 - DNA, 1609 bp, Zea mays
  Clone ID: MRT4577_3812C.1
aagaactgcagtgcagaaggcaacaaacaaccacactgattgaggcagttcgtgaacaagccgtcacacccactcgctgctgaaccaggagttccatccatcgccgctcactcccacgatcagcgtcgtcgcttatccgcaaatatctctcttcctctttgcagtcggcaccatgggttccgacttcaaatcgatccccttgatcgatatcggcccgcttgtcgaaaagattgatgatccaagcatggccaacgataaggatttactgcaggttgtccggttactggatgatgcttgcaaggaggccggattcttctatgtgaaaggccatggtattgatgagtcactgatgagggaagtcaggaatgtaacccgtgaattctttcagcttccttatgaggaaaaattaaaaattaagatgacacctcaaagtggatatagagggtatcaaaggataggggaaaatattaccaagggtaagcctgatatgcatgaagcaatcgattgttatactcctattagacctggcaaatatggagatctcgctaaaccaatggaaggatctaacttatgttaaaggggcaattgacatttcaagaaagataatacgaggtatagccttggctttgggaggggcaattgatgcttctgaaggtgatacagctggggatcctttctatgtgttaaggttgattcattatcacgaagatattccaaaagagcaccgcactgatgctggctgtggtgctcatacagattatggtcgttctggtgagtggatatatgcaacgccgattcccggaacctttgtttgtaacatcggtgaatgcacttcttacactggtttgccaggatgatgccaaatgtgcacttgaggggggcacaactcttcggtgatgtgctgggagctgcagaattctgtggctcgggaggggagcgcggcgtcccccccaaccatgatggaagtggatggctctgacaagaggaccaacactgctgttcctgaaccatctttgcttccttctgagcttgtgcagcattttgatcaaccactgtccaaaggaaagattaaggccatcaagaccttgctggaaaatgggaagcagttgaagaagaaggtcaggggctccaaagtcgcgccggctgttctggcatgcccaactgcgctggtctaatggtggagctggctctttagggtcgtcatcctgtttttatccatgttaccgtttgctggagtgttgacaatggtagtgtgtcagggtctgttcccttttggtggttcaaaaatcaggccttcctacaagtgtgtggaacgtagtaaggtgtcagctatgggggagcaaaatcagttttctccctcccttgctgtcttgtttctgcccctggctttgtacttggtcttttgcggccagcctcatgggaattgggtcagtctcttggccttgttgatgttgcaacatttatctagtagtcaattttttctttaatgtcacaatcaaattgtaatgtgctatgctggaatgtgagaggtctaaatgacgctgccaagcgggcgagtgtacgcaatatgattttcacaaaaaaaaaaaaaaaaaaggcccctagggcc

SEQ ID NO: 116931 - DNA, 294 bp, Zea mays
  Clone ID: MRT4577_38130C.1
cccacgcgtccggactagcgttcggactagttctagaactcgagctagagctctagcggacgctctataagatacacgctcacgcacccgtacatgcgacgtattagctcacctatagtgaaacctatggccaattcactgcaccgtcgtgtacagcgaaaccactgcgaaacccatctcaatacccaagttaatcatcttgcattacatagctgttttaacagctggcaggacagcaaagatggccctaccgaacagccttgcaaactgaatggcaaacgggacgcgcactgg

SEQ ID NO: 116932 - DNA, 1262 bp, Zea mays
  Clone ID: MRT4577_38131C.1
ttttttttttttttttagcggaatttctttattacaaaatgattacaagttacaacatttacaagttataacaagattacaatatatatcatcggagtttattacaaaagaaattgattcaaaaagattacaatttgaatgtataaaacatttataagttttaaaatacatgctagcttaagtgacagtcctcaataaagaagctaaagatgggatatagttatataagaaggccgagcccaccggcacttagcaccatccacaacagaacaaacttataacctgggataacactatgttagtgttgttaaatgacgatcacttggtgagtatctcccattctggcacttggttgattcatccactttagcttcgtccatcagcatcgtcttgtgattaatccagctcttgtccttcacatcacgtgattaattaacgtacctagatgatatgcataatgcatatgagtgagaataattataaacaatgcaaggtaataacactatgccgaagagggtaatatattgctagtaaggcattacaactcctaggcaaacactagctatctttgaattaacaacaatcatgatcctcgagctagggggacctaattcagatatttggaaatcatactaaacataagccttaagctaaagcataacattgataggttattacccttagacttgtcactttttaacactcaaaacttggaaaaggtgatagaacaagcatcaagaaagcagtacatctcaaaggattactagaacttaggttcactagtgatagtcacctaagatttagattaaagatatgagtatcttaactagtttcctaacttctttcccaaattaacttattgtaacacaccaactaataaatcatcacatttctattcaatcacacaagtagaacacttatcacacaacataaagttccatagaatttacatcctcagcaattaaagatctaaaccatccaagatgaaatataataagtgttccatactttccttagatcactgagtatagcaccttaagcttgggacacttgttcacttgaatttagcaagtacaagacttcaccaatcaagaactaactaaatttacttagtcaaacaataagaaggaaatgaattaatcaaatataacaaggcatttcgataaacacttcatatgcaacaagttgtcatcaatcaagggtcaaaaaaatgactaatccaacctagccaaacaagagcaacttcaataaatccacttaat

SEQ ID NO: 116933 - DNA, 1089 bp, Zea mays
  Clone ID: MRT4577_38132C.1
agcaagattacaatatatatcatcggagttggttacaaaagaaattgattcaaaaagattacaatttgaatgtataaaacatttataagttttaaaatacatgctagcttaagtgacaatcctcaataaagaagctaaagatgggatacacctatataagaaggccgagcccaccggcacttagcagcatccacaacagaacaaacttataatcctgggataacactatgttagtgttgttaaatgacgatcacttggtgagcatcttccatcctggcacttggtttattcatccattttagcttcgtccatcagcatcacttggagatcaattccactcgtcttccatagcacgtgatcaattaacgtacctaaatgatatgtatgatgcacatgagcatgagcacgaagagcataagatagataatctatgttaaagaggataaatatttaaaacaagtcatcacaacacctaggagcacactagatgttaagatattactaagtatcacaagtacattttttacatttacatagatctaactcaagcgttaatcaataaaaggctacacatgaaccttaactttatggattagagtacactatcaaaggattaacatcattcttagcactaatgaataacccactattaactagcataaaatcctatggagcaaaacttatctcaacctatagatctaaaatacttttatgcataacaggcacttcaattctaaactttactcctcaatcattcggcattaacatcatgcttataactataaggcgaccaaattaattcataaatctagatatgtatgtctactaaaccttcttcgcattattgagttcattataaccacacaaggtctaattagctactagttccaatacattcatcaaagtattaatttccaaactaataggtttagagcacacattaagaaagaaaaactcaaccatgtgcaacaagacatttggataaacatttcaaatgtcataagtcttcatcactcaagaatcaaaaaccgattactcatatttagtcaaacaggaatcaaaccaaataccccattgcagatttttttt

SEQ ID NO: 116934 - DNA, 601 bp, Zea mays
  Clone ID: MRT4577_38133C.1
ataatgcaatcccttttcttattctaatgcgtatttgttatgggtgctacccgaagtgcatatcccttgtacctgagttaactcattgcatggtatgccattaactctggtgactgtaatatcttatcttctacccacccttctgtctttccaggttaataatcttctgcaagttgcccagaaattccaagctgttgtcagtgaaagtggatcagctgggatatcaaataatgatgcacaaaccatctgcaacatgtgagtgatcctatttcaacttcagtcttgacatccatgctgtagtgcttttttggcgtgtgattgagtgacaaaattttccggttatctaattgatgtgtcatatttttcttctgtactgttaggtttgttaatgcatcacggcaactggcaaaaaatctagagcatcacaccttaaatgaacatgggctttctaaaagatatgtacgctgcctgcaggtggttagaatcacccttgtatctatttacaattcaagtacatacacatgcaatgcagcatgctgatggttggctgtccttgacagatatcggaggtggtgaatcacatgaaggacttgatcgagtt

SEQ ID NO: 116935 - DNA, 1246 bp, Zea mays
  Clone ID: MRT4577_38134C.1
tgtctggcgctaagctgatcctggagaaggggtacaccggagccaaggtcatgaacgtgatctttgcggtcctcactggctctctggctctaggtcaagcgtctccaagcatgaaagcgtttgccggcgggcaggccgctgcatacaagatgttcgagacgatcaacagagcgccggaaatcgacgcgtacagcaccacaggaaggaagctggaggacatccggggggaaatcgagttcagggacgtccatttctcctatccgacgaggcctgacgagccgatattcaggggtttctccctcgccatacccagcggcacgacgatcgcgctggtaggccagagcgggagcggtaaatccactgtcatcagcctgatcgagcggttctacgacccagatgtaggccacatactgctagatggcgtggacctacgcaagttccagctgcggtggttaaggcagcaaatgggcctggtcagtcaagaaccggccttgtttaacgacacgataagggcaaacattgcctatggaaaagatggacaggcaacagaatctgagatcgtatctgccgcacaactggcaaacgctcacaagttcatcagctcggcgctccagggatatgacacaatggttggagagcgtggagctcagctgtcaggagggcagaagcagcgcgtggccatcgcccgtgcgatcgtgaaggaccctcggatcctgcttctggacgaagcgaccagcgcactggatgccgagtccgagcggatcgtccaggacgcgctggacagggtgatggtgaaccggacaacagtggtcgtcgcccaccgtctgtcgacgatacagaatgcggatctgatcgccgtcgtcaggaacggggttatcatcgagaagggaaagcacgacgccttggtcaacgtcaaggatggcgcgtacgcgtccctcgtcgcccttcactcggcagcctcttcatagctgcaggtggtaggtagcatgggatcctgcaaacgtctgctgaaacatatatatatatatggacagaggcacagagctgccacaacctgtgtagcaagtcaggtgctagtatctgttcctctatttgatgacacacataattgcttattatacctaagcggggaaatggtacaaatagcaagggccaaatgtaaatgcaaggagctggtccttaagatagttaatatatatatatatatatatataatttaaacaattattaaaaaaaccaacaaaaa

SEQ ID NO: 116936 - DNA, 830 bp, Zea mays
  Clone ID: MRT4577_38135C.1
ccgggaaaagcacattaaaccccacaccgtgtccctctattcatggatcatgggtggaagatagcagtgcaaccacgtgccataaccttgtctctgttggaattccagagccctccttaaccggctttcagtgaaccccgtcgtgcccctgcgtgctgcgcgtcggccgtcgtccctgcaggagcctcttccatggcgcctagttttcttcccatggcgagctcgcccaagaaatcacccccatcgcagctcgccgtgtctgcgcagccccgacagtgacgatgtccatcccgttcggtgctctaggtgttcgacgaaatgggagaaccatgaaattgtcgtcgtttctcatccgcgaccccgccagtcttgtatgcagtccacatattgtgttcctcatcggtacactaattaatcacgtgatgtggaggacaagagctggattaatcaaaagacgatgctgatggacgaagctaaagtggatgaatcaatcaattgccaggatggaagatgctcaccaagtggtcgtcaattaacaacactaacgtagtgtttatcccaggttgtaattttgttctgttgtggatggtgctaagtgacggtgggctcggccttcttatataagtatatcccatctttagcttccctattgaggattgtcacttaagctagcatgtattttaaaacttataaatgttttatacattcaaattgtaatctttttgaatcaatttcttttgtaatcaactccgatgatatatattgtaatcttgttataacttgtaaatgttgtaacttgtaatcattttgtaataaagaatttccgctac

SEQ ID NO: 116937 - DNA, 218 bp, Zea mays
  unsure (1)..(218): unsure at all n locations
  Clone ID: MRT4577_38136C.1
gtcgatgcatacgattgangcataggaggatgctcgcgtacggtagctaagagtgacgctcgagagatgtcggaagggcctctgattttactatgtaaatgccgaggaggcatacggcatacggtacacactgcctctgctcacgccgaaccctagccagcgtgcacacttgcgagcgtcgaacccgcacgcgagcgaggccacggcagatcagaacc

SEQ ID NO: 116938 - DNA, 471 bp, Zea mays
  unsure (1)..(471): unsure at all n locations
  Clone ID: MRT4577_38137C.1
gtgggtggggggtttttttttttttttttttttttttttttttttttttttttttttttttttttttttttttaaaaccggggcaccgcccggctgaaaccggcgggggacgaaaaacatttgacccgggaaacatgcctcccccgggggggggggggggcaaaacccaaagaaactgatgccccgcccgggaggagcaaaccagggaccgactaactagctcccagggccccccggccggagaaaacgggggcccccacccccccccctttatatatataggggggccccttattacgggatccccccccacgagggcctggtgtggggacacatgggccagcgggcttgatcaaaatcctaaaaccctggggacccccttgggctcggcgggcgggccccccnccccctattcgggggcccggtggcccccggtgccccccaaaatgccccgggggggctttgcccccc

SEQ ID NO: 116939 - DNA, 257 bp, Zea mays
  Clone ID: MRT4577_38138C.1
gtccgaccacgcatccgcccacgcgtccgcccacgcgtccggacaacatggccgcctccgcctcgaccgtctccggcctcgccggcgcctccctggccaaccgcccggcgttctccacaagcttcacacagggcagccgggtgtctgcgacgaagcccctgatgagcaggaacctggagaggaaatggaggatgaactgcatgacgtttccccgggacgggctgcagagggaccctagcgtccaccggttcgggctc

SEQ ID NO: 116940 - DNA, 307 bp, Zea mays
  Clone ID: MRT4577_38139C.1
ataatctggaactgtaacttcttatttctggttggccacatacattatccaaaaaactttattattgaattacaactaataatcaatctaaaagagggcaccaccaatgatgtgttgttagcaggaggctgatttgtttgtcaaagcaagtttaacaaagggcaacatttgttatagctgctagagggtcgaagggttagccggaaactgcttgtaaaaaggcagcaactgttgctgagtcaataaggaaacactacttgctgcaactagctagctaaatggaagttaccattgcttgctgcaaata

SEQ ID NO: 116941 - DNA, 1700 bp, Zea mays
  Clone ID: MRT4577_3813C.1
ccaggagttccatccatcgccgctcactcccacgatcagcgtcgtcgcttatccgcaaatatctctcttcctctttgcagtcggcaccatgggttccgacttcaaatcgatccccttgatcgatatcggcccgcttgtcgaaaagattgatgatccaagcatggccaacgataaggatttactgcaggttgtccggttactggatgatgcttgcaaggaggccggattcttctatgtgaaaggccatggtattgatgagtcactgatgagggaagtcaggaatgtaacccgtgaattctttcagcttccttatgaggaaaaattaaaaattaagatgacacctcaaagtggatataggataggggaaaatattaccaagggtaagcctgatatgcatgaagcaatcgattgttatactcctattagacctggcaaatatggagatctcgctaaaccaatggaaggatctaacttatggccaaaatacccatcaaattttgaagtactgctggaaaattatatcaaattatgtagagacatttcaagaaagataatgcgaggtatagccttggctttgggaggggcaattgatgcttttgaaggggatacagctggagatcctttctgggtgttaaggttgattggttatcccgtagatattccagaagagcagcgcactgatactggctgtggagctcatacagattatggttagtagatctctccaaagaatttctattgagaaaaaaaaattccatatgtgaaactgtggatgacggacttctaacactggttaaccaggatgatgacatatgtgcccttgaggtgcaaaatcgttctggtgagtggatatatgcaacgccgattcccggaacctttgtttgtaacatcggtgacatgctgaaggtttggacaaatggaatatatcagcccacccttcacagagttgtcaacaattcccagcattaccgtgtatctgttgcattcttctacgagtccaacttcgatgctgcagtagggccgcgtgagttctgccgggagaaaaccggcggtgctgctaagtacgaaaaggttgtgtacggggagcatttggttcagaaagtattgacgaacttcgtcatgtaaatttgctaagtacgacaaataaatctgcattgcagcatcagaactccagacctatttggtgtgtagtgctgtaccagaaaggtagtaacggactaaagcatgcgcccgtctctgaaatttgaccttaacaagagtcgcagacttgcagtgcaggtgatatcacaaggaaatcggggggagatttgttctctctgctgcacggagttgtcgacaaccctgtcgctgaaatctgaatttagcatcagacaactggagatgctacgagtccgtctctgaaatctgaatttagcatcaggcgcgaaattgcctccatttcttcgccaaaccatctaatgatggaagctttgtagctggcaaggccatctcgtgtgacgccgcagccagacgatgccagcgtagcaagttacctaccattagcactggttaactagctagccatactagtgaattactctattccgatcaaatgttggagaattcttttctcatagatactttgatgaaaagaattggtaccaggaaggctatgttcggttctaccacaattcatatgtatcgagcgagtttcaatccct

SEQ ID NO: 116942 - DNA, 475 bp, Zea mays
  Clone ID: MRT4577_38140C.1
gcgacctttccccctccctggtttccacctggagccaatccagttcgcagccctcgggttgcggcagcggtgatccatactccacagcggtggaagagagcgtaagtagggacgacgagggggcacacatggggcagcgtgcgctgatctcactgcattagtggtccgtgatcaccggcatactggacgatttcacagagtttatcgtgcactttaccactatggtctgccaccgtcttatgaagctcaccatgcgcagacaacaagtcctcctacacctgcaactgtcacactgttaaatacctagtgggagacatattcacatactgatgagttattattcgtatcggatgagcatcaaatggctatagctttcatatgatattgctacgacgattacacagaaaggcatgctggatctaaagcttctactgctgctattcacaatctctatagcaaggtatgatcaaaactt

SEQ ID NO: 116943 - DNA, 309 bp, Zea mays
  unsure (1)..(309): unsure at all n locations
  Clone ID: MRT4577_38141C.1
ccccgcgcggtcgtcgttccgcaagcagccgccggtgggcacgccgtcctcctcgtccgcgtgggactgggagaacttctacccgccgtcgccgccagactccgagttcttcgaccgccgcaaggccgaggtcgagcatgccagccgtctccgggagctcgatgaggaggagaaggcccgggcctacctccagcaccacacccagtacaacctcaaggaagaagacgaggccgccgaagacgacgacggcgaggtggaccatgaaccggnagtgatgcattgcggcggatgggaggacgacgagcacta

SEQ ID NO: 116944 - DNA, 208 bp, Zea mays
  Clone ID: MRT4577_38143C.1
aaccccccttttagcggtcctttaaccgcgggggttgtggtgtttacccccagggtgaccttttcatttgccagctccttagcccccgttcttttggtttttttcctttcttttcccgccccgttggccgtttttccccgtcaatttttaaatgggggcttccttttagggttcctattttttgttttacggcccctccccccaaaaa

SEQ ID NO: 116945 - DNA, 794 bp, Zea mays
  Clone ID: MRT4577_38144C.1
gcctctcctcctccacggatcgacgctgcaggcaggtagctgcagctccgtcctcgccctcagcgtctagcctccagctatatacgcccaccctatctatcgccaccagcgtcccgtcctcggtcctccatcagtagtaaccactcctcgtcgtctctctcgcggtctcgcctcctgcagctagctctcgccagaaagggaaaccgcatctgcttcagcctcccgtcccgtctcggcgccgccgcctgatcgaccagagcccagcgcggggcgtcgaggccgtccggggcgggtccggcgctcagatctgaggcgagtagcaagcgaagaacatgcagatgcaggtcggaggaggcgcggccgacagcccgggcgctgcggcggcggcgggcgcggaggcgccgcgcccgagccgctacgagtcgcagaagcggcgggactggcacacgttcgggcagtacctgcgcaaccaccggccgccgctggagctggcgcggtgcagcggcgcgcacgtgcttatctagtgttaagatcgatctcattgtcgcgatggagatgaaccgatcaacacacacgtacgtgctgctgttcttcaggatttcctattcctattctcatatctccccccttttggttacatgatgctcatgcatttcctgctgcgctgctgggaaatggtactagtagctgtgcttggtactgtagggtttgcagaatcctgcttgttttgtgtatgcagtgcaatgatgatggagatataatataatggaatgcttaatttccaggttaatgtt

SEQ ID NO: 116946 - DNA, 707 bp, Zea mays
  unsure (1)..(707): unsure at all n locations
  Clone ID: MRT4577_38145C.1
ccggcccgaggccaaccccttcggcgcccgcgccgtgcgcctctacctccgcgaggtccgcgacagccaggccaaggcccgcggcatcgcctacgagaagaagcgccggaagcggccgtccgcctcgtcccagtcgtcgccgcaggccgcgacgaccccgccgttgcaggcccctcccgtctccacgccggccctctcggacgcggcggccgagagggccgacgtgcgggcgcacgtccccgacgccgggcacgggcaccagcaccagcaccacttcttcatgccacacccgcagttcctgcacgggttccgactgctgccaggcaaccccgaagcggtggctggcaatggtaatggcgatggcagcagcagcagcgctagcgtcgctgccggcagtggggacgagatagcgctggcgatggcggcggcggcggaggcgcacgcggcggggtgcatgctgccgctgtcggtgttcaactaggcaggcgtatagccgagcgaggtagggcttaaacaatagattaatccgggtgcttatctagtgttaagatcgatctcattgtcgcgatggagatgaaccgatcaacacacacgtacgtgctgctggtcttcaggatttcctatttctattctcatatctccccccttttggntacatgatgctcatgcatttcctgctgcgctgctgggaaatggtactagtagct

SEQ ID NO: 116947 - DNA, 456 bp, Zea mays
  Clone ID: MRT4577_38146C.1
cggccgggtggattttggcgtgcctgcctctgcgcctgcccctcccaacacaagacatgccggaagtgcaaggcgagctatgacccctcggccaacacgcgcctctcctgcaggtcgggttagcatcgggcctaggacagtatactcaagtcgtgagagacgctcagaaagggatcaaacttcgcaacgtcagattcgttgatgcgatggggttgccattgcaagacggccatctgcatctaagcacccaagctcaagtccagcttgggcgtatgttggctcagtcctatctaaattatggtacatcccaactctagctagtacttgtgagatagaaattcctgccctgtttggacgattcattgagaacccattcttataattattgttgtatggaatcaacttgttactgctcgatgcaatatcttcattaaaaaaaaaaaaaaaaaagcggcc

SEQ ID NO: 116948 - DNA, 1400 bp, Zea mays
  Clone ID: MRT4577_38147C.1
atttcggcacgaggcggtcctccatcagtagtaaccactcctcgtcgtctctctcgcggtctcgcctcctgcagctagctctcgccagaaagggaaaccgcatctgcttcagcctcccgtcccgtctcggcgccgccgcctgatcgaccagagcccagcgcggggcgtcgaggccgtccggggcgggtccggcgctcagatctgaggcgagtagcaagcgaagaacatgcagatgcaggtcggaggaggcgcggccgacagcccgggcgctgcggcggcggcgggcgcggaggcgccgcgcccgagccgctacgagtcgcagaagcggcgggactggcacacgttcgggcagtacctgcgcaaccaccggccgccgctggagctggcgcggtgcagcggcgcgcacgtgctcgagttcctgcgctacctcgaccagttcggcaagaccaaggtccacgcgccggggtgccccttcttcggccacccgtcgccgcccgcgccgtgcccgtgcccactgcggcaggcctggggcagccttgacgcgctcatcggccgcctgcgcgccgccttcgaggagcacgggggccggcccgaggccaccccttcggcgcccgcgccgtgcgcctctacctccgcgaggtccgcgacagccaggccaaggcccgcggcatcgcctacgagaagaagcgccggaagcggccgtccgcctcgtcccagtcgtcgccgcaggccgcgacgaccccgccgttgcaggcccctcccgtctccgacgtgcgggcgcacgtccccgacgccgggcacgggcaccagcaccagcaccacttcttcatgccacacccgcagttcctgcacgggttccgactgctgccaggcaaccccgaagcggtggctggcaatggtaatggcgatggcagcagcagcagcgctagcgtcgctgccggcagtggggacgagatagcgctggcgatggcggcggcggcggaggcgcacgcggcggggtgcatgctgccgctgtcggtgttcaactaggcaggcgtatagccgagcgaggtagggcttaaacaatagattaatccgggtgcttatctagtgttaagatcgatctcattgtcgcgatggagatgaaccgatcaacacacacgtacgtgctgctgttcttcaggatttcctattcctattctcatatctccccccttttggttacatgatgctcatgcatttcctgctgcgctgctgggaaatggtactagtagctgtgcttggtactgtagggtttgcagaatcctgcttgttttgtgtatgcagtgcaatgatgatggagatataatataatggaatgcttaatttccaggttaatgttattgctgcttcctctcaaaaaaaaaaaaaaaagggccctc

SEQ ID NO: 116949 - DNA, 1391 bp, Zea mays
  Clone ID: MRT4577_38148C.1
ctggaacataaggcgccccctatctgaactcccaaaaaaagccagccaatcagaaaagtttataccagattcgattcctcctcctgtcctccatctccccaattcgcacggccatcggaccatggattccggcgtgcctgcctctgcctatgcgcctgcctctgcgcctgcccctcccaaacacaagacatgccggaagtgcaaggcgagctatgacccctcggccaacacgcgcctctcctgcaggttccacccttccttcttcgtctgccgccgccacgacgaccagaagaggtactacgagctccgcgacggcgatcctccctacgccgccaagttctacgactgctgcggcgccgaggaccccgacgctccgggctgcaccactgacttgcaccgttcctacgacgacgcccaagactagcaaacctttgctgcttccacaggcctcatcttaatctcaagtctcatctaccgtttcgcttttgcatcccctccttatcctctctagtcagctatcaaattaaacccaccaatctggcccttaaatgaaatttcgctccaacaaggccggccgcggcggggtggtggcgaaccgctgggacggcgtggtgccgggcgactgcgcgccgtcccccgcggtgctgcgtctctcgcccgacctgcgctgggaggaggcgcgggagccgctgcacgccggcatcgacgccgccaaccacgccgtcggggtgggccccgggatggcgtttgccaacgcgctgctgcgctcgggccgcgcggggggcgccgtggtagggctcgtcccctgcgccgtgggaggcacgcggatggcagagtggggcaggggcaccgagctctacgccgagatgctgcgccgggccagggtcgccgtcgagacggggggccgcatcggtgcgctgttgtggtaccagggggagagtgacaccgtccgctggtccgacgccaccgagtacggccgccggatggggatgctcgtccgtgatctccgcgccgatcttggcatcccgcacctcctcgtcatccaggtcgggttagcatcgggcctaggacagtatactcaagtcgtgagagacgctcagaaagggatcaaacttcgcaacgtcagattcgttgatgcgatggggttgccattgcaagacggccatctgcatctaagcacccaagctcaagtccagcttgggcgtatgttggctcagtcctatctaaattatggtacatcccaactctagctagtacttgtgagatagaaattcctgccctgtttggacgattcattgagaacccattcttataattattgttgtatggaatcaacttgttactgctcgatgcaatatcttcatcacaactcagatccatcaaggtcttgg

SEQ ID NO: 116950 - DNA, 1498 bp, Zea mays
  Clone ID: MRT4577_38149C.1
ctcgaggccggccgggaatcaacagaacctctggtcacacacgcagcaagcaccgagcccagcgcccggcccagccacggcaacaccctcctcagcccgacgccgacgctcgccgtcatcctcgtaagtccacagcgcgcgcctcccgtcctcccagtcccaggtctcacccctagcgatgcgccactcccggcgctcgtgatccatggcctcactccccgttcctcacactcttccgcgggcctcgccagcgatagtgggcgccgcgagggggagggccgcggtgcgcgtacgcactgccaccgcggcattgggcggtaggtgcggcggcggcggcggaatggagcagcgccacggggaggccccgcacagcccagtgaaggagaagcctgtaatgtcaaacattgggaaatcgactaatattttatggcacaattgcttgattggacaatctgatagacagaaattgctgggacaaaaaggctgtgtcgtatggataacaggactcagtggttcagggaaaagtactcttgcatgtgcactgagtcgtgagttgcattgcagaggccacctcacgtatgtacttgatggtgacaacctcagacatggcctaaatagagatttaagctttaaggcagaagaccgtgcagaaaatatacgaagagttggtgaagtggcaaagcttttttctgatgctggtgtcatatgcattgctagcttgatattgacatacaggagagaccatcaattaatggtgagatagtaattaagatctaagatggggaatgcccttcaccataagcaatggccaagcaagttctatgctaccttgaagagaacggatatttgcaagcttagcatatgtattttgagaagattgatctgattcttgtgtgtccattacttgtggacacaataagatctgttgttggtcacatgaataaaaggcatcaacacgtaggaagtaacagaaggtacggttcattcagaaacggatatagaaatggagatggattcattcgtttcattgttgatgatatttgtttcgcgtgtattttgcctgcaatagctgcgattcatctgcatcagcaattcaggatgcattcggttaactcgcgttgaccgttcgcgtcaattcgggtagttgttctgtgcttgctagttgggttcgctgttggcaatgtatttgttacaagtaaatacggacaatgtgtgtaatttgtgtatcactttttttcctcttggaataaaaaccgaggaacattgtaacttcttccattgaatttattttgcctgcatagctgcgattcatctgaataagcaattcaggatgcattcggttaactcgcgttgaccgttcgcgtcaaattgggtagttgttctgtgcttgcgagctgggttcgctgttggcaatgtatttgttacaagtaaatacggataatgtgtgtaatttctgtatcacttttttcctcttggaataaaaaccgaggaacattgt

SEQ ID NO: 116951 - DNA, 585 bp, Zea mays
  unsure (1)..(585): unsure at all n locations
  Clone ID: MRT4577_3814C.1
gccacacagtacacagnacatcggcacaaccaaccattgccgtcaagctcgagcacacatgtacaacaacaagtaatcagacgcacgcgcaacgcaaaccacatgggcaccaacccttgttcttccttgtcttgattttctgacttgtagtgtgtaaaatggagtctatctttaagcctgttgacggctacttttacctctgcagggacagagtcaccctcgaccttgagctcgagctccttcaatcgtacaaggttgccgatgccggagagggactctatgttggtgacgagcttctcgagcttaggacaagatccggcggcgaagctgatcttggctttcttggagcactccacgataagaaggtcgaggtttaggaactcattttctttgaaggcaagctccgtttggtcagtgaacgtgtccaagaaaaccaaacagcgtatggatggcttcttgccaaggatttgtagatcatcttgctctagcattttaccacggganagtcaccttggttattcgcctaccctgctcaagcaatgaacccagcgtgttcttgttgtcaatggaaagtgtggtggtggt

SEQ ID NO: 116952 - DNA, 102 bp, Zea mays
  Clone ID: MRT4577_38150C.1
tccactcgtccgctcttccacggttccaccccggccgtctcctctagagaagcacccgcaccatacatcttccggcgcccgacacggactgcgagccccttc

SEQ ID NO: 116953 - DNA, 1291 bp, Zea mays
  Clone ID: MRT4577_38151C.1
acgcagcaaccaccgagcccagcgcccggcccagccacggcaacaccctcctcagcccgacgccgacgctcgccgtcatcctcgtaaatccacagcgcgcgcctcccgtcctcccaggtctcacccctagcgatgcgccactcccggcgctcgtgatccatggcctcactccccgttcctcacactcttccgcgggcctcgccagcgatagtgggcgccgcgagggggagggccgcggtgcgcgtacgcactgccaccgcggcattgggcggtgggtgcggcggcggcggcggaatggagcagcgccacggggaggccccgcacagcccagtgaaggagaagcctgtaatgtcaaacattgggaaatcgactaatattttatggcacaattgcttgattggacaatctgatagacagaaattgctgggacaaaaaggctgtgtcgtatggataacaggactcagtggttcagggaaaagtactcttgcatgtgcactgagtcgtgagttgcattgcagaggccacctcacgtatgtacttgatggtgacaacctcagacatggcctaaatagagatttaagctttaaggcagaagaccgtgcagaaaatatacgaagagttggtgaagtggcaaagcttttttctgatgctggtgtcatatgcattgctagcttgctatctccatacaggagagatcgtgatgcatgccgtgctctacttccacattctaactttattgaagtatttattgatttgcccctaaaaatttgtgaagctcgtgatcctaaaggcctatacaagcttgcacgtacaggaaagattaaaggtttcactggaattgatgatccatacgaaccaccaattaatggtgagatagtaattaagatgaaagatggggaatgcccttcacccaaagcaatggccaagcaagttctatgctaccttgaagagaacggatatttgcaagcttagcatatgtattttgagaagattgatctgattcttgtgtgtccattacttgtggacacaatacgatctgttgttggtcacatgaataaaaggcatcaacacgtaggaagtaacagaagctgcgattcatctgcatcagcaattcaggatgcattcggttaactcgcgttgaccgttcgcgtcaattcgggtagttgttctgtgcttgcgagttgggttcgctgttggcaatgtatttgttacaagtaaatacggacaatgtgtgtaatttgtgtatcacctttttcctcttggaataaaaaccgaggaacattgtaacttc

SEQ ID NO: 116954 - DNA, 343 bp, Zea mays
  Clone ID: MRT4577_38152C.1
ttttgggttgactcacgcgtccgcggacgcgtggtcggtcgcctaggacgtcctcgtgccgaactttcatcttctgcgacaaggtgttaatggacgcgtgggagcggtacatgctcagcctcgggctcggcttcaacaagatcggcgagtaggtcttctggatatgccatctagggatatttaacgagctgactctattgagatgtctgagcggtgtggagacagtgctcaaggatgtggggaaccaaatgaaactaggtagtggggtggaagccgtagcggtgttcctgtcaaacattaagcctggtatcccatataggatttgataaaactgtatggggag

SEQ ID NO: 116955 - DNA, 366 bp, Zea mays
  Clone ID: MRT4577_38153C.1
ttcggctcgagctgtatattaagaactaaacttctattccttgcttgctttgattacatttagttcttaatatacagtatcacattaaatttaatcaaagcaagcaaggaatagaagtttagcaaattattggcaaaatattatttaattgagctaaatggtcacttaaacagatacaattggccattgtgtagttctttaaacggtctaaatgggaaataaggattggagtttgaaatttgaagtaataactgataaatgcatgtgactgctagcacatagccttcttcttgaattggaagatgcaacaaagttttaagaaccatcaccgtgtgagtacgtgaacccctcaccttttggcacttt

SEQ ID NO: 116956 - DNA, 561 bp, Zea mays
  Clone ID: MRT4577_38154C.1
cgcgttcgctttccgctatttactttgagcaatgtgtgattttgtttttttatgcaattgctgtgtacgtgagtttgggatccaaaatcatgtgagtttctggcacgtacatagtttgcattcggtttgccttctaaaaccgggggtgacataagtggtatcaaagcctttctgactgtaggaccgctaacctagactatgtaacaccctgattttggggtataaaatttctttctaattatcatccaaaatcatgtgttactccttttctcactcttggctttttacctctctagattctttctctctttttccttttggttagaaatggcttaaactagtggaggttaattatttatttttgccaaaaccttatgagtcatgacatgttgcatcatgctgagtttaaaatattctttgaagtgttgcacaagtttgaatttagttgaatttgaaacctaacttgaatttggatttgaaaaccctatagataaagaaatagaacaggaattagaaaatccagagaaaacagaaaaggagaaagcagcctagtcggcccac

SEQ ID NO: 116957 - DNA, 617 bp, Zea mays
  Clone ID: MRT4577_38155C.1
cagctgtctggcgcttactcccattttgtcttgattagagtccgattaagaagcaacagattaaagcaacaccactgcatcgtctgtcgttactcgtttcacaagcacctgagcagagttagctctttggccgccgacggcggggagggctcgaagtcgaactcgaactcgccgccgcactgctgatccatctgccagccctggcggcccaggctcatctccaggctcggtggcgtcgcaggcggcagtccaagcaccctgacgctcatcacgccgctgcagtgctgctggtggagccactccgagctggagaccgtgtcgccgccgccgctgccgctgccgctcgtgttgttcggtgacggccgccgttgttggaagccgccgccgcttcctgcgtggtcgtcgcgagcctcgtcctccacgagacgatgagccgcgatggcgtcgtctgcatcgtccccgtgatgacggtcgacgcgctcatctcctaccttgagtccctgcagcttggtcactccttcgctgcagctccgctgatgctggacctgccgtcgggcgacccaagcacaagcggcggcggcgtgtcgacgatgatccaccggcggcgccggttgctg

SEQ ID NO: 116958 - DNA, 820 bp, Zea mays
  Clone ID: MRT4577_38156C.1
cgggccctcagaccagacgcgatccaatcatcaccactcgcccagtcgccctagctagctagctaagaactccagcgccgatcgagagctacctagatctctctctctctctctctctctctctctctctctcgagcggggtcgggcaaataataaacggaacatctggccatggcgtggaagaggaagaacggcagcgccagcgggtcgcccgcacgcggggccggcgccggctacgaggaggcggagaaggtcccgagaggccacgtcccgatgctggtcgctggcggggacgacgacggcgatggtggccagcgggtgctggtgccggtgcggcttctcagcgacccatccatcgcggagcttctcgacatggcggcgcagcggtacgggtacggccagccgggcgtgctgcgggtgccctgcgacgccggccacttccgccaggtcctcgacggcgccatgcacagatgcgggatcagcttggcgtgaacaagagaaggagattgagtggctgctagctgatcaagctgagcactgaggggattaattgttaagacacgcacccctccggcccgtgtggcgaccaagctagcttgtagccttgtacgtacacacagataatcctagctagctgattggtttgttcttcaatatattggttgatttgatccattattacaaaaaaaaaagaaaatatttgatgatagaagcacgtaaacttaaaaaaaaaaaaaaaaaaaaaaaaaaaaacataaggcaggcctccatggctgcatatatatattattatcgtctcgatccaaaaaaaaaaaaaaaa

SEQ ID NO: 116959 - DNA, 285 bp, Zea mays
  Clone ID: MRT4577_38157C.1
ggattcgtaaaaaaaaaaaaaaaaaaaaaaaaaaaaaaaaaaaaaaaaaaaaagggggaacactataatagagaaaaaaaacttacacactcttatatcgccaccttctccttcttctatatcggcccttatactaatttccttgggctacgttacacaacttttgggtctggaaataccttaactttccccaccttaattccctcgcgtcacacccctatttcccgaggttgtattataagaaagaggccctctcctatctcctttgaaaacttttgcttccca

SEQ ID NO: 116960 - DNA, 331 bp, Zea mays
  Clone ID: MRT4577_38158C.1
ctgctgtacgcgcccggacttattggctcgaccgacgcgtccggcaccaactagcatcacatgaagcacaatactgtaccaacaatggctgtcaaaatattttggctggctatgctccttggtctttcggcgagcgctgctacaagcatccattttcccgcagtgctcacaagctagtatagcttcccttcttcctctgtgcctgtgaccattgttgtcatcaggatgtgactacccaattctttagccctacgggagccgactggcatttgcatcgagcgtgttacctttatgacgactgttcctacgacagtcgtcattcctaatacag

SEQ ID NO: 116961 - DNA, 297 bp, Zea mays
  Clone ID: MRT4577_38159C.1
ctcgcctgggccaaggacgattactccctccaaacacagaaaaatcttggagacttccaccgtgcaggatatgctggatctgaagacgcagacgctcgggggcgtggtgttcgtaaccttttccacggatgaggtgatcacgaacgccatgcccggcattaaccggaaggcagatggacgggctcaccatcttcgtcaatgaggcccagtccagtgggagaccttgaggcggctgccatagcctcgatgtctactcgaagaagcagcacatactgatgtggacctcgccgatatgga

SEQ ID NO: 116962 - DNA, 615 bp, Zea mays
  Clone ID: MRT4577_3815C.1
gcttgcaggaggccggattcttttatgtgaaaggccatgggggggatgagtcactgatgagggaagtcaggaatgtaacccgtgaattctttcagcttccttatgaggaaaaattaaaaattaagatgacacctcaaagtggatatagagggtatcaaaggataggggaaaatattaccaagggtaagcctgatatgcatgaggcagtcgattgttatacttttattagacctggcaaatatggagatctcgctaaaccaatggaaggatctaacttatgacatttcaagaaagataatgcgaggtatagccttggctttgggaggggcaattgatgcttttgaaggggatacagctggagatcctttctgggtgttaaggttgattggttatcccgtagatattccagaagagcagcgcactgatactggctgtggagctcatacagattatggttagtagatctctccaaagaatttctattgagaaaaaaaaattccatatgtgaaactgtggatgacggacttctaacactggttaaccaggatgatgacatatgtgcccttgaggggcaaaatcggtctggtgagtggatatatgcaacgccgattcccg

SEQ ID NO: 116963 - DNA, 488 bp, Zea mays
  Clone ID: MRT4577_38160C.1
cattgggtacctcgaggccggccgggaggcaccaccaggtgattaagctctcacgcgcatacgcctagtttgctctcctgccatgaaggatatcgcatcagagtgtacccatagcaaggcagcgtagccggtagaaaggccaacaacgaagggcgtcgagacaaggctgccaggcccacgaacaagtatctgttacggcctgcgaaagccgggctgcatcttcccgctggtcggatcggtcgttacctcaagaatgttcgtcactcgaagcgagtggtcactgtcgcccccgtctatcttgccggagtgcttgagtactctctctcgctctgaggagctggacctgggcgccaacgcggctaaggacaacaagaagacgcgcatcgtcccgcgacacttgctcctgtcgattcgtaacgacgttgagatcggcatagctgatgactggcgtcaccatcgcgcacggcgactgtcctcctcaacatcaa

SEQ ID NO: 116964 - DNA, 1942 bp, Zea mays
  Clone ID: MRT4577_38161C.1
attggctcgtgggcgttttgcggtgggaggggaagggaggggaggcagccgctggaacacatagggacaagtgcgtttccagcagcatacggatagagctatagatggatcacgcattcaggccctgatgcaagcgctccccccgccatttccttcaacttctgctaagtagcctaatactcccatcggccggtcggctcctctacctgcatttgcggattggcgtcttcctcgtcaccgacccgatccatcccctctctacccggggacggggggtctacaacgtcgtcaggtcgtccttatccgcgtgctggccttcggatctcggctgccgcgttggtttaacacaaaccacgcgtccatgcctgccgcttccgcaggctccatgccactgccacctgggtgggttttctttccgggggcacatcacacatggcgtccgtccgcgtaggcacagaaggcttctcctggaggtgtgggagctgagttgggaggaggactgctgcagccatgaaggccctcattctcgtcggaggcttcggcacccgcctgcgcccgctcacgctcagcgtgcccaagccgctcgtggatttcggcaacaagcccatgatcctgcaccagatcgaggctctgaaggaagttggtgttacagaggttgtcctggccatcaattaccagcctgaggtcatgctcaactttctcaaggacttcgagagcaagcttggcatcaagatcacctgctcgcaggagacggagcccctcgggaccgcaggcccgctggccctggcccgcgacaagctcgccgacggatccggcgaccctttcttcgtgctcaacagcgacgtgatcagcgagtacccgttcgccgagctcattgagttccacagggcccacggcggcgaggccacgatcatggtgaccaaggtcgacgagccgtccaagtacggcgtggtggtcatggaggagggcaccggcaaggtggagcggttcgtggagaagcccaaggcgttcgtgggcaacaagatcaacgccggcatctacctgctcaacccgtccgtgctcggccgcatcgagctgaagccgacgtccatcgagaaggaggtgttcccgcgcgtcgcggcggacggggccctcttcgccatggttctcccgggtttctggatggacatcgggcagccgagggactacatcacgggcctgcgcctgtacctggactcgctgcggaagaaggcgcccgccaggctcgcgtcgggcgcgcacgtcctgggcaacgtgctggtgcacgagaccgcggtcatcggggacggctgcctcatcgggcccgacgtcgcggtcgggccaggctgcgtggtggaggccggggtgcgcctgtcccgctgcaccgtcatgcgcgccgcgcgcgtcaagcagcacgcctgcgtctccagcagcatcatcggctggcactccaccgtcggcaagtgggcgcgcgtcgagaacatgaccatcctcggcgaggacgtccacgtctgcgacgagatctacagcaacggcggcgtcgtgctcccgcacaaggagatcaaatccagcatcctcaagcccgagatcgtcatgtgatccgggagtaaatctggggcgccaaatccaaatcacaaggggcccttgcattgcattgcattgcatcgcatcgcatcccatcccatcccgatatgcttcatacttttgttgtttgattttttgctcggttgtttgtctgcaagtgtaaccagttgtcgagtgtttaatttgtcggctatatagactattttcaagtttcgctccgtgcttgtagataggtatcagtcgtctatcagatgagtggaaataacaacttctcttcgtatactacaaaaaaaaaaaaaaaaaaaaaaaaaaaaaaaaaaaaaaacaccaaaaaaaaaaaaaaaaacacccccaccacccc

SEQ ID NO: 116965 - DNA, 890 bp, Zea mays
  Clone ID: MRT4577_38162C.1
taattggcggcgaatcgagtacattaaacacttcgtcaaccccaaccgtagtagtgctcaaggggagacggaggaggaggaggaagcggtataaagccgcggcgtcgttcgtcggcagccgcgtcctgagtcgctcgcagtcgcagccgacgccttttcctcctccttgtcttcttcctcgctgcagctctcgccgccgaggtcctgggcgccgtcgacaaaccacctccctcccccgtctctcgtcgtctcggaaggaacggccgcccgtcgcgccaaggattcaagggtgtgggagctgagttgggaggaggactgctgctgcagccatgaaggccctcattctcgtcggaggcttcggcacccgcctgcgcccgctcacgctcagcgtccccaagccgctcgtggatttcggcaacaagcccatgatcctgcaccagatcgaggctctgaaggaagttggtgttacagaggttgtcctggccatcaattaccagcctgaggtcatgctcaactttctcaaggacttcgagagcaagcttggcatcaagatcacctgctcgcaggagacggagcccctcgggaccgcaggcccgctggccctggcccgcgacaagctcgccgacggatccggcgaccctttcttcgtgctcaacagcgacgtgatcagcgagtacccgttcgccgagctcattgagttccacagggcccacggcggcgaggccacgatcatgttgaccaaggtcgacgagccgtccaagtacggcgtggtggtcatggaggagggcaccggcaaggtggagcggttcgtggagaagcccaaggcgttcgtgggcaacaagatcaacgccggcatctacctgctcaacccgtccgtgctcggccgcatc

SEQ ID NO: 116966 - DNA, 129 bp, Zea mays
  Clone ID: MRT4577_38163C.1
atgaatctggaagcgtctgctgacgcctttcaggctgctgaaaaggcagctgctgcatccactggaatattagaaacaaattctgcaacatgacttacagctgctcgggcttcagctggtggtggtgct

SEQ ID NO: 116967 - DNA, 552 bp, Zea mays
  unsure (1)..(552): unsure at all n locations
  Clone ID: MRT4577_38164C.1
atcccctctcccccggggacggggggtctagnacgtcgtcaggtcgtccttatccgcgtgctggccttcggatttcggctgccgcgttggtttaacacaaaccacgcgtccatgcctgccgcttccgcaggctccatgccactgccacctgggtgggttttctttccgggggcacatcacacatggcgtccgtccgcgtaggcacagaaggcttctcctggagttcagtggctattccctactaactgctaactggcagcagcttctggatcgggccatcggggtcggtggatctcactgttttcttttcctgctgcttgctgcatttttcgcagggtgtgggagctgagttgggaggaggactgctgctgcagccatgaaggccctcattctcgtcggaggcttcggcacccgcctgcgcccgctcacgctcagcgtgcccaagccgctcgtggatttcggcaacaagcccatgatcctgcaccagatcgaggctctgaaggaagttggtgttacagaggttgtcctggccatcaattaccagcctgaggt

SEQ ID NO: 116968 - DNA, 286 bp, Zea mays
  Clone ID: MRT4577_38165C.1
ctcttccgacatacaaggatctaaatgattggactatatcaactctgagatgaacagagggcacatcatgagggactgttgggacaacactgcttggaaagtcaaaacgtgtaaaggaactggcagccacggttgcacgggtaatatggtgccatggctaggcgcacggtgctaagggaaaattaacaactgctggtgggcgaataatgtagcatgcctcacaccaactaacttggtggaaggcatgagcatgagtgctgctgctgataaacatgagagttcaatg

SEQ ID NO: 116969 - DNA, 450 bp, Zea mays
  Clone ID: MRT4577_38166C.1
ttttttttttttttttttttttttttttttttttttttttttttttttttttttttttaaaaccatcattaaaaaagggtttcttgcatgaaaacgtgttaacaaatccgtttgttttatttcaagggggggaaacctagggccctccttttggggacaccggcgctttttccaccaattatcagtattagcccaacccggggggggcccccccagaaaaaaaaaaaaaaccccgggcctccggggtaaaataaaacgttttttttagcgcctaaaatttctcattggccccaaaggaggttttttcccccctccttttaggccccctgaaaaaattttaaactgttttgggcgctgttactagaaaacaactaatcgatctgggaaagcgggtgaggcccccgggaatttttcaaaggggggccattggggaagcaggaccctttgttt

SEQ ID NO: 116970 - DNA, 360 bp, Zea mays
  unsure (1)..(360): unsure at all n locations
  Clone ID: MRT4577_38167C.1
tnnnnnnntgttntggttnnttttttttggttttgttttnntataccaaaagaaattgttatttccacccatcttataaaccactgatacctatttacaaacacggagcgaaacttgaaaatagtctatatagcccacaaaataaacactccacaactggttacacttgcagacaaacaacccggcaaaaaatcaaacaacaaaagtttgaagcctatccggatgggatgggatgccatgccatgcaatgcaatgcaatgcaagggccccttgtgatttggatttggccccccaaatttactcccggatcacatgacaaactcgggcttgaggatgccggatttgatctccttgtgcggg

SEQ ID NO: 116971 - DNA, 1800 bp, Zea mays
  Clone ID: MRT4577_38168C.1
tcgtggacgcgtgggcggacgcgtgggcgaagccagtacattaaacacttcgtcaaccccaaccgtagtagtgctcaaggggagacggatgaggaggaggaagcggtataaagccgcggcgtcgttcgtcggcagccgcgtcctgagtcgctcgcagtcgcagccgacgccttttcctcctccttcacttgttcctcgctgcagctctcgccggcgaggtcctgggcgccgtcgacaaaccaccttcctcccccgtctctcgtcgtctcggaaggaacggccgcccgtcgcgccaaggattcaattcggcacgcggtggcagcagcttctggccatcggggtcggaggatctcactgttttcttcctgctgcctgctgcatttttcgcagggtgtgggagctgagttgggaggaggactgctgcagccatgaaggccctcattctcgtcggaggcttcggcacccgcctgcgcccgctcacgctcagcgtgcccaagccgctcgtggatttcggcaacaagcccatgatcctgcaccagatcgaggctctgaaggaagttggtgttacagaggttgtcctggccatcaattaccagcctgaggtcatgctcaactttctcaaggacttcgagagcaagcttggcatcaagatcacctgctcgcaggagacggagcccctcgggaccgcaggcccgctggcgctggcccgcgacaagctcgccgacggatccggcgaccctttcttcgtgctcaacagcgacgtgatcagcgagtacccgttcgccgagctcattgagttccacagggcccacggcggcgaggccacgatcatggtgaccaaggtcgacgagccgtccaagtacggcgtggtggtcatggaggagggcaccggcaaggtggagcggttcgtggagaagcccaaggcgttcgtgggcaacaagatcaacgccggcatctacctgctcaacccgtccgtgctcggccgcatcgagctgaagccgacgtccatcgagaaggaggtgttcccgcgcgtcgcggcggacggggccctcttcgccatggttctcccgggtttctggatggacatcgggcagccgagggactacatcacgggcctgcgcctgtacctggactcgctgcggaagaaggcgcccgccaggctcgcgtcgggcgcgcacgtcctgggcaacgtgctggtgcacgagaccgcggtcatcggggacggctgcctcatcgggcccgacgtcgcggtcgggccaggctgcgtggtggaggccggggtgcgcctgtcccgctgcaccgtcatgcgcgccgcgcgcgtcaagcagcacgcctgcgtctccagcagcatcatcggctggcactccaccgtcggcaagtgggcgcgcgtcgagaacatgaccatcctcggcgaggacgtccacgtctgcgacgagatctacagcaacggcggcgtcgtgctcccgcacaaggagatcaaatccagcatcctcaagcccgagatcgtcatgtgatccgggagtaaatctggggcgccaaatccaaatcacaaggggcccttgcattgcattgcattgcatcgcatcgcatcccatcccatcccgatatgcttcatacttttgttgtttgattttttgctcggttgtttgtctgcaagtgtaaccagttgtcgagtgtttaatttgtcggctatatagactattttcaagtttcgctccgtgcttgtagataggtatcagtcgtctatcagatgagtggaaataacaacttctcttcgtatactacaagttgagcaactcc

SEQ ID NO: 116972 - DNA, 1071 bp, Zea mays
  Clone ID: MRT4577_38169C.1
tttggggtaccctcgggttcggccggggatgattaattggcggcgaagccagtacattaaacacttcgtcaaccccaaccgtagtagtgctcaaggggagacggaggaggaggaggaagcggtataaagccgcggcgtcgttcgtcggcagccgcgtcctgagtcgctcgcagtcgcagccgacgccttttcctcctccttgtcttcttcctcgctgcagctctcgccgccgaggtcctgggcgccgtcgacaaaccacctccctcccccgtctctcgtcgtctcggaaggaacggccgcccgtcgcgccaaggattcaaggtgcgtgcaccgcgcttcttgcagagagaagggtgtgggagctgagttgggaggaggactgctgcagccatgaaggccctcattctcgtcggaggcttcggcacccgcctgcgcccgctcacgctcagcgtccccaagccgctcgtggatttcggcaacaagcccatgatcctgcaccagatcgaggctctgaaggaagttggtgttacagaggttgtcctggccatcaattaccagcctgaggtcatgctcaactttctcaaggacttcgagagcaagcttggcatcaagatcacctgctcgcaggagacggagcccctcgggaccgcaggcccgctggccctggcccgcgacaagctcgcggacggatccggcgaccctttcttcgtgctcaacagcgacgtgatcagcgagtacccgttcgccgagctcattgagttccacagggcccacggcggcgaggccacgatcatgttgaccaaggtcgacgagccgtccaagtacggcgtggtggtcatggaggagggcaccggcaaggtggagcggttcgtggagaagcccaaggcgttcgtgggcaacaagatcaacgccggcatctacctgctcaacccgtccgtgctcggccgcatcgagctgaagccgacgtccatcgagaaggaggtgttcccgcgcgtcgcggcggacggtggcctcttcgccatggttctcccgggtttctggatggacatcgggcagccgagggactacatc

SEQ ID NO: 116973 - DNA, 170 bp, Zea mays
  unsure (1)..(170): unsure at all n locations
  Clone ID: MRT4577_3816C.1
gactcgatcgagccgacgctgggcgtcaataccacccgcacaggctgcaccgtccgtaagacggcttatcgtatcaaaaccgtccctgcaaggntgtggaggttcacctcaaactgtaagcatgcacgccaaatgccactttgcgccatagacatattcaagggaaaagc

SEQ ID NO: 116974 - DNA, 382 bp, Zea mays
  Clone ID: MRT4577_38170C.1
atgttactggttaatttaagcataatgacaaatctgtagattgtattgttacatcttttcaccagtaagtgtgcattgagaagaataaaaaccacattaattggaaaccaaatagtaatacagtatgagttctataactgattagtgattagaaagaggctctattattgctttccttaataagatagcaagtattatagtgggaatggagaataagtcaattttttaaatccatggtcttctacgatttcagcaacagtatttatgaatcactcatcttatgctgctccatggatcagggtgtaggtacaaacatattgaaagtttagcagagaatattgagattagttaagacttgggagaacagttttggctggccttc

SEQ ID NO: 116975 - DNA, 543 bp, Zea mays
  Clone ID: MRT4577_38171C.1
cccaaaatggaaggggcccggccctttttttttttgaaccccaaactccaaggggccccccccccaaaaaacacggcccggccttaaaaaacggaaaacccgtaaaaataaccccgcaaggccctaaaaaaggggcggggcttcgactggctttaataataagggggccagaaaaaaaagcagaaggggctgcccaaaaccatggtaaaatggttaaaacccaacagaacccccgggaaatttgaaggggggggaccccccaaagggggtttttacagaacaggcccctaaaaaccgggggaaaaaaaacataacatcgcccttttggcaaagggaaccctggggggggggacctgggcccccgaatccccctgtacatgggaaaaaaattcacccaacggggggggggggccccccccacccaagggggtaaattttttttttttggccaaaaagggatttgaagcccccgcccaccatgctgattgggcccataagggcccgccggatgggccccgggggggtctgggggagcccggccaa

SEQ ID NO: 116976 - DNA, 292 bp, Zea mays
  Clone ID: MRT4577_38172C.1
ctccgtaccatggcggctatcgctgaagatcgtcaaccgcagcatggcgtcaacagagaagctgcgacgaaggcggtacacacgcagttacagatggagcgtacgacgaaacgtgacaacaggagtcaagaggagggctcgtctgctactgcctggttaacagcgtgagtcacctgagccgcaataaccgtggctttaccacgctgccagagaggtacgacctgccgacgtccgaccgacgcgacgacgacgggctcgaccaggtgaagctacccgtcgtcgacctggcggg

SEQ ID NO: 116977 - DNA, 357 bp, Zea mays
  unsure (1)..(357): unsure at all n locations
  Clone ID: MRT4577_38173C.1
gtnntancngatgcccgccttttaactaaatcgacngtgacaactgaattgccatgttgccttggctcttaccatancacaacaactcgaactttataccaattaaanttgacaatttggnnattcatcaatttggacgcaggcttatctcanctgactccgacagagttctaacgaccagagtggggatgcttacaccccggttttccacacgaccagacaagcntcgcgattctgcttcggcggcngacngacgccaatgaaaacacaccgcccctacttccctctaagctcagcgttgctcgcgtgccagattgccttgcccgagccaccgtgcggtggggcccggtcggccct

SEQ ID NO: 116978 - DNA, 212 bp, Zea mays
  Clone ID: MRT4577_38174C.1
catccctttttttgtttttataacatcttgctgagccggggatataaatgatgacacggcgtggacctgtcaacgtctaaataatggccctataaggacgaaacgacgcgaacccttcccacaccagacatacgccttgtaaccccatacattaagggtgtggtgttattcctggctcatcgtacccacatgcacatgcattttaaggtgac

SEQ ID NO: 116979 - DNA, 606 bp, Zea mays
  Clone ID: MRT4577_38175C.1
cagcctcactagggttttatcggcggcggcggcgagatggtgcagcgcctcacctaccggaagcgtcacagctacgcgaccaagtccaaccagacccgggtcgtcaagacccctggtgggaagcttgtgtaccagtacacgaagaagagggcgagcgggcccaagtgccccgtcaccgggaagaagatccaggggatcccccacttaaggcctgctgagtacaaaaggtccaggttgtctaggaaccgcaggactgtgaaccgtccatatggtggagtactctctggaattgctgttagggagagaatcatccgtgctttcttggttgaggaacagaagattgtcaagaaggtcctgaaaatacagaaaaccaaggacaagacagctgcaaaatagagctccaggaatggaagcctagcactgttttgtacactgcgaaaagtatttttggtggatggaaaatctagttgccttgtgttgagcatttagcatgtgagacatacctgttgaagtgttgagtttagagagtctggacactggaatatccctttcacctttgaattgttggaatattgggacatctgttccccaagttgctttgttatg

SEQ ID NO: 116980 - DNA, 310 bp, Zea mays
  Clone ID: MRT4577_38176C.1
ctctctcttgctcagttttgggactacagtgttttgctgttttagaaatcagaaagaaaggaattcatacggggatgtttgaacaatggaaacaaagattcatgtgtaaagctttttttttgcatgtaagttattgcatttcaaaggaccccgcccctttttttacgaaaagaacccttttttgcgcaactgtggacactatcaatggtgccttgaaatctatgacctcaacttttcaaaaagacttttttcaatgttattttaaccgtgtaaataaggtagatagaggaattaaactgtatattctgga

SEQ ID NO: 116981 - DNA, 810 bp, Zea mays
  Clone ID: MRT4577_38177C.1
agccgccggaatacgcatcaatcgccgccgcccgagccgcggagctctccactcctctcttacccttcctctcccaacccacgcagcctcactagggtttagcggcggcggcgagatggtgcagcgcctcacgtaccggaagcgtcacagctacgctacgaagtccaaccagacccgagtcgtcaagaccccaggcgggaagcttgtgtaccagtacaccaagaagagggcgagcgggcccaagtgccccgtcaccgggaagaaaatccaggggatccctcacttgaggcctgctgagtacaaaaggtccaggttgcctaggagccgcaggactgtgaaccgtccttatggtggagtactctctggaattgctgttagggagagaatcattcgtgccttcttggtcgaggagcagaagattgtcaagaaggtcctgaaaatacaaaaaaccaaggacaagacagccgcaaagtaaatctccaggaatggggaagcctagccctgttttgtacactgcgaaaagtaattttggtggatggaaaatctaggtgccttgttgagcatttagcatgtgtgagtttagagagtctggacactgaatccaccctttcacctttgaattgttggaatatcgggaatctgttcccctagttgcttttattatgaattcagatccaatctgggtaagatcaaccttctggtttgtaacatcttttgtccatgttgctcgttgttgctcttgatgctcattcatatctatgcaaagatcaatataaaggcgtcgcggaggtgtattacctatttagcaag

SEQ ID NO: 116982 - DNA, 349 bp, Zea mays
  Clone ID: MRT4577_38178C.1
ggggaaaagaaagaacgcccggatgatgcacatataaaatcaagggggggtatacaaaagctagggggccttttaggccgagggcacccctttttggacagggattccgggtttttgatggtccccctgtatagacggcttttgtccggaataaagggtttcggggggaaacagaaaccgacccgggaaaaaacaaattgaaccgggaaaaaaaaaagcaaagccctcccattgtacacaatatgggacaatggaccacccgcagaattttggaagaagccagaaaattttggccaatgtttccaaagggcgattaaggtcaacacaggggggttactgccacccggga

SEQ ID NO: 116983 - DNA, 949 bp, Zea mays
  Clone ID: MRT4577_38179C.1
gctgtcacacacacacagaggcaagtggtttccaaagccaagtgtgtactagcaaccaactagctcgggcggcagcaggcagccatcatgtcggaggagaagcaccaccacttcttcaaccaccacaagaaggacgaggagcagcccgccggcgagtatgggtactccgagaccgttgtcacggccaccggcgagggcgagtacgagaggtacaagaaggaggagaaggagcacaagcacaagcagcacctcggcgagatggtgcagcgcctcacgtaccggaagcgtcacagctacgctacgaagtccaaccagacccgagtcgtcaagaccccaggcgggaagcttgtgtaccagtacaccaagaagagggcgagcgggcccaagtgccccgtcaccgggaagaaaatccaggggatccctcacttgaggcctgctgagtacaaaaggtccaggttgcctaggagccgcaggactgtgaaccgtccttatggtggagtactctctggaattgctgttagggagagaatcattcgtgctttcttggtcgaggagcagaagattgtcaagaaggtcctgaaaatacaaaaaaccaaggacaagacagctgcaaagtaaatctccaggaatggggaagcctagccctgttttgtacactgcgaaaattaattttggtggatggaaaatctaggtgccttgttgagcatttagcatgtgagtttagagattctggacactgaatccctttcacctttgaattgttggaatatcgggaatctgttcccctagttgcttttattatgaattcagatcctatctatgcaaagatcaaccttctggtttgtaacatcttttgtccatgttgctcgttgttgctcttgatgcccattcatatctatgcaagcagtgtggccgtgtattatttattttgtcgatttatcataatcat

SEQ ID NO: 116984 - DNA, 1326 bp, Zea mays
  Clone ID: MRT4577_3817C.1
ccgggatccatcgccgctcactcccacgatcagcgtcgtcgcttatccgcaaatatctctcttcctctttgcagtcggcaccatgggttccgacttcaaatcgatccccttgatcgatatcggcccgcttgtcgaaaagattgatgatccaagcatggccaacgataaggatttactgcaggttgtccggttactggatgatgcttgcaaggaggccggattcttctatgtgaaaggccatggtattgatgagtcactgatgagggaagtcaggaatgtaacccgtgaattctttcagcttccttatgaggaaaaattaaaaattaagatgacacctcaaagtggatatagagggtatcaaaggataggggaaaatattaccaagggtaagcctgatatgcatgaagcaatcgattgttatactcctattagacctggcaaatatggagatctcgctaaaccaatggaaggatctaacttatggccaaaatattatgtagagacatttcaagaaagataatgcgaggtatagccttggctttgggaggggcaattgatgcttttgaaggggatacagctggagatcctttctgggtgttaaggttgattggttatcccgtagatattccagaagagcagcgcactgatactggctgtggagctcatacagattatggacttctaacactggttaaccaggatgatgacatatgtgcccttgaggtgcaaaatcgttctggtgagtggatatatgcaacgccgattcccggaacctttgtttgtaacatcggtgacatgctgaaggtttggacaaatggaatatatcagcccacccttcacagagttgtcaacaattcccagcattaccgtgtatctgttgcattcttctacgagtccaacttcgatgctgcagtagagcctgttgagttctgccgggagaaaaccggcggtgctgctaagtacgaaaaggttgtgtacggggagcatttggttcagaaagtattgacgaacttcgtcatgtaaatttgctaagtacgacaaataaatctgcattgcagcatcagaactccagacctatttggtgtgtagtgctgtaccagaaaggtagtaacggactaaagcaaaaaaaaaaaaaaaaaatttgaccttaacaagagtcgcagacttgcagtgcaggtgatatcacaaggaaatcggggggagatttgttctttctgctgcacggagttgtcgacaaccctgtcgctgaaatctgaatttagcatcagacaactggagatgctacgagtccgtctctaaaaaaaaaaaaaaaaggcccctagggcc

SEQ ID NO: 116985 - DNA, 266 bp, Zea mays
  Clone ID: MRT4577_38180C.1
ttttattctagggccatgagcaaaaaaacagggggggcttatttcataataggagggatgtgcagaacaggatctaatccagttttctttccacaagcaaaaatctcaccttagtacatcggggaaaccttagcaggcccaattgcttatgatgaatcgaaagctgtaacagcctacgacaagtcattgaacacaacctttgacaataacactgatgtgcatcaatagcgctaaactaaatagacttatttggatgcttagctatt

SEQ ID NO: 116986 - DNA, 551 bp, Zea mays
  Clone ID: MRT4577_38181C.1
aattcggcacgagactgtacacacccaggaaactaaagacctccaggagtagtcgtcgtcctccgatccgatcctattcctttcatcgatcgatcttctagctacgagtgtaccaacctaccatgggcaataatggctgcctcctgctcgcgccgcgctgcttcctgctgtcgtgtcggcggcggaaggcgcggctggtgctgtggggcggggagacccgggcggcccggcacggcaagctggcggggcaggtgatgatggacgtggcgggcaccgtggtgtgccgcgccgacgccttctacctggggcgcccggcgcccgtgctggccatcgaggacaggctcctgggcggcgccacctacctggtgctccccgtggaccgcctcccgcagggctacgacgcgctgaccgccgcgtccctggccgcgctctcctacggcagcaggcggcccggaggcgggtccggctcggcgtcgtcgccgtccatcgcgggaggcgcccggagccccttcgagtacgtcaagggcgacgacgggcgcaccgtcatcaag

SEQ ID NO: 116987 - DNA, 360 bp, Zea mays
  Clone ID: MRT4577_38182C.1
gccggccgggccgggaaatgccctgccatgcatggtcagtgatctcctctctctctctctcactcactcactcactcccgcgcgtacctgttggaaaaaaaaacaccaactacagcttggctacagttttgataaactacacacacatacacatggacagcagtcagcagcagcagaaacaagacgtcgatcacacgtgtcgtccgcgtcgtctgggccgtgcatgccgcgctaccgcgccggcctaactactcctccgcactttactttgcgccgcttttgcaaaaattttttgaggatatgaatttgctgaagagaactggacttgtgtgccaaaaaaaaaaaaaaaaaaggccccta

SEQ ID NO: 116988 - DNA, 217 bp, Zea mays
  Clone ID: MRT4577_38183C.1
acctctgcttcctcagcagcctctcctgtgccacttactaccactccctccacaactccttcatcacctactgctaggtcctcgagtccaatatcatcctcgatcttcatactcatatttcccacttcttcttcttcttcaccttctccacttatgatgctatacttaactccatctattgcatgaacttcaatgatctttacttcctcaacatcac

SEQ ID NO: 116989 - DNA, 527 bp, Zea mays
  Clone ID: MRT4577_38184C.1
aaccgaaccaccatgccggccacccctctcgtcctcgccctcttgcttctgctcctcgccgccgggccgcgccccgtggcccccgcctccaccgaccgcgccgcgctactggccttccgcgcgtccctctccccgccctcccgcgcggcgctctcctcctggcacggcccgctctccgcgtcctggctcggggtctcgctccacccgcccgccgccgccgccgtggccgctccgccctccgtcgcgtcgctcgcgctccagggcctcaacctctccgggccgctcccggccccttcgctcgcgctcctacgccgcctccgagagctcgacctctccgccaacgcgctcttcggcgagctcccctgctccctaccgcgctcgcttgtcgacctcgacctctcccgcaacgcgctctcgggcgccatccccacctgcctccctgcctcgctgccggccctccgcaccctcaatctctcgtccaactctctcgggttcccactttccccgtggatctccttctcctcgcg

SEQ ID NO: 116990 - DNA, 645 bp, Zea mays
  unsure (1)..(645): unsure at all n locations
  Clone ID: MRT4577_38185C.1
cacnattcgcccttttagcggctcgtcccgggccaggtaacaaaaaaaaaaaaaaaaaaaaaaaaaaaaaaaaaaaaaaaaaaaaaaaaaaaaaaaaaaaaaaaaaaaaaaaaaaaaaaaaaaaaaaaatttaaaaaaaaaaaaaaaaaaaaaaaaaaatttttttcctttggccgggccccccttaggggggatttttgcaattttccttccccttgggggccgttttgcctttcttttggggggcccatttccccttttggggggtttttttacatttcattggccgggtttttccaccgttgggcttggaaaacccttggctttccccattttattccctttggggaacttcccctttttcccagttgggttattactaaaagggcccgccccgtccccctttccaaaaattttccccgcctgatgggcaattggcccccccttttaccggccctttaaccccgggggggggggggtttccccccagggggcccgtttctttttccaggcccttaccccccgttcttttggtttttttcctttcttttttccccattttggggggttttccccgttaagctttaaatggggggctccttttggggttccgtttaagggttttacggcccctcacccccaaaa

SEQ ID NO: 116991 - DNA, 546 bp, Zea mays
  Clone ID: MRT4577_38186C.1
tttttttttttttttttttttttgtgagtgcccccaatataaggaggcacaggtcttagtaaacgtttaagcaaaaccagaatgctgcaatagcgaccaagttgtcgccttcctcctacttcctatcttcttcttccttctcaaggcacaatccgggctctaccacaccactgctaacattctggtatcagatttgtcgatccctagcaccagtctggagtcgtccaccagccacgaccacttcacccgttttcagcgacggcactgggcaatggatcccaacacgaagattatttgggaggagttggagaagaaattcccagccatggatctcaaatgggagcaacaattctccgaatccgcccgtcacaaggaggggcgtgtggaggccttggagtcggctacggccgatttcgagcagtgtcggcctaaaggggatgccgccatggaagaccaggaaactcagcaagcagggggagggggcggcgctcgaaccctcctcaacggaacccggacttccctcgaagccagagttctccctggtgc

SEQ ID NO: 116992 - DNA, 381 bp, Zea mays
  Clone ID: MRT4577_38187C.1
cccacgcgtccggcggtagtggtcatgtcatgccgaccatgaactgcgcgcatatccagcaaggtcaacggctgccaccacggacgaaggaacattcttcttccattactggcctataaatacattgcgttgttttagttggtgtttcattccctggctggctcgacgtgatcgtcgcagtaatatccatcaaccgccatggcctcctgcatgccgtcgtcgaccttgttccggaggctgctgctggtgctccagctcgcggtggcggcgctgacgaccctgggcgcgcaggcgcactgcagtacgggtactacaacgagacgttcccgggcgtgtagtgacctggttcgctacggcctgctttccaagttcgccgacgac

SEQ ID NO: 116993 - DNA, 1254 bp, Zea mays
  Clone ID: MRT4577_38188C.1
gatgggtacctcgaagggggccgggacggccgccctagcttccccacattcagagctccttcgccgccgccctagctttcccgcgagcgggacggtagccgccgtatcctccttcctccaacaccgagcggctccaggcaggcagcatcctcgcgccctgtcgtgtcgcctctgcctctgagttcagctcgccggcagccgccgcccgcaatggaggccctccggaaagcggaggcggagctcacggtgtacgtgcacccctccaacgccaagcgcgtccggcacgccgtatcccgccagctcagcgcgcttctcttcacgtatgtggaccgttttgatggcgtgttgctgatgcatgaagtttcattccttattggcaaagacaaagagggcaaacccatatatgaaaggagtgaccgtaatgatcaaattgctgaacccgtttcttatggcaaaatcatgaatggcttggtgccatatttcagcgtccaagtgcatgccaccctgctgctcttctctccccagccggacatgatcctggaagggatggttgaaatgcttgggaaggagtcaattcatgccattgtattaggggttttctcagtggcaattatgtctgaagatattaagttcaaattcaaatggaaaagtgatggagggaaatttgtgagcctcacagataaaaaacatgtgattgaaagaggaacaatgataaggttttctgtcaaaagggtggatacagaaatgagttgtcatattactggatctttaatcccacctcacactggatgcatgcgttggttgtcagtacatgatcctaaatatgcatcagaactcaaaagtggtgaaagtagatcaagggatacaagcatcaaaattgagcagaatgaacaagaacatagaatactcaagaatgaagatggcatggtgaaatctgaacggccatataaatcccgaaagagggtgcggcacattgagaaatgacatttcattgaggccgtgaagatacaagttggagatcccggtagcttcatagaaatgtacgatgattttgtaaaacgaattgagggttgcatttgcaaattatcaccttttttgacaagatagtagtaactgatctcatcgaaggggtttagtggcaaatgacaagtcccatgtttcaattatagcccgggcttatgttgggttctgttgcgtcctatatcctgtaaaaggcctttccttttgaagcataactgaaagagttgcacaccc

SEQ ID NO: 116994 - DNA, 1404 bp, Zea mays
  Clone ID: MRT4577_38189C.1
cattgggacctcgaggccggccggggaaaagccctggcttccctttcacggccgccctagcttccccacactgagctccttcgccgccgccctagctttcccgcgagcgggacggcagccgccgtatcctccttcctccaataccgagcgggtccaggcaggtagcatcctcgcgccctgtcgtgtcgcctccgcctctgagttcagctcgccggcagccgccgcccgcaatggaggccctccggaaagcggaggcggagctcacggtgtacgtgcacccctccaacgccaagcgcgtccggcacgccgtatcccgccagctcagcgcgcttctcttcacgtatgtggaccgttttgatggcgtgttgctgatgcatgaagtttcattccttattggcaaagacaaagagggcaaacccatatatgaaaggagtgaccgtaatgatcaaattgctgaacccgtttcttatggcaaaatcatgaatggcttggtgccatatttcagcgtccaagtgcatgccaccctgctgctcttctctccccagccggacatgatcctggaagggatggttgaaatgcttgggaaggagtcaattcatgccattgtattaggggttttctcagtggcaattatgtctgaagatattaagttcaaattcaaatggaaaagtgatggagggaaatttgtgagcctcacagataaaaaacatgtgattgaaagaggaacaatgataaggttttctgtcaaaagggtggatacagaaatgagttgtcatattactggatctttaatcccacctcacactggatgcatgcgttggttgtcagtacatgatcctaaatatgcatcagaactcaaaagtggtgaaagtagatcaagggatacaagcatcaaaattgagcagaatgaacaagaacatagaatactcaagaatgaagatggtatggtgaaatctgaacggccatataaatcccgaaagagggggcggcacattgagaaatgacatttcattgaggccgtgaagatacaagaatgtgaaaagtcatgttcgcttcaatggttctgctacctgtttatgtttcttgtggggggagaaggtgcctccagttggagatcccggtagcttcatagaaatgtacgatgattttgtaaaacgaattgagggttgcatttgcaaattatcaccttttttgacaagatagtagtaattgatctcatcgaaggggtttagtggcaaatggcaagtcccatgtttcaactatagcccaggcttatgttgggttctgttgtgtccctataccctgtaaaaggcctttccttttgaagcattactgacagagttgcccacccatattaaccttttttcaccatccaaaaaaaaaaaaaaaaggcggcccccttta

SEQ ID NO: 116995 - DNA, 1723 bp, Zea mays
  Clone ID: MRT4577_3818C.1
agttccatccatcgccgctcactcccacgatcagcgtcgtcgcttatccgcaaatatctctcttcctctttgcagtcggcaccatgggttccgacttcaaatcgatccccttgatcggtacgtctcccttaattaattcttcaattgatcccatttgctctctggatgtgatttctcccttcaaagattcagattcaggtatcctgatcagattctgctctgcgctgccctgagacatccaaatttcttttcctcgcatttccacctcaatcgcgctgtaacaccttcctcccatccccaacctcaagaatttggtatccccgtttgggctgcacgttccatgtgggttcaggcttgagagccagctgcccccgtttcttgttcgcctcctgccgccgccgccgcagtgccagtaacttctgcaagcgaagggacgcaactcctcaaggatttgattcatatatttgactctggcttcagtagatacagcttctgtgattcgccctctctctgtgcttcgatctctcggttttataacgagcgtacttgtttgttcccaccactgccagatatcggcccgcttgtcgaaaagattgatgatccaagcatggccaacgataaggatttactgcaggttgtccggttactggatgatgcttgcaaggaggccggattcttctatgtgaaaggccatggtattgatgagtcactgatgagggaagtcaggaatgtaacccgtgaattctttcagcttccttatgaggaaaaattaaaaattaagatgacacctcaaagtggatatagagggtatcaaaggataggggaaaatattaccaagggtaagcctgatatgcatgaagcaatcgattgttatactcctattagacctggcaaatatggagatctcgctaaaccaatggaaggatctaacttatggccaaaatacccatcaaattttgaagtactgctggaaaattatatcaaattatgtagagacatttcaagaaagataatgcgaggtatagccttggctttgggaggggcaattgatgcttttgaaggggatacagctggagatcctttctgggtgttaaggttgattggttatcccgtagatattccagaagagcagcgcactgatactggctgtggagctcatacagattatggacttctaacactggttaaccaggatgatgacatatgtgcccttgaggtgcaaaatcgttctggtgagtggatatatgcaacgccgattcccggaacctttgtttgtaacatcggtgacatgctgaaggttttttttttcctggcttctttgcacgttcacttgcatctgattgttccacaacatcaggcttcttatatgtaatccttctgggttcaggtttggacaaatggaatatatcagcccacccttcacagagttgtcaacaattcccagcattaccgtgtatctgttgcattcttctacgagtccaacttcgatgctgcagtagagcctgttgagttctgccgggagaaaaccggcggtgctgctaagtacgaaaaggttgtgtacggggagcatttggttcagaaagtattgacgaacttcgtcatgtaaatttgctaagtacgacaaataaatctgcattgcagcatcagaactccagacctatttggtgtgtagtgctgtaccagaaaggtagtaacggactaaagcatgcgcccgtctctgaaa

SEQ ID NO: 116996 - DNA, 247 bp, Zea mays
  Clone ID: MRT4577_38190C.1
cgtcgcgcctgaattactagaacatgatcgcgcacggctcgttacgaagcttcgaatcattacggccactcttcggggagttagatcttgtgaaagagtgccagagagctggtaacatcaaaagagctatgcatatctgtgctttaccatagacactcacacgtcgactgacatacgcttagtgctgcaactacaataggtatcacagactgggtgacataaaccgcttacatgtcaagactgagca

SEQ ID NO: 116997 - DNA, 653 bp, Zea mays
  Clone ID: MRT4577_38191C.1
ttgggaccctcgaggccggccggtatccaccttccattcaactgtgtagaagtgctctgcattgcgcatcgttccatccggttcaaatctctgtaccgattttaccgattgtacaatgctcgtcgaacataccagtctcgtcgtcagatagatctcaccgtgtattagacttcacgcatggtgtgagcgaagctacacaacatagcgcagagcctcaagaaagacataagacgatgctgatcatgtcgagactcgtaatgatcaatgaagcctacaatcggtgcatacatttgttcctcaaggtgtatcgacagcatcctcgtttgcgatggatatattatcatatcctgatgagagtccgtacgtgcactttggactacagaacgcgtcctctgaacgctcgtcatgtacgtcttcatattgacctgacatgaggtatacaagcttcgcaagggctagaattgaccagcgagtaacaccaccttctataggttgcttgacttcctttctaggcacggtgactgagatgcacacttaaactctatgctcgacggtccactttccatgtcaattctgctgctttcctgactctggctcgaaaaaacttcgatagcgatgacatttacagtgtaacacccgcttgattacataca

SEQ ID NO: 116998 - DNA, 323 bp, Zea mays
  Clone ID: MRT4577_38192C.1
ggctgaactagcatcagcctaatagctgcattttggttaaaaatattagtaattggctagaaaatgagcttggcaggggcacttatttgcacctcagtacacgaaaaccatccgaaggctttacctcagggcacctcagtacacgcatagcgagcagctccctgataactatctccgggtcgggcaggcgtttgccaagtgggaaggatcgccccagttaaagcagcagccgagcacggggtcgcccggcgctgaaacgaacatcccgccgtcagggttacgggctttggcttttcgggcttcgccttttcgtcctggagatg

SEQ ID NO: 116999 - DNA, 509 bp, Zea mays
  unsure (1)..(509): unsure at all n locations
  Clone ID: MRT4577_38193C.1
tcgagcggccgcccgggcaggtaaaaaaaaaaaaaaaaaaaaaaaaaaaaaaaaaaaaaaaaaaaaaaaaaaaaaaaaaaaaaaaaaaaaaaaaaaaaaaaaaaaatcttgatcctaagaccgagaccactcttaagggaaatttctaaaaaatttccttttcccttgngggcgggcccccccttgggtgtatttttcccatttccccttttctggggggcggttccatttcccttttaggggccccacttccccttttttggggaaattttccttttcccgggcctggttttttcccgttgggtctgggtaaaccctggggggccccaaattaaatggcctggaccaattgccctttttaacaggtggggattttggaggggggggggccccgctttgtttttccaaattttgcccccccctggtggtgatttcgccccccctttccggtgcccttaaacgccgggtgggggcgggttcttccgcttttttcccttccttttttgggg

SEQ ID NO: 117000 - DNA, 161 bp, Zea mays
  Clone ID: MRT4577_38194C.1
gagcgtaggccgtcagggggtgtatttttttgcatggccgaggggacaaagcaacaaaggacggctatggtcatgattacatccgcagtacggacacgaacatgctaaggggggacaacagcattagcggaactcactgagacctggcgaactcacgcgcc

SEQ ID NO: 117001 - DNA, 397 bp, Zea mays
  Clone ID: MRT4577_38195C.1
ccaaaaaaaagaaggctttttaatttcctttcctttcctttgtttgggggggggggggatcggtcggtcgaaaagtttgctgtttttgttgggctttcaattaattaaccaaccaaccaaccgggcgaaaagggggcaggcgcaaaaagaagctggcttggggggggggggtgaaccccgccaaagggagcatcgtcctttgttttgttcggcgaattggcaaacacattttgctggttcaaagagagagagagccctggtagaagtttacgggtcaagccgtttcctttttgaagcggaagttttcggggccgcccccggggttggcgcccttattgcccctgccgtcttttacggggaacaaggcggggcaattgacccggggggggtcgtgtcc

SEQ ID NO: 117002 - DNA, 433 bp, Zea mays
  unsure (1)..(433): unsure at all n locations
  Clone ID: MRT4577_38196C.1
cccacctactcacccacacattcgttcgagtgcctcacatatcaccatgtcgctgttaaacctccacttggccaagaacactggcctcctcagagggccccanagactgccctggaggaactgcagtgccactgtgtcagaggctcctggtgctgtcgctacaccctctccaagctccctgtgcgctacaagggagggacagttcttgacggctcactgtatggggcactggcttggattcaagcgtttaaaacagatggtggccctgcgtggtcccatctggatcctgcaacctacgaggccgatcagtcgacagggattaagcatcactctgtaccagtgattaggcgcacagtctgatgccctggattgaatcttgaatgatattggatgatcgctcacttcattatctacgctgtactcgttgagcaca

SEQ ID NO: 117003 - DNA, 287 bp, Zea mays
  Clone ID: MRT4577_38197C.1
attcctcccatctcacaagaactcctcagacccgagaagcgcaatgcggacatggacgacaccggcactggagctggagggaaggcgaagaagggagcggccggtcgcaaggtcggcgggccgaggaagaagtcggtgacgaggtccgtgaaggccgagctaccgttccccgtcggccgcatcgggcgctacctcaagaagggccgctacgcgcaggcgtacggcagcggtgcacacgtctaactcgcggacgtcctggagatactcgccgctgaagtcctggagct

SEQ ID NO: 117004 - DNA, 267 bp, Zea mays
  Clone ID: MRT4577_38198C.1
ctagtcgcaacatacatagtgaagtacactatcaacatttgaacaccaatgggagccaagggtgctgggctgcttgccctccttgctgtgtcatcaatcgctgctccctctacttttattccacaaggcgcagatgactacctctctccggtgacagaccggtgatttctatactgcactatacaatctatacatcgtacaagaagccatccaagccagcgtcttaccgtcattagcataaacagttcaacaaccagatgctctatt

SEQ ID NO: 117005 - DNA, 742 bp, Zea mays
  Clone ID: MRT4577_38199C.1
atccacacagcgctccgctctcataccccatcacgacattcacaatcgatcaagtcacagcccatgatcatgatgcaccgtgctacgatcatcgcgctgatctgctgcctcgtggcaggcggcggagcgcgcgcgcagccgttcgactacccggcggcgaggctggccacgacctgggccaacacggacgccgccctgccgcaccacgtcgtttacaccgacggctccgtggcgcgcgccgccctgctgcggctcaacccggcgggcctcggcccctcctacgccttcggcttcttctgcaccgccagccgcccccgtggcgacggccccgcggccccctgtacggagttcctgctcggcgtcgccgtcgtgtactgcaacagcggcgcgggtatgacgttcgtcacggccggcgtcccgcaggtcgtctggtcggccaaccgcggcagcccggtctgcgagggcgccaccgcggagctcacgccggagggcgacctggttctgaggtcgggcccgggcggagcggtcttgtggtccaccggcaccaagggccggtccgtcgccggggcgcgcatcggcagcgacggaaacctggtgctatacgacgggcgcaacgccacggtgtggcagtcgttcgaccaccccacgaatgcgctcctcgtcgggcagtcgctgaaacacggggcgcggctcatcgccaacgtgtcggccgcgaactggcgcgatggccggttctacctcg

SEQ ID NO: 117006 - DNA, 239 bp, Zea mays
  Clone ID: MRT4577_3819C.1
ggttgttaaaacccttccagcacaaacaagccttattttttccaaacacgtaaattcatttcaccggccaacagagattttcatgccaaggccagcttagctagcaaactggaagttggacaaaaaggtctgcccggtacaaaataatttatcctttatcagatctggtgtgcgccacaactgacattggaaattggtaaccaatgaccccacaactcaagaaccggttgggggggggt

SEQ ID NO: 117007 - DNA, 205 bp, Zea mays
  Clone ID: MRT4577_381C.1
ctgcgctcgttttcgcggctgctggcccccgccaggctgccgagctgctcttcaacacggtcaaagttctatgtccgggagccagtcaatgccaaacctaactgggtgaaagttgggctgaccttgggcacctcgattttcatgtggatttatctcatccaccaacacaacggagatgttttggagtataaaagaagaaatggac

SEQ ID NO: 117008 - DNA, 1407 bp, Zea mays
  Clone ID: MRT4577_38200C.1
atgccatacttcataaggagttttgcctttaatacttttagtaggagacctattcagcagactgctgttgtcactgcctcccccaaaaaccttggtggtacccctttgctttgcaaactgaaaggcaaatctgggattaggaggagcttgtttacttacactgattattcaaacgatggagtcaccaagttcttggattatgcattcagtaggtcaggtgatgggggtaaaattaggtgtccctgcatcaagtgttgtaatacatacaacatgtcccgtgatgtagtatattcgcatctgacagcctatggaataataagaagctataccttttggtatcatcatggagaagtttttggagaaactgagaatgagttggaagtggaagatgatgatgattcacatgatggaatgcaggagctgatggaggatttgttcccttcgactaaccatcctggcaacgatacaatgacagaaccaacccctagtgttatttttgaagatcaaccaattggtgaagttgtgaagttctacaacttgcttaatgatttgaacctgcctctttatcatggctccaatagtactaagttatctgcactagttaaattgctcaatgttaagaatatgggaaagtggagtaacaagtcctttgcagatttactagatatactcctgaaggacttcctacctcagaacaatatcaaaggaaaaacaaaggacaacaataattcacgtcttgatttgaaagaaatgaatctaaagccacatctgcatccagttaaagatggggacaagttagttatgccacaagcaccttatgttttgcctccagaagctaagaggtacttagatgatgtgcagacagtgcacaatcgtcctggacgaatcaatgatgagtctgattatggaaagttttctttaccaatattttcttatgtgggaagatcacttggtgctcgcaagactcgagaccttgaattgcttgagttagaacaggctcatatatatgttctaaggaattgtgatgaggtgcaaccatttattagtgagtatagcaatggcgaggaagtgtcttcattgccacaatatacatccacctgggccaaaaatttcattccgtggtttaggaataagatacataatttgtatgaccatgataaaagttacgatatgaatggattcagatttcgcatagagagtcgtgacaaaaatcggtgcacacagaacagcggagttgttgttttggcagatggaagtacaattagtgagaatgcagaatattatggcatattaacagagataatagagcttcaatttcttgggggaagacgtgtgccattatttcgttgcaagtgggttgacatattcaataaaaaaagagggataaagaaggatgtttatggactc

SEQ ID NO: 117009 - DNA, 1731 bp, Zea mays
  Clone ID: MRT4577_38201C.1
atgccatacttcataaggagttttgcctttaatacttttagtaggagacctattcagcagactgctgttgtcactgcctcccccaaaaaccttggtggtacccctttgctttgcaaactgaaaggcaaatctgggattaggaggagcttgtttacttacactgattattcaaacgatggagtcaccaagttcttggattatgcattcagtaggtcaggtgatgggggtaaaattaggtgtccctgcatcaagtgttgtaatacatacaacatgtcccgtgatgtagtatattcgcatctgacagcctatggaataataagaagctataccttttggtatcatcatggagaagtttttggagaaactgagaatgagttggaagtggaagatgatgatgattcacatgatggaatgcaggagctgatggaggatttgttcccttcgactaaccatcctggcaacgatacaatgacagaaccaacccctagtgttatttttgaagatcaaccaattggtgaagttgtgaagttctacaacttgcttaatgatttgaacctgcctctttatcatggctccaatagtactaagttatctgcactagttaaattgctcaatgttaagaatatgggaaagtggagtaacaagtcctttgcagatttactagatatactcctgaaggacttcctacctcagaacaatatcaaaggaaaaacaaaggacaacaataattcacgtcttgatttgaaagaaatgaatctaaagccacatctgcatccagttaaagatggggacaagttagttatgccacaagcaccttatgttttgcctccagaagctaagaggtacttagatgatgtgcagacagtgcacaatcgtcctggacgaatcaatgatgagtctgattatggaaagttttctttaccaatattttcttatgtgggaagatcacttggtgctcgcaagactcgagaccttgaattgcttgagttagaacaggctcatatatatgttctaaggaattgtgatgaggtgcaaccatttattagtgagtatagcaatggcgaggaagtgtcttcattgccacaatatacatccacctgggccaaaaatttcattccgtggtttaggaataagatacataatttgtatgaccatgataaaagtgagcaaatggaagaccttctgtccttatctaggggccctttgcaaaacagtacatgttttgcaggttacgatatgaatggattcagatttcgcatagagagtcgtgacaaaaatcggtgcacacagaacagcggagttgttgttttggcagatggaagtacaattagtgagaatgcagaatattatggcatattaacagagataatagagcttcaatttcttgggggaagacgtgtgccattatttcgttgcaagtgggttgacatattcaataaaaaaagagggataaagaaggatgtttatggactcgttagtgtcaactttaaatgtctacttcggacaaatgagccatttgtattagctagccaagcttctcaagtctttttcgtcaaagacaatctgatcaaaggttggcacttggttgtcaaaatgcagccacgtgacacctataatgtacctcctggaaattcagacgacgaagataatgaagatgaggattatgatgacgaggaagatatagctattgatgatcctccaactacatcatttggtggaaagaggaaatag

SEQ ID NO: 117010 - DNA, 939 bp, Zea mays
  unsure (1)..(939): unsure at all n locations
  Clone ID: MRT4577_38202C.1
agaccgcctaccctcatacgttacgtcttcccctccgagcgcctccccgactggctccgactcgccctcgcgtctcccccctccaccgacctcgcctcgccgctcctgtcgcgtcgcgtcgcctccgagctccacctctccgtcttcgagtactacctcttctggttcgcctactaccctgtctcgtccgcatcatctgccgccccggccgcatccgcctccaaccctcgactcacctcgcgcgcccgcctcgagacctgggtctctactctcgccaccacggccatccgcaaatccggtcagaagcccgaaaactcgctatacctcaggctgctctatgcctacctcagggagttcgtgccaacgcgcactccacccgttaatatgtccgggggcggcaccctgctccaccgtgcacccagccatggcgtcgatgcaatcgactcgtttgcacgggccgagttcttccttcacacccttgtccacttctggcttgtcggcgatgacttctcgccgctccccaagcagacttgccatgcactcggcttgcggttaccttctcgtgctcatgctgacttgagtgagcggccaccgtcgccaggcctgggtgatgcagtgaagctgcttgtcatgtacctcaactgctgcgatggccgcgcactagccgatgcgtgtgtgccatctcctcaagggttgtcagtgtccaatgggctctgtgatacccaggttgggttctggaatccattgatacagaggcctttgtaccggtttgtactcaggaccttcttattctgccccattggcactgcgataaaaaatgcgtcacaagtcttctctggtgtgggttggcttatatggagccatggnaaagttacccaacaggagctggataggtatggcaagcagcaggcgggggatgagaaggagccacaaacgact

SEQ ID NO: 117011 - DNA, 336 bp, Zea mays
  Clone ID: MRT4577_38203C.1
aaaaaacgaaattccccacgattttttaaccactttagatccttttacaagataacccaggcttaaccattccacaacataccagttcacgttacgtaacaataaagggggccgcaagcaaaagcaaaaaaacgcgttacgtaacaatacaggggggcgtaagcaggaacagattttttagattttggggatgtccttgtcctcaaactggatgtagtcgttgcccttcttgcctttcttgggcccattgacgttaacccccttgttgagcctgagcgtgtcaggaagctccccggagggcttgggcaggggcgccttgttgttcatgttcttggg

SEQ ID NO: 117012 - DNA, 282 bp, Zea mays
  Clone ID: MRT4577_38204C.1
ctgatcgttgcagggatattcttgttgcagttggggcttgctgttttgctgaaactatatttcttcacgataactgtatagggttatttacatctaatgatcgtactagtcaagaatacacaattttccatgtggaatcacttccatgttcattgaacattgatgtaatttttccatgtatacatctttcttacacgtagaattgagaagcccctgaaattgaattacatcagccaaacaagtactgtgattgatatgggtgaagagtctgatctgtagtct

SEQ ID NO: 117013 - DNA, 666 bp, Zea mays
  Clone ID: MRT4577_38205C.1
atgtggaactgctcggcgccgcgctcgtcgctcctgctgcagtacggcgacgactacgtgcactggcttcgttcgggagttttgggtgttcttcctggacattctcgtcgtgtgtcactcccaagtaactggaatttgtttctgcgcgctcactactcgatgaaatggacggcagcgggggagacggcgaccggtgacgggggcagccgtctaaggggatcgaagaggctcaagacaaagacgccagccacagcacaaggtccacagcaccacggccagcggtgcagtccgaaaccaacaacaagtcagtctatcaaggcaccaccatgtaagaggagccagaagctgggggacaagatcacggcgctccagcagctagtctccccttatggcaagacggatacggcatcagtgctccacgaggcagccacctgcatcaagcacctccacgagcagatccagattctgacggcctcctaccctgaactcagttctcaagcgtcacagcaggacacgggcgacgaagagggcggcgcgacgggtctgcgccggcgaggcttgtgcgtggcgtcgctgtccccggccgtcgtgcagctcgtgtcggccgaggccgcgctcggaaaccgcgacacggaagaccactggcgctggctcggcactctgtag

SEQ ID NO: 117014 - DNA, 404 bp, Zea mays
  Clone ID: MRT4577_38206C.1
ttgctctagagcctctcattctattgctgaaccaatactcttctctaacgagcactccaacgtgtcgatctcccaccccactaactacgaccccagatccctcgtctgcacgacatcttcgaaccctaatctactgatcaggatatacgtactgttgtaccacttgcaccccttccccatcaacctcaaggacattgtcttcatcaagaacctcctaactcacatcaacgacctatctgaatgccatatgttcgacaatctaatacacgcgataccacacttgtaataactgtcacttacatgttcccttcacaactctgctatctaagtcccacatgtatgcgacagacaacctaacctccttttgttactctgattatcacttacctgcgctctgcttaaaa

SEQ ID NO: 117015 - DNA, 393 bp, Zea mays
  Clone ID: MRT4577_38207C.1
aaaaacagggcccgcgggggggcgagaccaaaaaactactaacctaaccacaggcggggtacaacagagcggggggcccagccctgtttattggaaacaaattggcatcgaccacccccccctcggaaacgaaaaggcaaaaaaaggggctcacttggccctggcgacctgggtgcggataaacttaacggcggaaaccatgttggtcagggcgggcttgacccccgggtacttgcgggtcttgaggccccagtcggggttcacccaaaggatgttggggtccaacacccccagcattttggcaatgcgggcggggatctccccaaccgacgggatcctgggggaggggattgtaaaaacaccggggccgatccccgcgccctacttgacccc

SEQ ID NO: 117016 - DNA, 186 bp, Zea mays
  Clone ID: MRT4577_38208C.1
ttcgttcggcactccctgacattgagaccgggtgcgggaaccaaggtgcggcgatgcctgtggacccctttctttgcgcttgcagccccaatattttgcataaatatcaaacattgtagcttcaacaagcggatgcccagtgcgcacgcttgcccaaaaggagcaggacatacaaatgatgctcgc

SEQ ID NO: 117017 - DNA, 296 bp, Zea mays
  Clone ID: MRT4577_38209C.1
tctagcgactgaagcagcatggccaagccgtgtggggtgcgcctgagcggggaagcccgcaaacaggtggaggtcttcaggcagaatcttttccaggaggctgaggaattcctctacagattcttgccacagaaaatcatatacctgaatcagctcttgcaagaggactccctcaatgtggctgacttgacttccctccgggccccactggacatccccatcccagaccctccacccaaggatgatgagatggaaacagataagcaggacgagacagaagtccctaagtgtggatt

SEQ ID NO: 117018 - DNA, 575 bp, Zea mays
  unsure (1)..(575): unsure at all n locations
  Clone ID: MRT4577_3820C.1
atccactcgctcctcacacagaaaacctagacgccgacatcgaagagatctcccaggtaagcaagagcgtccaccccgccgacgtcatgaagagcaatccccgcgtcaagaattctcgtcgaaagggacgcaaggcgcacttcacgaacccgtcctccgaccaccgagttctcatgtccgacgccctgacaacagagctccgtcacaagtacatagcgtgagctccatcccgatccgcaaggactagtaggtgcaagttgtgcgaggaaactaccatgcacgtgagggtaaggcgcagcagatgtatcgacatcgttgggacatccacgaccagcgaaactatcgccataaaggggaaggctccatgcgagaatgggagaatccacccctccaatgcgatcaacagcaagctgtaactcgacaaggaccgtaaggctctcctcgagcgaaagggctggaggagcgccgccgactaggctaataccaagtttactgcgcagacgaccctctcatgcngnctgctgcctgagccgacacatgcagatcttctccgaaaaatctgatagactatacta

SEQ ID NO: 117019 - DNA, 713 bp, Zea mays
  Clone ID: MRT4577_38210C.1
tcgagtttttttttttttttttttttttttttttttttttttttttttttttttttttttttttttttttttttttttttttttttttttttaaaggggaaacggcctttttacccaaaagggggcccaatttccttgtttttttttccaaaaaataacctaaaaaaaggggcccctgtttaacccagttccccccgggggggcccttaaggatgggaaaactttaaaaaacccccgcccaaaaaaacccccccgcccaaaggttttttggggcccccaaaaaacaccccctaaagggaaaacccccaaaaggccaaaagaccttttgggggggaaaaaaaaaatttttaacccggacagggccgggtggccccccccaaaatcccttttttttaaaaaaattcccggggattccccaaaaaggccccggccctttttttaaaaaccccccctttaaccccccctttcttaaagggcccaaagggggggggaaaccccctttttgggccaaaaaagctttgataaaaggccaaaaattttgctttaaacgggggccccgggggcccacccctcattggggagctaaaaaccatttggtttttccccggggggaaaaaaaaaaaaaaccccccccccccccttgaaaaaaactttgggggcccacttttaaaaggaaaatttgcctgggggcggcctgtttggaaaattttggg

SEQ ID NO: 117020 - DNA, 422 bp, Zea mays
  Clone ID: MRT4577_38211C.1
atagattaacaaaacaaactttctatcttgagcggcttctatacatttaaatgggttagtactcgtgggggaccacacaagtaacacaacctgctgtgaagaagcccccattcttgagcttgactgcaaagaacactcagctcattcaaccaccactgctgctaattttaaactctgccttctaaatgaggatgtaccatggtaacccttgtcatatgctccttttggctcgaatctgtcatagcccttatcaagagctgccaatttctaacgggcctgaacaaactaactttgttacataatgttacggaagttccattcattcaactctctcttggcaaacattaggcagaacttgtgatcgatactccataacctctgaaccttgctagagataaatatttttatacataacatttact

SEQ ID NO: 117021 - DNA, 492 bp, Zea mays
  Clone ID: MRT4577_38212C.1
accaggagactcgcgacacaagggggaaaaccacacccaggggagtccattttatgggttgacccttggacacgctgcaccaaaacacactggggccaaccctgtttgctgcaaactgggtcaccctttaaatacctacctaacaaaatagtaaaaaccaggggaaacctcactaaaatacttttttttagtacatattattgggactgcaaacaggggttccaagaaaataagggggctggtgcactcccaacaaaaagggcatgttgggactaaaattgccaggtggggggctttttgtattctcctgggggttaacgacattttcggccaaaccgaacaattgtgtgtttgaaccacaaactggtgggggttttatttggatgtgggcttttttaactctaacaggggtgcgtgaaatcattttgtagaaatcgaatgcatacccggctaaactgtagtcggtgagaataccctgaaaaccccattttg

SEQ ID NO: 117022 - DNA, 878 bp, Zea mays
  Clone ID: MRT4577_38213C.1
cggctaccaacgtcccggtgaccatgcccgccaacacagcgtcagtgtctatccggtccctcccgctgccggggcgttggcggagaacacgggggggaggaacgccccggtgaccatgcccgccaacgccaacgccaacgcaacgacaggtgcaccggcgccggtccctcccgccgtcgggtcgttgccggagaacacccagacgaccaacgtcccggtgaccatacccaacacagcgacaggttcacccgcggcggtccctcccgccaccgggtcgttgccggaaaacaccccggcgaccaacgtcccagtaaacatgcccgccaacgccaaccagccggccaacgtcgttccaccgcaagtagtggtgtcgaagcttccgccggaggtgctggccaagctccagcctggggcggccccggctctcccggccgacatccctcagatccccaagatgcccgacctctccgggctggccaacatctcgttcccggcgatgccgtcggagcccaggatgccgcagctgccgcccgacttctcgttgtacgggtacgaggtccccatccctaagttcatcaccaagatggtcgacggcaatggcgccggcggtgggcaacaaaactgagccgaagcattgtttcgatgtttgtggcacctgagctgtcaattacacgttaactgaagtttcgccatgcttttcagttctaatgtcgtcattcttttggtttgggtgatgtctggcaggaaatgtgatgatgggctatgttcttgtcatgtatatactctctttgtcctaaattataaattgttttatactttttaaattcaaaatatctaaaatcaattaaatcaaaaaaaaaaaaaaaaaatttgcggcc

SEQ ID NO: 117023 - DNA, 624 bp, Zea mays
  Clone ID: MRT4577_38214C.1
ctcacgcgtccggaccaacgtcccagtaaacatgccccggacgcgtgggcagccggccaacgtcgttccaccgcaagtagtggtgtcgaagcttccgccggaggtgctggccaagctcccgcccgacgtgctggccagcatcccgccggagacgctggccaacatcgcggcgtcgcaggggcagctgcagacgagcgagatcctggccaccatcccggcggcgcaggcgcagggccagctgccggcggacctgccgccggaggtgctggccaagctcccggccgtgcagagccaactgccggccaacattacgcccgagatgatgaccagtctcgccgccgtgcagcagcctgcggctgctggccagcctggggcggccccggctctcccggccgacatccctcagatccccaagatgcccgacctctccgggctggccaacatctcgttcccggctatgccgtcggagcccatgatgccgcacctgccgcccggacttctcgttgtacgggtacgatgtccccatccctaagttcatcaccaacatggtcgacggcaatggcgccggcgaggggcaacaaaactgagccgaagcattgtttcgatgttagaggcacctgagct

SEQ ID NO: 117024 - DNA, 410 bp, Zea mays
  unsure (1)..(410): unsure at all n locations
  Clone ID: MRT4577_38215C.1
tgataaatcggacaacaccatccggnccctagccatttttaaagtcttgaacgcctactacaaccaccctggcctcctcatgggctgctcacccatcaaccacattctctactacaaggtcatgcactacaaccccaataacccctactggttcaaccacgaccgcttcgtcctctccgacagccacagctgcatgctccattacgccctcctccacctcgcctgttacgacagcgttaatgaggaggacttgaagcaaatcaggcaataccgaaccaaaacacctggccaccctgagaacttttagactccaggagttgaagttaccaccgggcctcttggtcaaagtatccccaatgccggtgggttagcacttgctgaaaagcacctggctgcccttttaacaagcc

SEQ ID NO: 117025 - DNA, 467 bp, Zea mays
  Clone ID: MRT4577_38216C.1
gggcaaaaaaagaattgggccccttgaaataagggcccaagacaccaatcaaaattttttcgaaaaccttgctaaagcccaaagggggccctttttcccctggcccccaagggggggggggaaactttccagggttacctcccggaaaccccggggggcgggctgctttgccaaaaaaaggggccccgggggaaccccaggggaatctccttattagccccctaaaggggggcccctccaagaaagacattcccgccaagggcgaccggaaagcccccacggggggggcccggctcaaaagcccggggggtaggggcccccatgatcttggggccaggggggaccccccttttgcccctccagaactggggccccccaggggccgggaagaggtgcccaaccaggccctcaaaaaagggcttgggggccaaaatccgaccgcggtgttccccggaaaaacccccccc

SEQ ID NO: 117026 - DNA, 360 bp, Zea mays
  Clone ID: MRT4577_38217C.1
actcacaccgagacatctactcggatcagatctccaccgggcataagctccccatccatgaccaccttcaccgcgacctccctgctcgtactgacgcccgcggctgtgtccgtatcacagtttccaagaggcatcaacagatgtatgaacaacagaaggacgttccgtctcaggaacatcacttcctcttctcagtctccttccatgccagcgacttcccattaagacttcaaatgcaacgttgacgactgcacttcagaaacagatgtacttctcgcgtccttcatccatctccaactgtctcgggactctgcatgcctcattgctgcaacactgatacataaatgcttacgccgttac

SEQ ID NO: 117027 - DNA, 884 bp, Zea mays
  Clone ID: MRT4577_38218C.1
gacgattcaaaaatttcccctttcccactcccaaaacccactccgcctcccccgtgtacggtgtaccccatggcgcccgccgcggccgtcaccggcgccggagattccgatcgtctcgcgcgcgaggtggcgcgggtgctggacgagtgccgcacatcccacgccgtgcaaccgcgtaagctgcgggagctcgcggccctccgctcctcttcaggaggcggcggccgcctcttcatcgcagccttccacgtcgctgtcacgccgctcttcgccctcgcccgccgatccgctgaatctgaccgcgtcgcccgcttcatctctgccttcgcgtccgcttccgcatcatcggccgacggtggtgggaacgggttcctcgaggagttccttcggttcctcgtcaccgcgtccaaggccgcgcaccgtcccgcgcgattccgcgcatgccaaatcatctctgagattataatgcggctgccagatgatgctgaggtgagcgatgagatttgggatgaagtaattgatggcatgaaggtccgggttcaagataagaatgctgcaattcgcacttatgctgtgcgagcattgtcccgttttgcagttgaaggagaggatggtggcattcttgacctattccttgagaccctagacaatgagccgaatgctgaggttcggaagacaatagttttttctcttcaaccatcaaataatacactagagagcgtagttgaatcaatgcttgacattagtgaatcagttagacgagcagcatattctgtgcttgcaactaaatttcccctgcagactcttagcattaagcaaaggactactgtccttcaaggggcctatctgtaggtctgttcagaaacacgagtgcctgagatgct

SEQ ID NO: 117028 - DNA, 747 bp, Zea mays
  unsure (1)..(747): unsure at all n locations
  Clone ID: MRT4577_38219C.1
attgggaccctcgaggccggccgggcaattattctcactttagatttgtcatgagtcaaacttctctaacttttaccagctttgtagaatatacacaaacatctataatataaaattagtttaattaaattctccataactcatgtattgatagcgggcttatatgaacttatccatgtaaaaatatatcccccctaagaacagtcaaagttaacaagtttgacatacgagttaggacaaagcttaagtgaactataacttggaaaccaagtttttaattcgtcacttctaaatggttggtataacattcctttgtactaactcctcaaaactgcacatctttactaaacaggccagaaacatgatttatttgtagtttgtatttctgtatttcagacttttgtttcttatgtacaccacatttatgttttgtcaaaaaatagtcctggtcttgtcctattgaaatataaatctctgatacaactggtcatgaaagtgtttatatcacctttatctgcactatcaggttggcgcctatgcagtttatatgtggaggcatagaagattttttgggaattctagggagagtttagaacatattgtgcgtgtggttgtcctgaatatggtactgctccactntttttctgcttattttattttgccttcgtttcaaaaactttctttgttctatctgcaacattttctttttcatagggtatgggcctcctttcagggggattgataact

SEQ ID NO: 117029 - DNA, 373 bp, Zea mays
  Clone ID: MRT4577_3821C.1
ggggccacggagtaccccgaaccgggggaaaagaacatttccaagccagggtccgggggttccagccttacgggggttccctttttggcctttggccattttatcagcttcttttgggggggccctcaaactttgtcccctccaaatttttttcaattccccgggggagaagcccaatcaagggggggattttgtcccttttccccaaaggcccccgccctacagttccaaaaaggggggtttttggtttgaaaccccaaaggcttgaaataacctacatgacgaccttttcagcaagtcttgttgggaaaaaagaccatagctttttggtggtgggtgggtttcccctttttgaaatatatgggcctcattt

SEQ ID NO: 117030 - DNA, 366 bp, Zea mays
  Clone ID: MRT4577_38220C.1
ctgctggagctggtgtggaggctccacggcgccgggcgcctcctggaggccgtggacccgcgcctcgccgccggcgggtacgggtacgacggcgaggaagccgagcggctgctgctgctgggcctggcgtgcagccaccccaacccgcggcagcggcccaaggcgcaggccatcctgcagaacctgcagacgcggtccgtgccgccgctccccgtgcccatgtccaagccggtgttcatgtggcccgcgccgctcgccgacggggagggggaggaggaggaggacgcgacgcacgcttcgttcatgtcagtgcaagggggtcacacagcttgggcgtaaacttctagtgcaactaccgctacacgt

SEQ ID NO: 117031 - DNA, 360 bp, Zea mays
  Clone ID: MRT4577_38221C.1
gcgcggactcttggttcgacccatgctttcacttataaccgttgcagactcacaaagtcaggggaccatctggagctgaacatgtactagtgaattcaaaagcttaatataagtataactctatgctagtcaactaacatgacaacatgctattcgtacagtgcatttgcaactagcataagttattgtaaaagtcgcttatatcataagatatgccgcattacgagccattgctaaaagtgatgtacagctaatatgtatactccatatatcacctatgcagcatcatgtatgtaaacctcctaaacaaagacatctgcaagatataattataccgcatctacataaacttcgacatga

SEQ ID NO: 117032 - DNA, 533 bp, Zea mays
  Clone ID: MRT4577_38222C.1
ccggccgggttggcctgagagtgctagggttttgaacagatgtgcggcagcagttgcgtgagcgtctggatgtgggaggcggcgcgcgtggtgagttgacgactcctccgcgagaccgcgactgcactgcggtgatacagtcgtgtatcctgcaggcatcgacacagggtagcaggggcgtttgcgcgagcatcaggatgcgggagcctgctagcatgtcagtccatgtatcccaaggccaggatcctctcacggtctcacccacgggcacatctctggtgagcgtcctactctcagcccccctattctcattctctagatcgaccagttttcgttcctggtctgtgtactctgttgctccattgcttgaggaatgtttgtgttgtgtctaggaagcttcataatccacaatgatcagtgtacaaatctatacttggtagtttggtttctttgattatatatgaaagcaacccaagtaattgatgaattacaggtatttgtgttcagaaaaaaaaaaaaaaaaagcggcccct

SEQ ID NO: 117033 - DNA, 160 bp, Zea mays
  Clone ID: MRT4577_38223C.1
gagaaaaagaaaattgaatctgcagtgtggaatgaattcaagagggtaaaagttagagatgtttgaaaggaaaattgtaattattgttcaaagaagcttttgagtgtaacaaataatggtacatctcatttgaaagcacatctagagacatacatctatc

SEQ ID NO: 117034 - DNA, 251 bp, Zea mays
  Clone ID: MRT4577_38224C.1
gcacacatattattcactttctttgcggctgaggaatctttacaatattcaacaatttaaaatccaccctttcttttaaatataaaccacaggggttataaaaccaaaaattttgaaaacgcaggcctcattggatatcaaattcccagaacctaaagatgaacgcacatggccctcctctaccattatatattctacctgggggcagatggagtcctacaaaaataaagttcttcattttcacacttttc

SEQ ID NO: 117035 - DNA, 1326 bp, Zea mays
  unsure (1)..(1326): unsure at all n locations
  Clone ID: MRT4577_38225C.1
ccttctcgcgctctcgagattcttcccactttcacactgaagattcccgccgcctcccctgtgtcggcgctgctgccagcgctagcaccgatgccaccttgtcttgcctctttccatccaccgtcatcgccgctacctatggcttccacgtcgggccgtctcttgcctcatcctgttccccgccgctgctctcgccacccactatcggaggcattgtgtccagcaacatggttaagagggtatgctgtctgagcgccagggagatccgaacggtgatgccctctactcgcttcccattgtcagtggggctgccatagttggagaatgcggcgtaagcaggccgacgacgacgagttcctcaagatgtaatccggtacaaggaaacacaaggtcgaggtggtgaggcatggagctcgccttgggggccatggccagcttggcccctaagctaggcgacctgctcatggaggagtatgtcgtgcagaagggcctcaagcccgacatcgagtctctctccagggagcttgtgatgatgaacgccgccctcgtcgacgcgtctcgggtaccacctgaccagctcaccgaggtggaaaagctctgggcacgcaaggtccgggacctgtcgtatgacatggaggacgccgtcgacgatttcatcctgcgtgtggctggtggtgacgactctgccgccgactccaaattcttcaagaagacccttgccatggtcaaggacgtgatgtcgatgaagaagttcaaggatcggcgccagatctccgacaaggtcaaagacatcaagaaactctccaacgagttagctgaacttcgtgccaagtacacggtaaggggtgtgggtgctgatcttgccgcgagcaccggcatcgacccccgtgtcatcaatctgtacaagaaagagacagatctcgttggcatcgaggagtcaagggacaaagtcattaggatgctgtctatagggaccaaagatgatgatgcacatgagtcccatcaggatctaaagatagtgtctatagtcggggttggaggactaggtaagactactctagccaaaacagtgcatgacatgcttaagaagcaattcgactgttcggcttttatttctattggtagaactcctaatctgaataggacattcgagaagatgctattggaactcgatcgtgagtataaacaaattgacatggccagatgggatctagaacaatttaaaaacaaactggatgaattcttgaaggaccaagaggtacttgatcgttgttgatgaacatatgggatgnttgactcatggngaagcgatcagatatgccttga

SEQ ID NO: 117036 - DNA, 646 bp, Zea mays
  Clone ID: MRT4577_38226C.1
aattcggcacgaggagaaggtcgagctggtgaggcatggagctcgccttgggggccatggccagcttggcccccaagctgggcgacctgctcatggacgagtatgtcgtgcacaagggcctcaagcccgacatcgagtccctctccagggagctcgtgatgatgaacgccgccctcgtcgatgcgtcccgggttccacatgaccagctcactgaggtggaaaagctctgggcacgccaggtccgtgagctgtcgtatgacatggaggatgccgttgacgatttcattgtgcgtgtggctggtggtggcaccactaccaccaccgacgacaacgacaccaaagtcttcaagaagatccttggcaaggtcagcgccgtgatgtcgatgaagaagttcaaggatcggcgtcagatctccgacaaggtcaaagacatcaagaaactctctaacgagttggctgagcttcgtgccaagtacacggtaagaggtgcgggtgctgatctcgccgcgagcaccggcattgacccccgtgtcatcaatctgtacaagaagagtcggatctcgttggcatccaggagtcaagggacaaagttatcaagatgctatctatagggaccaaaatgggcgatgtgcaagcgtctgatcag

SEQ ID NO: 117037 - DNA, 418 bp, Zea mays
  Clone ID: MRT4577_38227C.1
aacacacactcgatacacaaaaaatccatcagaaacgcgctacagtgccactcactgcgggaacgactagaatcgggcgaaaaacttatacaaggaggggctgattaattggaacccactagaacaggccagccttggggttctccacctccttggcccagtcgggcctgacggggacccagagcaggacgagcgcctgggggaagggtcccccgaggaccaagggggtccaaacgcccttggcgccgaggacgagggagaaaccgaggaagacgccgaggggaacgccgacgacgaaggagaaacccaggaggaggacgccacgaacgcctgacacccgaagaccaccgcgaaaccggagaggaccggctgtatgccgaggaagaccagcggggacccgggggagaacccgggaaaa

SEQ ID NO: 117038 - DNA, 407 bp, Zea mays
  Clone ID: MRT4577_38228C.1
gctttgtatccttgacgtcttcctgcccgagagcgagagctgtcccgaaaaccgcattatacctggaagcagaattcagataaactctgagaaactcctgtgctcttgcaatgcagtctgtgggatgggaaggttcacggttcacccacaggtctctgttgatggaggttctgtgcaccgaagccgagctcttctcgcgcccgtcgaaactcctgggcgtcgaaggcaacggcaccgaggggacgggaggcggcgcggcggcgcctgactggagccactccttgtagtacacagcgaactgagccgtgccgctgtccatgtggtcgctgtagagcctctgcagggccttcatcctcgtgcgccggtcgtcggcgttccggccagcgacaaggtcgtcggcctccctg

SEQ ID NO: 117039 - DNA, 868 bp, Zea mays
  Clone ID: MRT4577_38229C.1
gtgttcgtttgattgttgctctggctgtctcttgctaaccaattttgtgggaaattcaacctttgaagcatcaatgtggtgaataatttctcaaaccctcaatatgctttccctaatgctggataaggcgctctcaaaaagccatatgaaacctatggatataaatccaggtgatgattggacaaatgtatccctttgatacataataaccagcatgcccaacgtgatggatggtggcgaccgtctgagacaaggtaacttaaaacttctatgcacacaatttgatctcttcttcattatgtccctcatagtggttatatatcattatattttttgctctgttcgcacaaactacttttgttattcatcaatcagacgcgttaagtggcgaccatctatttgtcgttctactccccttaacatgtaactgttaagtggtaaccaatcagacgcgtccatttcaaggttttccttagtttccattgaaatttatctattaccatggttatctgttaaccaaactatgaagttctgcatataatggtcagaggctatggtatttatcttatagtacaggaaatagacgccgaagcagctcctatgttccattgaagaaagaaggcaattcaattctgaatgataagaaaaataccaagggctgatgcccgactctcagctcagcactttcatcattgtgatgtgccaaaacaccgaagccatatcatacatgatcacctatggcttcgccgctgtcatcagcacaagggtgtccaacgagctgggagcccggaacatcgccaacgccaggaaggcgctcaccatgtcgctggcgctgtccctgatgctgggggtgggcgtcctgctgctc

SEQ ID NO: 117040 - DNA, 1443 bp, Zea mays
  Clone ID: MRT4577_3822C.1
atggagtggctgcgcgggaaatgcatcggcaagggcgcattcggcacggtgcacctcgccgtggacacggccacgggccgcgccttcgcggtgaagtcggtggactcgaagagcgcgccggcggcggccatggcgtgcctggagagcgagataaggatcctgaggcggctgagctcgccccacgtggtggcgtacctcggcgacgacggcgcgacggcgacgacgaggaacctgcacatggagctggtgcccggcggcagcgccacggaggcggcgcgcgggggcctcgcggagcgcggcgcgcgcggcgtcctgcggagtgtggccgccgcgctgcggtacctgcacgaggaggccggcgtcgtgcacggggacgtcaagggccggaacgtgctcctcggctgccgcgacggcgacgcggcccagtgctgcggagcgaagctcgccgacttcggcgcggcgaggctggtctccgacgccgcgccggcgcgcgggccgcgcgggacgcccgcgtggatggcccccgaggtcgcgcgcggcggcgcggccacgccggcgtcggacgtctgggccctgggctgcaccgcgctcgagctgctcacggggagccggccgtggtcggagctcggcggcgccgccgacgtcggcgagctgctcctcctcgtcgggttcggcggccagcgccccgccatccccgcgtggctgccggacgcgtgccgcgactttctcgacaagtgcctccgccgcgacgccggccagcggtggagctgcgcgcagctgctgcgccacccattcctttccgcggacgccggcgagacgtggccgtcgccgtcgccgtcgccgcgtgcggtcctcgactgggccccgtcggattcggactccgagcccatgtccagcgcggaggccgagagcatgcacgaggtcatggcgcgcgccaaggggcggctagccgaattggcctcaaacgggccgcggactagctgggactggcactgggatgaagtggagtgggggtccggacccaccagggcagccgacacctgggccccacctcccagttacgaggcgcaaagaaatggcgacgcaagtgcgcccgtacccagcaccgccgccttctccggcggccgtgatcgtgacgtcctcgtcctcggcagcggcagcggcagcgggctcccctgtggccatggccgtcctggttatcacagtcactgctgtcggtataaatgcgggtttgggaggcaatggccgcgaggaagaatcgagggagacgacgccgatgcacgagaagggagtggtgaccggtgcgagaagggctcatggggtggttcgtcggcgccgactgactcgatccagcgccgttggagctccggcagtttccccaaccccagattagcggagccgtgggcgttggccttccatgtactaaaggttgcgcgcggttga

SEQ ID NO: 117041 - DNA, 240 bp, Zea mays
  Clone ID: MRT4577_38230C.1
cccactgaagtcgaacccctaatggcttctcaagttcttcttcaacaggcactgtttgcccccaagctaagtttcccttcttcttctcgtaacgtcgcgttaatttctagggttccttccaccccaatttcatggcgttgcactcctctcattgctaagcctagtttcgctgtgagagctgactccaacgtcgaaggcgctggtgaagccaccgaagatgttccttcgtataatgttgat

SEQ ID NO: 117042 - DNA, 393 bp, Zea mays
  Clone ID: MRT4577_38231C.1
ctcctcctctcctctcctggagcactgctgtcctctacgctcggaccagtcgccggattcttcaatggtgtatcatcgggtcgaccccacgccttttctttcgcaaggcttcgtcgcaaaacatattcagcatcgagaaatcatggtggaatgcgtgaagatgaagaagaagttctgtcataccctcaaaaggtcatcaactaccagttgaatacatgggtctgggtcaacctgttgctcgtgttgggtttgatctcaacatcccgccaatgcaaaatggggatattaacgaagctgagggttgggatggttggcctgcggaggaacagttttagcagaaaaatgtaatccagcaaatgcagcaagagtgtgaagaagaacccattagcatgc

SEQ ID NO: 117043 - DNA, 184 bp, Zea mays
  Clone ID: MRT4577_38232C.1
gtgctaaacctatctgtattggcagcacagctactcagatctgcactcctgtctcttgggaagcagtttcagataaatcatgggcattgctggactgatggttgctttgagcccacaggagctcccgttttgaattgtgtggagaagtgtgttctgatgaggcattttactatgcctgttgatc

SEQ ID NO: 117044 - DNA, 332 bp, Zea mays
  Clone ID: MRT4577_38233C.1
gcccctaagggtaacattcaaccaaggaccccggaaaaagcacactgggagggggggaacccaaaggacggacaggacaaacaattaacatggggataaaaattattaggggcccattcaacttaaaaattttggaaaaggcacacttggacataaaaggcagaatagcataaggccggtgtagcttttgacaattttatttgggggaaaccagggaattttgggggaccattcgggggaaaaactgtaaacgggcaggggggttttaatcgaacaaggggaaacccaaatttttaaaaaactttttttttttttaaaacctttcttccttt

SEQ ID NO: 117045 - DNA, 223 bp, Zea mays
  Clone ID: MRT4577_38234C.1
tctcttttgtatagccatgctgtacgttagctaagggtggcgctagagccctatagctcgacccacatccgatccatgaagtactctgaggagctttagtatgagctgtgagcgtacttagtccacgtggcaggagccgtccatagcctacattcgtatcagaagcggctctactcatcagggagccagcacacctactcggatttgccttcaatacaagttt

SEQ ID NO: 117046 - DNA, 793 bp, Zea mays
  unsure (1)..(793): unsure at all n locations
  Clone ID: MRT4577_38235C.1
aaactgtcaacaggactttgggggcccatgcctagatgttcatggtaaattttgggcctttgggcggctgtaacttactaacttgtatgatcttagcgggcggactccgcgttagtcctaggccggcagggcctcctacgggcccaactaattgagacgttggattcgaggctacgcgaatctcaatgaactgccaattcccgtcctcatccagtggaaggcagttgtgccacctcaactgctcgaatcagcaggtgtgggaatctgggcagggcgccgcggagaagaggaggcccagcgctctacgtccgccatggcgggctcttccgaccccgacaagctcatgaacaaagccgacaaactaacaaaattgagttttacaagatggaatgctgattggaaaagcgctacctctttgtatgagcaagctgcaattgcgtataggttcagaaaggacaatgagaaagcaaaagatgcttttgagaaggcctcaaaaggacaggaaatgatctcctcaccatgggacgctgctaagcatatggaatctgctgctgctttagcaaaggagcttgggcgctggaatgaagtatctgatttctatcacagagcttcagaattataccgtggaatgtggaaggccacaacctgcatctgatgctctagcaaagggtgccagtggcatttggaggagaaatctccagaagaagctatcaaaatgtatgatgaggcttgttcagntctagaagaagatgggaaggaacagatggcttttgacttgtaccgtgccgcagca

SEQ ID NO: 117047 - DNA, 587 bp, Zea mays
  Clone ID: MRT4577_38236C.1
ccggccgggagtggaaggcagctgtgccagctcaactgctcgaatccgcagacgtgggaatctgggcagggcgccgcggagaagaggaggcccagcgctctacgtccgccatggcgggctcttccgaccccgacaagctcatgagcaaagccgacaaactgtaattaggcttgcacggaagctaccaacaggtgatctgcaggccatcaagaaagctgacgatggcgaggaatccttggacgaggatgacctgacttaaaacgatctcccgagccaaaaggtgcagagagcaaacgtcatagtttgccatcggtgggggaacaactgtaaaaagaagttatgcgagttacatactaaaaacttgtgggcagcattcccatatctataaacatgaaatttgtagggcccaattatgttgtatccgtactggtggtttggtgttaccgaaacaacgaaactttagtggtatgtttatggtttcttgtactacatgattcttgcaaatccagcatggtgtaaaattaatatgttggccaatcattactcctacatttgtagctgtgcagtggcccacgcgcttccgttgc

SEQ ID NO: 117048 - DNA, 308 bp, Zea mays
  Clone ID: MRT4577_38237C.1
accttggaaactatattatggaaatatcttaattatctaccttaatattcatctcctgacatgataaccgaatccatcttacttcttttttttgcaaatgattatttcacgaaatgtatcatctcggacgaagcaaagtcaacgcgcctaaagtcgtgcgtccgcagcaggcagggagtggcagcatttgtcgaaaatgtccatcgcgtggctgaagagagggacgtaggcgtcgatactgccgtcgccggagaaagacgacacgacgaatacggggccctccacgggcgagtagctcggcatgaaaa

SEQ ID NO: 117049 - DNA, 385 bp, Zea mays
  Clone ID: MRT4577_38238C.1
agctcacttcggggcgcttttttttttttttttttcaaaatttattacatgttgggttatatacaccatatggctaacactggccatttacaatgctgttattgacaattgcatgaatgaatacaaaaagggattgacttggttgaataatgctaaaaaaatccattttacggaccaaaaattaaataaaatagcaggccgaaattttgaccttggcttacatgagtctttaggtctccagacccggataaaacattggtaatcgtggcaaaaacactgctgtgactcggggagctcagaatgacaaagaactggagaatttggcgaaggtcattccatacagcgcagacaagtatcggctccaccttcttttatgcctgtattt

SEQ ID NO: 117050 - DNA, 667 bp, Zea mays
  Clone ID: MRT4577_38239C.1
ccggccggggaactgccagttcccgtcctcatccagtggaaggcggtcgtgccacctcaactgctcgaatcagcaggtgtgggaatctgggcagggcgccgcggagaagaggaggcccagcgctctacgtccgccatggcgggctcttccgaccccgacaagctcatgaacaaagccgacaaactgtaattaggcttgcacggaagctaccaacaggtgatctgcaggccatcaagaaagctgacgatggcgaggaatccttggacgagaatgacctgacttaaaacgatctcccgagccaaaaggtgcagagaacaaacgtcatagtttgccatcggtgggggaacatctgtaaaaagaagttatgcgagttacgtactaaaaacttgtgggcaacattcccatatctataaacatgaaatttgtagggcccaattatgttgtatccgtactggtggtttggtcatttggtgttaccgaaacagcgaaactttagtggtatgtttatggtgtcctgtgctacatgattcttgcaaatcgagcatggtgtaaaattaatatgttggccaatcattactcctacaattgtaaaaaaaaaaaaaaaaaaaaaaaaaaaaaaaaaaaaaaaaaaaaaaaaaaaaaaaaaaaaaaaaaggaccctagggcc

SEQ ID NO: 117051 - DNA, 614 bp, Zea mays
  Clone ID: MRT4577_3823C.1
ccggccgggaccgccgcccattcgccgagcccagcggctgggcctcctcgtgaaaagactcccagcggacgatgcagtggcctttcgcgtgaaaagagacccatcggccgcgcgggacccggcgaattttcaccggcgagacacctgggcgaacgaggtgatgccgcgcggggaaactagagcggcccgtgcgtccacgccggaacagccgtccgatgggccgccggcgcggatctggccgctccctccgcggtacgcgctgtcccacggccacgagcgtataaaggcgtcggaatcgctcggttcggttcggttcagcgagtggggtcgaatgcagccgggcagtccctcggttctgcggtcggccgcgcccggcggcgacgcgtttggggcgcgcggcggccggcacccggcagcgggctttggcacgcgcactggggtttgttcgcgtccgaaacggaaatttgttcgaaccactgatagatgcccgagcgcgagcgcagttgttcccgttgttgtttaagatggataggacaccgcaatgttgtttatcttggggctagatttgacgtggtttagatttctggtcttgaatgagacaacctgtgctcctc

SEQ ID NO: 117052 - DNA, 676 bp, Zea mays
  Clone ID: MRT4577_38240C.1
ggccgggttagcttccactgctataggcagcccacatgcgcgcacactcctaagctagctatagcagcaaggcagccagctgagctcagagctcccagtccagcgccggcgccaccaccgcagctgctcgctggtcaccatgagcaaggagaagcaccaccgcgactggatcctccggcgctgctgcggctccatcgccgcctgcatcctgacgctggccgtcgtcgtaggcttcatcgtgctcgtcatctacctggcgctgcgcccctccaagccgtccttctacctgcaggacgtgcagctgcgctccatcgacctcagcgacccggcgctctccctctttttctaggtacgtacgatctcgcgcgcgacgacgacggcgtgtgtcgtcgtacgacgtgtcagctgattgatgcacgagcgcgcgtgcatgcatatgcattgatttgggacgcacacggcacacacgcaggtgacgatcgcgtcgcggaacccgaacgagcgggtgggcgtgtactacaagacgctggacgcgttcaccacgtaccgcgacgaggcggggacggtacccgtgtcgatgcccgggatctaccagggccacaaggacgtgtcggtgtggtcgccggtcttgtcgggcgacgcggtccccgtggcgcagtacgtggcggacgccatg

SEQ ID NO: 117053 - DNA, 462 bp, Zea mays
  Clone ID: MRT4577_38241C.1
caacccaaaattggggaaaaaaaaaaaggggggccccaaaaataaaaaaaccaggggggaaccaaggggggggcatccaaatggcaaaggggaaaggggacccaaccccgtcccaggaaaaaaaaaaaaaggggggcggggaaagcatctgaaaggatttttgggtttggagcaacgaaaaaaaccccaggcaatttgaaaaaggattggatcggggcccaaataaatgggaagcagccaaccgaatggggctaacaacaaaggggggcctttaaatggaggggtaaaaccaaaacaaaaagggggctaaaagtaagggggggaacaaaaaagccccaaggggtttgaaataaaaccaaaatttgggaaaaaaaccacccaacctggttttaaaaaaaaaacaaggggggggcggaaaaagtaacacaggggaacaaaaaccctaggagggggggggaaaaa

SEQ ID NO: 117054 - DNA, 493 bp, Zea mays
  unsure (1)..(493): unsure at all n locations
  Clone ID: MRT4577_38242C.1
ctccgcgtccgcggacgcgtgggcgggggcgtgggtgcgcgtgtgtattcaggacgggtccctgctgccgttcaagcgtatcactatcactagcggtatgggccggcttatcaaggaggagattgttgaaatggtgcaggaggctgttatttttttttttttggaccangaggtgggggagagggggggcgcttataacactcctcgtcactatgcctattacatgaggaacaccatcttggttgatgtgtatcgcctcctatctctcggctggtgatgaggtcttgatcgttgacgccgtcgtttgcgccaccagttggttggtccgcatccagcttgttgtggtggtcgagttcgtcgacgtgttgatggagctcgcgggcgtctgctcccccattatctgcttcatgttccaccgcgctggctcggtcttggtctatgcggctggtttggtcgaggttgcctcgtctggtgggtgcggtgctggtccctt

SEQ ID NO: 117055 - DNA, 1684 bp, Zea mays
  Clone ID: MRT4577_38243C.1
ctcgagccggccgggaaactgtccatcggactttggggcccatgcctatatgttcatggtaaattttgggcctttgggcggctgtaagttactaccttgtatgatcttagcgggcggactccgcgttagtcctagggcgggagggcctcctacgggcccaactaattgagacgttggattcgaggctacgcgaatctctgtgaactgccaattcccgtcctcatccagtggaagggaggtgttgcccggcgccaggccggcgcgttcgacccggtagcccgaaaccgcccatatatcttgccgactttctgcgacacggtggaggcgtggagctaactacccccgcgctggctcgccaccgccgccgcagcaggcgtgggaatctgggcagcgccccgcggagaagaggaggcagcgcgctctccgtccgccatggcgggctcttccgaccccgacaagctcatgagcaaagccgacaaactaacaaaattgagttttacaagatggaatgctgattggaaaagcgctacctccttgtatgagcaagctgcaattgcgtataggttcagaaaggacaatgagaaagcaaaagatgcttttgagaaggcctcaaaaggacaggaaatgatctcctcaccatgggacgctgctaagcatatggaatctgctgctgctttagcaaaggagcttgggcgctggaatgaagtatctgatttctatcacagagcttcagaattataccgtgaatgtggaaggccacaacctgcatctgatgctctagcaaagggtgccagtgcattggaggagaaatctccagaagaagctatcaaaatgtatgatgaggcttgttcagttctagaagaagatgggaaggaacagatggcttttgacttgtaccgtgccgcagcagctttgtatatcaagatggagaaatattcagatgccgctgctttgtttttaagacttggttcagctgctgataagtgcaatgccatcaatagccaatgcaaggcctatctgagtgcgatcatcatctatctttacgcacatgattttcagcaagctcaaaaatgctacaatgactgctcagataaagtcgcttaacagggttcaagccttcctcaatagcgaccagaatcgatgcgcaacgaagctattgtctgcttatgaggaaggtgatgctgaagaaatcaaacgcattgctcaatcaagtgccttcaatcaccttgaccatgtggtaattaggcttgcacggaagctaccaacaggtgatctgcaggccatcaagaaagctgacgatggcgaggaatccttggacgaggatgacctgacttaaaacgatctcccgagccaaaaggtgcatagagcaaacgtcatagtttgccatcggtgggggaacagctgtaaaaagaggttatgcgagttacatactaaaaacttgtgggcagcattcccagatctataaacatgaaatttgtagggcccaattatgttgtatccgtactggtggtttggtgttacctaaactttagtggtatgtttatggtgccctgtgctacatgattcttgcaaatccagcatggtgtatatttgttggccaatcataaaaactaaaaaaaaaaaaaaaaagcggcctgccctgtgctacatgattcttgcaaatccagctgtgctacaggattct

SEQ ID NO: 117056 - DNA, 955 bp, Zea mays
  Clone ID: MRT4577_38244C.1
tgggtacctcgaggccggccgggacctcttcttcttcttctaccagtagttcattcattattagtacggtaccgggttggagtaattaaaaggccaccctccactcgcaccaccacactttagctctccccactgctataggcagcccacatgcgcgcacactcccaagtcctaagctagccagctgagctcgctcccagtccaagcgccggccccaccaccgcagctcgatcacaccatgagcaaggagaagcaccaccgcgactggatcctccggcgctgctgcggctccctcgccgcctgcatcctgacgctggccgccgtcgtcggcttcatcgtgctcgtcatctacctggcgctgcgcccctccaagccgtccttctacctgcaggacgtgcagctgcgctccatcgacctcagcgacccggcgctctccctcgacctccaggtgacgatcgcgtcgcggaacccgaacgagcgggtgggcgtgtactacaagacgctggacgcgttcaccacgtaccgcgacgaggcggtgacggtccccgtgtcgatgccggcgatctaccagggccacaaggacgtgtcggtgtggtcgccggtcatgtcggggcgacgcggtccccgtggcgcagtacgtggcggacgccatgaagcaggacatcgaggcgggctacgtgctgctccacgtcagggtggacggccgcgtcaagtggaaggtcggcagctgggtctcgggcagctaccacctcttcgtcaactgccccgcgctgctcgccaccagcggcagcgctgccgtcgccgccggcggaggcgtcttcgccgccagcgccgcgtccggggtagtccccgccggcgtcaacaccaccgtcgtctcactcaagttcacgcacccggcggactgcaccgtcgacgtgtgagtcgtcgctgcgccacgagcccacgacgacgaccg

SEQ ID NO: 117057 - DNA, 997 bp, Zea mays
  Clone ID: MRT4577_38245C.1
ctcgaggccggccgggcccttttttaaacacgcacacctcattacatacacctcttcttcttctaccagtagttcattcattattagtacggtaccgggttggagtaattaaaaggccaccctccactcgcaccaccacactttagctcctcccactgctataggcagcccacatgcgcgcgcactcccaagtcccaagtcctaagctagccagctgagctcgctcccagtccaagcgccggcgccaccaccgcagctgctcgctggtcaccatgagcaaggagaagcaccaccgcgactggatcctccggcgctgctgtggctccctcgccgcctgcatcctgacgctggccgccgtcgtcggcttcatcgtgctcgtcatcttcctggcgctgcgccccctccaagccgtccttctacctgcaggacgtgcagctgcgctccatcgacctcagcgacccggcgctctccctcgacctccaggtgacgatcgcgtcgcggaacccgaacgagcgggtgggcgtgtactacaagacgctggacgcgttcaccacgtaccgcgacgaggcggtgacggtacccgtgtcgatgccggcgatctaccagggccacaaggacgtgtcggtgtggtcgccggtcatgtcgggcgacgcggtccccgtggcgcagtacgtggcggacgccatgaagcaggacatcgaggcgggctacgtgctgctccacgtcagggtggacggccgcgtcaagtggaaggtcggcagctgggtctcgggcagctaccacctcttcgtcaactgccccgcgctgctcgccaccagcggcagcgccggcgccgccgcccggcggaggcgtcttcgccgccagcgccgcgtccggggtcgtccccgccggcgtcaacaccaccgtctccctcaagttcacgcacccggccgactgcaccgtcgacgtgtgagtcgtcgctgcgccacgagcccacgacgacgaccggcgcgcgctt

SEQ ID NO: 117058 - DNA, 1175 bp, Zea mays
  Clone ID: MRT4577_38246C.1
gccggccgggctcgggagctctccccactgctataggcagtccacatgcgcgcacactcccaagtcctaagctagccagctgagctcgctcccagtccaagcgccggccccaccaccgcagctcgatcacaccatgagcaaggagaagcaccaccgcgactggatcctccggcgctgctgcggctccctcgccgcctgcatcctgacgctggccgccgtcgtcggcttcatcgtgctcgtcatctacctggcgctgcgcccctccaagccgtccttctacctgcaggacgtgcagctgcgctccatcgacctcagcgacccggcgctctccctcgacctccaggtacgtacgatctcgcgcgcgacgacgacggcgtgtgtcgtcgtacgacgtgtcagctgattgatgcacgagcgcgcgtgcatgcatatgcattgatttgggacgcacacggcacacacgcaggtgacgatcgcgtcgcggaacccgaacgagcgggtgggcgtgtactacaagacgctggacgcgttcaccacgtaccgcgacgaggcggtgacggtccccgtgtcgatgccggcgatctaccagggccacaaggacgtgtcggtgtggtcgccggtcatgtcgggcgacgcggtccccgtggcgcagtacgtggcggacgccatgaagcaggacatcgaggcgggatacgtgctgctccacgtcagggtagacggccgcgtcaagtggaaggtcggcagctgggtctccggcagctaccacctcttcgtcaactgccccgcgctgctcgccaccagcggcagcgcgggcgccgccggcggaggcgtcttcgccgccagcgccgcgtccggggtcgtccccgccggcgtcaacaccaccgtctccctcaagttcacgcacccggcggactgcaccgtcgacgtgtgagtcgtcgctgcgctacgacgacgaccggcgcgcgcttcgttcgttcgttttcgttcgtactggctagtgcagtgcgggggatcaacgtcgccccctcgctcgcgcggttatcgagcagttagtttttcttgtagcaaatgttcgttcccatatattttcccttccgaagctgtgcagaaataagttaataagctatacatgcatatacatgtgcaaaaaaaaaaaaaaaaaggcccctagggcc

SEQ ID NO: 117059 - DNA, 692 bp, Zea mays
  Clone ID: MRT4577_38247C.1
ccggccgggagctctccccactgctataggcagcccacatgcgcgcacactcccaagtcctaagctagccagctgagctcgctcccagtccaagcgccggcgccaccaccgcagctcgatcacaccatgagcaaggagaagcaccaccgcgactggatcctccggcgctgctgcggttccatcgccgcctgcatcctgacgctggccgccgtcgtcggcttcatcgtgctcgtcatcttcctggcgctgcgcccctccaagccgtccttctacctgcaggacgtgcagctgcgctccatcgacctcagcgacccggcgctctccctcgacctccaggtacgtacacgtacgatctcgcgcgcgcgcgacgacgacggcggtgcgtgcatgcatatgcattgatttgggacgcacacggcacacacgcaggtgacgatcgcgtcgcggaacccgaacgagcgggtgggcgtgtactacaagacgctggacgcgttcaccacgtaccgcgacgaggcggtgacggtccccgtgtcgatgccggcgatctaccagggccacaaggacgtgtcggtgtggtcgccggtcatgtcgggcgacgcggtccccgtggcgcagtacgtggcggacgccatgaagcaggacatcgaggcgggatacgtgctgctccacgtcagggtggacggccgcgtcaa

SEQ ID NO: 117060 - DNA, 438 bp, Zea mays
  Clone ID: MRT4577_38248C.1
gggcaacaaattttaggcgcattcttacttccactcgcttccttcatgatccacgcttagtgagaggaaaacgccgttaaaaacgttcacaaagggcccaccctccattttggaaaaacatctctctctgaaactagagagagacaaaagaacctccttaaaaagaaaggtccccacccctaccattatatggcactgtgaggtggtataaagctttacaggtaggaaaatttttatccgtaaacaaaaggctcccgccgggcagaaaaggggttgtcgtcgacttagtaccaaaggggctctaacaccgggaagttctgttggatgggggcgatgtccaggcccttgaacttgaccaccgactccacggggccctggagggggttgagctccttaagcctggaaacctcacctagcttcttgccctgctaggggatc

SEQ ID NO: 117061 - DNA, 868 bp, Zea mays
  unsure (1)..(868): unsure at all n locations
  Clone ID: MRT4577_38249C.1
ngaaagaacccaattccctcgcgcgctcccccttcggcccttccaccctctcccgcatcaggcatcacacattccaccaccgccgccgccatcaccactgtgaccaccagccgcacactcgtatgtgattattggcacccggacgccaccgccaccgcctccgcctccaccaccgactgcgccatgggcgactcctcggtggccggcgcgcttgtgccgtccgtgcccaagccggagaccgcgccgtccggtgacaactctacggcggcgctggcgctgccggaagaggcggggacgcgcgcggcgtcggcgtcgccgcagggacctgcggaggaagagggccccgccgatagggacctcctctgcccgatctgcatggccatcatcaaggatgccttcctcaccgcctgcggccacagcttctgctacatgtgcgtcgtcacgcacctcagcaacaagagcgactgcccctgctgcgggcactaccttaccaaggcccagctctacccaaactttctccttgacaaggttctgaagaaaatatcagcccgacaaatcgcaaaaacagcgtcaccggtcgatcaatttcgatgtgcattgcaacagggaaatgaaatgggagttaaagagttagatagccttatgactttgattgctgagaagaagcggcaaatggaacaacaagaatcggagacgaatatgcaaatattgttagtcttcttgcactgccttagaaagcaaaagctggaagagttgaatgagatccaaagtgatctacagtacatcanagaagatataagtgctgtggagagacataggggtagaatataccgcacaaaagaaaagtactccatgaagctgcacatgc

SEQ ID NO: 117062 - DNA, 188 bp, Zea mays
  Clone ID: MRT4577_3824C.1
gtaatggcacaaagggcacaggtttacttattcacaaacatacaactctgattattcaaatacatgctcaacttccaataattgtaaaattgttcataagggaaaatcattccatctacatttttatttttttacactacaaggcttataacactaatacttttaacatgaacaacatcattataccc

SEQ ID NO: 117063 - DNA, 663 bp, Zea mays
  Clone ID: MRT4577_38250C.1
cactgctataggcagcccacatgcgcgcacactcctaagctagctatagcagcaaggcagccagctgagctcagagctcccagtccagcgccggcgccaccaccgcagctgctcgctggtcaccatgagcaaggagaagcaccaccgcgactggatcctccggcgctgctgcggctccatcgccgcctgcatcctgacgctggctgccgtcgtcggcttcatcgtgctcgtcatctacctggcgctgcgcccctccaagccgtccttctacctgcaggacgtgcagctgcgctccatcgacctcagcgacccggcgctctccctcgacctccaggtacgtacgatctcgcgcgcgacgacgacgacgacgacggaacacaagcagcatatgcattgatttgggacgccgcacacggtacacacgcaggtgacgatcgcgtcgcggaacccgaacgagcgggtgggcgtgtactacaagacgctggacgcgttcaccacgtaccgcgacgaggcggtgacggtacccgtgtcgatgccggcgatctaccagggccacaaggacgtgtcggtgtggtcgccggtcatgtcgggcgacgcggtccccgtggcgcagtacgtggcggacgccatgaagcaggacatcgaggcgggctacgtgctgct

SEQ ID NO: 117064 - DNA, 1248 bp, Zea mays
  Clone ID: MRT4577_38251C.1
cattgggtacctcgaggccggcctgggcgggcttcttcttcttctaccagtagttcattcattattagtacggtaccgggttggagtaattaaaaggccaccctccactcgcaccaccacactttagctccccccactgctataggcagcccacatgcgcgcacactcccaagtcctaagctagccagctgagctcgctcccagtccaagcgccggcgccaccaccgcagctcgatcacaccatgagcaaggagaagcaccaccgcgactggatcctccggcgctgctgcggctccatcgccgcctgcatcctgacgctggccgccgtcgtcggcttcatcgtgctcgtcatcttcctggcgctgcgcccctccaagccgtccttctacctgcaggacgtgcagctgcgctccatcgacctcagcgacccggcgctctccctcgacctccaggtgacgatcgcgtcgcggaacccgaacgagcgggtgggcgtgtactacaagacgctggacgcgttcaccacgtaccgcgacgaggcggtgacggtccccgtgtcgatgccggcgatctaccagggccacaaggacgtgtcggtgtggtcgccggtcatgtcgggcgacgcggtccccgtggcgcagtacgtggcggacgccatgaagcaggacatcgaggcgggatacgtgctgctccacgtcagggtggacggccgcgtcaagtggaaggtcggcagctgggtctccggcagctaccacctcttcgtcaactgccccgcgctgctcgccaccagcggcagcgcgggcgccgccggcggaggcgtcttcgccgccagcgccgcgtccggggtcgtccccgccggcgtcaacaccaccgtctccctcaagttcacgcacccggcggactgcaccgtcgacgtgtgagtcgtcgctgcgctacgacgacgaccggcgcgcgcttcgttcgttcgttttcgttcgtactggctagtgcagtgcgggggatcaacgtcgccccctcgctcgcgcggttatcgagcagttagtttttcttgtagcaaatgttcgttcccatatattttcccttccgaagctgtgcagaaataagttaataagctatacatacatatacatgtgtactagatttgctatatattattaccatatttaatatgaacctcacagtttgaattaattaagtactatatatatagggcagatttccagtagtaaaaaaaaaaaaaaaaaagcggcc

SEQ ID NO: 117065 - DNA, 288 bp, Zea mays
  Clone ID: MRT4577_38252C.1
tacgaggatgcctccgcctccgcctccggctgcgcgcttaacccaatacagcgccagggcagggcaaccaaaccctaggccctcgcgctcgtggaaaccatgggctgcccgcgccccgggggggagccgggctccagagctagggacccgttctccggggtaccgccatggcgaggcacccccagcgcacctgacccggccatgttctacatccccgcggcagcgacaagcacagggacggggaagggggagacgctgcgacgtggcatatcatcttccccaccatcg

SEQ ID NO: 117066 - DNA, 1215 bp, Zea mays
  Clone ID: MRT4577_38253C.1
actttagctcctccactgctataggcagcccacatgcgcgcgcactcccaagtcccaagtcctaagctagccagctgagctcgctcccagtccaagcgccggcgccaccaccgcagctgctcgctggtcaccatgagcaaggagaagcaccaccgcgactggatcctccggcgctgctgtggctccctcgccgcctgcatcctgacgctggccgccgtcgtcggcttcatcgtgctcgtcatcttcctggcgctgcgcccctccaagccgtccttctacctgcaggacgtgcagctgcgctccatcgacctcagcgacccggcgctctccctcgacctccaggtacgtacgatctcgcgcgcgacgacgacgacgacgacggaacacaagcagcatatgcattgatttgggacgccgcacacggtacacacgcaggtgacgatcgcgtcgcggaacccgaacgagcgggtgggcgtgtactacaagacgctggacgcgttcaccacgtaccgcgacgaggcggtgacggtacccgtgtcgatgccggcgatctaccagggccacaaggacgtgtcggtgtggtcgccggtcatgtcgggcgacgcggtccccgtggcgcagtacgtggcggacgccatgaagcaggacatcgaggcgggctacgtgctgctccacgtcagggtggacggccgcgtcaagtggaaggtcggcagctgggtctcgggcagctaccacctcttcgtcaactgccccgcgctgctcgccaccagcggcagcgccggcgccgccgccggcggaggcgtcttcgccgccagcgccgcgtccggggtcgtccccgccggcgtcaacaccaccgtctccctcaagttcacgcacccggccgactgcaccgtcgacgtgtgagtcgtcgctgcgccacgagcccacgacgacgaccggcgcgcgcttcgttcgttcgttttcgttcgtactggctagtgcggcgcgggggatcaacatcgccccctcgctcgcgcggttatcgagcaattagtttttcttttgtagcaaatgttcgttctcatatattttcccttccgaagctgtgcagaaataagttaataagctatacatacatatacatgtgtactagatttgctatatattattaccccatatatatttaatatgaaaaaaaaacccacgcgtccgcccacgcgtctcgcacaccgtctg

SEQ ID NO: 117067 - DNA, 501 bp, Zea mays
  Clone ID: MRT4577_38254C.1
attacaggtttcacgagcagaaagcactcatttcgtgccaaatgaacccaggcccggttacgcgagtgacactgaggaaccaagtgagaaacacagggcgcacacaagccaccaaaaacccaaaacctcggaccgatgcacgaagggcgcacggccaatcaagcccttcacttgccggccaagaaagttggaggcctacaacccaggccctaatgaagaaagggcaagcaagggggaaaacgaagaaaaataggggccccccccctgttaacagggtccaccccaaaaaccctaacgtggaaaacagggcaagcggacaccctccatccccttaatgttcagcacagccaaaggctgaaggttggcttgcaggaccagctggggcgaacatcccgccggggaaaagcatgtaaaggaaatttcattacgggccaaaaaccaaggggcaccccatacaaggaaccattgggcataaaaacttttgccctgccaccaaggatg

SEQ ID NO: 117068 - DNA, 579 bp, Zea mays
  Clone ID: MRT4577_38255C.1
cagcgtgccggaacaggcgcccggctccggccgcgcggcgttcttgggcgtgggcgagcggacctgtgcgactgtgtgctccaacggtgatctgagcttctcgtcgcaggactcggtcgtgcccgccgccgcgcagtcgccccgagcgccgacggggctgccgctgctgcagtgctcggcgtcggcgtcggcggcggggcagggcagcagcggcggaacggtgggcgacgagctggagttcctgaaccggtgcaaggacgccggcgtggtgcacatcctcgggaacaccatcgtgcgcgcgcggcgggattcgggcgtcgtgaagaagctcgccgttgactacatgtacgctttcatgaggagggtgtgcagggagaacagcgtcatcttcaacgtgccccatgagagcctgctcaatgtcgggcagatattctacatctgaatatctgtctgatgagagatagatagccttgttcttcgtccttttgtgtcccgggcacggtaggatatgtacactattgtcttgtatcgtacacttgtacagaataaatggctgtttggtttgttgctttagatgcc

SEQ ID NO: 117069 - DNA, 1265 bp, Zea mays
  Clone ID: MRT4577_38256C.1
gacccacgcgttcgaacacgcacaccacctcaccatacacctcttctcttctaccagtagttcattcattattagtacggtaccgggttggagtaattaaaaggccaccctccactcgcaccaccacactttagctccccactgctataggcagcccacatgcgcgcacactcctaagctagctatagcagcaaggcagccagctgagctcagagctcccagtccagcgccggcgccaccaccgcagctgctcgctggtcaccatgagcaaggagaagcaccaccgcgactggatcctccggcgctgctgcggctccatcgccgcctgcatcctgacgctggccgtcgtcgtaggcttcatcgtgctcgtcatctacctggcgctgcgcccctccaagccgtccttctacctgcaggacgtgcagctgcgctccatcgacctcagcgacccggcgctctccctcgacctccaggtgacgatcgcgtcgcggaacccgaacgagcgggtgggcgtgtactacaagacgctggacgcgttcaccacgtaccgcgacgaggcggtgacggtacccgtgtcgatgccggcgatctaccagggccacaaggacgtgtcggtgtggtcgccggtcatgtcgggcgacgcggtccccgtggcgcagtacgtggcggacgccatgaagcaggacatcgaggcgggctacgtgctgctccacgtcagggtggacggccgcgtcaagtggaaggtcggcagctgggtctcgggcagctaccacctcttcgtcaactgccccgcgctgctcgccaccagcggcagcgccggcgccgccgccggcggaggcgtcttcgccgccagcgccgcgtccggggtagtccccgccggcgtcaacaccaccgtcgtctccctcaagttcacgcacccggccgactgcaccgtcgacggtgtgagtcgtcgctgcgccacgagcccacgacgacgaccggcgcgcgcttcgttcgttcgttttcgttcgtactggctagtgcggcgcgggggatcaacatcgccccctcgctcgcgcggttatcgagcaattagtttttcttttgtagcaaatgttcgttctcatatattttcccttccgaagctaagctgtgcagaaataagttaataagctatacatacatacatatacatgtgtactagatttgctatatattattaccccatatatatttaatatgaaaacctcacagtttgaattaaaaaaaaaaaaaaaaaagcggcc

SEQ ID NO: 117070 - DNA, 644 bp, Zea mays
  Clone ID: MRT4577_38257C.1
cgtatcgactccttagggcgattgggttcctcgaggccggccgggaccgtactcaaagcctgaatgggcaaccgtgaaagatcaaccaaccaacaacaaccactactaactcctacggcggctgcatgtctgtaaccgggccggcaggtggcctcgtggcgaagcggcaccgccggctcccgtgaagacgcgccccaagtgtcgccgtacgtcagcgctctcggcattggcaacgccgcaggtggcctcgcgcgaatccgtccctctcgtctattgggtcgtgtttggttagagatggcaacggagactcgatccctaattcctcacggagaatttctccattacaggatggggatggagaagaaaattcccccgcgggatataaacgaggaaaatttatccctcgacgggtaaacggggatggggacggggaagcattctttatctctgttccccgtggggacccgttaaaattgcaagtgactatgtttttgtgtactggttaacgacaaaaataaataattaccttagcaagagacaactaattgtacaaatgtgttaattttgatgtatgcataatgatttcttatatctgacaatatgtataagtgacaatattcaaaaaaaaaaaaaaaaaagcggcc

SEQ ID NO: 117071 - DNA, 367 bp, Zea mays
  Clone ID: MRT4577_38258C.1
ctctacttggccaatggtgaatagaacagctatattctcaaaaactagaatagaactgttgaattctaattgactcttcaactaacgtacacttattcgccgctgccgggtgcctgggtttgttgtcagaattcggaactcacaaggcggtttctccgttcttcagagatctgggccagtcgacgacacacacattttttttttgtttttgcttggtcattgtatccatggcccgggagtatgcatgtgctgtgtctcctgcttggcaaacacgtgtcacccaatctagtaataagaaaagaaatataagtagaacagatggaaagacggatcggttaactgatgaatgaacaaatgaacgaatgct

SEQ ID NO: 117072 - DNA, 293 bp, Zea mays
  unsure (1)..(293): unsure at all n locations
  Clone ID: MRT4577_38259C.1
gtactcggtctctggaattcccgggcctcgttgtctggtcgtgatgctgtactcatgtaaccgatatgcccaaatattcttggtgccctctcctcagaagggaaccgaacgtggacgtgagttttgctcgttccagttccatggtatgcnnntctgtttcagcatanttatgtagtnntgtgtctacctggttttttnnggcagttgttacaaannaaaaaaagaaaaataaaaaaagagggcctggctgcttcttagaggactccaanngtcttacgtacccgcgtgcattt

SEQ ID NO: 117073 - DNA, 284 bp, Zea mays
  unsure (1)..(284): unsure at all n locations
  Clone ID: MRT4577_3825C.1
cccacgagcaaccgacaagccgccggcggcgagacgccggggccccaggagcgccgaaccggcgacgagcccccggcggagacacccaccgacgaggagcccgagaacggcggcccgggggagggcgagggaaagcgggccacccaagggccgggcgacgcggacaggggggacaagccagccgccgaggggggagaggacgaaagcgaggaagacacagccgcgaaggaggacgagaagcggacacacgccgncgacaggagcaaccgccaccccgacaagaa

SEQ ID NO: 117074 - DNA, 362 bp, Zea mays
  unsure (1)..(362): unsure at all n locations
  Clone ID: MRT4577_38260C.1
cggtcgcgtgggcggacgcgtgggcggacgcgtggngaaaaaaaaaaaaaaaaaaaaaaaaaaaaaaaaaaaaaaaacaaaacataaaaaaaaaaaaaaacccacgggaccctattttaaattccaaagcggccggtcgttgtggatgccaaggttttgtgcccctttattgggaccccttatttctttttttgggtcgccttttttcaatttattgacggggatttcacaccagtttccctgggaaatcccttggtttcccctccttgttttccttgggggagttccccttttttgcccctgtcgtattgtccttattcccccttgcgctctctttttgaaaatgttggccccccttattg

SEQ ID NO: 117075 - DNA, 1367 bp, Zea mays
  Clone ID: MRT4577_38261C.1
cggacgcgtgggtctgtacaccctgtcattgccggctccgtcggccgtcttcccgaggatgctgcggctgcgctggcgtgccgtcctccccccactcccactccctccgccgcctggcttgcttcgccgcctgcctccgcaccggcgcgccctctcgtcctcttccggcactatcccgcttccaccgccggtgatggaggcttcctacaagtttgggccctacaaaatcgacgccagggaggtcttccacgccacgcccctctcctacgccatggccactttctattgattgctcactgcagtatagttcatgaaactttacttacctttgtgttggttctcttctttttagacctggttatcttgtctgtctagggaggatcaagtttgctttaggtactcatttagtgagggctctgttttgttgagccactgacttcacttcatatttggttcatctttccatggagaccatctacaattctatgacatgattatttctttttcacatcatgcaacagttccacttccagaatgattgtatgcctgcaactcagttgactttgtgaacaatttctactgtgttgtcattcggggcagagctgtcataactcatagaccctcttacaccctccgctgcctggctttcgctcatccccttacgtttttgccacaatcggtacgaaggaggtcttccacaccacgcccctcttctacatcctgttgtatctcctcgcccatagctcccgggtcatgttcttgtgtgccccaagcgtgaagtgaaaagattcgccgatctaagttctgatgagattagtgacttatgggttactgcaaaggaagttggtgcacgtcttgagcagtaccacaaagcatcgtcacttacctttgctatccaggatggtcctcaagctggccaaacagttgcacatgtccacatccacctcatcccaaggaagaaaggggattttgagaaaaatgatgaaatatatgatgcggttcgtggcatcttttctaccaatctggttatttcattagtcattacaacaggcaatgaaataaagctttacccttttccttgctatatataatagattgatgtgaaggagaaagaattgaaggagaagcttgacctggacatcgagaggaaagataggagcatggaagagatggctaatgaggccaatgagtaccgtgctctttttagttagtttctaagctgagctgactgtttgctagaaataaggtttgctacctgttcttcattgttgcagttcagttatggttgcgcactgacattgtgatgatgtcccgttctgtaccgtggagaattaataatttgttgcaaggaatgcattcttagtgac

SEQ ID NO: 117076 - DNA, 431 bp, Zea mays
  Clone ID: MRT4577_38262C.1
ttttttttttttttttttttttttttttttttttgttttttttttaaaaaaaggacttttttatttgtgggaaagcaacaatcataagccctattacagcatttacctttggggcatttattggcacaaaacattagggcacaacatttttttttatttgggctagcaaaccttgcggtgtactgggagcaacaacattttcttcctttcaaccaacttggttggatggaactttgctttttatttgcaacagcaacaacgcccatatatacgcttttctgctgccgaccccacgagctttcttgcctttatcctgctgacagctgtgtagctctactgttttttgattgctgcacctttcacttctattgagcctgctggctcgggggtgccctgttgcctttttctccctgccccgggtaatggtggtt

SEQ ID NO: 117077 - DNA, 386 bp, Zea mays
  Clone ID: MRT4577_38263C.1
gcctgcagggagccgggccggaattatattgccgggtcgacggtacactagtcgggggccgccctttctttgtgtttttgtacaagtctaggccgcgaaggcacacaattgggccgcacatgcaacaactacgctgccacggcatggggaccgtacgaccaacatgcatgctcaaggtccacagataggtgactagtggggaaccctcctgagcagacaagatgctaaaacacgatggagtctacatacacgctcagtgacccaacgaatcatgactcatctagggctgaaaggctaatacactgaatcaatgctagccaaacggtgaagttctcaacctcggagacagcactggacgatctcagggtgttgaaccgttccttgac

SEQ ID NO: 117078 - DNA, 460 bp, Zea mays
  Clone ID: MRT4577_38264C.1
tttttttttttttttatgttatttccttgccgtggcgcaggaaatcgcagtcgatctgctcttcctgcaccagccgcgccaccgtatcgaccgcatcgtcatacgcgtgataccaggcccgcgcgcattccacgccgaccttggcggccagctcggcatagtccaccgccaggccgttgttgacgtggccgccgttgcgacccgaggcttccgcggccacatgcgggccggcttccagcacgaccaccgaggccccgcgcctggccagcgccagcgccgccgacaggcccgtgaagccgccgccgacgatggccacgtcgacctgggcgggcagatcgcgcgtgggggaaatgtagagcggggcagaatcggtccagtaggattccagcttcatggtcggggcttcaggcaagtggatggggcagggcgcggtcgtctgagccggcccagggcctgacgc

SEQ ID NO: 117079 - DNA, 387 bp, Zea mays
  Clone ID: MRT4577_38265C.1
caacgactattccagccggcagggctcctgctcctcctcctccttcccggccgccgcgcgagcttgggtaagggtctcttcttggggaaggcctgtgagaggagccatcatcatggccgctgttgagactgttgccctcagggtagctatgtaatgcaaggactgcgccgaaccggccaaaagatggttctccaagatggaaggagttgaaaccttccacataaacctcaaggagcagaaggcgacagacaaaggcaatgccaagccctgagagacgccttccagacggtttccaggtgcggggaagaggacctcgatactggagagggagaggcacagcggccccgacacgtctgcggcgagctccagaggccgagggcagtctcc

SEQ ID NO: 117080 - DNA, 673 bp, Zea mays
  Clone ID: MRT4577_38266C.1
cctaggaaccggcggcgggggccggaatttggcctttacgggggcccggccggaggaccccttggtgaagacaaaaccttcggatggtactaagccaagagacaccacctttggctatgggttggtcatagttccgccataatgcccagcaggagcccaacaattcttggtgtacgatcactccgatacttagttctcctttctggattgggtgacagagaccctattgaacgcgctgcgctgagatgttctacactttgatagtaacggcgggatataactgcatctctgttctttatataaaaacataacaagcctatctcctttgtatagggtatttccatagagaccctgttcagaggctcctataaaggcgcagaaaagcttaactgctctgagaacaaaggagcgcatattatcaatgaataattctccagaagatgttatgtgtatagtataactacacaaattgacgcagataatatgtacacggtgaaagattgtcaacgacatcccccatgagtcaggatgtagtacgcgccacagcaagtagtgtgggtcctacatgatgatactgtccaatcacgaaatactgggaggagcatctattatagagtacttaatgtacttgaaggacctagcctgcgcgagccgctcgagcatgcttgtatag

SEQ ID NO: 117081 - DNA, 493 bp, Zea mays
  Clone ID: MRT4577_38267C.1
gcattcaaaacgggggatccatttgcaccacgggccgggccaaaaaaaaacacggacccacgggggggaaaaactaaacaaaccttattaccagaaaaggtctgggctgggacaaacaagaaaataaattaccccgggcgggacttaaacaggcccgaaaaaaccacacgggagcattatattacggggcccggacccggagtcccggacgggaaaaggcacaagggattattgcccaagcaaacactgggggccccacgggggggggggacccgaggaaggggtcaacccgggccccccccctgccggggggggccccccaaaactccgggagggcccccttggagggggggaggctttccaacgccacgtccccccctgggaccaaggccgaactccccaaaaagaagggggggaaaccggcggccttccctgggggaaaattccccccgccgtcaaaaaaaaacacccgtctcttgggggcaaacttggg

SEQ ID NO: 117082 - DNA, 250 bp, Zea mays
  Clone ID: MRT4577_38268C.1
tgcacagaggattactctccgcgcaatacaatacaatctagcgtatagctaggacacgggtaccggtgaatgtactattgtgaaaaggccactgctctgttattacattccatattctatattatattggcgcacaattcacatctcggtcaatccctttcatacttaaagctagataatcgtttacattttctacaacttaatctggactaattgctttgggactactgacctagatagcacataccta

SEQ ID NO: 117083 - DNA, 458 bp, Zea mays
  Clone ID: MRT4577_38269C.1
accctttcgctcttagtctcactccctctgtcagtgtgttcttgtcagaatactgttcttgatgggggggtggattgttaattattaattccaaatactaaatattttacctgaatgcattttgcaagggtagtttcttaccaatgttcatgtcgcgcagtatgcacgggtttttgtcttacgtcctgttatagagggcttcacttcaataattgtagcttcgggtttctaacttcactataaaagatcttcaacagattagtaaggcgggttcaagagtgtgtggtttgcacgtacacttcactttctgtaatataattaatatatgaggttttttaattacctttgatgattatcgggtggaaaatgatacatgaaacccgtatgtcattgtaaccaaaggtattgtggtttgcttttgagcaacttctttaaaaggtttaaaatagtgtttttga

SEQ ID NO: 117084 - DNA, 2838 bp, Zea mays
  Clone ID: MRT4577_3826C.1
cccacgcgtccgaacgtcttgtaattcagcttgggaagaagatggttgagatgactggtgacttcactccagatttgatggccctattgtcagctgacatcatcatttctacccctgaaaaatgggatgggattagtcgaaattggcatagcagaagttacgttatgaaggtcgggctcatgatattggatgagatacatcttctgggagctgaccgtggacccatccttgaggtcattgtatcaagaatgcgatacatatcatcacaaacagaacgttcaattcggtttgttggtttatcaacggcattagcaaatgctcgtgatttagctgattggttgggcgttacagatgacggtctattcaatttcaagcctagtgtgagacctgtacctcttgaagtgcatatccagggatatcctgggaaattctattgtccaagaatgaatagcatgaacaaaccagcttatgcagccatatgcactcattcacccaataaaccagttctcatttttgtgtcatcacgtcgacagacaagacttacagctcttgatatcattcagcttgcagcatcagatgaaaaaccaaggcagttcctgagcattgaagacaactccctagacatggttctttcacaggtttctgacagtaatttgaggcatactctgcaatttggcataggtctgcatcatgctggtttaaatgacagagacagatccttggttgaggagcttttttcaaacaataagattcaggtgctggtatgtaccagcacattggcgtggggtgtcaatcttccagctcacctggtcataatcaagggcactgaatactatgatgggaaaacaaaaagatacatagattatgatatcacagatattctgcagatgatgggtcgtgcaggtcggccgcaatacgaccaacatggcaaagctgttattcttgtccatgaaccaaaaaagagcttttacaagaagttcctctacgaaccgtttcctgtggaaagtaatctgagggagcacttgcatgaccacataaatgcagaaattgtttctggcaccatcagcaacaaggaggaggcgattatttatctcacctggacttacctatatcgcagattggttgttaatccggcctattatggattggaggatactgaaacaaacacattgaattcttatctatcaaggttagtcgaaactacatttgaagatcttgaggacagtggatgcataaaagtggatgaccactctgtaaagtacttgattttggggaaaatagcttcacagtattacctgagctacctcactgtttcaatgtttgggtcaaatattggccccaacacaacgttggaagtctttctacacatactgtcagctgcatcagaatttgatgagcttcctgtacggcacaatgaggacaatttgaatcgaatactcagcggaaatgtcccgtatccagttgatcaacaccaccttgatgatccacatgttaaagccaacttactctttcaggcacatttctccagagcagaattgccaataagcgactatgtcactgacttgaaatcagttcttgatcagagcatacgcatcatacaggcaatgattgatgtatgcgcgaatagtggatggcttacgagtgcattgacttgcatgcatctcttgcagatgatcatacagggtctctggtttgagagagattatgaatccctctggatgttgccatccatgaatgatgatatattagaccatctcaagagtagaggagtctcaacagtcccctccttactagatctttcccgtgaagaattgcgtagggtacttcaaccattttctgcgtcagagttgtatcaggatctgcaacatttccctcatgttgatgtgaaagttaagcttcataatgaacaggagcgatccaaacctccaactttaaacatcaggttgcaattgaaaaattcgcgacggtcagcatcaagagcatttgcccctagatttcccaaggcaaaacaagaagcttggtggctggtcctggggaatgctacaagttcagagctgtatggtctgaaaagaattagttttgcagatcgggtgattaatactcgcatggaattgccacagacgttcaatgtgcaggagacgaagctgatcttggtgtcggattgctacctaggttttgacttggagtattctcttgagcatctcaccaagggttgagtgctttattcagagctgtttgggctgtttcattttgtatgggttcagcaaccagctcatcctagattgatcctgtaatcacgagacatgagttcattccatgaatttttgtttgtatgactacatccctcgtgttcatggttatattatatttaatagctatatatacgagtggataggtttataactttcatgaaatatcttttccgtaagcatagtagatgtttgagctctaaggttatgaccaacaaattgtgtatatggtcgtgcaaaatactattttataatataaactatattatttacataaaaaaaaaaaaaaataaaaaaaaaaaaaaaaaaaaaaaaaaaaaaaaaaaaaaaaaaaaaaaaaaaaaaagcttgacctgcccgggcggccgctcgatctggttttccccttcccaattgatgggggtttgctatcgattaagaccgttataaatttttggattggatcataatgttcatagttgaaggtttgggtcgctcctgttcattattaagctttactttctcatccccataaggtgagtgtttcagctcgttatacaactcttacgcataaaatggttaaagtaccaaaaaaaaaaaaaaaataaag

SEQ ID NO: 117085 - DNA, 271 bp, Zea mays
  unsure (1)..(271): unsure at all n locations
  Clone ID: MRT4577_38270C.1
ccgggncgacccagcgnccggccgagccctgccgncggccacgcagggggcgggggcggccgaagangcgggnccaccagcaagggcgagngcgaccnaagnncnaagggcgnnnaggannaannaanggcagngnnangngnaggcancaagacnnngcngcagcaacagcccgaacancgccacagcggaccggggcgggggggacananngancgagnggagcccaannaaaaaanacagngcngcccgggacccccgnngnnnnncg

SEQ ID NO: 117086 - DNA, 684 bp, Zea mays
  Clone ID: MRT4577_38271C.1
tttttttttttttttttaggtcacggagctattcatttcagggaatggaatattgtcatcatattttgcatatggcgcgggtcttgccggtcattggatagcaatacggtagattctgcgacacatcagtttggttgcggtttatcgtgccaggataccgtcaaagcgtgatcggaaccaagtcatggtttcctcctttttgacacggtgcttgtagccgacacggttggtggcatgcttgcgtcgagctactcggaagccgggtcgtcccataaccacgaagaaatccataccaaaaattccgattccggggtcgtatttgataccaaagtcaatatgctcagtgataccgaagccaaagttgccagtctccgagaagttgcgcttccggagttcatactctttgaccttgagcccacgttctaagatttcttcggctttgggtccccgaatagtcacatgacaggcgatcttttcattcctgcgaattccaaagtgacggacagtgtaacgagccttggaagtgacgggtgtttgaccggtaagttgctccaagaccttggaagctcgggtgagtcgatcaccggattcaccaaccgaaatgttaataaccagcttttcgatccggaggtcgcgcatcgggttagtcttggtgtcagccatggtctttggccgctcgtgccg

SEQ ID NO: 117087 - DNA, 557 bp, Zea mays
  Clone ID: MRT4577_38272C.1
ggccgcttttttttttttttttttatttttttttttttttttttgttttttttttttttttttgttttttgtttgctgtctgatcatgaactaaagacgaagagagctgaagctcaacgtttacccgttaaacagacctgacaccgagacagacctgcacaactaccagtacccgagaccagtcgacggcactaacatctttaactccccttgcaactgaaaacgagctctctgtctcagccgtcatttcgccctgaagtagcgtgcatccctgagccagagacgccaagcaaccctgcacacgacggagatgatgctaggcggcgcacggcaagcaagaggcgcctcggtcacgacagatcctagaggccgcagggtctgagaaccaaggccgctcatcactggagtacataggcgctcgggcccttcgccacgcaggacgatcatcttcataccgatggcgccttgccacccaccgaggagaccgagccctccctcaccttcccgacgaacacttggacggccaccacgacctgcgcggttatcccctcccgacc

SEQ ID NO: 117088 - DNA, 389 bp, Zea mays
  Clone ID: MRT4577_38273C.1
cgaagtcatgtcccacctcgacgcggcctcgctcctcgccccctcgccgccgctggcaaagccccacccgcgcagccgcttcctctgcctcatctcctccatgctcgccgtcctcggcgcctccctcgcgggtctcctcttattcgcgctccaccccgcgccgaacccggtcccgaactacgcgtcgctcttcctctccctcggatccaacgacaccgccgcctcgcacctccgagcgctcactctccacccgcacgtcgcggggaccaaggcgaacgccctcaccgaccgctacgtgttcgacgcgctctacgcgctcttctttcccacccacattacgccttaatccggcctcctgtgctaacccgttcaacggttccttttccttt

SEQ ID NO: 117089 - DNA, 292 bp, Zea mays
  Clone ID: MRT4577_38274C.1
gcgcgctctgagcagaggtttatgtgtacactctcggaccatgtttataatggaagagattctagagattaaagcacatatgctgaaaattcctggctatgggtgaaggtttgacgggtggggacagtgcatgtgcctgaacacttgaaagctgaaagtgctcgagccagggcatgtgctgttagaactcatacctatagatactcggcttgcacttgaggtcaatgtgaacagggctagggagtggggcctacgtatagaatctagcctgaatgccggtgttcgaagacat

SEQ ID NO: 117090 - DNA, 297 bp, Zea mays
  Clone ID: MRT4577_38275C.1
ggggggccaaaacccaaaaagggggggggagagagatttgcccccccgcccggggtatagcggaaagggggggttcaccggggagaaagaaataaggccccccggggccctatggccaaaaccccccgggccattttcaaaatgcctagcgaaaatgcggggggcgagggccatttccttcaccaggcactcgaaagcgaaagcccatcgggaagccaacccatccccccgaatagctgatccccccgcccccggggcccgagggcaacatttggcaacatcccccggggcaagggg

SEQ ID NO: 117091 - DNA, 595 bp, Zea mays
  Clone ID: MRT4577_38276C.1
ttgccactctcctcctaccccacacgtaagtgctcgcctagctccaaacgcacagagcttgccaccttgtgacgtaacgatcaccaggcctgcggtacgcccacttctaccgcacctatggtaagacgttctagaaacccaggcgtccttatgagaacgagcgccttgatgctgaactgaagctggactgccatgatgatgtgatgcgcaatcgcgagcttaggaccgtccagtatgccctgagcagaatccgtaatgctgccaggaacttgctcacccttgacgagaataacccccgccggatccttgatggtgatgcgcttcttcaccgcatggaccgctatgagctgctagctgaggcccacaaccagctcgactatgctcttgccctcaccgctgagaacttcctcgcaaggcgccttcttacacttgtcttctacgctgttgtgaacgagaccattcaccatggtcgtgacctgatcaagcagcgtgacatacaagtgtgctgggctccttggctacctccatcattcatgtggagggtgagagaactgagaactgcactgacttttctctgcctagaccattcggcgga

SEQ ID NO: 117092 - DNA, 355 bp, Zea mays
  Clone ID: MRT4577_38277C.1
tttgttaagttcatggacatgaacagggccaagacgtttgggaccccgtgtgtacgaggagacgatctggctcaagctttttatgcagcagcgcgtgctggagctcggctacagcttcctcttcacggacgccgacatactgaggcttcgcatcccgctccagggcatttgcgatacgccgacatgaacaagatcggtggacaactccaagatggttcctgcgctcctggactgcgagaacaccgtggggttctactacatgaagacgacgaaccggatcgtctagatggtcaggtactggcgggcggcgtgggcaaggttcgacagcaacctgatcgagcaggtggtgttcaac

SEQ ID NO: 117093 - DNA, 325 bp, Zea mays
  Clone ID: MRT4577_38278C.1
ccggccgggactcctgacttcaccttccgcccgatcaccagtagccctcgatcctaccgtctctaccgttctcacaaatccactccggcgcatttctgccgacttggccgaattcggtacgcttattgagatggctacgccacttataccaggacttgcagttgacgcaactcgctcttgctggcctctctgctgtacacgcttgacaaggttcatccgtaatgcctatagtttccaggatgcgcaaattctatgaaggtcgctatcatcctactatcacccgaccggaagctgccttaatccttgaacgaacccaaactgccaa

SEQ ID NO: 117094 - DNA, 482 bp, Zea mays
  Clone ID: MRT4577_38279C.1
taattcaacaactagctgcatcgtcttctccaccgaccttgccgccgtcgccccgccgctccatccgatctggaggacgacgccgcgaagcggtctgtcgaggagcagcagcagcgtacagccatcgacgctcacgacagcgatgtcgcgctagtgatggcgcaagcaaagcaggcgagcgaggaggccgagcggctggccacagcgagggctaaggtaggcatgcagatggccgagaagcagggaaggattgccacgctggacatcgagtgcgccacactgaagcagaccttggagctcctccgtcaggaaactgcaagtacatttgtgaaactctgtgagaaaagattgttctacacaaagagaacagaaaccttgactgtcaaactacaggagcaacaggaatggtttagtatgaagaataagattactagacaggagccacatgttgccaaatctcagagcaagcaaaacttcattga

SEQ ID NO: 117095 - DNA, 283 bp, Zea mays
  Clone ID: MRT4577_3827C.1
ctctcccttccctcttctctctcacctcagctctcctcattctccgcaggctgcagcagccgccccattctccttacccggcggtgcaagtgcaacgtccggggccggcagcaggccacagccgcttcatcctcgcctcattctccttctccatggtgcgcgcggccccggcgtccgcgtcccccgcggacatacgcacgactcgagtactcgcagtcgcagtgccgccgtaccagtaatcctcctgccgccgccgctgcacagggccgacatcagcagcaga

SEQ ID NO: 117096 - DNA, 399 bp, Zea mays
  Clone ID: MRT4577_38280C.1
cggacttgcagctgcatatcagccctcccccagccacgaaaccaacggagctagggttctggaaaagggctctagacaccaccccgacagcaactacaacggccgcggcggccaccacggccccctccctcgccttcgcgtcctcggcgccgacagccgtggggcaccacgcggcggccggcgcgcaccacaacgaccaccaccatcaggtgccgacgacgagctcccactcccacctggtgggcctgccgttcttgcaccacacccagcccatcctcctcccggagggccgcggcggcggcctccgccgggacctggcagccgcgaggcccatccggggcatccccgggtacaacgcctcgcagccgctcctccactttctgcagagccacacgcatt

SEQ ID NO: 117097 - DNA, 776 bp, Zea mays
  unsure (1)..(776): unsure at all n locations
  Clone ID: MRT4577_38281C.1
ttgggtccctcgaggccggccgggccgggatcgttggcagcgccattcatccatttgtctttttgatttgttttgacctgagggcaaggcagggcagaacagagagcattcgtctcgatcaaccagatctcgatcaatggaggtggcgggggcttgctgccacgccggcgaggagaggaaggtggctgtgcctatcggcaacgatgcggaggtggagccatgcgtcatcgccgtggacgacagctccgtcgaccgcgccatcgtcaccgcgctcctccggcgctccaagtacagagtcactgcggttgacagcgggaagagggcgctggagatactgggctcggagccgaatgtgagcatgatcatcacagactactggatgccagagatgaccggctacgacctgctcaaaaaggtcaaggagtcttcgaagctgaagcggatcccagtggtgatcatgtcctcagagaacgtgcccaccagaatcaccagatgccttgaggaaggcgcggaggacttcctgctgaagccggtcaggccgtccgacatctcccgcataacaaccaggatgctgctacactgaacttctttcaccagtggccacccaagccaggcgtagtgttttcaattcaagtcacagtagaggtataggaacggagtcaatttagggtagcaattagccgcaggaagtttgatgtaatgtggcctttcattcattagtgcttcgagctttctttggcgtcttactcgnatcagaacaggcagggattagttgt

SEQ ID NO: 117098 - DNA, 1257 bp, Zea mays
  Clone ID: MRT4577_38282C.1
cccagcgtccgcccagcgtccgcgtaattcaacaactagctgcatcgtcttctccaccgaccttgccgccgtcgccccgccgctccatccggtaagacatggaggagtacctggagagcatgaaatctctccgctcctacatgaacgatctggaggacgacgccgcgaagcggtctgtcgaggagcagcagcagcgtacagccatcgacgctcacgacagcgatgtcgcgctagtgatggcgcaagcaaagcaggcgagcgaggaggccgagcggctggccacagcgagggctaaggtaggcatgcagatggccgagaagcagggaaggattgccacgctggacatcgagtgcgccacactgaagcagaccttggagctcctccgtcaggaaactgcaagtacatttgtgaaactctgtgagaaaagattgttctacacaaagagaacagaaaccttgactgtcaaactacaggagcaacaggaatggtttagtatgaagaataagattactagacaggagccacatgttgccaaatctcagagcaagcaaaacttcattgaaggggagaaacatgtcatatttaactcagaagggagcctggataagtttaacaagcccgggaaactctacacacaactggtgtcagctcagctcaagatccaagacatcaaatcacaaagatcagcgcttcttttagaaatcagcagaatcaagcagattctggagcaagagaaaaacataattcctggttttcccgctgcactacagcagatggatatgaagtcattggaggaggaatacaaagctctgcaaggtgataaatcgggggaagttgagtacttccagtctcttgatgaaacaattaatgggatgaaggggattttggatcctgtcaaatgccaatgtggactggagtacaacttaaaacttgatggtgaagccatggatataagctaagcaagaacgaccacatacgcagatgcccatctccaccagatttcgtgcattttagatctgtacagtgtgagagatggattattctttggaaggtacagaatcttctcgcatgtatacgggtggatgctttgggcagagcttgacagcgtcatcgcgaataatatagaattctgatgttagaactatctggagcttgaacggactatacggccatagttttgttcaataattgtttttccttacgctcaaccgcttgtccagattgcagacataaaagatgctcatgttttttctaatc

SEQ ID NO: 117099 - DNA, 391 bp, Zea mays
  Clone ID: MRT4577_38283C.1
taatatatgcatggtcataataaagttttggttttaatgaatctaaaaaaaaaaaaaagcttgaacctgctccggccggccggtccggagggctgagattggggcacactgcggcgccgtggctaggcggatccggagctcgccaccactgcttgccgagctcgtggtcatagcggtcatctgtgtgaactgggtgaacgcgcacaccgccacacatcatcacacgccggacgcaccgagtgcatagcctggggagcctggggagcgagctgactgaccttactcgcgttgcgcgcactgccctctctgcccgctggaaacctgggaagcctgctgcgccaatggattgaacaactcgcgcagcgcggcgggaggggcattgggcgctctg

SEQ ID NO: 117100 - DNA, 559 bp, Zea mays
  Clone ID: MRT4577_38284C.1
gtcgatgctgccaatgaagcacccgtggtggagacccccccttcgggcgtctatccccatgagtttgtcctcaacaagatcgaggccatggccgacgctgttgcttctgctgatcctgaggagctgcccacaggccgaacaacatgtatactacaagccagatgacccaattcttgctgatgcagacgagcccgtccaggacaaaccaaacgtctaggcagaaggtgatgctattgccagggctgagcagactcctgtccaaaagcaagatgcagaccactatgagtaagatgttgatagtcatcctgataggatccagaatccccgcaacgctcaacatgtaaccggcatgcaagacttgtaataaataggaaatgagctggacacacacagaggctactattgctcctacacttggtcagtaccagacgagcgccgtaatgatgactactaatactcaggagcatggctggccaagacgaggtgatggatcaactcatgggcatcaacgatgggatcaaccacgacccaatcaagccgcgcgcataagctactactg

SEQ ID NO: 117101 - DNA, 276 bp, Zea mays
  Clone ID: MRT4577_38285C.1
gaagtgacatcacatccaaggacgtggtcagatccccagcacgctgcgaggacctctctacgacagggccctcctcagagaagctacactatctccgaggagtaggccaggggctgctttggcgttgtgcgggcatgattggagaatgctacaagccgaacgttcgtcactaagatcgtgccgtatgctgccgacggcgagcggctagtgctgcaggagtatgaggtgcttcggtcactgcagcactagaggctcatgtccctgcacgaggactac

SEQ ID NO: 117102 - DNA, 372 bp, Zea mays
  Clone ID: MRT4577_38286C.1
ttatttttttttttttttttttttttttttttgggctgtttaaaaataaccgaggtttttaactggcaccaacagattaaaatacaagcgtaccgaaagaatagctagaaatatcagggtccacaagggtagggcacatatacaactacggcaaaaccattcatacatgaaggcctccagcaaagcttcaacctgcttgttctgggacatatatattaagacggccccggactactacaatactggctggaattattctgagattgcagcatgaggtacctgcaagggtagaacccaccagcataccactaatttaagagagcagcaagagcactagcaaaattaggcgtgatgcccatatttgtgcttaac

SEQ ID NO: 117103 - DNA, 414 bp, Zea mays
  Clone ID: MRT4577_38287C.1
atttctaaaaaaaaaaaaaaaaaaaaaaaaaaaaaaaaaaaaaaaaaaaaaaaaaaaaaaaaaaaaaaaaaaaaaaaaaaaaaataggaaaaaggaaggggaaaaaaaaaaaaaaaaaaaaaaaaaggtttttcccttccccggggggccctttaaaaagggcaatttttccaaatttccttaaaactgggggccgtttaaaatttcttttaaaggccccatttccccctttaggggggggtttaaaaattaattggccggggttttaaacgtgggaattggaaaaaccctggggttcccaaatttattgcgtttgaagaaaatccccttttttcaagttggggtataaccaaaaaggcccccaccaatcgcctttccaaaaatttgccaaacctgattgggaaagggcccccc

SEQ ID NO: 117104 - DNA, 789 bp, Zea mays
  Clone ID: MRT4577_38288C.1
ccggccggccggcactcggccaccatcgctttaatccagtcactctttaatctaatacaccaactcaccaagtcactcttttaacttgcttaattttcaaaacaccttcaccatgaagttcagcctcttctccgtcattgctctggcctctgccgccatggctgctcccgccgtccaggtccaggccaaggccgctggtgccgctgccgatgtccacgcccgacaggttcccgccgttcctgctgctgtccctgccgttccccaggttgtcagcaccaccgtcagcaagaccgttatcaagaagatcacctccaccaaggtcaccaacaccggaggcgttgtcaaggttctgaccgttgccgtcgacgaggtcaccgtccaggttggcaccatcaaggagaccatcaccaaggtcaagtccggcgctcttggcaaggccgctgccatcacccacatccaccagaacgtcgccatcatcaaccagctcctcaccgttgtcgttgaccagctcaaggatgttgtcaaggtcgacatctctctccctgacgtcaagatcattgttggccttgtcatcaagcttgtcaacgagctcgttgctgtcgccaaggacatcctgagcactctcggcctcgacaacatcctcggcgctgtccttaacctcgtcttccgtcttctcggtactctgatcaacctcgttgccaacctcatcggcgacatcgttcccggtgttcttgacgtccttaccgccgtcctcgacacccttttccgcactgccctcgcccccgttgt

SEQ ID NO: 117105 - DNA, 438 bp, Zea mays
  unsure (1)..(438): unsure at all n locations
  Clone ID: MRT4577_38289C.1
aatcatcagaacattcacggtccataatgtaaccacagataatgaaagtgagatacggtgcgacacccagcaatccctgcacttgtgtttgctatagcaaaagccagctcaagccaggtgaacgtctcagtagcaatcctttggtgatacacttctttttccatttaagttttgagatacagtagntccgtcttccaaggcagggaagttacttggggccaatatccttcagggcgcagatctgctcctcccccatagcagactggacagncacaacaagatccttcccactttcaaaaccttccttaatctgggccacaagagtctcatcagntgggagtctgagatcatcccggacgcgtgggtgggcccggggattgcgggccgaggcctgcggaggagccaaggtggggctttgggggggggggttggggctgg

SEQ ID NO: 117106 - DNA, 1321 bp, Zea mays
  Clone ID: MRT4577_3828C.1
atttatagaaagcttgtaaccatacaattggtagtcattttaggtgctgttacttttggtgcctgctttacatcaccttttatttcatgaacttcttatgcttagttgctggctacccacgcgtccgtaatggtactagttgggtcgtgagaccaggaaaaaggaagtcagggatactttcgtcaagaccgaccggtgtcgtgtcgcctgctttgaaaaatcatacaacaaccaactaaaataagcgcggacggcacgcacacgcatcccggcagtcctgtccagtggtgcagctgcctgccttcagccttccctctctttcgcgacccccccggagccggagcagagatcgccagcgctaccggcgcggaggcatggcgggggccggagacaaggtggactacgtcttcaaggtggtgctgatcggagactcggcggtgggcaagtcgcagatcctcgcccgcttcgcccgcaacgagttcagcctcgactccaaggccaccatcggcgtcgagttccagacccgcaccctcgtcatcgaccacaggagcgtcaaggcccagatctgggacaccgccggccaggagaggtacagagccgtgactagtgcttattatagaggcgcactgggagctttgctggtctacgacatcaccagacggcagagcttcgatcacataccccgctggctagatgagctccgagcccatgctgacaagaacattgtgataatgctggttggcaacaagagcgatctcgaggagcagcgggccgtgagcactgaagacgccaaggagtttgccgagaaggagaacctcttcttcttggagacctctgcgctccaggcaacaaatgtggagagtgcttttcagactgtcttgacagagatattcaaaatccacagcaagaagaacatggtgtcggagccaaagagcaacggagctgccccagcaatgccggggacaaaggtcctcgtcccaggtccggcgcaggaaatcccaaagagcaagtgctgcagttccatgtgatgcttctacgtttggtgctgggtgggttgaaaatatattcacgcaacattgttttggttttaaatccctgctgaaatacttgggttttggcgggattgtgttggaacaccggtgtattttagatatttgtcacaattgtgacatgagggaaggatgtgctgatgtattagttctcttgttctctaattgatacgttttatccctgctgcaaatatctgtagcaccgattgtttttgagatgcgaggtgtgaatttgccgtgtaagaaaaaaaaaaaaaaaatttctgtcccgg

SEQ ID NO: 117107 - DNA, 278 bp, Zea mays
  Clone ID: MRT4577_38290C.1
ctctcagacaccaagctgcagatccaggcttttctgggaaagtgaggccaccatggctctggagaagtctcttgtccggctccttctgcttgtcctgatactgctggtgctgggctgggtccagccttccctgggcaaggaatcccgggcaagaaattccagcggcagcatatggactcagacagttcccccagcagcagctccacctactgtaaccaaatgatgaggcgccggaatatgacacaggggcggtgcaaaccagtgaacacctttgtgca

SEQ ID NO: 117108 - DNA, 1311 bp, Zea mays
  unsure (1)..(1311): unsure at all n locations
  Clone ID: MRT4577_38291C.1
ggactcntacngaatgaaattaaaagatttaacaaggaaagacgccaggatttgttggagatgctgaaaggctttgtatcagatcagcaatggatcgaatcttgcacgagctacagtcgtacaaagtactaaaaagaaagagctggcttctcccgaggcttcgagcgcatctgaaatgccactgctagaatgtggcacgaaagaagtacagaatgtggacgacacagcagtaaccaatcaaatgacttgacatagtcatcgcgcagtggcctaaatttgttgtgtccatacgaaacacagagcagcttcctgccatggtacgccatattgaagcttcgccagcgctttttacaccataaatctgaagagcgcccaggtttgaagattttctgagttatgatcacagccatttttacaccatcatgggggtggataccgtttgtgcattcagagaggagacggtcgaagaattctttgaaacctgcacagcattttacacgtgaagtttgatccaaagcattactggagattgtcatacggtcgggaaggatcaggattgtcgctggtgatacacaccttgtctgcacttgaatccagagtgcattcaagagacggtctgatgtttcctgtggtactgctaccaaacgggctaactgtttgcacctttgcctttccaacgctggtgcagactagaggaatgtgggaagaatccatcgcagagataattgttgtgttagaatcatcaggtcgctatatctatgctcaaaagcctgaaaacaagaaggacaagctcctaacgaacgggcatctatcacctcgtgcacaggttctacctgttccttcaaatacagcgcaggatccatcaggctgtcacgctcgtgcaaccatgggaccgccatgcgggcttctgtggccctgtgccgctgcctcacgaatccagttcccgactctcatcaaccatccgacataaacgtaaagatgctacctcacactttggaccactgaaaaagacatatccaaaagcccaacagtaacaacagatgtgatgtgacagaaccagagatccgggcaccgtgcgctaccgaagtgccagacttatcaaatgaggttatccacagcagcagatcgtataaaatagagaatttatactatatattacattgtttatacagtacaatttgaaatagaggataagatagagaatgtgataagatagataccgaagacaaccttatcactccagcggaaaataggaacaactatacataaggccattcttaataaaagttttattatggctagtttgttgac

SEQ ID NO: 117109 - DNA, 222 bp, Zea mays
  Clone ID: MRT4577_38292C.1
cactacacacacacacaccagggcattgttaccaatgactaactaccaggaggctgactactcgctcgaatgacgtcatgtacgacttcatgtccggcttctgcctccacacccacgccgtccagcatcacgtcgtcaacgagaagttccaggaggtcgacacagttcaacgctctcattaccaaccaccaccaccaccatggtcaccactgtggccacctc

SEQ ID NO: 117110 - DNA, 249 bp, Zea mays
  Clone ID: MRT4577_38293C.1
gttttgttggcctgatttagtttatttattctacaagcagtagtgagtggtcacagtcctagttgtggtaaatgtcctgacattgggtgctcgtacaagatttgcatttgcatcgtattaggggcaacgcgggataggctattgcacaattggttttttggttaggccgcatgatactgttgtattatttcttcgttggttgtgtgtattggacgatgggtacatatagttttatgtttggtttgcact

SEQ ID NO: 117111 - DNA, 237 bp, Zea mays
  Clone ID: MRT4577_38294C.1
ggacataagtcttgttttattccaactcgccgtcaaaaacatgaaagggagcccaatggtccaccaagaacacaagttttttgttttattttaaaacatgggcaaaaacatggaactgatcccacaatgatacactaaaacacaacaccctcaggaacgtggaagtgagcccaaacaggggttcctcacgatggacagagtaggcttccccccacaaatcgatcgtcatgagctcaa

SEQ ID NO: 117112 - DNA, 378 bp, Zea mays
  unsure (1)..(378): unsure at all n locations
  Clone ID: MRT4577_38295C.1
gacccggccgaccgccgccgactcccccgcggcgccggcccacagaacgccaccccggcggcgcccgccgccgcagcccgcaggcgcccggaacgcgccgacggcggccggaagccgaaccggcgcgccgccgagcacagccccgaccagcggcagaacgcgcacaacccggaaagacggggcgcgaggggggaagaggcgagccagaaggcgcgcgccacggacggccccangangcccncgagaggcganagcacaagccacaggggncaagggagggaggaggcagaccgcgagaacgaggaagnggcagaggagcagaaagangggcnagcaagcaacgcgggngcaccggaagagcgcccggaggcagaaaag

SEQ ID NO: 117113 - DNA, 104 bp, Zea mays
  Clone ID: MRT4577_38296C.1
ggccagccgtgcggcagcttctcccctttacctcctcgtctccgcacagagagggctcctcgctgccgtgtgccggccttcactttaccctctcgtctcctctc

SEQ ID NO: 117114 - DNA, 350 bp, Zea mays
  Clone ID: MRT4577_38297C.1
gggttataaatatattttggttatttacattttaagagtagaatcctaaagtgattccttccacaagagataccaatttgtcggcaacaacttcaagtgctttttctactttttcttggtagttctttgcttgttggcgaagatacttcacgcggtcgtgaacttcatgtgagtgttgaacatcagaggcggcttcgaatcttttcatttcgatgtgagcagatcttaaagcatcggcaagttcttgctttgaagccataaggtcttccatcgtttcatgtagggcttcattttgttccttgacttgcatagttcttacatcggccttggtattttggtattgcgctttt

SEQ ID NO: 117115 - DNA, 359 bp, Zea mays
  unsure (1)..(359): unsure at all n locations
  Clone ID: MRT4577_38298C.1
ggggcgtaatgtatatataagtgggtacataatttaattaccacgggtacggtaattaaaaaaactaaatcaaatcaacacattttagcacatttttgaatttttggacaaaactagaaaaaaaagaatgaaaaaaagggggcgggcaaaaaggaaagaagaagaaaaaaaattggcgggtacgtcgctgggtcaatcaaatgtgtgtgggttggtgtgtagncnattnaacttttcatcatcaactaatcaccgggcattactaaggacgatggatgaacgggaacgtacttttttaaccttcgggggtgaccnagnnatcatcagggcaggtatgtgcatgcatgacaatgctgggt

SEQ ID NO: 117116 - DNA, 458 bp, Zea mays
  Clone ID: MRT4577_3829C.1
ccggccggaatgggcgccattgcctccgatggaatcgccagcaggagctatggggcagggacatccgccgccgccgtggcaccatggtcattgcgattcgctagcgtctgattgagggtcgtggcctagtgatcttcgcaaaggcacgcggatggttatcatgccctcaccatgcggttctggggccgaagcggtgaggaattgtcaagacgcacccctccatggtcgaaggtcgcttcggcaggaactttggtcaagagcaggtaccacaggatgaggcgctttgaggatgctatgatgtgttcgtgagaggtctaggccgtcgtctcccagtcaactttgggttgttggaccgttgtctcttataatgtaattatttatttattttgtacagaactcctattatttagtaaatatgtgacattcgatccaaaaaaaaaaaaaaaaaatttgcggcc

SEQ ID NO: 117117 - DNA, 198 bp, Zea mays
  Clone ID: MRT4577_382C.1
tatccgatcatatcacagtgacactacacgatggtgagcgccagaatcgttgtcctcctcgccgtcctcctatgcgctgccgccgcagtcgcgtcgttctgggaggacgacaaccaccacctccacggtggccacatgtccgggcgatgcttgcggcggagcgtggtccgtccctggcaccagtgttccctggtgcct

SEQ ID NO: 117118 - DNA, 330 bp, Zea mays
  Clone ID: MRT4577_38300C.1
ggaccctaaaattatttaattatggaaaaggttgtttaaagaaaaaaaagggccactaaatggggccaaaatttcctggatgtttaaaggtgaggggacttttctcccaaaaaaaaaaaaattttgtggtcaccccactgaaaggggggcccccaaaaaattgagcagcctgttattgaaaaaaaatgtcaccttaaaagtttgaaaagaaaggccatcctgggttccaaaaaaaaaactaaaaaaaaagggggggagcttattttgggggtaaaaaattgggctccaagggaccttggttttgggggtggggggtttagaaaggccaaa

SEQ ID NO: 117119 - DNA, 540 bp, Zea mays
  Clone ID: MRT4577_38301C.1
gccaaccagaaataagaagttacatttccagattctaatgtgaaaaaaaaaaaaaaaaaaaaaaaaaaaaaaaaaaaaaaaaaaaaaaaaaaaaaaaaaaaaaaaaaaaaaaaaaaaaaaaaaaaaaaaaaaaaattaaaaaaaaaaaaaaaaaaaaaagtttttccctcccgggggggcccttaaaaagggcaaattttgaaaaattccaaaaaactgggggccgttaaaaaatcatttaaaagggccaaattccccttaaagggaggagaataaaaattaactggccgtgttttaaaaacgccaaaacggaaaaaaccctgggttaaccaaataaaaaacctttaaaaaaaacccccttttcacaagttgggaaaaaaaaaaaaagccccaaacaaaccccctttccaaaaatttcccaaccctaaagggaaaatgacccccccttttaccggccaattaaccccggggggggggggggtaccccaaaggggaaccgttaatttgcaagccctaaagcccccgttcctttaatttttt

SEQ ID NO: 117120 - DNA, 408 bp, Zea mays
  Clone ID: MRT4577_38302C.1
acggtgaaatgttggcgaaagcaccgaacattctgggacaatatgattatgagagagctctggaaactggtgaccaaagtgattgtggggaaaaactacattgtccgccagcaaaggggcatacagctaaatcatcacttctaggaatgaaatgcggtcatgcggccctaaatgatgacatggccgtcatcagcacgagtgggtaaagaggtgtgctttgctggtagggatctattgctcccttatagggccattgagccgggtcaacttgagaagccatttgataaattaactcaagagggtgctattgatcacaatgactcttaccatgatgcccaaaaacaactggttcttgcattttagtaccgcgccgattttcctagtgatctacacaaacagggtgttttt

SEQ ID NO: 117121 - DNA, 175 bp, Zea mays
  unsure (1)..(175): unsure at all n locations
  Clone ID: MRT4577_38303C.1
cggnattcggctcgaggtcgtcgccgcctacgtagtagccgtgctctgatgcttccccgccgggctcattttgatacgggacctgcggttaacaacagccagcacaacatactcatcacgtacagcaggccgatgtggtttatcatgcttgccaacatgatggtcataatctatt

SEQ ID NO: 117122 - DNA, 460 bp, Zea mays
  Clone ID: MRT4577_38304C.1
ggccggctccgaggccggccggggtcggtgggtatatcatgcaaccacccgaaatcgtcaccctcttcggcgtggcgcctgacaagtacggagacgtacacaggcaagacaggcatgggtgcaccgcggcgcgtcgagcgggaactgctcagcgagtcttctctcagcacagatcatcccgactatcgccagcgcgcgcgcgttcgtgacacagacgagcgatcgcgtgaccggatcgccgcgtcacagagcactcgagagtgcagactgctgaggctggatgtgttatatgagaaggagcgtgtgaccatgcacccgtcgcagtatgatgccaggcgtatcagcgggaagctgcgtctgttgctgcaccacggatcattgctcctgagttgggagtcaaacgtattttattgctctttgtcgaccagatcatgcgaaggggaaaagtaactggattcac

SEQ ID NO: 117123 - DNA, 720 bp, Zea mays
  unsure (1)..(720): unsure at all n locations
  Clone ID: MRT4577_38305C.1
gggaaaaaaaaaaaaaaatatagttcagctttgtactactccctatcctaaaattactgtcattttagctttgaaagatgtcccacaaagagtgtcgtttcgctagctacggaagtcctgtgcctattggaatcagttataacaatgacaggacataggagcaattaatgaagcatgtcctcagaaagtgtcctggttcatttgttcaagggaaaaaaaactctatggaagtgcatcttttgggatgaaaaagttgctgcaatgcatcagttgctgcgccgttggcctttgtggctgtatcaatgacagggcgtataaagcatgtccattaacttcgcactagatgtagagattaggacgttgtagttgtaggagtgtgaaggtcattttgcttatttcatggtatgcgcctcgaatcctaaaacgacagtaaatttgggagggagggagtaagtcaaaactttgacctctcctgcgttttcgaaaaaaaaaaaagtcaaaactttgaccaaatttttatttagaaaaatatattagcatctatgacttcaaataaactcacgcaggcatatttcatgtataactactaactagnataatgccgtgcatatgacgatacatcaacagttttacgacctnagtgttaaagccagtgggatgaatcatcccaataaaaaataaattaaagttaaagttaaccttcctaataaaataattaaa

SEQ ID NO: 117124 - DNA, 352 bp, Zea mays
  Clone ID: MRT4577_38306C.1
tttttgtttttttttttcaagaacatggaggctgatgctaaccgcacaaccaatatggccttttatttggtagagcaaagaggctgatctaattgcacacgattcaacatgatgggctcgcaagggacattttggtccagcaacaggacctttgttaaccaaaaggaaccatagtggcatttccagaaagggacccatagatgttaatcctataggaccatgggaaaagggagggaaagcgcaaatgaaacaataggcaaaccgagctggataggtaggggtttacaccaaaataaacgacatgatgctcttgtggaacaagtgtctgtttataaaggccattatcttaatg

SEQ ID NO: 117125 - DNA, 536 bp, Zea mays
  Clone ID: MRT4577_38307C.1
agcagtggtaacaacgcagagtacgcgggtgtgctggccacttcagttgttgtctattctacagtctctaatgcaaatcaccctcaacagcttgtgtttcatgtggtcaccgacagaatccattttggcgcaatgtcaacattattcctcataaatgacttcaaaggttgtactgttgaagtctgatgcatagatgagttcttgtggttgaatgcttcttcatctcctcttgttaggcaactatctgaggttgaaactcagggttactattactcaactggttccaagaatgcccgtgaatgctttggttccctatagagctgttgatgtctttacatattcttaaggtccttaccatgtcaatcacatggactggtgtgagtatagcttgttcctcaaccaacactatattattagttgtgattatacatataatattgttgcccaaaaaaaaaaaaaaaaaaaaaaaaaaaaaaaaaaaagaaaaaaaaaaaaaaaaaaaaaaaaaaaaagtactctgcgttgttaccactgct

SEQ ID NO: 117126 - DNA, 467 bp, Zea mays
  Clone ID: MRT4577_38308C.1
attggggaaaccccaaatggaaaaggggggcatcctggtgggccagcccggggaacaaattcgaggcacaactctcttggggggcacgggggcaaaaaccggggacaaaacgggggaaaacccaaaaaaaggaggggcggggggggccgggggcccgggacccgacggggcaaggggggaagggcccaagggcaaccacccccaaaacaaccatgaaccaaaaaaaaaagtccagggggccccggaccaaaacggcggggaaccaacccgcccccccgggggggggggggacgggggcgacgggggcgaacccggcaaaggggaaaaaggggcccgccccaacgggaagccgcccaggggccgggcccagggtcttcatgccggggggcaaaggggcgaaaaaaaactggaggaagcccattggggggaacaccccccccgccccgagcacggaaaaccccggggcc

SEQ ID NO: 117127 - DNA, 924 bp, Zea mays
  Clone ID: MRT4577_38309C.1
atggatcttggcacacatatgatggttcgtactctccaaactacctgggtcaacactagctacgcccctccgccccggcaaatccctgtctacccagtggtagtcgaggaagtttcggtggatctcccttacattcgagtggagaatggagtcatcctagaggacagctcggaggaacagctgccgacgcccaccccgttagcagagtcactggccttcgcagctaggtcatggacatcggcaccgcttgcaccagacatccaagctcctgcacccggaggcgacgactcagacgactctggggacgacgatgacgacggcaacgaggacgaagaagaacaagtcaacgaagaagctaactacgcccagcaggactacttcatggggtttggtcctgtcatcgaacattacacatcaatgttcgagacagggcacttccccaacctgctgcaagaagtgttgcacgcattgggaacctacgtccgccccctgtatgaaacaaggcaagtgagcgagcctccccgggcttgctactacatcactcgcatccatgccagggtgatggatgcaggggataggggattcaagactctgtctgctcatgagtccctgacaccgctatccacctacactgcctcgttcagtgatgctaccagacggaccctgtggtctctcagccacacctaccggcagcagctgcatgacacgaggttcaggcatcttcctctatgtctgagtggagggagccagaccagcatcgttccaggtggagctagtgaggagtgcctcaacaccctagctggtgtggtggccggactcaacaccgacctggacagtgccaccctggatctctctagggtgcacttagagctggaggatgcccatgctaggattgcagccctggaagcccaacttcaaggatag

SEQ ID NO: 117128 - DNA, 459 bp, Zea mays
  Clone ID: MRT4577_3830C.1
ccggccgggcggtgtttacgtatcatcaccatcatcatctagattcagatttagattgtagagcagctctctgtgtttgtcaccttggaacacagaatccctactactctctccccataaggtgtgtggactccctaacaacaatctgttttgaaatccatgctgttagtattcgattttctatttcaattttcaaccctttagctaggttttctgctttctaactaaatttcagcatccaccatagctgaactaatttggggagtagggtcccattactgtattgaggctatactaattgaacttctgatttagtttctgcacctgttgcaaactgcgggctttttttagtttttgcatttctaagggaaactatattgagatttaaaaaaaaaaaaaaaaaaaaaaaaaaaaaaaaaaaaaaaaaaaaaaaggaaaaaaaaaaaaaaaaaggcggcc

SEQ ID NO: 117129 - DNA, 405 bp, Zea mays
  unsure (1)..(405): unsure at all n locations
  Clone ID: MRT4577_38310C.1
ccaacatnntcaaaggctttgagtatattagaacaaaggccaaggtcnactactataatattttcantaatacattccccaacattgttttcttatcnaacaaggtctggcttgactcttaccacttctaggtgcttaaaaacattaaacaacactccccttatattactcaagatgtacacgatcacttcaccaatctccctctaaatattgtatctggttaccatatacacatgttttgttattcaactgacgatacccctgatctgatacccctcagccatgtcctttccaccaatcttgttgctcgtctcactgaagttttcaagaatataaccttccccttactcaagccctatgtgaaaacctcatttacattttattacctcaaccagggtaactcca

SEQ ID NO: 117130 - DNA, 1952 bp, Zea mays
  unsure (1)..(1952): unsure at all n locations
  Clone ID: MRT4577_38311C.1
attgggtccctcgaggccggccgggggggcacccgggccgctttgagctatcgtcgtatcccgttgtcccgatccgctccatctttcatactggggcacgacctcgtgaaaaggcaggccgactctgccagtataagaggaccgcatccccacggaatccctgtcagtctgcttcaggctttcggatcgcccctccgatagcgtgacaccctggaagcctcgcaatagagggaatgataaataagggcgacacgccatcgccaccgaaccctacccctacccgcgacttcgctccgcttccgccgatcggcttgccccgtcgatttcgccaacccctcgacccgatcggctccattgatcgtacctcgtcgtccggttgtcgatggccaggacctctttcaaaatggagcacgacctcgagaaaaggcagtccgaatctgccaggatcagggataagtatcccgacagaattcctgtgattgttgagaaagctggcaaaactgatgtccccgagattgataagaagaagtaccttgtccctgctgatctcactgtcggccagtttgtctatgtggtgaggaagagaatcaagctgagcccagagaaggccatctttgtctttgtgaagaacaccttgccaccaactgcctctttgatgtctgcaatctacgaagagaacaaggacgaggatggcttcctttacatgacctacagtggtgaaaacaccttcggctctgcctagagcaatcgcccctgccactgtaaataaacgagcatgatggggctgctgctattgtaaacctgtgtatatacctcagtctctagtatgctgctgccggattgcttcaatggcttcaatgacacccttagctttcaactgtttggatttctcctgtgacattgaattccttcggtatcgaaacatttgatcatttcactattacttcacttaccttatctcatcagatgcgtgattgctgtttatctgtgctcatcgtgtttgttttaagctgcaactctgctgacggccaagctgatgctatatttttctaatcgacccgcagtaaggggtgtttggtttaagaaattaatccatccaaaatgaggtgatgcatcgtgagttagttccttaaatttggtaggatgactcatactcagtccttacagtactatctaactatgataaaggaatagtactaactacgccaaagtactatctaactatgccntcggttggtttgcttctactctcttgtctcgtttgctgttaatttcgtggtccggaattaggcctcttgcctgtggttgatcggtataaatgttcatatattgaattgaacttgatgatgattgatgggtaggtttgtttcttgtctgtgttgctttcctaattttatggttgggggttttagatgttatgtatgcggctagtcggctactatgggtttaggttactctgcttctatgtgctctgttctgacacagtctgctaatttggtctttcgtaaacctgtttctatctggacctgttagggacagaccatgatttgaattctggcgtacttcagtttgtggtatcatttatcatggaatttgctaaacttttgggcagagtgttccctctgttctttttaaagaacttttgcatagttatccatccatctattcttaatgtgccaaaaactatgtagtttggatcaacctggtagctttagttttgtttttgaaagtactgttgtgatgtatggctcttgtgcatctgttatttctaggaacaatattctttttggcaagaattaatagtgttcttagttgtattaaggacttggttaatggactattagtttgttcatactttcatggggattgcagatggtgccatcttcatgttttggcatttgacttacatgactaatttatattattatggataatatatggtctgcatttta

SEQ ID NO: 117131 - DNA, 1008 bp, Zea mays
  Clone ID: MRT4577_38312C.1
ccggccgggaaaaaaagctgaactgaaagagcaagcgtgcgtgtgagacaaccaggtccgatccgcccccgccgagccgaggacagcagcgggggctctcggtctcctcctaggctcctacagatctcgtaccccgtcacagatctcgcgccctctccatcccatgcccaccccccctcgtcggatctgaccactccgcccctcctcccgtctccgccgccggagctgatatccgcggtcatggcgggcgccgcgggcgggttcgtcacgcgggccttcgaggccatgctcaaggagtgcgctgccaaccgcggcacctcactcgtagtcgtagctcaagcatcagcggcagcggcagcggcaggagctctgggcagcgtgcgcacgtggggtacctagctcgctctgctagcctaccatggctgatcaccaccggggcgcgacgggaggtggcgggggctacggcgacctccagcgcgggggcggcatgcacggcgaggcgcagcagcagcagaagcagggcgccatgatgacggcgctcaaggccgcgacggccgcgaccttcggcgggtcgatgctggtgctgtccgggctgatcctggccggcaccgtgatcgcgctcacggtggccacccccgtgctggtgatcttcagcccggtgctgggtgccggccgccatcgcgctggcgctcatggcggccgggttcgtcacctccggcggcctcggcgtcgctgcgctgtccgtgttctcctggatgttccagtgcctgacgggcaagcacccgccgggcgccgtcctgctggtccacgccacggcgaggctggcgtccttggcccgcgtcgtcctggttgctgctctgttccgcttcgtcccggcgctggggtcttgtgtgtttgacctctcttgtgcggaccgtgcgcgcgtcctccttgttccactgcctgcgcggcggtctttggccctttctggcggtggctgtttgctccgtcgctgtcgctgcgtctcgg

SEQ ID NO: 117132 - DNA, 530 bp, Zea mays
  Clone ID: MRT4577_38313C.1
gagagcgttttttttttttttttttttttttttttttttttttttttttttttttttttttttttttttttttttttaaaaaccggaaagggaacctcttatttcgggggggccccctacctcatccaaaaaaccttattattgggggccccccaaaaacccatctaaaaggagggccccccccaagatgtgttgttgggaggaggctgctgggtttgtcaaaacaaggtggacaaagggcaacaattgttgtaatttaaaaaggggggcggggttacccccaaaccgctgggaaaaaggccccaaccgttgctgtgtcaaaaaagaaaccccggttgctgcaactagctggctaaaagggaaaaaaatttgctgcggcaaaaaaaccgcgggggtcaaggcggcccattgggtaaaaggaaaaaatttttgttgatgaaagaaggccaaacctacctggccgaaagggaaaaggggttgccgcaaaaaacccacagggttcaagggaaataggggggtgaagggaaaaa

SEQ ID NO: 117133 - DNA, 270 bp, Zea mays
  Clone ID: MRT4577_38314C.1
aaatctttcattttatttattttgttaataactggcattcctgtggggataaaataatcgtatagttccttcctgctgaacagcgagtcttaaattttctgtttaacttctcaccctttgtatttctatatgtggggcttccatttggttttcctgattggttcacacacacacacctctacctccctcagtccaattgctgcataggcaaattcttttaaaaattactaatttaaggcctaggcaggaggattgcctgagctcaggact

SEQ ID NO: 117134 - DNA, 1655 bp, Zea mays
  Clone ID: MRT4577_38315C.1
ggaccaatccttcctgtctctgaataaatttgccctgttttttcagcgaggcgtcgctgaaagctggtgttagcggcgaccaagactatctgttcctgaaagccggtgtatcagtatcgtttcgttgtctgaactgattaaatcctaatatcgatagattagactctcccagcaactgctttgtcccctaaataaagtgattcatcatctcttttttacatctagcaaaagaaaaaaaaaaaaaaaaaaaaaaaaaaaaaaaaagtagtcgtagctcaagcatcagcggcaggagctctgggcagcgtgcgcacgtggggtacctagctcgctctgctagcctaccatggctgatcaccaccggggcgcgacgggaggtggcgggggctacggcgacctccagcgcgggggcggcatgcacggcgaggcgcagcagcagcagaagcagggcgccatgatgacggcgctcaaggccgcgacggccgcgaccttcggcgggtcgatgctggtgctgtccgggctgatcctggccggcaccgtgatcgcgctcacggtggccacccccgtgctggtgatcttcagcccggtgctggtgccggccgccatcgcgctggcgctcatggcggccgggttcgtcacctccggcggcctcggcgtcgctgcgctgtccgtgttctcctggatgtacaagtacctgacgggcaagcacccgccgggcgccgaccagctggaccacgccaaggcgaggctggcgtccaaggcccgcgacatcaaggatgcagcacagcaccgcatcgaccaggcgcaggggtcttgagagaagaaccacactcgagcggaccgcgcgcgcgacctccttgaaccactgccggcgcggcggcatatggcccttaaaggcggtggctgctgctacgtacgctgccgtagagtctcggtcgccgcgatagctctagctagtcgtttatgtgttgtgctttgtgtgtgcatgcttgtgtctgggggcatgcagtgcagtgcagtactatatgctgtatgcgtctctctttgatcggagaggcggatgtacagcatgctcgatatgtctagtttggatgtcatgtttatgatgaggaataaaatgcagtgttcaggtgagaaaaaaaaaaaaaaaaaaaaaaaaaaaaaaaaaaaaaaaaaaaaaaaaaaaaaccgccgactagtgagctcgtcgacccgggaattaattccggaccggtacctgcaggcggaagaagggggagaaaaaaaaaaaaaaaaaaaaaaaaaaaaaaaaaaaaaaaaaaaaaaaaaaaaaaaaaaaaagggggggcccgttttaaaagaaccaaagtttacttccgcgggcttccaaacttaaaacttttttttttggggcccccaaaataaaattaattggcccctttttaaaaacttccgaaatgggaaaaaaccttgggtttcccaaattaaatggctttgaaaaaaatccctttttccccaggggggtaaaaaaaaaaaaggccccacccaatcccctttccaaaaatttgcccaccttaaatggaaaatggaacccccctttaaccggccaataaaccccggggggggggggggttacccccaggggacccgttacatttgcaaggcccttaaccccc

SEQ ID NO: 117135 - DNA, 255 bp, Zea mays
  unsure (1)..(255): unsure at all n locations
  Clone ID: MRT4577_38316C.1
gctggagctggcgcncgccgaggccgagatgaggtacgcgttcccgcctgacctccgcgccgtcctcgccgcgggcctgccgttggggcccgggttcccggaccggcggtcgcgtgcggggctgnggtccgccttcgacctgcccatcgcggcgatgtcactncagattgcacggggcgcncnccccaccnnncccgancacncgttgcggcttgcncggtcnnncccncncccncncctgtnatcggcgccgga

SEQ ID NO: 117136 - DNA, 306 bp, Zea mays
  Clone ID: MRT4577_38317C.1
ttgcttacataccggcggagcgaggcgggccgcaggggtttgttcgagagctcttagggaggccctcctacaggatggagggcgaaatccccacgcgcggaaacgctagggcatgcggcctgggcaccggccgcaacatggggatcgtgctggaagtgtgccggcagatggcctgcaacggggtgaccgtcgggttgacagacagggaccacacgaggggcgcaagagccgtggagaaccttagaggcctggaggtttccgatgagctcttacaccgactggaaatggccgacgctgcgagcattc

SEQ ID NO: 117137 - DNA, 794 bp, Zea mays
  Clone ID: MRT4577_38318C.1
gacgttaccaccaacctccgccgtcagcctaggctcgaagaaccggtacgcttattcactccgcagggcatcgaccacggggatccccccgcacggcagggaagaagttgatgtgaaagagaatctaatcagcagggctagtcctggctcgcatgctccaacatgctccatgctaaggagacactgaggaagatgtactcagtcgccaagggctactactgcggggggctagccgctcccaatccttttccagcagcatgggatcttaggcattctctcaatccctcaaggaaagcgccgggttttgttaacccatgcagggcccgttcatatgcgcacatcgcggaaagctctgccggccaagagattgtgattgctcttggaagcaatgtgggggacaggatcagttcgttcgacagggcgctgcggctgatgaaagactcgggcataaagatcaccaggcacgcctgtctgtacgagaccgcccccgagtatgtgaccgaccagccgcggttcctcaactccgctgttcggggcacgaccaagctggggcctcatgatttgctcaagaagctgaaggagatcgagagggatataggccggaccgcggggataaggtacggcccaaggccgatcgatctcgatattctcctgtatggcgactcccagatcagtaccgagaccctgactgtgccacatgagcgcatccatgagagacaattcgttttagcgcctcttgttgaccttctggggtcctcggctgacgatcatatggagaaaagctgggactccct

SEQ ID NO: 117138 - DNA, 252 bp, Zea mays
  Clone ID: MRT4577_38319C.1
actaacaagaaaaacacccaacggactttagtgcacccaccagacaccaaacacgggggaaaaccaacaaggcgggccgcacccaaagacaccccatccgcacccatacaacaaatgccaacacatcaccaaggccaagggccacacggaacacacggaggacaccaacgcacgacgcacaaaccccgacagccaacaacgcaacagcggccgaaagcacaaacagcgcaaaaagaacgaaaaagacaaaca

SEQ ID NO: 117139 - DNA, 354 bp, Zea mays
  Clone ID: MRT4577_3831C.1
ttttgggttttttttttttttttttttttttttttttttttttttttttttttttttttttttttttttttttttttaaaacatgaaaaagctttgtttaattattaaaggttaagagtacttatttagggagataattttgaggttgggggtagtgttgggcccttccaacttgacctttttggtagctgccactgccagcaggagtaaacaaagccaggttatgctttctaacgtttttgaagtttgaaattttcttcatggaaaagggatacaaactgggaaaaacgggggccggaaagtttttaaagaaggagttttttccggaaacgggggttaacatggggtaagggt

SEQ ID NO: 117140 - DNA, 358 bp, Zea mays
  Clone ID: MRT4577_38320C.1
ggcggccaagatgacaccgaggcacccattattgctgggtggcgccgactactcggcggactattgttggatgaacaacagttgataaacaacaaggagcaattttttttttttaaaaagcccccattcaaaaaagatggttgctagatgatttctacagggaggaggcgggccccccctttcttccatattaagaagagagaggaggggcgcccctccttaatgatacaacctttcttccagcggggtgttgttattagcaccccccccaaaccccgcggggggccttccttggtggggtggtggggaggcctccttagtgttttttttgccccagcagaaacaggtggaatttttt

SEQ ID NO: 117141 - DNA, 931 bp, Zea mays
  Clone ID: MRT4577_38321C.1
gcacgaggttgccgggcccattctcgtgactgcttcctctactcgaaaatcctccgaacagaacgcaggcaggcggcggcggagacaggatcaggttcctcgcagccggcgttaagtagggcggccgccctacatcgtcccacctgtaggtacgacactgcgccgcttgaaggaggctttgcggcgatggaccgggtcggcggcggcgaaaagcaactggaggattgcacagtagccaatgctctaggaacttggttcttctcagttgcgggtgctcttgttgctattcctgtgggcataaagaagaaatccttagccccactcgtcttcttcggcactactggaaccatgctggacattatcatgggcattacccagtgtgagcgagagcatgctgagcgggaaatgaagattttggaagcccagaaattttcggtcgatgcttcagctcagaacgaaagctctgattcctttggcagtgctgacaagtgaaacacttctcctgttttccctcacttgtgacctggcttcacctctgttaattagagttgttgctcagatgccaatttgacacctttaaatttctgaatacactattcctactccctcaataacgtgcaattgtgcatttgatcaaccattagtttttatatatattgtgaattgaaaacaaaatataaaaggttcagtcttgctcctcaagcaagattgccacatggtgaaaatagctcaatccgttgtacggcttggtatgggactatatatatataatggtttttttaaaaaaaacttgtgcacgaatttctttttattctttaaaaaatcgtgtacgatagtcagttggttctcatatgtggacgagtttggatgcccgaggcctcatcattctaggcctttagttgtagttttttagttgttatgtctttgttga

SEQ ID NO: 117142 - DNA, 554 bp, Zea mays
  Clone ID: MRT4577_38322C.1
aaaaataaaaaaaaaaacaaaaaaacaaaaaaaaaaaaaaaaaaaaaaaaaaaaaattaaaaaaaaaataaaaacaacaactaagggcccaattatgaaaaaataaataaaaaatgggggtttgttcttgggccgtaccccctttagggggaatttttctatttttccttaacctggggggctgttcggccttttttttagggggcccttttccccttttggggggtcctttttaatttccttggccgggtttttccattttgggagttggaaaacccttggggtgccccacttttttcgcttttaaaaacttccccttttcccaattggggattttacgaaaaggtcccccccctttttccctttccaaaattttggccattttgatggggattgggcccccccttttaggggccttttagccccggggggtgggggggttccccccatttgtccctttttttttgcaggggccttagggccggctctttgggttttttcccttggttttccgaccaggtgcgcgggttttccccgacagcttttaattgggg

SEQ ID NO: 117143 - DNA, 2052 bp, Zea mays
  Clone ID: MRT4577_38323C.1
cagccatctcctcaccctcgttcaccacacagtccgccactcctttagtagcttgtgatttgtacgtcgacgagatcactggtcgggtggcggacgacgacacatggggaagggtagtgtgggtgcatcatggtgggcgttcctcctgctcgccggcgtgctgctggtcgtagcagccacggccggggcggaggacggagtggtcgaacgggaccgcaaggaggacctgcggtggtgcaagcaggcgtgcgagtggcagtacggaaaggacaccccgcggaagagggaatgcgagagcgagtgccgcgagcggcaccagcaagctgacgcgggcgaggacggcgacagcggcgtggacgcctacgtctcccgctccgggaggggcgagtgccggcgccagtgcctgcgccgccacgagggccagccgtgggagacccaggagtgcatgaggcggtgccgccgccgcggactggccgtcgacatggagcaagagtacggtcgcggcagcgagagcgcgggcaagtgccgggagaggtgcgagcgccaccaccgcggggactggtgggagaggcagcgctgcctgatggactgcaagagccgggagcgggaggaggagggcggcagcggcggccggcgcggcgaggaggaggaggacagcggcgaccgctgcccttgcgagaagcagtgcgagggccaccacgaccgggaaagcaggcagcagtgcgtccaggcttgcgagcgccggcgacagcagcgcggcggcagccgtgactccaacgtcgacgaggacgacagcgaccggcggtgccagatgaaatgccggcgccacagcgatcggcaggcgaggcagtggtgcgtgcagcgctgcgagcgtaagcaacaggaggaggacgccgccgccgacgacgacaacagcggccggtgccagaagagatgccagcaccacagcgatcggcaggcgaggcagtggtgcgtgcagcgctgcgagcgtaagcaacaggaggacgccgccgccgacgacgacgagaacagcgaccggtgccagaaaagatgccagcagcacagcgactggatgaaaaggctgcggtgcatgcaacggtgcgggcgacaggaggagggcggcgcacgcgacgacgctgacgacgacgccagccacggcgaccggtgcgagaagaagtgccagcagcaccaccgcgactacgacaagcagcagcagtgcgtgcgcgactgccgccgcggccgtggctgggaaacggtggccggcgccatccttgaggtggtgtgacgatcgacgacgtgcatggcgtggcgcagagctaataataaaagggtagtgtacgcttaccgcgtacgtacgtgtcaccgggcgtggcactctccagtctccagggacccatccaccaagtgctactgctccttcgtagggagacgtgggaataaagagtggtagctgcatgcgcgtacggcggccatggctctccgatgagagagctagctgtgtacgtgtgttcgtgatgttgttccatgcatgacatgtatacgtcttgcctaagtacgcttgtactagttgagagactgtgtaagtgaaatgtgctataataataaataagtaaagggcgccttctccaaaaaaaaaaaaaaaaaaaaaaaaaaaaaaaaaaaaaaaaaaaaaaaaaaaaaaaaacctacctttaaaaaattttttgccccctttgccgaacccggggttgaaaaacttaataaactcgtttgggcaacccgtttgcctccccaagggaacctgggaaaatatccacaaagttgaatgaccactcttgtttaccgaaactcccgaaggggctgtgggaaccaattttgcagaaaaaaaatatgtcaacccaaataaccctgcaaggtggaagttaatggtttatttggtggcccctgttgttacccacctttggggttggaaaacactgaacttgcctcaatatataaaccgggaacattgggcgccctggggccgcccctgtcatgagatcaattgcaaaaaaaaaaggcatttaatatttg

SEQ ID NO: 117144 - DNA, 1954 bp, Zea mays
  Clone ID: MRT4577_38324C.1
cccagccatctcctcacgccccagccatctcctcaccctcgttcaccacacagtccgccactcctttagtagcttgtgatttgtacgtcgacgagatcactggtcgggtggcggacgacgacacatggggaagggtagtgtgggtgcatcatggtgggcgttcctcctgctcgccggcgtgctgctggtcgtagcagccacggccggggcggaggacggagtggtcgaacgggaccgcaaggaggacctgcggtggtgcaagcaggcgtgcgagtggcagtacggaaaggacaccccgcggaagaggggcgagagcgagtgccgcgagcggcaccagcaagctgacgcgggcgaggacggcgacagcggcgtggacgcctacgtctcccgctccgggaggggcgagtgccggcgccagtgcctgcgccgccacgagggccagccgtgggagacccaggagtgcatgaggcggtgccgccgccgcggactggccgtcgacatggagcaagagtacggtcgcggcagcgagagcgcgggcaagtgccgggagaggtgcgagcgccaccaccgcggggactggtgggagaggcagcgctgcctgatggactgcaagagccgggagcgggaggagggcggcagcggcgaggaggaggaggaggacagcggcgaccgctgcccttgcgagaagcagtgcgagggccaccacgaccgggaaagcaggcagcagtgcgtccaggcttgcgagcgccggcgacaggagcgcggcggcagccgtgactccgacgtcgacgaggacgacagcgaccggcggtgccagatgaaatgccggcgccacagcgatcggcaggcgaggcagtggtgcgtgcagcgctgcgagcgtaagcaacaggaggacgccgccgccgacgacgacgagaacagcgaccggtgccagaagagatgccagcaccacagcgactggatgaaaaggctgcggtgcatgcaacggtgcgggcgacaggaggagggcggcgcacgcgacgacgctgacgacgaggccagccacggcgaccggtgcgagaagaagtgccagcagcaccaccgcgactacgacaagaagcagcagtgcgtgcgccaactgccgccgcggccgtggctgggaaacggtgggccggcgccatccttgaggtggtgtgacgatcgacgacgtgcatggcgtggcgcacagagctagtaataaaagggtagtgtacgcttaccgcgtacgtacgtgtcaccgggcgtggcactctccagtctccagggacccatccaccaaatgctactgctccttcgtagggagacgtgggaataaagagtggtagctgcatgcacgtacggcggccatggctctccgatgagagagctagctgtgtacgtgtgttcttgatgttgttccatgcatgacatgtatacgtcttgcctaagtacgcttgtactagttgagagactgtgtaagtgaaatgtgctataataataaataagtaaaaggcgccttctccaacaaaaaaaaaaaaaaaaaaaaaaaaaaaataaactaaaaatagttgaaaaaaaaagaaaaaaaaatgtgctataataataaataagtaaaggaaaacttctccaaaaaaaaaaaaaaaaaaaaaaaaaaaaaaaaaaaaaaaaggggggggcggtttttaaaagaaccaaattttactacccggtgattgaaaataaaaattttttttttgggggccccaaaataaaataaatgggccgggtttaaaaaacgggggactgggaaaaacccggggttaccaaaattaaatcccttggaaaaaaacccctttttcccaagtgggggaaaaaagaaaagggcccccccattaggccctttcaaaaaattttccaaccttaaaatggaaaagggaaccccccttatagggggaaataaaagcgggggggggggggg

SEQ ID NO: 117145 - DNA, 585 bp, Zea mays
  Clone ID: MRT4577_38325C.1
gtgactgacacgcagccacaaccgccgctgcgccaggggcttcagcaaagggaagaaagatggcccctgggactatctatgggtcaagccatacatatatgctgggaacacaagatccatcatcccttcctaaaggggggatctgcttaataatcaaaacccacacaaggcagacggcaccatacaacccaaacaactggatgccatgcatgatgttcctggcatccaattttgaggaatctcgcacagaagataagctgctgaaccaaaatgaggacttcactgacatggatgacacatactgctcacaaaaggaacaggaagcaagagaaggaaggcaagactaagaacacagacttcaagttctaaggacataccagcgatgagctcgtcatcatgcaccggagtagctgtaccaaatatgactggcttgatggtttaaatactgccatctgacacatgcggtccgtgttcctaagatccaatccgagcaggtaggcgctcattcgcattggttgagaacctgctatgctcaggcatcccagatccgtcagatccgccgtaagatggttgagattatgatca

SEQ ID NO: 117146 - DNA, 351 bp, Zea mays
  Clone ID: MRT4577_38326C.1
gataatctgagcattcacaaacacacccagccaagctcactaccatcagcctcacgacattggctaccatgatgctatgcgtgcttgcgcttctcgcgctttacgcgagcgcaacacatgcgtgcattattgctccatgctcacttgctccaagttccattattacacacgccctactaccagttgctcgaatgggcttgcaacacccaggtgtgcaagcctctatgctacaacaggcctttgaggatagcgtttcacatcagccaattttccagttgcgacatctatccttgcaacatataacaacacaacaccatacgcaacgctactgctagcacagttcctaccagc

SEQ ID NO: 117147 - DNA, 396 bp, Zea mays
  Clone ID: MRT4577_38327C.1
catatattttattttccacgggaacacaattcttctggggggctttgaatatatgggggggggcaaagggggaaaacattctgaaaccaaaagaggaacaatggaccagaaaacaaaacgcttccaggggggcctgggggaaagcaacagcctaacaggggagggggtattgagctggctatccagaaagacatggaataaaaatggcaggggtacacggggattaccctttccaaaaacatggttgcccctagctacaaaagcagggggccgccaaaggcaccaagagcgttcgatccttgggaagggacccaaactccggggggtaccccaacaaaaaatggctcccttcctaaaacgccaaccccgatttttcttaaggtgcaaccggggggg

SEQ ID NO: 117148 - DNA, 955 bp, Zea mays
  Clone ID: MRT4577_38328C.1
agcgcagagactcggtatcggctcgagagaaatatcatgctagtgagacagtttcggtaccgagggcctcgtcactcccaagtccaccctatagagcaaccggcatgtatggaacttccagatatgttacagatcagtcagtgctactgcaaaagagtgaagcactccatcaccgaggttttaccagagccgaagatggcgaaaacatgaaccatgttggcaaaggaaacgtggacaggtggctccatatgctcatggataaccaacaagaagatcatgctgtgtaccattcttcagacgaacacgataatgacgaggagaacgcttcggatgagcagcgaacgcagagccgggttgacgaagagagctgcaggaatggggtaactgaatgttctgatgagatcgtcgaggtcgaggacgagattgtttctgaccagggagcagaaagagggaggaacagctttggaattaaagacagagaggaaaagaagatttggttccctaggtctgacagcaccaggggtttccggtcactgccatcatcaccctccatgatcatgggaatgaggaaaggtgtggaacgcatggctgtcgacgatgaccgcaaatatggctatgaggattcagtgtccagaagcagcactaagttccttagcaggtgcaagcaggcaatcaagaaagcagtaaacaaataggtcactgcaccatacgtctgaatacctctttatttttccttttctttgtgtgagttcaaaatcgattccaattgttgtagtctgtgtagctgaataagcgagtgagcttagcttgcagacttttgtgtggtatttcttatggtcaccctaacgtgatcagattagtgtgtgtacaagtattttttttatttgttactttgttagaaaagataaactattattgttcctgagccgcagaagtcagcggaccgagtcggaca

SEQ ID NO: 117149 - DNA, 689 bp, Zea mays
  Clone ID: MRT4577_38329C.1
aattcggcacgagggtggcgaccccgacggagccaagtgacggtccatcttcttgcggcggcggcgacctcgagctgattgcagcgagaaggcggggacaaatcgatctcccctagctggctacacccgatggagccgagggttccttgcgttgacggcggcggcgacggcctcgagctgagggccgcgagaaggcatcgacgggagggcgggcgaatccacgtcctcgatgcgcaaatcctggagcctcagcgacagagatcgaatccattcaggaacatctttcatctattaactcaacgagaggtcttacctcgaacgaaacaccatgctaaaaggatatggaataactctccaaaatatgatcctcatttaattgagttaaggttttcagatgcagatgctaaacttggtattttatcttgggcagaatcactgtccctgcatcgctggtctgccaagtattgccctcttttgccacctcctaggtcaactattgcagctgctttcagtccagatggaaaatcacttgcgtccacacatggtgaccatactgtgaaaataatggactggcatacagggaaatgtgggaaggttttgagtggacatcgacgcctacttgggtggggagggccatgctttacttgtgacttgtgggtggggcaggttgatcatgagggggggtgggg

SEQ ID NO: 117150 - DNA, 358 bp, Zea mays
  Clone ID: MRT4577_3832C.1
gggaaaaccacgcgtggccccacctagcaacatagaacgtggaatgcagtatcaacaatcgaccaacaatggcggacaagatattttgcatccttatgctgcttgctctttatgcatgtgttgctaacgcgaccatttttactcaatactgacaagctactatagctgctcttcttgccccataccttacatcaatgaccgcttcagtatgtgaaaacccagcacttcaaccctacaggctagaacaagcaatcgcaacaagcaacttacctttatcacccctgttattataacaatcgccagtcctatctttggcgcaggcattggtacaaaccatcaaggcacaagagctgcaaca

SEQ ID NO: 117151 - DNA, 303 bp, Zea mays
  unsure (1)..(303): unsure at all n locations
  Clone ID: MRT4577_38330C.1
aaatttatttgcaattcctggggtgggttaggcaattttcacattnccaaattgggacaaccaaaaattacaccggatgcactccccttggatctacttgttggcctttccatgctatgcaacgactgacatgtttgtggactcaaaattgatcctcccttttgaaccaagaactttattccgagacctttattaacacttttgtaggaaaaggatgctggcaaaccctttccgggaaatggggccatgcctcagggaattgcccaacggctgaaacatactggggattgagtctggaagggt

SEQ ID NO: 117152 - DNA, 350 bp, Zea mays
  unsure (1)..(350): unsure at all n locations
  Clone ID: MRT4577_38331C.1
ggtggaggtggggagttttttggaaccgtgatatcccgaacacttggcttctgaaaatcagtatctccaacagcgcaatccgaattatagtattgtaactgcgtcagatttagcccagtaatcctcgtttctacgacattccgtttcttacaacggatctacgggcgctcttcttccccgagcgctgctctccttaggcgatccagttctccccgacgagcgctcctcctcgacgaccgctcctcctcgacggcgctcctctccaaggtcgtcgtaggtccttccccgcggccatggagaaatctncaagatccattcctatcggatctggagctgctagggccgacaca

SEQ ID NO: 117153 - DNA, 373 bp, Zea mays
  unsure (1)..(373): unsure at all n locations
  Clone ID: MRT4577_38332C.1
ggcaggggcgcncgccncccgcagccgggcgcgcggcaacgaccccagcggcccccgggcgaccaccgngcaccggaccacgggggccgggcagaaccggccggcgcaagaccncaacaagggccgccgagaccaccncaaccggaccaacgccggcccggcgncaaaacggggggaggggggcacccgcgccaggnggcacaggnncaagggggccagcaaccaaanccgccgaggcgaccgncgccncacgaacacgaccncacgggngcagacangaacnagcccngagccccagggggncccganggcaancngccnggcggcccgggcaaccangccacggccccgggagagcaggagaaaaagggac

SEQ ID NO: 117154 - DNA, 761 bp, Zea mays
  Clone ID: MRT4577_38333C.1
atcctcaccgcggactctcctcatcccttccccgatctctcaccacgctcctcttctgctaccttgctttccctgctgcgattcgttccttgctctattagtattagctagccggccggccggatcgatcgagcaaggagaggcgccccagcagtcctcgtcggatcgatccatctcgtcgacagcgtcagcgcctcaggtggatcggagcggaggtggtggaccgggagctagtagctgccacacatttcggtcgtcggaaccacatatcatgatgtcgtcctcgtcctcgtcctcgtcgtcggccgcctgctgcttcccgctggaccacctcgcgccgtcccccaccgagcagctctgctacgtgcactgcaactgctgcgacaccatcctcgccgacgagttggctctccagcaggcgccgagcttcctgatggagcaggcgagtgccaacctgagcagcaccatgacgggccgcagcagcaacagcagctgcgccagcaacctgccgccgccgccgccgatgccggcagctcagcctgtgcagcaggagcccgaactgcccaagaccgccccgtcggtaaacaggcctccggagaagcggcagagagtcccgtcggcatacagccggttcatcaaggacgagatccagcgcatcaagggcggcaacccggacatcacccaccgggaggcgttcagcgcagccgcaaagaattggggccatttcccacacatccacttcgggctcatgccggaccagg

SEQ ID NO: 117155 - DNA, 897 bp, Zea mays
  unsure (1)..(897): unsure at all n locations
  Clone ID: MRT4577_38334C.1
ctcagcacgctcctcttctgctaccttgctttccctgctgcgatccgttccttgccctattagtattagctacgcggccggccggatcgacgatcgagcaaggagaggcgccccagcagtcctcgtcggatcgatccatctcgtcgacagcgtcagcgcctcaggtggatcggagcggaggtggtggaccgggagctagtagctgccacacatttcggtcttcgaaaccacatatcatgatgtcgtcctcgtcctcgtcgtcggccgcctgctgcttcccgctggaccacctcgcgccgtcccccaccgagcagctctgctacgtgcactgcaactgctgcgacaccatcctcgccgtcggcgtgccctgcagcagcctgttcaagacggtgacggtgcgctgcggccactgcgccaacctactctccgtcaacctccgcggcctcctgctcccgcccgccgcgccggcgccgcccaaccatctcaacttcgctcactccttgctgtcacccacatccccgcatggcctcttggacgagttggctctccagcaggcgccgagcttcctgatggagcaggcgagtgccaacctgagcagcaccatgacgggccgcagcagcaacagcagctgcgccagcaacctgccgccgccggcgccgatgccggcagctcagcctgtgcagcaggaagccgaactgcccaagaccgccccgtcggtaaacaggcctccggagaagcggcagagagtcccgtcggcatacaaccggttcatcaaaggacgagatccagcgcatcaagggcggcaacccggacatcacccacccgnngaggcgttcagcgcagcccgcaaagaattgggcccatttcccacacatccacttcggcctcatgccggac

SEQ ID NO: 117156 - DNA, 799 bp, Zea mays
  Clone ID: MRT4577_38335C.1
accaccacctgactctcctccatcccctcctccgatctctcagcacgctcctcttctgctaccttgctttccctgctgcgatccgttccttgccctattagtattagctagccggctggatcgacgatcgagcaaggagaggcgccccagcagtcctcgtcggatcgatccatctcgtcgacagcgtcagcgcctcaggtggatcggagcggaggtggtggaccggagctagtagctgccacacacatttcggtcgtcggaaccgcatatcatgatgtcgtcctcgtcctcgtcctcgtcgtcggccgcctgctgcttcccgctggaccacctcgcgccgtcccccaccgagcagctctgctacgtgcactgcaactgctgcgacaccatcctcgccgtcggcgtgccctgcagcagcctgttcaagacggtgacggtgcgctgcggccactgcgccaacctactctccgtcaacctccgcggcctcctgctcccgcccgccgcgccggcgccgcccaaccatctcaacttcgctcactccttgctgtcacccacatccccgcatggcctcttggacgagttggctctccagcaggcgccgagcttcctgatggagcaggcgagtgccaaccttagcagcaccatgacgggccgcagcagcaacagcagctgcgctagcaacctgccgccgccggcgccgatgccggcagctcagcctgtgcagcaggagcccgaactgccaagaccgccccgtcggtaacaggcctccggagaagcggcagagagtcccgtcggcata

SEQ ID NO: 117157 - DNA, 547 bp, Zea mays
  Clone ID: MRT4577_38336C.1
ggtctgctgtggctatcatcggctcctctagggttctgctgcctatgtctcattctcttccggactctacgagggactgtccggacagagatgagaaagaggtgattgattatttagaccggaactagatgcgatccaaggagggtctgtttggggatgggaattgcggcacacgcctgctctacatccaattgatcctcgagaagaagtcatgtctacaggtgctggtgtccctatcggtgctgaacaaaccaccaatcctctgcggaggctgtctctggagggcctggatggctccgaccctgacgagaagtcttctgtcatgccatatggacgatctccccacgttggacatgaacagagagctgctactcaggcggactggcctagaacacctgctactacaggatggcatggatcgtacttactcctaccagtccagtgcctatgcctcttcaggatattacttccgtactggggatgatggttgaggctatgactgagactcaggggatgctgggtatgaacgaatgggcatgcccctcga

SEQ ID NO: 117158 - DNA, 1594 bp, Zea mays
  Clone ID: MRT4577_38337C.1
gccggccgggccgggacaccacctgactctcctccatcccctcctccgatctctcaccacgctcctcttctgctaccttgctttccctgctgcgatccgttccttgctctattagtattagctagccggccggccggatcgatcgagcaaggaggggcgccccagcagtcctcgtcggatcgatccatctcgtcgacagcgtcagcgcctcaggtggatcggagcggaggtggtggaccggagctagtagctgccagccacacatttcggtcgtcggaaccacatatcatgatgtcgtcctcgtcctcgtcctcgtcgtcggccgcctgctgcttcccgctggaccacctcgcgccgtcccccaccgagcagctctgctacgtgcactgcaactgctgcgacaccatcctcgccgtcggcgtgccttgcagcagcctgttcaagacggtgacggtgcgttgtggccactgcgccaacctactctccgtcaacctccgcggcctcctgctcccgcccgccgcgccggcgccgcccaaccatctcaacttcgctcactccttgctgtcacccacatccccgcatggcctcttggacgagttggctctccagcaggcgccgagcttcctgatggagcaggcgagtgccaacctgagcagcaccatgacgggccgcagcagcaacagcagctgcgccagcaacctgccgccgccggcgccgatgcctgcagctcagcctgtgcagcaggaagccgaactgcccaagaccgccccgtcggtaaacaggcctccggagaagcggcagagagtcccgtcggcatacaaccggttcatcaaggacgagatccagcgcatcaaggccggcaacccggacatcacccaccgggaggcgttcagcgcagccgcaaagaattgggcccatttcccacacatccacttcggcctcatgccggaccagggcctcaagaagaccttcaagactcatcaggatggcgctgaagacatgctactcaaagacgatctctacgccgcagcggctgcagctgcagcagccaacatgggcatcactccattctaataactctggttaggcatgtgttctgaatcagctggcacgtcgtagtggctatcgccctttgtgctgcattctagggtttcgtctcagatcttgatctcaacatcgatcgtgtgtcgtttaattagggtactttccagtgtggggatagaaatggagaataatcaagttagagcgcgcatcaagtaggccactgatgatccggtaggtacagacttgattgtctcctctaaatatcccttttcatttcatgttctctctgtttttcctattttttttgttcctggaccccttcaactcgccagtagagagctcgttgtgcctctctgatcccatgtttgcgtatgtctgctcaacaacatgtttttaccatggagaacaagttgaacatctgttagatctatcaacagtgtcatatatatgttccatcgtcctttaccatgtacttctactactactatgtggtttctttcaacatatagggttatattgcgttgcgaaaaaaaaaaaaaaaaaagcggcc

SEQ ID NO: 117159 - DNA, 259 bp, Zea mays
  Clone ID: MRT4577_38338C.1
cttttgccggtgacccaaaaaattggttgacaaccggggatccgggcggggggttaaccatgtttaagtaggaaccgctgttcctgttgcttgaccttgtgaggttcgggtccgaccaattggggtaatattggccctttggggccatggttttttttggggggggtccatgccgaagggggacctgtttgcccgcttccgttggctgggggaacaacggaaccgggtttgtagcctgccggggccaaaagaagaactg

SEQ ID NO: 117160 - DNA, 447 bp, Zea mays
  unsure (1)..(447): unsure at all n locations
  Clone ID: MRT4577_38339C.1
gcgcgcgcgccgcgaatcttcttcntcctccgcgccctcccctcctgccccgggtgactcgctcgattgcgtcggaactggctcggatgtcgagtgcttcgtcgacgccggcgccgaagacgccgctcccctccttcccgcgctctccgcaggcgcgtcaaaggacgatgggaagagcgagggcgacgcggcggtttcggcttcccctacggggagggagctcttggagtgggcatctctggtgtcgcccttcttcttctggggcacggctatggtggccatgaagggggtcataccccgcacgggtcccttcttcgtcgccgcgatacgcctgctccccgcgggcgcactgctagttgccttcgccgccgcgcgcggcaggaagcagccctccggctgggaggcctggctcgccatcgctgcgttcggactcatcgacgcggcctg

SEQ ID NO: 117161 - DNA, 850 bp, Zea mays
  Clone ID: MRT4577_3833C.1
ctgaaggacttccaatgtcaaaaaaacgttgtttagggggatttatacatttttgttctctgcttgcagaaatctgtccgcgatgaactgggggcattttgaactccgtcagggaattgagccgaacaagggtgaccacaaaacccaatattggggctcccttcaccctcctggtgaaacaacaccggcgggcccatcttttccaccttcaccaaacaaaagacttcagcacaaaaatccacatcccgggtccacgatcacattgggccgccctttttttttttttttgttcaaaacagtaaaaattgccaagaaatagctgccccaacagtacaaatcacgcaggaaggttgatttctgcgccaagaaatcaaaacgggttgtcacatcgatcccaaaagcattacaacaacagagaggcacaaactccagcgtctcctaactcaaagtctcctactactactactgaaacttgaaagaaactgcgtcgcgtggactcttgtcatttccagacaacgaccgctggacgacggtcagtgccgccgcgacgacgacgacgaccacgaggagctcccactcccaggctgctcggcgtacggcctcacgaaggtcctcctccaccacacctcgaacgcccgctgcaggttggggcacccgtcgcctccggccctgaggaacctgcccagccacgccagcagcacggcctgctgctcctccagcggcagcgtcagcacggcctgcccgatgccgtcctccaccgcggcgcggtcgaaccagcggcacccgtgctgcagccacctgtagtcgtccatcagcggcggcagccacacgtccagcagccgccgccgcg

SEQ ID NO: 117162 - DNA, 389 bp, Zea mays
  Clone ID: MRT4577_38340C.1
gggagaacatcaacaagtacttccgcaaggccaaggagagcggcaagaagcggccggcgcacgccaagacgtgcccctacttcgacgagctggaccggctctactcccggtcggccgacggcgggggaggcgaggccaggcagctggggagctcagagctgctggacgcggtgatcaagtaccccgacgtgcgctacgggccgccggtgttcggtggcggcaatgctaataatgaaggtggagaggacgacgacagcgacggggaggaggaggaggaggaggaggaggacggcattggcaaggggagggccggggatgatcaggacgacgaggtggacaacgatgatgagtagctagctaacagtacccccacccctcgctcgcatgca

SEQ ID NO: 117163 - DNA, 366 bp, Zea mays
  Clone ID: MRT4577_38341C.1
atgtcgctccgccacgccgtgctgatgcagtcgcggatgcttctccgcagccgtcgacccttctccaccatcagcgccacggacgaggccaacatcctcaaagaacttgatgaattgaagacgaagacgaagaaggcaattattgaagatgtggagaaggtaaaaaggctggagaatgaagatagaaatgcgctcaaccggctgttgacttcctgcgggatgcccaggggtgcatttcgagataagctagtgtttggatgtcatgtagttgagttatttgctgcattcagtgcagttgggatatggaaagctggaagagatgctccacataaggatgcaaagtttgctactgatgcttctatttag

SEQ ID NO: 117164 - DNA, 296 bp, Zea mays
  Clone ID: MRT4577_38342C.1
tgcccgctctgcaacgccgccatcgtcgacgtgctcgacatcttctgaccggggggggagcccgtgccgtagagatagatagatctcccgaatctctcgggcccctttcctctttcgcgtgctcccgctgtgaaaaaagatcacaacatgttcggctttggaaaaaatcaacatttcatttccatggtgcaaaaaaaaaaaaaaaaaaaaaaaaaaaaaaaaaaaaaaaaaaaaaaaaaaaaaggaaaaaaaaaaaaaaaaaaaaaaaaaaaaaaaaaaaaaaaaaaaaagggggc

SEQ ID NO: 117165 - DNA, 2034 bp, Zea mays
  Clone ID: MRT4577_38343C.1
acgcgggtgatcaatcttcaaaggctgaatcggaggcggcgccgaccaatccgtttgctacttgatatgagttgacctgagagagagagaacctgctataactctagcctgcattcaatcgattcacgcattcgatgagtcctatcttcgactgagtcaactgttttttttgtgtgtgcatcttttagcctgttggatttaacggttaacctgatcgtcactaagcagcacgggtgttcggcagtcgcaccctgtgctgcggaaggtgattggtggtgtgtttagggaccagttctaaagtgtgagattgcttaattgctgtgctcattctagccttgatcaggttggttttagcttgtagctgttgctgctgcttgtctttcggctatccatgtgtaattactcaagcccctcatctagcgtttggattttttttcactgcctgattaatctctcgtttgatttgcctagaaagaagcagaaaacaggaaaccttccgagatgaccaggcggcgctgctgttgcgcccttgaccacaataggccaccccaacgctcctatcactcagtggacgtccggtaagaagctggtcttctttgggtcagcggctgccgtggcacctttcgatctggaggacctgctgcgcgcgtcggctgaggtgctcgggaaaggagcgttcgggacgacatacaaggcagtgctcgagtctggggcaactgtggccgtgaagcgcctcaaggacgtgactctatctgcagctgagttccgtgaacgcatttccgagattggtgagcttcagcacgagttcattgtgccactccgtgcttactactacagcaaagatgagaagctacttgtttacgacttcatgcccatggggagcctgtctgcagtcctgcacggcaacgtaagttctggggggacaccacttaactgggatttaaggtcaagcattgctctagctgcagcccgtggtgttgagtacatccactcaacgacctcaacggcttcccatggtaacatcaagtcatccaatgtcctcctgggaaaatcatatcaagcacgtgtatcagagaatggccttaccactcttgttggtccatcatcttcatcgtctcgcaccaccggataccgcgcacctgaggttattgattcccggagggtttcccagaaggcagacgtgtacagctttggtgttctgttgcttgagctggtcacagggaaggcccccagccaggctgctctcaacgacgagggtgtcgacctgcccagatgggtgcagtcagttaaccgctcggagtggggttcactagtgtttgatatggagctcatgagacatcagactggtgaggagcccatggctcagctcgtgctgcttgctatggactgcacagcacaagtcccagaagcccggccgtcaatggcgcatgttgtcatgcggatagaggagatcaagaagtcaagcgtgaccccgaacattgaacaagttgatgatcaatcttcaaaggctgaatcggaggcggcgccgaccaatccgtttgctacttgatatgagttgacctgagagagagaatctgctataactctagcctgcattcaatcgattcacgcattcgatgaatcctatcttcgactgagtcgactgtttttttctgtgcatcttttagcctgttggatttaacggttaacctgatcgtcactaagcagcacgggtgttcggcagtcgcaccctgtgctgcggaaggtgattggtggtgtgtttagggaccagttttaaagtgtgagattgctcaattgctgtgctcattctagccttgatcaggttggttttagcttgtagctgctgctgctgcttgtcttccggctatccatgtgtaattactcaagcctcatctagcgtttggatttttttttcactttttgccggattaatctctcgtttggtttgccttagttgcttggcaatgtgatttcagtgggaccaaatatgtttttgggaaaagttttggtggtgtactgttaaccacttgtgct

SEQ ID NO: 117166 - DNA, 201 bp, Zea mays
  Clone ID: MRT4577_38344C.1
catttctattctgaataaactggacctcatatagaactgaatgagagggatgttatcataaggacaacatttcatgaaacacgggtgcgcgccgaccccgcacaaccagtgcagtacaaggacccggctagtgttatggcactatatcgagtgagtcatcccatggacatggtttactatactctgatctgttcttcctct

SEQ ID NO: 117167 - DNA, 328 bp, Zea mays
  Clone ID: MRT4577_38345C.1
gtgcttctcaaccgctaaatgacaaaaggagggggcctacaatttcggtggggcggctatcggcatcgatctcggcaccacctactcttgcgtcggcgtctggcatcacgaccgcgtcgagatcattgtcaacgaccagcgtaaccgcaccacgccctcgtacgtcaccttcaccaactccgagcgcctcatccgctatgcctgcaagaaccaggtcgccatgaacaccatcaacaccagctttgatgccaagcgtctcatcggccggacgttcattgctgcgtctgtgcacaacgatatcaagcagtagccctttaaggtcatttct

SEQ ID NO: 117168 - DNA, 1187 bp, Zea mays
  Clone ID: MRT4577_38346C.1
atcctgtgacggctatgcgggtagcactagggaaatccagccgcatctactcgccttcgctcaggcttttcccgctggccacaactctgggaccatccacatctacatctgggacaagggtttacctaaaggaaagggcctacttttgcttgctgaaatgagctcagctggcaaccttgcttagactacactactgcggttgtaaagattatcgagcaacatcctgctttgtaataggatgtatatcagtaaatcctgcatcttggtctccagcaccgtcgagccctgcattcatccatgccactcttggagtttagatggctgctggaggatatgcccttgggaaacaatataatactcccatttttgtgagtgtgtttttgccattcggttcttgttggatggctcacttgcttcttgttgactggggattaggtgtgttgggttgtggtcactagccggcgtcagctaggaacaacaacctgtagtaggtgtcaattgaggcgacattgtgtcaggaagcagaagacatgcacgcaattggtgaatgacaactttgcatctgtgatttggcccaagaaagtatgttctcctttgcgtccaaaatatatggatgggcaggagaggcgagggtcgcctcaccgtagatggaacccacgaggcgcgcaaggagtggcgccggcgcgccttctctggctccttgctccgctccaatggcatcaatgtccatgtgccacatcatggagcggatgcagcacaattggctagtaccaagaagcagaagaagaaaacacctgggagcagtaatgccaaccatggtcatccaagacataagcgtcggcacgcagacaagtaaaacattgatcaaccatggtcattatttttttataactgatacaaccattattttccctatactatagatccatttcccctttaggttgggaataatacaaaatattggtggtgtaagatagggttggctttccaatggccttttgagttttcgactggggattttgattttgcatgggccaaataatggaagttggacaatgtaacctttaactgatttggtggcctggattaggttcaataacttataatggccaaacctaatggggaatttacagttttcccccttgaataatggggtttttgcccccaattttttgaatggaccttta

SEQ ID NO: 117169 - DNA, 335 bp, Zea mays
  Clone ID: MRT4577_38347C.1
gacacggccgtgcggacccacgattcctttcgtttttctcttcctatattccctcaagctacgtactgcactatacctatatctgggcccagctactacaacgagcacctattctacaactctctgttctaccatactaaatactacctcaatgctgctctcttgcattcttgcttgcaccacacactccgcttttttaatgcctacatcgactgctcctatgacttcaaggcacgcgcggtcctcagtttcgacgtgttcactttactatcaaccttcattatgaagatctccctcaatgccacttttagcggacactttctaggggtaccaca

SEQ ID NO: 117170 - DNA, 2039 bp, Zea mays
  Clone ID: MRT4577_38348C.1
atggaattgtatctcaaccaacaaactatcgtggagccatacactgttccaattcaaatggcgccattcccaaaacatatattcttgaaccttgctgatattgtcgggttgccaaacaagactttagtcgttttatctcacgactggttgcccctagactatatttgcacgcaaggtgatcttgccctcatcgattttattaaggaaatcccttgtgaaccaagggtagaagtcgtgcttattgatgatgcctttgttgaaaggaagtggatggagtgtttatttcagccgaacacatatttaggtgacgaggttatagattgttacataaatttgataaaagctcaaaagcatctaaagtgccgatctggaggtcacgttcacatagaaaatgctttccagttcaatttcctgaagcgaaatggtgatgtcgaaattaaaacagaggagctatatccagttaaagacatggcacaaatatgtagcgctgaacgaagggtgttactttacctagaccatgacatgtatcatgcagacttcgatatatgccacgatttgtatggtctcatcattggagagcacgttccacatatgctggaagaaatttcctcgtacatcgttagtcatcagacacgcaccaccatacgctcttgcttaaacaaaaagaacaacccgagagtcatcgatgttggcgacaaccatgaggcctccctgcttaacgatggacagcgcggtgcagctgctctggaccgcgtccaagtggtggcttcgcgggagcttgtcgtacacagcggcgcatgcgaccacgtaggactgcttctagaggtcgaactgacagccgccaagcttcttctcgtcatcgatgagcgacaccaacatgagtgcctcctgctcatggtgtttattccgataaacatccgagagacgcactggtatcttaccgtgatccatgcaagaaatatggagatacaagtgctcgattcacttggtacttcacacgaccgtaaagacctcactgactctattaaaggactgcaaagacaaattgatataatatctcaacgtaaggagttaaaagaccacaggtggccagacctccaagttgcttcttggccgctcagagaaatagacatgggatatgcaaagcagacagatagctcttcatgtggcctctttcttttgaactatatcgaatactggacaggggatgaactgtctgacagttttacccaggatgacatgtcacactttacgaaaaaaatggctgctatattactatcttcagacctgaataagagaagggggtgtctgttatacaaaaatgaaaagaaagttgactctggaagcccatcagatgttgagatattagaaaacccaatagattctaagaagaggaaactactccacgtgcttgatgataacgaagtagtgtatgaagatgaggaaggccctattactcaagcagacttgcaaaggtggtttgttgatgattgggataaaagagctcctgtaaaagtctctaacgatgggtgcaccaatgactttttaatggttggtctttccacaaaggatatgccagtgaccaaagccgattcaatatatgttttatgtgattatatcatggcaatagaagacgatacgacactagaatatgttcttatgccatggaaattcaacggatgtcacgcccttttcgtaatagatcatgttaaaaagcatgtttattctataggtttaataccagctactcgttctacaagctatggccatgtggggaatgacagacgaatgaaatttgttggggatgcaaagattgttcgaagaaactttgtgattgatctgttaagttatgaggacaattcgtgccgatatgccatccctgcaaacatacaacagagacttatcgatatcgctaaaaagaattagtgattagtgaacagttgtcgacacatttgtctgtaactaatttgtgtgatattgataatattttccaatatatcagtgcaaactatgatattgaatgaaatagtttttatatg

SEQ ID NO: 117171 - DNA, 934 bp, Zea mays
  Clone ID: MRT4577_38349C.1
cattgggtacctcgaggccggccggggttgttggcttcgtggtccgtgtttaacgggcgtagagagagaaagagaacagagcgagagagggggaggacgaagccctccgcgtcgtctcctgctgttccatcccacatctattctgcctcggcttgcaccttcgacctcgctgaaagttctgacctcaaactgaaaggggcctgtgaagcgtttccttgcggcagtgcaatggaggtatttggcaaatctgtgattgctgagcccagcaatgtgattttcttgtccgcaatccttaacacagaaggatcaaaccctagtcacaagtgtgacaagaggtgccagaacgagaacatttttgggaacatgtaccgttgcaaactgactggaaccactcacatctgtgacaaaaactgtaaccagagaatcctctatgacaaccataactcgctctgccgagtgagtgggcagttttttccgctctctccattggagcagcaagcagtgaggggtatccgcaggaagcacgaagtggacagcaatgaaggctgctcctttaagcgcaggcgtggtgcacagctgcatccttcccccttcgagaggtcctactcagctgtgtctccaatcccgagccaggttggagatggcatggacctgagctagagctaacgagacttccttttcttcagccaaccacctaattccgttgtctaccctttttccctttggttacaggatggaactataagagattccttctttgtagacttttatgaagggatataagactccttagatgcaccgaataaatgtctatgtagtttctattctgtttcatgggaccttgttggaactcgtgaactttattgagcccctttcggatttaaaaaaaaaaaaaaaaaaaaaaaaaaaaaaaaaaaaaactcgaaaaggggcg

SEQ ID NO: 117172 - DNA, 297 bp, Zea mays
  Clone ID: MRT4577_3834C.1
cttaacggtcaaaatataggtattgtgaaatattttgctaatcttatagaagatgaaaaaatctcgttatttaaaaggatgactatatttaacagttgcctattttcttaatgtcagggtagatcttattttacagaacagtgggggaaatagaaacatgtgaaacgcataatgcaggctcctaaattaatgtcagtgaagttcagggtggacaaatgagtgtgtatgaggtatatagcatgctgatgacttctttaatgcttgaagtccgttcacaggtatctagccctagaatgc

SEQ ID NO: 117173 - DNA, 4134 bp, Zea mays
  Clone ID: MRT4577_38350C.1
tcagtttttcaaccgcatccttacatcaggaatctgctgcaccctctcagcgccttcttccaggcaccatctctctagcgcgtcgcacccactcacagccagtcgtgatacgttcctcggcagtatgtccactgcgcctattctcagattcggagcgccgacggtttccagacaacgaagggattctaggccgcacaggcctccgggaagaaccgcaagatcagcacactggcgtatcctcagattcctgagagaccgcatcgtccgcacggagaactgagtgagcctggggcaagagactatctccagagattccagggacgggaggttctcgaagcagggaggaaaccgtcttccggggtaattctcgacgcgcagacgcttgaggccggtgtgcggacagagtgcctcgattaccgcctcgctgttctctatgccctgctgctgctgctgctgttgttcgtccttgcaggcgtcctcgctccacttcagcatcagttcgcgcaggtactccttcccgcgcagattggcctccgtggcaccgtcgctggtggcagcttccagattaagaatgcaaagctctccgcggatcttcaagttcctcagctcgttgatgttgcacctgcccccatccctggagaccacaacgaacctggaaagagtttgaagtgactgtagccggtctatgccactcggcatcgatctaagagcagtgactctatcccaatcgatatgcaagctaaggtgacgcaggttaactaagcggctcatgcctgcaggcagatccgtgagccagtagcagtccctgaggtcaagtgtctgcaaattgaataggccgcagaccgtttctggaagagtctttatcagagtattccgaaggttgaggtatctgaggtgtatgcaggacccaacggaatctggcaggaggtctagctcagtgtaactcaggtctagtgcacgcagacaagttaacttcgagaaaagtgttgttggtacctggttcaaaggtagtttcattgcggggcataatttcaagagcctcgaattttcatagcgatagatcttgtcgaatgcaagaggctcatctttcgggcacagtatagttgtataacgtatccactcgggatggtcgactaccggtgaatcctcaggtctgagagtcagagattcgtgtttagaaacaagttgtgctagctcaagcatcaaacttggcactctaaacttttgatcagggaagctgcgggatgtttcaaagaatgatctccataggagctcatcaaagcatcgtcctgcttccatctcaaccctttcccttccgttactcttaacaagaccatcagctatccagagtctgacgagctcatccttctcaaactcaacaccaggaggaagtattgaacagaaggcaaaacattgtttgagatgatatggcaagtgctggtaacttatctgcaaacttggtaatatgctgtttgtgttttcgccatctccgagaatctgcatttcacctagtatgttttcccactgttctttgtctccatgagtgtcggacagtagtaacccaagagatttagcagctaacggggagccctggcagtttgaggcaatgctccgcccaatgggttccagatcatgctgatctctgctgccccaccccgagaacgcatagagtttgaggatttgccagcattcttcatcttccaagccctttaaatggatgtttagattggtggaaatcatcctagacaccttttcatgctgagtagtgatcagaaccttgcttccttccgctccaccagtcaatgagggcctcagaaactcccagaactgaaagctctctgcccaaaggttatcaatcaccagcaagaactgctttttatgtaggtggtcgtgcagccgttgctgcaatatgtccaagcttagaagctcacatttttgattggtcgccgcttcgatgatcattttggtggcctttctgatatcacacctatctgataaccaaacccagatcttgtcggtgaagaagttttgtacctcaggatctttgtaaaccgattgtgccagtgctgtcttcccgatgcctgtcgttccccatatggaaatcaccgccatatctgcgctatccgaaaccagagcacggacaatctgctccttctcttcgttgcggccaatgggcctctcgtcgcgatgcgcggcagattcaaggaaccgtgggcgctgcgtcggctgagacgctgccctcgtcccgtccccggcctgcaacctataccatttcctgcccgtgttgatctcgtcgaggcgttcgttgatcttcgcgatcttctcatccagctcccaccgctgccgcgggccgagctcgacgctgggccatagccgcttccgcttccgtgattgctcggcggccgctagcctggacacggccgtgatggttcccaggcggtcgagcagggcgtcgacgtcgaaggcgacggccctaagctcccggagccagagcctgacagagtcgtggtcgatgaagcggcgttgctcggcgtcctcgagcacggcgcggatgcgttccttggtgcgccgcagcttgtcggcctcctcctcgacgttccacaggcggacgccccggtagcagagagcgtcgattaccgcgccgccaatcttatccgggagaccgagcgccgtgaagacgctcttcagcgggcggtcccccagcatgctgctcaaccaatccatggacgacgacgaggtgccgtgaaccaagaaggggggagttgacttgttctgggaacggggcgaaacgaaagcagagatcttgagctgtgaagagagccgtcgaacggaaagctcgtagagtggccgcgagttctttgctcgcgactggatggcatctcccaggaaggctcctggcaaagtagcagccagccgctctcggactcgggcaaatggacgaacgccttccgggcagagtggtcgcgtggggtcaggtcgggcgacaacgttacagaagtccagatctagtgtcgtatcgtcttctattgccatgatataatcacataaaacatctattgaatcggctttgatcactgacatgtcctttgtggaaagaccaaccattaaaaagtcattggtgcacccatcggtagagacttttacatgagcttttttatcccaatcatcaacaaaccacctttgcaagtctgcttgaataatagggcctttctcatcttcatacactacttcgctatcatcaagcacgtggagtagtttcctcttattagaatatgttggattttctaatatctcaacatctgatgggcttccagagtcaacttctttttcatttttgtataacagacacccccttctcttattcaggtctgaagatagtaatatagcagccatttttttcctaaagtatgacatgccatcctgggtaaaactgtcagacagttcatcccctgtccagtattcgatatagttcaaaagaaagaggccacatgaagagctatctgtctgctttgcatatcccatgtctatttctctgagcagccaagaagcaacttggaggtctggccacctgtggtcttttaactccttacgttgagatatcatatcaatttgtctttgcaatcctttaataaagtcagtgaggtctttgcggtcttgtgaagtaccaattgaatcgagcacttgtatctccatatttcttgcatggatcacgacaagataccagtgcatctctcggatgtttatcggaataaacacctcgtcacctaaatatgcattcggctgaaataaacactccatccacttcctttcaacaaaggcatcatcaataagcatgacttctacccttggttcacaagggatttccttaataaaatcgatgagggcaagatcaccttgcgtgcaaatatagtctaggagcaaccagtcatgagataaaacttctcgaactattgcggttgccaccgatttttttggcttgttatgagacaagcctacaaatagagattccattctcgcgggacaaaaaccttcggacacgaacccttcggacaagtcaaaattgctgtatgacgaaacacaaagagaacgaaggatggaacagagccgaagctgtgcgcaaggaagcttcggcat

SEQ ID NO: 117174 - DNA, 537 bp, Zea mays
  Clone ID: MRT4577_38351C.1
aaccataaccatgagttaagattaacactttgaatgatcgcgctgctatcttgacctgtcgggttggcccgtaagcaagcgaggaagaggagggagaggtgcaccgtgcgcggttgggagcatgcttagaagactcacgaaaaagacagaaaatgagtggtagacgtattattcatttgttccaggtacaaagatacagtgaacaaagacctgtctataaatgtttccgatgggaataagagacaggtgtaccgtcacgggttaaataccagctaaaaggcactactgtggatactaaaagcggatataccaaagctgctgcatctggtgccttggcgtgcttctcacagttgcacttgattctgcttcgtgaattactggatcagctcccggtgtttatacaataaaattaaggtgatggtgacattgaaaaggacatattgatctccgtggtacagtgagattcttgtcttgagcccttttactgtcagaactaccttgtgaccaggctgagtaccgggcttgatctttataaca

SEQ ID NO: 117175 - DNA, 551 bp, Zea mays
  Clone ID: MRT4577_38352C.1
atggaaattcaatggatgtcacgcccttttcgtaatagatcatgttaaaaagcatgtgacttttatcgattttacaccgactcaagattggtgtaaacacatgccatacaagaggttcgcggaagcgattatcatggcctcaaaaaaatataagattgcttacagcaagaaacgttctggatggacggaggatatctttaagtgggaacatacaattcagactggtgttccaattgacttaagagggtttaataccagctacctcgttctacaagctatggccatgtgggggaatgacagacgactgaaatttgttggggatgcaaaaactcttcgaagaaactttgtgattgatcttttaagttatgaggacaattcgtgccgatatgccatccctgcaaacatacaacaaagacttgtcgatatcgctagaaaggattagctgattagtgaacagttgtcgacacatttgtctgtaactaatttgtgtgatattgataatgttttccaatatatcagtgcaaactatgatattgaatgaaatagttttt

SEQ ID NO: 117176 - DNA, 223 bp, Zea mays
  Clone ID: MRT4577_38353C.1
gcacgaggggactgggtggcactggcaccggcggcggcctcgtggtcgtggggcggcacacgcgcacagctgccagacgtgggtctgtggggccagcagccgacgcccgctcacgttcgcggaccggtccacgctctgccccgtttctagaggcagttggcagctgcatggcgtccttgtgcttggcgcgtgacgctcttttgcccggacaccgagacggctc

SEQ ID NO: 117177 - DNA, 602 bp, Zea mays
  Clone ID: MRT4577_38354C.1
gggggccgcatctcccctatcctcctctatcagcagcactcgctcagacatagagacgacagggaggaaaggatcggacgcccgcgcgcggcagcatcagcaacaacgaatgaactttgcctgcagtgcagtgcagtgcagggtgcagacgagacgacatgcgcaggcccatcgttttgcaggcacacggagagacatgctgccactacgaggcggcaagggccgtacgaaccgtcgacatgcctggcaccgaattgatgaaatgagtgatcatccaacaccaggcagccacagctagcttagctgtacgtacacatgcgtgaacggatctgccaaaccgaatatatagtaacgaacagcccagtcccaccagcttccaatcagtccacacacaatgatcacgcagccctggtttaacacatgcactactggcctgtttagttgtctggataggtggtcctggctagtatctagagaacctgactcttggtagcctggttgagagcatgcaatatctctacgtttggttgcctgtatgagcttagcctggctcatgcgagataatttttggttgcttgcataaatgcttgatgcatgagctt

SEQ ID NO: 117178 - DNA, 101 bp, Zea mays
  Clone ID: MRT4577_38355C.1
ctttcgtctcgatccagcatacgacatagctccacaggtcaggtccccatcgccgcggggcttgcgccacctcttccccgcccggcaggagcctccccgcc

SEQ ID NO: 117179 - DNA, 188 bp, Zea mays
  Clone ID: MRT4577_38356C.1
tccttcttcaatgatcatgtcttggtcgatgcactacaaaagtagattcttcgtctatgagtgtctggtggtctcctgctgctcagtatggtgccataggtcgacttcttctgccagggcggtacggcctacagcctctacttcaggctctacctcggctcgtgctccacgcacgtcggatgccgggg

SEQ ID NO: 117180 - DNA, 325 bp, Zea mays
  Clone ID: MRT4577_38357C.1
gaccgccttaaccaccaaaaaggacttcgtgttcggaaaaagagggaggcccatggggccacggtccaaagaaccctgaaggggctccaccccccgaaggcttcttccaacaccctgttaaacgccaggagcagttcccgctggctgccctaaatcgcctagctggccaagaaacatgcttatatcgcagaggcttagggagcccaacaccctcaaggttcacttgaagtcgggggttaagcctaagggcctgtacatcgtccccatccagcatacctacccggtttgggagcccttttttttgaatgtggatgactacaccttt

SEQ ID NO: 117181 - DNA, 572 bp, Zea mays
  unsure (1)..(572): unsure at all n locations
  Clone ID: MRT4577_38358C.1
cctcgaggccggccggggggcaaaatccctaatcgcatctgcttccagagccccccgccgccgctgcgccctcctctcggtcctgccgtccgtcgaggtaaaaggacagcatggtgagggtcagcgtgctcaatgatgctctcaagtccatgtacaatgctgaaaagatcgtggtggagctgaatggaagactgaataaatgtggtgttattagcccacgttttgatgtaggtgttaaggagatcgagggatggacggcgaggcttcttccatctcgccagtttggctacatcgtcctaacaacttctgctggaattatggaccatgaggaggcccgccgtaagaatgttggtggcaaggttctaggtttcttttattgaaaatgtgtttttttgagccacagatgcgtccaagaactcgtctgatgttttgaggtttgttaagactgggtgtccgagcctttgtggtttgttaagacagcgatgtgtcatgtatttcagaaattgngatttttatgagatgtacctgcgagagccctgtctgtttcgaaaaaaaaaaaaaaaaaagcggcc

SEQ ID NO: 117182 - DNA, 960 bp, Zea mays
  unsure (1)..(960): unsure at all n locations
  Clone ID: MRT4577_38359C.1
gccggccgggccggggacacgactctcggcaacggatatctcggctctcgcatcgatgaagaacgtagcaaaatgcgatacctggtgtgaattgcagaatcccgcgaaccatcgagtttttgaacgcaagttgcgcccgaagccttctggcggagggcacgtctgcctgggcgtcacgcgaaaaaaccctaatcgcatctgcttccagagccccccgccgccgctgcgccctcctctcggtcctgccgtccgtcgaggtaaaaggacagcatggtgagggtcagcgtgctcaatgatgctctcaagtccatgtacaatgctgaaaagatagggaaacgtcaggtcatgatcaggccgtcatccaaggtgatcatcaagttcctgacggtcatgcagcgccatggctacattggcgagttcgagtacgtggatgaccacagagctgggaagatcgtggtggagctgaatggaagactgaataaatgtggtgttattagcccacgttttgatgtaggtgttaaggagatcgagggatggacggcgaggcttcttccatctcgccagtttggctacatcgtcctatcaacttctgctggaattatggaccatgaggaggcccgccgtaagaatgttggtggcaaggttctaggtttcttttattgaaaaggtgttttttttgagcgacacatgcttccaagaacttgtctgatcttttgaggtttgttaagactgggtgtctgagcctttgtggtttgttaagagtgggatgtgtcatgtatttcagaaattggaatttttatgagatgtacctgcgagatccctgtctgtttcgattttcaaaaaaaaaaaatgatttatgcgaaaaaaaaaaaaataacagctagctcatcgactccagattggagaactcgacaccatgaaagtgcntgatcgttgcccttgctctcctggcgctcgctg

SEQ ID NO: 117183 - DNA, 386 bp, Zea mays
  Clone ID: MRT4577_3835C.1
gtgttataccatatgaatatatatcatacaagactagaattttgatactcataggagtatggaactgagcagggtcagctgtgggaacaacggaggtggtggagcaaaaccttgtgcggcgccatggctctgcatgtaatggaacatctctgccatcctctgctgatttgccaagcgatccaaccgctccgcctcccgctccgccatcatcctcgcctccatctcctgctgttccctcatctcttcttctagctgggcatgtaacatttcatcccaatgctataataactcagagaaggtatataactcaaggaatgacaagttcagggccggtcgtgacatttgggggccctaagcgaaaatctatatggaggccctatacgaac

SEQ ID NO: 117184 - DNA, 162 bp, Zea mays
  Clone ID: MRT4577_38360C.1
aaggcctaatgaagatcctcacggaaaggggttattccttcaccacgacggcagaacgggagacataaaggagaagctggcctttgtcgccctagactacgagcaggagctggagaccgctactcacgatcggcgcggagaggttcagatgcccagattccc

SEQ ID NO: 117185 - DNA, 974 bp, Zea mays
  unsure (1)..(974): unsure at all n locations
  Clone ID: MRT4577_38361C.1
acggaatctcggctctcgcattgctgaagaacgtagcaaaatgcgatacctggtgtgaattgcagaatcccgcgaaccatcgagtttttgaacgcaagttgcgcccgaagccttctggcggagggcacgtctgcctgggcgtcacgcaaaaaaaccctaatcgcatctgcttccagagccccccgccgccgctgcgccctcctctcggtcctgccgtccgtcgaggtaaaaggacagcatggtgagggtcagcgtgctcaatgatgctctcaagtccatgtacaatgctgaaaagatagggaaacgtcaggtcatgatcaggccgtcatccaaggtgatcatcaagttcctgacggtcatgcagcgccatggttacattggcgagttcgagtacgtggatgaccacagagctgggaagatcgtggtggagctgaatggaagactgaataaatgtggtgttattagcccacgttttgatgtaggtgttaaggagatcgagggatggacggcgaggcttcttccatctcgccagtttggctacatcgtcctaacaacttctgctggaattatggaccatgaggaggcccgccgtaagaatgttggtggcaaggttctaggtttcttttattgaaaatgtgtttttttgagccacagatgcgtccaagaactcgtctgatgttttgaggtttgttaagactgggtgtccgagcctttgtggtttgttaagacagcgatgtgtcatgtatttcagaaattgggatttttatgagatgtacctgcgagagccctgtctgtttcgattttcagatattggttttgatttatgcgatacaaacaggtcctttagtccatataaaaaaaaaatgctgaccagacatttttgttataattaaaaaaaaaagtcaactnncaaaaaccccaaaaaaaacccccccaaaaaagggttgttcgngaggaggaattatttaaggaat

SEQ ID NO: 117186 - DNA, 152 bp, Zea mays
  unsure (1)..(152): unsure at all n locations
  Clone ID: MRT4577_38362C.1
cggctctcggctcgagatcacagctgcatttcggaattgtaattggcgtctcttctttatcgcgtgggganatagtagangcgggctattacttcggcggctactttaagtctccgtgagtgcggtgctgaaggcctgagtttaggcctaga

SEQ ID NO: 117187 - DNA, 968 bp, Zea mays
  unsure (1)..(968): unsure at all n locations
  Clone ID: MRT4577_38363C.1
tttngcatgcagactgctagtgtaatgtaatttcaccaaaacaatacagatgagtgagacatgtgtcctggcaatgccgttaaaaaaccaagcagagcagggttgatgctagacatgatcaaacccgagacctaaacaaacaagtacctaaaaaccaagacagtgcaccactttaatcctttgatctgtgaagtacagagcaagcaagaacaggttgatcgagggagacaagacgagcagagccatcgcattatgaaatcagtatcgagtcccagtcgatctccagggaggggtacttgcgaaggtggaagctgtctgactcgtcccatggcgcttccgagaagtcgagcagctgcatctccggcaccacgtcggaagacccagtggaggacacgtcgccgtctgcagagaacgagctctctgagacggagcagcccggctcactcttgacgtgtgggctcaccgaggagaaggggctcggggtggctgtagtcgccgccgccggggcgtggctctggctctggccctgcggcagcggcgcgccgacgtccgcgccgctgcagatggcgtggagcttggcgtcgaccgcggcgtggagcggcgggccgaggtgctgcccgccgcgcctgagctcggggaagttgagcttggcggagtccccgcggaggcggaacgcggcgccgtcgtaggcgagcgcgatctcctcggcggtgtcgaaggtgccgagccagaggcgggtgcggttgcgcggcaggcggatctccgccacccacttgccccaatgccgctgccggacgccgcggtacagcttggacacccccgcccgcgcgggaaccggagcctgctgcggcacgccctgccgcttcatcggctgcgcggcgccgcccgctgccgccggccggcgcaggaaccggagccgcgactgcaccggaaaagctgcgccggggnccggacgctgggtcgaccgg

SEQ ID NO: 117188 - DNA, 387 bp, Zea mays
  Clone ID: MRT4577_38364C.1
tccggctggctgcttctagctctcactaggcggggctgctgcaaaaaggaaacagcaacagcaggcatgggagggtaaggagaggacgtccgcctgcgcgccaacaagttctcggagcgccagcccatcggcacggtggcgcagggcacggacgacaaggactacaaggagcccccgccggggcgggtgttccagcccggggagctcaagtcctggtccttctaccgtgccggcatcggcgagttctgcgccaccttactgttgctctacatctccatcctcaccggcatgggcgtttccaaatccacctgcaagtgcgccaccgaagggattcacggcatggggtgggcctttggcggcctgttcttttcccctcccctactgcac

SEQ ID NO: 117189 - DNA, 1752 bp, Zea mays
  Clone ID: MRT4577_38365C.1
caatccattgacatgtacagcagtgtgcactctcccaacctgagcttcttgggcacgccatcactgagccggttgtccaactcgttcctcacaaactcattccgggggaagccacctgagatcatctccagcttaatcaagccattactgccgacaagcattgcttccgccagcgatgaccagcagcagcagcagcatgaggacgtccggaagagctcccattacctgccaccatcacgcaaggcgtcgtcgctgcagaggatccccgaggaccagagacctatggttgggggccatgaggtgggtccctaccggcagtgctcctatacccaaggggtcatgaacggagtgaatgtcttatgtggtgtggggatcctgtcaacaccttatgctgtcaagcagggtggctggcttggactggtgatactagcggtattgggtgcactggcttggtacactggcatacttctgcgccgttgcctggacagcaaggatgggctcgagacttaccctgacatcggacatgctgcctttggtactgctggccgtatcatcatctcgataatactgtatatggaactatatgcatgttgcattgagtatttgatcttagagagcgataacttatcaaagttgttcccaaatgcacacctaaccatgggtaacttgactctggattcacatatgctatttgccatcttgactgctcttgtcgtcatgcctaccacttggcttcgtgatctcagctgcctcagcttcatttcagctggtggagtcattgcatctatcgtcattgtctcctgcttgttctgggtgggacttgttgatcacgttggcacagtcgagagtgaagggacggcactgaaccttcctggaatccccattgccatcgggttgtatgggtattgctactcaggccatggagtgttcccaaacatctactcttctctgaagaaaagcaaccagttccctgctgttcttttcacctgtatcgctctgtctactgttctgttcgctgctgctgcaatcatgggatacattatgttcggtgaatctacagagtcccaatttacactgaacttacccccaaatcttgtggcttccaagattgcggtctggactacggtgacgaatccaataaccaaatatgcgctgaccatgactcctctagccctgagtttggaggaactgctacctccaaataagcagacatacccgaacataatgatacttagatccgctctggtggtatcttcccttattattgctctgtccgttccattttttggacttgtcatgtcactggtcgggtcttttctcaccatgtttgtggcctatattctaccatgtgcctgctttttgtctatcctcaggagtaaagtcacctggtatcaggtagtactgtgtgtgttcatcattgtcgttggactttgctgtgttggtgttggcacgtactcttctctttctaagataatacaaaagtaccaatgaatttgccctagaattatgtatgatgtgtccatgtgttttcgaatagccagttttcttttctgggatggtggcgctggtctggaagggggagggggatgtcattcgttgtaaattttttgttggcatgagaggaagtggaggaatttcataaaatagggcaggttgtgttatcgaaggagtattttgtctgaaattgttctcgtgacggtaggtgctgctggggaccccccttctgttgcccccccctttttcgtttgcccc

SEQ ID NO: 117190 - DNA, 2767 bp, Zea mays
  Clone ID: MRT4577_38366C.1
ggccgggaacaactattaccaaacggctcctataagcccgtccctctccgatcctcggcacgagctctctgctcccatccccgcctcgtccgttaccataaatctagcttgggctctaatctaaccgagggaacaggtgggatatgaggaactcggtgtcggagcggagcttcctcatcgagagcgacgatgacgacgatgccgccgtggaggacgggaagcggcgcggccttggcggcggcggcggcggcgacgacgacgacgacgggtccgactcctcgtcgccgtgcgacagcccgcgggtggtggcggcgcggtgcagccagccgagttcgtacacgcagcaatggccgcagagctacaggcaatccattgacatgtacagcagtgtgcactctcccaacctgagcttcttgggcacgccatcactgagccggttgtccaactcgttcctcacaaactcattccgggggaagccacctgagatcatctccagcttaatcaagccattactgccgacaagcattgcttccgccagcgatgaccagcagcagcagcagcatgaggacgtccggaagagctcccattacctgccaccatcacgcaaggcgtcgtcgctgcagaggatccccgaggaccagagacctatggttgggggccatgaggtgggtccctaccggcagtgctcctatacccaaggggtcatgaacggagtgaatgtcttatgtggtgtggggatcctgtcaacaccttatgctgtcaagcagggtggctggcttggactggtgatactagcggtattgggtgcactggcttggtacactggcatacttctgcgccgttgcctggacagcaaggatgggctcgagacttaccctgacatcggacatgctgcctttggtactgctggccgtatcatcatctcggcaagattttctgcactagcaagctcaccagttgtcagttttgtatgcagataatactgtatatggaactatatgcatgttgcattgagtatttgatcttagagagcgataacttatcaaagttgttcccaaatgcacacctaaccatgggtaacttgactctggattcacatatgctatttgccatcttgactgctcttgtcgtcatgcctaccacttggcttcgtgatctcagctgcctcagcttcatttcagctggtggagtcattgcatctatcgtcattgtctcctgcttgttctgggtgggacttgttgatcacgttggcacagtcgagagtgaagggacggcactgaaccttcctggaatccccattgccatcgggttgtatgggtattgctactcaggccatggagtgttcccaaacatctactcttctctgaagaaaagcaaccagttccctgctgttcttttcacctgtatcgctctgtctactgttctgttcgctgctgctgcaatcatgggatacattatgttcggtgaatctacagagtcccaattcacactgaacttacccccaaatcttgtggcttccaagattgcggtctggactacggtgacgaatccaataaccaaatatatgccctgaccatgactcctctagccctgagttttgtaggaactgctaccgaatcatatacagacatacccttggataatgattcttactttctctcgcatttgatcccaccttattcaagctctgtcagttccattttttctttctctaatccttttcatgtccacttgtccatccttttctctccatgtcaaacgcctatattctattgactagaaatatctataaaaagtattatcttaaataagcagagttatttggttttaataaagaatttagcaatgtcaatgttatttttctcgttctatataaattttggatattcatggtcaaagttaaaaaatatttgacttaggacaaatatagatatacctgcattgttattttagtgagtcctatagttctcctccccaaactttgctatcaacatctaacagttaatccagttttcatgaataaatgtagtttcaatcgttctgtgttgtttaataatgttttatggatcgcatgctatgtccttaactaatacctacatatgcgctgaccatgactcctctagccctgagtttggaggaactgctacctccaaataagcagacatacccgaacataatgatgcttagatccgctctggtggtatcttcccttattattgctctgtccgttccattttttgccttttcaggacttgtcatgtcactggtcgggtcttttctcaccatgtttgtggcctatattctaccatgtgcctgctttttgtctatcctcaggagtaaagtgacctggtatcaggtagtactgtgtgtgttcatcattgtcgttggactttgctgtgttggtgttggcacgtactcttctctttctaagataatacaaaagtaccaatgaatttgccctagaattatgtatgatgtgtccatgtgttttcgaatagccagttttcttttctgggatggtggcgctggtctggaagggggagggggatgtcattcgttgtaaattttttgttggcatgagaggaagtggaggaatttcataaaatagggcaggttgtgttatcgaaggagtattttgtctgaaattgttctcgtgacggtaggtgctgctgggaacgaccttctgttgacgctgccattttcgtttgacccaaaaaaaaaaaaaaaaaaaaaaaaaaaaaaaactcgagggagggggcgtgtaccc

SEQ ID NO: 117191 - DNA, 254 bp, Zea mays
  Clone ID: MRT4577_38367C.1
attgcaccgacggcgaccgcccccaattttcttctaacccttcggcttcaattaagtcggcggggtcccaggttccttggcctgggtaaccattattttattaagccttgtgcccaaattggacgcaaggacttccgggcggaattccttgagccgagccaatttggataccggttggccacatagatatccgaggacaccacacccaaggggccgagccaaagtgatacggagacaaatctcccgccggtgtt

SEQ ID NO: 117192 - DNA, 350 bp, Zea mays
  Clone ID: MRT4577_38368C.1
aggatccacccatctcatatttctttgtcttcccccacgcataatctcatctcaagtaactcaaacattgatgcgggggggtatttaaatcatttgcatatatgtcaatcaagtactttattgcctctcctattcctcatatcatcatcatattatctaatgcatgacaagattgtctattttaacggccaatttacattttcttgcattccttgctgtgtaattacccatatacactcatattattcatatctttcctctaattttgtaaatatttttcttatcctattccttttttgtttttgtctttacatttattttttcacctttctaaattctcttttgtttat

SEQ ID NO: 117193 - DNA, 500 bp, Zea mays
  Clone ID: MRT4577_38369C.1
ggggatgacatcaataacgattcaaagcttcaaacagccaaacccacagttaagtttggatacccgttcaacaacccggggatatatcacgattattaagtagtcctaaaaggggtggataaaaaactccaaaccccccaacagccaacagtttgcccatgcatatgctactggggttacagtcaaacaggccaaggacagtttactaaatcattttttcacaaaacttacagggggagagaggggaacacccaaaacgagcgcagagtttttcctcccgtcgacagaattacccccttttgccacggatcctttttgccaactgaatgtccttgggcatgatggtcacccccttggcatggatcccccacaaattggtttcttcgaaaaaaccaaccaggtaggcctttgctgcctcctgcaaaacaagcacggcatggctctggaagcccaaatccgtcttgaaatcctgagcaatctccctgacaagcctttggaac

SEQ ID NO: 117194 - DNA, 180 bp, Zea mays
  Clone ID: MRT4577_3836C.1
aacaaaaccaaacgggcccggatttcacggttacaagcatttcaccctgacgggaacaactgggggcccaaggaaaaaaacaatgcgaggggccccggcccagggggggcctgaaacagtcaacaatccttgcccgtgcccgaaaaaaactaaacggcggcaaccgggaaaaaagacctg

SEQ ID NO: 117195 - DNA, 778 bp, Zea mays
  Clone ID: MRT4577_38370C.1
atggccagggtgcgttcgacagctagggttacacgcgacagagaggaaaccgaagctgctgaaactgccccgatctccgaagttatgaggcagtcaggactggttgtgacagagggcgcctgtgacgaaggtacacctgctaccgaagccgagcaggcagatattgaagagggtgatgctggtgaagaagagatagattataacaccactatgccatccaaacccagccatttggattttgggaagtcgactgtcttcgaagctgatatgcccatgatgacgacgctaggctacttcgaggaaaccgagaagaagctgattcgctttggcggggaagagaccatcccgaaaccagaaaatgataaagtggctcttcgaagccaaggagtggagccacttgccgaagccttctgtcgggtgcacgaacttcactatcagacgaaggctagagaagatggattgcacgagaatttcggcttttataattttgcgtaccgcaaagacatgaagacaccggtggttagctaccgcaccaaatggccaaccggttggaaaaccgaatggttttatgttaagattgatgagaaaaaggagaagctagttcagagtccgctggtccttaccctcggattaactaggcctcagtgcaacatgacgacgggggcatcatgcccagatgctgtgggcgaatttagagttgtgtctgagcatattggtactagggatttagttcaggaatacttagccaatagggtattcccaacgttaaaggaatggg

SEQ ID NO: 117196 - DNA, 422 bp, Zea mays
  Clone ID: MRT4577_38371C.1
agcccacgcgtccgtcggaatctgaagacctgaaccaagtttgatttacttttcaaaggcaagaatccagatagcagagttgaaatgttacccatggatttatcagctggtgaagaatctctgaaagaagtcgtacatgtggcagaatcatttttttctaatgcaggcgttgactatatggtccataatgcagccttcgaacgtcctgtaaatatcacccttattttgagttaatgttttaactcccttacccttcaaacatcatgttgttttattgttagtagtttttgatgatagatctgctagacatcactcctttttaatcatattctgaatcagatgatccctaaatgcatcaatttttaatcagattgcagaaacggagggctctagaagaaagtgaggaaggtcttaaggctaca

SEQ ID NO: 117197 - DNA, 538 bp, Zea mays
  Clone ID: MRT4577_38372C.1
tcgcggcggcggcgtttgcagcgggatctagggcagcggcgcggcagctaaaatatcaacccaggaatggcaatgtcttggacacgagcattgaagcatggagttattacaagggatgcagctcaattggtcgggataagaggctttgcagctcaggccaagggaaagaagggcggaaaaggtggtgcggctgatgctaaacctgtgctcagcaaagaaatgaagagtacaactgtgttcggggcaaatatcctgaaggagggttctgacccgaagatcaaccagattcggagtaccctgactggctgtggcacctggttgacaagcgtcctgtgctgagcgagctgcggaggaaagatgccaagacactgccttatgaagacctgaagcgtttcgtcaagttggacaaccgggctaggatcaaggaaaacaatgctctcactgctaagaactgatcaggagaatcacatctcatgtagtggtcaaagtaagcatattgtcctgtcttttgttacaaggtttattagttacttttgat

SEQ ID NO: 117198 - DNA, 404 bp, Zea mays
  unsure (1)..(404): unsure at all n locations
  Clone ID: MRT4577_38373C.1
aaaaaaaatacctccgcggaacancaaacaancaccctgccgancgccgagggcgggggcnanncganagagggcgaaagcgcgcgcgncaagaggacgccggaggaggggncgncgccgcngnccgcncnggcggaagacgngcngcaacagaaccngggacggcncgaggcggacccgcgggacngggcgcgggccgggggggggggcccncgccncgccgcncngcnccgggcggcccgccccccgccgcgacngncgcgggcgccccccgccgagcaccnccccgcgccgacaccggacggggcgcccgaggccagggcggcgcacaacaagcccaccggccgaagcccggggccccaacgcgccggggggcgccccgagcccaccgacgaacangggcc

SEQ ID NO: 117199 - DNA, 489 bp, Zea mays
  Clone ID: MRT4577_38374C.1
tcgctttaggcctgctgaactagccgataatgcacatgtgactactgaacatgacaagaactctgaacactatgagcaatcttccaaactatgagaagaccacatcattattctcccacatatagtaccacttcaattactaccaccgactggacagacgtctgatcctaaacctgcagaatgccctggaacgaatccaaccaggagagcacgtgcatattatacactatatgacgcacgaggcgactgcacaaagaagctacaagggccacgatccgccacttattgcgaccatgattaaacggacatgtaacccaattgcagacaccctgtcaccatggagagctcagaaggataggcggcacacatacaagcccagatgagcaccgtccgtggatgggcagaaatgtactcgctactaaagagcctactgaacacagccacgaaaagcaacacctgcaaatgcatgaccatcaaaatttacatcca

SEQ ID NO: 117200 - DNA, 828 bp, Zea mays
  Clone ID: MRT4577_38375C.1
atctgtcgcccctctctctcccttctgacaacccggccgcccccagtttcttctcctcttctctctccgcgctgccgtcccgaccccgtcttctgctcctccgcttcacgcggcgccggccgccggccgccggccggcctccctccaaatccgtacgccgagcgggccctccctccctttcgacctcctcccctgccgcagacactgccccccgtggtaagctgaaagccctaatcccgctctctcccgcctgattccttggcaccacctccgattccatacaattgtcgcgtgggtgctgctggttggagctcgtgagatgctttgaggtcgggctggagacggcacttaatcccgaattcttaggtgtttcccgctgcttggcgctggctgagctgtggggggaaggtaggccggccggcctaagcttagttattgacgctacgagctagcaaaaatctgtacttgccgcttcctttgccttgaattatctcccgtcccgctgttgtcctgctgtacttgtttacttttggaattacttgtgctactataagggaaggtgcgatctgccaaagtgcctaggcacctcgaatttcctcaccgcaccatggcagctcactatctcttgcgtgcttctctgcagatcccgtgcctacagataatttgactctgaaaaggtgacggctctggcctcggagtgatctgacacataaaggatacaggcgcccttattaccctgcttgaactaaaggggcaacaaagcgatttgttgtcctgttgttttgagctggaaacccccggtatggctgatgctagttcgaggactga

SEQ ID NO: 117201 - DNA, 555 bp, Zea mays
  Clone ID: MRT4577_38376C.1
agtttcttctctctctccgctgccgtcccgaccccgtcttctgctcctccgcttcctgcggcgccggccgccggccggcctcctccaaatccgtacgccaagcgggctctccctccctttcgaccttctcccctgccgcagacactgcccccgtggtaagcggaaagccctaatcctgctctctcccgcctgattccttggcaccacctccgattccatacaattgtcgcgtgtggtgctgctgctggttggagctcgtgagatgctttgaggtcgggctggagacggcacttaattccgaattcttaggtgtttcccgctgctttggcgctggctgagctgtgcggggaaggtaggccggccggcctaggcttagttattgacgctacgagctagcaaaaatctgtacttgacgcttcctttgccttgaattatctcccgtcccgctgttgtcctgctgtacttgtttatttttggaattacttgcgctactataagggaagatcccgcgcctacagataatttgactctgaaaaggcgacggctctggcctcc

SEQ ID NO: 117202 - DNA, 425 bp, Zea mays
  Clone ID: MRT4577_38377C.1
aaaaaaaaaaccttaaacctggggggggggggtgttaaccaaaaccaaaaaaaaaagcccccaaatctttcccccaaagcggggaaattaaaaaaccaaaccctggcaaattgggggccaaacccccagggggaacaaaccaaaaagggggggccaaacggggggaaaaacccgggggggaaaaaaaacacaaaaggggcccgcctgccgagaaaactctttggggggacggattaaaaaccccaacgtgggggcccgggggaaaaatgggggtaggggccgcccgtccataacccaaaaacccgggatggttggccctggggaaaaaaagggtttttcttttagaaaaaaaaaaagggggaggtctccccccggccgggggggtttttcccggggggacacaaaagggggcccctgggcccccc

SEQ ID NO: 117203 - DNA, 257 bp, Zea mays
  Clone ID: MRT4577_38378C.1
ctcgagccgcacggaagacagattttccgaaactttaagaagataacaggaaattttggattgcgctcatcgtggattcaggaaagaaaggttcacagtattggtaaactggaaaaatctcaagtcaattctgcaagtcatcatgattctattcctaaggacttgttgcatactgaaagaatggaactttcagagtctgtacttggaaagagagggattgggaagaagtgtttacgattacaatggaagaagattga

SEQ ID NO: 117204 - DNA, 237 bp, Zea mays
  Clone ID: MRT4577_38379C.1
aggagcagtgggcaagggcttcaggactcaggggtggtctgagacatggtcgggtgctggctcctctgtgtctgcatggacatgttccctgaccccaaactcttgtatccttgctgctcccagaaggtgcctggtagaaaaacgtcatccatagtcccttgattactgccccaaagcaccctcacttccctctggggagccccagttttccacattctgcaagaggacctagagatg

SEQ ID NO: 117205 - DNA, 429 bp, Zea mays
  Clone ID: MRT4577_3837C.1
aacccgaccaaagcaaggggggtgggccctttgggggggggggatccaacaacgggggggggggatccaaaagcaaaccgggaaaacacactgcccgttctggaaaggagccacgaacacatgcgggggcttgggaccatccccccccagtttatacccccccatgtccccaggggtggtagtttttatccccagcagttttttagcttggcacgcgtttagcttgcgcgggcatttataattgcatatatatgagccccatgggtcgggcatacacatatatgggggcggccctaggaataggatgccttgcatgcaataggctcaccctcatcaaatcagttcaaaggccaccgtagcggacgttggaaaacttggacttgaaccacttgaccctgctggggacgggggttttgatccggccctggg

SEQ ID NO: 117206 - DNA, 1000 bp, Zea mays
  Clone ID: MRT4577_38380C.1
taaggatctacaagaaagaagtgctttcatactagacattttcttacagatgatttacttcctgtgcatgtctggaaatatagacaaggcagtttctaggattattggaattcttccaactgcaatgcctgataattctggtgacaagttgcttgctgatgtcatttcttgcttgaccatgtccgacagctgcatattttggatttcgtgcctatatgtcttaatttacaggaaccttccagaggaaattattgatcagctggagtttcagaaagctttacctcgtgctttaatatggccttctattgatcccagtgtagacaacagagataagattacagatcttctaaattttgctgcttgtaagatggctgaagatattagtgagtgtgttaaaaacggggatccatcttacctgatgttatcacaattcctcgcagctaaccacacgttgctgtcggcggccattggaggcttaaaatcttctgttgatatgctggtgacctacatgaaggagtacccaatgtgtcctcagattcttctgatctcagctcggttagacagaaagcatggtacatgtccaggtctgaaaagctttgatgagttgatcttgaattggcctaaagaggcacaaggaattcaatatatgtggaatcaatatgttgaacatgctctggccactgatgccgagttagctgagaaggtactgacttgctggtttgaagaacatggaaaggactgtgatatccaaagcaatgctgctatttgtatagaactgagcagtgaagaacctggaacatcatcacttgtttcacctcaggcagttggttctggtccatctatatcagaagatctcgtctttcggttactaaacctctcactgtataagatactggagaacaacctacaggaagcacaaatggctgcgagtaaagcattgaaattggctcatggggggtggcgccagcaccggatttgagaaccgctgcattcatgcact

SEQ ID NO: 117207 - DNA, 390 bp, Zea mays
  Clone ID: MRT4577_38381C.1
aacggctgaaagggcggaaaattgcaataatctctttaaacacaaaatggcgaaagggatcttagctaacaatgcaggccttgcagacatattgaaaatatttccggcatttggaacattgctatttaacagttttaaagggcgaagattcctttcgtacgttcttggtggccttgataagccaaaaaagggccgccgggaaataattctttcattggctacgctcattaggtgcgttatttgttttattgacaccctgacttgactgattacactggttggcctatcttggaaatgttgaccccgttcaacacctttacaaacttgaagactttgaagattttgaaagttggtaaaccctttttccccaaatccttcttaaggggcttg

SEQ ID NO: 117208 - DNA, 145 bp, Zea mays
  Clone ID: MRT4577_38382C.1
cccgtagtccagcatgtacagttactatctgtactgggaggtctagctagcaagcgtgcccgctgacctcgctagggtcatgtctgccagatcacagagaagggacgacatgattcgttgcgatgaccgcagcgcgcctggaatg

SEQ ID NO: 117209 - DNA, 422 bp, Zea mays
  Clone ID: MRT4577_38383C.1
aaaaaaaaaaggcttaatgttgaggcgggggaccggggaacttaacggaaaaaaaagggccacggaaactgggggggggaaaaaaccaaacaaggaagggggcccttccccccaaggggcgggaaagaaaaaaaaaaaaattcctgggccccccccccttccccgaaaacggaaaattccgggaaaaaaaaacaccccggggaccccttctcccaaaaagggggggaaccattcccaaaaaggccccccatcctttaaaaatgggcgggggggaacccctttaagaacgacccgggcccttgtcccccggccggaacccccctaagggggaatcccaacccacggggggccggtacaaagggatcccagctgggaacaaagcttggggtaacaagggcaaaaaccgttcccgggggaaaaat

SEQ ID NO: 117210 - DNA, 233 bp, Zea mays
  Clone ID: MRT4577_38384C.1
gggaacgaaaaccaatttttcccaacacaatgcgagaacaggtggcaaaactagatttttacatttatttaacccctaaaaaagaaagggaaataaatggtccaaggcaaaggcgcatcattttgggatatacatgcttacaaaaccttaaattgaatgtggagaggtgctaaatcaaaccactacgtgtttaaatccattcattcagagcaggtatggagtggtgaataaat

SEQ ID NO: 117211 - DNA, 319 bp, Zea mays
  Clone ID: MRT4577_38385C.1
ctatacttttttaaagaagtgttttgaaagattagatgtatagaggggagcaagtaatgcggcatgcgggccggcataataatcattacaacagcgccaaacacctccaatcacacatgaaggaggggccaagggggagagagaagtcttattataaggaaggtggaaaaagacgaaatgaagaaataatgggacactctgtcacgtccactcatcatatttccaacaacgcgcgccggccggacggaataatagctgaccggaccgcgggtagcttacttgaacaccggtgaagatgaccctggggccgagcagatcc

SEQ ID NO: 117212 - DNA, 145 bp, Zea mays
  Clone ID: MRT4577_38386C.1
ccctgcaggaattcggcacgaggatggacctattctcttctaacctccccggtcccatcctgcttattcaagcaatcgttccttaggctgccaaagctgcccctgttcatcggcctgctaaggggagtccccgtgccgagctatg

SEQ ID NO: 117213 - DNA, 423 bp, Zea mays
  Clone ID: MRT4577_38387C.1
ccacaccccatcattgcaggtgctctcttttagattgcttatgagttatagcccaataataaaggtttttgtctgtagttagtggcttcccaaaaataagatgcacctgcccggccggccgcttgaaagctgatgcttatatatatccacaacactgaccatccatccagcttgcttctgcctactctaatcaacaccatcttgagtcatttaaccaataggtcgcactgaactacgatgcttattctcggaagaaaatactactaccatacatacagctcgctgcagcaaaccgtgcttccttgttgaccagcaacagatgatgcctttctaccaggagcttgccgctaaccccacaaccctattacaaatacaacactcgctgccccttggccaaaatgccttgacagacccaggttactc

SEQ ID NO: 117214 - DNA, 619 bp, Zea mays
  Clone ID: MRT4577_38388C.1
aatagaaagccatcatctgatcggcatgacacgattgccacacaaatagtaccatacacataatacataataaagttccaagcttcgcacacatacacacgaggtctcaagctagttaaccattacaatttacaagcacaagcacacacacacagtgcgtccagtcgcatgctacggctacggggacgccacgctgccaccagtacaacacgcgctcgaatgattcccaagttacttaatcgtctgggaagctccaaaagcagtttcaatacatagtttttgcgtcctgcagggtggattcctgctatgcatcaactttatttgggtcgtcatcggagcatttcatatccatccagatcgaccgtgctcatttgggcccgccatgtcctcgttgttcagctggtccatgtaggcttgttgatggtacccaatctgcagggaaggatcactctctgggtgctgaaggagtccctaataaggatcaagaacattaccacttgcgccactgtgcccaccttcctcccagctggaaacatggagcacattctctggacttgtttcttgcagctttttccttaggtctttattgagatcctgcaattcttgttccttgcttttg

SEQ ID NO: 117215 - DNA, 824 bp, Zea mays
  Clone ID: MRT4577_38389C.1
ttccgctccactagccacactcgactggggagttattacgtgccgtcccaactcacccgcggctccgtaccatccgtcgccgccggcgcaccgcgatggccgcctccgccccggccgtgaggcctctcgcccgggccgcaatccctatcccgctctctgcgcgtccgcggaccgccagggtctcctcgctccccctggcttctcctgctccggcccaacgcctcgctctcgggcggaccgggcaagcgcggctgccagcgcgcagccggtcggtgcggtgcctggcggcgctgagcccggagatgcgggagacactggacaaggtcgtggggtccagcaaggtgttgctattcatgaagggcaccaaggactttccgcagtgcggcttctcccacaccgtcgtgcagatcctgcgctcgctcgacgtgcccttcgagacgctcgacgtgctcgctaacgaggcgctccggcaggggctcaaggagtactccagctggcccaccttcccgcagctctacatcgacggcgagttcttcggcggatgtgacatcaccgtcgaggcatacaagagtggagaactgcaggaaactctagagaaagcaatgtgttcgtagaaaaaaaatgaacaataagcagatggcatacaattaatcaaaatgttatagtatttgctgtacaattcaggcttgtcatcaactggagatgcaagttgtggataattcatgtccaaatgttcagtgcactttcgactggaaatacatctttctgcagtttgtgactagtcaacaaaaaaaaaaacaaaaaaaaaaaaaaaagctgtgacg

SEQ ID NO: 117216 - DNA, 337 bp, Zea mays
  Clone ID: MRT4577_3838C.1
gcgcatccctcttgccgtgctagggtttcctcggtccccgtcgcctcgaacgggtcttgtcccgcctcacgggcggagctaggattcttctcgacgacgatgacgagactccaagttcttctcgacgatctgtaaacttcaagctgaagacttcttttctgctatgcttgattgatggggttgtgtcttcacccagttctgactatggcctgggctattttaccttccactgcgctttatgattttcggctcacttttgagcttgtatcccccggtattgtaataacattattcagactctgtaactatttgaagtaatgaatgtggttactagcct

SEQ ID NO: 117217 - DNA, 109 bp, Zea mays
  Clone ID: MRT4577_38390C.1
ctagtgctagttcgctactggctgccgactatcgccttcgtcgagtcgttaatcgtatccggaccggttactgtaggtgtaagagctgaccctaccgtctgccgtatta

SEQ ID NO: 117218 - DNA, 243 bp, Zea mays
  Clone ID: MRT4577_38391C.1
ggggggaaaacggggtctttttttaatggccccccccggggggctgggggaaacccttggttttatttcctcgtttaaccctttttccccccctaaattcaaaacgacccccctttgggaagtgcgggggcggagtcgaacaagggtgggccttgggcaaaaacaacttgggggccagggccaaacccccggtacctgcccgggggggggtttaaaagggcaaattctggaaaagtccacaaa

SEQ ID NO: 117219 - DNA, 358 bp, Zea mays
  Clone ID: MRT4577_38392C.1
gttagaatttcatgtacagtcccagtgcagcagtaaaactctccggatcgtaagtatagttgggagtaacctctacaatttctttacattcggattttgatccataacctttgtaatcaatttgactgaatcatttatccctaagatcctatgattaaacaaccttcatcgattatagaatcccaaggagcatgccaaatttgtaggcaaattttaaatcaacagtgttggcaaggaatgataatttatagttcatttgaaatactacattaaatcttattaattgcggttacaacaaactaaagccctactcctaatctttgcatgtaacaaaaactacatgtattctatgtaatat

SEQ ID NO: 117220 - DNA, 278 bp, Zea mays
  Clone ID: MRT4577_38393C.1
aatggccaccgcgctctctcttcaagggcttgacactgggggcgctcctctccatgggcgaagtcactggcgctggcgccgagcaacagtataagcgcaagaccaccaccgactaggaggacagattcttgttgttctacagcagtggctggatgtcgaccaaggccacctggtacggtgcaaaaaccgatttttgggggggggaaaatgaggggcgtgcggagataaggtgttaaatcaataaccgtagttgatcatgcaattactagagcatatta

SEQ ID NO: 117221 - DNA, 463 bp, Zea mays
  Clone ID: MRT4577_38394C.1
cgtcgtcctatcggggaatttaattgtttcaccgcagtttatgcgagcactactggttctccgccgttgtgggaaccaatacagcaactccaccgaaggaacaacgggaaaaactgctcccatgggaggagctaaagaaaaatagatagcctgtaaggggcaaaaaaggaaaaaaagggccaaaaggcgccctaaaagaaaaaaggggggaaagcgtgcctaatcaaccatctcaatgaccggaaccacaaatgattcacccacttgaaggcaaacgacgaggctttcgcacgtacttgacactcccgagggtttgccatggacttgagcaacccccaggactgactcagtggaaaaacaagctgaatcagaagcatgttggggatcaggaaggataccaatgagggctctggatctgaatgaatgagtagcactggaaaaaacttttgaacattgacttcgc

SEQ ID NO: 117222 - DNA, 385 bp, Zea mays
  unsure (1)..(385): unsure at all n locations
  Clone ID: MRT4577_38395C.1
gctagctaggaagaggtacggtgctggctaagctggctagatccatcggccatggagctganagcagcagctacctatatatctagctggttttctaacgacgatgacgacgaccgcgggactagcatgatgcagctagctgaagacagttgccctgcgactgtcttcagctcgaacaagatcgaccggcccggacaggaatgttgggcgtacgttgtcatcagggtttaagctccacgattccaaatattcaccacttctgggaggagttttgaagctgctcgaaagcatattgtgtctgagtgtaataaatcggcggggaatcatatgttcatgttctcactgcaagaataagcttgtcaaagagggtggtgaagtaaaatct

SEQ ID NO: 117223 - DNA, 1960 bp, Zea mays
  Clone ID: MRT4577_38396C.1
caaagggaaagacatcagatgcgttgtcgaaattgacagagcttgcaccagaaacagcgtgccttcttactttggacaaggacggaaatgccatttcagaaacagagatcagcactcaattacttcagagaaatgatgtcatcaagattgtgcctggcaccaaagttcctgttgacggcgttgtcataaaaggtcaaagccatgtcaatgaaagtatgataactggggaagcaaggcctattgcaaagaaaccaggcgacagggttattgggggtactgtaaatgataacggttgcataattgttaaggcgactcatgttgggtcagaaacagctttgtcgcaaatagtccagttggttgaagctgctcaacttgcaagagctccagtgcagaagttagcaggcaagatttcacgtttttttgttccaactgtggtggtggctgcatttcttacatggcttggctggttcatacctgggcaacttcacctctacccccagcaatggatcccaaaggccatggatagttttgagcttgctttgcagtttggaatttctgtcctagttgtcgcatgcccatgtgctttgggacttgctacaccaactgctgttatggttgcaactggtaaaggtgcttctcaaggtgttctcattaagggtggaaatgcacttgagaaagctcataagattaaggctatcatatttgataaaactggaacgctgacagttggtaaaccttctgtcgttcaaacaaaggtcttctcaaagataccacttctagaactctgtgatctggctgctggtgctgaggcaaacagcgagcatcctctatcaaaagctatcgttgagcacacaaagaagctcaaggaacaatatggatctcacagtgatcacatgatggaatctagggactttgaggtgcatccaggagcaggtgtcagtgcccatatcgaaggcaggctggttttggttggaaacaaaaggctgatgcaggaatttgaagttccgttgagtcctgaggtggaggcgtacatgtccgaaacagaagagcttgctaggacctgcgtacttgttgctatcgataagatcatctgtggggccctcgctgtttcggatcctctgaagcctaaggcaggccaagtcatttcttaccttaagtcaatgggcatctccagtatcatggtgaccggtgataattgggctaccgcaaaatcaattgcaaaggaagttgggatcagccaggtgtgcacgaggatcgacccagtgggaaaagctgaaaagatcaaagacttgcagatgcaagggttgacggtggcaatggttggcgatggggtaaacgactccccagcattggcggcggcagacgtgggcatggcgatcggtgctggcacagacgtggccatcgaggctgctgacatcgttctaatgaagagcaaccttgaggacgtcatcaccgccattgatctctcgcgcaagaccctctccaggatccggctgaactacgtgtgggccctgggctacaacgtcctgggcatgccgatcgccgccggcgtcctgttccctttcacgggcatccggctgcccccttggctcgccggggcatgcatggctgcctcgtcggtgagcgtcgtctgctcctccctgctcctccagctctacaagaaaccgctgcacgttgaagacgcgcccaggcccagggaggactcagatttggtgtgactgcgagtgaggactgatccctcgatctcgatgtgtactaacgagagcttgctggcgtcactgatgcttaacgagccaacacctgatcgatccgtgtacagcaagcaacacgttttggaacagttcgccaattgattgtgcaataattcaagacaaggtttataactttatatgatactagtacaatgacagcacataatcatagttttttttcgggaattacaagaaaaaaaaaaaaaaaa

SEQ ID NO: 117224 - DNA, 1568 bp, Zea mays
  Clone ID: MRT4577_38397C.1
cttagctaggaacggtgctggctaagcttgctctagctaggtccatcgtctgaggagagcagctacccagctatctagctggttttctaacgacgatgacgaacgaccgcgggactagcatgatgcagcatgctgaagacagttgtaggcagctctcctctggcaggcaggcgcgcggtcatcgtcgccatcgacgacggttgcttggctctgctatgctgtgttcgttcggccatggtgtgctagctagccgtgcatgcgttgcagtgtaacatgcgtgcatgcacgcgcgtacgtcctgccaaaggagagttgccctgcgactgtcttcagctcgaacaagatcgaccggcccggacaggaatgttgggcgtacgttgtcatcagggtttaagctccacgattccaaatattcaccacttctgggaggagttttgaagctgctcgaaagcatattgtgtctgagtgtaataaatcggcggggaatcatatgttcatgttctcactgcaagaataagcttgtcaaagagggtggtgaagtaaaatctcacctgatcagcggcacaggtgctcctagcgacgggtgtaagtcatggaggacaagcaacaggaagtccactgccaagtgcttccatcgtcgtcaaatcacaggtcaggggttaattatatgggggaagaggccattatcatcaggtacgcgtggttctcacacagtcggggccacgttcgttgatgatctgcctcttaatcggcatctcaaactcttgttgtgctctctacatcagtagagaaggtgtgttcacaagtcgtttcttcttaagactatgttttggttgatcttgatctatagaactattttattgtagaactactgaaccctttcgaagtgttgtactcaatttgtgtagaacaatgcatgattaatttctaccaatagtctacggtagccggtagttgttttatcctactagaaattgttgcatggttaattggttaatttgtgtaggatgtgccaaaagaagaggaagagaacaccatcaatatgaatggtgaattattcgtaagcttatcttccactaatggtgctggaagccagaaggagaaagaggaggatggagatcatgtgtcaaggctcaggagataaatcgaggaagaaaaagatcgaagggtggtgtttagttgtatccttccaagttccaagttcacggtaaagagaggaaagtgtgctagttcaagagagtatgggatggagataggcaccattggacttggagtggaggacaagatgttaccattttgcatttccatggagcgtggagacttctgagtgcttcaatctttttattaaaaatcagtctgagcgatgatgagtctaaagagactaagactatatcataatctacgatggatttaatctataaggtggatatatcacatatggttgccaatcttgtatatttcatatttgcatggttggtagttgcactgttgcaatcttaagacctgtatagttgcatatttgattgtgtttttagaatgttgatttgtggttgtgctcgcttctttct

SEQ ID NO: 117225 - DNA, 277 bp, Zea mays
  Clone ID: MRT4577_38398C.1
aactaatcagctttattttaaaatatacaagtattttgaaatgtagagtttaaggctgttctatttcttaaactacacacaaaactgacaaatccataccaaattaatcacccacagactgccaatttcatccactaatttaacactacagcattcaggataaattaaaggatttaatagtatagacagttaaacaaaaaaaaagcagtcatttgtaacatgctgctataaatagaacaaccagtttatggattcctggtacaaaaagtttcaatgg

SEQ ID NO: 117226 - DNA, 661 bp, Zea mays
  Clone ID: MRT4577_38399C.1
gccggccgggctctcgatcacacatattatttgagaccaatctagaaacataccaaagcacaatagcagtaccaacaatggaacacaaaagattacgcttacttatgctcctcgtgctctctgcgagcgctgctaccgcaaccattatgccacaatgatcacaaaatgctatatctttcttactgcccccatacctcacaccactcgcagcattcactatgaggaaacccaaatcttcaacccgtacagagatccaacaggaaatcacaggatggatcttacctttatcaccctagcaactgcaacaaccgaacaacctatcacagcacatacaactggacgattcagttgcgacaaaacatcaacgacacgacaactacaacaacgagtgatataaaaacgtggtgcatagtctcatacacatcagagtctttgattcgatcaaatgcatgtattgaactcagctgattatttgcaacaacaattaccattctaccacatagtcggtgactactcacagaaatatctatgattcaacctgctagcaacatagaactccgatgactatttacatcaacaacaactactaccattcatgcagctacatgacgggaaccacgactgctgcttgacacaacaacagctgttactcaactacctg

SEQ ID NO: 117227 - DNA, 227 bp, Zea mays
  Clone ID: MRT4577_3839C.1
ggaggaaaggtcacgggctttttttatgctgtctcgttcattttttgacgacaacatagacttcttaaggtttccttatgctagatcgactttgtggatcttctgtgttcaatcaggccgagatggctatgctgtgtggaacacgtcaacattagagctgcttctggtcttctggagcaaagcaaacgtgccttaatttgtttttactgtgggattactttaagggt

SEQ ID NO: 117228 - DNA, 415 bp, Zea mays
  Clone ID: MRT4577_383C.1
atcagaaccatatcaatcatatcaaaattaaaaaaaccttgggtttaaagggcgaccgggttgcaagaaagggttcacaacacccaaacagaaacagaaagggggattgcgcttatacaaggaaaaaaacccccccgggatgggaaaggcatcggaaaacaacagctacaggcattttcaaaatagctttattggttatggggggggtttccctttccggggcgggtctcggttctctttttggggaacccagttacaggttttttcgcctttgcccattggttttgggaccccggggttctcaagaaagggcaaacctcactaagggggatcttggggaccccccgcacctttggggggttattggcctccttaggcccgccaccaaggggaggggctggcgactcatctgcaa

SEQ ID NO: 117229 - DNA, 595 bp, Zea mays
  Clone ID: MRT4577_38400C.1
gccggccgggccggacccttggccgccgcccccctgcccatctcctcctctctcaattcttgcagccaccaaaccctatcagcccccctcaatcccctcctcccaaggtgccaatccttgccgctcggatcatcgtctcatggtgcgagtctccaatcgttttggtggagggaaggagggaggaaggaaagggggagaacccaaggcacctaatttctgctttggggaatagagggatgtagcagcacggccactacacctttaataaaggaaccaccatttaataatgttgttaatcagagttggacaagtctagtgaattgctttgttcttggttgagcgtttattttggggtgggctgagtttcttatcccatttgttttacttcagttgggtcataattaagttttaccactcttgcattacagtttctactatgtgaattatatgtctttatatcttgtatgagcttcatgtttcccctccttgttatgctagttttcaaagaaggtactgtcggatttttccttgctttatattctttctttattacatctcttgtgttgagaaaaaaaaaaaaaaaaaaaggccccta

SEQ ID NO: 117230 - DNA, 573 bp, Zea mays
  Clone ID: MRT4577_38401C.1
ccttggccgccaccctcccctgcccatctcctcctctctcaattcttgcagccacaccaccataccctagccgccccccccccccaatctcctcctcccaaggtgccaacccttgccgctcggatcatcgtcacgtggtgcgagtcttcaatcgttttggtggagggaagaagggaggaaggaaagggggagaattcaaggtggtggacttccggatcgttcttagggattttgcccaaacttccggtgaagacaagtaaaactgtgatggttattccgtctgttagatgaggcacctaatttctgcttttgggaatagagggatgtagcagcacggccacttcacctttaaataaaggaaccaccacttaatactgttgttaatcagagttggtcaagtctagtgtattactttgttcttggttgagcgtttgttttggggtgggctgagttccttatcctatttgttttgtttcagttgggtcataattaagttttaccacttttgcattttagtttctactatgtgaattatatgtctttatatcttgtatgagcttcatgttttccctc

SEQ ID NO: 117231 - DNA, 625 bp, Zea mays
  Clone ID: MRT4577_38402C.1
gatcccgagggcggccgggcccctttggccgccgcccccctgcccatctcctcctctctcaattcttgcagccaccaaaccctagccgccccccccaatcccctcctcccaaggtgccaatccttgccgctcggatcatcgtcgcgtggtgcgaatcttcaatcgttttggtggagggaagaagggaggaaggaaagggggagaacccaaggtggtggacttccggatcgttcttagggatttggcccaaacttccggtgaaggcacctaatttctgctttggggaatagagggatgtagcagcacggccactacacctttaataaaggaaccaccatttaataatgttgttaatcagagttggacaagtctagtgaattgctttgttcttggttgagcgtttattttggggtgggctgagtttcttatcccatttgttttgcttcagttgggtcataattaagttttaccacttttgcatttcagtttctactatgtgaattatatgtctttatatcctgtatgagcttcatgtttcccctccttgttatgcagtttcaaaggaggtgctgccggattttcaaaaaaaaaaaaaaaaaaaaaaaaaaaaaaaaaatttgcggcc

SEQ ID NO: 117232 - DNA, 336 bp, Zea mays
  Clone ID: MRT4577_38403C.1
ccggtccgtgcctccaagatgacaaagaaaagaaggaacaatggtcgtgccaaaaagggccgcggccacgtgcagcctattcgctgcactaactgtgcccgatgcgtgcccaaggacaaggccattaagaaattcgtcattcgaaacatagtggaggccgcagcagtcagggacatttctgaagcgagcgtcttcgatgcctatgtgcttcccaagctgtatgtgaagctacattactgtgtgagttgtgcaattcacagcaaagtagtcaggaatcgatctcgtgaagcccgcaaggaccgaacaccccgcacccgatttagacctgcgggtgct

SEQ ID NO: 117233 - DNA, 597 bp, Zea mays
  Clone ID: MRT4577_38404C.1
agtcgagcatgatctgctgcccccatcaggagacgttgacgtgcacgacgagtgcaagggcatcggcgtgctggatgagacctgcaaatccgccgtgcctagtgttgccgatccgataatgaattctgagggtggcgaggaagagaaggcaatccagagacctgatgccgaggagtccgtcaccgccgacggcaactttgctcaagaggagcaggaggaggaagaagatatcaagaaggacggcgacgataaggttggagccctgatcggcgcgctgtgctcgtttggggtcgcagccgccaccgcctgcgtctttctcatcggcggcaggctgcatcatcaccacacgcagcagcacaaaattcagctgcagttcttcggcgatgataagaggatccagcaagttgtgcgccagacgtcaaggctgaaccagaaggccatgtcgtttgcgacgggggcaggagcgtcacgacattttggaagggcacctgtaaaacgtagcaaaaacattaattactaatatgtttatatatgtaatatgtatatacatattcacatatttattgttctcccccctcaaaaaaaaaaaaaaaaaaa

SEQ ID NO: 117234 - DNA, 292 bp, Zea mays
  Clone ID: MRT4577_38405C.1
gtagttactttggctactataggaacacaggtggaagggccaaccatctatagcggggccagggtacaaccgcacaatcatatttcctcaagcccagctcaagcgcccggggattgtttacatctactgacgtccgccaaattaaaacacgacacatgtaattctaacatctccgtccaattttttagaattctgcaaaaaacaaacctggatgaagaatggggatcctggtactttttcttccccggaacctatccaatggagcacctcttaccaattaagcgaccggggg

SEQ ID NO: 117235 - DNA, 502 bp, Zea mays
  Clone ID: MRT4577_38406C.1
ccggccggggtgccgctatagactagttaatacttcctacccatacatcgctttcctctacccttcaagtcgattcccaatatcatacgatgtcgacattgattggcaggaagcacatactgatgacgctcatgcaagtatattggtgcctactactcggaacgcaacttggatcggggatcatgtactgctgatgagagaactgcgacaattgctaagcggctttccagagatcaatgctgagaacatcgtcagaagaaccgaccgactatctcgagagctacctggacagacgacttggtgccctctataacatcatcggagtgatctgacttctaggacacactcttccataagaccacgatgacaacatgttgatgtatatcgctccctgaagagatcatgtgccatgacaatgaatccacagggcacacacttagcgatgtgggatcctgaatgagatacagcaccctgggccgcgctgatttcagatagtaatgct

SEQ ID NO: 117236 - DNA, 214 bp, Zea mays
  unsure (1)..(214): unsure at all n locations
  Clone ID: MRT4577_38407C.1
gctaacgagcagcagatgttctattaaagattttatttttggcatgcctcgacgacaaggcaatgcatcgcatgggacctgaggccgcggcgcctgatgattactgcttatcagagcacagccacacaccccaacaggnggtctttacctgcgaataagcacgcgcacattggaaagcagattggctggttttcattgcacgcttcactggcga

SEQ ID NO: 117237 - DNA, 151 bp, Zea mays
  Clone ID: MRT4577_38408C.1
cccactccttcgactactcgtttacaaacttctgttcaaatacctaatctacatctccacagttcaactcaaaacacattgcgacctataagccttaaaataccggccattaaagcacaaatttcctatttcatttattctatctacactt

SEQ ID NO: 117238 - DNA, 246 bp, Zea mays
  Clone ID: MRT4577_38409C.1
tgttatcttcaacacgggcgtcatggtgctagagctctcgcgctggtgccgatgcgtgatacacgggacagatggaggagtggatggagctgcagaagcggatgcgcatctacaagctgggctgattgccgcccttcctaggtacctccgccgggaggatacgattcatcgaccaccgatggaaccagcacgacctcagtggggacaactacgcgagtctgtgtcgtggcctgaactcctgcatcg

SEQ ID NO: 117239 - DNA, 723 bp, Zea mays
  Clone ID: MRT4577_3840C.1
cattgggtacctcgaggccggccggtatctcctccgccactttcctcctcttccaagaacccaaccactccacgtcgtcgtcgtttgctgccgctgcgcaatggaggaggagcgctgcttcaacaactgggatctggacgccgtcgtccgcctgggctgccgccgccgcctctccccgccacggcagcccgacccgtttgcttcgcttctccctccgaccctgccgtcgccgtcgccgtcgccgccgcagaaggagaagcccgtggtgccagcgctggctaaaggaccagagccagagccatacgccgggtggcgctttcctaacctcggtgctggcggcgggcaagacggcgacgagctcatgagggccatgttagcagtccagccttccctgcctcagcctctgccaacgacaacgccaacgccaacgccaacgcttcccccggcagcaggagagcatcgacagtcgactgttacagccgtggacgtgccgctaccccaggtgcgccccgctccggccgccagagcgcagccgagcgggcggcaggtgcccggttccgtgccaagatccaagagaaggaagaaccaggtgaagaaggtggtctgccacgttccggcggacggctcgtcgtcggacatgtgggcgtggcgcaagtacggccagaagcccatcaagggctccccctacccaaggggatactaccggtgcagcagctcccaggg

SEQ ID NO: 117240 - DNA, 847 bp, Zea mays
  unsure (1)..(847): unsure at all n locations
  Clone ID: MRT4577_38410C.1
cattggtacctcgagccggcgggctccatacgaatcgcttggcgtccgcctcagcctgccgccaggagagccggctcggtcggttcgtcgaagatcccggatctgctctgtcacgaggtctttcggcgggtgttgtctcgcgaggtgtagcgagccaagttcaggagagtttcgagaagctgaaatggctcctaaaagtacacgcctaacattgcatatttccatgggtgccatatacttatcaaaaatgccctgtgtcaacctataaattggtataagactataagttgagtttctgtgtcatgcatttcctttttattttgtttttgtgtcatcattgttgaattgcattaggtattagtaggtatttctacatttagctctctgatttaaccaccccctgtttgttgtacttgtgccttgactagaacatgtgaaattgtgaatcgtctctatttgtttgtttactcgtgccttggccagaacatgtgaatcatctgaacggagggggtatataattagcaaagtactgcattgtctctgaaatacagataggatgtgcaatgcaatgttatcaatgcatattgtaatacatcgattgctatgcacaaagtctgtctattttagtgcacaatcaccatgcacaaattcataaactactattcgataggcttactgtaatagtgtactgtattcatgacctgactattttatctatgcacaaagctataattatctgctcctgccgagaattatcanactataattactgcattgtctcctaatacagacatgatatgtaatgcaatgttaccnnatacatatngtagtatattggttactatgc

SEQ ID NO: 117241 - DNA, 282 bp, Zea mays
  Clone ID: MRT4577_38411C.1
tggagtaggaggttcgggtcaatacaaaagttttcggggtagacttcaaggttacgaactacaaggtgcagtaggtctttaagattgtgtgtaaaggaactatcccgttgaacaaggtgaagttgcaggtgatgcacctcggttacagtgtgttctacgacttcattaccgtgcgtgaccatgtcttcctgacactagtaggaaccagaattctctccaaacactaaaacatcgacacaaacccccaggaggactcgacgtaaaacggtatcgagacattcc

SEQ ID NO: 117242 - DNA, 258 bp, Zea mays
  unsure (1)..(258): unsure at all n locations
  Clone ID: MRT4577_38412C.1
ggtaccctncgaggncctggccggggccatcacacaccactcggggtcttcagcaccatctagcctttattctactcnatcaccgcacaagaaccggagcgagaccatgagggtgatgctcgtagccctcgctctcctgtctctcgctgcgagcgccacctccacgcatacaagacggcgccatgccgctgacagccaccgccgacggttcatccaccgccgccagtgcatgtgccagcttaggcgaacctgccacgc

SEQ ID NO: 117243 - DNA, 159 bp, Zea mays
  Clone ID: MRT4577_38413C.1
gttggggaccccccccgctcattttaacagacctatcactgttgggatgttctacctcctctttgcaaagaggtaccataggtatgaaaagtgtgcacttcatcacccctgctcagatacaccccatgctatttttgtgagaaaggcccccccttcaac

SEQ ID NO: 117244 - DNA, 846 bp, Zea mays
  Clone ID: MRT4577_38414C.1
accaaagccgccagcctccgtcccctgcctgccaaccccaaatctcccctccctctgccgctctcgaaattccccgagcatcgaccatgtcggcctactgcggaaagtacaaggatgagctcatcaagaacgctgcctacattggcacccctggcaagggtatccttgctgccgacgagtccaccggcaccattggtaagcgctttgccagcatcaatgttgagaatgttgaggacaaccgtcgcgccctccgtgagctcctcttctgcacccctggagccctccagtacctcagcggtgtgatcctcttcgaggagaccttgtaccagagcaccaagggtggcaagcccttcgtcgacatcctcaaggagggcaacgtcctccctggcatcaaggtggacaagggtaccgtcgagctcgctggaaccaacggtgagaccaccacccagggctttgatgaccttggcaagcgctgcgccaagtactatgaggctggtgcccgctttgccaagtggcgtgccgtcctgaagattggccctaccgagccatcacagctttccatcaaccagaatgctcagggtctggctcgttatgccatcatctgccaggagaatggtctggtgcccattgtagagcctgagatccttgttgatggacctcatgacattgaccgctgtgcttatgtgaccgagatggtccttgctgcctgctacaaggctctcaacgaccagcatgtccctccttgagggtaccctcctgaagcccaacatggttacccctggttccgatgccaagaaggtagcccctgaggtcattgctgagtacaccgtcgcaccctccagagac

SEQ ID NO: 117245 - DNA, 406 bp, Zea mays
  Clone ID: MRT4577_38415C.1
actgggtcgagggctgtaactttaggcctttttgcgaaggtgacccaagattaggcgctggtaggagctctgctctattatgtgggcatgtagaactagcgcgcgcaccagctgggccgactcgatgcaggccatgtggaagaagaagaagtagcgctggctaaataggaagagccgtaaaatgaggcagagatctacataggtgcattttgataccgacgatgggcagctcatcctgtgccatggatctgaccctttacaaggatatgatcagattgcatactgtctttcgacgtacacgtcaaaggtgtaacccgtgttgtgttatgcgactagatagcgcgattatatacttacgatttggttattgaactgagatgccgtcagtgtaatattatttggattt

SEQ ID NO: 117246 - DNA, 1544 bp, Zea mays
  Clone ID: MRT4577_38416C.1
tgaaaaaaaaaaaaaaaaaaaaaaaaaaaaaaaaccaaagcctccttccctcccctgcctgccaacccccaatctcccgtcgcagccctcgaatctccccccgagcatcgaccatgtcggcctactgcggcaagtacaaggatgagctcatcaagaacgctgcctacattggcacccctggcaagggtatccttgctgctgatgagtccaccggcaccatcggcaagcgcttcgccagcatcaatgttgagaacgttgaggacaaccgtcgtgccctccgtgagctcctcttctgcacccctggtgccctccagtacctcagcggtgtgatcctgtttgaggagaccctgtaccagagcaccaagggtggcaagcccttcgtcgacatcctcaaggcgggcaatgtcctccccggcatcaaggtggacaagggcaccatcgagcttgctggaaccaacggtgagaccaccacccagggctttgatgaccttggcaagcgctgtgccaagtactacgaggctggtgcccgcttcgccaagtggcgtgcagtcctcaagatcggcgccaccgagccatcacagctctccatcgaccagaacgctcagggtctggctcgctatgccatcatctgccaggagaatggtctggttcccattgttgagccagagatccttgttgatggacctcatgacattgaccgctgtgcttacgtcaccgagatcgtccttgctgcctgctacaaggccctcaacgaccagcatgtcctcctcgagggcaccctcctgaagcccaacatggtcacccctggttccgactccaagaagggggcccctgaggtgattgctgagtacaccgcccgcaccctccagaggaccgtccctgctgctgtgcctgctgttgtcttcctctctggtggacagagcgaggaggaggccacccgcaacctcaatgccatgaacaagctcagcaccaagaagccgtggtccctgtctttctccttcggccgtgccctccaggcgagcaccctcaaggcctgggctggcaaggtggagaacttggagaaggctagagctgccttcctcgccaggtgcaaggccaactctgaggctaccctcggcacctacaagggtgatgctgccgccgacaccgagagcctccacgtcaaggactacaagtactgagttgcttctctttgcgtgcccgttttggaactcctgcctacgagctaggttgcggagtgtggtttgctcgttagagcttattttcggacatccaaaaaacatgcttcctatgtgggatgatggttatctttatatttgtatgttaattagtctctttgctgttaaatttcgtgtaagttggtcctgccgatggagaatcgagcagccccctttttttgttctatcaactatgctgtaatgctggctatgtatcggcaaaaacaattctatatgctgagttggagtcggcaaaaattcatatatgctgagttggagacaaaaaaaaaaaaaaaaaaaaagaaaaaaaaaaaaaaaaaagcggcc

SEQ ID NO: 117247 - DNA, 538 bp, Zea mays
  Clone ID: MRT4577_38417C.1
gggtggtggggggggggtttttttttttttttttttttatttttttttttttttttttttttttttttttttttttttttttttttttgggggggaaaaaaaaaaattttaaggccccgggccttcccttttgtttttttttcccttccgcgggggggggggggaccctttcctaaacctttcaaaaagctgctaccccgaccccccgaaaaaaaaaaaaaatcgggaaacggggctggtaaaaccgaacgggggattttgattttaaaacctatgacccccgcccccattaattgcccggcccaagccggccggaagcccaattaaggggggggcaactcccccaggggggcaagcgaccgggggggggggccccgccccgggggggggctggggcgggcccccccccccggggggaccaacaacatccacggggcggggggggccccccccacatgcttccgggggggggagcccccccccctaccgcatttttagaacccccggggggggggcgaccccttgagggggttttggc

SEQ ID NO: 117248 - DNA, 880 bp, Zea mays
  Clone ID: MRT4577_38418C.1
cggctgctcgaggcggcaggccgggactacgccttcagcctccctccctccctcccctgccaaccccaaatctcccctcgcccgtcgcagctctcgaatcccccccgagcatcgaccatgtcggcctactgcggaaagtacaaggatgagctcatcaagaacgctgcctacatcggcacccctggcaagggtatcctcgctgctgatgagtccaccggcaccatcggcaagcgctttgccagcatcaatgttgagaacgttgaggacaaccgtcgtgccctccgtgagctcctcttctgcacccctggtgccctccagtacctcagcggcgtgatcctgtttgaggagaccctgtaccagagcaccaagggtggcaagcccttcgtcgacatcctcaaggcgggcaatgtcctccctggcatcaaggtggacaagggtaccattgagcttgctggaaccaacggtgagaccaccacccagggctttgatgaccttggcaagcgctgcgccaagtactatgaggctggtgcccgcttcgccaagtggcgtgcagtcctcaagatcggcgccaccgagccatcgcagctctccatcgaccagaacgctcagggtctggctcgctatgccatcatctgccaggagaatggtctggtgcccattgtggagcctgagatccttgttgatggacctcatgacattgaccgctgtgcttacgtcaccgagatcgtccttgctgcctgctataaggccctcaacgaccagcatgtcctcctcgagggcactctcctgaagcccaacatggtcacccctggttctgactccaagaaggtggccccctgagtgattgctgagtacaccgtccgcaccctcccagagacgt

SEQ ID NO: 117249 - DNA, 559 bp, Zea mays
  Clone ID: MRT4577_38419C.1
cccccctcgagtttttttttttttttttttttttttttttttttttttttttttttttttttttttttttttttttttttttttttttttttttttttgaaaaaaaaaaaaaaaaattaaaaaccctttttaaaattttaatgaaaatgctttaaattgggggttggccccccccccctttttaaaagggaaaaaaaaaagggccccgagagaaaaaaaccgggggaggaaatttgggggggcccccccctttggagggccccattccacccgggaaggggcccccaaaaaaaaaaaccccaataaagggggccccttttctaaaaccccctttttaaaacacaaaccggggaggcctgttttggagaaaccccctgggggagcacgtgggggagggaaaggaagaccggggggtaacccccacaaggttttgagggggaagtggaaaacccgggaaaacccggggagggaaagcaggggcccgggacccgtgggccgggagtagccgccggaaagagagggagccaggagggggggggggggtcggaggggggtgggg

SEQ ID NO: 117250 - DNA, 237 bp, Zea mays
  Clone ID: MRT4577_3841C.1
cccacgcgtgcgcccacgcgtccgctgaggcgaaccaagctggagaatatcaacctgaggagcgcccacaatctgagactgattacatccgtgctcaagaggctatgagggtcatgatctatgttcatgcccgaatgatgatagtggacgatgaatacatgatgattgggttcggcaagatcaaccataggttcatggacggagccacagactctgagatcgccatgggcgcgtacc

SEQ ID NO: 117251 - DNA, 823 bp, Zea mays
  unsure (1)..(823): unsure at all n locations
  Clone ID: MRT4577_38420C.1
cattgggtacctcgaggccggccgggacacccgtcgtcgtccgcatcccccgcctgccttaccattcctcccaacaccacctcgcctgcgatcttcgtaacctccgtcgcgtctagcatctatcatgtcggcctactgcggaaagtacaaggatgagctcatcaagaatgctgcctacattggcacccctggcaaggtgatccttgctgctgatgagtccactgccaccattggcaagcgcctttccagcatcaatgccgagaacgttgaacagaaccgccgtgtcctccgtgagctcctattctgttgccctggtgctctccagtacatcagaggcgtgatcctcttcgaggagaccctgtaccacaagaccaaggatgtgaagccttttgttgatgtcctcaaggagggaggcgtcctccctgccatcaaggttgacaaggtcaccattgaggttgttgacactgataatgacaccaccacccaagggcatgacgaccttggcaagcgctgcgccaagtactactaggcaggtgcccgctttgccaagtgacacgctgttctcaagattggccctaatgagacatcacagcttgccatcgacctgaacgctcatggtctagatcgctacgccatcatctgacaagagaatggactggtgccaattgatgagcctgagatccttgttgatgaccctcatgacattgatcgctgcgcttacgtcactgagaccgtccttgctgcctgctacaaggtgctcaacgagcacatgntccctcctggagggtaccctcctgtagnccaacatggtgactccaggctc

SEQ ID NO: 117252 - DNA, 432 bp, Zea mays
  Clone ID: MRT4577_38421C.1
atggcgtgcttcacatttgggacaatcatcaccgattgctggccaaggtacatcgaggaaagaacagtcacgccaacaacaccggtgggcaaccgctacatcctgctgctcgtcgatgatgccacccgttttatgtgggctgtgttgctgccatccaaggacgcagcggcagaagcaatcaagaaaatcaaggcggcagcagaggtggaaagtgggcgcaagttgaaggtcctgcgcaccgacaatggcggggaattcaccgtcgcggagttcgccgcatactgcgccaatgaaggagtcaatcagcagaagattgaatccttcaaggcaaagatgaagcaaacctttgaaatgagtgatttgggtcttctgtctttctatcttggaattgaggttgtaatccagccactacacctatggaagaaaggctga

SEQ ID NO: 117253 - DNA, 337 bp, Zea mays
  Clone ID: MRT4577_38422C.1
attcctcccaacaccacctcgcctgcgatctccgtagcctccgtcgcgtcgagcatcgatcatgtcgggctactgcggaaagtacaaggatgagctcatcaagaatgctgcctacattggcacccctggcaagggtatccttgctgctgatgagtccactggcaccattggcaagcgcctttccagcatcaatgtcgagaacgttgaggagaaccggcgtgcccttcgcgaggctctattctgctgccctggtgctcttcagtacatataagcgggtgaacctcttccaggagaccctgtaccaaaacaccaaggatggcgagccctttgttgatgt

SEQ ID NO: 117254 - DNA, 553 bp, Zea mays
  unsure (1)..(553): unsure at all n locations
  Clone ID: MRT4577_38423C.1
gcctgccttaaccattcctccaacacacctcgccgcgatctccgtagcctccgtcgcgtcgagcatggatcatgttggcctactgcggaaagacaaagatgagctcatcaagaatgctggctacattggcacccctggcaagggtatacttgctgctgatgagcccactggcaccattggcaagcgcctttccagcatcaatgtcgagaacgttgaagagaaccgccgagccctccgagagctcctattctgctggcctggagctctccagaacatcagcggggtgatcctcttcgaggagaccctgtaccaaaagaccaaagatgggaagccttttgttgatgtcctcaaggagggaggcgtcctccctggcatcaacgttgacaagggcaccattgatgttgctggcactgataatgggaccaccacccaaggccatgacgaccttggtaagcgctgcgccaagtactacaaggcangtgcccgctctgccaagtggcgcgctgntctcaagaatggccctaatgagccatcacagattgccatagacctg

SEQ ID NO: 117255 - DNA, 869 bp, Zea mays
  Clone ID: MRT4577_38424C.1
tgctgcctacatggcacccccggcgagggtatccttgctgctgatgagtccactggcaccatggcaagcgcctttccagcatcaatgtcgagaacgttgaggagaaccgccgtgccctccgtgagctcctattctgctgccctggtgctctccagtacatcagcggtgtgatcctcttcgaggagaccctgtaccagaagaccaaggatggcaagccttttgttgatgtcctcaaggagggaggcgtcctccctggcatcaagcaggggcggagccagggggttttattggggtcagctgacccctataaaattttaaaaatactatacaaatatactgttagctagtgtatttagatgatgatcagtagaatagaccccaataactttgttttctggcttcgcccctggcatcaaggttgacaagggcaccattgaggttgttggcactgataaggagaccaccacccaaggccatgacgaccttggcaagcgttgcgccaagtactacgaggcaggtgcccgctttgccaagtggcgcgctgttctcaagattggccctaatgagccatcacagcttgccatcggcctgaacgctcacggtctggctcgctatgccatcatctgccaggagaatggtctggtgccaattgttgagcctgagatccttgttgatggccctcatgacattgatcgctgcgcttacgtcactgagaccgtccttggctgcctggtaccaagggcctaaacgggcacaatgttcctcttgaaggtacccttcttaagcccaacattgtggcctccagcttccaattcaaaaaggggaaccccgaagggaatggttaatacacaccgcgcaaccttcaaaag

SEQ ID NO: 117256 - DNA, 1530 bp, Zea mays
  Clone ID: MRT4577_38425C.1
gcaaggactgtctcagtgacgtaagcgcagcgatcaatgtcatgagggccatcaacaaggatctcaggctcaacaattggcaccagaccgttctcctggcagatgatggcgtagcgagccagaccctgagcattcaggtcaatggcaagctgtgacggctcgttggggccaatcttgagaacagcacgccacttggcaaagcgggcaccggcctcgtagtacttagcgcagcgctcgccgaggtcatcgtggccctgggtggtggtctccttgtcggtgccaacaacctcaatggtgcccttgtcgaccttgatgccagggaggacggtctggtgccaattgttgagcctgagatccttgttgatggccctcatgacattgatcgctgcgcttacgtcactgagacagtccttgctgcctgctacaaggctctcaacgagcaccatgtcctcctggagggtaccctcctgaagcccaacatggtgactcctggctccgactctaagaaggtgacacctgaggtgatcgcccagtacaccgtccgtaccctccagaggaccgtccctgctgctgtgcctgctgttgtcttcctctctggtggacagagcgaggaggaggccaccctgaatctcaatgccatgaacaagctcagcaccaagaagccatgggccctgtccttctccttcggccgtgccctccaggcgagtaccctcaaagcctgggctggcaaggtggagaacgtggagaaggctagagcggccttcctcgccaggtgcaaggccaactccgaggctaccctcggcacctacaagggtgatgctgccgccgacaccgagagccttcacgtcaaggactacaagtattgagttgcttctctttgcgatcccgttgttttggaactcctgcctacgagctaggttgcggagtgtggtttgctcgttagagcttattttcggacatccaaaaaacatgcttcctatgtgggatgatggttatctttatatttgtatgttaattagtctctttgctgttaaatttcgtgtaagttggtcctgccgatggagaatcgagcagctccctttttttgttctatcaactatgctgtaattctggctatgtatcggcaaaaacaattctatatgctgagttggagtcggcaaaaattcatatatgctgagttggagacagcaaaaaaaaaaaaaaaaaaaaaaaacaaaaaaaaaaaaaaaaaaaaccaaaaaaaaaaaaaaaaaaaaaaaaaaaaaaaaaaaaaaaaaaaaaaaaaaattttaaaaaaaaaaaaaaaaaaaaaaaaaaaaaagggcccctgggccggaacccccctagggggaaattccaaccccctggggggccgtttttaggggaccccagcctgggacccaacttggggggaaaaaagggcaaaacgtgttccctggggaaaatggtttcccgttcaaaattccacaaaaaaaaaaacccgaaagcaaaaagggaaaacccggggggccctaagggggggcccaaccc

SEQ ID NO: 117257 - DNA, 1430 bp, Zea mays
  Clone ID: MRT4577_38426C.1
aaaaaaaaaagccgcctccctccctccctcccctgcctgccaacccccaatctcccgtcgcagccctcgaatctcccccgagcatcgaccatgtcggcctactgcggcaagtacaaggatgagctcatcaagaacgctgcctacattggcacccctggcaagggtatcctcgctgctgatgagtccaccggcaccatcggcaagcgcttcgccagcatcaatgttgagaacgttgaggacaaccgccgtgccctccgtgagctcctcttctgcacccctggtgccctccagtacctcagcggtgtgatcctcttcgaggagaccctgtaccagagcaccaagggtggcaagcccttcgtcgacatcctcaaggcgggcaatgtcctccccggaatcaaggtggacaagggtaccatcgagcttgctggaaccaacggtgagaccaccacccagggctttgatgaccttggcaagcgctgcgccaagtactatgaggctggtgcccgcttcgccaagtggcgtgcagtccttaagatcggcgccaccgagccatcacagctctccatcgaccagaacgctcagggtctggctcgctatgccatcatctgccaggagaatgggctggtgcccattgttgagcctgagatccttgttgatggacctcatgacattgaccgctgtgcttacgtgactgagatcgtccttgctgcctgctacaaggcccctcaacgaccagcatgtcctccttgagggcaccctcctgaagcccaacatggtcacccctggatccgacgccaagaaggtggcccctgaggtgattgctgagtacaccgtccgcaccctccagaggaccgtccctgctgccgtccccgccattgtcttcctctccggtggacagagtgaggaggaggcgaccctgaacctgaacgccatgaacaagctccagaccaagaagccctggaacctgtccttctccttcgggcgtgccctccagcagagcaccctcaaggcctggtccggcaagacggagaacgaggagaaggccaggacggcgttcctggtgaggtgcaaggccaactccgaggccacccttggcacctacaagggcgacgccacccttggcgagggcgcctctgagagcctccacgtcaaggactacaagtactgatctatctgccttcggagctgtggcccgtttgggcgtcccgcttaccagtatcattgtttggttttctgagtcctgatatatccttggatatcgaacatcgtttttaataatatggaacttgtgttttcataataccgtagtagtttctttttggagttgaagtaccctggaaatcgggtgctgcgtatcgtatattggagcaggtttttgttccatggtcctgtaattttcctgctcatacaatgttcaaacctcatatgcg

SEQ ID NO: 117258 - DNA, 2896 bp, Zea mays
  Clone ID: MRT4577_38427C.1
cctcgatctactctcactgggattcttaacgtagtaaacaatgggcaacggcatatgctgcagcagcagcagcacagatgtagcaaaagtgttacagcaaaaaaaaaagaaaaaaagaagggaaacagcactgtacaattcattcgttcttcctcctcggtcccatgactcgattcttccttccttcctccagtcgcttgaatacttgatgatgccacactgctcgatccagcagtccagcgagcctccctcgatcgctccggcgctgtacatgctgctcgcgcgcatgcactgcaaacgatggcggggttcctctctatctcggtctcagtcaggtccatgtccaggccttggggggggtccatctttgctgcactagctgtgtaggggagcgtgctacccagccgccggggaccgatggggactgccggcccggccggtgcttaagagagcaacagtaagcgcagcgatcaacatatccagccttggcagatggcagatgatggcgtagcgagccagaccctgagcattcaggtcaatggcaagctgtgacggctcgttggggccatcttgagaacagcacgccactggcaaagcgggcaccggcctcgtagtacttagcgcagcgcttgccgaggtcatcgtggccctgggtggtggtctccttgtcggtgccaacaacctcgtgcccttgtcgaccttgatgccagggaggacgcctccctccttgaggacatcgacaaaaggcttgccatccttggtcttctggtagagggtctcctcgaagaggatcacaccgctgatgtactggagggcaccagggcagcagaacaggagctcacggagagcccgccggttctcctccacgttctcgacattgatgctggaaaggcgcttgccaatggtgccagttgactcatcagcagcaaggatacccttgccaggggtgccgatgtaggcagcattcttgatgagctcatccgcgtacttgccgcagtaggccgacatgatcgatgctcggcggaggcttcgaggatcgcaggatgtgttttggggaggaatggtaaacaaggaagacggggaattttttttttttttttttttgacaagctaataaatcatagttctattatataatacatgagaagagtgatggcttattgttgtatatttacaattttgaaacaaccctgaaagatcggttgactactattcagagccatcagaggccgccgcctcctcctcctcgtcgtcgtcctcgtcctcatcgtctgatgatgatgatacaccttcaactgcagcccatagcactagatcaagtaatcctgtgttgtcctcatggtcctctgatgaaccttcttcagctgactgttgcctattttctgataccagtatgtgttggatcaacaggtctcgtatgccaaagcgccagagcttggctcttctcttgcgaggtctcaacatgtaacgtaacgcaactatgcgagctgaactggcccccctgagaaaaaggtggcgcggctcctttttaacgggtgaactggccctgcagctcgccggcggagcaggtgcagctggcgcggccgtcgttcagtaccttgacctgcttctgaagatccttgatgtagtccacggccagatccagcatgtcggcagtgttggtttgcttttccatgttgggcacgagctcctgcagcttccgtatccgctcgctgatcttcgtcctcctcacccgctcggcgatgctgcgcgggtgggtggcgcacccgcgcttggcgcggatcttgcaggggacggcgtcctggaactggaggaacttctcgatcgccgccatctccgccgaggccgccctgccgcccttgttctttccgctgggcaggctgagctgcggcgccagcggctgctgcagcgcggggccggagtcgcgggggcgcttcgcgccggacgtcggcgacggcgacgcctcgtccggccaggcgccggacgcgaggccgcccatcgggtaccccgggatgccgctgtacccacgcgccgcgccgctggcgttgctgccggccgcctcggggctgccgctgccgccgcctccgtcgagctcctcgctgcccacctccgagatctgcgacatcaccgacccctgccgggacgggaagctcagctgccccttgagccgcgcgtcgctgacgccgttcctgaacccgccgccgcccatgcccacccggagcatgctcccgtacccgttgtccatgttcaagtggttgaggaagccggcgggggagctgctctggcggatcaggctgttgttaccagcgccaacggctgcaccgtgctccgtgccgccggagctgacgttgcggtacagcccctccatggcggccatctgctgctcctgctgcgactggtacatgagctgctgctgctgtgaggcggccatggacgcgacggcagcttcgtccatgaagtgagcggcggcggcggggcggggaggcttgcagtcgcgggtctcggagtggtgcccggcgagaaagcgcgcgaggacgttgtccgcggcggcgtggtccggtggtccgtgccctgcgccgccagccgcggggaagtcctgatcaccaccacacatcacctcgccgagcagcgtgctcggcgctgacctgtaccgcagcagtcccggggagcccatctgctgctgcggtggcgtcctggtcggctgcggcagggctgctggcaggttcaggtccttcaacggcgatcaccacccccaacaccccggaacacaagggattagagatggcaatggggccccgatccccgaatccccgcggggaattcctccattaggggatggggtgggggaaaggttctcccccccgcggggatgtaaacggggaaaaatccttccccg

SEQ ID NO: 117259 - DNA, 1943 bp, Zea mays
  unsure (1)..(1943): unsure at all n locations
  Clone ID: MRT4577_38428C.1
actatgatgatgttaaaggttatgacactgtcccaaatgaatctcgcacttactatggtgatgctaagggtcaaaagaatgcaccaagagtagttcaaggaagaggctccaagcattaccaaccacgcttgaagaatataactgatgtatcttcagtgcaaaataccaaatctctgactcttgaagacacttcgtcaaatgcaaacttgggaaaagaccgaactcaacggagatgttcgcgacttgaacaagtccttcctactaagcaggctgttgcatcaaacttgaattcagcttcaccaccattttatcctgcaaggtcatccaatcaagagttcccagttactcaaggagggaatgcacaacttagtaataacctactgagagggaaggcctttgtacagtcagttggacatgttgaagctgcattgaatggcatgaataaaccttcactgcttccagcatcatcatcatcaaatggtccatttcctttagccactgatcaagtcaatagagactatgggcagcctgcacatccaattgttcaacaaaactcagttcaatcccctacacaatctgcacccaggatgcctgcccagatgtttggtgcaaaattcagcaatagcagtaaaatatcaccagcacaacctacaactattctgggtgatgacactgaaatttcttcacctagtggatcaaacaaatatgattctcggttaacaattaaggggcaacctgatgaccaaggaacagagcattcttcgtttctccgtggtggggctcatgttcttggggctacaggtgcaatgggcattaaacttggtgatcaaaatttccatggtaccccagcattgctgccagttatgcagtttggaggtccgcgaccagttgggcgcggtgttccttcaatcggtatggctctgccaggatttgtgtctcaacaacaacttggtctcaataataattctgagatgacctggctaccaatattgactggtgcctctggagctctaggagcaccttatggttccccttatatagccatggatggaagttattactctcgacaatctgaacaagcatcttcatcagtttctattagagaacctagtgcaaataatgcttcttctctgttgaagtcccaagaaataacagaggttgcaagtgatgaaataactcaacgccaaaataagcctcgtcgatactcggagatgaactttggccaatgaacatagctgtgaccagtgaggattcattggagcttaggacccaagtaagacctgtgcaagagacccaagccttactaagtccttgcaacatctcactgtctgatgtctagcactttcggctatcttgtaactcccaaaatgccaggcttgacagttgaaggtgttgcaaccatatcagtatgatcatttgctgtgattattctgaagggctagtgttgttacactatgaggtgagatttacatggtactccacttcaccgcaatatcagacgtcgtatcagcatactgcatatgggggaggtcttgatggaaatcgtgagaggtctccgtgctgtaaagctcgtgttccatcgtacatcagtctgtgtacttttgggtgtgcgcttgctttgcttctgtgcctctgccttcagctcggtggcactcggctgacatgcatccgttatatttacttgttatatctgatccgatgtattgaagatggttagtagagcatgatttacggtggtgaatcttgctttggtcgtgttgacaaatcagggccttgcacgtaaaagaaccggtgcatccgagacgccagtgcacacagctcatggcgctgccgcaaaatccttgtctatttgcagagtgatgtgtgtaccgtgggcattacaaaataattgcagcctcttttggacggcggtaatattaagtttagcctgcnnnnnnnncgaa

SEQ ID NO: 117260 - DNA, 105 bp, Zea mays
  Clone ID: MRT4577_38429C.1
ttcacgggtccggtgcgcccattccttttatcaagctccaccttcttttccagggcatgcaccaaattgcgcagccttttgatgaggggactcaacgcttggacg

SEQ ID NO: 117261 - DNA, 219 bp, Zea mays
  Clone ID: MRT4577_3842C.1
tagctatagtgtgttcaaacacccgcttagtttcaatatatgtatgccggaaatctattagtgtgccaaggtgttatgatggaattaatggtgaaagatgttctgctactaaacttcaaagctgtagacgaacttgaaattagcttaatatccccggatatagccatataaagattatatgtgggagactccggatataactcgtactcaactcttttt

SEQ ID NO: 117262 - DNA, 207 bp, Zea mays
  Clone ID: MRT4577_38430C.1
tttttttttttttttgagcactcaaaaaaagatggattgatcttttacaaaaaaacatggacctcattaaaattaacattgttcaaacctgacaaataaaccaaggcaatgtttaactacattgggccacaagacatgtttacacacatttaacttacatgactaatgtcaagggcctacattttgctacatacaaactgtataggt

SEQ ID NO: 117263 - DNA, 308 bp, Zea mays
  Clone ID: MRT4577_38431C.1
aaaaaggccaaccttttttttttattaagggaagacaatgggcttacaaaacaactttttgggaggggaggctttttttcttttactacataacattccccctcctactattccacactttactactttacaatactaccacatttttttaactccccctttctaatttaaaaagccccggggcccttaccccctggccttgcttttgattcccccccccccccccttggggcttccctttgtgctgccccctattggcctgcccttgctcctgccgcccccccccttgcccccccccgttccggttc

SEQ ID NO: 117264 - DNA, 845 bp, Zea mays
  unsure (1)..(845): unsure at all n locations
  Clone ID: MRT4577_38432C.1
aacaccgacaccatcaattcatctcctttccttggcccgatcgtctcctaccacatgcgcatggtagacctacatatacgcctcaccggcgtgttctgacctgcgctagcaccaggcccgcttgaccagtccaccgagaaatcaacaagaacagcctcttcttcttcttcttcttcttcttcttcttcttcttcttagcaggattttgctatttgtttctggctttggtccagaagaatggagcgcggcgagtgaagcgggcatcgattgagtctactgaattagaaatcagctggatcgagggagggaatcaattgtcaccgatggaggtcatgactggaaaaggcggcgccaagcccgtccccaactatcttcggccatcgaccgggtcgtgccacgatgcgtgcaagcacggcggccatcacgcgttcgtggagaaacaggaagctccaaggacccaacccaaaccccggaagaagcagcagccatcagcttcggatgaccagaaccaaaagagaaggctggtcaaggtacggtcggtgtcacgtaggcgtgtcgtagatttcagcaaacccgacaaggccgatacgccggccggtgggagcgagattgttgttgagtggaaggacatcgtggcctatgacgcagtgccagctcctgctcctgccgatggaccatctcatcaacaacctgatgggaggaagaagaagagggatgtgatgaagggngaaacaccatttgtcaagaccacccatccggagactcctggtcagaancccaacgaatcactgaacaagaggctggctaagaacgtcaggtcgacgctcaccgggaagggctccatc

SEQ ID NO: 117265 - DNA, 867 bp, Zea mays
  Clone ID: MRT4577_38433C.1
ctttttccagtactaattcaacctgaaattatactctattcaattttttttgttcttaggaaatctactgatgatggtatatcatcctgggactggaaattaaagggtgatcgttcaacgtatcatgctttgtttcctcgagcatggactgtttatgatggcgagccagatcctgaactgaaagtatcctgccgtcaaatatctccatttattccccatgattaccaggagagcagccttcctacctctgtttttgtatacactctagtgaatactggaaaggaaagagcaaaagttagcctattgatgacttgggcgaattctataggaggactttcacatcattctggggatcatgtaaatgagccattcgtagggaaaaatggagtttccggtgttcttctacatcacaagacagccaataataatcctcctgtaacatttgcaattgcggcatgtgaaaatcaaaatgtaaatgtcacagtattgcctgtttttgggctttctggagaaagttctgttactgctaggggaatgtggggcacaatggttcaggtgattttacttttttcctttctttgtttttccctgcatgtaattccgtgttttagatgagattattgtatgcatagaaggcaaatcttctgtggaactgttttgaaataaccaaatgtttgccattttgatgactgagggtgcatatcataccatctgaatgtttaattgtttaaaggatggttcctttgatcgagataatctcaatactggtcctagcatgccttctttgctgggggatacaatttgtgcagcagtttctgcttccaccttggttgaaccacatgaagatgtgcagttgtatttgcattg

SEQ ID NO: 117266 - DNA, 499 bp, Zea mays
  Clone ID: MRT4577_38434C.1
ccccgaatcaatcggaaagatccccttggggaattttaaaaaaaaaaaacaagggggggcataaacgacgggggggggggggccgaccgaccgaccgaccacgagcttaaaggggtctaattaaaagggcttcagacagaccccccctacatccataaagttctaataaaaaggggctaagcaaaacgaccacgagctttaggccccctcgcccgggggggccggctccagtaggggcgcctccgcctcctgaacctccttttccgggtggggccccttttgggacttggggtacaccctcataaacgggcccccccccccgtactttgggggggggggctcgtagggcgacccgtcaaacatgccccaaaagtccttttggttcagctcccacaccccgtactgggggtgggagctggggtttttgataagccactgttccagccggggcacagcctccgggccgttaaacccctcccccctaaacaccgccccgggg

SEQ ID NO: 117267 - DNA, 3204 bp, Zea mays
  Clone ID: MRT4577_38435C.1
ccggccgggaattgccaacagcccaccaccaccacggccagtctcgctttctagtcgcttccgcgtcctccactcgccgcgctccccatcccggagcgcggcacaccgtagccccgcgccgcagcggctggccggcatgaagagcatgtggaagcagagcggcggcctggtgtgcgccgacgccggccccctcagccctctcggaggccgctcgcggcgccgcacgaggctgacgctgtacgcggtcgcctttgccttcgccgcgttcaccgcctacgtcgccttcgcctcgcctccctccgcgggcgccggcgcctcgtggttcggcggagtgtacgcgtccacggcgccgtaccgctcgcagatttccagcctcttctcgtccatcttgcccgccgactcgcccgccccctcgccagagccgctgcgcgtcacgttcggcggatcgggcggaggcggtggccaggtgacccgtgatgcgagcactgtgcaagttgggagcgcggcggaaagcatcagctctgccaaggctgggtctagtaagcagctgggaactggaggcggcgctccgatcggcaatgcgggcgctcggagtgtacctccggcagtccatttgccaggcactggaattggcggaggcgcagctccaacgaacagttccgcctcaggtgtcggtgctccgaacgacgcggtggatctgaataaacgaagcgacggaggcgtttctacagaaggcggcagtggatccccggccagtagttcagccgtgcatggaaccgccgcggaggtccgcgagaatagcgttaatgggtctaataagcagtcgggaaatggaagcggagccctgagcaatgctgctaccggacatggcagcactgtcagagctgaggccaaagttgcaagtgatgtttcaaccaatagttctgctgggagtggtagcttggggaaggtagatttgagcaccggatcttctaataatctggcagggagtggaagtgtcgtttcaggcagtggttcggatgctggaaatagaagcactgtaaagcctcatcctggagatgctgttggggcagggagcagggggtcttctggaaacggcacaggtaccatggttgatctgaataaaggttcagatgcccagccaggaaatcgaaatggagatgcaagccatcaatcagatgtaagttctggtttcgagaagagtaaaggtgcaaaggttgtgacgacagatgctcaaccagacagtggaagtggagatgcaagccataaatcacctggaagttctagtccggcaaagagcattgcaggagatggcgaagttgagggtagtaagagaaacgtgagtgttgttccaactgttaatcaaactgggagtccggcatcggtagggcagaaagatgttggttctcccaggaacaacaacacagttggagcatcccccccagtgaagaacccggaacagacctggagccaagttgctcccggcgggagcagtggtacagtgaataatccgaaaggaaatgctgctgctcagggcagtgctggttcatcagagaaccattcggcccaagtaaactcctcaaaatctggaaataacagcaagggtagcaggtcatcaataacacaggatggtggttctggtggaaataagaaaggtgattggtacaaggaaatggctagttgcgatatgtttagtgggaattgggttagggatgactcataccctctctaccctgagggatcgtgtcctcacattgatgagcccttcgactgctacctcaacggtcggcgagatctagcttaccagaagctccgctggcaacccagtggatgcagtatcccaagattgaacccaaccgatatgttggagaggctgagaggaaaaagactggtgttcgttggtgattcgctcaataggaacatgtgggaatcccttgtgtgtattttgagaaattctgtcaaagacaagaggaaggtttttgaggcatctggcaggcgcgagtttaagacggaaggctcatactctttccttttcacggactataactgcagcgtggagttcttccgctccccattcctagtccaggaatgggagatgcaagtgagcagtggaaagaaaaaggaaactctcaggcttgatctggtagagcaatcgtcattgaagtacaaggatgcagactttatcattttcaatacggggcattggtggacacatgagaaaactgctcttgggaaggactactatcaagaaggtaaccatgtgtataatgagctgaatgtcatggatgcctttcataaagctcttctcacctggtccaagtggatcgatgccaatgttaaccccagaaaaactctggtgttattcagaggctactcagcatctcatttcagtggcggacaatggaattcaggcggtggctgtgacaaggagagtaaaccaataaccaacgatcagtacctttcaacctacccaccaaagatgagcatcctggaggacgtgatccacaagatgaaaactccggtcgtttacttgaacataacgagaatggctgactacagaaaggatgcacacccttccatctaccgcaagcagaacctgactgacgaggagaggagatcgcccgaaagatttcaggactgcagccactggtgcctccctggagtaccagattcctggaatgaactggtttatgctcaacttctgatcaagcagcatcaaatgcgccaacaataaaggcaactgcggtttttttgctgtgtgcctgtatatgatctgttgttttctaggataaatggataatagtcaacacggtggtcgaagtaaagtcgacatgagaccgaggattttcttaaatcccggcttgttcgctgcggctttaatccggccgtggcttctacagtattttgtctctctatagattgcaactgcggctgccagccagctgatgaattcctcagttagggctacctcccaatacccacataaattcctcagtagaggtttctgggacatcatattgtaaagttcatgtctatcggtaatctgaaataatatgaagaatagtatagatgtgatgatataaaaaaaaaaaaaaaaaagctgattctctacctgctctcatgtatgtttcggataatcaaggttcctatggtatagaaaaaaaaaaaaaaaaaaaaaaaacaccccgagggggggtcccggta

SEQ ID NO: 117268 - DNA, 360 bp, Zea mays
  Clone ID: MRT4577_38436C.1
agcgagggccttttggagaagtgatgtcgtgcgacaacaagagtcgggtaagcttgcttatcgttacacatagtgctgctggtcctctgccgacctctgctctatgcgcctccgtccactagaaagaccatcgatgtggcgcggcagtgtcgactgttcaataggaagaaccaggcacaactcctaatggccgttgctcataggcacacctgagagattgcttggtaggtaatttaacgttcttgagagctctccacggctgtcgcagggagtacaggagacaagtgctgcaccgctgctcaacgatgctcggatgagggaattagtactgcccttatttgtgtgtcaagcatagtactg

SEQ ID NO: 117269 - DNA, 498 bp, Zea mays
  Clone ID: MRT4577_38437C.1
cgagcggcggaaactctagtaggagagcaaggacgcaagaagtcctccacatggctctggtctcctcctacttgaacgtcatgtggctgcctgtttgggtggttgtgacccccctctcccttctgtggaaggatcagctggccacctgatcctccccccaatgtgcaacatatccgacgggaatcgagagacgggggcgagacttctctttacctcaagaggcccgaccggacctggatctcgacaccaggcccgctcaagtccccctttgcatccgctttgctgcaagccggtgcctaccgcatcgctgacgagtgatccccgctgatttcaggccggcacatctataagacattctcagcatctaatcaacctctgatgatgaattatattgcaaaatagctcccctggtgctcctgtctaccaaacaatattttttccatggtgattttgtggaaccaaacctcccaacagatatgtgctgctacgtgctccttc

SEQ ID NO: 117270 - DNA, 487 bp, Zea mays
  unsure (1)..(487): unsure at all n locations
  Clone ID: MRT4577_38438C.1
tgnaaaacaaatttaccgcgngatgggttgcaaactctcaccaacaacctgtgttacacgtatgctaggtgcactcgctcagtatcaatcgttcctcctgcatattatgctcacctggcagccttccgagctcgcttctacatggagccggataccactgacagtgggtctatggcgagtggtgctacgacaagccgtgccccaggaggggcacgcaacaccagggctggtgttggaaatgttgccgtgaggccattaccggccctcaaggaaaacgtgaagcgtgtcatgttctattgctaagattgacgctgtgagcaagcaattatcgggctttacctaagacttttgagtatttttccaagtacctgcactgttttggtgatggtggcacactgttatgcaccactgaagttaataatcagagctgtgaattggagctaccttttatatatctggtattgtaaactggtttgcggtaaanaaa

SEQ ID NO: 117271 - DNA, 238 bp, Zea mays
  Clone ID: MRT4577_38439C.1
cagcagaccagcttcccaacagagataagatttgggctaggaacgtgagagagctctcctacgacatagaggttagtattgacgcattcatggtgcagtccaagggtaggaagctggttaaacaatatggtctccagaaagtcattggtatgtgtctcgactggttgttgcagcccaagattcgccataaaatggctactgaaataggacgatcaaaagcgcatcgttgaagtgcacg

SEQ ID NO: 117272 - DNA, 564 bp, Zea mays
  Clone ID: MRT4577_3843C.1
tcgagtcttctcccgcccgggctccatggccacgcacggcaacatcaggtcctccacatccccctcagccgcaacgtaggcgggcgcgtgtccgaccacgggctcgcgcgcctcgtcggcgtcgtggggtaccgcgcgcccgaggtcgtgacggacccgcgccggacgtcgcaaaaggccgacttgtacggtttcggcgtgctgctcctggagctgctgacggggaaggcgccgacgcacgcggtgctgcagcacgacgagggcgtggacctaccgtggtggggcgcgctccgtcgtgagaggggagtggacgtccgaggtgttcgacgcggagctgctcagtcacctgggcgccgaggaggagatggtggaggtgttgcggctggccatggactgcaccgagcccaccacgaaccaacggcctgcgatgccggaggtcgtgcagtggcgcgcatcgaggggctcggcggcacggcgtccgcgtcgaccgcgcggtccgcccggagttcgtccatggacgaggcagacgaccggccgctcatgagcaagcgaatatgacaacca

SEQ ID NO: 117273 - DNA, 157 bp, Zea mays
  Clone ID: MRT4577_38440C.1
aggcgcctgccagaccgcctcctcttccccgcctccgtgtgcccaaggccaggccaacagtttttaggtggaattggtacatgctaacaaccactgccttatagctagtggcagtcacgagtcactcctgaatgtaggccgaaattgctctttacta

SEQ ID NO: 117274 - DNA, 342 bp, Zea mays
  Clone ID: MRT4577_38441C.1
cgttgctgtcggttgctgttggcgtccatccgaggaagaaacagagagcaggggagggatgagatcaccatgggagcagcagaggtggccggccaccagcagagagggggctgggcgagctgggactgggcgccgagcatctaggaggtggggaggagatgggaaagggctaggcgagatccatggcgggtcatgcgcgatcgtgtggagaggagcaaggagggcgccgtacaggggcagggcgagctcgccagggaggagaggggctgggagtggcgtgggaagggacctaggggatggcttgcgtgagggagatttgggcgacagcaacggaattcgagc

SEQ ID NO: 117275 - DNA, 314 bp, Zea mays
  Clone ID: MRT4577_38442C.1
aaaaaaaaaaaataacaaaaatacacaaaattaaacttagacaacaaacaaaaaaacactatgctaagtcaaacatgcgcagacaagcacagtcaaaagacaaactatgcaaaaatgaactggccccgttgttccttccaacatcaccaacttgagctccttcgacaatagcaaaactcatagcacatccacttgccatgacgctacctcataatccaaccgagacacctggaaactcacgagcttcatactcaaactcaacatgctcgtatgaccactcatcttcacaggcctattcccggaaaacttcacca

SEQ ID NO: 117276 - DNA, 337 bp, Zea mays
  Clone ID: MRT4577_38443C.1
agactggggaacaaaaattttttttaacctttggagcacctcaatgcatgagccatggaaagggggggcgcctgccgcaaaacgaaacgaagcatggtgagggagctgccacacattgaaaagggggtagcgccagcgacctgagcccagtggagatcaaatgcaattaaccgcgggtggagatcgataagggggaaggattattgttggtgccccgcgagggattttttcgaacactttggcagcggggcacccggcctgccccaaattttgttggtcacttttcccgcgatcgactggaaaggggtgctagtacattttgtgggcctatttggtc

SEQ ID NO: 117277 - DNA, 1412 bp, Zea mays
  Clone ID: MRT4577_38444C.1
acgccactctccctttatcttccaccgccgcccctctccctggcatcttcccaccgccgctcctctccctagcatcttcccaccgccgcacgccctctctctggtgctgcagctcgcccccccctctgctcaccatctcctccctcgttcccatggcgccctccccttcttggtggccgacgcccctccctccatggagctcgcctctgccatgaccgccctctgcccccttccttgctgttcttattgcagcccctctccatgccaagctcgccctccttctgtgcccagccctagctcgccccagcccctctccctggctgcccttgctctgttttcccccaaccctagccgagctcgcccctgccctaagttctcaaggcagcccctctgtgttttccatggccggcaccctccccatcttttgtagattggaagaaaggattcctgtttgtgtgagaagaagcaaatcccagcataacgcatgctaggtgttcgacgaaatgttcgaattgggattgtcgttgatactgtggatctgagtcgtgctttgtattggttggaatggctgctacactagcttcagtttgttcagtcccattgacttcagtactgcttctctttgagctgacaaaggattacaggattttgcttcctctcatgtgaacaagggagaatattgtgaactgaaggtcatgtatcagcgaaaagcagctttcctcttgtagcaattgtgcactgaaaaactacagtgcccttatgacaccacaatagtaagcaagactacaggacatctatgcgaaatgcagctagccagctacactgatgtagagatcattcaggcagtttaacctctatactgtatcattttaatttaaccagctatttcactactgccttttatagtgtttaggttataaccaatgacatctattagagtttataatttaaactcattgattgaaaaacatttagttgtgatgtcactaaaaggtgaaataaatttcttatagtgtgcattattatcccttttttcatttctaagtaaaattcttaacaacttctgtataataatgattggatttatgactgttgtttgcactaacatctggtctaatttcattattcttgaacttcttttgtgcccatgcttcattacacatgtaggtcgctcgaatgcaactgtctggcctagcatccaatcgacctcaaccactcttcaccccacgagtgtgtggagctgatgaacttgtcgatgtgtactgattttttctcatatgtttctagccatgctttaattgattctttgtcaaattgtgcaacttgtgcaaaccatatgattacttggtattattgctttgatatggacatccagaaaaatattcaacttcgaatatctttggctttagtga

SEQ ID NO: 117278 - DNA, 522 bp, Zea mays
  unsure (1)..(522): unsure at all n locations
  Clone ID: MRT4577_38445C.1
gtacgcgagaagcccacacggtcgcctgtccacataccagcattcggcacgcgggctcaaggctctggctcgcgcacccctggtccctgttccgcaccgcaccgcacacctagacgcacctccagctgcagcgcgccatacttgaccgcatcagcatggcatccacggggacgacggcggcggcggcggcggtggcggtgccggaggtgaccctgcggtcgggcaacgggaagccgatgccgatggtgggcatgggcacggcgtcgttccccgtggtgcacgaggccgtcagggacgccgtgctggcggccatcgaggtggggttccgccacttcgacacggccttcctgtacggcaccgagaagccgctcggcgacgccgtggccgaggcgctgcggcgcggcctcctgcggtcccgggaggagctcttcgtcacgtccaagctgtggtgctcgcagacccacgcggacctngtgctggcgtgcctgggggaaactctgtagaacctgcggatggagtgcg

SEQ ID NO: 117279 - DNA, 320 bp, Zea mays
  Clone ID: MRT4577_38446C.1
ttctttgttcaaccgttcaaagttgaatgtatcaacaagaaataatgtccgtgcatatacaaaagatggtgtaaacctacccacaccaaagtataattgtagcatattggaggatatgtttttggaggaaaatgcagactttattagtggcacctttgctaactggaaagctttgcaagaggccttggtgttggtaaaggtttgggcacgtcaaagaacttcaatatacacacatgattgtctcaatggatacttaatttctgccatccttgtgtttcttactgtggactctggaggaagcatgattactagatcaatga

SEQ ID NO: 117280 - DNA, 1609 bp, Zea mays
  Clone ID: MRT4577_38447C.1
ccggccgggaagatcagatccccctttcgctggtttctttccccttggccaagcccaaaccgtctttaaatacacccgtcgtcgtccgcatcccccgcctgccttaaccattcctcccaacaccacctcgcctgcgatctccgtagcctccgtcgcgtcgagcatcgatcatgtcggcctactgcggaaagtacaaggatgagctcatcaagaatgctgcctacattggcacccctggcaagggtatccttgctgctgatgagtccactggcaccattggcaagcgcctttccagcatcaatgtcgagaacgttgaggagaaccgccgtgccctccgtgagctcctattctgctgccctggtgctctccagtacatcagcggtgtgatcctcttcgaggagaccctgtaccagaagaccaaggatggcaagccttttgttgatgtcctcaaggagggaggcgtcctccctggcatcaaggttgacaagggcaccattgaggttgttggcactgataaggagaccaccacccaaggccatgacgaccttggcaagcgctgcgccaagtactacgaggccggtgcccgctttgccaagtggcgcgctgttctcaagattggccccaatgagccatcacagcttgccatcgacctgaacgctcagggtctggctcgctatgccatcatctgccaggagaatggtctggtgccaattgttgagcctgagatccttgttgatggccctcatgacattgatcgctgcgcttacgtcactgagaccgtccttgctgcctgctacaaggcgctcaacgagcaccatgtcctcctggagggtaccctcctgaagcccaacatggtgactccaggctccgactccaagaaggtgactcctgaggtgattgctgagtacaccgtccgtaccctccagaggaccgtacctgctgctgtgcctgctgttgtcttcctctctggtggacagagcgaggaggaggccacccgcaacctcaatgccatgaacaagctcagcaccaagaagccgtggtccctgtctttctccttcggccgtgccctccaggcgagcaccctcaaggcctgggctggcaaggtggagaacttggagaaggctagagctgccttcctcgccaggtgcaaggccaactctgaggctaccctcggcacctacaagggtgatgctgccgccgacaccgagagcctccacgtcaaggactacaagtactgagttgcttctctttgcgtgcccgttttggaactcctgcctacgagctaggttgcggagtgtggtttgctcgttagagcttattttcggacatccaaaaaacatgcttcctatgtgggatgatggttatctttatatttgtatgttaattagtctctttgctgttaaatttcgtgtaagttggtcctgccgatggagaatcgagcagccccctttttttgttctatcaactatgctgtaatgctggctatgtatcggcaaaaacaattctatatgctgagttggagtcggcaaaaattcatatatgctgagttggagacagcaacttgtttggatcaaaaaaaaaataaaaaaaaaaaaaaaaaaggccccta

SEQ ID NO: 117281 - DNA, 592 bp, Zea mays
  unsure (1)..(592): unsure at all n locations
  Clone ID: MRT4577_38448C.1
ccggcctggtcaacacgtgctcggccttggagggcgcgttcgtcgagggctacgcggcggagctcggccggaaggtatgggctgtcgggccgctctgcctcatcgacactgacgcggacacgatggcgggtagaggcaaccgtgcggcgatggatgccgagcacatcgtgtcctggctcgacgcgcgaccggcggcgtctgtgccttacatcaacttcggcagcatcgctcgcctgtccgcaacgcaggtcgccgagctggccgccggtttggaggcgtcgcaccgtccgttcatctggtctactaaagagaccgccggactggacgcggagtttgaggcccgtgtcaaggactacggtctcgtcatccgcgggtgggcgccgcagatgaccatcctatcgcacaccgccgtcggcggcttcttgacgcactgcgggtggaactcgacactggaggccatctccaacggtgtgccgctgctgacctggccgcacttcgccgaccagttcctgaacgaggcgctgnatcgtggacggncctcggcgtcggcgtccgcgtccgcgnccgcgccgacgngnaggncccggcctcg

SEQ ID NO: 117282 - DNA, 573 bp, Zea mays
  Clone ID: MRT4577_38449C.1
cccacgcgtccgcggacgcgtgggctgctgtccccgcctaggccccttgcgctcgctcagcagcccgtggccggacggctcggcggcgatgtcaaggagataggagcgggttggatacttcgatctgccacccgttgtcgctactgcagcgtcactcaatccgtgcgacaaggagattggggcggaggatggggacgagacccgcttccgtgtggtcgccgctgagtatcgtgcgctcatcttctgctgcagcaccaccctcgcgctgctcggatccgatccccacctgttcgcagctctggcatgtgccacgccgcgttgccgatcgatgagttacggagaatcatcaaaatcactcatgcgaaggatctcgaataaattaacgatggagcaagagatcacagtgatcaggaattggttcacttaatggaaactatgaataatcaggaattggttccagtatgtgacatgatcaaactgtgtgaatgataggttccggatgtcatgtctttgatatcattgttttggcgttttggcaatggttcagtaaatgcaatgccgacagcgtaattt

SEQ ID NO: 117283 - DNA, 110 bp, Zea mays
  Clone ID: MRT4577_3844C.1
attcggctcgagcaaccagtctattcctccaggcagtggcagcgatgttctcgctctgctctattaccccaacaggatgggcagagcccagaagagatcattttcagctc

SEQ ID NO: 117284 - DNA, 3537 bp, Zea mays
  Clone ID: MRT4577_38450C.1
cctcgaggccggccgggccggggtccgactctcggcaacggatatctcggctctcgcatcgatgaagaacgtagcaaaatgcgatacctggtgtgaattgcagaatcccgcgaaccatcgagtttttgaacgcaagttgcgcccgaagccttctggcggagggcacgtctgcctgggcgtcacgcagatcccattttctgtctggtttctttccccttggccaagcccaagcccaaacccgggaaccccgtctttaaaaagtacaccctcgactcgtcctccgcattccccgtttgccttgtttaccattcctccccaaaacacatcctgcgatcctcgaagcctccgccgagcatcgatcatgtcggcctactgcggcaagtacgcggatgagctcatcaagaatgctgcctacatcggcacccctggcaagggtatccttgctgctgatgagtcaactggcaccattggcaagcgcctttccagcatcaatgtcgagaacgtggaggagaaccggcgggctctccgtgagctcctgttctgctgccctggtgccctccagtacatcagcggtgtgatcctcttcgaggagaccctctaccagaagaccaaggatggcaagccttttgtcgatgtcctcaaggagggaggcgtcctccctggcatcaaggtcgacaagggcaccattgaggttgttggcaccgacaaggagaccaccacccagggccacgatgacctcggcaagcgctgcgctaagtactacgaggccggtgcccgctttgccaagtggcgtgctgttctcaagattggccccaacgagccgtcacagcttgccattgacctgaatgctcagggtctggctcgctacgccatcatctgccaggagaacggtctggtgccaattgttgagcctgagatccttgttgatggccctcatgacattgatcgctgcgcttacgtcactgagacagtccttggctgcctgctacaaggctctcaacgagcaccatgtccctcctggagggtaccctcctgaagcccaacatggtgactcctggctccgactctaagaaggtgacacctgaggtgatcgcccagtacaccgtccgtaccctccagaggaccgtccctgctgctgtgcctgctgttgtcttcctctccggtggacagagcgaggaggaggccaccctgaatctcaatgccatgaacaagctcagcaccaagaagccatgggccctgtccttctccttcggccgtgccctccaggcgagcaccctcaaggcctgggctggcaaggtggagaacgtggagaaggctagagcggccttcctcgccaggtgcaaggccaactccgaggctaccctcggcacctacaagggtgatgctgccgccgacaccgagagccttcacgtcaaggactacaagtactgagttgcttctctttgcgatcccgttgttttggaactcctgcctgcgagtaggttgctgagtgttgtttgcttgttagagcttttatattcggacatgaaaaaaacatgcttcctatgtggatgatggttatctttatattcgtatattaactactagtctctgttgttaatttccgtgtaatttgctcctcccagatgggagaatcgaacgccgcttttttgttctatctgatattctgtaatactggccgttgtattggccttggtatcggcaaaaaccattccgtaaaaaaaaaaaaatcgacacgactctcggcaacggatatctcggctctcgcatcgatgaagaacgtagcaaaatgcgatacctggtgtgaattgcagaatcccgcgaaccatcgagtttttgaacgcaagttgcgcccgaagccttctggcggagggcacgtctgcctgggcgtcacgccaaaagaaaaaaaagatcagatccccctttcgctggtttctttccccttggccaagcccaaaccgtctttaaatacacccgtcgtcgtccgcatcccccgcctgccttaaccattcctcccaacaccacctcgcctgcgatcttcgtagcctccgtcgcgtcgagcatcgatcatgtcggcctactgcggaaagtacaaggatgagctcatcaagaatgctgcctacattggcacccccggcaagggtatccttgctgctgatgagtccactggcaccattggcaagcgcctttccagcatcaatgtcgagaacgttgaggagaaccgccgtgccctccgtgagctcctattctgctgccctggtgctctccagtacatcagcggtgtgatcctcttcgaggagaccctgtaccagaagaccaaggatggcaagccttttgttgatgtcctcaaggagggaggcgtcctccctggcatcaaggttgacaagggcaccattgaggttgttggcactgataaggagaccaccacccaaggccatgacgaccttggcaagcgttgcgccaagtactacgaggcaggtgcccgctttgccaagtggcgcgctgttctcaagattggccctaatgagccatcacagcttgccatcgacctgaacgctcagggtctggctcgctatgccatcatctgccaggagaatggtctggtgccaattgttgagcctgagatccttgttgatggccctcatgacattgatcgctgcgcttacgtcactgagaccgtccttgctgcctgctacaaggcgctcaacgagcaccatgtcctcctggagggtacccctcctgaagcccaacatggtgactccaggctccgactccaagaaggtgacccctgaggtgattgctgagtacaccgtccgtaccctccagaggaccgtccctgctgctgtgcctgctgttgtcttcctctctggtggacagagcgaggaggaggccacccgcaacctcaatgccatgaacaagctcagcaccaagaagccgtggtccctgtctttctccttcggccgtgccctccaggcgagcaccctcaaggcctgggctggcaaggtggagaacctggagaaggctagagctgccttcctcgccaggtgcaaggccaactctgaggctaccctcggcacctacaagggtgatgctgccgccgacaccgagagcctccacgtcaaggactacaagtactgagttgcttctctttgcgtgcccgttttggaactcctgcctacgagctaggttgcggagtgtggtttgctcgttagagcttattttcggacatccaaaaaacatgcttcctatgtgggatgatggttatctttatatttgtatgttaattagtctctttgctgttaaatttcgtgtaagttggtcctgccgatggagaatcgagcagctccctttttttgttctatcaactatgctgtaattctggctatgtatcggcaaaaacaattctatatgctgagttggagtcggcaaaaattcatatatgctgagttggagacagcaaaaaaaaaaaaaaaaaaaaaaaaaaaaaaaaaaaaaaaaaaaaaaaaaaaaaaaaaaaaaaaaaaaaaaaaaaaaaaa

SEQ ID NO: 117285 - DNA, 589 bp, Zea mays
  Clone ID: MRT4577_38451C.1
cgcaaatcccgtcgtggccactgcagccgccaaccaacgccacagttccagtggacatagcgcccaattcgttgatcatgccccgcatcccatgccaacatcctcatccggtagcgaccaaccatatcccatcagagctggtgcatacccctgccatctcctctttcccctacattcccacgcccccgtcgctggagaggaaggaggatccaaaggaaaaggagcttgccacgctgccggagaggaaggaaatctaatattgctcaaccgcgcaggcctcgaccaagctgttaagggttgcttgttgttgggaggaagtaatcagcaacagcaaagtttacatctcttcagccatgcctgcagtccctcacctgatgtaatctgggagccattctgtaggaagccagcttacagaagcagaagataacagcttaaccaacgacggttggagtgcaggcgtcatgttagtttggtgaattagtcggagtggactgctttgactcgtaagtctgctcactatattttctagttcgcattgatcttcggtccacaatcattttgcccccaaaagagtcgacatataatttct

SEQ ID NO: 117286 - DNA, 389 bp, Zea mays
  Clone ID: MRT4577_38452C.1
ccggttcggaattcccggctcgacccacgcgtgcgcggacgcgtgggttttttatttttttttttttttttttatttttctacgtgggtggctggccaattattccattcagacctggggagcactgaagcacagaatcataaacatgcatgcagccggagcgctatcatggccatggtcaaggcttgattaccgcaattcctttccatacgttgttcgaggcctaacacatgctttcgcttcattgcactctaacagttgatcgctcccttgacattttaaaccgacacgacaacctaataacgccaattacgtttactgcatttcatttgaccagctatgggataccaaacgactatccaagcctgaaagattctcttaccaataaa

SEQ ID NO: 117287 - DNA, 379 bp, Zea mays
  Clone ID: MRT4577_38453C.1
gattgactctgaactctatcatgctcagtccccaatcgctactgatctctgccgcgaggatttcgacttatatcacctttctgagtcaagcttgcatatctatcctctgaatattgtcatcaagacctgtggcactcccgacctcctgctcaccattccaagaatccttcagcttgctgaagacctgtctatgccacttgctgatgtgaagtacttctgcgggacgctcatgttttatgtcacacacccattcccctacaagtacttctgtgacgaagtcgctgtacttaaccgctactatagctgcctgaaataccgtgatcatgctgatatcaactgagattcagccatacttggaccgatatggtacgtcttctac

SEQ ID NO: 117288 - DNA, 277 bp, Zea mays
  Clone ID: MRT4577_38454C.1
ttccacgttttcgcccgagccggcgacaatggggcgggtttaagttcggcgacaagatcaggtactacccgcagacggacctcgggacaacggagaccatcgcgttccgtggcacagtcatcggcaagactcggtccgcgcctggagaggcggcgttctttagccgaggcccaaactaccgttcaccggggatcctcaagcccgtacgtcaatgcccgggcgttaacatatctctcggcgtggaccggcaccgcatctgacaccgaactggaaatcg

SEQ ID NO: 117289 - DNA, 672 bp, Zea mays
  unsure (1)..(672): unsure at all n locations
  Clone ID: MRT4577_38455C.1
cctcgagggcccggcccgggaaaaaaaaaaaaaaaaaaaaaaaaaaaaaaaaaaaaaaaaaaaaaaaaaaaaaaaaaaaaaaaaaaaaaaaaaaaaaaaaaaaaaaaaaaaggtccccggtccacactccccattccattttttaccataacactgacccgttaatagttagctagttttaagttagaaacgaacaacggactaatttcaatctgggagcgagggggaggccaacaataatgaaaatgacctccggccccccggaagcggcgggaatgggggggggggggctgttttttggggggggggcaactgtaacggggcaggcccttgtcccggccgtaataatcttcggcaactcgggggttgacccaggcaacaacaaccggttagcaaccctggggcgccccaatttcccgccttacggccggaatttcccgggaacccacgcccccacggggcgcttttgaaacggaaagctcgccacggactacaccggggaaagcctggggctaacctcgtacccgccggtacctgagcgaggaggcccaaagcaacaacaagagcctcctccacggggccaacttcgggtccggggccgccggttacctgaacgccaccgccgccctttacggggccatgttnnttaacccggcagggggggaacttccg

SEQ ID NO: 117290 - DNA, 243 bp, Zea mays
  Clone ID: MRT4577_38456C.1
aagcgaagcttcaggctagtctcggcgactctagcaagacgatggtcaaggacgacttgctcgagagcggccctgacggcggcgaggccgttgatcaaggactacacggaccctccccaggcaccgctgatcgacgcgctgtagctggaggcctgggcgctgcaccgcggcgtgatcgccgagcacacagccctctgccatgcctggcaccacccgccgcgccggggccagacacaagcacca

SEQ ID NO: 117291 - DNA, 294 bp, Zea mays
  Clone ID: MRT4577_38457C.1
ctgcgtcattgcgcaactgcgaaactaagaggatcactggctacttccttgtgatactctcggggatattggtaaaaagagcggtctagtttcatataccatgatccatgatggtgctatcttatgagaccatgtgcacattccatgacatctagtttcgatgaagacttgatagattacaagggatgtgaatgatggtcagtcaaatgagccaaagaagcttctgtctggtacaatgggttactgatcggcagtcaattgttgtagatgactttaatggttagtaccgatctg

SEQ ID NO: 117292 - DNA, 764 bp, Zea mays
  unsure (1)..(764): unsure at all n locations
  Clone ID: MRT4577_38458C.1
gactgcaccacaccattaactactcttcttctatctctagctaggctcgtttgctagcatgaatagaacagtgcacgcatggaggggaagagaggaggacgtccgcctgcgcgccaacaagctctcggagagccagcccatcggcacggaggagcacggcacgcacgacaaggactacaaggagcccccgccggtgccgctcttcgaggccggtgagctcaaggactgtgccttctaccgcgacgacatcggagaactcgttgccaccttcctcttcctctacatctccatcctcaccgaatgggcgtctccaagtccacctccaagtgagcaccggcggcataaaggtatcgactggcccttcgatgagatgatcttcgccctcntctactgcaccgccggtatctccggtgggcacatcaacccggcggtgaccgtccgactggtctgtcgaggaagttgtccctcaccagagaggtgttttacatcatcatgcagtgcctgggcgcctcgtgcggcgcgggagtcgccaaggggttccagcaagagctgtaatggcgnaacggcggaggcgccaaccgtcgtggagcccggctacaccaagggagacggactcgtgtgccgagatcgtcgggaccttcatcctcgtctacaccgtcttctccgcctacgacgccaagaggaacgacagggactcgcatgtgacgatcctcgcccatctttccatcagggtttgccgtgttcctcgtccacctgtacaccat

SEQ ID NO: 117293 - DNA, 276 bp, Zea mays
  Clone ID: MRT4577_38459C.1
acagtgcaacagatccctagttactatactggacttattagacctccatacacatgcaatacgtcttgtaccaagatttcatacttgtgctcctcccatcaaagatacaaatataactaagggacatatatactcgatgggaatatgcccgtgcatctttttagccctagaatctctgacatgagggtagcattataacggcgacccctttcttgatacatctcacgggatgaccggattccccacagtattcatgcccaggccgcccaggttgat

SEQ ID NO: 117294 - DNA, 199 bp, Zea mays
  Clone ID: MRT4577_3845C.1
acacataccaaatcatcgtcgccatcgcatcgcaacacagggtcttccagggttcctgcatcaatctatttccagacaccaaaggcaacaatacatcgatctttcaatacttccacctccatcttcggcatggccatcagatctccttcatccatcctcatccacatcatactcaagccaaccgttagtaaatgatgtg

SEQ ID NO: 117295 - DNA, 354 bp, Zea mays
  unsure (1)..(354): unsure at all n locations
  Clone ID: MRT4577_38460C.1
aacaagcttattagaatattgaagtattgttcatggnacaaatcaatcgggacgaatgcattttttttgtgatgccacccaaccaatatactaccaggtgtgaagagaaattaactattactcaagctgccatattaaggtaagctggacctacattttattgtcctagataaaacttttttcatgacaattcaagtattactagcttctagcatagtgttataatggctcctagctctaattcaagattagttgttccaccagtatatactcctttagaacacctatgcaatttgaactctattgaatacaagctatgatctaataccttttactagtccttctactatttca

SEQ ID NO: 117296 - DNA, 317 bp, Zea mays
  Clone ID: MRT4577_38461C.1
ttctcgagttttttatttaataagctcaccctaaaattgatatatttaaagaaataaaaatggtgggggcatggtttttgtacacatgatgaagtgtggccgtcgtccctagtgctactttgttgccgtgcaataatcagatgtcgttggtctcatcatcagcttcgattcatgtgctgttgcatctttcatgcaatattgtttgacaactttgcattgtgtgttcttaaattaaatctctcttgtttaaaaaaaaaaaaacaatacaatatgtgcatagaaaaattatgaagcaaacatggatactaattatttat

SEQ ID NO: 117297 - DNA, 557 bp, Zea mays
  Clone ID: MRT4577_38462C.1
ggcgattgggtatctcgaggccggccgggcgcagggcgggcgctccgggttcttcaactcgtggtctcgtgccgcatcagcgccggcgagttctgcggggaggagctcctcacgtgggcgctggacccgcggcccgcggcgaagctgccgctgtccacccggaccgtgcgcgccgtctccgagtccgaggtcgaggcgttcgcgctcatggccgacgacctccgcttcgtggcctcgcagttccgccacctgcacagcgcgcgcatccgccacagcccacaggttccgattctactcggaccagtggcgtatgtgggccgcgtgcttcatccaggccgcctggccactacaagaaaacgttgaaggagcgtcggttatttaaagagtgtcggggccaacactcttaatggaagtaaaagtgtgggttttactgtaccgacactcttaatttaagagtgtcggggtcccgcagaaaccgacacttttaatttaaaagtgtgggtgttttccacaccgacactcttatagaaactaaaaaaaaaaaaaaaaaagcggcc

SEQ ID NO: 117298 - DNA, 442 bp, Zea mays
  Clone ID: MRT4577_38463C.1
tcgcggacgcgtgggcgaacaagggaggactcgttcacccgcggacgtcggtagaggacctggacgagctgtccacgctgctgcaggtgcccatggtcgccggcaccgtcaacaggggcagcgaggtggtctccgccggcatggccgtcaatgactggacggccttctgcggcgcggacaccacggcgaccgaggtgtcggtcatcgagagcgtcttcaggctgagggacccccgccctgtggcgctgggttcagacgtcaaggactacacggttcaggatttctttacgagttgagctgagttttgctgcaggagagtagagagaccagtcgcattggccgccgaattgcctgcatctgcattgctggctaccagcaatttgtatcatgagaacctattattatcagacgtaaaatgttttttctttcctaacaaacaaaa

SEQ ID NO: 117299 - DNA, 251 bp, Zea mays
  Clone ID: MRT4577_38464C.1
ggcctccagtctatgcctccacctccatgctccactccacgaatccgacaactgtgacctccctgcggtcagcggtctacgccctctatggattagcaccacatcgttcgccccttgacagctcgtgatcgttgatggctactgttctataagtgcaggtacaaggaactgttgtatgaattatacaggagtagtaaatgttccataaaatatattgatgctatcaagtgttctataaatcataatagttg

SEQ ID NO: 117300 - DNA, 849 bp, Zea mays
  unsure (1)..(849): unsure at all n locations
  Clone ID: MRT4577_38465C.1
agatttaagggaagcaggatattctattgctgggagtagaacttgggcggcatggatcagcttgacgagcaatcgttcctggacgagctcatgtcgctgcgccgggaggaggcgccgtcgccggctccgtggcaggcgtatccgggcagcggcatgatgacgacgagcgacctcctcttctacggcggcgagggcaccaccgaggcgagcagcggcatggactttgccgggccgtttcagcagcccatggcgccaccgccggccacatctccgcaccggccgcacgagaagttcaacttcgactgcctcagcgaagtatgcaacccttacggcagctgcgtcggcggcgtacctaagcctggggtcgtccacgcggctggccaggcgtatgccctccaggatgccatggcgcagaacggcacgagtggcggcaagctgcatcacggtggtggcaggcgtcgtcgtccccggcgccgttcgtgttcgcaggtgtcgccggggagagctcggagatgaccaggggcgccttctccggcgcccacgctagaagcaagctcaacggtggcactacgtccaagaacctcatggcggaaaggcggcgccggaagcgtctcaacgaccgcctctccatgctccgctccatcgtgcccaagattaccaagatggataggacctcgatcctcggggacaccatagactacgtgaatgagctaaccgagcggatcaaacccttcgagggagagatcggcgccacgcccggaggatctgaacctgctngacaccacgaagaatttctccagcgggtacagtgaggagatgccgatgaggaatccaccaagtttgtcatcg

SEQ ID NO: 117301 - DNA, 1422 bp, Zea mays
  Clone ID: MRT4577_38466C.1
attggtacctcgagccggcgggaccccagctcccacacacagcaggcagcagctcgatcgctagctcctccgaaccggaaagccaagcccgctttggcgatcgtgcttgcttgcttggttccttcaattcctgccggagccagcgagagctagctgctgctgtcgcgtggtagacgtcgtcttgccagcgagagcctggctcgatcggtctctctggtacaacgtagggagaaagatcgagggggagaggacgacgacgatggccggcgcgaccgtgaccgtggaggaggtgaggaaggcccagcgcgccaccggccccgccaccgtgctggcgatcggcacggtgctgcgcgtggccaaggacctcgcggagaacaaccgcggcgcgcgggtgctggtggtgtgctccgagatcacggccgtcacgttccgcggcccctccgagtcgcacctcgactcgctcgtgggccaggcgctgttcggcgacggcgcggcggccgtggtcgtgggcgccgacccggacgaccgcgtcgagcgcccgctcttccagctcgtctccgccgcccagaccatcctgcccgactcggagggcgccatcgacggccacctccgcgaggtggggctcaccttccacctgctcaaggacgtgcctggcctcatctccaagaacatcggccgcgcgctggacgacgcgttcaagccgctcggcatctccgactggaactccatcttctgggtggcgcaccccggcgggcccgccatcctcgaccaggtggaggccaaggtcgggctggacaaggccaggatgcgcgccacccgccacgtcctctccgagtacggcaacatgtccagcgcctgcgtcctcttcatcctcgacgagatgcgcaagcgctccgccgaggacggacaggccaccacgggcgagggcctcgactggggcgtcctcttcggcttcggcccgggactcaccgtcgagaccgtcgtgctccacagcgtccccatcaccaccggagcggccaccgcctgattcatcgattcatcaacgatcaaattcctcccctctccgatccaattcgtcgtcgtctcgttcgtcattattttacgtcgtccgtccgcaaataatgtgctctctgctataattgtcgtgtgtagtagtaagtagctgttactatttttccatgtactgtcagtcgcacaatcatcatatataattaatatctctatataggcatttcatgcaagaccagggtatacgagctagcttgaggagaagacccttatcgttgtccctttagcatgcatggggtggtaaggtattgggtatacctgtgtaaaccaagcttggctggtttaattatatattcctttttaaaaaaaaaaaaaaccacaaaaaaaaaaaaaaaaaaaaaaaaaaaataaaag

SEQ ID NO: 117302 - DNA, 1375 bp, Zea mays
  Clone ID: MRT4577_38467C.1
cattgggtccctcgaggccggccgggagtgagaaaaacacttgtgaggacgacattataattcgccacgcggccgggggcccacaccacagctcccacacacacagcaggcagcagcacagcccacagctcgatcgctcctccgaaccggaaagccaagccgctttggcgatcgtgcgtcttgcttggttcctgccggccggagccagcgagagctagctagctgctgctgtcgtggtagacgtcttgccgcacgcacgcctagctcggtctctctggtacaacgtagggaggacgccgacgacgacgatggccggcgcgaccgtgaccgtggaggaggtgaggaaggcccagcgcgccaccggccccgccaccgtgctggcgatcggcaccgccacgcccgccaactgcgtgtaccaggccgactacccggactactacttccggatcaccaagagcgagcacctcaccgacctcaaggagaaattcaagaggatgtgcgacaagtcgatgatccggaagcgttacatgcacctgacggaggagttcctggcggagaacccgagcatgtgcgcgtacatggcgccgtcgctggacgcgcggcaggacgtggtggtggtggaggtgccgaagctggggaaggcggcggcgcagaaggcgatcaaggagtgggggcagcccaagtcgcggatcacgcacctggtgttctgcaccacgtccggggtggacatgccgggcgccgactaccagctgaccaaggcgctgggcctgcgcccctccgtgaaccgcctcatgatgtaccagcaggggtgcttcgcgggcgggacggtgctgcgcgtggccaaggacctggcggagtcggcccgggactcaccgtcgagaccgtcgtgctccacagcgtccccatcaccaccggagcggccaccgcctgattcatcatcaacgatccaattcgtcgtcgtctcgttcgtcattattttacgtcgtccgtccgcaaataataatgtgctctctgctataattgtcgtgtgtagtaagtagctgatactatttttccatgtactgtcagtcgcacaatcatcatatataatatctctatatatgcatttcatgcaagaccagggtagagctagcttgaggagaagacccttatcgttgtcactttagcatgcatggggtggtgaggtattgggtatacctgtgtaagacaagcttggctggtttaattatatatttttttaaaaaaatctgtttgctacaaaaacaaaacctgtaatgtgcatggtgatggcaaattggccgccattttcagtgcacctaaagctgtattggataaatgcttctactcgattattgattgtaagaggtccactgtt

SEQ ID NO: 117303 - DNA, 204 bp, Zea mays
  Clone ID: MRT4577_38468C.1
gaatgagacagaaggggctaatagctatgatttcatgtacgattcctgtactgtgacagggacactcaaggaacctgcgaagcttcaacaggcctacacaaagcgttcaaccgactcaatgtctacataaagacccctgataccgccgaatgaataaattccatccgcgaacttatcgttaatagcatcagcgtcaacgctacg

SEQ ID NO: 117304 - DNA, 1203 bp, Zea mays
  unsure (1)..(1203): unsure at all n locations
  Clone ID: MRT4577_38469C.1
cgaggccggccggaacaccctttctccccacacagcaggcagcagctcgatcgctagctcctccgaaccggaaagccaagcccgctttggcgatcgtgcttgcttgcttggttccttcaattcctgccggagccagcgagagctagctgctgctgtcgcgtggtagacgtcgtcttgccagcgagagcctagctcgatcggtctctctggtacaacgtagggagaaagatcgagggggagaggacgacgacgatggccggcgcgaccgtgaccgtggaggaggtggtgtgctccgagatcacggccgtcacgttccgcggcccctccgagtcgcacctcgactcgctcgtgggccaggcgctgttcggcgacggcgcggcgccgntgggtcgtgggcgccgacccggacgaccgcgtcgagcgcccgctcttccagctcgtctccgccgcccagaccatcctgcccgactcggagggcgccatcgacggccacctccgcgaggtggggctcaccttccacctgctcaaggacgtgcctggcctcatctccaagaacatcggccgcgcgctggacgacgcgttcaagccgctcggcatctccgactggaactccatcttctgggtggcgcgctctggcgggcccgccatcctcgaccaggtggaggccaaggtcgggctggacaaggccaggatgcgcgccaccccgccacgcctctccgagtacggcaacatgtccagcgcctgcgtcctcttcatcctcgacgagatgcgcaagcgctccgccgaggacggacaggccaccacgggcgagggcctcgactggggcgtcctcttcggcttcggcccgggactcaccgtcgagaccgtcgtgctccacagcgtccccatcaccaccggagcggccaccgcctgattcatcatcaacgatccaattcgtcgtcgtctcgttcgtcattattttacgtcgtccgtccgcaaataataatgtcgtgtgtagtaagtagctgatactatttttccatgtactgtcagtcgcacagtcatcatatataatatctctatatatgcatttcatgcaagaccagggtagagctagcttgaggagaagacccttatcgttgtcactttagcatgcatggggtggtgaggtattgggtatacctgtgtaagacaagcttggctggtttaattatatatttttcg

SEQ ID NO: 117305 - DNA, 2105 bp, Zea mays
  Clone ID: MRT4577_3846C.1
ccggccgggacggctattcaaaaaattgttccggaacgagactaaccgaacctccggcgttggccatgagcttcttctcccccttcccacaccacctccctcccaaatcagcccgtggcccaaatttactcggacttcacctctcccaatcctcctccatctccttcttaaattccacttcttcgatttgatccccacccgtcgccgctcttttttttctgcttatttttttttctgagccgaccagaaagaccagaaactcgagtttgttggctcctgatccaaactattctaatcgcacgaaagaggctgcaaatattgaattttgagtttctttgggagtggtttagtggataaatcggggaaaccataggggaattcctgaccgaaagtggtggaaagtttagtttggtgatggaggaggagaagcagcagatggagccgccggcgccggcgctggtgcgggaagcgggagccgagccaagggcgccacgacaaacgcaacagcagccgaatacggcggtccaggtgcagccttctatgccggtgctgaggccatggccaatggaaatcacgctttctatgaagcctgtggttgaaatgaagagtggcaccccagcaaagaagaagaagcactgtaattgcaaaaactcacaatgtttaaagctgtattgtgagtgttttgcagcaggtgattactgtgacggttgcaattgtaaacaatgtggaaacactgttgagaacgaaaagggtaggcaggaggctattaacaacacaaagctaagaaatccaaacgcctttcaacctaagattgaaaatggtccaattccttctagtgtttggaaggatgctggagcactaccttcacatccaaagcataataaaggttgtcactgcaagaagtcaggttgtctaaagaaatactgtgaatgttttcaagcgaatatcctttgctccaagaattgtaaatgtatggattgcaagaactatgaagggagtgaggagctacgtagtacaactcaaggggataattcatgtgatcgaaataacattcaacaagcagctaatgttgctctgaatggtgccattggatcttcagggtatagattttctccagtacgtagaaaaaggcctccagaagatccccactgtcagacattaaatgttgaaggaagtatgatgcagacacagtttcgagagacaaacaatgtggatgtttcccaaatgacctcatctactggacgtgatggttccactgtaaatttccagggtacatctaaactggtatataggtctccactagcaaatactatccatattactgatgtcaacgacctagccaaccatttggtgattgcatgcagaaaggcagcagagaggttcactacaatagttgataacaaagtggagatggaaacagataaggaaatttgcacaaatactgaccaaaagtttgatgagaacaagaaaggagtccagaaagctgcacttagtcaacttggcaaagtgactgatatagatcaacaaattgttgatgactccagattgcattgctctgatacccaagacgatgctagacctgcctctccaggaacacaagcgctgttgtgtgatgagcaggatctcacatttggtacagttcatagaagttcaattccagtagcaatgcatgatcaggtcatttcagagctacacgctgcacaagaaagtgcagtgttgaaggagttaagaaacaacctccggctaattatcgcacgtggaaaactaaatgaaggaaaatccgcatcagggacacggatggaattggatgctctaaggcatcatgaatcaagcaccagtttagccccagtacgagctgaagagaaatccaacactacagatggccctgaaataacacacgaactaaaatagatttagctcagtttggatttttcatgtcaagataagatatgtattgtaccatagccaatctctgtgtacatacggatagtatagtccttgttgctagaaaaggcaaccggcaatgtagcattaatcattcacgaggtgtaaagtaggaaacagatcacgtatttattttttatcaataatgagttttaattgag

SEQ ID NO: 117306 - DNA, 396 bp, Zea mays
  Clone ID: MRT4577_38470C.1
tcctccctgccctaccacgccgtcgtcgccaagccacccccgccgcccccatgctccacccagtgcaccgcctccctgccaccccttcccgcccggccgtccacccgcacgtctcccccgcgccgccctcccttcatctccgacgagtggccgggacgaggccgacgacgcctgtggtatgctgctccggtttcgtgggttcgctgcctgtagcgaatcaggggagcgaattcgaacctcgatccagatcgatctatgggggtcggggttccgtggccatcgatccgagattcatggcatcgaaaaatagtaccagaggcagaggcaaacacctagcatcacctagtgctagcttaaatcatgcaccatcaccaagatttcgccatcggaggggtt

SEQ ID NO: 117307 - DNA, 646 bp, Zea mays
  Clone ID: MRT4577_38471C.1
ggtaccccggatccaattcggcacgagggcgtcttccatttggcctcggtgccttctcctcttgcttgtggccacagtctgagccatgccgcgcgtgcgacgaccagtagaaaccgctctcgagcgcgacgctgcagcaggcacaggcgaggtcccgctcatccagatcacaccagcccatcgatgacagcaacaccttctcgggcgccgccgccgcgacgcagtcctcgcacatgtctccggcgtccacgagctagcggtgggtcccgaagaggctgccgatgccgaggcgggagcagagcgcgcacggcggcgcgagatcgaagaagccggcgaaccgagctatgaggattaggattttggttttaaggttctttttttagctcgagcatccttataaaaaaattatttcaatggctgtttccttagagctagtttgacaactccattttcccaagaaaaaatgaactaatttcccttgaaaaatgaaaatcccccctatattatttctctatgtgtcgcactacattataaatatcaagtaattgtaatggtgcttctttcctttaaatatgcgtattaattcttgcagcagttaagtctacatgcacattttgtgtatctatttacgtagcgaactgccaaa

SEQ ID NO: 117308 - DNA, 2196 bp, Zea mays
  Clone ID: MRT4577_38472C.1
gccggccggggtcgggattaagactagctaactagcgtgaattagctcctccgacgactactagctctcgcttgctccgacgacgacccctgccggccgggatcagacggcacagctcgcaggacctgaaccacttgagaacctgccagctagctaaccaaccggctacgggcaagaacaaggagattgggggccccccggcggggcggggacaccacagctcccacacacagcaggcagcagctcgatcgctagctcctccgaaccggaaagccaagcccgctttggcgatcgtgcttgcttgcttggttccttcaattcctgccggagccagcgagagctagctgctgctgtcgcgtggtagacgtcgtcttgccagcgagagcctagctcgatcggtctctctggtacaacgtagggagaaagatcgagggggagaggacgacgacgatggccggcgcgaccgtgaccgtggaggaggtgaggaaggcccagcgcgccaccggccccgccaccgtgctggcgatcggcaccgccacgcccgccaactgcgtgtaccaggccgactacccggactactacttccggatcaccaagagcgagcacctcaccgacctcaaggagaaattcaagaggatgtgcgacaagtcgatgatccggaagcgttacatgcacctgacggaggagttcctggcggagaacccgagcatgtgcgcgtacatggcgccgtcgctggacgcgcggcaggacgtggtggtggtggaggtgccgaagctggggaaggcggcggcgcagaaggcgatcaaggagtgggggcagccaaagtcgcggatcacgcacctggtgttctgcaccacgtccggggtggacatgccgggcgccgactaccagctgaccaaggcgctgggcctgcgcccctccgtgaaccgcctcatgatgtaccagcaggggtgcttcgcgggcggcacggtgctgcgcgtggccaaggacctcgcggagaacaaccgcggcgcgcgggtgctggtggtgtgctccgagatcacggccgtcacgttccgcggcccctccgagtcgcacctcgactcgctcgtgggccaggcgctgttcggcgacggcgcggcggccgtggtcgtgggcgccgacccggacgaccgcgtcgagcgcccgctcttccagctagtctccgccgcccagaccatcctgcccgactcggagggcgccatcgacggccacctccgcgaggtggggctcaccttccacctgctcaaggacgtgcctggcctcatctccaagaacatcggccgcgcgctggacgacgcgttcaagccgctcggcatctccgactggaactccatcttctgggtggcgcaccccggcgggcccgccatcctcgaccaggtggaggccaaggtcgggctggacaaggccaggatgcgcgccacccgccacgtcctctccgagtacggcaacatgtccagcgcctgcgtcctcttcatcctcgacgagatgcgcaagcgctccgccgaggacggacaggccaccacgggcgagggcctcgactggggcgtcctcttcggcttcggcccgggactcaccgtcgagaccgtcgtgctccacagcgtccccatcaccaccggagcggccaccgcctgattcatcgattcatcaacgatcaaattcctcccctctccgatccaattcgtcgtcgtctcgttcgtcattattttacgtcgtccgtccgcaaataatgtgctctctgctataattgtcgtgtgtagtagtaagtagctgttactatttttccatgtactgtcagtcgcacaatcatcatatataattaatatctctatatatgcatttcatgcaagaccagggtagagctagcttgaggagaagacccttatcgttgtcactttagcatgcatggggtggtgaggtattgggtatacctgtgtaagacaagcttggctggtttaattatatattttttttaaaaaaaaaataaatatgatacaaaaataacacctgtaatgtgcatggtgacggcaaattgaccgccattttcagtgcacctaaagctgtattggataaatgctcctactcgattattgattgtccctttagcatgcatggggtggtaaggtattgggtaaacctgtgtaaaacaagcttggctggtttaattaaatttttttt

SEQ ID NO: 117309 - DNA, 271 bp, Zea mays
  Clone ID: MRT4577_38473C.1
tggatgacaaagaaaaaccattggaggaactgcatatagtcgttgatgcagggaatggtgctggtggtttttttgtggggggggtgctcaaaccatggggggctgttaccactggaaatcaatttcttgagccttatggtttgtttaccaatcacattaccaaccttatggacaaaacctcagtgaaatttattgcacaagcggtttttggtaacattgcagacttaggcatcttattagatactgttgattttagtttatcgtgctttta

SEQ ID NO: 117310 - DNA, 1858 bp, Zea mays
  unsure (1)..(1858): unsure at all n locations
  Clone ID: MRT4577_38474C.1
ttttttttttttttttatccatccgctttttttttttttttttgtagcaaacagatttttttaaaaaaatatataattaaaccagccaagcttgtcttacacaggtatacccaatacctcaccaccccatgcatgctaaagtgacaacgataagggtcttctcctcaagctagctctaccctggtcttgcatgaaatgcatatatagagatattatatatgatgattgtgcgactgacagtacatggaaaaatagtatcagctacttactacacacgacaattatagcagagagcacattattatttgcggacggacgacgtaaaataatgacgaacgagacgacgacgaattggatcgttgatgatgaatcaggcggtggccgctccggtggtgatggggacgctgtggagcacgacggtctcgacggtgagtcccgggccgaagccgaagaggacgccccagtcgaggccctcgcccgtggtggcctgtccgtcctcggcggagcgcttgcgcatctcgtcgaggatgaagaggacgcaggcgctggacatgttgccgtactcggagaggacgtggcgggtggcgcgcatcctggccttgtccagcccgaccttggcctccacctggtcgaggatggcgggcccgccggggtgcgccacccagaagatggagttccagtcggagatgccgagcggcttgaacgcgtcgtccagcgcgcggccgatgttcttggagatgaggccaggcacgtccttgagcaggtggaaggtgagccccacctcgcgggaggtggccgtcgatggcgccctccgagtcgggcaggatggtctgggcggcggagacgagctggaagagcgggcgctcgacgcggtcgtccgggtcggcgcccacgaccacgaccgccgcgccgtcgccgaacagcgcctggcccacgagcgagtcgaggtgcgactcggaggggccgcggaacgtgacggccgtgatctcggagcacaccaccagcacccgcgcgccgcggttgttctccgccaggtccttggccacgcgcagcaccgtcccgcccgcgaagcacccctgctggtacatcatgaggcggttcacggaggggcgcaggcccagcgccttggtcagctggtagtcggcgcccggcatgtccaccccggacgtggtgcagaacaccaggtgcgtgatccgcgacttgggctgcccccactccttgatcgccttctgcgccgccgccttccccagcttcggcgcctccaccaccaccacgtcctgccgcgcgtccagcgacggcgccatgtacgcgcacatgctcgggttctccgccaggaactcctccgtcaggtgcatgtaacgcttccggatcatcgacttgtcgccggtcaggtcgacaaaatccaagtggtgtgggaatgccgtgctgatggagtactataagtagtagcccgggcggccggcctcgaggtaccagttggcgggcgtggcggtnccgatcgccagcacggtggcggggccggtggcgcgctgggccttcctcacctcctccacggtcacggtcgcgccggccatcgtcgtcgtcggcgtcctccctacgttgtaccagagagaccgagctaggcgtgcgtgcggcaagacgtctaccacgacagcagcagctagctagctctcgctggctccggccggcaggaaccaagcaagacgcacgatcgccaaagcggcttggctttccggttcggaggagcgatcgagctgtgggctgtgctgctgcctgctgtgtgtgtgggaactgtgggtgtgggagttttttttttttttttttttttttttncccggccagagcccncgnagggtac

SEQ ID NO: 117311 - DNA, 361 bp, Zea mays
  Clone ID: MRT4577_38475C.1
tcatacctcacaccaaaccctcacattctacttctcatcaccctacaaaattcccggccaagttcaatttaaaaaccttctggccaataaattcatccttacccactaacacctcaataatttcatcttcttttttattctacctcaatcacatctctttcctactattatacttctcaccctacaaacacatcataccatatctcaaccttcataatcacattcctttccaaaatacaactctcaaaacctccatttactacaattactccttcttctacaaatttatcaactacttcattaacatatcttcatctatccatacatcctttcccaatttcatacttcttcttttctaccc

SEQ ID NO: 117312 - DNA, 340 bp, Zea mays
  Clone ID: MRT4577_38476C.1
tcggttttttttatagaagctgatccgaacaggcaaccaaagagcaaggtgtccagccgagccatggaccaagagagcaaatgaagatgggttgagctaagtataactgccacaggatcactgatggcaaggccccacgcaagacgctagaacaccagtgcttagaggaagactagaccgacgtcagaccgcctgaaaaaatcgcaacagcacattcccggagacgcggcgctggaggtgatccgtacgtaggcatagaaggtaccagcttttgatccgaaggctgaccttctagtgcctgctgcgagagatcacacgtgagttcaagatagaccttgga

SEQ ID NO: 117313 - DNA, 462 bp, Zea mays
  Clone ID: MRT4577_38477C.1
ggggggggggcgggcgacccaaacatggctaaaacaaaaaaccaccaccacccaaaactcatcataataaatattaaaaccaaaggaaaaaacacacaaaagggcgggtccttttcagactttctagtttacttcccgcttacttacgcgtgcatccttttttatagctctcctaaaattaaatctacttgccgttttttaaccacttttttactagaaaacccctggcataacccaacttattcccttctcaatccactcccttttcatccgcttgtttataaccaaaataggtccccaccaatcccccttccaaccattttcccaccctgaatggcgattggaccccccccttgactcgctccattaaccccgcgcgtgagtgggggttccccccaggttgcccccttcattttccatccccttaccccccccttttttccttttttttctttttttttc

SEQ ID NO: 117314 - DNA, 321 bp, Zea mays
  Clone ID: MRT4577_38478C.1
gccgcccttttttttttttttttaacccagccctttaaaaacgggaaatgaaatcgaaaggccaataacaaaggaatattccaaaccgaagttctggttttttaacaaccttgaaccccctggaaggaaaaaaataagggggcaagcttataaaaaaaacggggggcaaaactaagttcaaaaaaaaaaatggataaacaaaaaaaaatggttggacagtctaacccaacttaataacaaactgaaacctggaaggggtgaaaggcccttaagggaatcaatgaatactcaataaaaaaggccaacccccttggcttcttt

SEQ ID NO: 117315 - DNA, 362 bp, Zea mays
  Clone ID: MRT4577_38479C.1
gcacgcgtgcgtaggctcggaattcggctcgaggcccaacaatgcccgcacttttcttttatcgccctttacagctcttctcagggggggctgattggatggaaagaggggggaaccaactttgttgtttcataaaatgacggagagttccctagtgccaaatgaggtgacttttaatgctaccaaaaaaggtatcgccgtgcaggcaatattaggaaggcattccaaccatctgagcagatgctagatagaggcctaacgcctgacaataacacgtacaggtcacttataagtgtagttgggtggacgctttgtaccatgaatgctaccgaatttgttgttgatctagaaaacaactgggc

SEQ ID NO: 117316 - DNA, 740 bp, Zea mays
  unsure (1)..(740): unsure at all n locations
  Clone ID: MRT4577_3847C.1
tttttnnnnnnnnnnnnnnnnnaccggccggccgtgagaaggaagacaggtgactggtggtgaaagagctagcagcaccagcatggtggtggggatcgtgattaggctggtcgtcgctttcgtgcttttggtactagtcttcagctgccggctgtgtgatttgtgaattgaaggcgctattcggctgcacgacagaaggcagcacgcgcagcagtgggcggaggagaggaaccagctgaggtcgtacatgaccatggactacgccccatggcaccgccgcgtgcccaagcacaactgatctgattgatccactgcactgccagcagtactgctcttttcgtcggcagcgctagcaatctgcatctgtgcgaagcatggtgacacacaggagaagaagttgatagtaggtttcattctttttcgtcgttgttagctgtatgtcagtatgtgtatctacgtactacgtgtcgtccacgcagctagcgtgcagatacatgcacgcaaattttgccacccccactgcaccctgacctactaatgatggtattgctaggataaatataatatatacgcagttatatatagtacctgatatcagtacgtgtgtactcagtttctgtaataaggcctaggtgtgtttggttaggtaaaagnttctgcttcttctgtnntaattaagngcancggtttaggagggttacccactaagggggtggttggtttgctttctaagacgcccc

SEQ ID NO: 117317 - DNA, 313 bp, Zea mays
  Clone ID: MRT4577_38480C.1
cggaatcccgggcggcccacccgtccgttagtttgaccgcggccggccgttttattgttccaagctcctccccgcctggcgacgcttattttttaatggggtccctaaatacaattaactggccgccgttttcaacttcgggcctgggaaaccccggccgttccccaccttaatggccttgtataccattcccctttttgccagtgggcgtataatcaaaaaggccttaacctttcgcctttcctaacaattgtcctacctgattggcaattggaacctcccctgtattggcccattatcccctgtcggtttt

SEQ ID NO: 117318 - DNA, 1542 bp, Zea mays
  unsure (1)..(1542): unsure at all n locations
  Clone ID: MRT4577_38481C.1
ttgcaagccccgaagcttgtgatgtctctagtggaaaggttgaggatgctaagacacgaaatgagggtataaaaaaagttagaagaggcgaggatgcatgtaataccttgaagtctttcaaagatggagagaagcctcatgaaagcatcttcaaaagtttgacaccagtgtgcacacctcgtcatgctaacacggtccctccgttggcagtagcaagtccacggggccaaaagaagaaatcagctgttgtcaggctttctttcaagaggcagtctttcgatggagaacaaactnactgaaatatgttcctctagaaggtacttgatccgcccacgagctggattattggttccacaagctggtgagaaaatttctgaaggttgttggtctgtgcttgagccttcggcattcaagctgcgaggggaaagttttttcaaggacaaaaagaagtctcctgccccagcttgttctccatacacttcatttggtgtggacatattcatgtcccctaggaaaattcaccacattgcccagcatattgagcttccatctgtaaagccaaatgataaaattccttcgctacttatcgtaaatattcagatgcctacatatcctgctgctatgttccttggtgatagtgacggtgaagggattaatctggtgctatatttcaaactgaacgataactttgagaaagaaatttctccccagtttcatgacagcatcaagagacttgtaagcgacgaaacggagaaggtcaagggtttcccattggactcaacagtccctttcagagaaagattgaagatattggcagggttagttaacccagatgacatgaacctgagttctgcggagaggaagcttgttcaggcttacaatgaaaagccagtcctctcaaggcctcagcacaacttttatgtgggatcaaattacttggagatcgaccttgatgtacaccgctttagcttcatctcgaggaaagggctcgaagcattccgagaaagattgaaacatgggatgattgatctcggtctaaccatacaggcccagaagcaggaggaacttccagagcatgtactgtgctgtgtaaggctaaacaaaattgattttgtcgataatgggcaaataccaacactactgccatgtgacgatgactaaaaagttcggccagcagcctagcaacaaattaactgaaactgatgtttcggccaagaacatgagcatgtgctcacaagtccattccccgaagaattgtgagatgaactgaagtggggatctgcgtgtatagtcatggttttttttttctttcgtattctggtgttgcgaatcaaattctgttggaacttggaagttgatttgcgagtccggaattgaacatgccggcaagacgtcttatccatgttctatttttttcaggagtattattaattactttgcttataagaaagcatataaaaaaaaaaaaaaaaaaaaaaaagcctcagctcctttcttccccgccccttggcttttgcttggttgcatcgggccggtcgagcc

SEQ ID NO: 117319 - DNA, 440 bp, Zea mays
  Clone ID: MRT4577_38482C.1
atcgctagcgtccgatacctatctcctgctgcaggcgcagcctctctcagacctcattaccgtgacgacttcctcttccagttccagtacagcgacctcctgctggcgcctgcgcacccttcgctctaccaagatgtcgctgatcacctggtcctcggagctagcttcccggctgctggtgacaacaggtccagctcggaggagtcggacgcctacctgcagcgcagcctcgcggaggagcgcaggaagaggaggatggtatccaacagggagtccgcccggcggtcgcgcgtgaggaagcagaagcagctgagcgagctctgggcgcaggtcgtccacctccgcggcaccaaccgccagctccttgaccagctcaagtgctcaaccgtgtcacggaggatacggtcgcagcccacgcgtccgctagttctagatcgcga

SEQ ID NO: 117320 - DNA, 1227 bp, Zea mays
  Clone ID: MRT4577_38483C.1
tcaattagttgggcctaggcggtcatttgcttcacagctcctgcgcgagatctgtgaccgactctcggcacaggatgcgcgctgggcttcgctcgagtttgatgttgctcgccacgcagcgccgacccaggccttggagacatcagtggtggttgtgtcgattccgtccttacgagccgagatcgaagcctccagatcgacgccgtggaggctgctgcggtaactcgcgtcggcgcgctggagtcgtggcgtccgcgagtcgagtcccacgcatcggtcgacctcttcgacagcggcgacgactccaatgagttgtgctacgaggagcccgtcaccgccgacaactggggcggactcttcgatggtgatgacgctgccaatgcggagatcaccgacgactgggacaaaccctccaccgcttccaccgacgagcccagcctcgtccacgtgctccgccacgaccctccactgctcgtcgagagccgcctccatgcactccgcgtggcgcaggagctgggcgcccgtccacgtgctggtggccgagctcgtgtgcttaccggagaagatgatggcgaccaccagccccatgacctcgggctcggtcgtgtcgcgcccgtccctgtacctggcctccatcaggctctacagcacgtcgtcgtctccggctcggatggaggagcgcctgcgcgaccggatgacctcggcgaagatactcgcgagcgctgcgcgcacactatcacactgccgcaacaccggcgttggggtgtacaggaacagaaggctggtcagatccgtgatcttctcccgcacctcgtcgactttgtcaagcatccgctcccgcacctccttccccagcaggcaccgcgccgtgatcagcagcagcacctgctcgtcgtccccagcaccatcaacatcagagtgcctaccaactgttcgatgaaatatccatgccatatcttcgatgttgcagtgatggctctgatgagtgcagggtgttcgaacaaggagcttgaactcgcaccgcacaccaggtgttggtctgctcagctcagcaacatttggatgggcaatggatgttatgcgtatggggagctctgttttctctggaagcctccatggcgagggttcatttgtgtccaagagtgtaatgctggtgcagtttgattcattgaatatattggcttctcagcgtcgggaatcagttctccatctgtgattataccgacg

SEQ ID NO: 117321 - DNA, 2309 bp, Zea mays
  Clone ID: MRT4577_38484C.1
gaaatgaatcgacatggtttcgtaggtgcaaaaggtgatacagatgagttagtgtggaaaatcttcaatctatacacaagttaacagaaccatacgggggcttcttcttctttttcttcttttttactttcttatatagccaaaagaaatacatagccctcctccacaaatccaaaaaccgtgccaattcactccgacatgtctcggattggcactcaagacaaaacaccatggaaggaaggcaatgcaaagcaaggagcaataaccctcgtggtcgacctcataacttatctggaccacacttggacgagccatactgaaccagcaattccaaactccatgagagatagtttcattcgactcaaatgggagactgcttcttagtagcgtaggtagggcgattccgggccgatcctcagcgttcctccaagctccgtgggcactagaggtaccagtgagtgaagcacgtcggtgatcagtggcctgtaactcggctctggctgcacgcagagcacggccactgcagcaacttggtacaagtgtttcagatccattgtgttcttgatcatgggatcaattatgttcgggagcttggatctatcagttagctgaggcatggcccatgtaacgattgatcggcactgagattgtgccatcttctcgacaggtttccttcccagcaggagttctagaagtactaccccaaacgcgtatacatcgctcttctcagtcagcttcccatctaataagtactcaggagccacatagcccatagtcccagaaagctttaaattccctttgctgtgattcccactagtcactgccaggccaaagtctgaaatcttagcgctgaagtctgaatctaaaagtatgttagatgacttaagatccctatggataaccggtgggttgcagtgctcatgcaggtactctaatccccttgctgtgtcgagagcaatcttcatccgaatatgccagctcagagctgaaccatgtgatggcccatgaagttgcgaatccaacgacccactctccatcagctcataaacaacgaaacggttctcctcatgaatgcagaagcccacaagggacacgatgttcggatgtcgaatcttcccaagcaagtctagctcattctcgaattccttcttgcaatcatgtgccccaccatccagtctcttcaccgcagcagcaaacctcccatcaaaattggctttgtacacagacccaaacccaccaaatccaaggacattgctctcactgaagttttctgtcgctgcctccaaagatgtgtaatccatcatcgccgcggcactcttcttggtagtcttgtacgagccaaagctgttcaacatcggcgcaaaagcaatccttgcggtatctatgctctgggtgtccttggaatccaccagggctcgccgtgatcgtcgccacagcaagaaggcatacagcgcggcaatggggatcacgacgctggcgacggatgagaggataatggcagcgacgagctccctgctgaggtggtggtgcctctccgccacaaccacacctaagggaggaggcgccacggccgaaggaagcacggaggccacgccgccgctggcggtgggtgcaggctgcagcgcgggctgagccgccggtggccatcccggagaaggcggcgtggccctcccattggcgaccaacaacgggcgacacaccaggagcagcaagacgacgaaggcggaggaacggaggagcggcgatggcggcggcattgacttcaccactactcctccccgcctccgtccctctccttcccgcgtctctcgtctcgcgcacctctcctccgcaggagcagacaggggcgttacaacagcaacgggcacactaaagcctgtgcctttctgaccagataccatgcgagtcagggaatccaaagggggaggaagaatgcagcggatacagcaccactgcactgctgcgcgctctctcggctcttctctgacccttgcgtgcactcactcctccctctggtttcttgagccgccagttgatctcgctcgctccgtttcttttccgccagcgtaacgctgcagggagacggcgacaagaagaggagagggggagggagggatcaggaatggtagcccggtaaagtcctcagggggtataggaggagagggacgggcggtgctcagctcacaggctcttgtaaaaggttggtggtcgcgtggagcaaaggagggcagcttgccccaattgtcatgtggcagttgcgaaaaggcaccgcaggcccgctgctgggatccggccgagcccgagggtac

SEQ ID NO: 117322 - DNA, 616 bp, Zea mays
  Clone ID: MRT4577_38485C.1
gtcgaaaacaataaaaagataaggtaagaactttaccttaaagttagaataaaacaagatgtcggcgatatgttgccgctggtatctgctgaggtcggcctcaagcttcagaaagccaacactcttcgacagagtgctgacaaccttcgccccaacctgatcccggaggcatcctaaactctcttcggcaaagccaccgaagagcaatgcccctggttgatagccgcatgatatcgcataatccctcagttcttccttctcagccttagacaacttttgaccaagtatgtcttgaaaattaaaatatttttcctccgaagtatcttcagcaatctcctctttcccgggcgctggggcaagggtctcttcggcagctgtagcagcttcttctgcggccatgttcaaaatcatcttatcaatatcagagaaggtgccctccagatttgtatcttcggctgtctcagcttcggcagttacaccttcggcgggggcagcctcggtagctgcagtgtctttggcagccggtgtttttgacgctgaggccggcgatggcgtttcttcaatagcatcaataacagtaatgatcctttgccttttttcagcaagcttcttgatt

SEQ ID NO: 117323 - DNA, 235 bp, Zea mays
  Clone ID: MRT4577_38486C.1
catgatcaaaccttggttacatcatgttgaatgaaagcacctgccatttggaaaacattttgtacgaaatccagcatgaaggtgtaaagggcagtttgctgaatgcatggtcagacacagacgatgcagcctgttttattaccacttgcatacttgatttcttacaaaatgttttccacattgcaggtgctttcattcaacatgatcaaaccttggttacatcacgaaactcttc

SEQ ID NO: 117324 - DNA, 170 bp, Zea mays
  Clone ID: MRT4577_38487C.1
gcctccatggcgttcgcactggcgggggccttcaagggcctctccctggcgcccactactaccacgtcctccttcccgcgctgcgaccgcgcctcgctctccgtcggcggcgcacggagcgtgccggtgaccgtaccggcgcggcggctcaccatccagatggcgcacaa

SEQ ID NO: 117325 - DNA, 599 bp, Zea mays
  Clone ID: MRT4577_38488C.1
cttttttttttttttttttttttttttttttttttttttttttttttttttttttttttttttttttttttttttttttttttttttttttttttttttttttaaacccggggaatatttttaaaaaaaaaacccgggggaaacgaccccgggaaaagggggaaaattgggtctttcccaaaaaccaaaaaaaggggcccggaaaaaaaaccaactcggggggacagattttcaaactaaaaaaaagcccggggggaggggggaaacggcattatgggcatccaggctaaagggtccggttttagcacaaaatcaaagatgcctaggggggccttgggggggaaaggctaataagggggaactttttaaatttccggaacgacgccctttcctttgaaaactcgccaaaaaaaaaaaaggttgtttttaaagtaagaaatgggggccgccggaaaaaaaaaaaaaaaacctttgttattaggattttttggagccccaataaaaaaggcctaatgtttgggagggaaaaattttttccactagcttaaggttggggtatccattttggggaagccccatcaaaaaaaaaaacctccttg

SEQ ID NO: 117326 - DNA, 345 bp, Zea mays
  Clone ID: MRT4577_38489C.1
ctatgaccttgatgcacgcgtcctaagctcggaattcggctcgagttgtttccaactcgcaacatagaaagcacaggagcgtcccaacaatggcagtggaagtctagatacttctcatgcttatggtccttgctgtatgtgcatgtgctgctgaccactaccattacattgttaatactcataatactgctatagcttgttcttctttacctatacaccagcatgaatgtaccgttgagaaaacgaaaacccacaactttaaacgttccagctggaactagcaattggaacatgccctttatcattatcacccctgcaactataacaatccctatcactatattt

SEQ ID NO: 117327 - DNA, 430 bp, Zea mays
  Clone ID: MRT4577_3848C.1
ccccggccaaggatgttcttgctgttcaattgggacttgatgtattcaatatctactgatcctgcaattcaatatcctcaagctcataccatgttctggatctttgtaaaacaaataagggttcctggtctggctctgaatcctcagcttccaaaagatcactgccattcctagcacaggattttgaatcagatattgacacaagacttctgaagcttgtaaataagattgcttctggatcttgtggggacatgtttcttgggacctacagtggtgaggaggttgctgttaaagttcttaatcctcagaatttgaacaaaaatgtatggagtgaatttaagcaagaaatcaacatgttaagggaagttgatcatccgaatattgtccgattcattggttcatgcacaaaggcacctcagttttacataat

SEQ ID NO: 117328 - DNA, 396 bp, Zea mays
  Clone ID: MRT4577_38490C.1
tgtaaatctgtcagaggaggatagaaagaaggtttgtcttttactggaagttgcattttgttttgcaacgatttttttattatgtttagttgtttgccctccggaggtcgagttttttttactatattgtacaatagtcacaaaaaacagttaattttcagtgtttaatttaatcatgttggattcgttcagcaactttcctgcagtagccatggttgtatactattctgttagaagtgtttgttaaatctacgtaaagagctacagaaataagttaagttgactagtatatagaaggacgggtctggtgcagtggtgagagctatctcaatgagtcacgtgttagaagcagcctcaccgcatttgtcagggaaaagcttgcattggtttatgtct

SEQ ID NO: 117329 - DNA, 349 bp, Zea mays
  Clone ID: MRT4577_38491C.1
tcggacaatcaaacttctgcctgcactgaagagactgtatatccttacaatgtacacttaaggctgaggaatcattaagcatcgggtctcaattctctatttgtgttacccatcgcgtgcatagaaagaatgggtgagcaagatgcaatctgcacctcgcaccatgtgaacaggttatttacttggccttctttgcctgctctaatacaaaaaaagataatttctatgcacggcggcattacacgatccatcaaccatataaagctaacataaaatctttatagaccatttaccatcaaatcatgctcacttgttctgatagaacttatatggactgatccaactgaaa

SEQ ID NO: 117330 - DNA, 214 bp, Zea mays
  Clone ID: MRT4577_38492C.1
taggtatactcttcggcgacatccccagggctatctcttgagggaccgaggggtggaactcacactcaccacggtgcaactagggattgctaggccagtacacaaatctattccataatgcaccgtaacacagaggctgccaacaactaatataagtgatacgcttaagtatatgctgccaatgcaacctatgatggagcttataatggagctg

SEQ ID NO: 117331 - DNA, 1580 bp, Zea mays
  Clone ID: MRT4577_38493C.1
gtgttcagccagctactcctttgctttccggccggaaccataccaaacacgcccatattaatacccgctcgccggggggccggcggggaaacgcaggccgcagtcgcgtgcggaactagagctccttcagagaagtgccgtgccagtgccaccgccggccgcatcatcgttccgcccccctgagtgttcagtaacttcttccgatccatattatggcttcaaagcagcagcagaaacagttcctggatgaagccatgatcaagcagccgacaccggaggaggaccgtgagggcgcatggccctcagtgctgacgatcatcggctttggattcctaaccttcaactcattcatggctgtgtacaggtcaaatggagatgttggatctatctcctttgtggtcttctcttacctggtcctcgttctgctgttctactgcctgcgccgattcgagacaactccaccagagtcgcctagccgggagcacataaaaatggccgtgtgggtactcaccacgatgctcactgctgcgttctcatacaaggtggcagcaattatgccactcccggtgcaggtgctggtgtgggcaatggcaggagcaactgtgttcggtggtttttatgctttcttcatccaccaggaaaaaaccgcccagctggaacccccaaaaccataacgagggtgcccgtcctgctagccggtgtgcttgctgtgcgatcgtttggcatgtgcttgttgaggggttgctaggggattggagaggaaagaagggatttaatccccttcaatccccctcaaaccactagtaaccgaacgtgggcctgagggggcgggcgagtctttatattgaatgaaactacataaaatagcatgccgtctctgtcactggcaatcaacccgaaaatatgccgtctgagtttagggttgggtcaaacttgtcgaatttggggttctgttataatatgttgagcatgaataaagatggatgctggtgactctgtcgccatcgccgtccaatcatgagtgtcctgtaattcaacttatatctatcatgtatgtatgtatgtatgtatgtatgtatgtatatgctgttttcctcgcaagaacatatccgaaaatatgcgtctgagtttagggttgggtcaaacttgtcgaatttggggtccggttttatttggtgggcctggatcaaagaccttggttctttcctccttgcgcgcctgggtgcgcagttcggccctatattcaaccatgtcttgactgtgtcctcatctccccaggtgttaaccatcttctaccgagccttacaacacgcgtgctctccactcactcactcctggagcacactgatctctccatcctgctcgacaacgaggccatctatgacatctgctggcgctccctcgacattgagaggcccaactactccaacttcaatcaccttcagcctcacctgatctcatacatgactgcttctctgaggcctgacgctgccctcaatggggatgtgaacgagctccagactaatctggtgccttacccatagatccacttcatgctctcctcctacacaccggtgatc

SEQ ID NO: 117332 - DNA, 162 bp, Zea mays
  Clone ID: MRT4577_38494C.1
caaacatattacagctccaactcagtgctgcagagactgaaggccagccaaaccgctcaccagacacgcggaattcacgcagcatgtacgccgacgacgggttcgccttcgccatcgacgccgcctaactcacccaaacctaacttcctcgcagccacagcc

SEQ ID NO: 117333 - DNA, 512 bp, Zea mays
  Clone ID: MRT4577_38495C.1
gtttctcgaggccggccgggctcttaccccgcccgacgacctgtttctgccagtcatatttcccgggcagcgcgcgatctcaacgctcccgtcgcgccctgcccctgcgcttcaaccgctccatccaggcgagatcctgcggatggaacccccggcggcaaaggaggcgccgtcaccgccgctccagcctgcggcggaggaggacgcgatgctctctgcgacggcggtcatggcgaaggaagcctctgtagcgttccagggacgtcgctacgccgactgcgcagaagtgctcacgaggctgctggacatgaaagagggcgatcccaaggtgcaattataactactctctgtaagcggtttaggattgtgtgcgggaatctaggttgtgtgttggcacgcttcaatggttaaaatagaaaatcaatgtgtctggacacatttcgattgctagctatgtacatgtgcttagaaaattggctgtttgcaaaaaaaaaaaaaaaaaacccgcggcc

SEQ ID NO: 117334 - DNA, 195 bp, Zea mays
  unsure (1)..(195): unsure at all n locations
  Clone ID: MRT4577_38496C.1
ccggccgggaaacgcatgccgcagtcgcgtgcggaactagagctccttcagagaagtgccgtgccagtgccaccgccggccgcatcatcgttccgcccccctgggtgcccgtcctgctagccggtgtgcnttgctgtgcgatcgtttggcatgtgcttgttgaggggttgctaggggattgagggaggattgaag

SEQ ID NO: 117335 - DNA, 1374 bp, Zea mays
  Clone ID: MRT4577_38497C.1
cggagcggggccgggggaaacgcaggccgcagtcgcgtgcggaactagagctccttcagagaagtgccgtgccagtgccaccgccggccgcatcatcgttccgcccccctggtgttatcagtattgctcgtgatgcggtgaagcatgagctcaccaagcatattggagttgatgtttcgtatacacgagctcaagtctaggatgatgttatcttgctttgagtgttcagtaacttcttccgatccatattatggcttcaaagcagcagcagaaacagttcctggatgaagccatgatcaagcagccgacaccggaggaggaccgtgagggcgcatggccctcagtgctgacgatcatcggctttggattcctaaccttcaactcattcatggctgtgtacaggtcaaatggagatgttggatctatctcctttgtggtcttctcttacctggtcctcgttctgctgttctactgcctgcgccgattcgagacaactccaccagagtcgcctagccgggagcacataaaaatggccgtgtgggtactcaccacgatgctcactgctgcgttctcatacaaggtggcagcaattatgccactcccggtgcaggtgctggtgtgggcaatggcaggagcaactgtgttcggtggtttttatgctttcttcatccaccaggaaaaaaccgcccagctggaacccccaaaaccataacgagggtgcccgtcctgctagccggtgtgcttgctgtgcgatcgtttggcatgtgcttgttgaggggttgctaggggatttaatccccttcaatccccctcaaaccactagtaaccgaacgtggcctgagggggcgggcgagtctttatattgaatgaaactacataaaatagcatgccgtctctgtcactggcaatggacggtggtgcctagcgcaactcagcgcacaactgtgtgtcttgatttttcttctgtttatcacggcattagtgccatgccgttttatgttacagtgttgtgtgctcgcaagcatccgaaaatatgcgtctgagtttagggttgggtcaaacttgtcgaatttggggttctgttataatatgttgagcatgaataaagatggatgctggtgactctgtcgccatcgccgtccatcatgagtgtcctgtaattcaacttatatctatcatgtatgtatgtatgtatgtatgtatgtatgtaaaaaaaaaaaaaaaaaaaaaaagtgaccccccacctactatgcttctttgttttaactaaaaaatggatgctggtgattctgtcaccatccccgtccttctttagtgtcctgtaattcaacttacttctatcatgtatgtatgtccgtatgtatgtatgtatgt

SEQ ID NO: 117336 - DNA, 501 bp, Zea mays
  Clone ID: MRT4577_38498C.1
agtttccagcctgcctctacagtagggcgcgatatatgaatttcggaggatagcagataaatgctgcaactgcaagctcccaactcctccaagcaacctgagcgagacctgcaagaaacaaacaccgggcggcaggcgggatcgatcttgggaaccagcggaggagatggcggccaagggggcgaccgagatggaggtgggcggcgacggcgtcgccgtcatcaccatctgcaacccgccggtcaactccctctccatcgatgtactcctaagcttaaaggaaagctatgaagaagctctgcagaggaaggatgtcaaagctattgttgttacagggaaaggaggaaaattttctggaggattcgatattagttcctttggggatcttcacagtggaaaaattgagcagccaaaggttggttacatatcaatagacattctcactgaacttctggaaggtgcaacaaagccatcggtggctgcaattgatggcctttgtct

SEQ ID NO: 117337 - DNA, 268 bp, Zea mays
  Clone ID: MRT4577_38499C.1
gtagcagcacgcccacgcctctcccaggggcggcatcccatttagtgcttgcaaccatggctatgcgatcgaacaaccactctaagaggctcaatagcgcataagcattggatgctccgataaagctagccaagctctcattgccaagccatgtcatgtacctcactcatctagtgagtgacttgctcaagctctgatgatcacgaacagctctaagtatgctgaaaactaccgtgaggtcatatttatccagatgcaacggcatcta

SEQ ID NO: 117338 - DNA, 2295 bp, Zea mays
  Clone ID: MRT4577_3849C.1
accgagacccagccctcctcctccggcgacggcagcctcccgacgttcccggccaacatctccaccctcgtcgccccgaccccgcgcgcctccggctcccgccgcttccccgtgctccagacgctgctgctctccttgctctccctctgcctcatcctcctctcagcgctcctctccatccacctcgtccgccgcctccgccaccgtggtggcgccgcggcatcctccccctccgctgcccagcgccgctccgcaagtaaccaccaccaagacgacgacaacgacgacggggacgaggagggccgcagcctcaagccgccaccaatgcccacctcctccactaaccccagcactgagttcctctacctcggaaccctcgccaccccgccgccgccggggccgcagcaccccgggacaagttccagtctacgccctggctcgccggagctccgccctctgcctccgcttccgcgcgtcggcccgccgtccggcgagttcttatcccgcagctccgcttccgaccccagcaccgtgcctcccgccgccgctgccgatgcctcgtcgtcctcgctctctccctcctcgccgtcggcatcctcgcccacgctcggctctagccccgtccatttccgcccgccgacatcccccagccgcgtggccgagcccccaatccctcgccgcctaaacggaggccgtcgccgcccaagggtgctgcggagccagtggcggcgcacgggtggaaccccttcgtgccgctgccgccgcgaccagctgtggcttcatcagatgatggtgactctgatcagatgatggacctgcgcaagtcgcggcctttgcactcggacaagctcaagcccggctctttgcacatgaaggacgaggtgatccagctatacctcaacaattcggcagcagttgcggcaccaagggaggtgtgtttgcttggtgccctcaggtgtcatggcatcgggatgattgtaggagcattgggagtttccaaggagcaactgaaggatgcactcttggaaggtaatgtacatggtttgggagtggaagccttgcagatgctcactcagatggtgctcagcaatgaagaagagctcaagatcaaatatttcaaggatgactccctgaacagactttgcccagttgatgtttttttgaaggcaatgctggatgttccatttgtgttcaagagagtagatgccatgctttacattgccagcttctatttggagatcaatcggctgagaatgtcgtatgctactcttgagggggcttgccaggagatgagaagcagcaggctgttccacaaagtccttgaggctgttgtgaatttcggcaatttcatgagcaccaattcggggtctccaagttcaaaaggcttggagccaaacactgttctgaagatagctgatgtgaaaggagctgatgggaaggctgctctcatgcagttcattgtccaggaaattgtgaaacctgaaggatatgatgtgatgcagcatggttcaggtgcatgcaagatgagcacaaacactctgcagtgtgatgccgagtgcaggaagcatggccttgaggttgttgccaaacttgcagcccagctgagcaacaccaagaaagccgcctccattgacataaaaaggctgagccaaagcgtgtcagagcttggaatggggcttgggaaggtccacgacgtggtgaggctgaacagcatggttacatctgttgatagcgctcggcgtttccacaatagcatgagcacatttctaaggcacgccgaggaggagatcctgaagctccagtcccaggagagcatctgcttgtcatcagtgaaggagatggcggagtggtttattggggagtcagtcaacgatgaagctcacatgttcagaatctttgctggagtgaaggagttcctagctatgctcgatcatatctgcaaggaggctggggaggtgagcagcaacaattgggtcggcgcgacaacggcgagctggatggctgcacccatggggatgatgccttaagccgctggagctgtcttggcaaaatctgtagctaccctttttgtagaatatttcatatcaagctatttggactagtatggttcctagtattagcagtagatgagaacgatgttatggtatgttaagccgaagcctctctctatataaatatatctggataatgtatgctggacacccgtctattgtaaagtttactgttactggtaatggggtttgccgtcctttcctgaaaaaaaaaaaaaaaaaaaactcgagagtacttctagac

SEQ ID NO: 117339 - DNA, 401 bp, Zea mays
  unsure (1)..(401): unsure at all n locations
  Clone ID: MRT4577_384C.1
gggccggaaatnccgggtcggaccacagccttccgcaaatcttttgattaaaagcagggggtgggctttgttcaaacccttgccatggcggatcagtggggggattcggcaaacaaggggagcattaagaaggtaaccaagggcctgaaccaaggaatgggggttttgtttggggttgaaggcttcctgctgatcttttttggggggaactatgccttgattgtgtttgcccaaaaaacgctcccgccaaaaaaaaaaaacccgtttttgaaaaaaaactttaaaaaggaaaagttgaagcaggggttttttgccctggaagattaaactgccttgcggcggtgcctcctttccaaagttccttatttactggatttttagagaaaaaaattttttttttt

SEQ ID NO: 117340 - DNA, 178 bp, Zea mays
  Clone ID: MRT4577_38500C.1
aatcagtgtcgcatactcggatgagactgaacgtctagatggcatgcatttgccactagattttttttctgctattaccaaggactgcacaaagaaaatgtagatgtatacacaacaagaacattccatctgacttggtagaccatctatggcacaaataataataataatttgcaat

SEQ ID NO: 117341 - DNA, 1048 bp, Zea mays
  Clone ID: MRT4577_38501C.1
ctcgcctcctcccacgacgacgcgcacgggcgtgcgtgcatgcggccagcggtcacggcccctccggcaaggcgaccaccgccgtgcgcgtgagaacaccggctcggctcgtctcgtcggacgactcgctcggcgccgcccgcgtccccatggcgcggccgcggccgcacggccgcatcgtccacgtcgccttcgccttcgcgttcgcgtctgccgtcctcctgccgccggccgcggagggtgtccaggagggcgacgtgctggtcgctttccgggacacgctgcgcggtctggacggcgcgccgccgggcccgctgcggaactggggcacgccgggtccgtgccggggcaactcctcctcctggtacggcgtgtcgtgccacggcaacggctccgtgcagggcctgcagctggagcggctcggcctgtcgggtggcgcgcccgacctgtccgtcctcgccgtgctcccgggcctgcgcgcgctcagcctctccgacaacgcgctcaccggcgccttccccaacgtgtccgcgctcgccgtgctcaagatgctctacctgtcgcggaaccgcctgtccggcgccatccccgagggcacgttcaggcccatgcgtggactccgcaagctgcacctctcctccaacgagttctccggccccgtcccggagtccatcacctcgccgcgcctgctggagctgtcgctcgccaacaaccacttcgagggcccgctgccggacttctcccagccggagctcaggttcgtcgacgtctccaacaacaacctctccgggcccataccggtagggctcagccgcttcaatgcaagcatgttcgcaggcaacaagctcctttgcggcaaaccactagaagtggaatgcgacagctcggggtcgccgcgcaccggcatgtcgaccatgatgaagatcgccatcgcgctcatcatccttggcgtgctgctctgcgtcgcgggcatcaccacgggcgccctcggcagccggaaaaggaagccgaggcgcgcggcctccttaggcttgcaggctttctcctg

SEQ ID NO: 117342 - DNA, 381 bp, Zea mays
  Clone ID: MRT4577_38502C.1
cgtactcttacagatccttgagtgccatacatatggccacatcgtgggggctgacttcaggggtcaggaccacgcaatgatactgatgaatcattagaacactgaagcgaggaaaagggcatggaccggggatgagaggctagcgcttggagcaaagcatggcaggccactgcaggctcgagatatgctgcgacttgtatttagatacagagaacccgtggctattgatcactaatggttgttgagaaagaataaccttgaaccttcttgatgagtgtatcctactgcgatttgatcgctgatgccgattcataatacaccatcagaggcatctactgctcggagaagtagagcgtccacgtgcctgttgatgcatttatg

SEQ ID NO: 117343 - DNA, 386 bp, Zea mays
  Clone ID: MRT4577_38503C.1
tccgaattcccgactggagccacgcgtacgcgtgctgccagcgtgtacacgaggaggtttccttttcacatccgaacactccttagtgtgctgggctcctcttctgcggggccacagcaatccgcagatattagctgactcgtgaccgactgctatagctacccttcttccgccatgcctgctatcaaatgtagttatagtccgacgaagcacaccatgtaagacgctataaggttcaacaccattgtccgacgggcaactttcacacattacccatttctggtacaaagaagtccgaacgaatcatgctgcactagattgtacaaaccaagagctcacaccatgttgtacaactactactaacgtagagccatctactttgacca

SEQ ID NO: 117344 - DNA, 557 bp, Zea mays
  Clone ID: MRT4577_38504C.1
gccccagaatccccggcgacgacccacgcgtgcgcggacgcgtgggctcgcactcgcacgtacaccacactagttaccacagacgacgggcgccatgaaagtaccggcgcttctcctcctggtctccctgtgcttctcgctcgcgctcgcgtggcaaacggacacggaatcgggctcaggcaggccgtaccactacggcgaggagagtttccggcactggacgcgctcccggcaggtcctgctcacgtggtggccgcggcagccgcggcgagggtggcgactcgggttcttcttcttcttccaagtgggagatcaaaccgtccagcctcacggacaagaagccgacccattccaacagccacggcaggcactacgagatcaccggcgacgagtgcccgcacctccggctgctcgacatggacgtcggcctggcaaacatcgcccgcggttctatgatggcgccgagctacaacacccgtgccaacaagatagctatcgtcctcaagggccagggctacttcgagatggcgtgtccgcacgtctccggcggccggtcg

SEQ ID NO: 117345 - DNA, 281 bp, Zea mays
  Clone ID: MRT4577_38505C.1
gcgccgcgcacgttcctgcagcccagccactacgacgccgacgaggtgatgttcgtgaaggaaggcgagggcgtcatcgtgctgctccgcggcgggaagaggaacagatccgggagctgagcaggtcctgctcacgtggtggccgcggcagccgcggcgagggtggcgactcgggttcttcttcttcttccaagtgggagatcaaaccgtccagcctcacggacaagaagccgacccattccaacagccacggcaggcactacgagatcaccggcgacgag

SEQ ID NO: 117346 - DNA, 464 bp, Zea mays
  Clone ID: MRT4577_38507C.1
tttggatgtccagtctgagccatcaaagggacagatttcaagaactcgaagagatgctagtaacatctgccagcaatctgtgatcgaccttgattcttttgcatataaaccattaaagaaagatcctgtggcgctgaactcaagaaggtctaagcttaggttacctgccccgaacaaatccaccactggtacataatttgatggagagtttgagacaatggcgatctttgccgtgaagcattgggaagaactttgttctgtgagatatgacatgcggggagatgcagatgttacgtcgccatggagatttatagtttcaaacatccacatggattagagaagttccctgagctgaagtagggtgtaaaatgcatggcctggcagtagaaaattaggatgctgatgtctatatccatttacatgcgtcccattgtcgattatatctatgaacagtttttgcgttc

SEQ ID NO: 117347 - DNA, 299 bp, Zea mays
  Clone ID: MRT4577_38508C.1
cgccgtcggcaactaccgcgtcgccgagctggaagccgcgccgcgcacgttcctgtgcttctcgctcgcgctcgcgtgagcaaacggacacggaatcgggctcaggcaggccgtaccactacggcgaggagagtttccggcactggacgcgctcccggcagggccggttcagggtgctggaacggttcacccacgagctgctggaggtgatgttcgtgaaggaaggcgagggcgtcatcgtgctgctccgcggcgggaagacggagtcgttctgcgtcagggagggcgacgtcatggtc

SEQ ID NO: 117348 - DNA, 263 bp, Zea mays
  Clone ID: MRT4577_38509C.1
gctccttcccgcacccaccgaacgctcgctgggggggtgaataaatgttctagcgggccctccaaactcacactgctcgtagtgctcttcctcctctcgcgggcgccacttgccaatcaaccccccaacaccgcacgtaatggcccatgcacatacctacttcgcaccctacacggcctttcggaacagtaccctcacgctcccaacgcgacggtacacctttgccggggcctcctacgaccgctgctctgccgctacaacgc

SEQ ID NO: 117349 - DNA, 778 bp, Zea mays
  unsure (1)..(778): unsure at all n locations
  Clone ID: MRT4577_3850C.1
attatccacagacaccactccccctgagctcgctcgcacgccgcggccgggtaacaccaccaccgggcaccatggcctcctccttcctctccctacggctccctaccccctccccgcccaccgcgacgtcgtccccgttcttcccgaatcccctagtccggtccggaaggtgcagtccgctgtcctctaccctcgtggcgcgtgttgccgggccggcggcgggggctccgtcgccgttgttcaacccgaggggcgacccgttcctatccacgctagcagctgcttctccagagcagctcgcggcagctgcgggtggcgaacgccgcggcgaggaccacctgccgttcctcgagatcttccagaacgccaagctcatgtcctcgcccgcgcaggtggaacgttctagcagctcttacagtcagcacagtcctagaaggcctcccccggatttgccgtcgttgcttctacatggccggattgtttatattggcatgccgttggtgccagcagttaccgagcttattgttgcccagttgatgtaccttgattggatgaatagtagtgagcctgcatatatatacatcaactcaacaggaacggctcgtgatgatggtgaaccagttggaatggagacggaaggttttgctatctatgatgccatgatgcggatgaaaactgaggttcacacactttgtataggagctgcagcaggtcatgcctgccttgtccttgcagcaggnaaagaaggcaaacgatatatgtttccccatgccaaagc

SEQ ID NO: 117350 - DNA, 1774 bp, Zea mays
  Clone ID: MRT4577_38510C.1
ccccgcgtccgcccacgcgtccgctcgcactcgcacgtacaccacactagttaccacagacgacgggcgccatgaaagtcccggtgcttctcctcctggtctccctgtgcttctcgctcgcgctcgcgtggcaaacggacacggaatcgggctcaggcaggccgtaccactacggcgaggagagtttccggcactggacgcgctcccggcagggccggttcagggtgctggaacggttcacccacgagctgctggaggacgccgtcggcaactaccgcgtcgccgagctggaagccgcgccgcgcacgttcctgcagcccagccactacgacgccgacgaggtgatgttcgtgaaggaaggcgagggcgtcatcgtgctgctccgcggcgggaagagggagtcgttctgcgtcagggagggcgacgtcatggtcatccccgcgggcgccgtcgtgtactcggccaacacgcaccagtcggaatggttccgcgtcgtcatgctcctcagccccgtcgtctccacgtctggacgcttcgaggagttcttccccatcggaggcgagagccccgagtccttcctcagcgtcttcagcgacgacgttatccaggcgtcgttcaacactcgccgggaggagtgggagaaagtgttcgagaagcagagcaagggggagatcacgacggcgtccgaggaacagatccgggagctgagcaggtcctgctcacgtggtggccgcggcagccgcggcgagggtggcgactcgggttcttcttcttcttccaagtgggagatcaaaccgtccagcctcacggacaagaagccgacccattccaacagccacggcaggcactacgagatcaccggcgacgagtgcccgcacctccggctgctcgacatggacgtcggcctggcaaacatcgcccgcggttctatgatggcgccgagctacaacacccgtgccaacaagatagctatcgtcctcaagggccagggctacttcgagatggcgtgtccgcacgtctccggcggccggtcgtcgccgcgccgtgagcgcgggcacggccgagaggaagaggaggagcgggaagaggagcaaggcggtggcggtgggcaaaaggcgaggagctacaggcaggtgaaatcccgcatcagagagggctccgtcatcgtgatcccggcggggcacccgaccgcgctggtcgccggcgaagacaagaacctcgccgtcctctgcttcgaagtgaacgccagcttcgacgataaggtgttcctcgcgggcacgaacagcgcgcttcagaagatggataggccggcgaagctgctggcgttcggggcggacgaggagcagcaggtggaccgtgtcatcggagcacagaaggacgccgtcttccttcgcgggccccagagccacagggtctcgtcggtgtaagtgcatgcttgagatgtagcggccgctcatcggcctcgagacctcgacggtcgcggccaccccggtggtgaggttaagaagtggaataaagtaggtgatggctcgccggcgtcgcgttacgtatgaacagtagtatgtacgtccagtggagggtgacgcccggccgtacgggagtatgtaatctacctacctacctatgcaggtgaaataacgttgttgagacttgagaaaaaaaaaaaaaaaaaaaaaaaaaaaaaaaaaaaaaaaaaaaaaaaaaaaaaaaaaaaaaaaaaaaaaaaaaaaaaaaaaaagggcgggccgctcgcgaatctaaaaactagcgggac

SEQ ID NO: 117351 - DNA, 1176 bp, Zea mays
  Clone ID: MRT4577_38511C.1
ggaattccccacgcgtccgaataaaggcacatctcttgcctcctctttcgcgctgtccggagaggaggggcaggaggaggccgcaccaaatctatctggggatcggagcgcgggcgacaagatgccacgcggcggcaagcccgcggcttcgtcgaagccgaacccgttcgactcggactcggactcggagtccagcaataagccggcgaacaagtccggggcgtcgtcgtaccaggcccccgccgacgccaagaagcggtacaaggacgggttccgggactcgggcgggctggagaaccagtcggtgcaggagctggagcactacgcggcgtacaaggccgaggagacgacggacgcgctcgccggctgcctgcgcatcgccgaggacatcaggcaggacgccagcgacacgctgatcacgctgcacaagcagggggagcagatcagccggacgcacgagaaggccgtcgagatcgaccaggacctcgccaagagcgagaccctcctcgggagcctcggaggcttcttctccaagacgtggaagcccaagaagacgaggcagatcaagggaccagcgcaggtgtcacgagatgactccttcaagaagaaggccagccgcatggagcagagggacaagctgggcctgagcccgcgagggaagcgcgaccctcgccactacgctgaggccaccgacgccatggacaaagtccagatcgagaagaagaagcaggacgacgccctcgacgacctcagcggcgtgctgggccagctcaagggcatggccgtcgacatgggctccgagcttgacaggcaaaacgaagcgctggatcatctgcaaggcgacgtggaggagctcaactccagggtgaagggagcaaaccagcgtgcgcgcaagctcgtcgccaaataggccgcctagctcgaacgtgggagcttgcgcattcctgggtctggtttgcgccacgattcaccctcgccggctgattgcttgctgtaacatgcatgtattcgctctccattgcattgcattgggagcgttttttctgttcaacagagaatgttctttctccttgcattgttcaccaaagttatactatatgggaaaaaaagaaaaagaaaaacagcagtggaaaaaaaaaaaaaaaaaaaaaaaaaaaattcgggggggggcccgga

SEQ ID NO: 117352 - DNA, 1738 bp, Zea mays
  Clone ID: MRT4577_38512C.1
ccgggatcgaacgcacactcgcactcgcactcgcacgtacacggtacaccacactagctaccacagacgacgggcgccatgaaagtcccggtgcttctcctcctggtctccctgtgcttctcgctcgcgctcgcgtggcaaacggacacggactcgggctcaggcaggccgtaccactacggcgaggagagtttccggcactggacgcgctcccggcagggccggttcagggtgctggaacggttcacccacgagctgctggaggacgccgtcggcaactaccgcgtcgccgagctggaggccgcgccgcgcgcgttcctgcagcccagccactacgacgccgacgaggtgatgttcgtgaaggaaggcgagggcgtcatcgtgctgctcagcggcgggaagagggagtcgttctgcgtcagggagggcgacgtcatggtcatccccgcgggcgccgtcgtgtactcggccaacacgcaccagtccgagtggttccgcgtcgtcatgctcctcagccccgtcgtctccacgtctggacgcttcgaggagttcttccccatcggaggcgagagccccgagtccttcctcagcgtcttcagcgacgacgttatccaggcgtcgttcaacactcgccgggaggagtgggagaaagtgttcgagaagcagagcaagggggagatcacgacgggcgtccgaggaacagatccgggagctgagcaggtcctgctcacgtggtggccgcagcagccgcagcgagggtggcgactcgggttcttcttcttccaagtgggagatcaagccgtccagcctcacggacaagaagccgacccattccaacagccacggcaggcactacgagatcaccggcgacgagtgcccgcacctccggctgctcgacatggacgtcggcctggcaaacatcgcccgcggttctatgatggcgccgagctacaacacccgcgccaacaagatagctatcgtcctcaagggccagggctacttcgagatggcgtgcccgcacgtctccggcggccggtcgtcgccgcgccgggagcgtgggcacggcccgagaggaagaggaggagcgggaagaggagcaaggcggtggcggtgggcaaaagtcgaggagctacaggcaggtgaaatcccgcatcagagagggctccgtcatcgtgatcccggcggggcacccgaccgcgctggtcgccggcgaagacaagaacctcgccgtcctctgcttcgaagtgaacgccagcttcgacgataaggtgttcctcgcgggcacgaacagcgcgcttcagaagatggataggccggcgaagctgctggcgttcggggcggacgaggagcagcaggtggaccgtgtcataggagcacagaaggacgccgtcttcctggcgcgggccccagagccacagggtctcgtcggtgtaagtagtgcatgcttgagatgtagcggccgctcatcggcctcgagacctcgacggtcgcggccaccccggtggtgaggttaagaagtggaataaagtaggtgatggctcgccggcgtcgcgttacgtatgaacagtagtatgtacgtccagtggagggtgacgcccggccgtacgggagtatgtaatctacctacctacctatgcaggtgaaataacgttgttgagacttgagacatcctgtctgctcttggaaaatgtaaagacagtcgtgctgccttccattccataaaaaaaaaaaaaaaaaa

SEQ ID NO: 117353 - DNA, 463 bp, Zea mays
  Clone ID: MRT4577_38513C.1
cctcgaggccggccgggaggatattatagtggaatgtggcacaaccgtgcgaacggcaccccctcctagagcggaaccacattccaagaaatctaaagtcaagcaaggggcgcgcctcccagttcgggtcctacggcgatgacgcgtacaactgttactctcctctctacgatcaagtccagagcgttctctgaaactcggcgaccgatcccctcctccgccgtataccagcggacacctcatggacagaggatgaccaacgtccgccgctacctggcgcgcaattgcccggtggactcctccacgtttcagaggaccataacataaggagcatctacgagtcataaagcgagagctactgtcaaatgggaagatattatgaccggccagaagatagatctaccagaggacgttcgctgatggagatcatagaccagcacggagatcaggagaaaacccaccg

SEQ ID NO: 117354 - DNA, 2315 bp, Zea mays
  Clone ID: MRT4577_38514C.1
ttgggtacctcgaggccggccgggaatgcggcgcctccactttgcgatgcccgcgtcctcgctcccctccccatcctcctcatctaccgtgctctccattccccacccgctcccaccgccgctcgcagatgccgcccaaggtggtcgccgtcgccgcgggcgaggcccacacactcgccctcacgggtgacgggcaggtgtactcctggggcagggggccgttcggtcgcctcgggaacggccgcgaggacgacaagctggtccccaccgcggtggcgcccgcggtctctgccagcgggacaccgcggcccaggttcgtcgccgtcgcggctggtgcctaccacagccttgcgctggacgatgaaggttcactctggtcatggggttacaatctctatggtcaacttggctatggggaccagaattccctttttccatgtttcgttgagcaatttcaggatttaggttctcctgaaacactgaatgatgaagaccagaacacacgtggtcgcacttgtttgaagctgtcttctgtcacagctggtggcatgatgtcgcttgccatagacagtttggggagcctttggatgtgggggagttgcccacagcagactgatgccggagagttttgtatttcaagtagctctatcccactacctgtgtgggatttccatggacacaccgttgttaaggttgcctgtggtaacgagcatgtagtagctgcagttagtgctggggagacctatactggaggtgaccttgtttgttacgcttggggaaataacaaccatggtcagttgggtctaggtgacaaggaaagtagatctcgtcctgtgcttatttcagcatttagtgaaggatcttcctgggaggtgtatgaaattgcatgcggagcttcccatactgcagtcctcgccaataagaagtccactgaccagatagaatctcggtgctggacatttggccttggtgacaaggggcagcttggccatggaaccacagccaccatttgctcaccacaacctgtcgatggattaccaaccggatccttccttatttctcttgactgtggattgttccacacaaccgtagtctcctctgatggagaggtgtggtgctggggaatggagagaggtcttggattgtgcccagatgctagcttttcgggagttgatgaaggggatgctttatatccaataagagttcagtctcctgagaccaatgggttcaagtttcttggtccagtgcagatcgcctgtggagctgcccacactgttcttgttgctggtgatgggtataggatgtgggcatggggcagaggccgcagtggtgtgcttgggagaggccagactgctgacagttacataccatgcgttgtgatgtggcctcctcttgatgagaactttcatgaggaccaaatgggaggatcaacatcaagagtgaatgatcacactagcactgagttggaacagaagctatctgctgcctcggaggagttacaattccttaggtcaaaactgacactcatggagagatatgccaatatacttcacatctcaatcttccgtaagccacttgatgaacgggcgctaccacgttcacttcaggaatcttccgtctttgatatcagaaaggaatttgagaacattttggatgcagcagatactgatgaacttaatcgtttagagatcttctaccgcagcatgctttctggcgttaaagacaagcttctgaagagaagagtacgagaaatggtccaacaatgcattatttcactcagcagggaggccaaaccctaaagataagtgaattggattattacacttgttaccggactgcaagtgggtacagtatcacctttggtctcactaaaattgcaaaaaaaaaaggtcaacccagtgtcttatctgtttcttcaaacatagtgagtagatctgtcctggcatcaagatcatcacctggccgaccattgcacgaagacagcattactcatactgacatgtaagcatatatgttgtttatgaaattctttatatgataaatgcatcctagataaattgaatcctgtgtaaaggatgtttctgtggattgtcatagacggacaagaatttatggacatatggttaaagtgttatcggaaaagccttaggcaagtagcagtttaaattataaaaaaaaaaaaaaaaaaagcggccgtagtaaggcttttttttatcatggtgacatttgagattttttatttgaatatttttgcaaatagtttctcttacatctatttttttcaaatatctttgaaaaatactcccgtttacttt

SEQ ID NO: 117355 - DNA, 755 bp, Zea mays
  Clone ID: MRT4577_38515C.1
cattgggtacctcgaggccggccgggctccagccgccgctcctgcctccagccgccgctcctgccgtgtatcgcgtggccgcacgcccgcacagctcctctccagcgccgcatcgagcttactgctcagcgcctcatgctcggctgctcgcctgctcctgcccagctgcccttctctcctctccagcgcaacgcctgttctccagcggccagcgccgcgctgctgcgcgctcgcggctcgcggctagccaccggccaggcccaggccacaccgctgcaggcagcactgccaggcacagcacagccacacaggcgcctagctgcccagccaggcacacagcgcagcgcgctcgacggctcgagtccgtatcttgaccgccgttgggcttgcaggagagccacgatcttgagctccttccttattctacagtttttataccgacaattagtggtgttttttgtattgtcttttatgggccgggaaccctacaaccaagatttgctctctctggtatgtactagtatatttgtatgattattatccaaatcttagattaggggcacaagcgatttcaaggaaaaaagacctctacccagaggagaggagacgatgtcaaagtatacatttagctggttcggcctggctgattaggaaaaaagacatctacccagaaaggtacctgcaagattattgtatttataaaatttgtatttataaaatttttatcgaccaaaaaaaaaaaaaaaaaagcggcc

SEQ ID NO: 117356 - DNA, 307 bp, Zea mays
  unsure (1)..(307): unsure at all n locations
  Clone ID: MRT4577_38516C.1
ggtaaaatgaatttaaaaagtgctccatagtccttaagctgaatgacagaccctgcagcatttttatacgtnatcctgcaagacaacacaaccggttcaattacattcgggcgttacaacacagtaagagaacgtgtagaactaccgatacatttnaccttgtatatggtattgtaaaggtataattagttagggctgaggtgccaatcttataggtatacaatgttttgtaatggaatgatgttatatatgaatgaattataatattaaagtggggtaacaaaaagtgtataattggtgggttata

SEQ ID NO: 117357 - DNA, 1006 bp, Zea mays
  unsure (1)..(1006): unsure at all n locations
  Clone ID: MRT4577_38517C.1
gcctgatctgcatgtctcaatgcaaaatcttcttctggggaagtctggtgagggaaagatggccnaacatattctatggtggatgagcaggaaggttcagctgatgccctggttcccccactaactcatgcatgaaacttgaaggaaaccccgcgcccattagagacggaaaaagtaaggttcaagtttgccgcccgctaactttcgccaaatgcatctgcaaccttcatgtcttattggaggtgagatgaggttctattatcgcatgacatgctcacagattcctgtgcatggcatgcctatgatatgtggcccatcatttcctcccctgtatccatcccatgcatcaaagtttggtcagatggccacgtgggacaaaaggcgcagtttcttgctgctgctccagtaagaaagagcgggctcgaatcgcgttgtcacaggattatttttgtatcgatcagggtggccaagtccatttatgtcagacatatcctccctgctgctgctggtaggttgtgaatttcctagcattcttttccctttggccgcttgcattgtctttgcatttcattcttggtcggtctattttgtaagagttgctttgggggcaaaacatgtgtcctgtccggtctgctaccgcacgctatttgtacaagtcaggtccgtgcgtgcattggtttatttcccggtgttatcggagcagcgcgtgtttgtgcctttttccaccgtgtttttggtaatctacatacatgctgctccatttcggtttatgaggagctgtgtgggtgaagaaacagagatagagttatataggtctttgaagtggttcttgctggtggcagaggcaaattgagttgggtgtggtttatgaattgtaccatggtgtggagaagacccactggtaatatttactgtatttggctggtgctccgccgcagagcatatgagcaaagttaagcgtgagtgctctttttctcagcttcatctaaaaaaaaaaaaaaaccga

SEQ ID NO: 117358 - DNA, 527 bp, Zea mays
  Clone ID: MRT4577_38518C.1
aaaaaacaaagggggccataatttttactttttttttcttttttttttcccaaaaataagttttccccccccttaatttggggtttggtttaaaaaacgggggcaaaaagtttccgggcggaaaaggaaacaagggtaaaaaaaggaccaggggggaccaatgggcaacaaatttttgttctaaaaactcacccgatcctgaatggggggggccacctcgggttccccaatggaaaggactatccgggggcttaaaatttttttttggcacataaacccccaaaatggtttggggtttttatgggggccccctttgttaaaaaggaaaggtttttaaggtttctttttggttgggggactttgaaaaaaaaccctattttttttctggagggccgcctaaaaaggttaccccttggaataaagcgcaaaggtggggggacaccctttgacgggggggggggaaactttggctaaggttgaacccaaagggaatttacttgggcaaaaggagaaggggattaaggggg

SEQ ID NO: 117359 - DNA, 588 bp, Zea mays
  Clone ID: MRT4577_38519C.1
ggccgcttttttttttttttttttcttttttttttttttttttttttttttttttttttttttttttttttttttttattcaacggccataaaaataatgcacgaaaatgtacacaaatcctttttttataaaaccaaaatgtagggcggaaaaagtacatgggggggggagtcgacacccgggggcagaacattaaccaccacccgccccgccgcccggggttccaaagcaaccaatgcattattatcggcgtggtcgtacataaagaatcgatcgtggggccgggaaaattaaataacacccccaaaggaaaaaaaaaagatgaaactgaaatggagcgagcagcaacgtcgaggcacgcggggggggggacaacatcggcgtgactaggggggacaggaaaaaaagtcggagtttactactaaaagcaagaaggggaggcccgggcccgccaacgccaccaccgtggggaaaccgaccgcgcgcgcgcttgcacccgagtcttcgtttcgtggcgtgcccgtgggcaaaagcaagggccccggggacgtcgggggggcggggctcggcgttttggggcttttggg

SEQ ID NO: 117360 - DNA, 1438 bp, Zea mays
  Clone ID: MRT4577_3851C.1
ctcgaggccggccgggaaactttgaatccctaaaccttatgaaatgcaacaacattcccagccgccgccgccgccgcccggccgtctcgtcccctctcgtcgccttctcagccaagctaaaacctcgctctccttgtccagtcagattctcctccgcaatccgccattgcgctccgttatgcaggcgttcgcgcgcctctcctccgctgcctccaggaaagtgatcgcgggtgtctctagcgcaaccacacggtcgtgctaccggacctcccgggggttggcgcatgcggcgtcgctgcctgcgcaggagcctccaccgaaggggcagaagaggattacgaagcaggagaggaggactaggataatggaatttattgagaattatagggcttcaaatgatggcaagtttcctactattaaaaatatccgtcagcaagtggggggcagtcactacacagcgcgtgagataattcaagaaatggagtataataatgcaaaattaccactgagcaatgccaaggcagctccacttcaaggaacagttgaagtcattgagcactccatgcctaaggatgaagccatagtggttgaaagtcatggaatactagaagtttctgagcactccatgaccaaggatggtgatgaagcggctcaaattcaaggaacaattgaagtttctgagcactccttccctaaggatgaatgtaagttggctcagtgtcaaggaccatttcgatttcctgagcactcaaggcctaaggacgacagtggaaatgttgctaaacatgatatggacactccagaaacctgtaagactgcagacttccccgctttatctgatcaaacagagagcgagataatggaggacctaacggacaaaccagaccctggaaaccagcaaagggaaatagaagctatcaaatttaatttgaagcattatgaaaaacccttgaatgcaaatgattcaaatgcaaagacgcatgccagagaagacaacccaaagcttgaggaatccgcgaacacaggacttttgggcagcctgaaatcttttgcttatggcatcagaaacttctggaaaaatctgtaaatgtctttctttttggccgtcgcctagcacgcttggtcctcgtggcttcatcaatttctaaagctatggtcactagaccgtgcatatgacggtgcatcacactattttacgctgcaaactatacggtttgcagagtggagtttgaaaatggaggcgagatgagtaaagtatctggagatagcctaatcggactaaaattgagaaggctacagaattgataacttgtccctttgttaagtgtttgcgatacagggccaatttgtaaagttctttttatgcgatacaactaatgtcaacttctcgctgtggcactttgataaagctagatacaaggattattgttactgccct

SEQ ID NO: 117361 - DNA, 264 bp, Zea mays
  Clone ID: MRT4577_38520C.1
agagcaaattaaagcactggtgcatataatgattattggacaaattgacaagatcaccggcgccccgctggagaaaaaaaaacattttctttttcagagaaaataaatccggacaaattgaactttcattggcgcaaacaatcactgggcatgcatgttccatccatccattcatgggtttcgggccaacactgaatttatttttttcgcgggttcgcccccagagaagcacccacaacatggggggaaaaagcccgatttctt

SEQ ID NO: 117362 - DNA, 783 bp, Zea mays
  Clone ID: MRT4577_38521C.1
cgcaggccggtccctgggctccgactacgtggtggcgcgctacaggctgccgcgcccgctggcgctcaccgccacgctcctcctcgccttcttcggccacctcctcgtcgccgcgggcctgcgtgatggcgtctacgccgcgtcgctcatcatgggcttctgcctcggctctctatggacggtgctgttcgccgtcgtgtcggaggtgtttgggctgaagcacttctccacgctctacaacctgtccacgttggcgagccccgtcggatcctacgtgctgagcgtgcaggtggcgggccggatgtacgaccgtgaggcgcaacggcagggccatcgccggcaagacgagctcgcctgcgttgggggttcagtgcttcagggcatcgttcgagatcatcgccggtgtcacgttgctcggcgtggcggtgtccatggtgatggcctggaggacgagggcgttctaccatgataggacgcggttcttattcagtgctgctgctgacacagccgccacgacagacagcagcagcagcaggcaagaagacgaaaacaaaacgatagctgcaagtcaaagtatcggtatttgctagatatactctcggtcgtcgtcgtagcgaagacattaggatacaaaaagtcctctatatatctcttgcatatcatgcagtgtgtgtgcaacatgcgctggtacaatcatacttcttaaggtgacacaccacactaatttaaagcgaggacgagtgtcttgtcttaatagtggcggtacacaccatacttctatgt

SEQ ID NO: 117363 - DNA, 293 bp, Zea mays
  Clone ID: MRT4577_38522C.1
gttggttaggcaatctttctagggcagaaagaagtacaggataggaagagcataatacactgtttttctcaacaaggagcagtatgtacacagtcataatgatgtgactgcttagcccctaaatatggtaactactctgggacaatatgggaggaaaagtgaagattgtgatggtgtaagagctaaatcctcatctgtcatatccagaaatcactatataatatataataatgaaatgactaagttatgtgaggaaaaaaacagaagacattgctaaaagagttaaaagtcat

SEQ ID NO: 117364 - DNA, 490 bp, Zea mays
  unsure (1)..(490): unsure at all n locations
  Clone ID: MRT4577_38523C.1
gcncaacatgctgccagacatgctgctaggcatgttactgcgtatgctgttacgggtactggtgagggaaagtgtgctagcagatgtacttacagaggcataaattgaggcatttgttgtggaccaggctatagtacctgaaaaactacatacacctttgtatgacgatttctacaacagtagtcaccaaagtagcaagcaaactttcaaagtaaaatcacaaatgaccccaaaatggacccctcctggaaagtaaactacaagagagacatgggaaggtgcatgtaacacttttaataacacatgtaccaagaactgcactaagcactttgctataaacagcgtgctggttagcagacaaattgttagagatatagttaatgcttaacttaatgaacttgatgatgaactccatcatgatgcccacgatagcccaaccatcaggttcaccaaatggcaaaagaagtggaaacaagagcttgaccaggaa

SEQ ID NO: 117365 - DNA, 351 bp, Zea mays
  Clone ID: MRT4577_38524C.1
agggcgaacaattactttaaaaaaggggggacccattgctgggggctaccacatgagtgggatatgagggatgggctaaaccaaaaacagactggcccgtaccaaactcgaaaaacaattattttattagggtgtccacagcagcgatactatactacccctattatggttgttattcaaaaccggactcaatgaacagggatgttcattgtggatgaacttttttacatggtttactgtggacaaccttagtgcatattttttgtggcgggattagatagatttttacaagtgcctacttacgaatgcgttttagcatcacatagcgtacttatcaagtatcaattattt

SEQ ID NO: 117366 - DNA, 174 bp, Zea mays
  Clone ID: MRT4577_38525C.1
cgggggagttcgcttcttctcgcatcttgctttacttcgaggcatggcatgcgcggagggacgttgtctcgccgccaccgacccctgcggccccagcggggcgcctaactcgcccctgcagcctgttgtgacggcctaacgaaaggttgccgcgccggagaggcccgggattag

SEQ ID NO: 117367 - DNA, 207 bp, Zea mays
  Clone ID: MRT4577_38526C.1
cctagcttgaaatgactgaccgtctctatacagccacctaaacttgaataaactggccggggacttaaaacgaatggactggaaaaactgtggctttacccagctgactcaccttgcaaaagatccgcatctagcgagcttgcgaacaagcgaacaggccggaacgcatagggatgcgaacagtagcgcagcatgaagggcgaatgg

SEQ ID NO: 117368 - DNA, 363 bp, Zea mays
  Clone ID: MRT4577_38527C.1
cggccgcacgagggatggatggagcctgaacttcactcttcgcgtgagggcgggatccgatgatgggcttgtgcgagcatctacagcttttagggaaaaagggtggatgaacatgaggactgacaggttttttgaatagctacatacattatcatctcagcgaggtgagcttaagctcgacaactctgttatcctaagagatgctactcttatgatatattcatctgccattcatatactgagttgcttgaatatactagtgaccgccttgaagaaaacatgacatatactcattgttattcctcacttttcttttaaacactgttagaccgcacagatcatgcacatgatcctgagtgcctg

SEQ ID NO: 117369 - DNA, 515 bp, Zea mays
  unsure (1)..(515): unsure at all n locations
  Clone ID: MRT4577_38528C.1
attgggtacctcgaggccggccgggaaatncgtaagctcggaattcgtagtagtagtatcgagcaaaagacgtggcgccgccgtggcgctgatagatgcggccatggacagtaacggcgagtgctcggcccccaccctcagcgccgcgcttctgcccctcttcggcccaccgccggagccgctgccggagagtctcgaggacaagctgaggcgggtgagcgaggagaaccggaggctggccgccgcgctggacgccatactcgccgaccgctccaccccgcgagcgctgtccacgtcgtcgccggccgggggcactgcggtggccgccgcggagccgccgcggcccaaggtccggacggatgtgtgcgcgcgccgagccgtatgacgccgacaccaaccaccttagggactgctaccagtggcgcaagtacggccagaaggtgacgcgggacaacccgcatccgagatcctacttccgctgggcgtacgcgccctcctgccccgtcaagaagaag

SEQ ID NO: 117370 - DNA, 517 bp, Zea mays
  Clone ID: MRT4577_38529C.1
gtttactgtcctgcaaccgagcgcgcggggacagccctccggcggaccgggacccgctctttgtgtttatacctccggcggggcgacccacgccaacctaagaccccaggtaacggtacaaagtctgatactctccaccgcagatgacgcggatccaaaccagaggcccatggctgtcctttagttcccgaccacaccacaaactaccgacatgtcggctaccggtaccgacgaggccggagcggaggagcgcctccaggagctgaaggggaggctcgggaagaagcagcactacgaggaggccgcaaacaagctcgccggcggcggtcgggaccgatacctcggcgcctccgccggcctccgcaaagggatgcattgaagagattgacagggtgtaccacagctgcaaaccagatatacagcttcagcatactggcgtgcaggcttgaacctcttacgttggaatagagaatctgcgaagtaattctgctgaaaaggacacatgaagacctgcatt

SEQ ID NO: 117371 - DNA, 210 bp, Zea mays
  Clone ID: MRT4577_3852C.1
cgcggtccggccggactcccggtcgcccacgcgtccgaacaggttcttcagtttctctctgtgtcacacacaccaacaatacctatgtatggcaggggcgcggcctgcttacagaggcaggcagcccgatggcgtgggcggcaccatataggaagggggccaggcggtatgacttgggactagagaggtactaaaaaaagaggggggggg

SEQ ID NO: 117372 - DNA, 903 bp, Zea mays
  Clone ID: MRT4577_38530C.1
atggtcgacgccggcccgccccgatcttctcaagcgcatgccacggtcgacgccgatctacctcgatcttctaccgcgcctgccatggtcgacacagcacgaccccaatcttctccgctgcatgccatggttgacgccaactcgcctcgatcttgtacctgtgatgccatggttgacgccgacctacctcgatcttctacctgtgatgccatggttgacgtcgatctgccccaaacgagcatagccccatgggtcctgaccccatcaagcacaaccacatggatcccgtcagcaggaaccacacatctcatttcaccttttggaacacctgaaaagaatacagtcatgtcccccttgatgtatgctactcatgttcctgaagtacatgaatctatgaagccatttgttggacaaatttttgaaagattgcaagatgcagaggaattttatagaagatatgcaaaagaggctcgttttggagttcgtattggtccacatacagatttgaatggtgttagaagatggcaaagatggttgtgttctaaacagggatataggtctaagaaaaaggtagacagcaaaccgaaacgtattcaaaagatttctaggtgtggttgtgaagcagttctagctgtcaagctgattgaagataataagtttcgggtggagatatttgtggaatcacatacacatagtcttgtttcaccagacaaggtccacttgattaggtcgaacagagaagttaatgagaaggctaagcgtgcattagtggcatgccacaagggaggcatcggtacaagtggggcatacagatcgagtcctttattggttgttcaattcctaaccatgttattatacagccacctaatgaagtcaaatctgtgggtaggtgcaaacgaataa

SEQ ID NO: 117373 - DNA, 285 bp, Zea mays
  unsure (1)..(285): unsure at all n locations
  Clone ID: MRT4577_38531C.1
cgacctcgcgnccggaancgattagcagacnggaggataagctctgcggctccacaaacagactngcttctgacgatgccaaaattaatcaagagggattgataggaggggctgattttgggagctcaccaacgcatggggaatcaacttctgatcagcaggatgatggaaacaaatctggtcaaaaccataaggataacggggcttggtctcgtcccgggggtggggaaccggggggtgcgggtcttgggggtgaacggtgcctggggggtgcggggttggggg

SEQ ID NO: 117374 - DNA, 1685 bp, Zea mays
  unsure (1)..(1685): unsure at all n locations
  Clone ID: MRT4577_38532C.1
nnaaaaattccaaaaaaaaagaaaaaaaaaaaaaaaaaaaaaaaaaaaaaaaaaaaatcgagaaaaaaaggatcgtctgctggcatcgttccattctcctctaaaccctagccgcctagcgcctcgatctgagcagcctgtctcgcggaggtagttctggttgatttggtcctagatggcggaggaaaaagtggggcggatcttcgtcggcgggctgtcgtggaacaccacggagcgcacgctcgagcgcaccttcggtcagtacggcaaggtcatcgaggctcaggttgtagtggaaagggagacaggccgctctaggggatttggatttgtcacattttcagaacctcgggctgtggatgctgccattcggggaatgcataacggagaactggatggccgcaatatttctgtgaacaaagctgaacctaggaactctgatggctatggatatggtggtggtggtggtggtggttactcgtccggtggtagaggtggatatcgtagtggagctgatgtagttccagcagccagtgatgattgtttcaaatgtggccgtcctggacattgggctcgtgaatgcccttattcagatggaagtggtagaactggaaggtattctcccggttcaaggtatggtggtggcactggtggacgtggtgatcgctttggaggatcagatcgttttgctcgctatgatgatgatcgatatgatggtgggcgctatgtggacagcagggatacttattatggttccgggcgcgatcgctatgcaccggcagcagaacgctattctggtgacaggtacagtggtgcagatcgatatgcgtccagcggctttgccagagaaaggagctatgagagagatggagggaggtccaatggaggttactaccgtgatgaaccgaggggcactggtggctatggcagaggtggttcacgtggcggcggcggcggtgggcctgctcgctttggtgggagttaccgagataggcctgctccatacgatcgtcccagcaggggaggagcagctcgtgcttatgatgatcgttactgaagaatgttcccctgaggcagaacagagatatctgtgtatttcagctatgcactagtatttacatttgccagcttgatccttcaattccgtgttatccagcagttgcagtttgttttattagtctatgaagacaatggttcagtccatgggttattaatatgctggtaccgtaatctttaggcagtgtgctcctggttgattcgtcatgtttgtgtaactactttggagtttgcactaaataatgaactaattccagtatgtggtctttgaattggacttccgttatgcttactgagatagctgtgccgcattctgcattgaggatgaactttgcaccgataattctgagatgtgctgtgcggcaatgtgcagatcgatctgttcagctcttgatgctgctgggttttgttggtctaatatcaggaaggtttaattctgcttctactctgggctgagtaagatggtgcgaatctgagtctcagaaaaactgtggttcatgcagtcaggtgatggttatgatgttttcctgatgcagatgaatgcgttatgttactgatttactagcgatgtctggtgcagatccgcagataaacttggcttctttgctctgttctctggcttattctaa

SEQ ID NO: 117375 - DNA, 593 bp, Zea mays
  unsure (1)..(593): unsure at all n locations
  Clone ID: MRT4577_38533C.1
cggggtttgttggcatcgttccattcccctctaaaccctagccgcctagcgcctcgatccgagcagccctaggtctcgcggaggtagttctggttgatttggtccaagatggcggaggaaaaggtggggcggatcttcgtcggcgggctgtcgtggaacaccacggagcgcacgctcgagcgcaccttcggtcagtacggcaaggtcatcgaggctcagctgctgattcagagactgcagtcagttcaatttctgcatgttaggaagttagcgaagttgcaggaaaagaaattcactaatcatttgagctcactggttgtagtggaaagggagacaggccgctctaggggatttggatttgtcacattttcagaacctcgggctgtggatgctgccattcggggaatgcataacggagaactggatggccgcaatatttctgtgaacaaagctgaacctaggaactctgatggctatggatatggtggtggtggtgnggtggtggtggtggttactcgtccggtggtngaggtggatatngtagtggggctgatgtagttncagcagccagtgatgattgtttnaaatgtggc

SEQ ID NO: 117376 - DNA, 556 bp, Zea mays
  Clone ID: MRT4577_38534C.1
gggcgcgatcgctatgcaccggcagcagaacgctattctggtgacaggtacagtggtgcagatcgttatgcgtccagcggctttgccagagaaaggagctatgagagagatggagggaggtccaatggaggttactaccggactagttctagcggcactggtggctatggcagaggtggttcacgtggcggcggcggcggcgggcctgctcgctttggtgggagttaccgagataggcctgctccatacgatcgtcccagcaggggaggggcagctcgtgcttatgatgatcgttactgaggaatgtttccttgaggcagaacagagatatctgtgtatttcagctatgcactagtatttacatttgccaggttgatccttcaattccgtgctatccagcagttgcagtttgttttattgttcagtccatgagttattagtatgctggtaccgtaatctttgggcagtgtgctcctggttgattcgtcatgtttgtgtaactactttggactttgcactaaataatgaactaattccagtatgtgttctttgaatt

SEQ ID NO: 117377 - DNA, 1045 bp, Zea mays
  Clone ID: MRT4577_38535C.1
tccccttcttcctcgcagacgccgccgcccaccgcagctgccgcccaccgactgccccgccgccaccgcctctccgcggttgttgctgcttcaacaaggagggacggctatcggagcaggactacggcacccgggcggcgcggtgacggcggagtgggctccatctgggtaaacccgagcgctccgccgcgccccggcgtggccagccgcactctccgccgcctcgttgagctcgacaacctcgacgccgcgctgcgtctcctcctcggcggtccctcctcaacgcccgcgacctcggactcggcgccggagccgccggctgtcatcagctgcaacatcctcatcaagaagctctgcgcccgccgccgcctcgccgacgcggagcgcgtgcttgaggcgctcaaggtctctggtgctgccgacgccgtctcccataacaccctcgtcgcgggttactgccgcgacggcagcctcggggacgcggagcgcgtggtcgaggcggctagggcatctggcaccgcgaacgtagttacctacacagccctcatcgacgggtactgccgctccgggcgcctcgccgatgccctgcgcctcatcgcctccatgcctgtggcgcccgacacctacacctacaacaccgtgttgaagggcttgcgctgtgctaagcagtgggagcaggccgaggaactcatgcgggagatgatccggaacagttgccatccgaatgaggtgaccttcgccacacagatccgtgctttctgccaaaatgggttgcttgaccgagctgtggagcttcttgagcaaatgccaaagtatgggtgcacgcctgatgttatcatatacagtacgctggttaatggattctcagagcatgggcgtgtagatgaggcactcaagctattgaacaccatgttatgcaggcctaatacggtttgttataatgctgcattgaagggtttatgtattgctgggcgatgggaggaagttggagagctcatagctgaaatggttaggaaagattgcccgccaaatgatgcaacattta

SEQ ID NO: 117378 - DNA, 395 bp, Zea mays
  Clone ID: MRT4577_38536C.1
gttctagatcgcgagcggctgccctttttttttttttttttttttttagactaaacatatattgattagttaatctatgaatgtggcttgtatttgtgtctatatttattatcattcattcgaacgattgacagaaaaagaaaaagagtgctaaaaagaacgagtattcactgacatttcgtggcattgttctccgtcaaggaggtgctactctacgctaccaaaaggccaaagagagagctcacagaaatttcctgtccttttctgcaagcacaaaatttccgaaatctctgccgactaataataattctaattacgcgaccgatgatcgatcaaatcactagaccaaattctgcgttccatcgaggacgagtattgggctgcgaacagagtac

SEQ ID NO: 117379 - DNA, 978 bp, Zea mays
  Clone ID: MRT4577_38537C.1
ggccgtaccgtacggcgccgggcggcacagcggtgtcctcatccgtggcgcaagtgtatgtaaggttccctccgggccactcgggagtctgcacggcgccttatcatcacacacggaaccagattgcgggcagccatagacgaagagagaaagaaaggtcaacagggcactgcttgcctgctgcgtagtgactagtgtgcctcaaccaaaaggatccatggctcccggagacgactctaaccccgccgcctcctatatccacacggtgcagcacctgatagagaggtgcatgacgttcgggatgagcatggaggagtgcatggaggcgctggctaagcgcgccgacgtcctgcccgtcgtcacctccacagtgtggaaggagctggagaaggagaacaaggagttcttcgacaagtaccaggagtggatatcggagaagcgaagcgcaggcacctcctagcgcggtggcactgaactagctgctggctttgcttagattagccatgatgtgtattgtttggttattcttggattcgttacttaggcattgtttagttattcttggattcgttacttaggctttctctagtgctaaaatctagggagtgtttggtttatagggactaatgtttagtcccttcattttattctattttagtctataaattgccaaatatagaaactaaaatagagttctaatttctatatttggtaattttggaactaaaatagaataaaatgtagggactaaaaattagtcactagaaaccaaacacccccttagtatctaataaaatttagcatatgctaaactttagcgcttgctgtcccttggtgtccacgaggagcatgcaactaatggtaagaaagagataaagcggtattcaatgtaaaatggggttgaagactacttttggcacagtttagcatctttgatggagctaaattgctaatagatactatatataacgggccctt

SEQ ID NO: 117380 - DNA, 393 bp, Zea mays
  Clone ID: MRT4577_38538C.1
agttgttataatttatggaatctaagtaactagcaaactaattactaaccagtataggaaaatgttgcttgctatcacattggagccagcaattgtattaacactttgggtaggatatgaatattagactgtcatttgtcagaacatcagtaaggcgtgaagaatcagaagaatattcagtcgaagctggtgatgaattaacatgccatattgccatgctacttgaaacactggtcagcgctcgtgcatgtctcaccaactgcgctgcaggtacctgtgtccatgaccaactacaagaaagacacgaacggatgccagttcatcatcaccaccgtggaaggaagcaggtgctaagtgcacatttccgggcttacatacaagcattggagaaac

SEQ ID NO: 117381 - DNA, 470 bp, Zea mays
  unsure (1)..(470): unsure at all n locations
  Clone ID: MRT4577_38539C.1
agacgacgctcagaccaaagagcgagaagggggcaagcggcacgctgccggaaaagagaggctggcgtggtgaagggcagggcggagccttgcaccgcagaagagaagcgaggggagcgccaagcagtagtagaaagagagatagggaggaagagcgacgagagccgaggagctctcctccgcctaatccttggccgcgctgctagattcgccagaattaccgaggcgctgcaccccggatctacagggcggcggcggcgctcgtcggaatccggcggggcggcggtgatttgccggggatcggcgccgcatgtctcagatctgagatggacaggatccgggacggcaggaggagcggggtgtccggcggagccgggccgccgcctccgagaaggcgcctcaggagcaacggcggagggggccccagagactcgccgcgctccgagcgccgacgngnngagcgccncatg

SEQ ID NO: 117382 - DNA, 705 bp, Zea mays
  unsure (1)..(705): unsure at all n locations
  Clone ID: MRT4577_3853C.1
attgggtacctcgaggccggccgggaatgtcaacactccagtccactacaatcatcgctgtaggagatggaggaggcggcggcggcggcggcggaggtgaggtatgggatagtcggggtggggatgatgggccgggagcacctccacaacctcgcccacctcgccacagaggtcgagcgggagcagtccgtccgggtgcgggtcaccggcctcgccgacccccaccaggagtcactccgccttggcctccagctcgccgctgagctcggcctcccgcctccccagacctttccaggtcaccgcgagctgctggacagcgggctctgtgacgccatcatcgtatcatccccaaacatgacccactacgagatactcatggacatcatccaccatcgtgaaccgcagcacatccttgtcgagaagcccctgtgcaccactgtgcaggactgcaagaaggtcattgaagctgctaaacagagaccagagatagttgtgcaagttggattagaatacaggtatatgccacccgttgctaagctgatagacatcgttaagagcggtacactaggacaagtcagaatggtggcaatacgcgaacaccgttttccttttcttgttaggtaaancactggaatagatttcattgtacagtgnnggaactctagtagagagtgctgccacttncttgatctgatgatattgttt

SEQ ID NO: 117383 - DNA, 287 bp, Zea mays
  Clone ID: MRT4577_38540C.1
attattattataaattttttatattttaaatttttacgtatatttgtatatttgtaaacatctttttcttttttattttgccaaaaaacaaaaaaaaaataaatgtttttttccttgatttatccccaatttacaatgcctggaaagtttaagccacaacattttttaacagaaaagtgttgttctaaaccaaatcgtaaaaaacggggttactaactattgtgaaaaaattgctattttatgtaacaactaatattgggtgaatttcattcttttaatcttaaaaa

SEQ ID NO: 117384 - DNA, 272 bp, Zea mays
  Clone ID: MRT4577_38541C.1
atgatactggacatgttccgccatttttttaaaactgcctccaccaagcattcagaacaagtcacccactgtatggaaattataatgatgtttgtaattcaggagagcgatgatgtccatgctgaactggcatcattccttcttcagaaccttacaaaagaagcacaagaaactctcccggcatcttttggacttgcagagagggtactaggcctatgcagggacaagctcaaaccagtgtttcatgagttacttaaggccactctcttgga

SEQ ID NO: 117385 - DNA, 400 bp, Zea mays
  unsure (1)..(400): unsure at all n locations
  Clone ID: MRT4577_38542C.1
acctagcctagcaaccagccgccgacctcctctctaccatggatatgtgccttggagccaggggatccatcatcaccaatcttttcctcttctatacctcctcatgccgcggcatggatctccttgttcggttgtcatctagctaggagtatctggctagctcgccggccggccggaggaggaggagaaagaaatggaagtgtgactatggtgttggctcggctcactcagaagttgaagccgaatctaaatggtagctgccggcgtttctgattgagccgtgccaatatctcagtactctttcatgctgatctcgcgtcacgccagcatcgatctcttcctgaagtcgtgtagtctctctctcgtactctcatgcatnctnggcatgtgttcttatact

SEQ ID NO: 117386 - DNA, 209 bp, Zea mays
  Clone ID: MRT4577_38543C.1
agcggcccgcccgacggtgtcaagccaatttttccctcataccgtcatgtgttttctagaaataatcacaatatttgattgatatttatctcattacattccaccacacgccaaacccaatgagctcttcttcccatcaaccacaatcaaaatcaatttgggggggggggggccctccccgctaagaagacccccttaccaacctcctg

SEQ ID NO: 117387 - DNA, 1991 bp, Zea mays
  Clone ID: MRT4577_38544C.1
gattcatataataattaatgtatgtattttgtatatatatatctaaatttatcatacatgaatataaacataaaaaatgaagtctaaaatgaatactattttgggagggagggattactattctggaacgaagggtgtaccaccttggttctcaatatttgtcgctcgttagtttatttttaaactataccgcaacagattaaaaaaatgaagagagtattatttatacaacgaacccacttgaagattcagtgaaagtaacaagcaaccataacatcctggtctagccataaataaattaatgaattcaactctccaaggacagcttggggtcaacaaacccaatagcctgcccgtatttgggattcgtcaggctggctgcatcaggatcaggagcacgtgcgtcatattgccatttaccgcacttccgtaggcagtggccaatgttcttccccgcatgaacagtctccctgagtgtaaatagtaagggccatattatgaatcgaaaacatggtccgataccatatagccggaacttttgccaccccccttctataatggctgaagccatatccatcagtacattaatccaaagatgcagttagttaatgcttaacacagcagaagcacagagcaacttcggcttgggcttgtaaatctcccagagcttggacaatattttcccggctatctattgtttcttcttcatggtgaagcattttccgcaatcttcgtactagaggagtatcaccatggccggtgcatacaataagcatagaattgtcaggtagggcaccatataactgctttatctttttatccaattcacacaaaatttcctttaattcaggacaaatttgactttttgctttttttgaagcagtttttgtatcacatgtttttaatgcaatagcctctgcgacacatgatttcaacttttcgggatcttcagctcttcggcggaagtaagagatcaatcctgagaactgggtccaaatgaaagccactttgtcgttcttcacctccttcattgatctggagagggcatcatcatcagaaaagacagcaattgaattgcaagaagtatctgaatatcgatctagaatagacatgtcatcaataagggagcattttttcccactctcatgcagtatagatgtcaatttccgccttgacaacgatggttgggaaccaaaatcaggacctggttaacaagttagtagaaagtaccaacaaaatgatatgcttatgccatgttgtctccctatccacattagctatttacagctcgagccgaatgccaaacaaaagtgatagcaaaaatgccttcttagttcttaccatgtcttattttcaatatagcaagttctagagcagctctagcatcttccacactgtcatgcccagatcctgtgttctggatctaccggccgagaaatctttttgtcaagacacgcaaagcaatcttacagcgagatcctcgattatacttgtacaaaacagctgtgtcgatgattaaaccatgggatatctgcaatgccataaggtcattttccaaagaatgaccaacaagaattgtttctgtatatacaagtccaacaaactcttcctgaatttcatgcagggatgtggacacgtcagccaacatctcagcagtgattccactgaaccttgtattgtaatcaatgattggattagcaggcttaactagtctatctagcaccaccgatcctttaatgtcaattaatgtcactcttgtaagctcaaatccagcttctgttatgcacatttcacaatcaagtgctaccccttcaatttaccaggttttgtccctactgtttcagctccttcaggttccttgccacataaagttcttgcacttgattgtgaaatgtgcataacagaagctggaggagctgaaacagtagggtcaagtgcaagaactttatgtggcaaggaacctgaaggagctgaaacagtagggacaaaac

SEQ ID NO: 117388 - DNA, 479 bp, Zea mays
  Clone ID: MRT4577_38546C.1
cttatttgtccggcaccgttgactgcgacctgggggggcagaggaagaagcagatgctctccgagatccaagccgccgttgaggaagctgaatagatgattcggaagatggacctggaagcaaggagcctacaggctagcatgaaggctgggttgcttgcaaagctgagggagtataaaaatgacctgaacaacttcaagagtgagttcatgaggatatctgcgcccaatgccaggcaggctacccgggaggagctactggagtctgctatggctgagactatcgctgagactactgaacagaggagaacattgatgataacaactgagagactgaatcaattcactgacagaattaaagatagcctgagaactatggtggtgacagaagagcttgttgactagattcttcaagacctgcaccaactgatgcaggcactactacatgctcatgcgactttggaccgcgttgatgataac

SEQ ID NO: 117389 - DNA, 484 bp, Zea mays
  Clone ID: MRT4577_38547C.1
ctaaagtagcataagctgcagctgcaccggggtggcggtcgatctagaactcgtggatcccccgggttgcaggacttcggcacgaggcacagttgtaggttatacccgaaacacatgctcgtcaagaatgtcggaatcactaagaagcacatcatggtgttttgtagaaacctagtcgaagtctattcaaccaaacactttaatgtataaactaaatattatacaatatacttgcatagcagcccctgcttcacattcgattttttaaaatttaatatttatattagagatctatatatgtataaatatgtatcttgtcagatttgttactcaaatatatagagaccagtttactctggaagatcggtcaaacgactgaagccgctatgaatgaaggaaaatctaagctgcaaaaatgtatgagctataaaatgagaaaggttactgatagaggtgctttattgctcattttttacaaaatgga

SEQ ID NO: 117390 - DNA, 1237 bp, Zea mays
  unsure (1)..(1237): unsure at all n locations
  Clone ID: MRT4577_38548C.1
nnnnnnnnnnnnnnnnnnnnnnnnnnnnnnnnnnnnnnnnnnnnnnnnnnnnnnnnnnnnnnnnnnnnnnnnnnnnnnnnnnnnnnnnnnnnnnnnnnnnnnnttatattattttattattggccgcttttttttttttttttttcaatttttttttgtagaattctaagtctcccaaactttaaagtcgcatttgccatggaacatatcgaagtcatcagaagcaaaacccaacaagacgagcgcatcctgattcctgaacatactagaacccatcctcctacagaatccaacaagacagtgtatcctgaagaacatactaaaccctatcctcctaaacaataacagctgccggtatccttttaccgggccttcctcactcctcgtcttcgtcatttagatcggtccagtcatctatgtttgtggcattcggagcggcggtctctgatgaacgcagctcttcgatctcaataaggaggaagggatcacagataaccttccctctttctaggaccctaggacagcctgcaatagggcactgcggtggttttttggtccttatatattgcattacagggtccttttcatagatatgcttgcaatccacacagcgaactggattcatcaattcaatcacaggctttccagttaatgggcatgtgacatttaagatgctcatctgagtgctagtcatgacaatgtcctcctgttcctcaccaggcataggctgaccagcatggtgaacattccagacagactccctgaactgccgaaagagtgggtggttctgttgtgatgccgatgacgcttccctaatcttgctagcctccaccccgatcaatgttttgaaatccgttggctgatcagatgactgatacactccaggtactgccttaattgcctgggccatggccgcgcagtcctcgtacgaagccaccaactccagaaccgtctcctcaagcttcttcaccttatcggactttccgtccctctcgaagtctacggcgagggacttcatggtgccgatagccttccgcatgtccgcgactagggcttgcgcgtccgacgactccacctcggcggtgttgaagagcttcgtggccatcgacgacatctccggcaatcttccgaagtcacgtccaacgagagagcgggtagcggggtaggaagagtttagagcgaggagaagagtgggtcgcgttgggacgcataggcgccccggccgagctcgacgatg

SEQ ID NO: 117391 - DNA, 1060 bp, Zea mays
  unsure (1)..(1060): unsure at all n locations
  Clone ID: MRT4577_38549C.1
gccagaaagggttgtacgagtagcaccagatatctggcgtaaaaaaatgttacactattgacaatggcaaactaatagctccaggaggtagacggagctgagaacaaatcattctactgacataaataccacatcgaatgagtccagcaaaatccagatctcagtaagtcgccaagaagatacaggagcaagtataaaaacaaaattcgaagtgctgctgaaacatgttgcttgtgcgcacaaattcgctccatctttaccagttgaaaataatatcgcggatgatcattctcttttagcatggtggcacttaaaacattctgtcaattttaccaggttcaacagtgttccgcgcaaccttcacttattgagatagaaaaccccattatgtatattcaaagagagtatagaacggaattgtacgcataccagcgaactggattcatcaattcaatcacaggctttccagttaatgggcatgtgacatttaagatgctcatctgagtgctagtcatgacaatgtcctcctgttcctcaccaggcataggctgaccagcatggtgaacattccagacagactccctgaactgccgaaagagtgggtggttctgttgtgatgccgatgacgcttccctaatcttgctagcctccaccccgatcaatgttttgaaatccgttggctttgagtggagaccgaaccaaaacaacaaggccaacaagatttagtcataatcactccaatccaaacgccctaaattgcttcgatccccacggcgagcagcacccgcacctgatcagatgactgatacactccaggtactgccttaattgcctgggccatggccgcgcagtcctcgtacgaagccaccaactccagaaccgtctcctcaagcttcttcaccttatcggactttccgtccctctcgaagtctacggcgagggacttcatggtgccgatagccttccgcatgtccgcgactagggcttgcgcgtccgacgactccacctcggcggtgttgaagagcttcgtggccatcgacgacattnccggcatcttccg

SEQ ID NO: 117392 - DNA, 376 bp, Zea mays
  Clone ID: MRT4577_3854C.1
cttgtgtaataaaaccaggaaggggaattgggaaaccagacgggggacacacccggggaaacatgccggggcacaaatcaagggccaaaaggggaaggggaaaatagggtggaacaaataaattccaaaaatttaaaaacgaacatgctacaaaggggcgcttgggaaaggcctaatttggaaaccttcttcggggactggggggccttctttggggactggggggcctttttaggggacggggcctcctggcggcccccccgggaccccttttgggccaacaacttgggtaagaaaaccggggagaacttggggaggaaacccccccccccaaaggggacccccgacaaaaacttggcgaccaaaacgccggaac

SEQ ID NO: 117393 - DNA, 276 bp, Zea mays
  Clone ID: MRT4577_38550C.1
ctcatatatgtcaatctagatcaagccaagctgatttgatggtttggagtccaacatcgaccccaaactggccaaaataggtaaacgatgaaaaatgttaagtatgcaaggtttgagtgttcaacgatgctgcaaacaccttttactacatgtttggtactttggtttgctctctaactctttctgtagagaaagtgtcatttcaggctctgtttgaggaaaaacagaaaagagaggagactaatgggaaagaggtaacttttaggactaagtcaa

SEQ ID NO: 117394 - DNA, 1307 bp, Zea mays
  Clone ID: MRT4577_38551C.1
aacaccacttcgctctgctccgacagtccgacttcgccgcgatcccgcaatggtcgacgtcgaccgccggccgtcgcacccgcacggcctcccgcgtcctccttcccacgccgccggcctgcgccgtctctccacccgtgcctcggcacccagcagcccggctcctccgtctccctccgcctccgcgccctccccgacggcgcttctcgctcacctcgccgcggccggagtggccgtcctcccgggcctctccgccaccgagttcgccctcgcggaggccgcgctcggcggcgtccagctgccgcccgacctccgcgagctcctcgcgctgggcctgccgtcgggggacggattcccggactaccgcaccccggcggggctgcgcctcctccgcttcgccgcgcaggaggtccccgcggccgtcgccgcgacgctgccgctcgccccgggccggcgcgcggggcgggccgcgccgccgcccctcgtcccgctgtgcggccggcattacgtgccggcgacgccctgcctcgcgggcaacccggtgttctacgtgtccgactcgggcgtcacgttcgcgggcgccaacgccgccgacttcctcctccgcgccttcgccgccgagccgccgcccggcgcgccgctccggcgccagctctccgcgccggtcccgcccccgtccggcgcgccgccgtccactgcgcgccggagcctggactccgtcaccggcagggccccgcgctggatcgagttctggacggacgccgccgcggccggggaccggttcctggaagtcccaacgggggccacaagcgccgccgcgtccagcgcggcgccggagtggctgcggcccagccttgaggaggcggcctcgatgctgaggcgcggcgggtggggcctctgcgaggtggaggagatggtgacgggagagggtcccagcggcgccggcgaggtgaatgtggtggcgttggcgttgactgtcgaccggtgctgccgggacctgaagagtggagggtggggcgcggaggaagtggtggagatgctgggggcgctgctggggccgaggaagccgcggcgggcggtggcggcgctgccgccggacgtggccgcacggatggggcggctcgccgaggccgtgtcgcgggctgtcgggtcccatgccaaggcgaaacctccgaggccatcttgagaaacagatgttgtagtctaggtcctaggaattcttttccccctgttttccctgtattgagtacgtgcgtgtacgtgtaagtgaactactagtcttgtacaacgagcagcacgtgccttgt

SEQ ID NO: 117395 - DNA, 688 bp, Zea mays
  Clone ID: MRT4577_38552C.1
tatatttacacttaaaccaccactagacctgagctagggataaactggaaaggacttgctcctgctccagaactgagtctctctctatttggtaagcctatggacgagcctgagtttcctagcacccccaatgccttatttcattctggaactgctggaagttccaaaaaggtcagtggggaggctgctgctacacttgggtcagataaggcaccagttgagaagattgtaacacctgttccctgcaatgtaaatcctctgaatactacatcagcaactgtttctggaattgatcagctgccatctaataatttggtgaagaaagaacctgaagaaatatcccagcagcatattattgacggcgctaaaaagccaaatccattagaacgacaaagtgttggacaagttatcggttgtgctgaatctgaaaagacggacagtgcaccccaaggtgctcgtaaaattgggtttgatttgaattctgacatctttgcaaatagtagtatccataatgagtctgatgtagcagcagttgatgccccaataccagctaaaactttacctgatacttgccatgatacgagcatgcctgctgttcctgaagtagacaaatttgtgaagcatgaaagatccacaagtgccaccctcagtcctgttgtggaaacaggaaatggtcatactacacctg

SEQ ID NO: 117396 - DNA, 297 bp, Zea mays
  unsure (1)..(297): unsure at all n locations
  Clone ID: MRT4577_38553C.1
tgggtactcagcggcggacatcatcacgcgtatcggggtggaaacctctagtttccactccgctcgcccccgctttgaccgcctcccctcccctccgctcctgttcctccatacccccacccccccgangagcggcgcggcggcggcggcggcaaagccaaaggcaagatgttcgggcgcgcgccgaagaagagcgacaacacccagtactacaggatcctcggggtgcccaagtcggggtcccaggacgacctcaagaaagcctaccgcaaggcagctatcaagaaccaccccgac

SEQ ID NO: 117397 - DNA, 915 bp, Zea mays
  unsure (1)..(915): unsure at all n locations
  Clone ID: MRT4577_38554C.1
ctcgaggccggccgggccgggaataaatacttcccttgccttcctcagcggctcctcgtcctcggctcctcccgcagtcccgctcccctccgcactgtgtcgagccgagcgtgccgctggccgaccttggcaccttgcccgcgcccgcccgagctctgacgctgcctgaagcagcaagtgacagctcccctgggcgagccggtttactaccagcacggtgagcttcgttcgggcggagcagacgacaggcagcgcaccaaggtagatcgacgggctctacacggacccgatctgcctctatgctgcaacctggcttttcttcttccaatcgccaccacagcgcaacgcctgaacggccgtcgctgccggctacgccagatgctcaggtcttcttcggccccttcgccggcgacgagcgccaccaggatgcgtccgagactaagttgatgaagcagcctacttgggtcttctttgagaaagaatcggtaactgacttaagagaacaaattctccaactcattcagcatgattgtaaggatcaagaggaaaaatcacgggcagagctactggagaagctcaacagatgtaaaagagatacacttatcgaactgtgtcgctcgtttgatttaattggctcaagagctaataggaaggaggaacttgtattgtttctgatggaattcattaaggatcactgttctggtagtgatgtcataaactcggataagaaatacaagaaaagaaagcgtgtcagagaagaggaaaatttgtctactggtaaaccttcaaaggtaatcgggagtctaaaggagacacaaagcctcgaaaacnagcaatccaaaccaagtaaagatgagcttgaggaagctgtcttttcttatcttggatactgcagactttgccacgatgaccttt

SEQ ID NO: 117398 - DNA, 1302 bp, Zea mays
  Clone ID: MRT4577_38555C.1
atggagccccccacgcgtccaggcagcgacaccgattgaccgacacgccaccggcgtcgtgcttcagccaacccccgtcctcgtcctgcaggtccactcctcaccccgacgcagatccccagcatttaatcaaacaggcgcacgcttcccccttctctctccgaaatcaaccctcccagctcattttatcccccgctattctagtcgccagacccagatcgctaccctccatcgtttggagccagacaggagcggctgcggcggcatttctagggttttgttgaaggtctgagctgtgcaaagagagatggattccaaaaagaagaggaacaagaagaagaagggaaaccaagggaagaatgccgctgatgtcacatccattgctggggaagctgcttctcagaatcacaatcatgagttagccccaatagatcatcataaaggttctgatgcagatgatgtcatgtccagtgttggagaggaacttcctcagtacaagaatcatcagccaaatatacaggcagattataatggcacaagtgcttacgacactacatcctccattggagagtgtattgcatgctatcaaaacaacgaacctatgatgacacaggagaatcacaaggctagcaatgcagtccctgcagatcagaggagtgttggactgtcagagtctagtgtggagcttgacatgcatagacttcatgaagccaaactcgataaattacatgagacaataaagcagttggagaatgaaaagagtttgtggcttcaaaaagtgatcaccatggagggtgaacttgaaaagttgcataacgaagtgggttgtcatgctcaaaatgaggtccttttggaggaaaaactgaatagtctacagagtggttatgatgtgctgattaagaaggaggaagttgtggataacaaagtcaggtgcatagacaacatcaatgataccttaactcatcaagagtctttgcttaaagaaagattaagtgggctggaggaaacaaacaaatccctgctggtacagtcaggtgaaggtgctggaggaagcttcaaacaatacttctgaggaaaatcagatgttggtaaaaaaaatatatgaacttgattcaagactacaagcacttgaagcaaaggctgctcctagtgaagccttaatgattggaaagtgccctgatatgaggtgatgtagcaagtgcattttgccaactcgtcacttcagcaacagacagtagattttcagagggtcacaaactgtttgctggagaggtctgaacagactagtgaaacttaattctg

SEQ ID NO: 117399 - DNA, 679 bp, Zea mays
  Clone ID: MRT4577_38556C.1
cccacgcgtccggacgacgaccacctcgccgccgcccatgtcgtcggtcccggactgggccgacgccatcgtccccaacagcaagcgacggcgccaccggtcgccgcccgccgcttcatcctcctcctcgcacagcagcagcaccacacagaaagaggaactggaagacgaggaggaggacatggccaaatgcctcatcctcctcgcccagggccccgccgccattgaggcagctagagtaatgccggcaccccgtagcaggccaaagagcacggggagccgcaggttcttggccgccgccgaggccagaggtggtgtgtgcgtgtcgtacgagtgcaagacgtgcaacaggtgcttcccctctttccaggccctcggcggccaccgcaccagccacaacaagcatccgcgacggccagcagaggaggtgctggcggcaatggccatcaccaccacgcttagcctagcggcgacgaggcccgcgcacgagtgctcgtcatgcggctccgtgttcacgtccggccaagcgctcggcgggcacatgaggcgccaccggccgctcaccaccaccagctcgtcgcccgccacggggaccgaggaccaacaagacagcagtagcaagctgctgcaggagagtagaatcaacctggagctggacctcaacctgctgccgtcgacg

SEQ ID NO: 117400 - DNA, 223 bp, Zea mays
  Clone ID: MRT4577_38557C.1
aaactggcatcggggctgccatcgccagagtgtttgctcgaaacggtgcagctgttgcaatccactatgtctcagagagctctaaagcgagggccgagaaagtggcagccgacattagtcgggaatttggaactaaaacaaccgttgttcagggagcgctggaaaaagctagcacttcgacgaagattgtccaagagactctggaagggcttaacgccgacca

SEQ ID NO: 117401 - DNA, 1290 bp, Zea mays
  Clone ID: MRT4577_38558C.1
atgatgggaagatccaggaagtgtattcaagacttaggaatcaaagatattgatctgcatggaaggaagttcacctgggcaggggcacatgatgtgttggacaagttcaaagctacagccaaggggctgcagcgatggagtgacaagaaagtgggcaatttcaagttgcaacttgagttggctagagaagtgatgttgcaactggaatcggcaagggatggtagatctcttactgacctcaaatgctggctgctacagagattgaagaagcattccttggttcttgcttccctgctcatgacggtggctaggaccagatctcggttgtcttggctcaaggacggcgatgccaacaccaagttatttcatacttgctcaaggtttcgtaagaggaagaattttattggtgcagtaagggatggggatcagctcatcacctcccatgatgggaaggccgaggttttctgggatttctatatgaatctaattggaagtgagcacacgacaagatttctgcatgctaaaaataagcctagaattctcctgaagctggacatttccaaggccttcgactcggtctcttggcctttccttcttgaagtattggaaaaattgggctttggtcccatgtggagggatgtgataagtggtattcttatgacctcttccacccaggtcctgctcaatggggtgcctgggagcttcatttctcataaaaggggcttgcggcaaggcgaccccttgtctccgctgctttttattcttgttatggatgtcctcaatgtgcttatggtcaaggctgaggagcatgggttgctgcaggccatttcttctaattccatccatcaccggatctcactctacgccgatgacgtggcgctcttcctaaaaccagagcccagtgacttaaatactgatgtgatgattttggatctgtttggggaagcttcagggttgaggactaatatagcgaagagcagtatcgcgcccattcgatgcacccatgttgatctgaatttggtccagcagcttcttccctgcagatttgaagctttttcaattaaatacttgggccttcctctctccctgaagttgtctaaggctcagcttcagcctctcattgataaggtggtggacctcttaccggcttggaaagctgacctgatgacccgtgctggcagagctacccaagtgcaatttgtgttcactgctactgttatctatcatatgatggcactggatctgcctaagtgggctattaatgttatgaatcaatacgacataaagtag

SEQ ID NO: 117402 - DNA, 377 bp, Zea mays
  Clone ID: MRT4577_38559C.1
gataggtacaaattctaagagcactttaactttgtaggtttatggttagcgcagcttggtatcctgaccacatgaaatagtaacctgacagtttattggtgctataatgggtgcaagagatttaaatatacacatcaggtcatggacctctagggatgccacagtatattggctgtgttgatgttgagtaccttcatggtggtgcactgaaaagttttcttataaagaacaagagaaggaagcttgcctttatagttgtggatcaaatagactcttgacattgccagtggattatgctttcttcactcatagacgatagggcatcgtgatgtcataactgaaaatatgcttctggacaaaacgagaactgttaaaat

SEQ ID NO: 117403 - DNA, 261 bp, Zea mays
  Clone ID: MRT4577_3855C.1
agggcggggacaaagcacccttaatccatgtacagaatgtaaggaaacttggagctattatcagttcgtttttgacatcagtttgtttgaaggcggtaaattagccaaatgcttaacatttacaatacacggtttgttttgctgttgggcgcaatcaaacaggcgacacctgatgttggggggggcaggaaggcaacaacagaccgcaaaagcttttttttgcccaccgaaactactttggagaaatgagtttgttggggg

SEQ ID NO: 117404 - DNA, 726 bp, Zea mays
  Clone ID: MRT4577_38560C.1
atctcaacttcacatcacgtggtcctatgcagtacagctctgtctattcttcttcatgctgacacgatcattgtctggccacgctagtagcgctgagtgtgcgctcgcaatgagattaaggagtgacgtatggcatccgagggtgtcctcatcttgaatctcaacatggctgttcttcacagtgggcaacgcctgccgcagctgtccgaccacaacgcctacggtcaagtcatcgccgacgtctcctgctactaccccatctccgtctttcctcctgtgtgaagtgctcgctgaactggctcctttcgacgtgtgcgcctatgcgatcggcctgcacaaaggctcagatgacaaggctacctgttgatccatgctgcgatatcctccaaggtcttgcagacttggaggccgccgtgtgcctctgcacaggcatcaagggcacaccagctagcgttgctattatatgtagctatatttaataatgccctcgatcactactagtggtaatgtgagcgcaaaggatacttgagattattaaactattgaaagatacagcttacacctacactcgtaaccatgctcgtgactaattaatgatgtacctgtatctggatagcacacatgcattgtccgccagctgatctcacctgtcgcatccgttagcgttgtgtactacaggcctagaaccatattcgatgctagttgttgcctgctcacatattttgt

SEQ ID NO: 117405 - DNA, 381 bp, Zea mays
  Clone ID: MRT4577_38561C.1
cggacgcgtggggcttactgctcacttaacgtgatttctttatgctttacttggtttgcaactgattgtggagtagcaatgtgacgaagtcaaaagggtggctaattcatttagtttctgcttgttttgctttcttgagatggtttgtagacttaacctttgtgatagcacacgaccaatgtggttgggactctgaacatgctcggattggcaaagaggatcaatgctaggttcctcctcaccagtaccagtgaggtctatggtgatcccctacagcacccgcaggtggagacttactggcgcaatgtcaataccatcgacgtcaggagctgctacgatgagggcaagcgtacagccgaaacagtgaccatggattaccac

SEQ ID NO: 117406 - DNA, 529 bp, Zea mays
  Clone ID: MRT4577_38562C.1
aaaatatagaaagtatataatataggatcaaaggcattatctctactacttatgctaccaagtacatcttacagactccatatataaattttactttcttcatctatcatctacagtattttttctctatatattgcagttgtagcagtccgaacagctggttttaatccgaaaaaaacagcaacttgattcttgtccacttgcattgcactagaaaaaatactttccagagagtagtgaaaaaaggaaacaaatatacttcccatagagaggtcgcgcaattggcacagcatatcaactagaagggtgaagctcccgccttcctgacgtcaacagtggcaaggtctaccaccctaaactacgtatgggtattaaatttttcatatgtttctagaaccaatcccacgttttagttttaaaatgcttgactgaagatgtagcagttaaattttgcactaagtgctgtaatagctgcaacaaacccaaatttaaggccctgtttggaagggcttcacttcaaaaatacaac

SEQ ID NO: 117407 - DNA, 272 bp, Zea mays
  Clone ID: MRT4577_38563C.1
gccactgctgcaccagcctctccgaagaccggctgtcccgctcggagaagcaggcgcaactctagataatgctatcagttagcacaagatcaaccacatatgtgcttctagatgtcagtggcttgcgcatgcatatggccagtctataacgagctagctcgcgtagtgcgtacacgagtatgcacgcatgacgcacctcacatgaatggggccctcatacactatgataccagttgtccttcaccatgaaaagaataaagtatggcggacag

SEQ ID NO: 117408 - DNA, 171 bp, Zea mays
  Clone ID: MRT4577_38564C.1
caggatgcagctgttatctaaccagggagaaagcatcatgcacgtcctcacgctacgcggttccaacggcatctaggagatggactgcttggatgtcaggtacctggctttgttccccgccaagttccagaagaacttctggatcaagaacggtagttttgtgatcgtgga

SEQ ID NO: 117409 - DNA, 299 bp, Zea mays
  unsure (1)..(299): unsure at all n locations
  Clone ID: MRT4577_38565C.1
tgnctcatcccatcccactaccacccatctcgtcgtccgccgattcgatccggtgtgcttccaacccagggtgagtctccggatccgtcgccgactggtatccgagtgctatcgtaaacgatccagaactttccgtntgactgtccccctcgccttccgcggcgtctgatgaaacttgcgaggtacataaagaggtttcttcaactgtgaatgatcctgatgaaagannnnccncttcacattcaacgaggtgcacctaaaagtttcctggatctactgcatggcaaaattgtcagttc

SEQ ID NO: 117410 - DNA, 456 bp, Zea mays
  Clone ID: MRT4577_38566C.1
atgggcaagggtcacaaacgcaagcgtgagccgactcctccgtcggaggatttcggcgactcggaatactcggaggagttctcctccgagtccgagaagtctccagctcccgcctctcccccggcgtcgtctgatgattcagacgactcccaggggattgccgcggaggtctggacgtacatccgggccgtcgagcgctccgggctcgagggctcggatgagtccgagttctcctcggacgaggaggactcggacggcagcgaggacgaagatgacgacgacgacggcggcgacgacgacgacgacgacggtgtcggcagcaacggcggcgggggcagcggcggcaagggcagcaccagaggcggcggcagcacgggcagcaccagaggcggcagcagcacgggcagcaccaggggcggcggcggcaagggcaacagcagcaaggccagtggctaa

SEQ ID NO: 117411 - DNA, 468 bp, Zea mays
  Clone ID: MRT4577_38567C.1
atgggcaagggtaccaagcgcaagcgcgagccgactcctccgtcggaggattttggtgactcggaatactcggaggaggagttctcctccgagtccgagggatctccggctcccgtctctcccccggcgtcgtctgatgattcagacgactcccaggggattgccgcggaggtctggacgtacatccgggccgtcgagcgctccgggctcgagggctcggatgagtctgagttctcctcggacgaggaggactcggacggcggcgaggacgaagatgacgacgacgacgacggcgacgacggcgacggtggcgacggcaacggtgacggcagcaacggcggcagggacagcagcggcaagggcagcaccagaggcggcagcagtacgggcagcaccagaggcggcagcggcaagggcagcaccaagggcggcggcggcaagggcagcagcagcaaggccagtggctaa

SEQ ID NO: 117412 - DNA, 450 bp, Zea mays
  Clone ID: MRT4577_38568C.1
atgggcaagggtaacaaacgcaagcgcgagccgactcctccgtcggaggacttcggcgactcggaatactcggaggaggagttctcctccgagtccgaggggtcttcggctcccgtctctcccccggcgtcgtctgatgattcagacgactcccaagggattgccgcggaagtctggacgtacatccggaccgttgagcgctccgggctcgagggctcggatgagtcggagttctcctcggaggaggaggactcggacggcggcgagggcgaggacgacgacgacggtggcgacgacgatggcgacggcagcggcgggggcagcggcggcggcgacgggagcaagggcagcaccagaggcggcagcagcacgggcagcaccagaggtggcagcaacaaaggcagcaccaggggcggcggcggtggcagcagcagcaaggccagtggttaa

SEQ ID NO: 117413 - DNA, 470 bp, Zea mays
  Clone ID: MRT4577_38569C.1
cggctcgagttctcttaggactactcttgataaagtttgtgcgagaaagagagtccgctgtgctgaagacctattgagcaataaatcagccgtcaaaccaaagccccgatttcttcgtgttaacacactcaaggtcactacagagtctgtcattgaagaattgaacaaaatgcacatggttgacaaagatgaaatggttccagatatgttggtactcccacctggaactgatttgcataaccatccgttggttacagatgggaaagtgtttttacaggggagagctagttgtatggtagcagttgcattgtgccctaagccaggctggaaggttattgatgcatgtgcggctccagggaacaaaacagtccaccttgctgcactcatgaatggagaggggagtattatagcttgtgaacttaacaaagagagggccaagacattgcaacatactgtcagaagatctggag

SEQ ID NO: 117414 - DNA, 1472 bp, Zea mays
  unsure (1)..(1472): unsure at all n locations
  Clone ID: MRT4577_3856C.1
cggggtcaacactccagtccactacaatcatcgctgtaggagatggaggaggcggcggcggcggcggcggaggtgaggtatgggatagtcggggtggggatgatgggccgggagcacctccacaacctcgcccacctcgccacagaggtcgagcgggagcagtccgtccgggtgcgggtcaccggcctcgccgacccccaccaggagtcactccgccttggcctccagctcgccgctgagctcggcctcccgcctccccaggtacgtatatccccgctccaccctcctgattatccgcgagattctgagttcggaagctcctcatggccgctcgccaaaatagcccgatattggttgcgctcgcctaattgctcaccttaaggccccgtttggatcctagctaattgtttgtcagttgctaacagttagccgacaaataattagctgtcaaacaattaaccatgatatgtttgatgtctaaaacatagtaaataatcaatcagaaactattagcaagtcaaatggctaatgaacaaacaatttgctggctaacaattagctaatttattagttagcccgtttagagcctaaggtgctaaaattagccagcaaattatttgacagatggatctaaacatgtcctcagtcacacccctcctacataaaatacctcaccacgactaattacatgttttagattattttttgtgggcaacaaaaaatagaatcggcactttgcggttatgcccctcaactgtttccttcacggactccctgatcctcgtcggcagcagcgagttctgcttgctcagcgtcgacttggtccggaacatgctgctaaagtcaccacccctgcgcgcggtgccatcgctggcggcctggaccaagccgcgttgtggttgagcaccctgaggctcctaccactccttgtaaaatattacgcacataaagaacagattttgatagaatatgaatcagttatggttagacagtggcactatacaaagcacaaccatgtgagttcttagtctggtactaattactgattcggtaaatcttagtgacatccaaaaggtttcaagacctttccaggtcaccgcgagctgctggacagcgggctctgtgacgccatcatcgtatcatccccaaacatgacccactacgagatactcatggacattatccaccatcgtgaaccgcagcacgtccttgtcgagaagcccctgtgcaccactgtgcaggactgcaagaaggtcattgaagctgctaaacagagaccagagatagttgtgcaagttggattagaatacaggtatatgccacccgttgctaagctgatagacatcgttaagagcggtacactaggacaagtcagaatggtggcaatacgcgaacaccgntttccttttcttgntaaggtactactagctgggttttgttacctgcaagtgatatcttggacctcttggttg

SEQ ID NO: 117415 - DNA, 462 bp, Zea mays
  Clone ID: MRT4577_38570C.1
atgggcaagagtaacaaacgcaagcgtgagccgactcctccgtcggagaacttcggcgactcggaatactcggaggaggagttctcctccgagtccgaggggtctccggctcctgtctctcccccggcgtcgtctgatgattcagacgactcccaggggattgtcgcggaagtctggacgtacatccgggccatcgagcgctccgggctcgagggctcggatgaggaggactcggacggcggcgaggacgaggatgacgacgacgacgacggcgatgacgacgacggtggcgacggcgacggtgacggcagcggcagcggcgggggcagcggcggcggcgacgggagcaagggcagcaccagaggcggcagcagcacgggcagcaccagaggcggcagcagcaagggcagcaccaggggcggcggcggtggcggtggcagcagcagcaaggccagtggctaa

SEQ ID NO: 117416 - DNA, 1506 bp, Zea mays
  Clone ID: MRT4577_38571C.1
acctcgaggccggccgggctatgcttctctttgcctccaacctgtgccgccatttctcttttgctgagatcaaggccgcaacgaacaactttgatgagtcccttattcttggtgtgggtggatttggtaaagtttatcgtggtgaggttgatgggggaacaactaaggtggctatcaagcgtggcaaccccttgtctgagcagggtgtgcatgagttccagactgagattgaaatgctgtccaagctccgccaccgccatctggtgtcactgattgggtactgcgaggagaagaatgaaatgatcctggtctacgattacatggcccatggtactctccgtgagcacctgtacaagacccagaagccacctcttacctggaggcagcgtttggatatctgtattggtgcagctcgtgggcttcactaccttcacactggtgcaaagcacaccatcatccaccgggatgtgaagacaacaaacatcctgctggatgagaaatgggttgccaaggtttcagattttggtctgtccaagactggcccatctatggaccatactcatgtgagcacagttgtcaaaggcagtttcggataccttgatcctgaatactttcgcaggcagcagctcacagagaagtctgatgtatactcttttggtgttgtgctgtttgaggtcctctgtgcacggcctgccttgaaccctactcttccaaaagaggaagttagcttggcggagtgggcgttgcactgccagaagaagggcgttcttgatcagattgttgacccctacctgaagggaaagatagctccacaatgcttcaagaagtttgctgagacagccgagaagtgtgtttctgatcagagtattgaccgcccttcgatgggcgatgtgctctggaacttggagtttgcccttcagatgcaggagagcgcggaagagagcggaagcctcggttgtgggatgtcggacgagggcactccccttgtgatggtcgggaagaaggatccaaatgacccgtcgatcgaatcgagcaccaccaccacaaccaccacttctttgagcatgggcgatcagagcgtcgcgagtatggactcggatgggctgacgcctagcgccgtcttctcacagatcatgaaccccaaggggcggtgaggtaaagctggtcccattcgttaccttgcattcattcagcatgtttttttcacgagttcgtgctgttacggttctctcgaattaagaaccagacgtccgagaattgtttcatactagatattctgccttgccctgtacttcttccccagtattgcaacgactgtacatctgttggcttgtattgtaccgctgctattgacccaactagtattttactttatgagaaagtgatgtgcacgaactattgttatgggtggttgtgtgacgtgctgttaggaatgagtctcgactctgaatacgacatctacacttgataatcagttttcaatctgaatgggttgcgagagctgat

SEQ ID NO: 117417 - DNA, 1057 bp, Zea mays
  Clone ID: MRT4577_38572C.1
ggacgtggggcggacgcgtgggtaagaaatccccacctggacatcattattccaacgtcagccatgagtctcataatccagtggaagaacaaaaaccacatcaatcacatgataaccccaatgaaagaatagatggcattcttggtggcaacgagttcctggtgtgtcgacctccaggatcgatgcaatgaataaaattgacaagggtaaggtaaaagcagctttggagaagcgaagaaaaacaaaaggtgatattaccacaaaggtagacgtgatggatgatgatgatctacttgagagagagcttgaacatggtgttgaattggctattgaggatgagaagattaagcaggataagatgcataacttgtcccatattaaggacaagaagattacgcaggataatatgcagaatttgtcccatattaaggacgagcaggataacatgcagaacttgtccgacattgaggatgagaagattaagcaggatgagaggcagaacatgtcccatgctccagtggatcttcaaaccactgaccaagtaatggagaatggtcaccatgtcgagcctagtgtaccaacaactgtggaagacacggggtttccattggacaacaaagaacatcctccatttgataagcaaaatgatgttcctgagcacgagtcccagcagcttgaacacacattgaagcacgacctccctcagctggtaggggggcctgagcaggatgatggaacagactgtaaaaggcctaagctcgaagagtaggttctggatgatgctcactttattttggacagttttcctggagactggtgaactgcatacaacttggcacggagttggtgagcatggctttgccggtgccttgctgtgctgtgaaatatgccctacggctgattgcagtttacaattcgagggaggtcgtgctagcaaatatttttacgttcaaacgaacattggaatatatggaccaaaacatgctcacgcttctgataacggttgcattcgttccttaaatgtgttccatgaaagtgaagcaaatgattttcatcc

SEQ ID NO: 117418 - DNA, 429 bp, Zea mays
  Clone ID: MRT4577_38573C.1
ggttggaactttgggctgtttatgtgctgccggtttcttctattgtgctgcgcttactcagacttaaagtctctctcgcggtacgctgtagttacggtgaagaatcatttgattgcgagtgttgagcatagtgaggtcgcggataaggttaggtgtaagtcttgagtttctactgttgagaagagtcgtgttttgtctacgtcttgttctgtgcggtatcttgtggggatgcctgatgcgctgctgaggattggtggcttacctggtatgacgaagtactagctggaaccggtctatggtgtcaatgtggggtcggatactgtggcgtggtcgtctgagtttactaaggaggagcctttaacttccctccatgttgaccctcattagtctgtgggagccgcggttgcggaggctattggcgggttcgag

SEQ ID NO: 117419 - DNA, 450 bp, Zea mays
  Clone ID: MRT4577_38574C.1
atgggcaagagtaacaaacgcaagcgtgagccgactcctccgtcggaggacttcggcgactcagagtactcggaggaggagttctcctccgagtccgagggatctccggctcccgtctctcccctggcgtcgtctaatgattcagacgactcccaggggattgccgcggaagtctggacgtacatccgggccgtcgagcgctccgggctcgagggctcggatgagtcggagttctcctcggacgaggaggactcggacgacggcgaggaaacggatgacgacgacgacgacgacggtggcgacggtgacggcagcggcagcggcgggggcagcggcgacaagggcagcaccagaggcggcagcagcacaggcagcaccagaggcggcagcagcaagggcagcaccaggggcggcggcggcaacggcagcagcagcaaggccagtggctaa

SEQ ID NO: 117420 - DNA, 2357 bp, Zea mays
  Clone ID: MRT4577_38575C.1
cattgggacctcgaggccggcgggcatgtaccttatcaggatgcatttctgtgagatccagtaccccatcacaaagatcaatcagcgggtcttcaatatttacattaacaaccagactgcagtcaagggtgctgatgtgaatgcctgggcggccgtaagtggtgctaccacccttattggcactccggtgtatcaggactatgtagtgagcacatcgggtttaggggccatggatttatgggtagctctccatcccaatcccgactcgaagccacaaatatatgatgctatcctcaatgggatggaggtgttcaagctacagcttaccaatggcagccttgcagggctgaatcctgtcccaagtgttgccctggtgcctgatgggacaactaagaagaagtcaagtgttgggcctattgtcggtggagtggttggaggtttggtggttcttgcacttggctattgctgctttgtgatctgcaagcgcaggaggaatgccgggaaggatgcaggcatgagtgatgggcattctggttggctgcccctgtctctttatggcaattcacacacttccagttcggccaagtcacacactactggtagctatgcttcatctttgccatccaacctgtgccgccatttctctttcgctgagatcaaggccgcaacgaacaactttgatgagtcccttattcttggtgtgggtggatttggtaaagtttatcgcggtgaggttgatgggggaacaactaaggtggctatcaagcgtggcaacccgttgtctgagcagggtgtgcatgagttccagactgagattgaaatgctgtccaagctccgccaccgccatctggtgtcactgattgggtactgcgaggagaagaatgaaatgatcctggtctacgattacatggcccatggtactctccgtgagcacctgtacaagacccagaagccacctcttacctggaggcagcgtttggatatctgtattggtgcagctcgtgggcttcactaccttcacactggtgcaaagcacaccatcatccaccgggatgtgaagacaacaaacatccttctggatgagaaatgggttgccaaggtttcagattttggtctgtccaagactggcccatctatggaccatactcatgtgagcacagttgtcaaaggcagttttggttaccttgatcccgaatacttccgcaggcagcagctcacagagaaatccgatgtctactcttttggtgttgtgctgtttgaggtcctctgtgcacggcctgccttgaaccctactcttccaaaagaagaagtcagcttggcggagtgggcgttgcactgccagaagaagggcattcttgaccagattgtcgacccctacctgaagggaaagatagccccacagtgcttcaagaagttcgccgagacagccgagaagtgtgtttctgatcagggcatcgaccgcccttcgatgggtgatgtgctctggaacctggagttcgcccttcagatgcaggaaggcgcagaagagagcggaagccttggctgcgggatgtcagacgagggcgccccattgatggtcgggaagaaggacccgaacgacccatcgatcgagtcaagcaccaccaccacaaccaccacttctataagcatgggcgaccaaagcgtcgcgagtatagactcggatgggctgacgcctagcgccgtcttctcgcagatcatgaaccccaaggggcggtgaggtaaagctggccccattcgttaccttgcaggcgtaatttattcattcagaatatatttttttcttaaatgttctctcaagttaaggcttaagaaccagaagtgtgaggattgtttcgtactagatattctgccttgccttgtactacttccttctccgagtattgtaatgactatacaatctgttggcttgtattgtaccgctgctattgacccagccagtattttactgcaaaaaaaaaaaaaaaaaaaaaaagaaaaagtactctgcgttgttaccactgcttaatttatttattcagaatattttttttctttaatgttctctaaagttaaggcttaagaaccactaatgtgaggatagattcgtactaaatattctgtcttgccttgtactactttcttacccatgtattgtaatgactatacatatgtgggctagaattgcacccttctctattgcccaccgtatataatgtaaatactcacgccctgattgttctctataacctgttcaaatttggtagattacgctctatacaaccggcaattcatcaagcaccttatgtccccctccaagcagtgaatatgttcacttacactcattgtgagcggctttc

SEQ ID NO: 117421 - DNA, 243 bp, Zea mays
  Clone ID: MRT4577_38576C.1
tcgaaaatttgccattttgtctgggttcactcttctcggggcgagagcttatgtggcggacgtctaggccggcctgtcgcaggagacgtgaaccatccggtgctgatgaacagcctctacgtcgtgtgtcgtgatacgagcaggtgcacgggaaaatcctgcacgccgcattcgtgcccttcggtgaggtcatggacgtcaagacgccgttcgaccagtccacgcggaagcaccgctccttcg

SEQ ID NO: 117422 - DNA, 447 bp, Zea mays
  Clone ID: MRT4577_38577C.1
atgggcaagagtaacaaacgcaagcgtgagctgactcctccgtcggaggacttcggcgactcggaatactcggaggaagagttctcctccgagtccgaggggtctccggctcccgtctctcccccggcgtcgtctgatgattcagacgactcccaggggattgccgcggaagtctggacgtacatccgggccgtcgagcactccgggctcgagggctcggatgagtcggagttctcctcggatgaggaggactcagacggcggcgaggacgaggatgacgacgacgacgacggcgacgacgacgacggtggcgacggtgacggcagcggcagcggtgggggcagcggcggcggcgacgggagcaagggcggcaccagaggcggcagcagcaagggcagctccaggggcgacggcggtggcagcagcagcaaggccagtggcgtttag

SEQ ID NO: 117423 - DNA, 481 bp, Zea mays
  Clone ID: MRT4577_38579C.1
atatataacaggagttctatacaaaataaataattacattataaggagacaacggtccagcaacccaaagttgactgggagacaacgacctagaccactcacgaactcatcgcagcatcctccatgagcatcatcctgcagtacctggtcttgacctgggacttgagattccaggtaccaacttgctcttcagatgactcgtaacctcgcgcgaaagtttgaagcgctgatgagagctgaccacgacacatggtgatcccgctgcagaggacgaacaacggcgagattccgacgaccccaatgatcccggccttggaagcccctacacccaagtcctacggttcctggcgatcccataaaagccatcacccgaggataagcggtcctgggcgcagatcgcatcgacggcgggtgactccttcccctcacgaccaaggaggcccacgatggtgtttgtctcctcggtgtcatctcatggcag

SEQ ID NO: 117424 - DNA, 1174 bp, Zea mays
  Clone ID: MRT4577_3857C.1
agttcgcagcagcagcacgccagcgcagggaacttcccttccttctcgccagcgcagggagcagctagcagccatggcgcctccacctcccagcgcctagaccttcctctccagcgtgccccctctaggcatagcggcagctcctcctccctctgcttcgtgcgcgcaggagcagaagctccatggccgccgagcccccttctatggccgggcgtcccttccttccggcgcgctgaagcatctcctggcgacctcaccttctcagcgcagaagcttggggcctcccatggcgccctcctccctggtctcccttgcgcagggcagccatggtcgggctcccctggagcaggcgctcctagcagccatggctccctccctcggttgctcctcgctgcttctttcccatggaactggcgcaggggacaactccatctctccccttggcgccaccttcaggcagggtagcagggagctcgacgcccctggcagcccacaccttcttcctcccatggtcgagccccccctgcactttccctttcttcagcatggcgcccctatttcccagccgtgcagctccctgttggttctccaccccgccggcagcttggagtccgagcaggcaccgcgggagcctatccccatgacgcccagcagccctgctgtcccctccccgtgacgcgacgtatctgctcggctccctctcccggcagcatagctcctcgcagccggatttccccgcagccccagctcgagcagtgagctcgccgtcgcccattggctgttcgacagaatgcctgtgggaaaacatcgtgttgtgcgcagccccatccgcgacaccgtcgaaacccgtgctagtcgtcaatgccattcgtcgcgcacgcgtgttcgatacaagaccggtcgggtgcaccacgtgcttgcacaactcaaatccgatcccgttcaggttgattgatttataataatacatgtgctttggttgatgtcgggcaatgcatgtatatatgtggatgtgtgtaatatgtttcggtactacgcattggtaggatcacgtttgcgattggagaacaagaggttgttgatgtgtgcgatttgtagtttgtctaattacgttttggtcgatgtgatgtatagtggtgtttgactagatgtgggtataaaatgttttgatttt

SEQ ID NO: 117425 - DNA, 444 bp, Zea mays
  Clone ID: MRT4577_38580C.1
ttagccactggccttgctgccgctgccaccgccgccgcctctggtgctgcccgtgctgctgccgcctctggtgctgcccttgctcccgtcgccgccgccgccgcccccgccgctgccgctgccgtcgccatcgccgtcgccaccaccatcgtcgtcgtcgtcgtcgtcatcctcgccctcgccgccgtccgagtcctcctcctccgaggagaactccgactcatccgagccctcgagcccggagcgctcgacggcccggatgtatgtccagacttccgcggcaatcccctgggagtcgtctgaatcatcagacgacgccgggggagagacgggagctggagagccctcggactcggaggagaactcctcctccgagtattccgagtcgccgaagtcctccgacggaggagtcggctcgcgcttgcgcttgttactcttgcccat

SEQ ID NO: 117426 - DNA, 456 bp, Zea mays
  Clone ID: MRT4577_38581C.1
atgggcaagtgtaacaaacgcaagcgtgagccgactcctccgtcggaggacttcggcgactcggaatactcggaggaggagttctcctccgagtccgatgggtctccggctcccgtctctcccccggcgtcgtctgatgattcagatgactcccaggggattgccgcggaagtctggacatacatccgggccgtcgagcgctccgggctcgagggctcggatgagtcggagttctcctcggacgaggaggactcggacggcggcgaggacgaggatgacgactacgacgacggcgatgacgacgatggtggcgacggcgacggtggcaacggcgatggtgatggcagcggcagcggcgggggcagcggcggcaagggcagcaccagaggcggcagcagcacgggcagcaccaggggcggcggcggcaacggcagcagcagcaaggctagtggctaa

SEQ ID NO: 117427 - DNA, 1996 bp, Zea mays
  Clone ID: MRT4577_38582C.1
cgcaaaggcttcattgcttcacctgcaatggagactgaaaggtccgcgcataataaagtgcatattcagtctggtaatgcttcaaggaaaactgagggatttatacaacagagcatcaatgccaatcgacaaaagaatgggacatcagtacaacattctgaaagcttcaccacttctgctcgaagaactgctggtggctttccaccagcacctacaacggaggataaattcaaagctgcaaggctttcatccagtaatgaagctgcacccagaaaagagggggttggacagcgaatcagtaacattagcatatcgcttcaaaagagaactgagaacacaaacaaagatgtcgcgaagaaagaagttggcacctcctctccattgcctccaaatcctgctaatgctatgcataagggaaatggcaaggttggtaggccaatggacaacacacaaggatccatgcagagatttggcagcccatcaacatcaagtgcaacatgggggatggatagaggagcacctaggtcatccatcccaagcccgagcattacaatacggagaccgaatggcatggtacgaccagctgaaaatctttctgtctctgctaagaaacctgatgcaggaggcctttcacctgctatgggtaaggaaaaggaacaaggtggaaggttgctgcaagctaatatttcaactgatcagaaactggcagctgaaagtcgttctgcctctgctaagaaacctgatgcaggaggcctttcacctgctatgggtaaggaaaaggaacaaggtggaagattgctgcaagctaatatttcaactgatcagaaactggcagctgaaagtcgttctgtctctgctaagaaacctgatgcaggaggcctttcacctgctatgggtaaggaaaaggaacagggtggaaggttgctgcaaggtaatatttcaactgatcagaaactgggagctgaaaaccgttctgtctctgctaagaaacctgatgcaggaggcctttcacctgctatgggcaaggaaaaggaacaaggtggaaggttgctgcaggctaatatttcaactgatcagaaactggttatgtcaaagcctccagctgtggagaaagctgcagatgggagagctgaaaggatggagaaggtcagagatggggcaccagatattgccaagaaagaggacaaaaagagtgatcggcatgagaaaaagaaaaggaaagagaaagataaacacaaagagaagaaaaaggataaagaggcaaagaaggagaaaagggaacataaccacaaacagcataataaaacacgagaaaacagtataagttatcccatagatagtcttaacttgaagcactcggtccctcctttagccccaccagttgatgatggaaaatctgttgtgcctgatgagaacctgaagaagcgaaagaaccatgaaacgaatggttacttacaaaacaaccttgatatgcggcctacaaagttgccgagaccagcactccccagcaatcgtgtggagaatggtacagcatctcatgtagccgcgccactctcttctgtgaagcaggaagccataaatattgaaaaggctgaaaggctccacaaggaagagaaggtcaatggcaaccaacagggtcagcagcgaggtccagtcgatccggtggctgcttatgagaatggcacaagctctaggaagccacctcaccccgactgcaagtatcttagccagatatacagcattcctgaagcacctcaaatgatggaattgcctgggcaggaaggtgaggactggctgttcgacaaaggcggcacccagccaaggaagccggccagttcagcgcctgaggctgatggagtcccccaagtgtgggctcaggctctgaaaattgaccatgctgatgtcattgctctgccatacgtgatacccttttagctgagtgacaatcacctgtgaagctgagacatcaatgaacaacagcgctttgtgtgggctg

SEQ ID NO: 117428 - DNA, 299 bp, Zea mays
  Clone ID: MRT4577_38583C.1
ttctttttataaccatccttacaaaattacacacggtgtttatataaataactggggcggcttataaaactttcaaatctttaaactacaatatcaatccatcatacttattcaaatattataattttatccctcaatattattctctttaattaccaattcttataccaattataatttttccattaacttaattaaacctttttcaaaattatacaatatatatatcatacactctcccttttatcaatatattaacatttataattccatctataaatttattacaattcacccaa

SEQ ID NO: 117429 - DNA, 338 bp, Zea mays
  unsure (1)..(338): unsure at all n locations
  Clone ID: MRT4577_38584C.1
acgcttcaaacacatattactaataatgtttccctttcatcataatcccccctacaaaaggaaccgttctcttttatacaacaacatccttctcaanaactccaacatattctatccaaataatactctctatctacatttgacactttcaaacttaacctttcatttacataatattacccaaacaaaccaccaacttttctattttattctaagatattttatccaaatatatattcttatataaacaatctttttgatattctacaaaaccattttaatcctatatatgatttttctccaattttaactttttatttcattctattcttttatta

SEQ ID NO: 117430 - DNA, 208 bp, Zea mays
  Clone ID: MRT4577_38585C.1
accgaattgcaatttcgacctagacgtacgcgtgcgcttacgcgttcgcggacgcaaggtgcgatttgaaccttaacctaacaagatcaacggctagggacaaactaaaacggagcgcaacggaattctgggtcacctactcttagcaacagttagcttggcaagatctttttccgtgcgtttactgtttcttcttatgcatcgtcta

SEQ ID NO: 117431 - DNA, 554 bp, Zea mays
  Clone ID: MRT4577_38586C.1
tttttaaacccaaaaaaaaacgaatcttaggcagcactagacaagtaaactcagttctctcgccaggttcttctggcctagacaagtagtacagaatataaacacttgtaaatgcacgcgaatgacgtggtgacaaggggagaaaattcattaacaacgtggcagtggcatcttgaacttgaagtagcgtggttggaaaagctaccgggtgatgcgtaaaagccaagctctgtcatcactcaccgttgacttgaactgaagacacggcaccactagcagtcctcgagatcgtcgctttcctggctcccatctccagcctaacatccacgacacgtccccagtcctcatccgccgcgcacaagttggacgccagcaggtagttccctgcatggtggggctccatcgcgatcacatgatccatcaccctcctggccaagccggcgtccccatggtcccggcaggcgccggccagggcacgccagatcacagggtcgggcgcgacgggcatggccaggacgaactcgaacgcgtcggccaacgacccggccctgcac

SEQ ID NO: 117432 - DNA, 312 bp, Zea mays
  Clone ID: MRT4577_38587C.1
acgcaaccacctgactcagaggagccttctgtgctctatacgagatgtaccatgcgagaaaggagcctatgaagctgcggacgctcttcaacatgacccctgcgaggacctggaccagacgtgagtgccccagctactcatactagcgacacacaggagcacaagaggtacactacaagagcaggcgggcagatcacaagatgccggacgagcacctgcacatgcacgggtactcctactactgggactgaaacaactgatcatcccatcgatcgagatatgcatgcataactcgatatatataccagccct

SEQ ID NO: 117433 - DNA, 543 bp, Zea mays
  Clone ID: MRT4577_38588C.1
gggtgttttgtgttttttttttttttttttttttttttttttttttttttttttttttttttttttttttttttttttttttttttttttttttttcttgggcctttttgttgcccttcttggttaattagttgccatttttactcataggggggggggggggggtttaatcctgggggtgctactttcaagcctaacaatgggagtgattaacttttttcttttttggggggcctttgtgcctgggtgtgtgtccgggcgcgggggaacagccctcctgggccaactccttaggggacctctcacgctctttttttttttttttttttactgtcggcctctgcccccccaagaccttctcaaaattcggtcttgaaaaagggggggggcgaatctttgcgggggggcccttggattccccctcctgaattggggcctgtacattgtccggttggtttttttcccttggtattttctttttacggtttgccttgacgaaaaatctttttttctttgtttttgggcccggtttccgttttggct

SEQ ID NO: 117434 - DNA, 319 bp, Zea mays
  Clone ID: MRT4577_38589C.1
agctcctttttttatgggtcctggatcatgggcaagactaaacttatggggggcgttatataccggactgatcaaaaaactgatttaactcggtccaacaacctaacagtgataacagaatacatgctcaccatggggtggctggtggacagcgtctactgacagaacaacagcgggcatcacttaggcgggtgcaccgctccttgagctagcgaactcacagaggcttgacacgacatgtaacatgatccgccctacgacattgcatgactgcacgcggctgatacgtctatgaacgtgtgactaaccttgctacatg

SEQ ID NO: 117435 - DNA, 348 bp, Zea mays
  Clone ID: MRT4577_3858C.1
gggggtgttttttttttttgttgaaagggtgggtcggctgggatgtcgcagcatcccacagtggaacgtctagctccacaggaagtaagtaagctgagcgtaaatctttttttttttccaacgcctgccgcggcagctgtgtgggggtgtgcaggagcggcagtgggcttgtcttactttttcagaccctcggggcggcttgttggtgcgtgtggtgccggcatcactggctggcgtgtttaactttgcgcttggtccgccttgggcggttggtcagggtccgacagctccgttgtgctggtctggagcgtggccgggggcccggcgcttggcatccatctcctcggc

SEQ ID NO: 117436 - DNA, 2233 bp, Zea mays
  Clone ID: MRT4577_38590C.1
accagcatgcctaccaccgccactcagctgaccatgaccacagcaacaacatgcaacatgcaggagaatcccccccccccccggccgccagggcctgcgcggccgcctcggccccgccgccgccgccggcgcggcggcgccggctccgcggcgcctaccgcgactgcggcccgggccccgtgctcaccaagggctggagccgcttcgtcaaggagaagggcctccaagccggcgacgtcgtcggcttctaccgctccgctgccggcgccgacaccaagctcttcatcgactgcaagctgcgacccaacagcgtcgacgccgcctcgacgacgagcccggtcgtcgccgccggcgccggtggcgaaggccgtgcgtctcttcggcgtcgacctgctgacggcgccggcggacgccatggcccggtgcaagagagccagggacttggcctcgcccccgcaggcggcgatcaagaagcagctcgtggagctggcactagctagtgtagatcaatgctacggagcgggtcgatctttctcttagttagctaagctagtcggtttttattttattttattttattttgctcgatcgctcactgaaatggtagcatcagggctgagctaaatttttagtccctcctcggaatctcatgtagttggttcgtcatcctctggctttgctccgatgtaaatcttctcatcaactgtatactaccaatggaaacaaaaagcagccatggaaggctgcacgatgattaactgaaaaaaaaaaaaaaaaaaaaaaaaaaaaaaaaaaaaaaaaaaaaaaaaaaaaaaaaaaaaaaaaaaaaaaaaaaaaaaaaaaaaaaaaaaaaaaaaaaaaaaaaaaaaaggggggggcccttttaaagaatcaaattttacttccccgtgcttgcaacgtaaaactttttttatggggcccccaaaataaaataaatgggccggggtttaaaaacttccgaattgctcgaggccggccgggtgcctccctctacacagcacacggcacaccaccaccactcacctctccctcttctcgctgccgatctttcttcccttcccttccttccacctcggctagctagctagttattaccttagcatcccaccacatcacaccaaggtcacgcggcggccggcaagaatggcgacgcaccacctggcccagggccacccgcaggcgtggccgtgggggatggccatgtacaccaacctgcactaccaccaccaccaccaccaccagcagtactacgagagggagcacctgttcgagaagccgctcacgccgagcgacgtgggcaagctaaaccgcctggtgatccccaagcagcacgcggagaggcacttccccctcggcggcggcgacggggacgggaacgagaagggcctgctgctggaattcgacgacgaggccggcaggccgtggcggttccgctactcgtactgggtcagcagccagagctacgtgctcaccaagggctggagccgctacgtcaaggagaagcgcctcgacgccggcgacgtcgtgcgcttcgaccgggtgcgcggcgtcggcccccccgtccgactattcctctgctccccagcggcgcggcgaagcggaccgcggcgggtgattccgacgccgcccggcgcccggcgggcgagcagcagcagcagcagccgtggagccccaccgtgtgctacagcacgtcggggtcgtcgtacccgcccagccccgctagccccccttacgcctaccacatcgacacgccacacgcaggcgcaggcgaggcggacgccaagagcagcggcggcacgcctactacaggaacagcgccgacgaggaagctccggctgttcggcgtcaacctcgactgcggcccggagccggagccggagacgccgacggcgccaatgtacggctacggatacgtgcaccagagtccctacgcagcagtgcccgcagttcccagctactggtaatgagcaagcacggtcggaaggaacaacaccgagatcattcagtcgcattacacgtactgtactactgctagctgaagctgatagagctaattaaaatggataagcatataagcaaagcgtcagtttcttttctttttttaatgtttgctcaacttgtataggaaattaggaatgaataggataggagtaattgtaaaaaaaaaaaaaaaaaaaaaaaaaaaaaaaaaacccccccccgaccccctttc

SEQ ID NO: 117437 - DNA, 353 bp, Zea mays
  Clone ID: MRT4577_38591C.1
acgagcgaagtccgcgactgtgaagtttgcaccggagaagcctaaacgtgttgtgacccaaccataggatggctctactcaacgaaagcgatctcgactaaatgctggtgcgaccaatgcattatccattaacgatcaactgcatgatctacgacccatctattgagcccgcgtgacaaaacaccgtatgccgctggcacctacgctgactctgaatgctgagcaagcatatgaccctctcgacgaggactattgatctgtgactcgatatactaccacatcatgcagagctgacccaactaatacaactgctcctgatggactataatgtgtgcagcgtcaccgtgctgacc

SEQ ID NO: 117438 - DNA, 190 bp, Zea mays
  unsure (1)..(190): unsure at all n locations
  Clone ID: MRT4577_38592C.1
cacgcgtgcgatcggatcagaaacgccatccgggacaccgcgaccaggtcctttggcgaagcgagatggagacatccaggaaagtgtgcgaggtcggcgctcgcgtgtcggggctggcgtgtgcccgggagctgctccacgagggccaccacatgacggacatggagcaaggcggcgnccatggcaggca

SEQ ID NO: 117439 - DNA, 352 bp, Zea mays
  Clone ID: MRT4577_38593C.1
acctattggtctttcggatccgttctaccctttgcttgcaaagaggactatgattatctgaggttccactactattggcgacagcctctaatattacaaggccaactactagctggcaccgactcatgaataactgtttataatgatcggagctgtgtcagaatattacgcagctgctgcatactatgtctatctcttacctgaagcggcatggtacagatttgtaagtgctgcctgtttcgatgatatcgcatgatgatattatgatgcaagctgaacgacactggaaatgatggaaacgcactgtgaggcacacttagcctctagagcttgatcttacgactcggttgag

SEQ ID NO: 117440 - DNA, 1024 bp, Zea mays
  Clone ID: MRT4577_38594C.1
gctcggaattcggctcgagcgacgtcgtcgtctccttccgcggcacggtcaccggttccgagtgggtggccaacatgatgagctccctcgagcaggccaggttcgatccggcggacccgcgccccgacgtgaaggtcgagtcgggcttcctctccgtctacacctccgacgacgccacctgccgcttcacctacggcagctgccgaaaccagctgctttccgaggtcactcgcctcatcagcaaatacaaacacgaggagatgagcatcacgctggccggccacagcatgggcagctccctcgccctcctcttgggctacgaccttgccgagctcggtctcaactgcgacggttgcggcgacaccgtgccgatcaccgtctactcctttgctggcccgagggttggcaacactgggttcaagaatcggtgtgatgagctcggggtgaaggtgctaagggtggtaaatgtcaatgaccctatcaccaagttgcccggcatcttcttgaacgagaacttcttcggggccggcaggttggagcttccatggagctgtgcctgttacacgcatgtcggtgtcgagcttgccctggatttcttcaaggcgagagatcctgcttgtgtgcatgacctagaggcctatatagggttgctcaagtgccctaacaaggttgcagtggtgaaaaacgacggggagcatgttttgagcaaggcaatgaagtttgtgcttcaacacagttttgatacttggagatggcaaatggccgcaatccaagttggtgagttagtgcaagccattgggttgtagattgattgatacaggggtccaatttcattcccattttttgtgggggatatgaaacatagatgcccttgtaaattcattcatcttgtcggtaaaacgaggtagagaagagtggaaattaaggggggaaactcggaattgtacatgaaaggtaacaaaaacaatcaaaagaaatactgatcatagttaatacatatactcggaattgctaatttctagcc

SEQ ID NO: 117441 - DNA, 337 bp, Zea mays
  Clone ID: MRT4577_38595C.1
catttgctaagtctaaaagctgactgagcaccatgaggctgagcccgcgtcttcttctgatcattctggttgtttgttgctatgaaactactgctggcaatgtctgtgatgctgttttgcgtgaaagcgcggccttcgttctaggaagtaaggataacctgaggaaggaacttgagcaatattctgtccctgccgaggctgttaaagcagaactggaggtgaagcgatgtgtagaccagatgagatacggagacagacttaaagtggcaggagcactggtacaaattttatttagatgtggcgtgagacgatggctggatgagtattttcctggtat

SEQ ID NO: 117442 - DNA, 433 bp, Zea mays
  Clone ID: MRT4577_38596C.1
gatcagccagatccccaaaaggaaggttgtccaaactagtagcttgttctcgcaagagggtgaattcacggctgtggatccagcggaacttaatattttagaggaataagggggaaaatgacccgccacacatacactgcatcagtgttgcactgttgctgcatacagaactcagaagtgtatttcgtagaccatttgaataaggctgttggaaacggtgacatctagtgctgtttgtgtttcgttgccgggacggtaacatctacagttaagggggcgtttgagaacaaagtttttctgcagtattgaagcaatactgtagtattgagcaatactatggtattatatactttgaggtgtttggcaactcatctgaaatttctgtatactaaactgtagtattgtaaatactgcccttgttttgcagttttgg

SEQ ID NO: 117443 - DNA, 433 bp, Zea mays
  Clone ID: MRT4577_38597C.1
gttgtctgtattataggatcgttaaaacaaaacatcatgaataacgacatcgttctcgtcgggcgccccactctgtaagctgccagcgcctttactgtgcaaatgcccttcccctgcgcggggctgcagggcttgtacatgcgctaactccagcctgacaacaatgatgggcgccggcaggctgtacccctacgcgtgtacctgaggcatgcgcagtgcataccggtggaggccaccccctactacgccgggtgtgggcatgcccatcgccatgtggcatgcgatcctggaacagcactacctgctgctgatgatgattaaggacttgctctcccaggctcatcatctgcagatgatgatgcatctagagcgtgccgatgtcgacatcatgagcctgtaccagccagctcttattcatcatctgctgcagctg

SEQ ID NO: 117444 - DNA, 248 bp, Zea mays
  Clone ID: MRT4577_38598C.1
cctcgagcttgagctttttgctccttgtcccatgcaagcgaacgagattgcctcgagcttgagctttttgctccttgtcccatgcaagcgaacgagattgggcggacatctcttctcaactcatttatgcggtcgccatctacgacccaaatagccgtcctgcggcggagttccgcttggagccgacttacttcagcttcgagatcccctatatgatcattgcttccgctactactattatcatgcct

SEQ ID NO: 117445 - DNA, 387 bp, Zea mays
  Clone ID: MRT4577_38599C.1
tccacccacgcattcgcggtcacagttcactcgttgaccagcatccgatgctgaaaggagagctagaggctggcatggtgaagcgctaccgttcagctgatctgacgggctcactcttgaatgactgggatattctgaagaaaacgactcaagtgaagcattcaacggctctgatccaaggcatgcatccgccgatcaagatcaaagctcgatgctcaacgtcatttactaaccagaaggatcgtttccatgcacatctgcgctaaactgacgacgaactgacgagactactagataagcatcagatgctgactagtgaactggaaaaaactatagctgatgatgcgcaacttgttcgaaagattcaatcttatcaaaactataacc

SEQ ID NO: 117446 - DNA, 601 bp, Zea mays
  Clone ID: MRT4577_3859C.1
gtcgcgcaatgttgcgagcggcggcgtcgaggtgcgcccgcggtgccgtccggcggctgtcgtcgtctgcggcggtggaggcttcgccagtcgccgtggggtcgcggcggaagcctctcctcgacgagggtgactggtcgttccatcgggagtggtggggcgaggaggacggccctggcgagggggcgcagaccgtcttccgccgccactccgagtgcggcaacggcgtcgtctccgtctccgcctatcccgcttcccgtccggctagtgagcattggccagccacggagagatggcttcaagaaagaaatgcaagactatacccagaatcagccagttctgaccagtttaaggcagcaactggacagaacactatgaaaattctgtgcatcggacatggtggcggcaccttaccattgtttttggctagcaagttcagaggtgctaccatccacattgtggaaattgatccagtggttgtttcagcttcaattgaatccatgggtttccccatgtcatctgttaaaggcttatcgcctgggtccatgctacctgctgacgctgatgatctactgtggggaggtttacataaccgcatttt

SEQ ID NO: 117447 - DNA, 339 bp, Zea mays
  Clone ID: MRT4577_385C.1
aaaacaaggcaactaataatatattcctggcaggaaatacagaagcctccccaactttttattaacttatcccacattttgccagccctttgggtaactttgaaaaaaaactgactttatcagcacatttttttgatacaaaaatttacccttatcaggggcgggggttacattagcaacggaacaaaagttgaaacaaatttgctttggcaagcaaactggattaatactttttaacttccacgggtactggggtttttccgaaggttgtacttgcccagggggcatgttgcattggtgggaaccccctttttgattccggggcaggggaaatggggc

SEQ ID NO: 117448 - DNA, 801 bp, Zea mays
  unsure (1)..(801): unsure at all n locations
  Clone ID: MRT4577_38600C.1
gggacattatcccccactcaccacctgatgctcagctcaattcgctgtcgggtttgaatctgcctgagtctgtcaccaaactattacagtcgtatcacacattatttgaagaacccaccacccttcctcctagtcgctcctgtgaccatacaataccactggtacccggcgcccgtcctgtcaatgtgagaccataccggttttctcctgctatgaaggatgaaattgaatcccaagtaagcaagatgctggagactggagtcattcaacacagcaccagttctttctcttctccagttttacttgtcaagaagaaagaccactcctggcgtttttgtatagattacagacaccttaatgcgctcaccattaagtccaagtacccggtgcctgttattgatgaattattggatgaattatatggtgcatcttggttttctatacttgatctgagagcaggattccatcagatcttactccgtaacggtgaagaatacaaaacagcctttcaaacacatttaggccactatgagtttcgagtgatggcctttggcttaacaggagcacctggtacttttcagaaggcgatgaaccatactctagccccagctttgaggaaatatgcattggtgtttttcgatgacatattggtgtatagttcatccatggaattgcatcttcaccacttggcgcatgtttttgacttgctgaaccgcgatcaatggaagattaagctctccaaatgctccttcgcagtcaacaaggtgtcatatctcggncatgttgtcagccaagctggag

SEQ ID NO: 117449 - DNA, 195 bp, Zea mays
  Clone ID: MRT4577_38601C.1
tccttactagcctctctttctttaccaaagctttttaactattaccataatcccactcctacagaaaactttactataactaactgtatcttcccttcaaccccaaacacaacctagtcttctactcccctgcctcttcctcttccccctattcctctttctcttcctttgatctactccatctgttccatctcc

SEQ ID NO: 117450 - DNA, 295 bp, Zea mays
  Clone ID: MRT4577_38602C.1
aaagaagaaggacggtggcggcggcggcggggccgatgagaagaaggatatggataatgagaaggataataaagcggacggcggcgataataaggcggacaatgagaatggcggcggcggctcctgcgtgatagatgaaggccgacaatgaaaaaggcagcggctagaagaatgccgacaaggataatggctgcggcgagaataatgcctgacaatgagaatggtgccgacaagcccattgaggataatgaataagcccaatgacgagactgttacgctgaagattcggctgcac

SEQ ID NO: 117451 - DNA, 313 bp, Zea mays
  Clone ID: MRT4577_38603C.1
ctgtactgtgggaaggcgggacgaggatggcatgacagaacagaatgtagaagggcatggtcttctaggtgtgtgtggaagtgccagttgtgagaccctttttacaggggactcgctaccagtgatggcatttggaaccatggacccatgcatgcagcactgtatgaagcaacatgggcttgccaggttgatggcgtgtccgttcctgatgctggagcaactgttggacttaccgttttagacgatgccagtgatgatgccacagattgatgacgcctaacatgatggtaccattgatgaatccgagcattga

SEQ ID NO: 117452 - DNA, 2767 bp, Zea mays
  Clone ID: MRT4577_38604C.1
aatcacttcaaacccttgcggctgctcccgttcttgtttcccctccgtcggctgctgaccggattcgcctcacaggctcgggatccgggcgttccgcgcgatgggcggcggcggcggcggcggcgcggaggaggaggagctgacggcgcaggagacagcgctctacgaccgccagatccgcgtctggggcgtcgatgcccagaagaggctaagtaaggcgcatgtgcttgtgtgcggcgtgaacggtactactattgagttctgcaagaatattgttctagcaggagttggcagtttatccttgatggacgatcacatagtcacagaggatgatctcaattcaaacttcctaattcctcatgatgagagtgtgtatggtggtaaatcacgggcagaggtttgctgcgagtccttaaaagatttcaatccaatggtccgagttgctgttgcaaaaggtgacccatcacttattgatggaacattcattgacaggttcgcaacactttctgacatagatgcagttctggctcgaaggaaggatatgtgtgataaaatgtctttgaatgagtctcgtattcctactactctcgtggaacgactgctagcagctggaaagaaggagcatcctcctgtatgtgctatccttggtggtattcttggtcaggaggtgatcaaatcgatatcctgcaagggcgatccagtcaagaatttcttctatttcgatgtggctgacggtaaaggtgtcatcgaggatatcccaccaccaccacctgcaaaataaagcactcagctgcgtaactctcgactcgacttggttcactaatcgttttctgtacccactcagcttcgaacatgtagtggcaacttttagatctagagccatgtgaaaaaaggcaagtttgactttaacccagatgtttagggattggtcgagcagcaaactgtgacagtatgtatgcatcgacaatttaaagctgaagtctggaccggtttccatgcttacaggggcggacttcctttgtcgtccctctacccatttgtaaatttgggagcgggggttgggaaaactgtcgaaaaagaagcaagcacattgctttctactctgtagactgcaaggattcttgtggtgaaatatttgttgagttgcaaaaacatagctatcatcagataaaccgtggagcagaacctgaacatcaggagttgacatatcctagacgcaacaggtgctctgaagcaggttcggtgtcctgcaactgctaggtatggctcccgtctgccggattgccgtctcaggctcgggatccgggcgctcgcggcgatggcgaaaaacggagatttcctcaaaaccctcgccagcttatcccccttccctccctcacacgatctctcctcgacggctaacccggattgccgtctcaggctcgggatccgggcgctcgcggcgatggacggcggcggcggcggcgctggcggcgcggagggggagctcacggcgcaggagacagcgctctacgaccgccagatccgcgtctggggcgtcgatgcccagaagagactaagtaaggcgcacgtgcttgtgtgtggcatgaacggaaccaccatcgagttctgcaagaatattgttctagctggagttggaagtttatccttgatggatgataatgtagtcacagaggaggatctgaatgcaaatttcctaattcctcctgatgagagcatatatggtggtagatctcgagcccaagtttgctgcgagtctttgatagatttcaatcctatggttcgagtttttgttgaaaagggtgatccatcattaattgatggagaattccttgacaagtttgacattgttgtacttagccgtgcatctcttaaaacaaagttgttgattaatgaaaactgtcgaaagagaagcaaacacattgcattttatactatagattgcaaggattcatgtggtgaaatatttgttgacttacagaagcatagctatgttcagaaaaagcctggaggagcaactgaacaacaggagttgacatattctagtcttcaggaagctatctctgtgccttggaatagtctaccgaagaagacggcaaaattatactttgctatgagagtactggaggattatgaattatctgaagggcgcagccctggcgaaacaacactttctgacatagatgcagttctggctcgaaggaaggatatgtgtgataaaatgtctttgaatgagtctcgtattcctactactctcgtggaacgactgctagcagctggaaagaaggagcatcctcctgtatgtgctatccttggtggtattcttggtcaggaggtgatcaaatcgatatcctgcaagggcgatccagtcaagaatttcttctatttcgatgtggctgacggtaaaggtgtcatcgaggatatcccaccaccaccacctgcaaaataaagcactcagctgcgtaactctcgactcgacttggttcactaatcgttttctgtacccactcagcttcgaacatgtagcaacttttagatctagagccatgtgaaaaaaggcaggtttgactttaacccagatgtttagggattgttcgagcagcaaactgtgacagtatgtatgcatcgacaatttaaagctgaagtctggacggtttccatgcttttgggggcggatttcctttgttgtccctttgaaaaaaaaaaaaaaaagaaaaaaaaattccaaacaattgcacagcccaaaaggcaaaatgggacgcaccat

SEQ ID NO: 117453 - DNA, 1468 bp, Zea mays
  unsure (1)..(1468): unsure at all n locations
  Clone ID: MRT4577_38605C.1
cacgatctctcctcgacggctaacccggattgccgtctcaggctcgggatccgggcgctcgcggcgatggacggcggcggcggcgctggcggcgcggagggggagctcacggcgcaggagacagcgctctacgaccgccagatccgcgtctggggcgtcgatgcccagaagagactaagtaaggcgcacgtgcttgtgtgtggcatgaacggaaccaccatcgagttctgcaagaatattgttctagctggagttggaagtttatccttgatggatgataatgtagtcacagaggaggatctgaatgcaaatttcctaattcctcctgatgagagcatatatggtggtagatctcgagcccaagtttgctgcgagtctttgatagatttcaatcctatggttcgagtttttgttgaaaagggtgatccatcattaattgatggagaattccttgacaagtttgacattgttgtacttagccgtgcatctcttaaaacaaagaaaaagcctggaggagcaactgaacaacaggagttgacatattctagccttcaggaagctatctctgtgccttggaatagtctaccgaagaagacggcaaaattatactttgctatgagagtactggaggattatgaattatctgaagggcgcagccctggcgaaacaacactttctgatatagatgcagttctggctcggaggaaggatatgtgtgataaaatgtctttgaatgagtctcgtattcctactactctcgtggaacgactgctagcagctggaaagaaggagcatcctcctgtatgtgctatccttggtggtattcttggtcaggaggtgatcaaatcgatatcctgcaagggcgatccagtcaagaatttcttctatttcgatgtggctgacggtaaaggtgtcatcgaggatatcccaccaccaccacctgcaaaataaagcactcagctgcgtaactctcgactcgacttggttcactaatcgttttctgtacccactcagcttcgaacatgtagtagcaacttttagatctagagccatgtgaaaaaaggcaggtttgactttaacccagatgtttagggatttttcgagcagcaaactgtgacagtatgtatgcattgacaatttaaagctgaagtctggaccggtttccatgcttttgggggcggatttcctttgttgtccctttacccatttgtcaaatttggtagcggtggttggggggagtggggaatgaagtgagaaggctatgtttataactgtgaaccgacggttgcagctatacatatcgtcatgcctgtgtactcaaaaaaaaaaaaaaaaaaaaaaaaaaaaaaaaaaaaaaaaaaaaaaaaaaaaaaaaaaaaaaaaaaaaaaaaaaaaaaaaaaaaaaaaaaaaaaaaannnnnnnnnnnnnnnnnnnnnnnnnnnnnnnnnnnnnnnnnnnnnnnnnnnn

SEQ ID NO: 117454 - DNA, 748 bp, Zea mays
  Clone ID: MRT4577_38606C.1
gttccttcctctctacttcggttgtcctccacatcctctaagaccaagaggccggtgaatccacctccgccgcacatgtgcctgcgagcaacacccccgtagacgcctcggaggagcccatcccgacttccgcggtgctgatggcgaaggccaaccacatggcgaaccggcgccgcccggataacgccgccttcctcaagtgcaagatcatggaccactaaacccgacaagggcctcgagaaggaccgccatgcgtcacgacgctgacgaccacagcctgctgacagaactatcaccaaaagtgacccacggaaatgcatgaatatgctggctgcatgcatgactacaccaactcaattcgactgctgccgcaccgagccgcacgtttgtgacgtaagcctgcccgcatttccgagtagatcttgagagtcttacttgcagtgaccttcccaagtaaggtgacaaaggtggaaaaacagcggtcatgatatgccgtgcctgttgacctcatggaatatgtactggtgaatgaagatgacagcctgccagctattcaccccatctgccgcccctcatgatgttagagcaggctaatgctctaaaacgacgtcgatcggcgatgtctcgttatgcccacgaattacatatggcggactccctgtcatgtctgcctgacccgagagtgacagcccgctgatctaatcttctgatccggacttccacaagctatgtacgactacaatgtact

SEQ ID NO: 117455 - DNA, 2198 bp, Zea mays
  Clone ID: MRT4577_38607C.1
gccggccgggccggggaatgaatttattcatccactcaagaatcccaagagcactcggtgcaaaggaaacgaagggacggatgaaaatgcttcgacttctatctttcggtttcttacactacgcacataaataaatagagatgcgtaggcctccttttttttttcttacacgaactaccagtgttctaggccggcaatcggtggagtcttcttggttcctgatggatcatctgcccaagtttgtggccgatttgatatgtttcttccgtaggctcgggatccgggcgctcgcggcgatggacggcggcggcggcgctggcggcgcggagggggagctcacggcgcaggagacagcgctctacgaccgccagatccgcgtctggggcgtcgatgcccagaagagactaagtaaggcgcacgtgcttgtgtgtggcatgaacggaaccaccatcgagttctgcaagaatattgttctagctggagttggaagtttatccttgatggatgataatgtagtcacagaggaggatctgaatgcaaatttcctaattcctcctgatgagagcatatatggtggtagatctcgagcccaagtttgctgcgagtctttgatagatttcaatcctatggttcgagttttttgttgaaaagggtgatccatcattaattgatggagaattccttgacaagtttgacattgttgtacttagacagaagcatagctatgtaaagaaaaagcctggaggagcaactgaacaacaggagttgacatattctagccttcaggtagatgatttagttttcagtgacttctaaaatctaaagtctggtaaaattattttgactcaaacataccttgttcatgttttgctccctgaatatagtgttctttttggctgcaacatttgctgtgaaatatatgtgatgcaatgcaactgatagatgttaatgctatagaatgaagcaatttgaattacattttttatatttgaatctgagaagtgcaggtagtgcagtggtgagagcgattgaagcagcctctctgtatttgttggagaaaggcttgccttgggttatcccttccctagaccccactcctgggagcctctggcacttggtctgctcctttgtatttgaatgtgaatgatgtgccattgttttctgtaataatacaattacatttactttatttagttgtagcgatgaaaactaaaaaagactgctgtatactgattttcagtttgcctttaattctattgtgggtactttagtttgaactttaacttttttttggcaataggtgccttgaaattagctctagtctttgatgtattaagaattgcatctacctaaatgtcggcttttctatgacaaatctattaactggcagtgcctaatggcatatttgtttaaacttcatagctcaatgtatagtgctattggaagagttatgtctgatttgtttccggaaatctgcatcttatcattttggatgctttaatttggaaatgcattacagttttgttgaattaaacacaattgcattcaattttgttcatacaggaagctatctctgtgccttggaatagtctaccgaagaagacggcaaaattatactttgctatgagagtactggaggattatgaattatctgaagggcgcagccctggcgaaacaacactttctgatatagatgcagttctggctcggaggaaggatatgtgtgataaaatgtctttgaatgagtctcgtattcctactactctcgtggaacgactgctagcagctggaaagaaggagcatcctcctgtatgtgctatccttggtggtattcttggtcaggaggtgatcaaatcgatatcctgcaagggcgatccagtcaagaatttcttctatttcgatgtggctgacggtaaaggtgtcatcgaggatatcccaccaccaccacctgcaaaataaagcactcagctgcgtaactctcgactcgacttggttcactaatcgttttctgtacccactcagcttcgaacatgtagtagcaacttttagatctagagccatgtgaaaaaaggcaggtttgactttaacccagatgtttagggatttttcgagcagcaaactgtgacagtatgtatgcattgacaatttaaagctgaagtctggaccggtttccaaaaaaaaaaaaaaaaaaagcggcc

SEQ ID NO: 117456 - DNA, 858 bp, Zea mays
  Clone ID: MRT4577_38608C.1
accaaaagccccctcaaaagccgaaggagacctcgactggaaggaccgccgggcgcaagaactccaacgaacaaaccacgcggggcggccggtcaaatctacgccaccaggcgtgcgagggcctcgccgcagttcgattcgactcccccctcctccgcctccctcgattctcgccgcggaagcgaaaatgagcgacaatctcatggaaaaagtgaacgctctcggcgagcgcctcaagatcaccgggtcggaggtgagcaagcagatgcaggccggcatgagctccatgagcttcaagatgaaggagctcttccaggcgcagactccggccgacaagatcgtcgaggacgctaccgccgagaccctcgaggggcccgactgggccgccaacctcgaaatctgcgacctgatcaacaccgagaaggtgaacagcgtcgacctgatccgcgggatcaagaagcggatcatgctcaaggaggctagggttcagttcctcgccctcttcctcctcgagaccatcgtcaagaactgcgagaaggccttctccgaggttgcggccgagaggattctagatgagatggtcaggctgattgatgacccccagacggtggtcaataacaggaacaaggcccttacgctcattgaggcgtggggagagtctggcgatgagctccgctacttgccggtctatgagcaaacctacaagagcctgaaatcaagaggaattcggtttcctggacgtgacaatgagagcctggcccccatatttactccaccacgctctgttgctgaagctgaagttgctgcaatttctccagcagacattcgaagatgacatgtgcatacatatactgctga

SEQ ID NO: 117457 - DNA, 919 bp, Zea mays
  Clone ID: MRT4577_38609C.1
cattgggtacctcgaggccggccgggatcctacaaggaaacaggaacaggcagctctgaaagactgaaactcacggccatggccatcctgggcgccctcaggctcgcgccgtctccacccgccctcgccggcgctgcgccaccggcgacgtcgccgtctgcggctgtacgctcctccgtgcacttccacctcgccaatgccggcgccgccgcgctcgtcgccgcctcgctcctcgccgccgaccccgccgtggctttcattggaggaggaccgtacgggaagcaggtgacgcgggggcaggacctcaccggcaaggacttcagcggccagacactcatcaagcaggacttcaagacgtctatactgaggcaggcgaacttcaaaggcgcgaacctgctcggcgcgagcttcttcgatgcagacctcacaagcgctgatctctctgacgctgatcttagaggcgctgatttgtcgctggcgaatttaacgaaggcaaacttatcaaatgccaacttagaaggggcacttgccactgggaacacttctttcaaaggtgccgacataactggggcagattttaccgatgtgccgctgcgagatgatcaacgggagtacctctgcaaaatcgctgacggagtaaattcaaccactggaaacccaacaaaggagactctgttctgcagctgatcgacggaaggacctgggacttgtgacttattcaacgtcttgataaacttgcatctgctgctgtaagcacgtgaggaatgtaaattgagttatagagggttcctagaaataataactggtaattacgtgtaaatcaaccaacaatataagtgtgtgctgccctttgaatgtgcaaacgattttttattacaactcaaaaaaaaaaaaaagggcggccgccaccgcggtggag

SEQ ID NO: 117458 - DNA, 197 bp, Zea mays
  Clone ID: MRT4577_3860C.1
atcccccttgcaagtatagtctcgggggctctagaaaacgatgggcgggggcgacctgatccaaagcggcgcttgccgcggcgagttcgcttccaaggactacacggacccttccccggcgccgcttatcgaccctgcttaacttgggtcctggtcgctttaccccgccctgatcccccagttcatcgccacccttc

SEQ ID NO: 117459 - DNA, 545 bp, Zea mays
  Clone ID: MRT4577_38610C.1
aagaaccactctttcgtccgacactccggcgcccgtttcatggcggagcctgccagctagtagatgcttccatccacgcgcgaccgccagcccgccgtattttctgagggtcggggctatagtctttggccggctcacggcgcaaaccaagctgggttcgacagagtgggaatgccctaatgtcagagctgggtttcacactgaggtcaaccggaaaatctatctcagggtgcccaaaaagaaggtggaccaggagcaacgtatctacatgatgacgtattggtactgcaggtgtgcgttaccgaacacgtggtgaaggaacctggtaatggtttgacatatggaacgctatataccgtgagctagattatatattattgggtgacacatataggatgcaagcaatctcatataactcaagtgttagataagcatgctctatcttgacagagtagataattccaaaaagaaatgctatgcattaatggaccaagatgagatcttactcagtgtctggcactatatgataccatgctaagtataaa

SEQ ID NO: 117460 - DNA, 347 bp, Zea mays
  unsure (1)..(347): unsure at all n locations
  Clone ID: MRT4577_38611C.1
gggaaaaaccaaaaaaaacccaaaagggggagaaattgtgtttttattttctgaggggccaaggggtgggaagttgggacaaaaaaaaacaggggaaaaaggggggatttgggggcctttgggaannnnnnnnnnnnnnttnntntnnnccttttttnaaancttttaaaannnnttnnngggggccccccccttgcacagggaattttgagaactttttattggggaaaatggtcgaaacctggggaaaaggtcctttgggaaattcaaggggtttacgggggaacatagggtttttaagactccacaatctttctggggggccataccgggggacatttgttgtt

SEQ ID NO: 117461 - DNA, 174 bp, Zea mays
  Clone ID: MRT4577_38612C.1
gcggaagcagatgccgcctataggacctggtaccgaattggcacaacgcattgaattacttccttcacaccaacttagatcacacagcatctattgaccggggataaggcggcgaccatgaatacgaatcgcgtgaagatcatatgcatggatatggcaaatacagcttagaga

SEQ ID NO: 117462 - DNA, 449 bp, Zea mays
  Clone ID: MRT4577_38613C.1
ggggaaaaataaaacctaaagcagcatctgggtaactggtaactctgcattggggtgccctgaataattacatgggggcgggggggggcacaaaactttacacgtttttaatcaaaagagcaaggggcccgaacaggggttatatattttcgggtgatcgatcaccttttaccggttttggaagttcaaagccttggggcccccccccaagaggaagaccaacagaagggtgtagcccaaatgccccagccccacctagcccaggaaggcgtgcttcatgcccaggttttgttccaaaaattccttcaccacaactgggccggggttgccagtagccgtcacgttgggggctaccttgccgaactgggaccccgtgaccccgtaaatggtccaggacaccgggttgcaccagtagaaccatccccaccaaataggcaaccccggtcggg

SEQ ID NO: 117463 - DNA, 781 bp, Zea mays
  Clone ID: MRT4577_38614C.1
aggttctgagggagagaagagacggagggacaagttacccgcgaccaggaccgcgatggctgccgagccgccatcatcgtcgtcgtggtcgtcgtcgtcgggcgtggccagagcgctggctcaccaccaccaggccgtgctcgggttcctgctcggtctcctcgtcagcctcgtgctctacactacggtgtccggccagttccgatccacgagtaccattgtcgttctgcagtccacgccggccgagcgtaccgggcaaattgatatgacttctcctcctccggtatcatcagtgtcatcgactcttaataattctactcaagaatatgggcagactgacgaggcaatcaagacaacggggaaagaagatctcgaagacgagaacgttgtacatgcaaccgacatgaataacaagactggtaacgcgcaaacagataaaacagaccatttaggccaaccaacaaatgatgctagtgacaagggatatctcactcggcaaaacggcggcgatgggaataatgaaagcaacgtcaaacatggtgctccggggaagcccatctgcgacctgtccgaccccagatatgacatctgcgagatctccggcgacgtccgtgccatcggtgtcaaccgtaccgtactatatgtcccgcctgccgaagagcgcgacaatgacagccaagaatgggccatcaaggaccagtcccgcaaggggctggtggacatcatcgaggtgaatgtcaagaccctgagcgccgctcagtccctcgtggcgccagagtgc

SEQ ID NO: 117464 - DNA, 499 bp, Zea mays
  Clone ID: MRT4577_38615C.1
cggggtggacacggtcgcgccacagaagcactacatgcggagcattgttcgactctctatgtctacagcacctacctgttgacaccaactgccggccctgctccgagaaccagaatgggcgccgccgatgcatcttcgttgcctacgtccgccatgacctgccgagcggcggcggcgtggggaccgggccagccactggtgatggaagaggtggaggtcgccccgccggggcccatggggatgcgagggaagggcgcgtacacctccgtctgccgcagcagacgcgcctggctggcgatccaaggcgcaccttggtctgctccccagagtcttcggccactaggcatccggagtagtaccgagtgtaggtgaaggtgtgaccgcgctccgagtccgtgaccacggtctccctgtcttcattggggaatgccatagcggccagctctgtgtcccaggggtgagcaccatgccgccagaggctacctctggaccggaaggg

SEQ ID NO: 117465 - DNA, 1263 bp, Zea mays
  Clone ID: MRT4577_38616C.1
cacaaatacagttccatcaatacccattatgtttgcaatgtaaaaaaaccaaaacaaaattacaggagcaatgtactccatcacgatcaaaatgtttcttcacaattcttcgtttgagcccttaattaattctaattcaaaaaaagaaaaggccgcttttttttttttttttttggtccaatccttaaattcttaaattttatagtgtaaaatttagagtctactaccacccctatccgtaccttactaacgacattatgcagattggcacgctgcaaaacttcaaggaattatctactgtcagctgaattgtgtgttttatgacttccatgtctctgacatgaggatcttacaatccagcaactagctgcttaaaataaattaagaatcctctttagggaccttgctctgtatagttcctggtgtagaatttgagcctctttaagccgacctgacttagcaacccttgtgactatagacagataaaatgcactcctgtggttgacatttcttgataccattactcgtagtatttcagcagcagcttcagctttacaacctttgcacaatgcttggatcatcatggaaaatgtagttgctttaacctcaaatccaagagcaagcatctgattcaaaagctccagtgcttctttggccatattcttcttacagaaccccataataagtgaaccataagtgacatcatcaggattgatcccatcaacaatcatttcatcaaatagagtcatagcattaataatatcacccctttttgctaaagcatctatgagggtgttgtatgtaatgcgaaccacctggcatccattttctctgatggaatggaaaatcccaagagcttcttgaaccatccccttttagagatggcattcagaagtgtgttgtatgtcactatatcaggaaagcatttctcactcaccatcatctctagaacatcaattgcctgatccagatgtccatacctacaaaagtagtttataaagatattgtaggcagtaacatcaggcttatgatttgcctgcttcatgtgtgcgagcaaatcacctacttcagaccaccttctcttgtcacacagggaatgaagcaagatgcaataggttgtaccatttggctcaaggccttcagctgaaagacgagttaatatcaactttgcatccttcaaacagcctgctttgcatgacgcactgataagagtgttgtagctgacaacatgtggttgacatccctccaaatcggacgcgtggg

SEQ ID NO: 117466 - DNA, 444 bp, Zea mays
  Clone ID: MRT4577_38617C.1
ggcccaagggggagcaagatttcaaacttgaaagctccccacacccccatttaatggtaattggaccgggtttgtgtacagaaggttacccatatgggcacccaaaaaaaggtttttacactaaaaactgttttttttttaaagggtattttaaaaaacaaaatgaaattggaaatttgatgagtaagttttaaagcaaacataaaaacaatccccctttttcaaaatttcaaaggggggatgaaaaatttgaaggagctttgggcttcccaatccttaaacatcccagggggggcttattttctcccttttaaacaagaaaagggaaaaaaaaagggggggaaaactcgggtaaagtatgctgttaaaccgggggaccccacacattatgcaattggggggggcactaaatggcagttattcctgcaagttcgcgcagttttt

SEQ ID NO: 117467 - DNA, 1570 bp, Zea mays
  Clone ID: MRT4577_38618C.1
tgggacctcgagccggccgggttgggtccgcgcgacgctacggcaagctattccagtgattaccaaagcaaagccttccctgtttccaagcgcttcgcctccaatatctccacgccgttcgcggtgcttccgctcgcccactcctgtgccgctgcgcgccgctgcagctcccggcaccgtcctacgaaccaacacggccccagatttcttccagctcctccaaccgattcgaccggaaccgccgcacgagccccccaaagctcgcatcctttcctgcgtttatttatttcagttcaaattccggagtgttcgttctgtttttgccctaacttggtcacaatgggcggcaataatgacggcgtttccggtgccgcttgcttgaagccgctcaacggcgtctcccctacctacgtacccagcgccggcgccggcgccctgtacttccttatcggctccgggctcggcgtcgtggcggtgctccacgcatctgggttggcggaggtcagcggagagtgggcctccgcggcgcggtggaccgaggtaagcagagagtggccctccgccgcgcggtgggctgcccaactggccggatcggtcggcgcccagcgcctgctcctcgcaacgtcgcttcttttcctggccgtcagcgtctggcgcctcgccaggcgctgcgccgccgtggaggggcgcgtcggcagcacggactccgcggtgcgggcgttgcacgtcgggggagtcgtctgcgccgtgtgcgggtcgaagattcgggccctcaagagaggctgccgtggcgtggagcgcacccgctcggtcgactcgagcaagccggtctcgaggtcgctggctgctgagttcgaccaggaggctgacggggaggaagaggacaatgctggagagaccagcgatccagatgacggcagtgtgcagtacctgaggaggaggctcaaggaggagatgctgctgaaggaggttgcgctcgaggagctggagaaggagaggcatgccgcagcgtctgcagccgacgaggccatgtccaagattgcgtgcctgcgtagcgagaaggcgctggtggagagggaggcgcggcaattccaggagatgatgcagcagaagcagatgtatgaccggcaggtgatcgagtcacttcagtgggtgatcatgaagtctggaatgcaaggctgggagccagaggccataactgatcgagccttgtcggagacaagcgaggatgacagagataagaagtagctagctcttggttattggagttgaatggaaccactgaggaaggccctgttgtttgctttgagttcatcgtcctctgatcagctcttagtaaccaaacagagaatgccaagttacgaaaactcggatgttccttgaccatgcaaagctcttcaggggaaatatctgaaatccacctgtaaatataccatcttcttttaaactacctgtgtacttatctaataagaacaacatctgtacttgatcgctctaccttgcaaatgttcattgctatttatctgcaaatgttcattgctatctgaaaaaaaaaaaaaaaaaagcggcc

SEQ ID NO: 117468 - DNA, 597 bp, Zea mays
  Clone ID: MRT4577_38619C.1
atgtggtggccctcctagagagctcaacatactcaaagacctcaaggtttgaagaaagctcctttctgctctgctaatttttccatcgatgaaactcttccattactaattaaattattgctaccgattttctgatttcagatcaaggaggaaggaaatgctcagtttggaatggaagatttgttgtactacatcaaaagagctgaagaattcaaggttgatcttgacgttggtgaaattaaacaatacttccctgttggcctggtcatatctggaatgctgaagatatttcaggatctatttgcactacgattcgacgaaattaaggatgttgatgtttggcatgatacagttcgtgtgttttctgtttgggatgcaagttcaagtgatcttttgggttacttttttcttgatatcttttccagggaaggaaagtatgcccacacttgtgttgtgacccttcagaatggatgcttatgttctaatggtacacgtaaggttccggctgctgtgatattatctcagtgtccaaaagagtttgatggtaattcagcattgctgcggttccctgaagttgtgaggctattccatgaattt

SEQ ID NO: 117469 - DNA, 1738 bp, Zea mays
  Clone ID: MRT4577_3861C.1
gagaatactaaggaatcaggtattgtcatggagctagagatgaattgggatgccaatccaagtatcatacttgctgtaaaaactagacttgtcggcacgaggccaatacaggtgaaggacattggctttacaggagttttccgcttaattttcaaaccactaattgaagagctaccttgctttggagctgtttgcttttctctacgacagaagaaaaagctggatttccgactgaaggtcattggcggcgaaatttctgctgtacctggaatttcagatgctcttgaggacactataaaaaatgctattgaggactcaataacatggccagtaaggaaagtcattcctattatacctggggactacagtgatctggaactgaagcctgttggtaccttggaggtcaagcttgtgcaggcaagagatttgacaaacaaagatctgataggaaaatcggatccttttgccattgtatatgtgcgaccattaccagacaaaatgaagagaagtaaaacaattaacaacgatctgaaccctatctggaatgaacactttgagtttactgttgaagatgctgatactcagagtgtaaccgtgaagatttatgatgatgatggcattcaagaatctgaattgattggctgtgctcaagtcaggctgaaggatctacagccaggcaaagtgaaggatgtctggttaaaacttgtaaaagatctggagattcaaagggacaggaaagatcggggtcaggtgcaccttgagctgctatactgtccatttgacatgaaggatgaggttccaaaccctttcagccaacagttttcgatgacttcattggagagaacattgacaagcatggaaaatggatcggggggctctagttttgataggctgtcttcaagaaagaaaagggaaattatcatacgaggagttctttcagtaacagtgatatctggggaggatctgcctgcgatggatatgaatggaaaatctgacccatatgtcatactttctctcaagaagacaaagacaaagtacaagacaagggttgtgaccgaaagcttgaacccagtatggaatcaaacttttgattttgtcgttgaagatggcttacatgacatgcttatgttggaagtatatgatcatgacactttccgtagagattacatggggcggtgcatcctgaccttgacaaaagttttgctggaggaagagtacaaggaaagcttcaacctggagggagcgaagagcgggaagctgaacttgcatctgaagtgggcgccacagccaatcatgcgtgattcgcgtgaagcgggcagcttaaggtcaaggtaagtgcgcacgcatgggtgtacgtgtatttttttggctgggtgtctcggcctcgagacctgcttggtcgagggtttgtaaattttgaggtgcattctttttgaaattcaacgcgtatgcggggacggtcccccaaaattttattccgaccaaggactgcagttacgtgagctagcagaagtattcaggttaaaaaaaaaaaaaaaaaaaaaaagccaaaaaaaaaaaaaaaaaaaaaaaaaaagtactctgcgttgttaccactcctcgcatcgcaatggtttgtctgtgtactccttgtaatatttaaagtatgaaaaaaatgtgtagatcagaaagctagtgaaacaaattcagcagttggcggcttgacgcgacaacggtcagtcggtcacgggtggttgct

SEQ ID NO: 117470 - DNA, 594 bp, Zea mays
  Clone ID: MRT4577_38620C.1
tcttattcgcatggctaacatgctgggggaactgatgagattgaaaaagtcaagaatttggattcacgccacagtacacttgtagaaaacgcctactacctttgtaaaccgcccgaaagatctgcgcggatatcgaaagttcggccaccgttgcatcaatacataagaaagttgcttttggggggggttgacaaatcaagtgttgaacatgttttgcgccaactacgcaaattaccttgggcagagtgtcaacaataccttctgaagtgctttctaaaggttcacaaaggaaagtacagccaagttcatctgattgctcttctcactgctagtctcagccgctatcacgatgactttgctgtctcagtggtagatgaggttttagaagagataagggttggattggagttgaatgactatgggatgcaacaaaggaggcttgcccacatgcggttccttggagagctatacagctacaagcatatagattcatcagttgtttttgatacactgtaccttatcattgtgtttggtcatggaactccggaacaagatgtgctggatccaccagaagattgtttcagaatcaggttg

SEQ ID NO: 117471 - DNA, 533 bp, Zea mays
  unsure (1)..(533): unsure at all n locations
  Clone ID: MRT4577_38621C.1
ggtaccctncgcggtccggccggggtctcctgctctatgtttccaaagccaagcgctctttctccatgccgctcagcctcctctctgtttcagtcgtggagcatcagcaatccacatcatctccgttggccgagcggttccctcgcggcgcccaggatccttcccagacgcgctcggctccctggtctgtctgtcaccttgccgacgcctcctctgctcctccacctgtagctcgcccctatctcctcctctccccatggcggctccccctggatccctccctgcgcgaaccctctcctgcagcacgccagtgccgaccacaatctcccatggcgcaggagctccccattctcctcttgctagggcgccgtcgctgggctcgcccagtctctcgctttctctgctccagcagcaaccgtctcaaggtattccagttcgggagcagcagcaatcgatatagctcctccgcaccgtggcgcagccagccgncgatgccatgtccctgcaacctngngncgnncgcgcgcccgcct

SEQ ID NO: 117472 - DNA, 341 bp, Zea mays
  Clone ID: MRT4577_38622C.1
gccacagcatgcgacaatgcgtgctaccacgcgactgatcgatagcaaatgtagagcgcggagatggatagagataatggcgggcgtggtagctcatgggaggactgatagggggatggcgggctattggcggtgcagacgcggttctccgagcgaacccaatttgctgaaggtatgcctaggaccgcgggatccgaagtggatgactgatcgtcaaggaaggaggcccccaccgctcctgcattgaggagatcgagctggggatggacacctttaacatcacgctctatgtggatcagggcgggtaccgcagcgtatccaagggcttcctaggccactcc

SEQ ID NO: 117473 - DNA, 465 bp, Zea mays
  Clone ID: MRT4577_38623C.1
ggggaaaggggcattgaaccccaacttttttaacttttgaacagcgcaaacgaaacagggggggggtttaattttcttgaaaccgaccacaaaccatgggtgggtttgcattgaacattattcccccccccgtccttaaaaaaaaagggctggagcccaaagggggggggaatttaggagcccccccaaaaccctatggggggaaaaacggggccccatatgaactataaggggagccatgggagggattaaaccccggggggggaccctgtttcatcccagggacattagtcctttttggggcaaccttaatttggcgaccatgcaattcccattcattcaaattcaaaacttcctggacaggtttttgttccaaaaattcaacataagcaaaaccttttgggtgcccaaacttggcagaaaaaaatggcaccctgtggacagttccacaagcttggaaaaagc

SEQ ID NO: 117474 - DNA, 334 bp, Zea mays
  Clone ID: MRT4577_38624C.1
cgggtggctaaggattggaaggagatgattgacagtccagagagttgctatgttcttggcagcctagcctcgtggggcctcctttactttcttatctcctataacattgtaactgagtttgacatgaaggagatcttccgtctctttggtaacatccctttcaaacagaagaagaaatctgccatgctcttaaaaggtcttgggctcagcaatagaatcccagagttaatggactatttgatcggaaacggacaacaaatggatgttttatgtttggcacgtgttcttaacatggtggacaagtatcctccactttctcttctgaagggatatg

SEQ ID NO: 117475 - DNA, 442 bp, Zea mays
  Clone ID: MRT4577_38625C.1
cccaaaaccccccagggaaaaaataattttcccccccccggcccccaggggggccccgcccccggggggaaaaagaaaggggggttttttcctgaaaaaaggggcccgccttaagggggcccccggggggtaaacaaaaaaaacccctggggggggccttggaaaaaaggggcacccccttgaggttttcctgccccccccccaaaagggggccccccccaaaaagcttttcaaacgttatttggggggggaaaaaagggggggggcccccctgggggggaacaaactcccggggaaagttttaaaacccggtttttttaacccaccgggggaccctgttgtgaaaaacccgggcccccaggggcccaaaaaaatcattggcccggcccgggaagggggtaaccaaggggacaacaggcccctcttaaacccccgggggggg

SEQ ID NO: 117476 - DNA, 846 bp, Zea mays
  unsure (1)..(846): unsure at all n locations
  Clone ID: MRT4577_38626C.1
cattgggtacctcgaggccggccggggcctaagcaactttntgggcgacggcggcgccagcaggtcaccactagccaccgcgacgcggtttccagctcggcgccgtggctataaaagctcgtcgtccggcttcggagtccgggatccaccaccatcctctgccttgtcgatcatccatcgaccgcctcctgctcggcttcccaccccgcctgcctgcgttgcacaccagggaggagctcctccgaccgaccggccatgagctaccaggctcctcctccgggcacctcagcctacccgccgccgggcacggcctaccctccgccaggccagccgcaggcgtacccgccgccggcatacggcgcgccgccacccatggccgccggcgggtaccctcccccgccgcagcaggactctaagggcggcaacgacggcttcctgaaaggatgcttggccgctctctgctgctgctgcatgctcgacatgtgcttctgagttcgtcgtcaggggctcagggcacggggatggcgcgcctagagtccagaccgatctccatcatgcagtcaggcgaaaaacaatgcatggagctgttctttttttttccttcctttctgaatcatgacgatgatacatctttgtttccgtttccatcctgtatatgctttcccgtgctatgcatggaaacttcactagctaccccagcagggattatgttctctggcgttcatgcgcgtgtgttcttgagctctgaagtctgaaatgaaaacatctgcgatcggattcgtattaataaaaaaaaaaaaaaaaaagcggcctaaaaaaaacaaaagaaaaaaaaaaaaaaaaaaa

SEQ ID NO: 117477 - DNA, 614 bp, Zea mays
  unsure (1)..(614): unsure at all n locations
  Clone ID: MRT4577_38627C.1
ggaccctcgaggctcggccggtggtctaaggttacggctgaaatccaccagaccaccaccatcctcccttgtcgatcatccatcgaccgcctcctgctcggcttcccaccccgcctgcctgcgctgcacaccagggaggagctcctccgaccgaccggccatgagctaccaggctcctcctccgggcacctcaggtacgtgtcccgctgcgacacggggtcatcaagatgcaacctttattactactgcagcctgcccctgatcgattttgcctcgcctgtgcagcctacccgccgccgggcacggcctaccctccgccaggccagccgcaggcgtacccgccgccggcatacggcgcgccgccacccatggccgccggcgggtaccctcccccgccgcagcaggactctaagggcggcaacgacggcttcctgaaaggatgcttggccgctctctgctgctgctgcatgctcgacatgtgcttctgagttcgtcgtcaggggctcanggcacggggatggcgcgcctagagtccagactgatctccatcatgcggtcaggcgaaaaacaatgcatggagctggtttttttccattgtgaatcatgacgatgat

SEQ ID NO: 117478 - DNA, 815 bp, Zea mays
  unsure (1)..(815): unsure at all n locations
  Clone ID: MRT4577_38628C.1
atcatccatcgacgctttctggctcggcttcccaccccgcctggcntgcgttgcacaccagggaggagctcctccgaccgaccggccatgagctaccaggctcctcctccgggcacctcaggtacgtgtcccgctgcgacacggggtcatcaagatgcaacctttattactactgcagcctgcccctgatcgattttgcctcggctgtgcagcctacccgccgccgggcacggcctaccctccgccaggccagccgcaggcgtacccgccgccggcatacggcgcgccgccacccatggccgccggcgggtaccctcccccgccgcagcaggactctaagggcggcaacgacggcttcctgaaaggatggtaaggatccgcctatccacctgccatgcctggtgccagccgcttcaacgtttcgttcgccgcttctgaactctacttactgaccctgtcctccgtccttgttcgatctgcagcttggccgctctctgctgctgctgcatgctcgacatgtgcttctgagttcgtcgtcaggggctcagggcacggggatggcgcgcctagagtccagaccgatctccatcatgcagtcaggcgaaaaaacaatgcatggagctgttctttttttttccttcctttctgaatcatgacgatgatacatctttgtttccgtttccatcctgtatatgctttcccgtgctatgcatggaaacttcactagctaccccagcagggattatgttctctggcgttcatgcaagtgtgttctgagctcgaatcttttgaccggccgcctcgagcgccgcaca

SEQ ID NO: 117479 - DNA, 1281 bp, Zea mays
  Clone ID: MRT4577_38629C.1
tgttaacgtactcatggagaacaaccacaaagactgttccaccttgttgagaccagtggatgcagaagattcattgagactgcataatatgtttcttccttttactttctggagttcacttttcactggcatgcttcaaattggggtcaagtactcacaagagacaattcgtactgatgcattatccataatgattctcattgtaaggacaacagatcccatagaagaacgccagaaattcggatttacttcagtaatgacgagattgcatctgctattgcagaaagagaacggattgcttgttaagaagcattctgtgcgtctacttttcttgcttctgaattgcccagtgatgttgaagttgctgtgtagtggaggcaaagacggctccaaacagatgggatcggaagcttgtgaaagtgatagatcacaagaagtcataagctcagttcttgtggatttatctgattgtttgacatgtggggaaacttgttctctggggattgagctttgcaggctcgtcatcattctgctagcttatatagcttccagtggcaaattgggatatgaggtgcttttagttccagtgagtgcccgtggtgccagttttttggagatgataatggaagtccttgcatcgcagatgcaatatgaaacacgagagttactaaaagaaagatgtttggtgatgagagaagctcttatcctgctaaaccggctggcatcacacgcaaactattcgaaaccaaccttggaagtgctgacgagaagcaagttatgcgcgacctggacgatcgatgttgcgaaccggctgccccatacgaggatggcaaatgatctcgcggagctggcccagaaattcaggtcgcgagtgtatgctttcatagaggagaaacccttgacaagcgacggtaccaatctgggcgcttctaataagagatgagatacccaggactggcgcagcctgaggtagcttgggtagtaatatggaaagcatattgctagcggctcgacaagtttagtttcttttttttttccttactgacactagggttttgtttaggagttagactggctttgctggggccagtcgctagcttttgctgttggtgtacagaggcgaatgctccctcgccatttttgagggggagggagaatgtagttgtactacggcaagtccttgggaacgtacatcataattgttgtttggacatcatctcatggctttggcattgaccatcgcagcttttttgaattgaaagttttagcttttttcttacc

SEQ ID NO: 117480 - DNA, 376 bp, Zea mays
  Clone ID: MRT4577_3862C.1
tttattttaaaaaaaaaaaaaaaaaaaaaaaaaaaaaaaaaaaagggagaaacaaataaaaaaaaacaacaaaaaaaacacaaaaatacaaagggggggccgttctatagggtcaaagatatccaacgcacggatgggaggttaacaccgttttaacggggaacccaaatgcatttcacaggccgaattttaacaccgacatgacgggtaaaaccctgggggtaccaaactaaaaggcccttgaacgatatccctctttaacaagtgggcagactgaaaaaaaggcgggacccgaccggccttcccaaaatttgcgcagccggaatggcgaatgggccccccctgagcgcgacactttaaagcggccgaggggggg

SEQ ID NO: 117481 - DNA, 276 bp, Zea mays
  Clone ID: MRT4577_38630C.1
acagacagtcacattcacattcaacgagcccgaccgtcagagctcgtcttcttcctccgtagacaatccaccatggcgatggtgctggtgatggtgctggggaagatcccggtggatacgcccaagcacgatgtcctccacaccgtcgccggttacttgatccgtatgttcccttccagtattctacttgtatttgacctacgatcccaatgagaagagaggagaccctgatggcggttttaccgttctcgccaactacatcagggtccttggtat

SEQ ID NO: 117482 - DNA, 469 bp, Zea mays
  unsure (1)..(469): unsure at all n locations
  Clone ID: MRT4577_38631C.1
cccacgcagccgcccacgcgnccggaccgccgcgncggcggncgannccaaagacagcagcggaggcggaggcanccaagnccncnccgctctttttcctgctcgacgcggtcttggccaagctcggntgcgngctggaccgacatcactcaacgacagggaggaanccgccangaaccggggcaccancaggcgccccccggacnnggagacgcggcggcccccgctgaacgcgncggccggcncgcgcgccgacgangacagccacnccncngcgcacgagcncnancgcgacccgcngcngcncngcaccaacancgnggncnncnncccggggggcacccccgagaaccccgcggccgncgaggcccgcgcgcncgncaccgggcacgcancggcggngcnccacaagccgaagcaggagcacgnggcngnggcggnggcggcgccggcaccggcaagcgccgac

SEQ ID NO: 117483 - DNA, 375 bp, Zea mays
  Clone ID: MRT4577_38632C.1
ctatgctattatcattcttggtttctctgaggatgagggtgcaactcatcgagagagggctgttaatgctacgcacctactcaaagatatatgctgcatgatcaagagctttgagctggtcaacagaatcaaagtccatagggatgcgaatcatctcaatgtgctttaaaactgcagatgatgctggaacacttgatcatacttgacatgaaccgagcagtatgaacttcgctaataatcttatgtagatcagctcaggacatcatacgactactattacctgcattgacagatgtttcaattgctttcctctctgctacactcctgcgagacagaccaaattcaaacgtctgaatcatctaccttatatcattc

SEQ ID NO: 117484 - DNA, 264 bp, Zea mays
  unsure (1)..(264): unsure at all n locations
  Clone ID: MRT4577_38633C.1
gaccgagccatcatccccccccgagccgtgccaaccaaaagccatccaccaacaacaacaagcccggccgcttccttgtccctgcccctccgttggtctcctttgcccatctcatcctctctctctctctccctctctctctctctggcggtcggcgtggctccgggggcgcgaagcgcgggcttcgcggggcgactcngccgcngcgacctgcanngttggtatgaaaggggtcacccacgcggcgccaaccacaagcgcccc

SEQ ID NO: 117485 - DNA, 460 bp, Zea mays
  Clone ID: MRT4577_38634C.1
aaaggcccaaaacaaccggttaaaaaaaaaacacggggggggggttttcccggaacaaaccaaaaaaaaatcgctccaaggggcggaaaccggggcgggggaaaaaagggcaagaactgggggccaaccccaaaagacccgaatacatttttaccccaacaacactaacaaccctggggggacccccacgggcccccctgggtactgggggcccaaagccccttttccgggccaccaacccccgttgccggggggggggcaggggggggctaaacccccccttccccagggttttttttaaggtaactttgaaaccccttaaccgcccccgggaaacttttgaggggcttgccaaggggggggcccatctcggggagctgtttgggcccaaacacaagcgcggggaccccggggaaaacgggaagccccggccccccgagcccaaaaggggacttgcccc

SEQ ID NO: 117486 - DNA, 631 bp, Zea mays
  Clone ID: MRT4577_38635C.1
tacttcgagtttctagcgcatatacgacgaggtccctactcctcgcagctccggcgatccccgcggcgtccggcctcatacttcctcgcctctgccttcactcctctttccaacaatcaatatgatccgtgccgtgagcgcatcagtcgcccccagctctctgaggtacctcattggaaccggcgaggcccccacatcagctgcggagccactgcaagtgctccacctgctgttgcatatgctccacctgctgagaaacctcctgctgcaaatgctgatgcaccgaccagattgctgctgctgatccgccaccctataataccacagcgccgacggacataacaacgtgaacttccttaccgatcgtgcttcgaacgaggaccacgctgctgctggcgtcgattcttccctgtatatatctgtctgctaggagctgatgccgctcaccaagatatcaccccctactgtcatacgatgctttcttctgaagctagagaattcgttgccatttcatgtgtcacccagagctcccgagcctacagtaaccgtactatgcgtctacattacgtatctaatcgagagtctgaaccctcatcatatatcatactctgcacgcagcttatcgtttcac

SEQ ID NO: 117487 - DNA, 850 bp, Zea mays
  unsure (1)..(850): unsure at all n locations
  Clone ID: MRT4577_38636C.1
atcgccacgcctcgtgtcccctccgccattcccccgccgcatctggagcgacctcccaccgaataaacccccaaaacctagccgccgccgtcgccgtcgccggcgccgccgccgcagccatgaacgccttccggttcctcggggacatgacccacctcttctcggtcatcgtcctcctcctcaagatctacgccaacaagtcatgctcaggggtgtcgaggaagacgcaggagctgtacctggcggtgttcgtggcgcgctacctcgacctcttcacagactacatctcgctctacaactccgtcatgaagatcgtcttcatcaccacctccgccgccatcgtctggtacatgcgccgccacccgcaggtgcgccgcacctacgaccgggaccaggacaccttccgccacgtcttcctcgtcgccgccgccttcgcgctcgccctcatcttcaacgagcgcttcaccctccgcgagatatgctgggcattttcgatttacctggaggcagtggcgattctacctcagttagttctgctccagagaagcagaaatgtggataacttgactggacaatatgttctgtttctcggggcctaccgcgcattctacattctaaactggatctaccgttatttcacagagggtcaccaaagcagatggatcccctggattgctggtttggtccaaactggtctatacgcagatttcttctactactattntctttgagtggaaagacaacgtgaagctcgagctgcctgcctgagcatgctttgtccatgcgacaaaagcaccattgcattgcatgggccagaagtgtatcgaaaatgagntgatgatattgcatg

SEQ ID NO: 117488 - DNA, 275 bp, Zea mays
  Clone ID: MRT4577_38637C.1
ttttaagggggttttcctttttttcctggatacgttttttttgggggaaaacccctcccctaattttttactaattttgggtttccggaaaaagaaaggggggaagattaatccttttaagtccacaaccctaccaaaaaagggggggaaagaaatttaattgcctaaaccgaacccgtttataaggggggccccaaataaagaatggcccttttgaacttttcccgggggttaacaaattttgcccaaggcttaaaccaaaacgttgggcccaa

SEQ ID NO: 117489 - DNA, 1061 bp, Zea mays
  Clone ID: MRT4577_38638C.1
aggcccgtaccgaaaatcctcccacacgctgacgctggtgcccgttgctctgtcctctgttcgaaaaatttcctcttgttgagacctggggcatctctctctctcgccccccccccccccctgctcgcggcgcagcggagccgacgcgatgccgccgaggaggaaacggcgagcaccaccggccaagtcgcagaggcagacggagccggatccgcaaccgcaagtgccccctggcgccgacgcgccgctggaagagcggctgatatggggcagccaacaagaaagcgagcgccggattactgccatcaaagccataaaagacgcggaggctgggaacatacattaccagttgcaattggcacggtcctattattccgaggagcaattggagggaaacgccatgcagtattttcaggagaacttgcacaatctgtcggttgttccgaacgaggaatatgatgtgcttgagctgaaatggaataacggcgacgaatggatgattggagactttgcagatgacaggactctacgggcttcgattgcatcattcacagctgctgatggacttcagttcccaagggattcagacttctatacgcgcactagcaatttcagtgactttgcttggagtgagcagcctgaaggccaaatggcaggagcatcagaagcttttcagacacctggggctgtgagtaaccggctatcctgtggcatgacacccaaaactgtgaggctacccaagaatggtgagatgctcctatctgtgcatggttcacctcttggggtctataaagaagaaaatttagcagccattgaagaatctggtaacggaagtgaagatgctccctgataactcactgatatcacctgatggtgccagcctttgacaataacagtaatgcactttgaaattagtgtttaggtcactctgtattttgatgaaccctattgtagcatgccgacttttattcagctgacattattgtgctttgaacagttgttagctttgctgccaaggaggtcggcagaatcacttggctccggcctccgtgccatttcaa

SEQ ID NO: 117490 - DNA, 355 bp, Zea mays
  Clone ID: MRT4577_38639C.1
aaaaaacgggaatttcagatctaataggattatcatgaatctcagaacataacagggtaaacacgaattaagcatatgcgccattgggttcacagatccacacctaaaccggtaaataaaactgccagcgatacatgataaactaagaccaccactcatatcaccaccatcttattcagatccaaacgaacggacccacggggagtcgacgatcaccgaaggagggcgggccaacagaccaaatcagagagatctaagagagctgtccgcagtaaaagaccttgaccaccttggaggtggagcccttgagggtgcccaccttctcgaaggccttgacgacgtccatgcccttgac

SEQ ID NO: 117491 - DNA, 175 bp, Zea mays
  Clone ID: MRT4577_3863C.1
tccccattccggccaccgatcgaccttcacgccagtcttggtttcttcagaggtgtcgcgcacggctgtctgagcaggagagtaggatgatgagggatgacatctgcgtccacatcgggcaggccggcattcaagtcggtaacgcgtgctgggaactttactggctagagcacgg

SEQ ID NO: 117492 - DNA, 1423 bp, Zea mays
  Clone ID: MRT4577_38640C.1
acaaatatatttcaaaggtcttgttggatcattgcgactaggaggttgtctcatatacacctcttcttcaagcacccaatgcaaagaatgcattctgaatgcctatttgtttcatgctccatatttgagagattacaagtgataggatgactctgattgttgttggtttgataactggacaaaatgtatcaagataatcaatagcatacttttgctttgtgacaagtctagctttaagtctatgcactaaattaaaccatcaacctttctcttcactttgaaaaccatctactatcaatgagatctattcctttccattatggaagcagctcccatgtgtgattcctcttttgcatcttgtttttgacaaaaatcagaggtaaagggtatgatatatcatcaacacctagaagttcattgtgtagcgtgtggtcatgcttatttgttttgtgcttgcattctactctttatattgaaaatcataatttaaaatgtgaaaatgcactacataagtgaattgtcattgcgagtaaaattaatatgatcaagttcaataaccatgtgaagtgttgttaaaaacatctagtttccaaatgtgaatacatcaaacatgggcgaatgtgttcttataaatttctctaaaaaataagacgagatgataagtattccaaattcatatatacctcatgctagctcttctatttttggaacctctgtctaatataacacaaaagaattttttcctaatgtttaagccttcccttggttggtgtgaggtgttcatgaaggggtttcatgtggtttgcatagtatactttgcaattgtattgactattatttaactatattagagtgcttttgaacaaagggagttttgtaaaatatgtatatctatgatgtatatatgtcctaataataatttcatatgtccgatgtttgtaataaacaacagctccagagaagaggcagcgtgttccttcagcatataacagatttattaaggaggagatacgaaggattaaagcatgtaacccggacataagccatagggaagccttcagcactgcagcaaagaattgggcacattttccgaatattcattttggtctagggccctgtgaaagtagcaacaatcttgatgaggccaccggtgcaatgtgccatccccagaaagtccaagatctctactaagacctatatcagcactgccctttgtttcctcttagttctggactagttggtgagtgccatatatatatgcatgagtgtgatatgatcatgaggtaaggaattatgattaagatgatatatatgtacgagatgaacatgcccctaggttcatgaaagactaaataaggatcgtcatctcaccatgttatcataggtagtaactattgtttgaaataaattatcctttgtgtgc

SEQ ID NO: 117493 - DNA, 1687 bp, Zea mays
  Clone ID: MRT4577_38641C.1
taatttagggggccccaaaaaaaaactaaaaatttgcaaggaagcggaagtaaaatttggttctttaaaacggccccccccttttttttttttattttttttttttttttattttttttttttttttttttttttttttttttttttttttttttagataaattgtatcatacatttctcattatatattttatgaagagaacaccgttgaagagagtcttaaaaatccagtattgattattggacaagaccgtcaactctctctcgaataggctacaaattcggcatttcactctcgtcactcctcatggtcgcccttgtgaagattgtgcaggatgtagagagaagctgatgacaagaagatgcagatcgagtagctgaggaggtccagccccgtggctatcgtcaccatcttgctcttctcgaacatcttcacaagtagaatcatcacgatgacgtgccccacttttgtcttgagctcgtcaagcgaggtgatgttcatccacttcgggcgttccttcaaagcgaacatcccgaacagcgacgagccgctgagggcacggtcggattcaggaggaacaccggcgggagcgttgctgatgaagaggccgtagagacccatcccaaatatcagcatgactgttccagcaagatacacatcgatggcctcgacgaccttgaggaccatctgccccgtatgaacccccttgacacagctcgaccagtaaacctggtacgcctctttgatgaagacacagccattgaggaagcacaggacggagccggcgagtgacccggcgacggcgaggagtgccaggaaccggaagtcgaagatcaccctctcgacggtggtctcgacggcggtggacttggtgtctgtggcgggagcgatggcgtggccgttgggcccgcccacggtcccgtagccgcggccgtcctgggacgacgacgccacctcgccggacggcgcggaggaggccgaagaggcgacggccacgagccgccgccgcggcagcgccggagggagcagccgggaccccgccggggccgcgtggacggctggcggcgcggcgcagccgcgcagcagcaggagcgccatcgggtgtctgtgtggtgcttgccgcacgagagaggcttggctgctgccgcagcgtgcaggtgcgacgcctccgggcgggcggggtcgctgggaatggaagtggagcgagtgcgactgtgcgactgcgaggcggcgatctgaaggaccggcgggaggcggacggggggatgtacctcgtggttggtgtcgctgtcgggtgtgtcccgccgctcgaggtcatctgtcagtcaataatgccacacacgtgctactataagttcacagtatacttcaatcaagtcatatgcttgcatgaacttttcttcccttatgacatgttcaaccctgatgcgcgcggtcatgtcctggttggcctcgagcagctgcgcgacctcgcgacgcatctggcgtacaatgcacctccttgcgattccgcagcagcttgatccgggccaccgccatccgcagcgacgtcttgcacttgtcaggcttgaagcccttgtgcaggacgccggagaatttccccttgctcttgtgcatctccgcccccgccgcgcggcacggacctgtgtcttccggcctgattcgaatccagcctcgtgccgaatt

SEQ ID NO: 117494 - DNA, 516 bp, Zea mays
  Clone ID: MRT4577_38642C.1
ttaccgttcatatttactcttcaaagcgaacatcccgaacagcgacgatccgctcagggcacgtttgtattcagaacgaacatccgcggaagcgttgctgacgaagagattctgtgaatcaataatggacagacgtgctactataagttcacagtatacttcaatcaagtcatatgcttgcatgaacttttcttcccttatgacatgttcaaccctgatgcgcgcggtcatgtcctggttggcctcgaggagctgcgcgacctcgcgacgcatctggcgtacctgcacctccttgcgattccgcagcagcttgatccggcccaccgccatccgcagcgacgtcttgcacttgtcaggcttgaagcccttgtgcaggacgccggagaacttccccttgctcttgtgcatctccgcccccgccgcgcggcacgaacctgtgtcttccggcccttccgttgcctcgcgagcaggatacggcggctccgtctcatggggagggagggtgtgcgcagccat

SEQ ID NO: 117495 - DNA, 184 bp, Zea mays
  unsure (1)..(184): unsure at all n locations
  Clone ID: MRT4577_38643C.1
ctcgagggcctggccgggaaaaaaaaaaaaaaaaaaacgttacaagggacccgcatcgaggagactanncctacggccatnnggcgaggagaaggtncttctcgcgcctccgcctcccggcttctacnngggaggcctcannggcgacgcanngccgtggcnnnggcgaccccncnngccccgg

SEQ ID NO: 117496 - DNA, 708 bp, Zea mays
  unsure (1)..(708): unsure at all n locations
  Clone ID: MRT4577_38645C.1
ggccgcttttttttttttttttttcgataaattggtatcatatatttctcattttatattttatgaagagaacaccgttgaagagagtcttaaaaatccagtattgattattggacaagaccgtcaactctctctctcgaataggctacaaattcggcatttcactctcgtcactcctcatggtcgcccttgtgaagattgtgcaggatgtagagagaagctgatgacaagaagatgcagatcgagtagctgaggaggtccagccccgtggctatcgtcaccatcttgctcttctcgaacatcttcacaagtagaatcatcacgatgacgtgccccacttttgtcttgagctcgtcaagcgaggtgatgttcatccacttcgggcgttcctgcatgatgaacaaaagatctatcgtattgctaaaggattcaaaaggttacttgcagagaagtgattgagatttcaaattcctgagagctaccttcaaagcgaacattccgaacagcgacgagccgctgagggcacggtcggattcaggaggaacaccggcgggagcgttgctgatgaagaggccgtagagacccatcccaaatatcagcatgactgttccagcaagatacacatctgcagaagatcgtgcgtgcacaagtgtaccagcanaggaacagttaactgacgacgctagttggctgaacagaggtcagcta

SEQ ID NO: 117497 - DNA, 574 bp, Zea mays
  Clone ID: MRT4577_38646C.1
cgcggccgcgtcgacctcattcgactcatatgtcgccagcttgtccctcatgcttgtagataactacaagaaccaattgaaggaagctcttagagtgacaagaccaggaggttacctagccttctcagtctggggtagacctgccaacacaaacctgtttggaatcttcgcattccttcctcaaaagtatggactagaagctcaagctatgcctaagaactcaccattccatttaggttaagaccccgatggacttgcccaggaacttaaagaaatgggctttgctgatgtgcacatctggtatcagccaatgtactctaccttcagagatgctgaagacttctttacctatatgttcggagatgctaccttccagtcaaagttcaaagcacttgatgaagagaaacaagcagggttcaagaaggaagcagaggcctacttccttgagaaattcggtccttctgttgtcgatcccaagtaatttgaaggaatgataatttcatgcagaaaacctcaatgattactgatttatcttaaatccgtttttatcttaaaaaaaagtcgacgcggccgc

SEQ ID NO: 117498 - DNA, 199 bp, Zea mays
  Clone ID: MRT4577_38647C.1
cactggcggatgtcgtagtagtctagcgtcatgagctccgctgctagcaatattctatttatgtccatgatcagctgttagactcgcagtcatcctaccctgtactcacagatgttctgtgtgtatcgtcgaacacagttaatttattgagagtactgttagaattaagtcctctggaacgtcgttagcatctatcatg

SEQ ID NO: 117499 - DNA, 484 bp, Zea mays
  unsure (1)..(484): unsure at all n locations
  Clone ID: MRT4577_38648C.1
tttttataatccttttttttttatttttattaattcgtggttttttttttttttttggggtgggggggaccccatttttttccttggcgaagggggaaccgaagccaagaaggcccgacaaagaaaacaaaacaaaaacgttgcaattcctttccctatacaaaaacaacgatccggggcttttctatttatgggggggcaattttttttgggggggggtggtttttccccttttttttccccngggggcgaccccccaacaacaacccacaggggttacatcccccacccgccccctttttattctctccnnttagcaagagaggggaaaaaaatgccggccttaatggggacgggtccccctccctcctgggggggcccggcagtaggttcgttcgtccggctttcggggggggggagaacaacagatcctttttccggctactggcggnttgcgaatcgcgatcgctggccgaaaagcccg

SEQ ID NO: 117500 - DNA, 636 bp, Zea mays
  Clone ID: MRT4577_38649C.1
ctttggagtatatctggcctgttcaaattattgctccattaggacatgctagcaacaatagacgcctcagggtagatactcagtacagcacatctgcgcatgatctgcttcaatcctacacagactcgtcgcagaaggatcgtcaccctgtgcgggctgcaacaactgtccgtgcttgctcactcgaagcagcacgcgtgagcgccagtgctatgacctgtcggtcaacgggtgccatccagaatgcatgaactgcgtcaaggtcgatgctctaactcgcacccggcatgggccccgttccccgtcgacacctaccgctgtgatgcaggttctcacaaacttctgccagaacacatgcccaagagcgaagctgctgagtagaagccgacctcctctgagtacatgcgacgccaccagtttgcttctctccatgtccgtcagagaagaaatagatatctaaataaatgccgccgcccgctctattctgtgcttgctcttgctcgtctacagagaataaatagataactcactacatcatcagccatatgaatgtagactcacggttacaacaggagttgcctccgtctaaaacagtgtaaggatatccacactcgtataactctaaatttttaccca

SEQ ID NO: 117501 - DNA, 153 bp, Zea mays
  Clone ID: MRT4577_3864C.1
atgatgcttcagatggactgggccgtgatgggttcaacatcggacaagatgtacctctgccaggtaccaaactttgggagtataaatgataaagacgagaccgggcgggtgacttgcccgagaaggaagtctccatgtagtgtctccgtctga

SEQ ID NO: 117502 - DNA, 373 bp, Zea mays
  Clone ID: MRT4577_38650C.1
gacttgttgagaaagctatgggctattgataggacccctgaagcacctgggcaattcaaggccagacttggacggtttgctccccaattcagcggctttaaccaacatgattcacaggagcttcttgctttcctattggatggactccatgaagactggtgccgtgttaaatgtaaaccatattctgatgctaatgattcagatggccgttcggatgaagaggttgcagatgagtattgtaacaaccatttagctctaaatgactgtatcatagtttatattttccagggtcagttccaagtcaacattaggtttggcccatctgcaataaagtttttgtaacatatgacccgttttattatttttttttggc

SEQ ID NO: 117503 - DNA, 357 bp, Zea mays
  Clone ID: MRT4577_38651C.1
gacacggcactgcaatcacaaggagaagggttatattaaaagaccgggggttcaacccacgccaagcaatagaaaaacgcaaattggctacaggctagagcacaagcaaactggccaagagtactacacaaaccgactgcccttcctaaaaccacacaatccctatttgctagaaatactacctacaacgctacatgaccatctcagcgggcagaggcaggttgaagtccaagtcgaacccaaggcccgcacagcaccgacagcagctaccgggagcaacaacctcggttccccatcccttactacctctccaccggcgccaggttcaagaacaggcacggctgggtggccaccttc

SEQ ID NO: 117504 - DNA, 355 bp, Zea mays
  Clone ID: MRT4577_38652C.1
actgttgctctagatccggggatggttttttttttttttggttgaaagcttttatctaaacaaaaatgccatacaagctattacacactggcaaaacatgcctatgccgaaaacagacctcaagaagccacaaacgaacaacaccaccagtcctatttacaagaacaaacaccccaacagtaacaccacccacaacaaacaccaaactcaaacgacccggaccccaccgggaccagaacaacaattcaaaaacaccaggctgtgtctgcagcgtgccacgcataaaaaaacacccgggcagcaaacaaaacaccaagggccagggcaccaagcccttttaccggccacacaccac

SEQ ID NO: 117505 - DNA, 642 bp, Zea mays
  Clone ID: MRT4577_38653C.1
ctttcgcctgcgcgctctgctctactcttcttccagtcgccccttccccaatcgcgctcagctcggattcaatcgtggagctcctttcctctacctcccgcagctcccagccgtggcgttctacctgctagtgccgcgccgtcctctgcttgcagctcccgtggcacgcgcctctgctcggcgtccttcctccctctatctctggcgttcggcatctcagccatggccggctggacctgcatccttacgtgtgctttggtagccccatcgagttcggcggactcgatcttctccaagcaccaccgtgcctgggcgctggtgcaacaacagggctcgatcctgctgttgcattttttttccagcgtcagtcgcagttcactgcgctcgacctctggtctccaagctcccgcagcctagctcatgtcttttccatccgcgcgcgtccttcgctgctccctggtgccgcgtgcgcgcccctggctcggcaccagccgttcttccctgtgcacgcgagtctccctgcgcacagattttctttgctgctcgccgcgctcgattggtcgcgcgctgggcgctgtcccgtgccggtattcgccgaccccgccgaggagcttactgctccgatcccgcccgtcacgttct

SEQ ID NO: 117506 - DNA, 223 bp, Zea mays
  Clone ID: MRT4577_38654C.1
aaaaataaaattaacagaaattagatccaaatctctatgttcgcccgatctaaagaacccaacgttacgttcgcttacatacgagggtataccaatcctatatcgccaccaaaatcaaaaacactggccgtcatttaacaacacttttacttggaaaacccttgcttaacccaactaaaatccatggcaatacatccccctttctccagctttctaattacaa

SEQ ID NO: 117507 - DNA, 759 bp, Zea mays
  Clone ID: MRT4577_38655C.1
ccggccgggaccgctcttgtcagtgcataatccataactccccaccgcgacaaataagctgtgtcgagcataatcatagttagccctcctactagcattccctcgagctacgtcaacaacaaaaccgtctcatcgtcgccatggttgaacgtgcgaaccgcccttctgcgctaaatgcgcccgctgctactggtcctagtccccaggtcgacattgtgggagaagccggcagccaaaaggtggttgcaagactgccgtctggagagagtgttgaggtgctgctctatggagccacagtcaccagctggaagagcaatggcggccaaactgagaatctgtggctgagcgaagctgccgacttgacgggcaagaagccagttaggggtggaatccccgtcgtgttcccggtcttcggcccgccacccaaggaaggccaccccacgtccacgcttccccagcacggcttcgctcgtggatcacgatgggagttcatgggcaagtccacagccgaagatgctctcgactccaactctgtcaagctcgactttggccttgatcgccaggcactcagcgaagagtcgcgcaaggcatggcccctcgactttggccttgtatacagtgtcacattgagcaaggacagcctacaagctgtactcactgtgcgcaacgagggcgaggagagcttcgagttccaattcctgctgcacacctacttcaagattcaagacatttccaagggtgtgattactggccttgccg

SEQ ID NO: 117508 - DNA, 231 bp, Zea mays
  Clone ID: MRT4577_38656C.1
cccacgcgtccgcccacgcgtccggagtgacaatgctcacccaggcgcgtgccggtgacggttccccgagagcgtgaggcggcggcggatctcgagagcaaaaggcggtggtggcctgagacgcgcgcgacgatagcctccggacacacgaccgacggctactcgctgatccggcggcggggcgacgatggctccccgattcggtggtgcggcggcggtggcaccctaatc

SEQ ID NO: 117509 - DNA, 693 bp, Zea mays
  unsure (1)..(693): unsure at all n locations
  Clone ID: MRT4577_38657C.1
ccggccggaaccagtcactcattaccatcactttccttcataactatctcaccatgagaatctctacgtctgcccttatcctggcgtcctgcctgtcaacagcctccgctgtacctcacaactccaaagancaaagcatcgacgtcgatgttgttgtcatcggaggtggctcatcaggtatccacgcagccatcaacctcaaagatgcaggcgcaaaggttgccgtgattgagaagaagaaccagatcggcggccacgctgagacatacgtcaaccccaagacaaaggcgtttgccaacattggagtcgttgtctttgaaaacaccaagaccgtccagacgtactttgaacgtctaggtgttgaatctatcgtcggcagtcctttcgacactaagacagtcaccaagcagtatgacttttctctcggtattcccatccctacgccagacaaggccaaggccgcggaaaaccaaaacgctattgctagtgcgatgcaagcctacagtcaaaatgtcttttccaagtacccttggatcgaccagggctatacatttgttcccaaccctgtgcccgaggaacttctccagcctttcggactggtcgctcaacagaacaacttcactgctctccttcctctcatctctcagntcaactggtaccctggaaacatcaccaccattcccgctctctacg

SEQ ID NO: 117510 - DNA, 444 bp, Zea mays
  Clone ID: MRT4577_38658C.1
aaagcttcttccatttacacaccgcagcagatgtagctccacagcatgaagacgacaccatgaaggagtgcatctcaatccacatcggccaaatccgagatacaggtagggaacgcgcgttgggagcttaactgcctcaagaatggcatctaggctgaaggtaacgatgatccggtgacaacacctccgcagccgcggaggatgcatgcaacaccaccttcagtgatactggggctgggaaatacgtctcctagagctgtctaaatattgacgttgaagcaagtgccatctatgaggtgaggagtgggacctaacgacagttcttcgacgatgtaacaattatcagagctaaggaggatgaagccaataacatcgcccgagatgactacacgataggcgagtctactgatgacctgtggatggatccaaacaagaagcttgccg

SEQ ID NO: 117511 - DNA, 373 bp, Zea mays
  Clone ID: MRT4577_38659C.1
ggggaaataaatttatttcactggacaaaaatagttttattggcttgggatgggggggaccccatccatataattttcggaaaaaaaaaaaaatacccggatgagtataaaaaaaaccggcggatcggataaaccaaaaaaccatgccgctatatatatatatatatgccggagccaaaaaattttttttttatcagttggccccccaattaaaaaaatggtaattaactgtaagggggcccccctgaaaaccctttcccttggggtcaaagggcttaaaccccctgtcttaatccaagtccaagccccccttgctgcactggtccaaaaacctcaccgggaaggaccccccccccccccggttaatcaccac

SEQ ID NO: 117512 - DNA, 309 bp, Zea mays
  Clone ID: MRT4577_3865C.1
aaggaaaaggggaaagaaattaatttttttttggggggttataggtggaacctattataaactggaaaaacattgtgttacaaaaaaaaaaaagcttttttggggaattttcctttgggaaaaaccaacagtttttgggggggccccaaacaaaaacaacacattgaaccctttttaacacctttgaagggtgccccaaggggggattaaacacaagtgcaaataacctcccactgggaacccaggatcccgggggcgtactaccggtaatttttctttaaaaggttgaaaaaagggttgatttttttt

SEQ ID NO: 117513 - DNA, 166 bp, Zea mays
  Clone ID: MRT4577_38660C.1
catctttaccgcctctacttccagtaccgcaaacatgtctaacagatccttacggccaaccacatcctcgacctcctcagactcaagggcaaggtcgtcgtcgtcagcggcgcttccggaccccgaggcatgggtatcgaggtcgcccgcagagccactgagatga

SEQ ID NO: 117514 - DNA, 635 bp, Zea mays
  Clone ID: MRT4577_38661C.1
ggatttcgggcggtaacacaaagttatctaactaacgctgtaaactagaaaagaagcaaaccattactttgattgtttggttcaaatcatctatatcatggtattccatcactctctgattggaggggtattggataacgctccattttctataagtcaggttaaaagattacattgtgcctaaaacaaacacgatacaatataatcagttgtcgctataattaaataacattacatttcactgaaccaaacaacatcttagtttagttaattaccttcatttcattgatgttgttttctttctcttcattttattgatttcctttcaaattgcatcccatcggttgattcttgatttgttgcttttgtgaacaagctttgtgacttattttggatttgagtagcacaatcataacattgctggtaagagatctcttggtcttgattgaaatggccagtcattattgtctgcgtaatagattatgtttgcattattttcatagccacaccagaactctttaattcttcatgcttttacggatctgttttgtccatatgtccgagtgaatcttcttttatctagcaaggtaactatgttcttaatcttcattatatttgaaatatattgctactca

SEQ ID NO: 117515 - DNA, 484 bp, Zea mays
  unsure (1)..(484): unsure at all n locations
  Clone ID: MRT4577_38662C.1
nataacttttttttttttttttttttttttgggggttcaggaaaagagcaacaagctacttgctctgaaagatgttgacaacctcttgaatgtttttaacacatgcagtaaaacctgctacataagttattggttactgccttactggtatataaatacatggcataactttccacgagggaacataattaattaattttacacgggagaactgaagagggaaagggggaaggggccaacccctttctccagcgcttatggcttgcttgcctctcgatcttttcgtgctccaagccctgttgatctaccaagctccttaattttagctcttttatgactctgcatcttttttttttgggggaaaaaccggtattgtctttacaagatctttcacacatcccggcccattttttatttaaacacctttttttttttagagccagaagaattaaggtttttttggaccgcattttgcttttctcag

SEQ ID NO: 117516 - DNA, 297 bp, Zea mays
  Clone ID: MRT4577_38663C.1
ggccgtcccatctacgtctaaactacttttgggtttgttcctagccatttttttctaggcaacatcggttgttgtttgggtacaatactctgaatacatgaaacgtgacgcaagcagtttgatctatttccagcgtactcatagtagtaccgttgtcagcatattgctcttgttgtaatatggcatatgttccatgtgtttgcaattattttaagaattgaagtagagaacgtctggtgcatggacaaggtcgtgtactttttctactattgtatgagggcgtttctacctggctac

SEQ ID NO: 117517 - DNA, 323 bp, Zea mays
  Clone ID: MRT4577_38664C.1
atgggtaggtttcaatgtttttagcaaaccaacacctgcaacagcgacccaagctgctgccacacaaacagctgcaggacattttttaaaaaatccacaaacctccccgtaccttttttttgaaccccctttttccctatgcccatgcaaaggatttcctctccacttggaggaatttttttgagcgcaccccgggaccatctttatttatttaataaacccctccaccttgtttaaacccaatgccttcgcccaccacccaaaaatggtccccaaccaccttttattctcacccctaaaatatatttccaacccttttataa

SEQ ID NO: 117518 - DNA, 707 bp, Zea mays
  Clone ID: MRT4577_38665C.1
gctctctccccgcctcctcgccgcccactcccgctctccctagggcttccccctcctctcctcggcggcgcggcggcgaagtccaaccaggccccaccggagctccgaccatgggcggcgagaaggagaacctcgacctctccgacctcaacacctccctccccgccgccgccgccgccctcagcgccgaggaccgcgtcggcctcgtcaatgccctgaaggacaagctgcagagcttggcggggcagcacgcggacgtgctcgagtcgctctcgcccaatgtcaggacgcgtgttgagtttctgaggggcattcagagccaacatgatgagattgagacgaagtttttcgaggaacgggctgcccttgaagccaagtaccagaagctgtatgaaccattgtatgctaagaggtatgacattgtaaatggagttgtggaggttgatggtgttgctaaagaacctaccactgaaaatgctgccgaggggggagattcagatgcaaaaggtgtcccagatttttggctcactgctttgaaaacaaatgacgtgttgactgaggagatccaagagcgtgatgagcctgttttgaaatatctaaaggatatcaagtggtctagaattgatgaccctaagggtttcaagcttgagtttttctttgatacaaaccctttcttcaagaactctgtcctaacaaatcctatcata

SEQ ID NO: 117519 - DNA, 309 bp, Zea mays
  Clone ID: MRT4577_38666C.1
aggactctactatgcgacagtgttctgccttgtaactgtcggcagagctagatggcactctagaacttggtaccactttccctgcatgaacagtatgaccaatgcctccatgataatgatcattcaatccaccatcaacgtttgttaggcagatgacacccttaaagatctgtctatcttccttggaaccatcaaacgcatcctatgaaggcttcggaacttttttcccagacaagcattgtggcaatgtcctcctccttcatccctatctccgcaaacaatcctttcccatgcatcttgctgatcaac

SEQ ID NO: 117520 - DNA, 391 bp, Zea mays
  Clone ID: MRT4577_38667C.1
ccggccggagagcccgagacccctcccatccccacgccgtcacccaccatgtcctgcttgctttcctgatatggcgtatctctcggagccgctggcgatggagtatttgatcggacaatcgcaccggaggataagggagggagtcaggaggttataatcgctgaggtgcgagcattatagcatcagcatgatgtagaagattccatctgaaaaatgtgtgccgcaggctatgttgcgagtagcagtgcactgcacgcgtggtgtattgccaaatacttttcatggaaaaagaggaccgtctcgttgatgtattgaagggcattatggtcgtaataaagaagtggcaagcgacaccactatctcaagaagagttgattgtatgtggagatga

SEQ ID NO: 117521 - DNA, 767 bp, Zea mays
  Clone ID: MRT4577_38668C.1
ggccctctcgccgcaccgatagccaatccacgcacaccctctcccgtcccgcaagcctcgctcgcctcgcctcgccctgatccgatccccaaatccctcgccgtcgacgccccgaatctcagctccggtgaggccgacccattagcagggcgtgacctcggcgcgcccgccctcccgcccgccgctccctcctctccgcccgccgtcgtccccggtcgccggaacccgacaagttggatatctaggaggcaccgcagcgttgcggcgcccaccgcgcggacaccatgtctgcggcgccagccgcgtaccccaccaccagcctccgcgccgtcgcgtccgggaactccttcttcccctgctcgcaccgcctcaagctctcctcctcgcatcgttttagtagtagtagtattggtaatcgtagtaattgcctctgacgtttgcctccccctcgtcgcccacgaccttcggttcgatctgctccttgtgctcgtcctgaggattgtctggttgtgagggctaggtgctacatctctgccttttgcgtttgcgcgagtttggtgtctgtgtctgtgttcgatcaccaggtccgatccagagcgatttggcctgttggaggtggtgattgctgtctctccgaggaaagaggaagttctcttctgaacttcggatctagcttgtggatgggcggacctttggtagactgcagtgcctgaagtgtgagcagcagctcatgtctcatccgcagcacctgcgggaaagcaggtttt

SEQ ID NO: 117522 - DNA, 606 bp, Zea mays
  Clone ID: MRT4577_38669C.1
gatgcgtcaagcgcctacagccggacctgggactgctgcgatgacatgtgttcactggaaggatgaccctcgtgggcacttggtgcgctgccatacgactggtcgaagcgtgtaacggggtattagaaggcttactcaaccaacggtactgcaaaggcgcaagaacacaatctttatgcagggtaatggaggcgcttaattacacatggtgaaccagaccagcatgagcggacaccactaccttgttgctgggaagcaactagggcagtcactagtcattcaccagagaacctgaccccggggttaaatcaacctgctggagatggcttggcaacaaagggtcttggttcaatgatcgacgagatgcggctatgccacacgagaattccgatcagcactggcatcagcacccgtgtcattaacgtcctcgctctgaatacgctgcttgctgctacggctttcctattgttacacattcatccacgggactacaattctttgcattctatcacgtggttgcgctctatttcatttgaaaagaaagcctcttttttttgagaatagaattgctctattagattctacttaactactggatgctagtta

SEQ ID NO: 117523 - DNA, 216 bp, Zea mays
  Clone ID: MRT4577_3866C.1
tcgcgatctagaactttttttttttttttttagagggtaaaatcacaattgtacttatatccaaggacaaaaacacaatggcccagattttcgtatgagcaatacacatctaggcctttagttgggagtttttcgtattcctattttacgaaaactaactacaacattttagatgcaaactttgaaattcagcccacgcgtccgcccaccgtccgg

SEQ ID NO: 117524 - DNA, 416 bp, Zea mays
  unsure (1)..(416): unsure at all n locations
  Clone ID: MRT4577_38670C.1
aagcagtggtaacaacgcagcagtacgcgggagagttcggtggcgatgttcattcagcttttctacttgttttgaacaagttaaatgcccaagacattttgttctgttccattccagctcaagaattcaaagctaagcattgcacattttttaaaaaaaaaaaaaaaaaaaggggggggggtttttctttttttaaaaaaaaaaaaaaaaaaaaaaggaccctggggtggttcccccggttaaggggcgattccggcgattttccttacacttgggggcggttcggccttccttttaaggggccaattttgccttttgggggggggttttcaattnattgggcggtggtttcaacgggggggctggggaaaccccgggggttcccaattttattgtgttggngggccttcccgttt

SEQ ID NO: 117525 - DNA, 123 bp, Zea mays
  Clone ID: MRT4577_38671C.1
gtcactgatcagaagatatcatcgataagaggaattagtcctctgttggatcagataacacagttaggagcgccgattcttatagttgcggaggctgtaagtggcgaggcgctgacaacatta

SEQ ID NO: 117526 - DNA, 229 bp, Zea mays
  Clone ID: MRT4577_38672C.1
aaaaccaactggtacattacgattgatagaaaaaagggtttcaacagcacttggatagaccagtatgaccaatgttgtttaaaaacctgcactttacaactaaaaggaaacaagtcataaattggtcccaaactctgagggacaattaaatccatatactggagcaaaaaccaaaagatgtgagtttgttcccaatccccaaaagaggagtcattttttcttttatacc

SEQ ID NO: 117527 - DNA, 591 bp, Zea mays
  unsure (1)..(591): unsure at all n locations
  Clone ID: MRT4577_38673C.1
ttgnctagttctagaatcgcgacagcgggtccccatagacgtggcggaatgtcttcaggtgcaaaggcaggcattggtgcagtcgttgccattcttgtgcttattagcttcgttggagctgcattttggtacaggaagaaacggaggagagttcatggataccatgctggcttcttaatgccttcgcctgcctcgactactacacaagtgctagctaaaacgaatttcagtgctgggagtcctgaatcaaaagattcaatgccagagttcagcatgggcaattgtcggttcttcacttatgaagaattgtatcaggtcacaaatggtttctctgcacagaacctgcttggggaaggtgggttcgggtcagtgtataagggttgcttggctgatggagagtttgcggttaagaaactgaaagatggtggtgggcagggggaacgcgagttccatgctgaggtggatattatcagtcgtgtgcatcatcgccatctagtatctcttgtagggtattgcatttcagatgagcagagattgcttgtctatgattttgtgcccaacaacacgcttcactaccatcttcatggactt

SEQ ID NO: 117528 - DNA, 182 bp, Zea mays
  Clone ID: MRT4577_38674C.1
ggtgaattccaggaagcagggtactctggaaatggtctcagtcaaccctgtgtacatgcacgccgacatagcaaataccacaggtgtcgtgactagcatagaaccttcaaaagcggatgacagctatgacatccgctttcaaacaagcgaagaattcgtgcagatctcactgaggttcgacc

SEQ ID NO: 117529 - DNA, 1278 bp, Zea mays
  Clone ID: MRT4577_38675C.1
ttgggtacctcgaggccggccgggaaatcttccggcccatacgcgttgcccgcccatctctctctctctctccccctgcgcccacacgcacgtttccactccgaccgggccagagccccccgccgggcagtttccgttcgctgttgcgatccacctccagcctgcacatcccctcccccgagttcgagccggagggccgaagagtagatctgcggcggcggccagaggatggccgtcaactgggagctgcggggctgctgcgaccacgaccagaggatcttcatcgccgccgtcggcgtctccaccgtcgtcatcctcctcctctggaggacgttcctgctcacgccgttcaagctcatcaccgtcttcctccacgagaccagccacgcgcttgcctgcaagctcacttgcggcgatgtagaaggcatgcaggtccatgcgaatgagggtggcgttactcaaacccggggtggcatatattggataatcttgcccgctggatatctgggttcatcattttggggaatggtcttcatacttgcatccacaaatatcctcactacaagaattgcagcgggttgtttcatacttgcattgtttattgttctttttgttgcagaaaattggtttcttcgctggctctgccttggtatgcatcaacatgacttagtctccatttaagaccttactctgaaatatgtgatcttattcataggtgtgatgaacagcttattttcagtttatgatatttatgacgacttgatatcccgaagagttaatacaagtgatgctgagaagtttgctgaaatatgcccttgcccttgcaatggttttgcatggggtgttatatggggattcatctcgtttatcttcctctgcgcttcaatataccttggactggtcatattgtcttgagggttccaacctcgcgcacgccgttttgatctgacaaccaactctggttggctttttccagagttctccttgctctagattttgggttcaaacttacattgttctggcggctgtacagtatacatgtagggtaaacatgtacatccatcgtggagttaattcggcggggattgttcatgtgattcttcgattttagcggttctatagataccattgctcatttatggtctgtagcctcattgctcatttgaccaatttgaaatcgtattcagaaacgccatattcttcgatttacaggtacatgtacaccatattacctttgccccattgctcatttgaccaattgattgaaatcgtattcag

SEQ ID NO: 117530 - DNA, 409 bp, Zea mays
  Clone ID: MRT4577_38676C.1
tcgagccggccgagattttggtccctcactgccgttcccgaaccccctatatgtatgtaagatgagggcgacatatctctccgtccctatagcgcccacagatggatattcacgccagaatcgttctctcccgaaggcgtagcgagcgacttgattgagaggagaggcgtaacatgacccagagtatctccgtcgagatcgggcaatccggtatccgagccagcaactcgagctggtaactttactgcctccacgacggaatacagtctgatggccaagagcctggacataagaccgatgtgacatcaagatgatgactttagcaccttcttcacgcatactggtgctgggaaacaccttcgcctgacaaacttcgttgatctacaacccactgtgactcgtgaggtgc

SEQ ID NO: 117531 - DNA, 351 bp, Zea mays
  Clone ID: MRT4577_38677C.1
ctgcacaccctcaatcaccacacagtcctccactcctttagtagctcgtgattgggagggttactagaccactggtcgggtctctgacgacgacacatggtgcagggtcgcgtggccgcatcatggacggcagttccttctgctcgccggcgtgctgctggccgtcgcagacacggccggtgcggaggacagactggtcgaactaaaccgcccggcggacctgcggcggtgcaagcatgcagacaagtagcacaactgaaaggacaccccgaggaagagggaatgcgagagcgagtgccgcgagcggcaccatcaagatgacgcggtcgatgacagcaaccgcagcgacta

SEQ ID NO: 117532 - DNA, 997 bp, Zea mays
  unsure (1)..(997): unsure at all n locations
  Clone ID: MRT4577_38678C.1
cgggntttaggtgacactatagaaggcatgcaggtccatgcgaatgagggtggcgttactcaaacccggggtggcatatattggataatcttgcccgctggatatctgggttcatcattttggggaatggtcttcatacttgcatccacaaatctcctcactacaagaattgcagcgggttgtttcatacttgcattgtttattgttctttttgttgcagaaaattggtttcttcgctggctctgccttggattcattgtgttcattgctgttgtttgggtcatacaagaatttacatctttccatgttctgaaatatgtgatcttattcataggtgtgatgaacagcttatttccagtttacgatatttatgatgacttgatatcccgaagagttaacacaagtgatgctgaaaagtttgctgaaatctgcccttgcccctgcaatggttttgcatggggtgttatatggggattcatctcgtttatctttctctgcgcttcaatataccttggactggtcatattgtcttgagggttcgccattttgatctgacaatcgactctggttggctttttcgaagcttcgttgctcgaggtttttggttcaagcttacaaggttcttggtgggttgtacagtatacatgttgcatggggtcatgtacatcgattcatctcgaatatcttggggggcgcatccatgtggattctttcggtcatattgtcttgagggttcgccattctgatctgacaatcgactctgattggctttttcgaagcttcgttgctcgaggttttggttcaagcttacatggttctggtggttgtacagtatacatgtgcagggtaaacatgtacatccattataagttaatttggtggggattattcatgggattcttcgattttagtggttctatagagtaccattttacttaccattaccagttgcatttatggttgtagcctcttcaatttatgtacctgtatatcatat

SEQ ID NO: 117533 - DNA, 1429 bp, Zea mays
  Clone ID: MRT4577_38679C.1
ttgggaccctcgaggccggccgggataaccgccggacgccggtgatgaccacgtaatccggtgtacgctcgttaaccacaaacgtccgagcgtcacctggcgtcggctgtctggccgcgcggactggagcaatcaaaatctctcggccccccaatccatacgcgccgcggacacccacccaccaccaccacacgcagcgacgcagcccgcccatctctctctctctctctctctcgggtcctgcgcacgcacacacgcacgtttccagttcgaccgagccagagccccgccccgggcagtttctattcgctgtcgcgctcctcctcctcctcctgcacatcccctccccccgaattcgagccggaggaccgaagagtagatctgcgccgggcgaccagaggatggccgtcaactgggagctgcagggctgctgccaccgcgaccagaggatcttcatcgccgccgttggcgtctccaccgtcgtcatcctcctcctctggaggacgttcctgctcacgccgttcaagctcatcaccgtcttcctccacgagaccagccacgcgctcgcctgcaagctcacctgcggcgatgtagaaggcatgcaggtccatgcgaatgagggtggcgttactcaaactcggggtggcatatattggataatcttgcccgctggatatctgggttcatcattttggggaatggtgttcatacttgcatccacaaatctcctcactacaagaattgcagcgggttgtttcatacttgcactgtttattgtcctttttgttgcagacaattggtttcttcgctggctctgccttggattcattgtattcattgctgttgtttgggtcatacaagaatttacatctttccatattctgaaatatgtgatcttattcataggtgtgatgaacagcttattttcagtttatgatatttatgatgacttgatatcccgaagagttaacacaagtgatgctgaaaagtttgctgaaatctgcccttgcccctgcaatggttttgcatggggtgttatatggggattcatctcgtttatctttctctgcgcttcaatataccttggactggtcatattgtcttgagggttcgccattttgatctgacaatcgactctggttggctttttcgaagtttcgttgctcgaggttttggttcaagcttacatggttctggtggttgtacagtatacatgtgcagggtaaacatgtacatccattataagttaatttggtggggattattcatgggattcttcgattttagtggttctatagagtaccattttacttaccattaccagttgcatttatggtctgtagcctcttcaatttatgtacctgtatatcatatattgctcatttatccatttcaaaacgtattcagagatgcaatattgtgcatcttt

SEQ ID NO: 117534 - DNA, 2672 bp, Zea mays
  unsure (1)..(2672): unsure at all n locations
  Clone ID: MRT4577_3867C.1
cagctttgagttcgagctccccttcccccccttctctgctcccgcgactcgaccctctctctataaatacaaccgccggctcccaccgccaaaccatccatcacagaccaccacaccaacaacagactacggaggaccgccgccgcccacgcaaaaacccacccgatccccgcaaaaacccccgcacgcgatccacgccaattccagtcaccgcgatgcagggtctcgccccgcccacctctgtttccatacaccggcacctgccggcccggtccagggcccgggcctccaattccgtcaggttctcgccgcgcgccgtcagctccgtgccgcccgccgagtgcctccaagcgccgttccacaagcccgtcgccgacctgccggcgccgtccaggaagcccgccgccattgccgtcccagggcactccgcggcgccgaggaaagcggacggcggcaagaagcagctcaacttgttccagcgcgccgcggcggccgcgctcgacgcgttcgaggaagggttcgtggccaacgtcctggagcggccccacgggctgcccagcacggccgacccggccgtgcagatcgccggcaacttcgcgcccgtcggggagaggccgcccgtgcacgagctccccgtctccggccgcatcccgcccttcatcgacggggtctacgcgcgcaacggcgccaacccctgcttcgaccccgtcgccgggcaccacctcttcgacggcgacggcatggtgcacgcgctgcggatacgcaacggcgccgccgagtcctacgcctgccgcttcacggagaccgcgcgcctgcgccaggagcgcgcgatcggccgccccgtcttccccaaggccattggcgagctgcacgggcactccgggatcgcgcgcctcgccctgttctacgcgcgcgccgcgtgcggcctcgtggacccctcggccggcaccggcgtggccaacgccggcctcgtctacttcaacggccgcctgctcgccatgtccgaggacgacctcccctaccacgtccgcgtggcggacgacggcgacctcgagaccgtcggccgctacgacttcgacgggcagctcggctgcgccatgatcgcgcaccccaagctggacccggccaccggggagctccacgcgctcagctacgacgtcatcaagaggccgtacctcaagtacttctacttcaggcccgacggcaccaagtccgacgacgtggagatcccgctggagcagcccacgatgatccacgacttcgccatcaccgagaacttcgtggttgtgcccgaccaccaggtggtgttcaagctccaggagatgctgcgcggcgggtcgcccgtggtgctggacaaggagaagacgtcgcggttcggcgtgctccccaagcacgccgcggacgcgtcggagatggcgtgggtggacgtgccggactgcttctgcttccacctgtggaacgcgtgggaggacgaggcgacgggcgaggtggtggtgatcggctcctgcatgacccccgccgactccatcttcaacgagtccgacgagcgcctggagagcgtgctgacggagatccgcctggacgcgcgcacgggccggtccacgcgccgcgccgtcctgccgccgtcgcagcaggtgaacctggaggtgggcatggtgaaccgcaacctcctgggccgcgagacccggtacgcgtacctcgcggtggcggagccgtggcccaaggtgtcgggcttcgccaaggtggacctgtccacgggcgagctcaccaagttcgagtacggcgagggccggttcggcggcgagccctgcttcgtgcccatggacccggccgcggcccacccgcgcggcgaggacgacgggtacgtgctcaccttcgtccacgacgagcgcgccggcacgtcggagctacttgtggtcaatgccgccgacatgcggctggaggccacggtccagctgccgtcccgcgtgcccttcggcttccacggcaccttcatcacgggccaggagctcgaggcccaggcggcctgaccgagctccacgtttctcggaggaggaacagaggagccagccatggatcaggggagaagtcaccagagggagcccagatcagttccccggggtcttcctgtccccccacgcacaccagagttacagttggtagttgctttgctttgcctttttttttttcattatttcatttgacactagtgtaagtaaattgggatagtggcagcttagagagagagagagagattagtagaaaggcgcccagctcgtagcttttcagctggtggtgcctctggctagtatagagtacatatttttttcttcttcttctttgctttatcccttttttttttctccctttggatgacatggatgtgcatccagctccagttgttgtcacccagtccagtggactggggtgtctgggatcttggttgctgctacttgctcgccattgccacccagttgctgccgctgctgctgaggtgttgctggcttagtggcttggcttgtatactctgtgttccctgtggctatcggtgcgtgtacatttgttcacagtatatgactgatggtatgaaaataagaaccggtgacggtttatgtctaaaaaaaaaaaaaaaaaaaaaaaaaaaaaannaagggcggcccggacgcgtgggt

SEQ ID NO: 117535 - DNA, 588 bp, Zea mays
  Clone ID: MRT4577_38680C.1
gcgttcgtcctcagaccaaatcaagcacaacccaccgccgcgtgcctccaccgctccggtctgcctccagcaacggcggcggccatgcaggtgcagggccacctccggcgcgtcctccgggcgccgccgcccagaatcctactctaccgcgcgatctcctccccgccgcccggtggcggcagcggggtggcggtgaagcaggtgacgcgggggaacatggaggaagccctggagaagctgcggggacgcgtgcgggaggccgcattcgtgggggtggacttggagatgagcggcgtcacgagcgcgccctggagagacaccttcgagctcgaccgcgccgacgtgcgctacctcaaactccgcgactccgcggaacggttcgccgccctacagctcggcgtctgcccttttcgatgggaccctgccaagtccgccttcgttgcccatccgcataacttctttatcttccctcgcaggagctccctagtgattgttcatctcatgagtttctttgtcagacaacttcaatcgagttcctagcaaataccagtttgatttcaacacatgcttccgtgaagggatatctta

SEQ ID NO: 117536 - DNA, 839 bp, Zea mays
  Clone ID: MRT4577_38681C.1
ccaggtagaaggcatgcaggtccatgcgaatgagggtggcgttactcaaactcggggtggcatatattggataatcttgcccgctggatatctgggttcatctttttggggaatggtgttcatacttgcatccacaaatctcctcactacaagaattgcagcgggttgtttcatacttgcactgtttattgtcctttttgttgcagacaattggtttcttcgctggctctgccttggattcattgtattcattgctgttgtttgggtcatacaagaatttacatctttccatattctgaaatatgtgatcttattcataggtgtgatgaacagcttattttcggtttatgatatttatgacgacttgatatcccgaagagttaatacaagtgatgctgagaagtttgctgaaatctgcccttgcccttgcaatggttttgcatggggtgttatatggggattcatctcgtttatcttcctctgcgcttcaatataccttggactggtcatattgtcttgagggttccaacctcgcgcacgccgttttgatctgacaaccaactctggttggctttttccagagttctccttgctctagattttgggttcaaacttacattgttctggcggctgtacagtatacatgtagggtaaacatgtacatccattgtggagttaattcggcggggattgttcatgtgattcttcgattttagcggttccatagataccattgctcatttatggtctgtagcctcattgctcatttgacctattgaaatcgtattcagatgtacctgtacatgtaccccatattattacctttgcccccattgctc

SEQ ID NO: 117537 - DNA, 447 bp, Zea mays
  unsure (1)..(447): unsure at all n locations
  Clone ID: MRT4577_38682C.1
ctcaaatnttcaaactctagttttctcttatataacccacgccaacanaaacggggctcggttaatttactagtgtgccccgacaccnacaaaaccacccaatattaacttccttcattcttattctatttttactaccataattactatttaacctgttattttcttcctaactttctttaacacttttattgattatctctttctcttataaaccaatctattttccattttcaatcattaatatttatttttttttatttattaaatttttatatttttttttattaattttattttatttaatattttttttttcccttttttatttattttatttaatttaaatttttttttattttattttattcttttttttattataatattttaattttattcttttattatattttttttctatttatataattttttttctttttt

SEQ ID NO: 117538 - DNA, 262 bp, Zea mays
  Clone ID: MRT4577_38683C.1
cccatgcgtccgtccacccgtccggagacgcgtgggatcaaacatatactgcaggctccaggcccaacagactctaaagatatctattgggggtgcgagcacaccgatacatgcctccaccattgcatcactgatctaaacccggcatgaagggctcatcatagcgtctgctgctactgcaggcgctggcctctgaaatacaactgtactgctaatgtgcatcacagcgaactggccccgacgaacctatacggccaatgct

SEQ ID NO: 117539 - DNA, 263 bp, Zea mays
  Clone ID: MRT4577_38684C.1
cgcttttaattgatgattctcccgaaaacgggttttaattactgcgtttggggatgtgacaatctaccaaaatcacttctaatctaatactcataccttctgttttcaccagactgcaactaacacacacttatatctacacttcactattttcaaatcaaccaccataaaacttgaccaacattcaatctatttatacaaactaccacaacaacacccaaattatactcacactctctaacttatatcatattatgaacaac

SEQ ID NO: 117540 - DNA, 272 bp, Zea mays
  unsure (1)..(272): unsure at all n locations
  Clone ID: MRT4577_38685C.1
aaaatttatttttattgggcttcancttcacaggatgcgtatgtctgcagctcgttgggcagttcaaacgggcctttgtgcaagcatgaacatgatgactattctgagaggcctgaatgccctttccttattagatttggttattgtaagattgcatcatcatgccaattttaccacccaaaagacatattttttttttctttccatccagaatacaaatctcaaaggcgtccccaactaacttataaatcatgtggacactcatgcaaaaa

SEQ ID NO: 117541 - DNA, 1250 bp, Zea mays
  Clone ID: MRT4577_38686C.1
ctcttccgcgagacggcaaaccgatcggtggaacggaacctccctcagtctcaggcgagcgagccagcgacagtaggctgtaggccccgcccgcttcagatccataggcagccgcgcgcgatcacgtcgtggtggataaaagcgtgcgcgctgcgccgctgccacgaggtaagagagacgggacgagcgtcagcgcagtgcgcgtgtggtcgggtagcgatccgaggagcgcgcagcgatggcagcggcggccgtggcgactgtggccaccccatcccccgcctccaggcggctgttcccctccgccggctcgtctcttctccggttcccaaggccgaccaagcggctccggcgcgccctgcgggtcgccgcggcgggggatgaagcggacgtgctgcctggcccgggggccgagggggaggccgtggtgcccgggaggctggaggagcagcgggacgagcagctgggcggaagccagctcgacatcggagggctcgccttccagggcgacgtgggggcgggggtttcaccggcggcggagcgggctccggggcttccggcggtggcggcggcaacaagatgctggacccgggcatcaacacggccatcgtgctcggggccagcacctacgctctcaccaagctgctcaccgtcgaccaggactactggcatgggtggacgatcttcgagatcctgcgctatatgccggagcacaactggtccgcatacgaggaggccctcaaagccaacccggttctagccaagatgatgatcagcggtgtcgtctactcccttggtgactggattgcacagtgctacgaaggcaagccgatatttgatttcgaccgtgctaggatgttccggtctggccttgttggtttcacgcttcatgggtcactttcacattactactaccatatatgcgaggcactgttcccattcaaagacttctatgggtcgactgtgtggagcttgtctgggtcacaatactgtcgacttattcaaacgaaaagtcagaggcaaggaattctgatagtacctccacaccagcggcttcaaaggacaactccacatagcaaccccaaagatcttggaaagttgcttcgcccttccctcacttcaggggttatgtaaattgtacagttagctgcagcaactatgcaggtgtaacctttttttttttgtagctatatattcatgaaacatgaactgtgcagcatgtgctatagaataccatgaagaaaatagcg

SEQ ID NO: 117542 - DNA, 165 bp, Zea mays
  Clone ID: MRT4577_38687C.1
atcggcggtggcatgtgggcgtggcgggatgctgatccggagtgctgaccaagcgagctgatcacgcgccgcagtgtagacgccggcaagtcaagtacttcagtcgtcgtcgagctgttcgtgatcgagttcatcctgtttcatacgggagatcggaggtggcag

SEQ ID NO: 117543 - DNA, 358 bp, Zea mays
  Clone ID: MRT4577_38688C.1
ggcaggcagtaaaaaacacttccaagaataatttataccgtatcggaaagcttaaagggaacatgtttttttttttttcgaaaataaattggaggggacaacaacgggaaaagcccacattgatcgccaagaccccaacttatttaattttttggggacatagggttaggtaaatacttggtgaactattgattggcctggggatataagcagatccggggggcaaactaacagccttggcaaatttttcccttttgaaacaaaatttcaaacgaaaaccactccatgttctgacttccattttattgggcggggggaaaagaaatgctttgggtatgccgcctttgtatttgttttg

SEQ ID NO: 117544 - DNA, 1394 bp, Zea mays
  Clone ID: MRT4577_38689C.1
gtcgacccacgcgtccgcccacgcgtccgcccacgcgtccgcgcgccctgcggttcgccgcggcgggggatgaagcggacgtgctgcctggcccgggggccgagggggaggccgtggtgcccgggaggctggaggagcagcgggacgagccgctgggtggaagccagctcgacatcggaggactcgccttccagggcgacgtgggcgggggtttcaccggcggcggagcgggctccggggcttccggcggtggcggcggcaacaagatgctggaccggggcatcaacacggccatcgtgctcggggccagcacctacgcgctcaccaagctgctcaccgtcgaccaggactactggcatgggtggacgatcttcgagatcctgcgctatatgccggagcacaactggtccgcatacgaggaggccctcaaagccaacccggttctagccaagatgatgatcagcggtgtcgtctactcccttggtgactggattgcacagtgctacgaaggcaagccgatatttgatttcgaccgtgctaggatgttccggtctggccttgttgggttcacgcttcatgggtcactttcacattactactaccatatatgcgaggcactgttcccattcaaggattggtgggttgtccctgcaaaggttgcattcgatcagaccatctggtctgcggtctggaacagtatctactttgtggtcttgggtttccttcggttggaatcacctactactatctacaacgagctcaagtccacattctggcccatgcttacagctggatggaagttgtggccttttgcgcacttagttacatatggtgtggttcctgttgagcaaagacttctatgggtcgactgcgtggagcttgtctgggtcacaatactgtcgacttattcaaacgaaaagtcagaggcaaggaattctgacagtacctccacaccagcggcttcaaaggacaactccacatagcaaccccaaagatcttggaaagttgcttcgcccttccctcacttcaggggttatgtaaattgtacagttagctgcagcaactatgcagaagtgaactgcacttgttttgggacgtaaggtactctgcaacttgaatctgatttggaaccagagttggtcggtgtactcctagcaaactagtttccataaatctgtcatattggaagagttgatacaatttcattactctgctaagagttctaccaagaaagcatgtacagatgtgtttaatgtagaggctcttaatgtgcttaaacgggatatttatttaaaaatcgtggagcatctttacgtgaaaaaaaaaaaaaaaaaaaaaaaaaaaaaaaaaaaaaaaaaaaaaaaaaaaaaaaaaaaaaaaaaaaaaaaaaaaaa

SEQ ID NO: 117545 - DNA, 271 bp, Zea mays
  Clone ID: MRT4577_3868C.1
ccggccgggaaactagccacagtgcaccgacggctgacgaaacaaacatagtgttgtcaacttcatcctacaccgatgttcatacagccgactgcccatgctactccgacggatcgatacaagcaaagcaaggatttcatgcgctcaaaccatctgatgcttcgcatgtacacgaacaatgtcgtgtccgacgatttcgaggactgctggtccgacaccgcggtcatctgcaccaagacccacaactgcggcgacgacacttgctcgggga

SEQ ID NO: 117546 - DNA, 1702 bp, Zea mays
  Clone ID: MRT4577_38690C.1
atggcggcggccgtggcctcgtccccctccccctcccccgcctccacccgcctcctccgcggccaccacccgcccccgtcgtgctcggcgccgtcgctgctccgcctgaccaggtcgtcgcggaggctacggctgcgcgccgcggcggcggcggaggaggccgacgtgctccccgggcctggggccgagggggagatggcgacgggcgggaggctggaggagcaacccgaggggccgatcgggggcagccaggtcgacatcggcgggctcgccttccagggcgacatgggcggaggagggttcgccggcgggagcgggggcgccggggccggcggcggggacggcaacaagatgctcgaccgcggcatcaacacggccatcgtgctcggcgccagcacctacgccctcaccaagctcctcaccgtcgaccacgactactggcatggatggacgatctttgagatcttgcggtacatgcccgagcacaactggtcggcttacgaggaggccctcaagaccaacccggtgcttgccaagatgatgattagtggcgtcgtctactccctcggcgactggattgcgcagtgctacgaaggcaagccgatcttcgagttcgaccgtgctcggatgttccggtctggccttgtcgggttcacgcttcacgggtccctttcacattactactaccatatatgcgaggcactgttcccattcaaggattggtgggttgtccctgcaaaggttgcattcgatcagaccatctggtctgcgatctggaacagtatctactttgtggtcttgggtttccttcggttggaatcacctaccactatctacaacgagctcaagtccacattctggcccatgcttaccgctggatggaagttgtggccttttgcacacttagttacatatggtgtggttcctgttgagcaaagacttctatgggtcgactgtgtggagcttgtctgggtcacaatactgtcgacttattcaaacgaaaagtcagaggcaaggaattctgatagtacctccacaccagcggcttcaaaggacaactccacatagcaaccccaaagatcttggaaagttgcttcgcccttccctcacttcaggggttatgtaaattgtacagttagctgcagcaactatgcaggtgtaaccttttttttttgtagctatatattcatgaaacatgaactgtgcagcatgtgctatagaataccatgaagaaattagcgtgctccgttcgtcccccaaataagtataagtatgtttctagttttcaaaatttgtaacacgacaagtgcatttctaggccatagtccaaataggaccagtacctttttctattttcctcccattcctatttcctaacatgcaatttgtgacatgttattttatgtttataggaatatatatttttatagggatataagtaatttaatagacactgattcctttccttgattccagaagtgaactgcacttgttttgggacgtaaggtactctgcaacttgaattatcctatggaaccagagttggtcggtgtactcctagcaaactagtttccataaatctgtcataaagagttgacaatttcattaaaaaaaaaaaaaaaaaaaaatcggggaacttcattcgtccgttctaaaaaaaaaaaacgcgtccgcccacgcgtccgcccacgcgtccgcggac

SEQ ID NO: 117547 - DNA, 805 bp, Zea mays
  unsure (1)..(805): unsure at all n locations
  Clone ID: MRT4577_38691C.1
ccggccgggccggggttgcttatctgcacggactaagcaaggtggtgatacacagggatctgaaaccgtccaacgtgctcttggacggaaactggagagcaaaaattgcagattttggcaccgccaaagtgttcgtcgatggccagacgaatccgacactggtacagacagagggatacagggctccagagtacacggcgcgagggccgagcctgacgctgaagtgcgacgtgtatagctttggagtcgtcctgatcgagatcgtcagtggccaaaggaacagcagcaaccagacgctcatttccgatgcacgggagtcttggagccagaataagatcaaggaggaccttctggattcagccgtgggccaaccggggccagagatcctccttcggctggagaggtgcgtgcaggtcggccttctctgcgtgcagcagtcgccagctgacaggccatccatggctgaagtatcgcgatgttaacacggggaaacggcagcagcagcttcgcagctccgttccgcaccgcaagtggccgctggccgctgnncggctgccgccgcgactcctcttcgcgacgcanggacgcgtcngtctggagcacacggcgactccatctatctcacgtagactacgaagcaagcccacgacgactccatctatcttggagttggatctgtcacggtattggttagtggtacacaattacgagcattgcagttgcaggaaacagcagcaaaagtatatatgtagttatgtactagcgnattcatgtatgttgctggaatattaccaaaagttcatgt

SEQ ID NO: 117548 - DNA, 1689 bp, Zea mays
  Clone ID: MRT4577_38692C.1
ccggccgggacctctcccctcgatcctcttccgcgagacggaaaccgatcggtggaacggaacctccctcagtctcaaggcgagcgagcaagcgcggctcacgtccacagggccagcgacagtaggctgtaggccccgcccgctccagatccataggcagccgcgcgcgatcgcggcgtggtggataaaagcgtgcgcgctgcgccgctgccacgagggaagagaggcgggacgagcgtcagtgcagtgcgcgtgtggtcgggtagcgatccgaggagcgcgcagcgatggcggcggcggccgtggcgactgtggcctccccatcccccgcctccaggcggctgttcccctccgccggcccgtctcttctccggctcccaaggccgaccacgcggctccggcgcgccctgcggttcgccgctgcgggggatgaagcggacgtgctgcctggcccgggggccgagggggaggccgtggtgcccgggaggctggaggagcagcgggacgagcagctgggcggaagccagctcgacatcggagggctcgccttccagggcgacgtgggcgggggcttcaccggcggcggagcgggctccggggcctccggcggtggcggcggcaacaagatgctggaccggggcatcaacacggccatcgtgctcggggccagcacctacgctctcaccaagctgctcaccgtcgaccaggactactggcatgggtggacgatcttcgagatcctgcgctatatgccggagcacaactggtccgcatacgaggaggccctcaaagctaacccggttctagccaagatgatgatcagtggtgtcgtctactcccttggtgactggattgcacagtgctacgaaggcaagccaatctttgatttcgaccgtgctcggatgttccggtctggtcttgttgggttcacgcttcatgggtcactttcacattactactaccatatctgtgaggcactattcccattcaaggattggtgggttgtccctgcaaaggttgcattcgatcagaccgtttggtctgcaatctggaacagtatctacttcgtggtcttgggtttccttcggttggaatcacctaccactatctacagtgaactcaagtctacattctggcccatgcttaccgctggatggaagttgtggccttttgcacacttaattacatatggtgtggttcctgttgagcaaagacttctatgggtcgactgtgtggagcttgtctgggtcacaatattgtcgacgtactcaaacgaaaagtcagaggcaaggaattctgatagcacctccacaccagatgcttcaaaggacaactccagatagcagccctagagatcttggagagctgattcgcccttccatcgcttcaggggttatgtaaattgtacaattagctgcagcaactctgcaggtgtaaccctttttttggtagatatatatatattcatgaaacatcaattgtgtagtatgtgccatagaatattacgaagaaagtagcgaacttcattcgtccgttctaaaataagtatatttctagcattcaaaatttgtaacacgacaaaaaaaaaactagcattcaaactttatctcataatagacatttcagccatagacggcgttttttttaaaaagcgtacgcgtgggtcgacccgggaattccaaacgggta

SEQ ID NO: 117549 - DNA, 1897 bp, Zea mays
  Clone ID: MRT4577_38693C.1
tgggaccctcgaggccggcgagggtttttccttctgtgctatgctggcgtgaacctgtcatgctttctgcttgacctccttgatgctcctagttggcgccctagatggaaatttcaccattggagcctttcacttgttggggcattactctgtgttgtgattatgtttctgatctcctggtctttcactgttgtctcccttgcccttgcaagcctcatctattactatgtgagcataaaagggaaggctggagactggggagatgggttcaagagtgcatactttcaattggccctccgaagtctcagatcacttggagcaaaccaagtccatcctaagaattggtaccccattcctctggtattctgccgtccatggggtaaacttccggaaaatgttccttgtcatccaaaacttgcagacttcgctaattgtatgaagaagaagggtcgtggtatgtccatttttgtctcgataattgatggtgattatcatgaactagctgaggatgcaaagactgcctgccgccaactagatgcttatattgactacaaacgctgtgagggtgttgcagagatcattgtagctcctaatatgtctgatggtttccgtagcattgtgcagacaatgggcctaggaaacttaaaaccaaatattgttgtgatgcggtaccctgagatctggcgacgtgagaatttgacacagataccgtcaacatttgtcagcataataaatgattgcattattgctaacaaggcagtagtcattgtgaagggactcgatgagtggcctaatgagtaccagcgtcagtatgggactattgacctctactggattgtaagggatggaggattgatgcttcttctgtcccaactcctgctgacaaaggagagctttgagagctgtaagatccaagtcttctgcatatctgaagaggataccgacgcagaggagctgaaagctgatgtcaaaaagttcttgtatgatcttaggatgcaagctgaggtcattgttgtcactatgaaatcatgggagtcacacatggagagcagcagtagcggtgttcagcaggataactcccatgaggcttacacaagtgcacagcaaaggatcgaaacataccttgacgagatgaaggaaactgctcaaagagaaaggcagccactaaaggagaatgggaggcaagttgttgtgaatgaacagaaggttgataaattcctttacacaatgttgaaattgaactccacgatactcaggtactccagaatggcagctgtagttcttgtgagccttccaccaccaccactaaatcatcctgcatatttctacatggagtacatggatttgcttgtagagaatgtcccacgcatgttaatagttaggggatatacgagagatgttgtcacatttttcacatgattatacatatgatacttcccacctggagactctagtgtcgtctggctgttgtactatcttagcagagactggttacacaagattcaagcgtggattctgccatcgaaatgacaagccctcaccttgaaggcaaccatgatgagatgtcaaatgtcaagggctcttgttcgggcttattgggttcgtgaactactgaactgcagtgtcttcattcttttctggattttaaagatccacatagcgagctttgattcttacagattttgtagtcatcatatgtaaacacttaccatctaagtaagcatacttacatgctgccccaatgacagaatgcgatccttaccttctcacaaacatttatatatgtattttctttgcatcacttaagtccatctaaaacttatggacctgtggagatgagcagagagccagagatgcgaattttgaatggctacccccaacaaatgaattttggttg

SEQ ID NO: 117550 - DNA, 982 bp, Zea mays
  Clone ID: MRT4577_38694C.1
tcggccgagagcagagcacgcacgcagagaagctcatcagtgcccatcccctgctccagtgaggagagagatagagagtcgccgccgccgccgctgccgccatgaagatcctagtcgcggtgaagcgggtggtggactacgccgtcaaggtgcgcgtgaggccggaccggacgggcgtggagacggccaacgtcaagatgtcgatgaaccccttctgcgaaatcgccgtcgaggaggcgctccggctccgcgaggccggcgctgctgctgaggtcgtcgcggccactgtgggccccgcccagtccgctgaaacgctccgcaccgcgctcgccaatggtgcggaccgcgccatccacgtgctccacgatccggaccccgcgcggcccctcctcccgctcaccgtcgccaagatcctccgcgctgtcgcgctccaggagaagcctggcctcgtcatcctcggcaagcaggcgattgatgatgattgcaaccaaacaggacaaatgctagctggattgcttcagtggccacaaggaacctttgcctccaaggttatattggacaccgagaaacaaaaagctactgttgagcgagaagttgatggtggaattgaaaccatatgccttgatttgccagcagtgatcaccacggatttgagacttaaccagccaaggtatgcaactttgccgaacataatgaaggcaaagtccaaagttattaagaaagttgtccctaaagacctcggtgtagacattagatcagacatggaggttattgaggtcaacgaaccaccaaaacggaaggcaggggtgattctttcgtctgtcgacgagctcattgacaggttgaaaaatgaagcacgtgtcttgtaacaatttgtatattattccgactgaatatggtctgacgttcatttatgtaagttataataaaagcgttctccaaatgttcagaccatatttacaaataagagaagtgtttctac

SEQ ID NO: 117551 - DNA, 264 bp, Zea mays
  unsure (1)..(264): unsure at all n locations
  Clone ID: MRT4577_38695C.1
cggattttnagcacctgtataaagttctagggctcgtgttcttacaacacacacacaaaaagagagagacgtgcggacattgatgactgatgacatttttgcggtggatcaattgttccggaagaagcgggcgaaaaatggtggtcgagggacaagcacgttcctgtcgtgccctgtggaaattcctagccgctgctgcaacccatcaccaatgtgctctcgttgtcccttttctctactatactactacttctgcattccttc

SEQ ID NO: 117552 - DNA, 267 bp, Zea mays
  Clone ID: MRT4577_38696C.1
aaaggggggatctgattacggggggacttaaacaaacatggtttaacgttttcagttccccatcacagttccccatcacgttacaaatttgtaaaacaaacggcccctaactttttgatttgttttggtcggtacaagacaccccttcataaccggtttaccacttttttttttaagatagccgccttcccagccccccaaatggggggctttcaaattacatgataccggggcggtcaagtaaaacaaccagctccaaagcctttt

SEQ ID NO: 117553 - DNA, 718 bp, Zea mays
  unsure (1)..(718): unsure at all n locations
  Clone ID: MRT4577_38697C.1
gggtaccggcgcccctcctcgngtttttttttttttttttttttttttttttttttttttttttttttttttttttttttttttttttttttttttttttttttttttggcacaaaccctgcggtctcgcaaaaggggggcaaaacaaaagggaaaaggccccatgggagccaccctcaagttctgtaaatgtcccccgatctacccccagggcacaactgggattatccatagactggaaaataatttatgcccaaccccaatggggaatgatcccatcaaacttttcacctttttgttttgctcagggagctactaagggacgggaaacccctcggggacggatcccaccgaaggggggagaggcacctcccgttccttttaggaaaacccagtttatacagtccattagccacgtttccgccatttttgaagtccaggggcgggtccctcgattccagcttttaaggatcggcccccaccccatcaaaatctgttagcgatttcagctgggggccaaggttaacaatagttttttggcactccgcaagcttcccgggagcactgactagttttttttcctgcttcaccttaaggtctccgtttgagttcgggaggcgccaaagtttcgccttttgggtgtccctaaacacctgcgcctccaggttgggggattttgctttgaactcttttgacagaagcttttcctgctccacct

SEQ ID NO: 117554 - DNA, 325 bp, Zea mays
  unsure (1)..(325): unsure at all n locations
  Clone ID: MRT4577_38698C.1
ggctgaaagaattcctgatgcaagctcccagactaatctcttccctgagcattatgggcaggaggatctaatgagtgcacttctaaaacagcaagaaggcatgggaccatctgagaatgagtttgactttgatggatattctctggacaacattcctgtctagaacaaacccttcccgattgaagttgccagtgtaaatagtttgttacacaagcacatgatcatcctgcagttagctattttggaactgagtcaaaatttggttgatgtcaaatattcagacttctgggagtagtagtgtattgtaatggtttagntctggatg

SEQ ID NO: 117555 - DNA, 452 bp, Zea mays
  Clone ID: MRT4577_38699C.1
ccacccgttcccctggatttttatttatcaaataaaaacgaccagtaataacataagccataagggcgtccagtttaaagcaccacagccaaatgtccagttcaaaggatcgggaagcacttatacattgtgtccccaagtcgagcaaaaaatcacacgattgattaaacagcgacatccttgggagggcactgcccaggttgggcattaaaaaacaggtttgtgatggacataaactttaatctgaacttgtcccccccattgcccggtttcccgttttttgggctggaaaacgggggggtcctcaccgtttggggggaaagtgtttccggagtggactcggaaatcgcgatcaaaaactgacgagctgcttccctggtgaactttttggttggtgaaggtgaagccattaattttaggcagcgagcgaaaaaatcggactttttcggcac

SEQ ID NO: 117556 - DNA, 615 bp, Zea mays
  unsure (1)..(615): unsure at all n locations
  Clone ID: MRT4577_3869C.1
ctacttccanaggtggcctgcaactcgcgccgggttcccgcaacgccacgggtcaaccacggacctggacctttattccggtggggacaccccggccaagcaggacccggttttaacttaacggcaggggacttacggcgggtgctggttaacggggcccgctttgggcgccaggttaaggaccgggaacccctgcttgacaccgaatgacaggggcaatcttcggcggcgggaacccggcggccactttggctatagggggtggtggttccagggccgcgaacacaaaaggggggccgcgctctgtttaacaccncaaagacccggaggggcgcgggcgccaaaccccgcgcccggtgcacacgggtcaaagcgatgctcacgaagacactgtcgccgcggaatattatgaggcagcagtgtaggtaggggagacagttctgttgatgttctgattaaacaaaaaaggggttgactcaattattgtttgtatagaaaaggcaggatctgtaaacgcatcaaagcaggcccaaagccaaaccatgtttcagtttgatttcgcaccaagcctgaattgaatttgtagtaggggagatacacctggcggggggggat

SEQ ID NO: 117557 - DNA, 544 bp, Zea mays
  Clone ID: MRT4577_386C.1
atggaaacggggaaacccctccctttattttttggatggatgacaaggccaaactgaattggaacaaggggttattacccccggggggggaaaaaatgcccccaaaacctcccgggggggaaaaaaaaaaaaaattttcggttcaaaacccccccccagttttttagggggtgcccccacattatggggcccccgatttctaagggggggaaaaaatcttcttggggggcttcttcccgggggggaactgtttcaaccccttgggaaaccccttcatggagcggggggaattattggtgggggcgacgaaaaaaaggccaaaacgttgggggaagccggggaaccatttaaagttggccaaaaaaaaccaagggaaaaaaccttgcacatttgatcccaagtttattgtttccttaaaaaaaacgagggggggctggagggaaacaaaccttttggagccatttaagggatcccccaggggaaaagggggccccttggaatcaacatccccgattccgttccccgggatgaaaaaaggggggtt

SEQ ID NO: 117558 - DNA, 160 bp, Zea mays
  Clone ID: MRT4577_38700C.1
ctctacagactcagaatataggattagctataggctatctttttcctcgggaatggacttcttgcataaacagtactttgagaagatgcgaagcaaactgtgacagtggttgtactgatggctggtatctactaccagttattgacatgtggtaacacct

SEQ ID NO: 117559 - DNA, 254 bp, Zea mays
  Clone ID: MRT4577_38701C.1
cacagtggaatggagagctcggtctgaatctgcacaggagctgatgctgagtggtgtcgggggcttcatgctaggcctactcttccttggggccgagctgttcatctacttcaggaatcagaaaggacactctgaacttcagccaacaggattcctgagctgcaatgcagatgaccagattcatggaagaaccttctgtcgcagctttgcagactgttaagcgttcctgcttggacgttattcttccacaagag

SEQ ID NO: 117560 - DNA, 261 bp, Zea mays
  unsure (1)..(261): unsure at all n locations
  Clone ID: MRT4577_38704C.1
ctagatctacatctcgagaggccgccactgcgacaaatcgtccagccggcaatgaattctgcaacggcaacagcagacgtggcaacgcgccgcctactgagacgaacgaggacgtggcggcagcagtcaaagacgtggagcgagggtgcaactcagcagcggtcgcgcacgaatagaacataaaaccanaaaaaatggggagaaaactgaaactgtgagagactaggcaaacgtgcatatagatagatgggtatcggggat

SEQ ID NO: 117561 - DNA, 429 bp, Zea mays
  unsure (1)..(429): unsure at all n locations
  Clone ID: MRT4577_38705C.1
accaattgttgtnaccnttattatgttcncntnnattcnatgacncatcatcagancgcctaatcagcaancgactncantcnttnnggcaatgactaaatcaaacttatcatcaaacaaataatgttaatccacacaccaaaaggacgaacctgagccctaataattgtatccctaattatatttatcggctcaaccaaccttctagggcttcttccccatacatttacccctaccactcagctatctataaacctaagcatagccatccccctatgagcaggagccgtaattctaggcttccgacacaaactaaaaaattctttagcccacttcttaccgcaaggcacccccatctcactaattcccatactaatcatcatcgaaactatcagcctattnattcaacgatagtactagcagtacgnc

SEQ ID NO: 117562 - DNA, 702 bp, Zea mays
  Clone ID: MRT4577_38706C.1
cctctctacctccgctttcctccctctcgcgccgccgccgccgctgccgccacctccgcaggcagcccaccgcgaagcgaggtcgaatcagccatggcagacgccaaggccacgacggcggtcaccctccgcacccgcaagttcatgaccaaccgcctgctcgcccgtaagcagttcgtgctcgaggtcatccacccgggccgcgccaacgtctccaaggcggagctgaaggagaggctcgccaaggtgtacgaggtgaaggaccccaactgcatcttcgtcttcaagttccgcacccacttcggaggcggcaagtcctccggattcggtctcatctacgacaacctcgagtccgccaagaagttcgagcccaagtaccgcctcatcaggaatggccttgctaccaaggtagagaagtcacgcaagcagatcaaggaaaggaagaacaggacaaagaagatccgtggtgtgaagaagaccaaggccggagatgccaagaagaaataagaacatttctgtcttcatcttttcactatcagcctttgcttggtttaggacggtatccctgtggcaatgttgctgagtgcttaattatgactagaaaagactatgccatttgtgtcatctcccgctatgttaagaggcattttgtagtatcttatgctaagattttgaagaacttggtcagactatcgataaaaa

SEQ ID NO: 117563 - DNA, 370 bp, Zea mays
  unsure (1)..(370): unsure at all n locations
  Clone ID: MRT4577_38707C.1
cagtgttgtttttgtcttctacttcccctccaccgcggtgtcgtattaatgtggttctgcgttntccgaatacgaacttaaactaatccagatcgcggcttacaatgttcattacccctgattccacgctggcctatcctgggccacggacaaccactccctccacaacgccttaacaacctacagagaggtactttagtccaaaatcatcctatatcgaaaaacacacacgtcccgaaccattatatccctaccttctccacaaaacatgcgatgccgaacaccatcaatggcatgaacggcaccgagctgtacgttcgtaacatcaccgtcaacgtggcccaatcccgctgcactcgtggaagcggcg

SEQ ID NO: 117564 - DNA, 317 bp, Zea mays
  unsure (1)..(317): unsure at all n locations
  Clone ID: MRT4577_38708C.1
acacacacacgctacagagcagagcagagtcttgctccagtatctgccctctcctgccttcctgtagagcatccatcacgtgaagttcacggacaaacatgtctccggtgaaggtgttcgggcacccgatgttgacaaacgtcgcacgggtgctgctcttcctggaggaggtcggcgccgagtacgagctcgtgcccatggacttcgtcgccggcgagcacaagaggccccaacacgtccagnnctaaacccgnnntttgnccggaaaaaggnaaaaattgtggggccccccccctttttgtggggtgggggggggg

SEQ ID NO: 117565 - DNA, 288 bp, Zea mays
  Clone ID: MRT4577_38709C.1
ccttttgttttttgttttaaaacgacgggtgtggggcccatgcgtataaaaccgattacccggacacataaacctcaccaacgtgcaacacagggactcacccttgctaaagcacgagcagttgcatgagtcacaccgctcttgtttaagaccaaagtcaactgacccacaccaacaagctatattaggtcaacaagacgcccgaggcttccattcaccaacctcagtggggagccacctgatctacactaatgatcacaacgccctagcctgcacaaccacacgagg

SEQ ID NO: 117566 - DNA, 157 bp, Zea mays
  Clone ID: MRT4577_3870C.1
ccaatagctaacgtctcaactgctggcacacgcgctatagatcaacgctcatgcgaacgcaccgctgctctttttgcatcactacactactggcatggtggattttgcttatcatgcctagtgtggcctgtcttctttaccatcctaacgctgggta

SEQ ID NO: 117567 - DNA, 586 bp, Zea mays
  Clone ID: MRT4577_38710C.1
tcgcggacgcgtgggcggacgcgtgttcggactcttgggcggacgcgtgggcggacgcgtggggggacgcgtgggcttggatgaggatattgccagtccagctagtggagcaagaaagaaacgagcatgcaacactagtactgcaacaaagccctatgttgaagattatgaggggaatgtggggaactttgcaatctaatagtgctactgcaaaaatggttctacagggaaaattaaggacagagtccatcaagaatgcgatgaatctggttaagaaatgtggtgcaccagaaggaagtgttgagcattacatggctacaaaattgttcatgaaagctgaaaactgagatatgttctttacttttgaatcaaatgaaggaaggttatcttggttaaagagaaattgtcaggactatgggttgtattgagttgggagttatcatgagtgtgtcataaaccttttatgtactactgtcttgaactattttatgtagtattgtcgtagaccttctatgtgtgtatgttgtcagaaaccttttatgtacggcttcatgaaccttttatatactattgtcatgaaccttct

SEQ ID NO: 117568 - DNA, 428 bp, Zea mays
  Clone ID: MRT4577_38711C.1
aggaccgcatacacgtacatataattattgaagaagtggaaatgactgcaatataaaatatttcactggggcacactgtacacaccgtcagccatatacttgtattaaacaacaagcatacagtataaaggtcgacttacaaaaataaactctcaaatagttaacacatcattatctgtatcaagctccatgtaaactccataattagccagcgtcaataaatgagggcataaaacaaaatattaaaataacggtacacatatgctgtttccctgtatacgatcgatagaaaccaccaatctgctttaccacttgacaatgctgtgtctaccatgcatgtttatgcgctgctgcggtttatgatgattcgccctttttttgcttggcagccttccacactgttttttttttctccttgcttcagttat

SEQ ID NO: 117569 - DNA, 574 bp, Zea mays
  Clone ID: MRT4577_38712C.1
ttttttttttttttttaagcagaaatataattaatttttagagttacaatcggagctcaacataaatacacaaatgactacgatacaagaggttcctggctccacttttgccacgtcttaggtcaccacagagcctatatgaggcaacaagtccaagaactaatttaattacacctacggacaaaacacaatctacactaaacataaacctatggatagagcacaagtctacaaagccaaaaaaaattgtttggtattcttctattttttcttgtgtttttttttgtaaatttttgaagttcaactaaaaaagaaagatagaaaaaaaatactcctcaccgccggcgtcgagatgtccaagccaggcaagcacccctccaatcccgcggacgcgcgaaggcaagatgagccggaggcagatgagatgcggcggcagagaaggttggggaagaaacgagcgaagggagaggagcgtacctgggaggggaatggacgcgctgtgctcacgagcgtacgggttcgggtgtttttttggagcccaaggatccttgatatggaggaatattcttttttt

SEQ ID NO: 117570 - DNA, 866 bp, Zea mays
  Clone ID: MRT4577_38713C.1
gtgtgcggcgctcgagctggtataaagggaggtggcgcacctggctatacatatatctcctagaaagcaagcagcgtcgagtttctccaggtccgaatcagtgatccgatcgcaagaagcaagcaacaatgtcgccggcgcgcagcagcagcagcaacgtcttcgacccgctgtcgctggacttctgggcgtcgttcgccgacccgttcggcgtcgtccggccgctggcggagcagtgccccgtcctcaccaacgtgcgcgtcgactggaaggagacccccgaggcgcacgtgttcagggccgaccttccgggcgtcaggaaggaggctgccaaggtcgaggtggaggacggcaacgtgctcgtcatcagcggcgagcgcgccagggaggaggaggaggccggcaaggacgaggcgtggcgctggcgcctcgccgagcgcagcagcggcaggttcaagaggcggttccgcctgccgcgcggcgccaggctggaccaggttcacgcgtccatggagaacggcgtgctcaccgtcaccgtgcccaaggaggaggccaagaagccgcaggtcagggctgtcgagatctctggttgatcgatccgttcactgcatgcattacgagtgcccgagctgtactacaggtagtataacttttcgaaattcgctggtaggacatctgccaagcaaatacaaactgtctatctgtccatcgttcgtgtatggaagtgttgtgcttttggtgtcaagtacgtctggccagtgttttgtagtctatatgatgtgtaatgcatctgtgcttttctttttgctgttgactgttgtgtgtatcaattattcgtgcagtcgaacaaacgattgtgttccccc

SEQ ID NO: 117571 - DNA, 429 bp, Zea mays
  unsure (1)..(429): unsure at all n locations
  Clone ID: MRT4577_38714C.1
ttttntttttttttntgggcacaaaaattattttgtctacactgaaaaggtgttatatgcataatccaaagggcaaaagactgaccgtctatcgatcgatccagattctgtctataatggctactttgagctacacgtggcatacacaatactggacgacttcatacattcatgctaccatggacatgcaagcgtacgtgcacacacagacagattttattttaccatgcctagcctttgacaagaaacattctcattagcgttattgtgattatcatgactacaagatatgcggccattgttacggaagggaagtcttcgataacagcctaatccccggttagcttattcccctgcacatcagggagtttgacagttagggattcttaaccctgacttttaggggatgctaatggcatttccattttt

SEQ ID NO: 117572 - DNA, 121 bp, Zea mays
  unsure (1)..(121): unsure at all n locations
  Clone ID: MRT4577_38715C.1
gtnaccaggnnctggcaactctgggnaggccgagcgaggcgaggctcatcagacctcggntgggacgtgcgtgtatgcgtcttgtgtgtatattaaagggnaggggtgttcgttgtatcca

SEQ ID NO: 117573 - DNA, 163 bp, Zea mays
  unsure (1)..(163): unsure at all n locations
  Clone ID: MRT4577_38716C.1
tttttnnttttttttaagaataggtaaaaatgttatttacttgcaatctaatggggtacaaatgataccagcacgaaaatatatacgcagtatgtattcctcagccgctgaaaatcctctatctgtttacagcgaaccagctagaattcttctaatnggtgta

SEQ ID NO: 117574 - DNA, 630 bp, Zea mays
  unsure (1)..(630): unsure at all n locations
  Clone ID: MRT4577_38717C.1
ntttactcccccacccccccccacgcggcctcgattccacccagtgatccagggcatcggcatccaccaccaccaccaccgaccgtgcgtgcgcggcggtccgccaatgccattccgccgctccctcgccactagggactcgccaccgcgatgtccttcctctcctcgctctccagcctcggcctcggttactccatcgccatcgcgctcggctttctcgtcctgctcgcctccctcctgctggctttctacttctgcttcggccgcggcggggactactgggccggagaagcagccaccacggcctccagctccggccacctctccatcaccgtcccgcgcgtgctcttcgtcgcggaagggtccgagtcccccgacgccgacgccgcttactcctccgccgccgtcgcggcctgctcacccgtcgggctcgatgccgccgccatcgcgtcctaccccaaggtccctttctcctccagcggggccaccgacgccgacgccatgtgctccatctgcctcagcgagtacagggacggcgagacgctgcgcgtgatgcccgagtgcaggcacggcttccacgtcgcgtgcctcgacgcctggctgcggcggagcgcgtcgtgccccgtctgc

SEQ ID NO: 117575 - DNA, 372 bp, Zea mays
  Clone ID: MRT4577_38718C.1
ggacgaggggttttttcgtcaaagacaccagaaaacattttttttgttttacaacaacacacggggagcacgaaaagccgacaaaagggggacaacagacacacaccccaagcggggggaggcaccctcaggcatggccagggatgccccccactcaacctaccgcaaacggggagactacaaaagcccacgactgaagggggggcatgtcccacactccagtgcctaagggggggggaaaaacccgcgggccgcccaagcaaaaaaactgcaggaggccttaggatccccacccaaacgaggggtggtcccccctaaaagaccgccgaccaacaattaaaaaagtcgacggatactgggccgaaagtaccg

SEQ ID NO: 117576 - DNA, 517 bp, Zea mays
  Clone ID: MRT4577_38719C.1
gcggaagcttttatataacttacatttatttagaaagtaagatcaagttacttattacagaccagagctataaacgagtgctgagtagtattattacacataccaagggaggcacaaactcctcccgataagttttaagcaaaagatcctatgtggaggaccaagtcctcccgcacttcagtcttgtttttcatcatggggaaaccaccttagcacagaagcaacagaaatctgctacttcctcaccacgacaatagtgttcgcaagaacctgggcggggatgacgcggggtagagcagggctatccatgtcttcggtctgtggcggcgtacttctggccacagcgaggtgagaactataagtgtgctcaccacacaggggggttgacacagctcaggaacaacttaactcttgaatcaagttttatatctgccaactaagggcaggtgtcactggtcttgcacagcgcatggaagtgaagagctcccaggggtgccagcactatctggtctccaat

SEQ ID NO: 117577 - DNA, 254 bp, Zea mays
  Clone ID: MRT4577_3871C.1
cgtgcggagcctatcaattagctcatcgactccagattgttagaattctacaccatgaatgtgctgatcgttgccggggctctcctggcgctcgctgcgagcgccgactccagtacaagcggcggctgtggctgccagacaccaccgtttcatctaccgccttcgttctatatgccgcctccgttctatctgccgccgcagtatcagccgcaaccatggcaataccccacttaaccaccgtagcttagcccgtg

SEQ ID NO: 117578 - DNA, 667 bp, Zea mays
  unsure (1)..(667): unsure at all n locations
  Clone ID: MRT4577_38720C.1
ngtgctggtcacccctgggnagctcttcacttccatgcgctgtgcaagaccagtgacacctgcccttagttggcagatataaaacttgattcaaggaaattcctctccctatcttcaagctctaaccaataaccactacaagggtgaagttgttctgctgttccagccagtgctaatcctctcccttgctgcagagttaagttgttcctgagctgtgtcaacccccctgtgtggtgagcacactcatagttctcacctcgctgtggccagaagtacgccgccacagaccgaagacatggatagccctgctctaccccgcgtcatccccgcccaggttcttgcgaacactattgtcgtgaacgcgaagaagaagtggaagtgactgaagaaaagacatcaccacctttggaatctcaggcagagacttggctctacttcgacatctgcgagtccgagcctgactcacctactaacaaagagaacgatctggttgaggagcccgaagaactcgcaggagaagcccctgagcagcagtcggttggtggaggttgtcaacattgcaaccactgctcaggagaagatgaagccgtggaaggagacttccaggagttccaagactacgaagagttctaggcgtgggttagcgggcacccccagtcggctgcct

SEQ ID NO: 117579 - DNA, 1704 bp, Zea mays
  Clone ID: MRT4577_38721C.1
taccttgagaccggccgggagttttcatctaaagtttattcttcgtcacatgggatggccgtttgcttgtttgttgcttccgggaggcggtggtgaattgaagcagatcgacaagcatggctgcccactggtctcgatcgatcggcctgccatgccatgccactagagtccgtcctgactggccgcccgttcccccgtataaaaaggcaggcaggcaggcagagcggggacgagcaagcaagcagttgcagttgcagcggcctcctcctctgcttcctccctcctcctcctcaccatggtgctggctgcgcacgatccccctccccttgtgttcgacgctgcccgcctgagcggcctctccgacatcccgcagcagttcatctggccggcggacgagagccccaccccggactccgccgaggagctggccgtgccgctcatcgacctctccggggacgccgccgaggtggtccggcaggtccggcgcgcctgcgacctgcacggcttcttccaggtggtggggcacggcatcgacgcggcgctgacggcggaggcccaccgctgcatggacgccttcttcacgctgccgctcccggacaagcagcgcgcgcagcgccgccagggggacagctgcggctacgccagcagcttcacgggccggttcgcgtccaagctgccctggaaggagacgctgtcgttccgctacaccgacgacgacgacggcgacaagtccaaggacgtcgtggcgtcctacttcgtggacaagctgggcgaggggtaccggcaccacggggaggtgtacgggcgctactgctctgagatgagccgtctgtcgctggagctcatggaggtgctaggcgagagcctgggcgtgggccggcgccacttccggcgcttcttccaggggaacgactccatcatgcgcctcaactactacccgccgtgccagcggccctacgacacgctgggcacggggccgcattgcgaccccacgtcgctcaccatcctgcaccaggacgacgtgggcggactccaggtgttcgacgccgccacgctcgcgtggcgctccatcaggccccgcccgggcgccttcgtcgtcaacatcggcgacaccttcatggcgctctccaacgggcgctacaggagctgcctccaccgcgccgtcgtcaacagccgggtggcacgccgctcgctcgccttcttcctgtgcccggagatggacaaggtggtcaggccgcccaaggagctggtggacgacgccaacccgagggcgtacccggacttcacgtggaggacgctgctggacttcaccatgaggcactacaggtcggacatgaggacgctcgaggccttctccaactggctcagcaccagtagcaatggcggacagcacctgctggagaagaagtaggcatgctatttgggtatggaagatggtggatgtaagcaaacaaagccaaattaagcagagtaggttaattaaggttggctgatgatccatttagggaaggagctgatctccctgactccctcctccaattttctcaaccaaatttatatagtataataataataataaaatagcaagtaatagttgtatcgtattattattaattaatttattagctggtaggcaagtagtattaaaaaaaatttaaaaaaaaatgggcgtatttctattttggcgttttgctctgtgttaat

SEQ ID NO: 117580 - DNA, 620 bp, Zea mays
  Clone ID: MRT4577_38722C.1
gtgcggcgctcaggcggcgggtttcaacaatgtctcattgatatctccggtctcacatccgaagaacaaggtatcacaatgccatacctgacagtgaatagcaagaatcatcgcgatcatcatatctttgaacgcctgctgctccctgagccttcagaagataggagaagcctgcctgggacgcccatgattcactcactgacggcgttcacgccgtcaccctacacggaaccaagctctcacacatcaccttccgcatgacgaagaaggtgaccaagaagatgcgcgcagacaccgcgccatcccctactgaatacgtgtgcgcattgatcatagcatcaggtacaacgccaaacgaactcaatggagtcgtatctatgtcggattatgagcgcaatctagtgctgcgtcctgctgcgtctcaaagatagcatctaatcagctatacttcaggtttatcattgactctgtttctgtaatgtaccaagtgatgctgtgatgctattataaagagtctgatgagtgctgacataaacagaaaacctgactcactgaggtgtaccccaatattccttgcagaattgctatgctaaccaacgaaccctgtatctattatatat

SEQ ID NO: 117581 - DNA, 162 bp, Zea mays
  Clone ID: MRT4577_38723C.1
cgggcccacatgcatatgcagggatataaatgcttaacagttgatactttttttgggaaagcgcttaaactgttacaaaaacgggcgcggccggccaggcctaagggatcaataattctatatagagaggagaggaggcttattttcaacaccaccattaat

SEQ ID NO: 117582 - DNA, 762 bp, Zea mays
  Clone ID: MRT4577_38724C.1
ccggccgggatgcctcggtcggtcgaacaatcttcaataacccagtcggcaggcgtgacccgatgctctcgcgtcgtcggatcgtcgccaccgtctcctccgcgtcgcctacaccgacatggacgaccggcagtatgccggactgaccaaggcaggcttgggcgtgctggccttcaactcgggcctcgccatctacaactcctggggcgacgcgagctccgtcgcgttcgtgctctccgcggactccatcctcgtgctgctcttcctctgcctccgtgagctggagctgcaggggcggccgggggccgccggcaggggcagggatgtcgggatcatcagagccgcggtgtggacgctgacgacgctgctctcggccatgttcgcgtctagggtggcgccgctgatgccgcctgtcgtcggcgcgctcgtctgggcgacggctgtggccactgccgccggcggcttctgggcggtcttcctcagctgaatgtttaggcttagttcgacgagagagtgatcctgtgcgtgctactagatagtttgttaccatatttgcacttttgtatgcagaagatattttgtatgttgttttctgcattaagacggtctccagttgatcttttgtatgcagaagatattttgtatgttgttttctgcattaagatggtctccggttgatcgtgtaaatgatcacgtaatacgttattgtacactgtagatattgtttataaaaagaagttgaattattagagaataagatag

SEQ ID NO: 117583 - DNA, 490 bp, Zea mays
  Clone ID: MRT4577_38725C.1
aacgcataatgatactaccactctgttgctaaaatcaaggtgctccctgtctagggggccagagccagggataatactaccgctaaaaatacacaggtgaaccggagatccttcacgcaccccacattgaatcaaagaaggggccaagtgcactcacacccacaccttaatatgtcaacatactaccagcgagctgtagccacttctagcatttataattgaccttgttctcactagccaacctagccgcacacacaagtagcgggatggccataatgcgcatgcagcgaccggccttcacatatactagctggatgatcacaactatgtatggactggacagacctgctcatgaccatagcagttgcacacgtgatagcgccctccattgctgttaatacggcgcttaagaaggggcgggcgatcatgaaggcttccttgtagaatactgataagagcaccccatgagtcctacgttgactgcacactg

SEQ ID NO: 117584 - DNA, 378 bp, Zea mays
  Clone ID: MRT4577_38726C.1
ccacttcccctttttttagctctagcctctagctaggcaaccgaatctactagcagaggcagcgcatgacgccgacgacgaagctggcgatgcagtcctgtccgcggccgtggagcgcgtcgtctcggacgaggttttttaggcccctgttcctgggcagcgcgccggcgcggtgcaggatcgtcgccaccgcgaccgccggcccaccttccgccacgcgcgccgcgaaccgaaccaccggcctgaggaacagcgggagcagggccatgagttcgcggtgtctactggcaatgtcgcagctggatggaggcgtcaggcttcgccaattggcaacgaagatggcgacacctcgagagcggcgggcgggcggccggccga

SEQ ID NO: 117585 - DNA, 255 bp, Zea mays
  Clone ID: MRT4577_38727C.1
ggcagcagggagctcagctccttctcccatggcacagcagcaagcccccaccccatggcgcccttcctcctcggctccaatggtgtggccgagcagcagctccctcagctcttccctctccagctcgtccctctcctctcccacaacggcagcaacacccatggatggcgcccagaaaattccagcagcaagcatcgcacatcctgctgtccacggcgtgcagcaaatagggaactccagctccactctcccaat

SEQ ID NO: 117586 - DNA, 310 bp, Zea mays
  Clone ID: MRT4577_38728C.1
cggacgcgtgggcggacgcgtgggtttttttttttttttttttttttttttttttttttttatattgggtggtgtctttttttatgtgtctttcttatttactctttcttgctacccaacagctgacctatacaacacacgaaccaaatacaccggcccccgcattacaacgactagacgcgggaaaaccgtggcgaaacccaaattaatcgcctagcaggacataaacctgtaaacaggtgaaagcaataccaacacgaccgaaccgatcgaccttcccaacagctgttcaacatcaatggaaaaaggc

SEQ ID NO: 117587 - DNA, 338 bp, Zea mays
  Clone ID: MRT4577_38729C.1
aggaagcaccccgttgttttttcacgatttttaagtggtcctagaagggggggataaaagatttgacaaacagccaacagtttgcccatgcttttgtttttggggttccggaaaaacgggccagggccggtttactagatcattttttaaaaaaacttacgggggggggggggggaacacacaaaaggggggcagggtttttttgcccgtgaaaagatttaccccttttggccagggttcttttttgccagttaaatgtccttggccatgagggccacccccttggcatggatcgcccacaaattggttttttcaaagagaccaactgggggggcctt

SEQ ID NO: 117588 - DNA, 411 bp, Zea mays
  unsure (1)..(411): unsure at all n locations
  Clone ID: MRT4577_3872C.1
agagcttatcagtccattcacaggttccagtacgagagatcagggagcgaccctatcctaggcggtgtggtagtctcctcggatgagaccgagagcagtgacgacgacgacgatagcggcggcggcggcgggtattcgacgagggagtcgacgccggaggtggacgaaaacgaggtggacaagaaggcggaggggttcatcgccaggttcagggagcagatcaggcggcagagcagtggtaacaacgcagagtacgcggggtcgcgcggcgtcaagcaccacggcaagtagatcgccggccggctggtatgttttgagtcgtttggttcacataacgggctaaatcatgtgtttttaagttcaacactacaaatggatattggtctattcaannnnaaaaagtgggggggg

SEQ ID NO: 117589 - DNA, 563 bp, Zea mays
  unsure (1)..(563): unsure at all n locations
  Clone ID: MRT4577_38730C.1
gtttggnagggggttgccgtccaaatcgaaccaggctctgaaatccgtaaagaacacccttgtcttttcgccccggatcgacaagactcacatccacattgcgcgtattgagcacggcgtctctgccaagtcgacacccaccgtccacctgatctacaagcttgacaggcaacgacaagcgcgtgatctagacggctgacaaggacgccgctgaaataaagaagccggccttcaagtatgcttgggcgcctgccctgctcaaggctgatcgtcagaggggtatcacaattgatattgctctgaggaagtttgctaccaccacccactattgtaccgttactgatgcccctggacaccgtgactatatcaagaacatgatcactgctacctcccaggctgactgtgctgatcttatcattgactccaccactggtggttttgaggctggtatctcgaaggatggccagacacgtgagcatgctcgccttgcgttcacacttggagagacgcagacgatctgctgctgccacaagatggctgcaacctctcccaaatactccaag

SEQ ID NO: 117590 - DNA, 541 bp, Zea mays
  Clone ID: MRT4577_38731C.1
gtgggttttttttttttttttttttttttttttttttttttttttttttttttttttttttttttttttttttaattttacatattccacctaagagtatccattatgatccaaaaaagaaaaggaaaaaacctaggaaaaaaaaagagggggggggggggggcagaaaaaccccccccccccaacgccaaaaaaaccggttaaagggcctcgaagcccaccctgcaaacaatggggaggccgcccaccccacccgggcaatggccggcccccaggggcaggttaagggagccccccgggccccccggggggggcgggaaaccgcccgaagggcgggccccggcccccggggaacccgtggaaaacgtccgccggggcccgggggccaaccttggcccgttgggccataaaaccccccccccccgggggaagggggccgaaacccgccaggaaaaggcgtcccccaccccccagggggcaactttcaaaaggccccaaccgggccgcggggggcgaaccccaggggggaacccggggaacc

SEQ ID NO: 117591 - DNA, 278 bp, Zea mays
  Clone ID: MRT4577_38732C.1
gtcgatcgatcccttctaggggaggggaattcaggacaggaggaggccaggttctcgccccgcaataggacgccgatcgattccggatcttagctcgagagtccggtgcccacttctcggtgctcgttgcaggattttacgggtagtccaaagaaataagaaacatgccagagacttatgttgatgagcaaccaaagggtgtgtctcggaatcgtccacctgcacatatgaatggtgatgaagaaaagtttatcctggccactcccgtgttgactggg

SEQ ID NO: 117592 - DNA, 332 bp, Zea mays
  Clone ID: MRT4577_38733C.1
gcgacgatccacagaaggatgagtgaagaggataaaactgctgcttctgctgagcagccgaatagggcacctaaggtcaatgaaaggatcctgtcttctctgacaggaggtccggagctgctcatccgttgtatgatcttgagatcggccctgatgctgatgctgtttgcaatggtgttgttgacaccccccgggaagcacagttaaatatgagcttgaccagaaaactggactgattaaggaagataaaaacctatactggtgaggggagtacgctggggattatgggttacagtgcgagggctctgtgggaagacggtggcgcgttgggt

SEQ ID NO: 117593 - DNA, 476 bp, Zea mays
  unsure (1)..(476): unsure at all n locations
  Clone ID: MRT4577_38734C.1
ggcttgngaactttgggctgatttatgtgcttgtataactaatcattcaacctctctttccgcacgtgagtcgtatcttacacccccgtgcgcaaggaaagcgaggtgaacggccggaccctgagaccctgatagaataacggcgaagtcggaacggccatctaatcggatcattcccgcgatagtaagggcgacacgctacactcagacaatccataagtctgctgtcgacgtctataaacccgggaagggtaccgagtccttatcagtctcctccggcacggtaggaacgaactcgtctaatacaccctcagggtccgactcatccaaagtacctatatgagaaagaaattagtaaagttactaggaccgaacgcgtcccctccgacggcggcgcatctaaaaccccgagaaagtcgcagccttgcctaagcagggtaaagagacacgcccaagctccaaccagtaatcatatc

SEQ ID NO: 117594 - DNA, 349 bp, Zea mays
  Clone ID: MRT4577_38735C.1
cgtcaccggcgagaactcaagtttttatgggtcacccgagcagcagcggacctggggagcctgcagggcaagggacgactgcccctacttgacagaatccacccacacgtccccgatcatgaaggcccgagagcaagatgtaaaaaactaagctatggaactaagccagctagctcaactacacgaagatggcctactggaagttctcaaagccctacagcatccgctccaggtggatggagcaaccctgcaaagccacgcgcgaggcgatcatggccgggggctggtacacgcttgatagcacactgagcccgagagaccgcaaggcttcgggtgcaggcaggagcac

SEQ ID NO: 117595 - DNA, 561 bp, Zea mays
  Clone ID: MRT4577_38736C.1
ctcgagttttttttttttttttttttttttttttttttttttttttttttttttttttttttttttttttttttttggtttttttgttttctttttttttttttgttggtgcttttttttttttttgttttttctttttttttggtgtttttttttgggggagccaaaaaaaacccccccccggtttggggggggggggggggcactaaaaaggcttcccccaccgacgggggacgtttttggggcccccccaaaaaacccgttgaccagccggggaggggagacacagcttccgaccggggcttgctggcaaaaaacaaccccggggccggaaaagcccccgccacgcttacccggccgggggggcaaaaaaaacctgccgaacgggggggaggaaaaaaacagcccgccgcccggaagaaaacacccccccccttgccggagggggctggagtacgagccggggccgcacgcgaaaaccagcgcctgctttatttgggcgggcaaaaacccccgcccccccagggaggggggggccaaccccgcccgggggccgggatc

SEQ ID NO: 117596 - DNA, 416 bp, Zea mays
  Clone ID: MRT4577_38737C.1
ggagagagttgcctttaaattaatatattagagaggcccggcgtaaataaaaaggctggtttccaaagtcctgcttgaccaataaagggctgatgaattcccaaaatcgaattcgacgtttcccaacacaaggtttttaaagggtctttttaaacttttaacctttcgaggttatgggttatactggagagcgggggcaaaacggcttgttggaaagctcaagagaccgagattaaacacggcccggtttaccctgtgttctactaaaacactcggaggtcccatttcagaaacatggttccatattcacggcatccccatccattaacaccttggatctggctggaatcccagctcttctgtggaccttccagaaacgctcaggaggaagagtacagcttgataatatttgttgg

SEQ ID NO: 117597 - DNA, 269 bp, Zea mays
  Clone ID: MRT4577_38738C.1
tctaagcagtggtaacaacgcagagtacttttttttttttttttttttttttttttggttttttttttttttttttttttttttttggaaagaacaattgtacgctcctggtatattatgatattatgggtggaggccaaagggggaactccacatgccgaaacctccagattggggggggggaagggtacaattttttgcatcgcgggctactgtctcattgcgcccgctgggtcccccccgcgtcctctgcgttgctgccgctggtt

SEQ ID NO: 117598 - DNA, 340 bp, Zea mays
  Clone ID: MRT4577_38739C.1
cgagggcgtgcctaacgacgagatcgtctccgacctcaaggttctcgttatcaagcccgtcatcccagacagggtgcggggtctagacgacggtggtgcacctcaacccgtctgggcgcttcgtcatctgcgggccccacggtgactcctgtctcaccggccgcaagatcatcatcgacacctacggcagctggggagcccacctcgttggcgccttcttcggcaaggaccccaccaaggtggaccgtaacggggcctacgtcgccaggcatgacgtcaagagcattgtggccagcgggcttttccgacggttgctcgtgcaggtgtactacgccatcgg

SEQ ID NO: 117599 - DNA, 386 bp, Zea mays
  unsure (1)..(386): unsure at all n locations
  Clone ID: MRT4577_3873C.1
cccttcaatttttttttattattttttttttggttgtttttttggaaaattccgggggttccaaacaaangggggggctgacaaaaaaagggccgactttaaaaccaaaaaggtctctggaaaaccgaaccaccacctgccaggaaaacaacaagggaggggacaccaaaacgcgcctcccaaaaaaattgatggaaaaaccctaccaccccataaatggtgaaaaaccaacccaagaaaggcagcaaccccaccgcccccggggtggcccggaccgagaacgcacactcctctggaaggaaagcacatgtggcccaccaggggccgggggagccctaacaaaaaccccagaagaggaactggcccccccccaaggggcccccctt

SEQ ID NO: 117600 - DNA, 654 bp, Zea mays
  unsure (1)..(654): unsure at all n locations
  Clone ID: MRT4577_38740C.1
attcccgggggaaatatacgcagacaagcttggggggtgatgaaaagggagaaagtcacgcgcatatataggtagcagatgcagaagaagaaagcaaaaccgatctacattgctcgacgaaatcaaaccaagatgcacgagcagatagcgatactcacagaagcacgacggattcagaggagtaacttacatttgcagaaacatatagatagatactccctccgtttctttttagttgtcgctggatagttcaattttgcactattcagcgacaactaaaacgaaacggagtgagtagtagatagggccaatttaacttcacatctcactgcagcattacagagttcttgttatgccatttcttcccacggctttcttgaccttcttcggagatcagagagcgagaggcagagaatgaagaaagtgttcgtgtacacttttgagagagagagagagagaggttcaaagaagctatacggcccttctaagagagagaagaagaagaagttcaagaaagctgtggaaaggcatggcatggacctgaaaagttgttgagtggctgcacattgttattgctttctctgcctncatccaccatgcgcgctgccattttgcatatngcctctcttgttggtctccctctccttatataac

SEQ ID NO: 117601 - DNA, 446 bp, Zea mays
  Clone ID: MRT4577_38741C.1
aacaaggggcagccactcaacaactcttcagggccatgccatgcctttccacagctttcttgaacttcttcttcttctctctcttagaagggccgtatagcttttttgaacctctctctttctctctctcaaaaggggacacaaacactttcttaattctctgcctctcgctctttgatctccgaaaaagggcaaaaaagccgggggaaaaaatggcataacaagaactctgtaatgctgcagtgagatgtgaagttaaattggccctatctactactcactccggttcgttttagttggcgctgaatagggcaaaattgaactatcccgcggcaactaaaaaaaaacggggggaggatctatctatatggttctgcaaatggaagttacccctttgaatccggcgggcttttgggagtatcgctatctgctcgggcatcttggtt

SEQ ID NO: 117602 - DNA, 586 bp, Zea mays
  unsure (1)..(586): unsure at all n locations
  Clone ID: MRT4577_38742C.1
tcgaggctctggccgggaagaaatatctctctacctagctaagcctgcagcctcagcgccacaggcagagcaaccacacgctcttcgatccgtcattagccagcgcctcgatctccttcgattcaatcgtttgacattgatatggcgttcgctgaggaggagacgacgaggtacctcggcacgaacctcatcgagagctgcggcgactcggaggacgggctcgccggctgggctccgtccggctcgtgcacgctctccgcgcacgccgacgaggacgcgtctcttccttcgctggcagccgcattgtccgccgccgccggcggcgacgacgaaggcgacgactctgacgaggacgaattccagcagcgcgcgccgaggcccagcggccggtacgtcctggccgcgcgccgcgcgagcgacaaggacgggctctgccgcgcggtctcgcgcgccccgatcaggcccaacgtaacgtaccgggtggccgggtgggtcggnctgggcgccgccgnggacggctcccacgccgttcacgtngaggtccgcgncgacggtggtggccgcccgggcggtggcggcgtggctg

SEQ ID NO: 117603 - DNA, 463 bp, Zea mays
  Clone ID: MRT4577_38743C.1
ggccgcccgggcaggtgctttttttttttttttttttttttttttttctttttttttttttttttttttttttttttttttttttttttttgtgttaaagctggtttctcccattcttaggaaaagtgttttttgtaacccttggggtacacacatcacttttgcatcgggaattgcaacttcttatttctgggtggcccctccatacctccaaaaaactttatttttggattgcaactaaccctcattttaaaagagggcccctccaatgatgtgttgttggtaggaggttcctgggtttgccaaagcaggttggccaaagggcaaccattgttgtagtgcaaaaagggttgcggactatcccgcacaccggttggaaaaaggtagcacttgctgttgtgtaaaaaaggaatctcgacttgctgcatctctattgttaaaaggaacaattttttgcttttga

SEQ ID NO: 117604 - DNA, 610 bp, Zea mays
  Clone ID: MRT4577_38744C.1
atacacgacttcctggaacggatatctcgggttctcgcatcaatgaagaaggtagcacatggcgatacctgagagcgaattgaagaatcccgcgaaccatcgagtttctgaacgcaagcggtacccgaatccttctgaaggtgggcgacggccgactgggcttgactcacgttttagaagagagttggcttcacctcccccgccggctcacattgcggatggtgatgatcaccggactaagcactacctgcccgagcggatcgaaatgtcgtcgtccactgcttttcagagctgcatgtgctcatgacgcacctgggcccctaatgagctctaaattgctcacacctgtccacttacagcgcagggctcagcgtccaagagtgctgtctatctcgagactgagaggaccaacaagcttgctatgctccccatctgggaggacgaggagactggtctcttgtcttagagaataactggatggtggcatgcctttctgtaggtcactgctttgcttgtgccttgcaactactgaaaaccatagccactcctaccttgttgacatacagtagctacgaatatgtggaagactccactatgttcttgcatctat

SEQ ID NO: 117605 - DNA, 219 bp, Zea mays
  Clone ID: MRT4577_38745C.1
tacttgaagaaactacagcttaaccttttggtagtgtcttcatcatcatcaacacctagcagaaacatattgttgcccgccagaagaaggcagcttatgcggagaaggcagataaataagtgcagcggttggagttagtatgccatttttttcgactcagtcatgggagcatggtactgcttaaagtgcaagtggtgtgccctggttccaacattcgga

SEQ ID NO: 117606 - DNA, 369 bp, Zea mays
  Clone ID: MRT4577_38746C.1
aaaaaaaaaaagggcccccgcgggttttttttcggccccaaaagcagaaaaaatcttgggggaaaagggtccccccccccccccaaaaattttttttgcccccccccttcccccccaaagaagagggccccccccccccccaaacccccatttcctttcccccccgggggcccccggggggcttcaggggccccacccggcttgggggtctgggcccgttccaccccccggggttttttcccggggggccataacccctgcccctgggaattttgtcccgggctttttcaccccttgggcccccactttcaggcccttttgggagcccctgctttttttaaaaactggtggggaaccccgggggggcgg

SEQ ID NO: 117607 - DNA, 310 bp, Zea mays
  unsure (1)..(310): unsure at all n locations
  Clone ID: MRT4577_38747C.1
gcataaaacggggccaagccttcttatgatgacatcacacacaacaaggaggcaaggggcccaagccttgttcttctcatctcgtcaccgttacggagggccggaaggcgcaatcgcaacgacctgcttccctacgtttctgccaaaaaacaatccgatcaaagaatgctggcgcgctctcaataccctcgacgacgtcctccacgacggttaccttcccgtccttggtggagcccgccctttccttcttgaacctngggtccgggtggggggtgcctttaacgttgaaccccccccccgggcggttttg

SEQ ID NO: 117608 - DNA, 848 bp, Zea mays
  unsure (1)..(848): unsure at all n locations
  Clone ID: MRT4577_38748C.1
cgaggccggccgggagcgacgccactggggccgcccgctccatcgcgtcgacgtcgaggacgccgcgccgccaatcaccgccccgctccctcctctccaccgcttacaatccccagaaggcggtcgccggtctccccctcgcgccctacccgcctccatcgcctgctaccatgccaggccgggctcttaaatcctagctaggctcagccaatccccgcgccaggatgccgtcaacctcgggtccggttgccgtggcgtcggcttcggcgtcggcgaaagccgcgccgtccccggacgtcgggatctcgccggacctgtacccgtcggaggacgacctggcctacgaggaggagatcctgcgcgagcccttcaagctcaaggggtggtggcgctacctcgtggcccgcgccgccgcgccgttcgccaagcgcgccgtcatctacgagcgcgcgctcaaggcgctcccggggagctacaagctctggcacgcctacctccgcgaccgcctcgaccacgcgcgcccgcaccccatcgatcaccccgcctactcctccctcaacaacaccttcgagcgggcgctagccaccatgcacaagatgccgcgcgtctgggtcctctacctcacctcactcctcgaccagcgcctgctcacgcgcgcgcgccgtgccttcgaccgcgccctccgcgcgctccccgtcacgcagcacgaccgcatctggccgctgtaccttcgcctcgcttcgctcccggcctgcccccgtcgagacgtcgctccgagtcttccgccgataccctccatttgacccctnccccacgctgaggacttcatcacttcctcatatcagcca

SEQ ID NO: 117609 - DNA, 815 bp, Zea mays
  unsure (1)..(815): unsure at all n locations
  Clone ID: MRT4577_38749C.1
gccgggnattggctatnctggngncacacaggngctttaggaggtaggtaggaagggagatcagttcgtcgacccatcccggggatggctaactgcacggcacaatatgctcctctcagacccagcaggcaccaattgctacctggacaaggagaatcagacacacattggaatgtctttctcctagagttggaggagcactcaagtcgcaccttgacgtcgccaccatactgtccaatcgcagtggaggccgcgcagtttctgcggggagtggaagacgggtatgaagccttgagaagcttgcctgaatcaacagaaacagaattatccatcctccggaggggggtgaagctggcgaggcagctcgaggagatggagtgtgacaggtgttggaaggtgctcgcggatttctggtcagagatgttgctctacatcgcgccatcggagaatgtgaaggagcacatcgaggcactggcaaatggaggggagttcataacacactggtgggcgttgctcacccacgctggcattctagataggaatgtccacagtgcgtgacatagaaaatccatctacaaactcaggccacaaatcaacagccaatgggaatatctgaggtatcatatatagatcgatacattatttgtgtgttctcatgtatttatatatactccctccatcttgaagtatatatatggtatccaagtaattttatgacatattatattggaaacacaaatgctccatacaactgtcttgttatcatatttaggttggtgatatacattatattaatggtagtaatgcttgtgatt

SEQ ID NO: 117610 - DNA, 941 bp, Zea mays
  Clone ID: MRT4577_3874C.1
gcacgaggttttttttttttttttttttagagaagaagatggattacttcattcctcaaaccaaacacactatcttcattcctcaaaccaaacacactattaagtattcctttcatcgttcaagaagcaaatataatcattgtatttaagccattatatgacagaaattcaggattctcaaagcattacaggaatttcgtcacggtaaaaaatcagacaagtttcaaaggatacgcgtatctacactcgtccaaaataacattcatatccaacatattacagcctatgtgcatttgcatcgatgacccaacacaattttagttggtatagagaggaaaactttatgttttttttcgtgaagcccagtcatatcccatctatttctcccttccaactgccaagtagtcagttacccaacatgcacaatatgcctttaccagacgtccagctagggtctctttgacacttcacagttcacacttcacacagagcaagggctctgccacatggctacgtcagttattaggtcacggagctgatccatgaggagctttacttgcttgtttttgctttcaatttcctttcttaaagcagaagcatgctcttccaatctctcaatctccgcctggtcaacttcagattctgttgaaccaatgtcctgagggcaggacgacacagcagagatggagtcccgcagcgccaccgggataagaaccctagatcaaattcacctagcattggcaaaccaattttatcttgaacagtgtgcaaaaatcaggcttcaccaattacaactatgaccgattaaggttagataaacaattttctatgtacaatgtgaaaagcaagttctagttaattaaaatccatgtttgttgatattaccagttggctttgtccttaataattactcccttcgtccattttcttaggcgccttcc

SEQ ID NO: 117611 - DNA, 440 bp, Zea mays
  Clone ID: MRT4577_38750C.1
cacccacgcgtacgcacaccccaccaacccatacccataccagaggctcgctgatcttacttctcaacggtagatcggatgatcgaccgaacgaacgatgcagacggcgctagcttcacagagcacactgctagctcagcagcatgtcggacggtacggcgacctgcatcttcatcatcctcaccattatcctgccaccgctcggagtcatcctcgtgttcagctgctcggtgctgtaactaccacatcggctgccgctttctgacttccttgctgcagtgcactgccaatcgacagataactgttgttgcttactcgcatgctgcaggctgatcttcggatctgtcttatcactcagcttcttcggctacctcgccagcatcatctacgctgtcagggccatcagcatctagcaggccggtgcgtaagcatccaatgca

SEQ ID NO: 117612 - DNA, 228 bp, Zea mays
  Clone ID: MRT4577_38751C.1
gggttgcaaactctcaccaacaacttgtgtttcacgtatgccaagtgcacacccccaatatcaatcggtcctcctgcatactattctcatcttgcagccttccgagctcggttttacattgggccagattcaaatgacaacggatctttggcgagcggggcttccacaaggcgtgggccttcaccgggggcacgccacaccaaggcttgtgcctccaatttttctttg

SEQ ID NO: 117613 - DNA, 287 bp, Zea mays
  Clone ID: MRT4577_38752C.1
cttacacattacttacctatacccattaccaacattccacactttctccatacaaacacttcaataatcttttaacacccacttatgcaaacctataatctacatcaaacactatcaccaaacatcttataacaaccacttcccctaactctacaccaatcctaatcacatcttaccattcaaaccatctcaactcaacatcatctaacactaaaccacctaaccatctttaaccctatctcctacttgcaacaacaacctattctcattcaacccacttatctttt

SEQ ID NO: 117614 - DNA, 975 bp, Zea mays
  Clone ID: MRT4577_38753C.1
cctccctcgagtttttttttttttttttactacagagcactggcggatcctttttactccatctgatcacatcgattacatcatgttcccacagaaacaaagcttgatcgatcaagatagctagcagcaaactctgtaacaaatataatcacgctgcttgtcgatcaatcaatcgatggatgttgtggtaagctcaaatcatctacagtacaagcaagctaggtgtgcatggagttcgttatggagacggcagctactccatccctagaagagggcgtggtcatcccacgactccaagctcgggaacccgccgccgttgctgcaactgtactcccctcctcctcctcctatgccgccgccgccgccaccaccacaggcctccgcctccgccgccgccgcggagccgtggaagcaggccgcgccaggccgcccgccacccccggcgtcgagcaggaacgccgacgtgtccagcgtcggcaccagcgtcgtcgtcgccgtcgaaagcacagcgcgggagggcggtgccgggcggcagagcagctgctccgtggcctggtgcaccgcgtcggcgccggcgccggcgcccgtcacctggtgcaccatgcgccggaagctggcggcgtcggcgctgatgtaggtggtgggcagcttccgcgacggccgcggccggcgcggcttgcccgcgcgccgccgggacgcggggcggaggtgctgccgggtcggtgacggggacggggacggcggcgtggcgagatcctccgttaggtcgtagacgacgccctggtgctggttgctgggtaaaactaggaccgggtgccagggcggcggcgatggcgagatggaggaggaggaggtggaggtggagtgggcagatccgcccaagtagtgcgtggctgcggccatgagcatccggcgcggcctgctgggtgagccgaggaggccgagcgcgaggagagactggggccgaattacaag

SEQ ID NO: 117615 - DNA, 704 bp, Zea mays
  Clone ID: MRT4577_38754C.1
actcctataggggattgcatagctcgcacccggccggggcgctcgcacgccgcgaatcgccggaccggtcggcgacggagacgacagagcccaagtcgaagcgatccgattttgccggcggcagcgaccggagtatggggctgggaggccggggcgtggtgggagacaggtggtcgcaacgcatcctctggatttgcgccctgggcagcgccgtgagcctctacttcgtggcggtggagaggcaggctcagaatcgtgcgcgggcggtggcggagggcctcaaggcgctcgacggcgccggggatgacgtgtgacagcggtggacgctgccgtgcagagggcctcctttggttcacatgttcacagaacctcatagcgttgcaataatgtactaaacatctgtgctcagtctttgtagaattaaatgtggatcaatgtgagtgttctcctatttcacataattcatctgagcctttgttgctgcacagaaatgttgatccgtgccactacgtgagtgttttcttatttcacacaatttgtccatttaaggatccacatgatgtattccgtagagtggagtaaccagaattcaataactgtgtattcactgtgttttttattgtccaatacaatgcatatcacaaaatatcaaaaaaaaactgaagaaaatttactgtaaaaaaaaaaaaaaaaaatttgcggcc

SEQ ID NO: 117616 - DNA, 486 bp, Zea mays
  Clone ID: MRT4577_38755C.1
gaactatacaagttcacaataccttttgatgaaagaaagggctccggtgtatagagagggcctcgcgctccgctcctccctgcacctcatccccttcccctgctccccctcacacgacgtgcggcggtgcgaggaccggccctggcaccagcgcccccggtgcctggagcagtgcagggaggaggagcgggagaagcggcaagagcggagcaggcatgaggccgacgatcgtagcggcgagggctcatcggaggatgagcgcgagcgcgagcaggagaaggaggagaagcagaaggaccggcggctgtacgtgttcgaccggcgcagcttccgtcgcgtggtccggagcgagcaggggtccctgagggtgctccggccgttcgacaaggtgtccaggctcttccgcggcatccgggactaccgcgtggcggtcctggaggcgaacccgcgctcgttcgtggtgcccatccacaccgatgcgcattt

SEQ ID NO: 117617 - DNA, 264 bp, Zea mays
  Clone ID: MRT4577_38756C.1
gcgaggcaaggccatctgccgccatgacgctctccctctccacctctttcctccccattcccgccgacgcgaggaccacctgccgcaccctacgctccgtcagcccctcccaggtacgcacgttcgtacacaccgggcctccctctcgccattcctgcacggatcttcgtcgtcgccgccgctaattcctgagtccggaacctggacggcgcggtgcaggggatgcgctgctcgatgcgcaagaaggggttgcacccggagatc

SEQ ID NO: 117618 - DNA, 2926 bp, Zea mays
  unsure (1)..(2926): unsure at all n locations
  Clone ID: MRT4577_38757C.1
acgaggcaaggcactgcacgcttgcatgcacacagtccacactcagacatggcgatgggcgccgcttgcatcctactgatgatggtttcgctggaggccctgcttctcgccgccgtcgccggcggcgggaccatccgtctgcccagcgatgtcggaggcgttgctgcagaccttgtcacggcgagagcgagcgcgagggcaacggcaaagcatcagttacgcgacgaggaggagaggccgtgggggaaatgctgccacttggccgtatgcgtcaagacgtacccgctaacttgctcgtgcttcgatcgggttgagcgctgctccgactcctgtaaggagtgtgtggaaacggaggactcgcgccacgtctggtgttttgactcctctctagccacttggccatacttgtgctaactgttttggcttaagtattgaagttttacaggatcacctattcacccccccccctctaggtgctctcatgactgccatacctgcagggtgctgcacaagtgctttatttatgccccttttggtctccatggtactagccccgggacggcatacagacaacctaacacacccgagcatatcacagtgacagacacgatggtgagcgccagaattgttgtcctcctcgccaccctcctatgcgctgccgccgcagtcgcgtcgtcctgggaggacgacaaccaccaccaccacgggggccacaagtccgggcaatgcgtgcggcggtgcgaggaccggccctggcaccagcgcccccggtgcctggagcagtgcagggaggaggagcgggagaagcggcaagagcggagcaggcacgaggccgacgaccgcagcggcgagggctcgtcggaggatgagcgagagcaggagaaggagaaacagaaggaccggcggccgtacgtgttcgaccggcgcagctttcgtcgcgtggtccggagcgagcaggggtccctgagggtgctccggcccttcgacgaggtgtccaggctcctccgcggcatccgggactaccgcgtggcggtcctggaggcgaacccgcgctcgttcgtggtgcccagccacaccgacgcgcactgcatctgctacgtggcggaaggcgagggagtggtgacgacgatcgagaacggcgagaggcggtcatacaccatcaagcaaggccacgtcttcgtggcgccggccggggcggtcacctacctggccaacaccgacggccggaagaaactggtcatcgccaagatcctccataccatctccgtgcctggcgagttccagttcttcttcggccccggcgggaggaacccggaatcgttcctgtcgagcttcagcaagagcatccagagagctgcatacaagacctcgagcgaccgtctggagaggctgttcgggaggcatgggcaggacaaggggatcatcgtgcgcgccacggaggagcagacccgcgagctgcggcgccacgcctcggagggcggccacggcccgcactggcccctgccgccgttcggcgagtcgcgcggcccctacagcctcctggaccagcggcccagcatcgccaaccagcacgggcagctctacgaggccgacgcgcgcagcttccacgacctcgccgagcacgacgtcagcgtctccttcgccaacatcaccgcggggtccatgagcgcgccattgttcaacacccgttcgttcaagatcgcctacgtgccgaacggcaagggctacgccgagatcgtgtgcccgcaccgccagtcgcagggcggcgagagcgagcgcgagcgcgacaagggcaggaggagcgaagaagaagaagaagaatcgtctgaggagcaggaggaggccgggcaggggtaccacaccatccgggcgcggctgtcaccgggcacggcgttcgtggtgcccgcgggccacccgttcgtcgcggtggcgtcccgggacagcaacctccagatcgtgtgcttcgaggtccacgccgacaggaacgagaaggtgttcctggccggcgccgacaacgtgctgcagaagctcgaccgggtcgccaaggcgctgtcattcgcctccaaggcggaggaggtggacgaggtgctcggctcgcggcgcgagaaggggttccttcctggccccaaggagagcggcggccacgaggagcgggagcaagaggaggaggaggaacgcgaagaacgccacggcggccgtggggagagggaacgccacggacgtgaggagcgggagaaagaggaggaggaacgcgaaggacgccacggccgcgggcgccgcgaggaggtggcggagacgctcatgaggatggttaccgccaggatgtgaggccgccgcgctcgccaaaacgagcaagaagcaacaagagggtggcgcgcgaccgacgtgcgtacgtagcatgagcctgagtggagacgttggacgtgtatgtatatacctctctgcgtgttaactatgtacgtaagcggcaggcagtgcaataagtgtggctctgtagtatgtacgtgcggatacgatgctgtatgctactgaggcaagtcccataaataaataatgacacgtgcgtgttctataaaaaaaaaaaaaaaccgacgtcgacaggtaccgtggcgaccccgggcccaggtgccacgacgaggacgggaggagcgcggagcggacggagatcgtgtgcttgaggtccacaccgacaggaacgagaaggtgttcctggccggcgccgacaacgtgctgcagaagcttgaccgggtcgtcaaggcgctgtcgttcgccgccaaggcggaggaggtggacgaggtgctcggttcgcggggcgagaaggggttanaaaaaaaaaaaaaaaaanaaannnnnnnnnnaaaaaaaaaaaaaaaaaggttcagatattgtagatgatgaaccactgtctctctctcttgggctccct

SEQ ID NO: 117619 - DNA, 292 bp, Zea mays
  unsure (1)..(292): unsure at all n locations
  Clone ID: MRT4577_38758C.1
aataataataataaattaacacttatnntgatctngnaaaattatacagnnccaaaactgggtgttnnttngnatttttggtactgggttncttggacatttaggggttgtttgggaatacatgagactgtttttngnaagagacagnatttgaaaagttggttggncaaagntgntaagaggattatttnaaaagggtgttgcaagcgtntattacaggagnatgtgagcctaagattgtntggnccgatgggtttggtgtnaagaaaaccttggaagcaatttagatngn

SEQ ID NO: 117620 - DNA, 388 bp, Zea mays
  Clone ID: MRT4577_38759C.1
cccacgcgttcgtggacgcgtgggcggacgcgtgggagatcatgttattgttgcccagcctaccagagtcgacaaggcctataatgaaaagacctgtattgctcttctctagaaggtgaaccaaatctggtttgtgaccgagagtttctaatctgctatgatgttcaagcacgcctgatggggagtgttggcaagtcacaggagtgttgtaacataggacacctttattgctgtccttttattttgcctgttttctgtccaaataaaaacttgatgcttcttgcatgttttgatgcgcttgttcaaatacaatcttttttttattatttttgtggtgtttagtttatgccgtcgttctttcagtgtatgctaaggttaattttttcta

SEQ ID NO: 117621 - DNA, 879 bp, Zea mays
  Clone ID: MRT4577_3875C.1
ggccgggaatgtatccataaatatctccagcatcttgctaataatagtatacaaaaatattttatataaaatataattagtttaattgatatatgtctaaattattattattagaatggaattcaattccaatgatccaaacggggcgtaattgtaattgtaaagtgcacggacgatctccatttataaatctgcagtcaccatccatattccatccggactcccgcccgtctcggatccaggtccagggacgccgccctgcacccgcgccatgccgacgctcggcatcgcgcggctgctggacgcctccttccggcgccgcttcgccgcggcgggcctcgtcgaggcctccgtcccgctggacggcggcgcgaccacggtgcactgctggcgcttcccgccgagcgccgacgacggcggcggcgaggacgcccgccccgtcctggtgctcctgcacggctttgggcccccggcgacgtggcagtggcggcgccaggtgggcccgctctcgcgccggttccggctcatcgtcccggacctgctcttcttcggcggctcgtccacgtcgtcggcgcccggcgtctccgaggcccagcaggcggaggcggtggcgaaggtcgtggcggctgtggcgccggcgccggcgcgcgtgtcggtggccggcaccagctacggcgggttcgtggcgtaccacgtggcccggctgctgggccccgacgccgtggagcgggtgtggtcgccagctccgacctgctcaaggccgacgccgacgaccaagccttgctccgccgcgccggcgccgagcgcgtcgaggacgtcatgctgccgcgctccccggaccggctgcggcgactggtgcagctcgcctaccaccgcccg

SEQ ID NO: 117622 - DNA, 1066 bp, Zea mays
  unsure (1)..(1066): unsure at all n locations
  Clone ID: MRT4577_38760C.1
catatgcttgtctcaaagattaagccatgcatgtgcaagtatgaaccaatttgaactgtgaaactgcgaatggctcattaaatcagttatagtttgtttgatggtacgtgctactcggataaccgtagtaattctagagctaatacgtgcaacaaaccccgacttctgggaggggcgcatttattagataaaaggctgacgcgggctctccccggtggcccgatgattcaagaaaaagccatggatcatctcctctttttctcattcaaatcagtcatgcattcaaaatccgctttccttctgatcgtggtggcagttagcaccacggccatggtgcacggccaccctgccgctagcactccggcggcacggttctgggagcaggccctctccggcacgcctatgccggaggtgctagctgattttgttcagaaaggaatcgatctgtcaccgcttgtggagcactactctgcacagcccagtatcggcatgtgcacactcttcaacactatctgcgacgcgcggatggtggcggagaccggcatcttcttccacgaggccgagctgcatccaggcagcactatgaccctctctttcccagcggaggcggagacagccatcctcccgcacgacgtcgccggcaaggtccccttcgagaacctaagcgacgtcctctccacgttccacatctcaccaggctccgctgaggcggcgcaagtggaggacaccctgcgcaagtgccagcagccgccaaccgccggtgagatgaaagcctgcaccatgtcgctagagagcactgtaaaggccgccatggagatgctcggcaccaccatccagcagggtggtggtggtggtgaacgtgtgggcggccacgtcgacgctcccccgcggtggcctgctaccacgccgggagtacattgtcgaggaggtcaccaagctagagggcactggctacgtggcctgccacaaggtgccgttcccatacgccgtcttccattgtcacatcgcacatacggggtatataggtacaaggtcaccctccacggncgcggcgacacgaggggcc

SEQ ID NO: 117623 - DNA, 543 bp, Zea mays
  Clone ID: MRT4577_38761C.1
gccacctgtgcgatatgaatttctcgccgatggggatcctctgccgctgggccactacgctccgtggttgtgctccaccacctacgtccagctctcgttgatcgacctgggaggatgcgcggcgcacacggatgttcgtcgcagcttcgcctgggtggattcattctcggcgcggctggaatttctcaccgatgtgagctctccgccgccaaagcgtcaccggacctcgcagagcatgggcacaaccttagatggcgatttggcgcaccagggcgtttcgtcgtgcacgcgcggaatcggggggaataccggttcgtgcttgggtggaatcgctcgccgaaggcctcacctgggcgccgtcgttcggccggatgaatgtagccaggagattggagggagccgctgccaaggtgctccgactcgccatcgatccgctgggcgccatcagacgccgtgtgcatgaatagcttaccactccatctttggctcagcagtgaggacacgtgtcatctgaagagcaagattggtacctggaatctcaag

SEQ ID NO: 117624 - DNA, 390 bp, Zea mays
  Clone ID: MRT4577_38762C.1
aaaaaaaaaaaaatggggccccttccgatttcccaaccctttacattaaggggggtaccaaaaaaaaagggcccctcaaaggaacccagggccccaaaaaaaaggaaaaaaaggggccgggggacccaattttttccaaaagggaggctttttttaaaccccggccaaacaaatttggaaaacttttttttcccaggggttcggacccatccggccctaaaaattcaaagggccttaagggggggcctggggagccatttccctttgggccataaaaccccaaagtggggggggggcttggggccccccccgcccaggggggggttgcccaggcccacttttttggggcccagtttgtccacgagggggggggcctggcccccgtccccc

SEQ ID NO: 117625 - DNA, 367 bp, Zea mays
  Clone ID: MRT4577_38763C.1
cccacgcgttctcccacgcttccgttcagtattagacagccactagcactactacggtgacgactgctagaatggatctggtttctttgacaaggtgaatgtatttattcatgtcattttttattagattttaatttgtatttatgtttttttattatttattttattttttattttatttttatatctttttttattattattttagttatcattttttttttaattatattttttatttatttatttttttttttctttatatttttttttatattatattatttattattttatttttatttttatgttattttttatattatttatatattttttaatgattatatttttatttattattatt

SEQ ID NO: 117626 - DNA, 471 bp, Zea mays
  Clone ID: MRT4577_38764C.1
gttattataattttattttgttgtttcagattaacataaaaacacatttggggttattaaaataaaactagaagggttttatttttatgttgaaacctacaaaaaataatgagtgatgtaacttgcaattagataggaaacgaaagacaacgtgatgaaaaaaaaaaaaaaaaacgagggcgaaaccaaaaaatgcgaaaccggaaccggaacgggaacaaatttacctataatggaggggaataaaaactagaccaaggagaggacttggttgttaccttgagaaaaatagaaatagtataaaatttcccattaagaaacaaaccgcaaccaaaaaagtaaaaagctagaagtggttacggagaaagatagctcaaattaatagaagtgggcctaattgccaatttccaggggggaaaactgagaagcggagccgaaaaaaaaaaaaggccaccccccaggcaaaggggg

SEQ ID NO: 117627 - DNA, 267 bp, Zea mays
  Clone ID: MRT4577_38765C.1
attcaacagagcacagaagtgggatgaggagataatgaaggacctctaccgcatcatcatgctcagcgcacgtgcgactatggtccccgctatcgataagcgcatgagcaaggagatcactgctcgtagcaccaggcagcatcaagatcaaggtcaccacgccaactgagaggaagctcagtgtgtgcacaggaagccctaccctaacataagctcagcactgtgcaacagatgtggatatctaaggacgaatgctaggagtccatc

SEQ ID NO: 117628 - DNA, 279 bp, Zea mays
  Clone ID: MRT4577_38766C.1
ccggtcttaaaaacccagaccaaccacacaaaaggggggcaaatgggaaacacgagcccgagacaccgcgaccgaaggaaaacccaagagggaaaggagaaccgagaggaaggggacccagaaccaaaaggccagagccaaccacacaagagcggacacaaggcacaccggcggcggcgcggcagagcggacaacaagggcgccgaacacaacaaggcgccaacaacaaaagcccgagaagaaagggacaaacaggacgaccaacaacgcaaaagggcg

SEQ ID NO: 117629 - DNA, 762 bp, Zea mays
  Clone ID: MRT4577_38767C.1
cctggtctgcccatggccgcccccgccctggcccgcctccgaccccggccaagcagctcctcttcttcggctcaatcgtcatgcccccgcgcgcgtccatgccgcagcagcagccgcctccgcccccacacccgcatctgcacagcatcgggggcgtaaaaaagtccatgtccatcagcagcaatttacagccggcaaagcccggactagctagctagaagcatttgcaggtcagttgtttaacttctgaatcgtctcatcttctcatcggtactgctcaccatctcttgtttatattatgagtgctagtgctagcagcactcttgttttcattttcgtgcttttgccgattgccacttttctgtactgttgctcactctttgtccatactacatatgtataccatggtgcatcttgccataatgtagtagatcgtatggtaggcatttattagctacgcaccacaacacaagcaaaatggaagacttctcttgtgcttttacgcaaggtcaactgaaaaataaccctaccgtagcctaaatcatgtcatgtgtagtttgatttgtctgggccttgagtggtatagactccaatagttctttatgactctctagcagccttgagtggtatatacatgtatagatgttgtgtctactgacaaaagtaccgttggtacgttgtacgttgtaagctggaaaaggcaatggggagttatggggcaggaaaaaatatccaggagcagtgtctgcatgcatgtttttg

SEQ ID NO: 117630 - DNA, 243 bp, Zea mays
  Clone ID: MRT4577_38768C.1
accaaaggggtgaggatgggaacaaacacactgtggcaaaccttgaggaagcgccagaccacccccctttttgccatagacaatgatccctgggaactacaagatggtgggccgcttcctcaattccctctggccgctacaaccaactggggaggttcattccctttcaatgcaggcgacacgccgttcccttttcgggtaccatggcagccgtagcccaaacatgaacagacccgcccaccg

SEQ ID NO: 117631 - DNA, 655 bp, Zea mays
  Clone ID: MRT4577_38769C.1
actcgtcttattaacaaacacacaccccacctaccccggacggaccggcaggcagacaacatggacctcgtcctcctggagaaggccctgctgggcctgttcgccgcggctgtggtggccatcgccgtggtcaagctgagcggcaagcggtaccgcctaccaccggggcccccgggcgcccctgtggttggaaactgactgcaggtgggcgacgacctgaaccaccgcatcctgatggccatggcgaagcggttcggagacatctttctgctgcgcatgggcgtgcgcaacctggtggtgttgtccacccaatagctgtacaaggaggggctccacacgcaggtcgttgagatcggctaacgcaccagcaacgaggggtacgtcatcttcacaagcatggggaaagacatattgttcccagcgtactgtgaccactggagaaagatgcggagtataatgagcgtgctacttgttcacctacaaggaggtgggccaaatacgcgcattatgtgaagatgaaggccgtctattgcttatctacctgaatatacactgacaggcagtccctcatgctatctgctggatatgcaaacaacccccaaatgatgtatggagcatattctcctgtttccactgttggagatggccaacaata

SEQ ID NO: 117632 - DNA, 402 bp, Zea mays
  Clone ID: MRT4577_3876C.1
aaaggtacttgctgcattgatacattaaataaggcataaacctaccctttattggtttgggatggtttcaggagtcgtagggactatttccactacattttttttctctctctctcgaaagattgattttgttccttctaatttgtctggcaatgaactcttctaaaacattgtgcttgtgcgtgtaggaacggcggcgccttctgagacgatcgtggatgtggaggctgaagtcaaggacgtggagtgatgtttccacgggatcctacaccacgccagtcctcatcagtaccagttctcgtcttctcagcagaagaagagcacgattttcttctgaatcgaggtctgcggcggcgagccggaagtagagttcctggccgaaggaggggtacacgcggaggt

SEQ ID NO: 117633 - DNA, 370 bp, Zea mays
  Clone ID: MRT4577_38770C.1
gtgcgttcagtgccagtcttccttttgggcaggaggaagaaattgtgcttcgtggacaactccctcaccccaaaatacaacaggctgcgggtcttagacaacgctacctaccacggaatgcgcattggaggccggggcggggctgccccacaaagaagaaggaacatgggcacacacgcacacagatatggatcgaccaatacaacgaatcgggaacacgagaacgacggcggtgcactgtggagacatccacgagctcaagtgcgagtttccaagcgttttgaagctcctgctctccggctaggacggccacacgcggacggtagcaaggatggggggcccgggcgtcttccacatgatgtagaggggc

SEQ ID NO: 117634 - DNA, 472 bp, Zea mays
  Clone ID: MRT4577_38771C.1
ctctccgcatcttcgcatcgacgggccgccttgtctcaatagcgcgccgctggggactggggtagtggggtggggtataaggatcaccactcaccacacttatactactctaaatttgcactgtaaaaaaaatattctgtcctggacagcaaaatactttactctataccacatatctacgcactcatgtttactctatatcccaaccctataccaactatcatatattatatcattttgtaactctatatccctagctggcgtcggcgaggcatattgaagtgtaccagtatcagcagtagctagctagctcttcacccacactcatgctcctgcagtacgatcgagtggagagagggactctataaatagcgttatacaagcgcactctaattttacagtagcacataaggtgcacgactacagcatctgttaactgaaaatgtaactgaaaaaacataccgcatgcttt

SEQ ID NO: 117635 - DNA, 869 bp, Zea mays
  Clone ID: MRT4577_38772C.1
cccacgcgtccgcccacgcgtccgcccacgcgtccgcccacgcgtccgggggccgcgcgatcgtcgacggccgctccgcccggaatgccgcggcggagcagccggcgccggtgcgcgtcgacgaggacaaggaggcggaggtgccggaggccgtatttgacagtggccgcccggctacggaggaggccttgttctcggaggatgaggaggaggaagaagaggacgcaccgccggtggccccacctccccctccaccaccagtcatcgccgtgcctgtatctgagaagcccgaggcatcaaggcaacaacagagtgctgagcaagcaggcacatcgaaagacacacagcctgagcaaagctccgagagggatgcaccggctcagcagggaggtcaaaagagaccgcggaccgtcgaaggcgctggagaaggcacggcagaccttgagagcaagctggtcgagatccttgaccggaacagccggttggtggctgcacagttggaggcgcagaaccagaactgcgagcttgacagagagcagaggaaagaccaagctaacagcctagttgtcgtgctcggcaggctggccgatgcccttggcaggatcgccgataagctatagtcagtcacctaggtgtatatgttgacagaaataattacagcgggaaatgtaagtgaatgtacagattggtatagggctattggcattcgattctttttcttttttttgggattgggagcggtgttatatactagccctcaaatgatgtggggactagcagaattcagttgtgggtggattctggggctgtgttatatagggaggcgagtaattattttcaccaatgcaattgtgtatagttgagccttt

SEQ ID NO: 117636 - DNA, 1338 bp, Zea mays
  Clone ID: MRT4577_38773C.1
ctgcctcagggctagaccgaccaccgaagaatcccgcaaccatggcgctccagcttgccgtcctcttactgctcccactactcgccggcgcgtccgccgacgacaaattcatccggcaggtgacgacgcaaggtacccgcgccggcgcgggcccgggtctgctcccggaggcgcagttcgcagcgttcgtgaggcggcacgggcggcggtactccgggcccaaggagtatgcgcgtcggctgcgcgtgttcgcggccaacctggcccgcgcggcggcgcaccaggcgctggacccgacggcgcgccacggggtcacgcccttctccgacctcacgcgggaggagttcgaggcgcgcctcacgggcctgcgcgccggcggggacgtccagcggctcatgagtggcgtgccggccgccccgccggcctcgcaggaggaggtggcccggctgccggccagcttcgactggcgcgacaagggcgccgtcacgggcgtcaagacgcagggcgcgtgcgggtcgtgctgggcgttcagcacgacgggcgcggtggagggcgccaacttcgtcgccacgggggagctcgtcgacctcagcgagcagcagctggtcgactgcgaccacacgtgcagcgcggtggcgcagaacgagtgcaacaacggctgcgccggcgggctgatgacgaacgcgtactcgtacctgatggagtccggcggcctgatggagcagagcgcgtacccgtacacgggcgcggcggggccctgccgcttcgacccgacccaggtcgccgtccgcgtggccaacttcaccgccgtgccggccggcgacgaggcccagatccgcgcggcgctcgtccgccgcgggcccctcgcggtggggctcaacgcggcgttcatgcagacgtacgtgggcggggtgtcgtgccctctcatctgcccgcgcgcgtgggtcaaccacggcgtgctcctcgtcggctacggcgcgcgcggcttcgcggcgctgcggctgggctaccgcccctactggatcatcaagaactcgtggggaaagcagtggggtgagcaagggtactaccgcctgtgccgcggaagcaacgtatgcggcgtcgacagcatggtctccgccgtcgccgtggcaccggcgctgtgaacgaatccagtgtactcctgaaacggaagtcctggacggggcatggtattgtctgcacgtggtagtgtaggcttggatacaagtgataaaggaataacaaatcccgatacgtacagccgtacagaccccacccatgtgctctttgctactcgttccgttccattctaatataaattatatataaatgagttct

SEQ ID NO: 117637 - DNA, 355 bp, Zea mays
  Clone ID: MRT4577_38774C.1
ctatccaagtggaattcccagcagcattgaatgaactggtgcagaagtttcaagtctattacctagggaacgtgcctgtggctagactcgttggggtagatgtgattaatggagcctggagtcagtcgtgtcttccagtagtcgtgagcagtcggacccaagtcacgtcagcgtggcccctgccaccctcaccatctggcaccatcatgcaggagcagtgctggaggagtgtcgagtgcggttcctctccttcctggctgtgggcagagatgtgcacacgttcgcattcatcatggctgacggaccagcctccttctgctgtcacatgtattagtgcgagctcaatgctgccagt

SEQ ID NO: 117638 - DNA, 347 bp, Zea mays
  Clone ID: MRT4577_38775C.1
actaattctttctactctttgctgacacacaaacacaccctggcaagcaggccccgctgtcactatacaaatgccccaatcttgtaatacagaaactatggaaaagacaatagctcggctcccaacatgaagggccctaactggaagaccgttccatgacttatttcgggcggggggaaccaggggtacaagacctcgggtcgccctccctctacctgaggagggcgcgcaggggaaacccccggcaccttcacaacctcttaaacggccaccgggaatatctcccacggggtgacccttacgaccgaaccccgcgattagctcctcaacgaatccctaggagcaat

SEQ ID NO: 117639 - DNA, 1473 bp, Zea mays
  Clone ID: MRT4577_38776C.1
ttgggtacctcgcctccggcggaagcgcgtctgcggccgcgctgccgaggaggaggaggacgacgacgacgacgacgtgttcccgcaggcgtggagcgacggcggcaagcggtgcccggaggggacggtgccgatacggcggacgacggcgcgcgacgtgctgcgcgccagctccgcccggcggttcgggatgaagggccgggccagccaccacgcccgccgcgactcgaccagcagcggccacgagcacgcggtggggtacgtgacgggggaccagttctacggcgccaaggccagcctgaacgtgtggtccgccaaggtggcgtcggcggcggagttcagcctctcccagatctgggtcatctccggctccttcggcaacgacctcaacaccgtcgaggccggatggcaggtgagccctgaactgtacggagatagcagccccaggttcttcacatattggacgaccgacgcataccaggagaccgggtgctacaacctgcactgctccggcttcgtccagacgaacaaccggatcgccattggagccgctatctcgccgacctcggtctacaacggccggcagttcgacatcagcctgctcatatggaaggacccacaccaggggaactggtggctgcagctggggtcgacggggcagctggtggggtactggccgtcgttcctgttcacgcacctgggcgggcacgccaacatggtgcagttcggcggcgaggtggtgaactcgcggccgtcggggtcgcacacgcccacgcagatggggagcggccacttcccccgcgagggctccaaccgcgccgcctacttccgcaacgtgcaggtggtggacggcgacaacagcctcgtccccgccgccgcgctccgcctcgtcgccgaccacccggcctgctacgacatccagggcggctacaaccgcgcctggggaaactacttctactacggagggcctggcaggaacgtgcactgcccgtgatacatgatccggccggcgaccatgcatgcatggcgatggcatgaactgaatgaacgaagaagcagatacgtgcacagatacatatatatatatatactactacagagattcagagacggatcacagtatgcggccgtgccggaggattgatctctagtgggatcgtcgtcgccgctcatcaaccggacatggatcctatatatataggagcggtgctagtcgttatagcttagccatagtccctcgtttggttactgcgcatgctaatgagtaatgagtttttagtcgcccagcccagctgcgtacacgcgcgccgccggccgggccggtagtagcacaggcaaaaggtttcgatttgatgtatgtgaggcttctttcgtttgcatcggtctgatttttttttgtcttgagttctgtatacatgaagaaatccacagagtatttgctcaaaaaaaaaaaaaaaaaaggcccctagggcc

SEQ ID NO: 117640 - DNA, 515 bp, Zea mays
  Clone ID: MRT4577_38777C.1
cccagcgtccgcccacgcgtccggcttatcctacaccaaagtgtgaaaagaaatgcaaggagcagaaccaagtttggcaggaaaagaagcatttcagcattgatgcgtacagaataaattcagatccacatgacataatggcagaggtctacaaaaatggtcctgtagaagttgctttcacagtttacgaggtaatgtccagctgctttgtctcaagttctccatgcattttgtcaacagattttgtgtagctgagacgttatgaaggactatggggtgcagatactgctagtacttttagaggacaaacattccatacaaaaacttagaaagactattatctaaaaaaaaaggttagcaaggacatgacaaaagcagaacaagagaaacacaagccaaaaaacaaatctggtatatatataataacatgctttgggatcattcatagtcttagaacatatgtcattttagtggaaagaaactttatttttttctgattcaacaatggaaaatct

SEQ ID NO: 117641 - DNA, 195 bp, Zea mays
  Clone ID: MRT4577_38778C.1
gatatttattttattttataacgatctatacttttaattaaagcatgtcaagtgccacgacttgcttcaatgcaaagtatcaatcgttgggcggccgactgactatgagcgagccgaccccagagctaatgaccgcccgctacctgcatgcgtaccaaccttgcctatctcgagtcatatctgagctcggcgttg

SEQ ID NO: 117642 - DNA, 276 bp, Zea mays
  Clone ID: MRT4577_38779C.1
cttggctctcacgtattgatctcgatattcaacttcccctctttgccttgaccttacttattccttgtactacaaaacctacttatacccacctgctacatcatcgactcttgttgattcctcagacatagatctaacacaaatttctcgcacaacatcgttgctgcactctatagcaacatttttatcaatcgtgtactttttcaaatcctacttcgatggccgactttgctcccccgtctggtccgcctccccctaaggcccccgaggttcctg

SEQ ID NO: 117643 - DNA, 305 bp, Zea mays
  Clone ID: MRT4577_3877C.1
aactgggggggtgcgtacctattatccgcacggggcccaaaacatttcgggattataaatacacattggggggagaaaacggcctggccatttgtaattggaagaaaaaatcgtcctttctgaataggcaccaaatgacccaaaattcgggtaattgatgacgcttaagctgatccgattaacccggacaatggctccggggccttggaggacccattaaacaacaatggtgccggggcgacggaggacccattataccactactgctctggggcgcccgaggaattaaaccacaatggagccga

SEQ ID NO: 117644 - DNA, 191 bp, Zea mays
  Clone ID: MRT4577_38780C.1
tggcgactcttctctgactagcttgctgctcccgcagaggagcggagctcacgcaaagactcggtcgttcactcggaggaaccagactccggtacggagtccaaagccggaggtttcaccgaggcaacgctagccatcgtagaagctctccacacccagaacccccgccaaaagccaacagagcacctccc

SEQ ID NO: 117645 - DNA, 133 bp, Zea mays
  Clone ID: MRT4577_38781C.1
cgcacacacaaccccgcatttttctccttacaagtccactcagtacacaaggtgccgttgcaaatttagttccggtttgctgtcaagctcttcctgcttgcccttcggtaagcatttctcggagaagacgact

SEQ ID NO: 117646 - DNA, 346 bp, Zea mays
  unsure (1)..(346): unsure at all n locations
  Clone ID: MRT4577_38782C.1
ccccgcagcgcgatcctcagagcggccgcctttttaaccccggntttgaacacgaagcactacttgggtacataaggggaggaaagaaccaaaaacaccggaaaacaaaccccaaagggaaaaggggggccaaaggaaggagctcaaagagagtaacaggccacacatgcatgaaaaacagcatggcaggacgggccacaccaactctataatcggatcaaccgagcgacattgtatggcaacgcacggcgcgaggggcataatcgagcgagagccaccgaagtaccgccgcaccaagtgatctcaaaccggcacaaaggtgactgacgctatcctcactctaccc

SEQ ID NO: 117647 - DNA, 874 bp, Zea mays
  Clone ID: MRT4577_38783C.1
gaggcggtgtcgctcatcgcgcaccggctgggccggatggacccgccgctgcggcgggagtgcatcgagcacctctgcgaggcgcactcgcaccggtggagcatgcgccgcagcaaggcccacttcttccgcctcatggcggcgctggcgcccctgttcacggggctcaggtggttcgtcgacgtctgtcactggaagaacccgtccaccaccgtcgcggtccacatcatctacgccatgctggtgtgctgccccaacctcatcatgcccaccttcttcatgtacaagttcctcatcggcctctggaactaccggcgccggccgaggcacccgtggcacgtcgacaccaaggtgtcgcacgccgagatggcgcacctggacgagctggacgaggagttcgacgacttcccgacggcgcgtcgtcccgaggtgatccgcatgcggtacgacaggctgaggagcctcggggcgcggatacaggagatggtcggcgacgttgcggcccacgccgagcgtgcgcggtgcgcgatgacgtggcgcgacccccgcgccacggccatgtacctgctggcgtgcctgttccttgcggtcaccaccctcctggcaccgttccaggcggtggcgctgctcacggggttctacgtgatgcggcacccgacgctccggcagaggctgcccgacgtgccggcgaacttcttccggcgactgccatgcaaggtcgattgcctgctttgattgcggatcaaatgatgtttcagtccgtaatttgatattttattgttagcaccgttcgactcttcaattctataaatgttgatctagtatacaattcctccgtttataaaagttgggagttgggactcgcgagtcagac

SEQ ID NO: 117648 - DNA, 2163 bp, Zea mays
  Clone ID: MRT4577_38784C.1
ggccgcttttttttttttttttttcaaaatgaggtttataataataatataataaaaactccaggccaccgactggcctcgaggccggccggggattccccctccccctccccttctgccccccggcaagacggcaagggattaacaacctaacctgactcgtggcgggacggatgacatccccaaaaccctaaccacgcgacgctcgccgactcgccgtcacagccgcacctcaaccggagtcgaagcgccattgatgaactccgagcctgccgtggccgcagctagcgatgcacaagctcctcccacgcgccgcctccttcctcgacgcagccgccgccgcggcccccctgctgctctccttcccacgcatgcccacgctgcggctgtctggtagcccattcgtagccatgcgtcctggcggaaaccctagccgtatccgtgcgccgccgtggctgcactgtgacgctgggtggaggcggggactctgttccgccgaggctgcgaggcgcgggggcgatacagaggagatggagaaggatggcgggggtcgctcggcgccggagaggaagcagagatgtcggaatgatgcgctggtgggaaggggggagctgcttaccattcccggagtcgggccacggaacctgaggaagctcgtggacaagggattcgatgacgtggcgcagctcaagcagctctacagggataagttctttggcaagtctaatgagaagatgattgaattcttgcaaaattcagttggcatcattcacaagaatcatgctgagagtataactttgttcattaaagagagtgttgatgaagagctgaaaggcaccgatacatctaagcttcctaaaaataggaggttgaccttttgtatagaagggaatatcagtgttgggaaaactaccttccttcaaagaatagctaatgaaactatcgaactacgtgaccttgtagaaattgtacctgaacctattgctaagtggcaggatgttggccccgaacacttcaatgtacttgatgctttctatgcagagccacagaggtatgcatacaccttccagaattatgtatttgtgacaagggtcatgcaagagaaggaatctgcgtgtggaataaaacctcttaggctgatggaaagaagcgttttcagtgatcgaatggtttttgttcgtgctgtgcatgaagcaaactggatgaacgagatggaaatcagcatttatgactcttggtttgacccagttgtgtcatcactcccaggtcttgtacctgatggttttatttatctaagagctagccctgatacttgtcacaaaagaatgatggtgcgaaaaagatcagaggaggctggtgttactcttgattaccttcgaggtttgcatgagaaacatgagagctggttacttccatccaagggaggaggttctggcgtgttgtccatcagtcagcttccagttcatatggagggctccctgcatgcggatatacgagatagggtattctacttggaaggagatcacatgcattcaagtatccagaaggttcctgctcttatcctggactgtgaacatgacattgattttaacaaggacatcgaagccaaacgacaatatgctcggcaagttgcggagttctttgactttgtgaagaaaaagaaggaatctcttacagcagagtcagagacggctgatggtgataagagtataaacaaacagattgtgctgccgcacggaggtggtttgtgggtgcccggaagcagcccgttaccagaatcagctctaaaatcatttgatttcaggagaacgatgtcttcctcgacttaaggtgggcaaacatcccaatggcgctatcaatttctgccgacaacctgcattggtgtggtccagcagcgtatcttgattgatatatatataccctgtaaatatttaaagattatataaagatttaggcttttagctagtgttggcgtacaatgtattatactagtggtatccaactctgttgcctgtagatgatcgagctgctttctgtttgcctggaaatgttgatcgaaccgctttcgagacagtgcttttgtaaatttggggtgcatcataggcgcagaatcttttgttttacggggggcaacccccaaataaaaaacaaaaggggggaaaa

SEQ ID NO: 117649 - DNA, 199 bp, Zea mays
  unsure (1)..(199): unsure at all n locations
  Clone ID: MRT4577_38785C.1
tcttccaatctaactactacctaaaatagcggcggttttttatacatctccgtcctaaatttcaccgttcatactcattactcaaatcttcattccattatttctgcttaacattacccaactacttcctctacaacactttgatacttaacttcacatttatcatgttcttttcctacacccanatcattttcaaact

SEQ ID NO: 117650 - DNA, 572 bp, Zea mays
  Clone ID: MRT4577_38786C.1
gagctcgggaagcttccatcgctggagatttcgcttaacctcagctgtaaccgtctctccggggaaattccagcgcagttcggcgagctggataagcttggcagcctcgacatctcgtacaaccagctctctggcagccttgcgcccctcgcgaggctcgagaacctcgtcatgctcaacatctcgtacaacacgttctctggtgacctcccagacacgcccttcttccagaagcttccgctcagcgacatcgcgggcaaccacctgctcgtcgtgggcgccggcggtgacgaggcctcccggcacgcggccgtttcggcgctgaggctggccatgacgatccttgtcgtggtgagcgctctcctcctcctgacggccacctacgtgctcgcgcgctcgcggcgccgcaacggcgccatccacgggcacggcgccgacgagacgtgggaggtgaccctgtaccagaagctggacttctccgtggacgaggtggtgcgcgcgctgacgtcggcgaacgtgatcgggacggggagctcgggcgtggtgtaccgcgtggcgctcccaaacggcga

SEQ ID NO: 117651 - DNA, 418 bp, Zea mays
  Clone ID: MRT4577_38787C.1
ttttgatgtgtggttatatcctgaatgctggggggggtatacaaaaacgttttggggatggccacatatattattacatttgcaaaaatctgtcaacgtttatttgttctagttacatgatctaaacgatgtgaaactctgaaagggaaagcacccaatctgatcggttgtggtgttccatgacacttattctatattgaattggtagatctgatatatccatgaaactttttttttgatgctgtgctctgtttagagatttcttgatgatgattacctcaagtaaatattcagttttcctctctctggttcttttcaaaagggtctcttatttccctattctttaccacatattgttttcttaaaaaaaatgtcttgttccatgcccatttttagtacgttatttggagtaaaagat

SEQ ID NO: 117652 - DNA, 201 bp, Zea mays
  Clone ID: MRT4577_38788C.1
aacgtctgaccctagctacttctgggctgctacattcctgatacaggaataatgaagttgcgtgtgcagatctcatctggcggatcgcaaccaaaaacaaatccttctgtgcgaagcactttggcaacatggggcgcctcctgtctataggatcaaagctcccaaccgcgtccatactatacactagctactagtactctg

SEQ ID NO: 117653 - DNA, 325 bp, Zea mays
  Clone ID: MRT4577_38789C.1
ggcttatttttttatttttttatttataacgggggcctttttaaaaataaacgggggtccaaacaaaccacgaggcctcggggggggcacaccctgtaccgccgaaccaatcaggccccaccggacctaacggggcccacaatacccgatgaacaccgccctgaaggacgagtatggaatccacccagactatccttgcttacaaactctctagttggcctccacctcaccgagggggcctggcggccagaaatcgcccgggagccggggcgaccacctgaaactggccactggaaagatgctccgctaggcagggggacgggcc

SEQ ID NO: 117654 - DNA, 1387 bp, Zea mays
  unsure (1)..(1387): unsure at all n locations
  Clone ID: MRT4577_3878C.1
ttcccggggccacccacgcgtccggccaccgcgtgcggctcccctatcccctgcctgctgtgttcactaacccacctccgccccccgttccgggtccccctccccgtcagaaggttccccagatttatagcccggagtagcggcggcgacggggcatgcgctcggagcccaaaccaggttacaacgagagcaaggccatccctgattccctgatgccttcttccttgagaaggcctccgcggaggcgttcatggagcgagtcgagtcggtagtgggcgaggtattcaacatcgtcaggcagtggcaaactcagcagcagaagcaggtccaggagttccaggcactacacgacacacacttggctccagatgagcattcatagtatttcgtcttccatgtcaattaaccaataaactctttaataattgacgtctcgatgatgtgttatcatccatgtttaacttaaatgtgttctagttctgaaataccaaagtttataaaacaaaagatatgcaacaaggaatcaacattgaactgtaggtgtatgtgtgatagcctaccaagtgtaaaagtagatatgttcccttggttaggtgtagctaaacatatggtgaaaattggcagaagggaaatggtcctaacattcattttttggaagaactatatggtatagactacagagttcagatgctcaaggtagacagtggctgtttggtttggaggtataacataaataaaatgttccatgttattatcgataaatgcattacatacaataaagaataccattgcatactttttttttatttcattctttattttctataaccctggttgtacctcacatgctactgaattctcttatatatatgatacatataagaggaagtatttcaatgagcccaaaaggctaaggagagagctgcaactgaagctagtgatgataaggggacaaggtctctaagggaatcttcagcaactactctaatgactacaccaatatcatctccccctactattcccacacagacagaatagttctagaattcttggtggtaataaagagttgttgctgaagtaaatgcagttctttctgcagccaaaaaaactttagttggctttcacatgatatgtggcgatgaaaatatgttttcgtatgaatggcatcgtgaggaagaacttttgcatctagagtgtttgggtatatgtaatatgttgtatgccaaatgcaacttcaaaaaccttggtaacaatatagaattagtgtcttgaattatgctatttactaatatttataacttagaatggggaattaattgcagaagctncagaggagaattctgaaagaatggtttaatcctagaaaaaatgaattaatgttcttttt

SEQ ID NO: 117655 - DNA, 357 bp, Zea mays
  Clone ID: MRT4577_38790C.1
tattttttttggtttggttttatgtttgtcgctgtggtttttgttacacacaacaaaaacacccaccgaccacggaaaacacgctttgatcaaaatggaacacagttttttatttacctcacacaatacagggggtacatacgacaccttttttggggctacctaaactgtgcgcctcgacctttggaataagtaggttccgaaccggaccttgacgtccttcacaaacaacctgaaataccacctcgactaactaacggacaccagggactctctatgcgtcccccttagcttttacaccagcacctagatcttgaggccggcttccaccccaatgaccgatttaatgcccgccct

SEQ ID NO: 117656 - DNA, 643 bp, Zea mays
  Clone ID: MRT4577_38791C.1
cgatgggtacctcgaggccggccggaaactccgtcaaattcggcacgaggtccctctcgtcggtctcttctctcttggtcggtcctggataaacacaaatctcttgcctccctccccctcctcttcgcctctctgcattgcggtgctactagctagcaaccaaatccaaagcagcaaagccttgcaggctagctagggaagcaaatcaatctcaggctttgccgctcgctctatacatccgtcctcctcgtgctgcgtgctgcgtggcgtgtgtctgtctggagaggtgaagcggcggaggcagcatgagggcgggcgggatgctgtgccggtcgcaggcggcgacggcggtgtgcgtgccgggggacgcgcggtccatggtggtggcccggcgcgccgccgaccgcacccgcgacagcgacgacgcccgcgccctgcacgacgtcaggtacgcgcgcctcggcgccggcgccggagacgggggccgccgcacctccgcttcgcggaggttctcggcgcccagcagggcccgcgcgcctcctccgaccggtaccgtcgtcactgcgtgttgcaagccgcgcgtggtgaggccgcggcgcgcgcccgtggccgggacgctggccgtggggaccaagagccccac

SEQ ID NO: 117657 - DNA, 2044 bp, Zea mays
  unsure (1)..(2044): unsure at all n locations
  Clone ID: MRT4577_38792C.1
gcgctagccggccgcgctcgcaccgtcgcgtgtcccattctcctcgtcgttcgaaactggcccctgcctcaccgtgtcgtgggcaccggcggctccacacgggatgtggccacgcctgacacctncacctccatggctgagtgacggatgagcggctgggaggtctcccgcggagcggctccactagccgcctcaacgtgcaggcgcaggagttcgtgccgcgcgctgccgcggtgcccctcccccttcgcaacagaagcggttgccattggtagggttggcaagttcggtccccaccgctgctgcagcgcaggtgcgaaacgaagctcccctggacggagctctatcgcgtagtacggagtccacagggcgaggaaagatgctagcaggcgcccccaccggcgatgcgggccccagctccggcgctgggagcaacccacccactcggccacggaggttccccggggcggcgcagccggagatcatgcgggcggcggagaaggacgatagctacgcagcccacgtcacggaggcatgccgcgacgcatttcggcacctcttcggtaccagggttgctgttgcttaccagaatgagataaaattgcttggtcagtccctttactacttgctaacaactggttcaggccagcaaacacttggtgaagaatattgtgatatatctcaggttgcaaccttgcatggacttccacctactcctgctaggcggattctattcattttgtaccaaactactgtgccctaccttgctgaacggatcagctccagaattgttgcccgtagtattgtactcaacgaatctcagtttgatgaccatcctgaaagtgataattctagtagtgacattgcacaatccaccacaaatagtgacattccttcaagaagcttaagtgtttctgctctgtcagggttcagaggccgagttcatgccttgtggcaatgggttcttcagaaatggccttcaatgctgccatatgctcaagattttatacagttggctatccggacaaatctaatgttcttctattttgaaggtctgtattatcatttgccaaagcgagcagctggtattcgctatgtattcattggcaagccaatgaatcagagacctaggtatcagatcttgggtatttttctgttgattcagttgtgtattcttggagctgaaagactccgaagaagtaatatatcgtcaatagctagttccattaatcaaatatcatctggaggctatccatcgactacaggtcggggcatccctgttctaaatgaagatggaaatatcatcagtgacatccgcagtggtaaagctgcagatatagcttctcattcagagacctccaatggcaagagcaaatgcaccctttgtctcagcatccggcaaaatcctactgccacaacctgtggacatgttttctgctggaattgcataatggagtggtgcaatgagaagcctgagtgccccctatgcagaactccgattacccattcgagtttgatttgtatatatcattcagatttctagcaaatcatttcgcacagtaggagtccatatcatacttcactggcgtcaaaatttccagaccatatttcggcaagaaaactgcatgccaaaatggtttcgtatacttaagtgggagaagagtacgagaccatttcaagaggttaaagatcagagagttgcatacgataatttgttgtaggttgaaagtttagattgaattagggaccacaggtagtagaaattatttattggcagttcggatagtagataacttgtattggacaccgatgtgaattttattggttagaacaatgtccgactcgaatcatcgagctatttagcaatatgttgtgtccattttcgtcgcacttataccagcttgtatgttttgactaagttaggtgcaggtatgttactataattttcatttatgtttgagtatagaatataaaatagctgggtggaaaaaaaaaaaaaaaaaaaaaaaaaaaaaaaaaaaaaaaaaaaaaaaaaaaaaaaaaa

SEQ ID NO: 117658 - DNA, 326 bp, Zea mays
  Clone ID: MRT4577_38793C.1
ccccagaaaaaacaaattagggggtttcaacaattaaccgggggggagggagagccccccctttgggccaaacagggggcattttgggggccaaggcccacctaaaatttggactggcctatgcaagggaacgggaaaaaaaaaacacacaggcctttgggggaataaaaaaaaccaggggcggaccccctttccgggccaaaaaaaaaggaaggggcaaaacaaagccggggagcctaattgccggggacaaaagggggggggaaggccccagccttgttgttgacggggccaccgagggggacaaagggggtctcgaaggggcc

SEQ ID NO: 117659 - DNA, 849 bp, Zea mays
  Clone ID: MRT4577_38794C.1
cccacgcgtccgcctctctgttttccaaaggtttcaagaacacgagcagccagatcacggcggcctacacctcggacgggcggtacgccgtgtgcgcgagcgaggactcgcacgtctacctgtggcggaccacccgggtgccgcctgccgcggccatcggcatcggcatgaagcccaaggcgtggtgcaccatccgctcctacgagaacttctactgcaaggacgtgtccgccgcggtcccctggacgcagtcgccgtccccgccgggcgccggcgacggcagccccactggcggcagcccggcgtcggcggacaagccgccgcaggtcgcgtcatgcaacgacgagtcctgcagcgtcgccgccaagccggagggcggcgatccgagcagctgcagcgccgccgctgccgagcccagcagctccgcgcggcagggtggcgccaagggcgacggcggcaacgcgtggggcctggtggtggtcacggcgagcttgggcggggagatcagggtgtaccagaactttgggatgccgttcaggatcaaaggccaggccaattttttctagtgattttgggcactcccgagactgcaattcgtttggctgttcctgttggtgacttctcttctcctaactatatcattttgtgtatgtgatgtgcaatgaaaatagtcaagggtgccatgatttggcgtgttttagctgctgagaagggatttttacttgtaccaaaattagtcaaagaaagaactttttaatatataacatgataatgcaagaaataagaggtttatatatagactagtataatggatagttcgttataccggcatataaattattcgataaa

SEQ ID NO: 117660 - DNA, 241 bp, Zea mays
  Clone ID: MRT4577_38795C.1
agatcccaacgtctcacgcacccctcaaccctaccgctgctgcgcaggcatacgacctccgtgtgcaacgcttcgccgccatgtcgggtcccttacactccagctccgaccataacgcctccgccggagcggtggtcaagatcatcgtggtcatgtaccagacgaagacgcagctagagcacatcctgcttgtcgcctggcacctacattggctcagtggagaagcatacccagacgctct

SEQ ID NO: 117661 - DNA, 338 bp, Zea mays
  Clone ID: MRT4577_38796C.1
agacttttcataaagagggcttaagaagccgcttctctactcactgacagcgcctcctatatctatataggatgtcatacctgatatatggcttagcacatgttcctccatcagatgaattactcttacgccgacttctgctgcgtctcctcgttttgcaatgtagatccgaatgatgagctgtgcccatgcattcccctacagcccgcaccgtgtcgtttacctcaaagacagtgtgaccatccttgttctacaaagtgctcctattggttgcttcctatatataaccagaccttctataatgtatggatctccccttcgcaacagcattaaccgca

SEQ ID NO: 117662 - DNA, 248 bp, Zea mays
  Clone ID: MRT4577_38797C.1
caaatctctccttcctcgcatacgcgcgcacaaccgagctgacaccaaagaacaagaacgaacaaccgagcaagcacaagcttagctaccgtggaggtgtccaaggcgacgacggccgccgcgccaggctagccaaccagctgctcgtcgctcgctagctgcggacctgtggctggtcgctgacgtcgacgtcgggacggagctccgtgtcgggctgccgggaagagtcgccgatgccgccaaggctg

SEQ ID NO: 117663 - DNA, 196 bp, Zea mays
  Clone ID: MRT4577_38798C.1
ctcggtatctagtttggctctccgagtctctggttccctcctctctgcggctgtgctggtctctcttcatctccggcgtggctgctggcgtctgacctcttcattcaagttagctaatgtcatgttgcatggatgcgcaggccatcctcaagggcccgagtgtggttaatgtgatcttcattggactgtcctttgg

SEQ ID NO: 117664 - DNA, 188 bp, Zea mays
  Clone ID: MRT4577_38799C.1
accaccgaaacaatggtttatttgggaacatgcacgactgtttgtttagtttacaacatttgattttgtttttagtaccatttactggaaaaataagcaagaatgttgttagcatccacatgcgatccatagaggggggggtttggggcaacaagggtttagctttttcctgccccccacgaaaactg

SEQ ID NO: 117665 - DNA, 295 bp, Zea mays
  Clone ID: MRT4577_3879C.1
ctagtttttttttaactaactgtgcaagcatacaactgcggaggaaaaactccaggtcgtgtatgtttcacttcactaattgaaaattactgccagaacatggtaattttataaagggtgccttccacacaacttacgaaggaggcagctggatggtgtttgggcgaagaagatgaagggcagagaggaacggagacggcctttgggcggcggctgcagataatataggaactgctggcagccgatactgcttgcgagttagtcccgccaaagctgctggccgctcaagcgccgg

SEQ ID NO: 117666 - DNA, 723 bp, Zea mays
  Clone ID: MRT4577_387C.1
attgttccagtacagcgtctcttcctatcacaattaaccttgtgtccctcactagacgttggctagcaagaagccatggcctctacttcgtctctatcagccgtgttgctcttgtgcctggccatggcggcgtcggcgcagctgtcgccgacgttctaccaaacgacgtgcccgaacgctctggccactatcaaggccgccgtgacggccgccgtgaacaaggagaaccgcatgggcgcgtcgctgctccggctgcacttccacgactgcttcgtccaaggttgtgacgcgtctgttctgctgtctggcatggaacaaaacgctatcccgaacgtgatgtcgctgcgaggcttcgaagtcatcgacagcatcaaggcgcagctcgagaccatgtgcaagcagaccgtctcctgcgccgacatcctcaccgtcgctgcccgcgactctgtcgtcgccttgggagggccttcgtggacggttcctcttgggaggagggactccaccaacgcaaacgaagcggcggcgaacaacgagctacctcccccattcttcgacctcgtcaacctcacacagtccttcggcgccaagggcttcaccgttaccgacatggtcgccctctccggcgcccacaccatcgggcaggcacagtgccagaacttcagggacagactctacaacgagaccaacatcaactccggctttgcgacgtcgctcaaagccaac

SEQ ID NO: 117667 - DNA, 358 bp, Zea mays
  Clone ID: MRT4577_38800C.1
cattcttttattcttcaaaagctgaacatcaccagcggggactcactatacagggtcgagttaaacaactcatggaggctattccatcatttcatcattctatatactaactctcaaaagaagttaatactttatctattaactcaatttaccaattaaactctaaactgccactgccattacaaattgcacggtttccaacatcaaaacaaatcttcatttaattttcttacatcaattcttatctctcttatacacactttcataagccttaaatcattccttctctaaatctaccaccattatttattctgactccaatttcttattttaaatgaatacatacacaaaaacttat

SEQ ID NO: 117668 - DNA, 279 bp, Zea mays
  Clone ID: MRT4577_38801C.1
ggaggagcttaaataaaaatttttttttatttaactggtaaaatttcaagaaaaaaagttcaacttgacacatggttaagcctttcataaaataaaatgaggttttttttatacacactggccgacagaaaattagagaagagttcagaacagcgccaatttttggaaaaaccaggagggttatttaaaaaaccagccaatttttgagggcctttaatttttaaaaaaaccaagtggggagtaaatttaaattttgttaaaaagaaaccaatttttttt

SEQ ID NO: 117669 - DNA, 389 bp, Zea mays
  Clone ID: MRT4577_38802C.1
acacggtggttttttttttttttttggtcttttctaaaaacacacggtggtgcccaagaggaaccccccggccagccagcaaaaaggggggggggcggcccacacaccaaggcgtatagcaaacacaaccagggggggggggtcccaagggggggggggaaagaaacaaaggatgccggtacatgcgacacatacgccctaaggacaggataattaacagggggtactacagctacggggatccgcggaacccaaagcccagatctcctgcgcctgggggcggtgggggttcttcccgggggctaccggattcccctgccacttcatcctcccatgaaagcttggctaacccgccctggaatataactttgacggcttctttctttggg

SEQ ID NO: 117670 - DNA, 1182 bp, Zea mays
  Clone ID: MRT4577_38803C.1
atctactctagaaaaataagcatccatctcctcggttcagcccacaggcaacgaacgcacgcgagcgcgcgagtgagcgagcgagagagagaaagatggcgaacctgttcctgaagcaggcgaagcactacgcggcggcgcggccggactacccggcggagctcttccacttcatcgcgtccaagacggcgcgccacgacctcgcgtgggacgtcggcaccggcagcggccaggccgcagtctcgctggcgaagctgtacaagaacgtggtgggcacggacacgagcgcgcagcagctggcctacgcgccggccctccccaacgtgcgctacgcccacaccccggcggacctgcccctcgagggcatccacgcggccgtcgccccgccgggctccgtcgacctggtcaccgtggcgcaggccttccactggctcgacctgccgcgcttctacgcgcaggtccgctccgtgctgcgccccggccacggcgtgctcgccgcctggtgctacaccgagccacgcgtcgacgccgccgtcgacgccgtgttctggcgcctgtaccacgggtcccagggattctgggcgcccaaccgccggatggtcgacgacgagtaccggagcgccgacttcccgttcgacccggtcgagggggagaaccacacgggcccgttccagttctccacgcaccgccggatggacctcgatgactacctcatgtatatcacgtcctggtccgcctaccagactgccaaggataacggcgtcgagctgctcgatgcgcccaccgtccaggagttcgcggcggcgtggggcggcgatgccaaggaggtgaagaccgtcacgtaccctatcttcctcaggattggcaaggtcaggtcggagtgagctgcacggaaaaatgaaactcgacaaactatggatacactacggacgctccgacgattgatgatcgatcatctaggaatcgatgcttataacctttttgaataatgttttattcgattgcaaatgtttgttcgatctgcacaattgtatttcaaattctaatgcatgcactattctgttcgacttttcaaaaaaaaaaaaaaaaaagcggccttttttttctctgggtcttcctgatagtgtaaatttcaatatctatactgtgatgacaaaatattcacaataacccatgtgactg

SEQ ID NO: 117671 - DNA, 287 bp, Zea mays
  Clone ID: MRT4577_38804C.1
gtcctggataagaccaagtttctggtcccagaccatgttaacatgagcgagttggtcaagatcatccggcgccgcctgcaactcaaccccacgcaggccttcttcctgctggtgaaccagcacagcatggtgagtgtacccacacccatcgctgacatctatgaacaggagaaggatgaagacggattcctctacatggtctatgcctcccaagaaaccttcggcttctgagtcaagaggaggggtggggggtggcggggtctgctcgtcgtcttccccagggaggt

SEQ ID NO: 117672 - DNA, 369 bp, Zea mays
  Clone ID: MRT4577_38805C.1
ccataaaggggttttttgggaacccgcaggaaacaaaaacccccagtattgcacaaacgtggttaattttaggggacaacgccaacaaaacatctggacttgcctttgcaaggcaaccggaaacaaaagaaaaacaagcacttcggaaaattaatgaatccccgttccttcacccttttcaaacctaaaaaaaatgaagccgaatataaaacccacggatcttattttccagggacaaagggggggggatttgcccacacctttttttttgctggggaaccaagcgcataaaaaggatctttagcgggcccttgccggagaggagggcccggacaaaaaagcccaacatggaaaacatggcaaggcggg

SEQ ID NO: 117673 - DNA, 1325 bp, Zea mays
  Clone ID: MRT4577_38806C.1
atcctcgaggccggccgggggatgcgtccataccagcactaaagcaccggatcccatcagaactccgaagttaagcgtgcttgggcgagagtagtactaggatgggtgacctccttgggagtccccgcgccggccgggaacctggttcaaacacctcgcttcactagaggaataatctagcagcttctgttgcctccaaattgtccggagaaaggagttgaagcagtgtgagagggccctgagacgatggcgaacctgttcctcaagcaggcaaagcagtacgtggcgacgcggccggtctacccgccggagctcttcgacttcatcgcctccaagacccctcgccgcgacatggcctgggatgtcggcaccggcaacggccaggccgcagcgtcgctggcgaagctgtacaagcacgtggtgggcacggacacgagcgcgcagcagctcgcctacgcgacgcgcctcagcaacacccgctacgtgcacaccccagcggacctgcccctggaggggatccacgccaccgtggccccgccggcctccgtcgacctcgtcaccgtcgcgcaggccttccactggctcgacctcccgcgcttctacgcgcaggcccgctccgtgctgcgccccggccacggcgtgctcgccgcctggtgctacaccgagccacgcgtcgacgccgccgtcgacgccgtgttctggcgcctgtaccacgggtcccacgagatcctgggcgcccagcggcgacttccgacgacgagtagcggagcgcggacagcacgcgggcccgttccagttctccacgcaccgccggatggacctcgatgactacctcatgtatatcacgtcctggtccgcctaccagactgccaaggataacggcgtcgagctgctcgatgcgcccaccgtccaggagttcgcggcggcgtggggcggcgatgccaaggaggtgaagaccgtcacgtaccccatcttcctcaggattggcaaggtcaggtcggagtgagctgcacggaaaaaagaaactcgacaaactatggatacactacggacgctccgacgattgatgatcgatcatctaggaatcgatgcttataacctttttgaataatgttttattcgattgcaaatgtttgttcgatctgcacaattgattgcagatgtttgttcttcacaattgtatttcaaattctaatgcatgaaaaaaaaaaaaaaaaattttttttcaaaaaaaattcctgatagtgtaaatttcaatatctatactgtgatgacaaaatatccacaataacccataaaactgtaaaatatttatttattaatat

SEQ ID NO: 117674 - DNA, 751 bp, Zea mays
  unsure (1)..(751): unsure at all n locations
  Clone ID: MRT4577_38807C.1
cattcgaggccgcgagggccgacgcggcctcgaatccctctttcttcgcctgctggctctctcgtcgtccgttcctcgtcctctccggcattcgaggatagtttttcgccgggggcggcctagaaatcagccgtcaggtgaaccgggaggggtggttgcctgaggaggaagagatgatcacgcgagcgaagctggtggagcagctgcgggagcaccagatccggtcggcccagtcctactccgccgcgctcgccgtcttctcgcccaacccccacatcgcctccaggagagatctcaaggttgctgtcatctatgcggtcctgttttgttttctcatggtgtcctgctatgccgccctttacttgaaatggttcagactttcagccatgtttgtaaccttcgggatcctccttccagtgagtctcaaaatctctaggcatagaaggctgaagaggaaaagagaaaggagactgttgttgccactgtccatgtgaatacattttttttgatacaccctgtaacattctagtggagttggccagctacagaagatagggaaatcctcggcagacgaactcaactttacggccccagcctacgctttggaaaatgttgtatgcatcacctgttgtgcttctgtcctccacatgtgtacacacacacatacgtgccgaacactttgcgttgttttgcccccaaaaaaaaaaaaaacccgcggccttcgttccgttgaagtcgaaaaaaaaaaana

SEQ ID NO: 117675 - DNA, 435 bp, Zea mays
  Clone ID: MRT4577_38808C.1
gttgcacgcgtccgggggcggagagttccccgcgctcatacgggggccaccccatttccatcccccaaagcctaatctaggggtctacggtccgcgaatcaccgtacctgatggcccccaagcgacgctgagcggatcagggctcgccggtgcctgcgccacctgacttctatgcggaaagcaaaacttcagacggagggcatcttagacgacggcggcggtgcccgttcctgcgacgactggatggaacattggaagaagatggcggaagacgcattatacgctgaagtcggggcgacctgtggctacccatatatgtagggagggaagcgcacggcgccgtcaaaggcacagaagcttgttgatcaccacgtgggcattgagaatgatgcatgggtcaagtctcaggggcacccatctgaacttgatggggaa

SEQ ID NO: 117676 - DNA, 389 bp, Zea mays
  unsure (1)..(389): unsure at all n locations
  Clone ID: MRT4577_38809C.1
ccccccnggaataattcccgagagaacacccgcgccaagaggggcactttgtaggaaagacccccgggtcgcgggcatcacctgcgcacgacgaacaccccacagaaacagagggggggccgcccccaaaacaaaaaccccgaaaaggctaaaagaccacgcggaaaaacccccacaaagggagaaaagggccggggggacgagggccccctcaggggccgggatcagacgagctctgtgggggggcggtccaccatgaccacccacaggccggggggcgagttcgccagcacaaacaggaacaccactgccggaggggaaaaacaaacaggccaaaacgggcccgtgggagcagggggggcaacttaaaaaccgggagacaacccccc

SEQ ID NO: 117677 - DNA, 242 bp, Zea mays
  Clone ID: MRT4577_3880C.1
ggcaaacagtatcaagaagacaagatccaaattaaagaagtggtgaaatctggaaagattcctatgacaacttcatggacattagaggaattccaaactgctactctggaggatgatgctcttaaaggaatatcaaccatcaacatcaagcttgtatatgacgatcagcttgaaaggcaaaaagagagaaagagcgtgaggagaaagagaagaagaaagagaaagagaaagaaaggaaggag

SEQ ID NO: 117678 - DNA, 369 bp, Zea mays
  unsure (1)..(369): unsure at all n locations
  Clone ID: MRT4577_38810C.1
acgggtaacaacgcaaacgcgggaagcctttgatccctggatcgctccatctcttggacgacaaaggcagagggtgcttccgtcagctccacgtatatctgacagcttagaggcgtcaagtctgaaaatttgcccctctttatagttcaacattcattctgtttcagtcttggaccgttaagaatcttaaaacaatttgctcgacctggctcgctgaggctccctataaacaaagaagcagttgcgcttaatagaagttcctatcttttaaattaaaaaaaaaaaaaaaaaaaaaaaaaaaaaaaaaaaaaaaaaaataaanaaaaaaaaaaaaaaaaaagggctttgcgttggtccaccgcttagggg

SEQ ID NO: 117679 - DNA, 159 bp, Zea mays
  Clone ID: MRT4577_38811C.1
tctttttgtaaaactagtacggaaatggcgcgcaggcgttgttcctaacgcgacggtaagatgtaagcaccaagcaatccacttttctggaggagagcaacttcctggaccatctccaggagagcgagcgacatgcgctcgtcgagctccacgacaagg

SEQ ID NO: 117680 - DNA, 563 bp, Zea mays
  Clone ID: MRT4577_38812C.1
gcccacggcacgtggagcgcgctccgcgccccggctgctcttttttcactcggcctggctcctctcccgtcggtcgcggcggggcgcggcgctgccctccgtcatccgcaggaatttctgccgctctctaaggtgggaggtgttggcgtgcgcgcttgccttttggaccctgggacggctgactgcgaggtggaactcgccgacttccggtgcgcctgaggctgcacctccttggatcttcttgcgatgtgtgccgcctccctgccaaactctgaggagagggggacgaacttcttctgtgagcgcatgcccgctgacgatgagatccgctgttgctcggggggctgcgggtgctttggcgtccgcggcgggttgtctggtgggttcgaattccgatccggggtggtgacctggtcctcgctcccgctcggttttatcatcgcgccgccctcgtcggcgcttagtccacgttgctcttgaggcttttcattggggaaccagtctggaccgggttacaccgccctttcgaggacccccggcttggcatgcgtttgttatgaatg

SEQ ID NO: 117681 - DNA, 497 bp, Zea mays
  Clone ID: MRT4577_38813C.1
cgatcgcgagcgcatgcacgtacgttgtcggaagcttatgttagaagaagcaccagagcactgatcgatggcgggccacgctcttctctacggcctgcagctgctggaccgtgctgagcagtatcatcgtctctaggtcgtgggcgaggaaagaccccttcgatgaaagagtcagctacagccatgcagacaagcaaggtgccggcaggcatctgtggttctcgtccaagcaatgcctctcctacctagatcgcactctgcactgtgactatggcttacacccgttgggcctataggacccggagggcaccgggggctttatcgagcccaagtggctggcctatggcagaggtagatacaacggatcgctacgccatgctgggcaccgtgggcaccatcgcccaagagatcttaagcaagattggcataatacatcctgagaccgcgctgccgtggctcaagacggacataattcctgccgatggcacctacaacta

SEQ ID NO: 117682 - DNA, 367 bp, Zea mays
  Clone ID: MRT4577_38814C.1
aaaaccaagcacaacgccggggaactttaacagcctataaaaggagggcccaacatcagggggggtttaggggtcccacccctgtccgttcctttttttaaaaaggaaacggtcctttttttataaagcaaaggttacttcggggaaaacttgaataaaggggggggggtaacaacaagggcgggggggccccacaaaaaaaaagggcccagggctgttttgtctccccaaaaccaaaactggaaaatatgcccccggggggggggattccataggccaaacaggggggggcctgcataaaaaaccactcttaaaactaaaaaaacaagtttaaccggtcgatcctgggttttttttggcggggaag

SEQ ID NO: 117683 - DNA, 1648 bp, Zea mays
  Clone ID: MRT4577_38815C.1
cgtccatttttttttttttttaaaagcccagaaatcggtattctacacaccttgttcatcatgaatttttttgtcagagttacagttcagcgtagcagcacacctaaagaaacgattgtttgcaccaagaattacagcccctggaactcaggcctcggcatgagatgtatcccacggcatctcttctttctttctttcttctttctctatcaccaacaatcagcaatacaactggaatttgtaaggtactacctccgttcttttttatttgtcgcatttagttcaaaaatgaactagggggcggcaaatattcgagaacggaggtagtacatcagtagggggcaccctgccctcaggcccaacgcctgctagttgtcgtgattcagcgccataaacttgcactgctcactcatcgcctggagctgcgcctccttcttgtcaagcattgcgcgtagcctcacattctcctccatcactttgtggacttcagcttctttctgagctttctcactctcaagctggttagtcttggctactagtctgtcaaagagtttctccaggatctcaaattgcttttctgatgagagaagagtttctctaacactaaccagagtgctaacataagttctcagcgactcgaaatcatgctttacccgactaagctccacctcattttcagcagcgcgctgtctctgccgagtggtctccagcaccatatcctcaaccctttgcctcatctcattcaacatcccgttcgtgccaacggcaaacttctccatctcctcgactttggcggacatagtctcaacctgcaacgtcttcctcctgatctcttccaaccccatcctcaccttttctttctcgttagcagcttcggactcggccacaatcaccctcttcacaagcgactccatcacatccgtcacgacgcggatggatttgagaatgtcgtccacatccacatcccctccaacggcatcgccatgctcaggacgagcaccaccctccgccaccgtcccgtcaacggaagctcccccgcagggcgcagggtcggcgcccttaggccagtccgccagcggcaccccgtgccggtcgacgtacccgacgccatcctgctgcctgatcccgcaggaggtgtgcgcgaggtgcggtatcgccatgatcctcgccttggacttgaggtacgccagcagcgtggcgatggtcttcaccctgcggcacaggtgttctagctccttccgggaatcgccctcggagcaccgcaacccgaccttcgcctccacgagccgctcccgcagcgcgtccacctgagactgctgctgccgcagctcctcccgccattcgcactccccggcgggaaaatcgctccgatcgggagcggcaggctgctccatgggtttgacacaccctccttccgaccggaggcgtgagcacgaggtcggcggcggcggcggatcgggtgggcgccggcgccgctgcggcggcctgtgacttcgcctggggcacggcggcttcgcgacgctagttgctcctcgtcgtcaccagctcgtcgcctttccccttccttcctccgcctacccaccctgattctgattgggttttggtatgcttcattgttccttctcttttcgccggcctcgaggtaccc

SEQ ID NO: 117684 - DNA, 293 bp, Zea mays
  Clone ID: MRT4577_38816C.1
aattcggcacgaggggacgtttgagtgcttgaggaggccaccgccgcgggaacacgaaccacctccacttcggctgcaggtccagccgcccggcgcagatcacggggccaggtcgtctccttcgccctcgctcccgcgtcgtcccgccgggtccggctccgttgccgcgcgatgcagcagcacgaggaggagcaggagcggccgccgactgtacgcgcggtcaccatccccttcgccgacctcagggtgccggacagggaccttggcgacaagatcgaggaaggtctgggtcc

SEQ ID NO: 117685 - DNA, 444 bp, Zea mays
  Clone ID: MRT4577_38817C.1
gggaaaaaaactttttttttttcatttaaaatgggcattaagggaatgggtaaaacgggcccggccccccaggggggggggggacccatttttccccaaataccggcggtaaaaggcccaacttgcttgctggcccgggggttttccacaaaaaaaattttttttagggggggacccccccgggaaaaaggtaggggcatggggtcggttttttaaggccccaaaatgcccgaaggtggtgggttttttgggccccaaaaaacccccaaaactggccctttttggggttttttttcaggatggcccgggggacccaacccaaaaaccccggggcccgggggtgggggtccccccggctgagggggggggaaaacttgtgcccaaaaaactgggctttgggggaacaatggggggttcccccgggggttcactgatgccccaaaa

SEQ ID NO: 117686 - DNA, 447 bp, Zea mays
  Clone ID: MRT4577_38818C.1
tgctccttgctctgttaggtgattgcggtaagctgaattacttttgaaggactagtttgaattggtggttgagaggtggaaaatcgaatatatcaattctgtatctaggtctaaatagctcgagatcttggtccgagtgtggtggtatgctcaatccatggcgctgcaggtggcataattgattggctagattgtttcttcttttctgcagttagtggatgtttttccaatttgtagagctagtaatccactagcgtgcgctagcggtatcctatcatctgatctagctatttagaagaaagaggagctgcatcagtgaattttggttgcatctgcagatgttgtgctaaagatcatgtctgtcttcatgacacattaagatatttgattcataaaaggtatcagcaccagtaatgaatctatcctttgatttgatttctccctgct

SEQ ID NO: 117687 - DNA, 583 bp, Zea mays
  unsure (1)..(583): unsure at all n locations
  Clone ID: MRT4577_38819C.1
ggccgcttttttttttttttttttagctgcgggtgtcttaattcgaaaactcgatacacatccatgttcaggtagcaggggtacatgcatgtgatagcgcaacaatcatagtaataagaatacatccactagtcttggcttgtattggcacaaagggggccacgggcacggcctatacatattatacggagaatgcccatgcagaggggccttgcattatttctcttgttcctggcgacaacatgcatgcgtctccattattattctattcagcaaaagcatcacatgttggccttcatgttgagccgngtggcaatctttatgcccagggactcgtctcacttgccgaggaggcctatccagatggacctgacctcctgtctgacctttgggagtccgagcgagtcggggaatagcctcactaatcgagcctgtcgctgggcgtcccaggagcgtgacctctcccctggctgcttgaattcgtctggcttgcgtatggttgacttgtccctcctccccgaaccggactgagcgatactgtagtggacgaggccgactgccgcaacggcgcgtgcctggacgg

SEQ ID NO: 117688 - DNA, 391 bp, Zea mays
  Clone ID: MRT4577_3881C.1
caccacaaccaagggtaaaaccctttgttttttatagggcgaggggcagtacaccaagtttggggggtggccatacaacaacgttttggaaaactgggaggggtcactgatagtttggcaccccatgttttaaaaaacccactgggggtggttttatttatgggaagagcttaaaaaaaaccccgaaacgaattgcccccatgactttaaaatttaaaccaaccttaccaaaaggaaaaaggggccgccgcttaattgtagtaaaacttgaggcccattcccccggggaccccgtagtccctgagggggaagggggccttgtaaaagttggaccacttttggatggggaattttttggggggggtccccctttgggccgccaccaaatttt

SEQ ID NO: 117689 - DNA, 155 bp, Zea mays
  Clone ID: MRT4577_38820C.1
cttggtatcggctgccgacgactttgacccggatcttgctgctgcccctgaccctgccccttcgggggcaccctagtccaacatcaacgttaccagcatcctccaaaatggcgtgtagttcaccactctgctccacctgctgtacgcctccctta

SEQ ID NO: 117690 - DNA, 249 bp, Zea mays
  Clone ID: MRT4577_38821C.1
gtcaagcttgtccccacccatgtggctttcaacgaccgcgaccaaaaaagcgcggacagcacgttaagttatgcggacaacatcacgctcaagtgcgccaacaccctagcatgccagttcctccaactcaataaagacggactgaaagctagtcgataccggcacaaaactatcgaagagcgcaggaacgccacagtactctataacgtccacaaacgaagtccatcgcatctgaaccaattgactaac

SEQ ID NO: 117691 - DNA, 266 bp, Zea mays
  Clone ID: MRT4577_38822C.1
ccgggaaggcccgggccggcccacgcgaccggttcacgaactacaaagaagctaataaaaacacttgtattgaaagcgatgtgctccacctccaggcaggcattgacgaaggtagctacttagcaacagagaagccccggctacataggctacagaaggcatcaccgaaactgtccatgaggaaggggctctcattgggtgaccatacctaggcgaatacgggggggaagacctagagggcgaaaaaaaaaaacaaaaacaagcag

SEQ ID NO: 117692 - DNA, 122 bp, Zea mays
  Clone ID: MRT4577_38823C.1
acgcggccgcggactgaattgccgcgaccgacgcgcccgctagttctagatcgcggagcctgccgttctaaaaggatctcaggctaaagtacgcgtgcatgcaagcgggttaacttttctat

SEQ ID NO: 117693 - DNA, 210 bp, Zea mays
  Clone ID: MRT4577_38824C.1
aaaacacatacttagcccgggcggggaattaaacagccttggataggaaatgcaagaaaccaccaacaagagtgcgatacataccaaaacaatacaaaaatcatacccaaaatacaaaggaaggcagtctcccaacactatacgatctaatgtgactgaggaaacaaaacatataactagaggtgccaaatccaggcttccagtataatc

SEQ ID NO: 117694 - DNA, 3161 bp, Zea mays
  unsure (1)..(3161): unsure at all n locations
  Clone ID: MRT4577_38825C.1
gagtcgggattggggaatgcgggatgcgtgtgacgcgtggaccccgcacgcaaaccctagatcggaagccgcacccgggcacatgaccgccttatccccgagtcagaccagcggcggccggaaccgggagccccgttgctggccacgcccccaccgctcgcgcgcgtcgagcagcttctcgtcgtagttgagcctacgcttggcgcctaccgccggttccgctgccgggtgtcctcccttcgtgccgctgacaccagagggtaggatccccgcgctttcgaccagcagatcccgccgcgacccaggaaggagacacttatggggaagggacaaatattagctgttcttcaaataggtggagaattcaacaccgatgaagatggacacatgtcatattctggtggagaggcacatgctatgcatgttcaaagtgactggacttttagtgcatttaagcaagagatatcgtcaacacttaacaatctgaagcttgaccagtttgcattcaagtatttccttccaaagaatgataaaactttgatctctatttccaatgacaaggacctacgacgcatggttgaattccatgcggagtcagattcgacatacatttatgtcatgaagaaagctgacaacagatcaaagaacattgttgctgtcttggacactcccacagatgcctttgcgattgtcccaacaactcaggatgggtctaagagacaaaaggtttgtgcaagttggaagaatgtgataactggagttggccaagtgtttgaaggacctaaggatttccgtgatgccttacataagtatgccattgcacatagattccattatagatttatcaagaatgactcatctcgtgtgactgctgaatgtactggtgaaggttgcccatggcgaatacatgcttctaagtcccctgcaaagaaagaatttatggtcaagaaaatatctgaaagccacacctgtgaatctgaaacagtcaaaagcaatcggttggcttctcaacgatgggttgctagtgtcataaaagaaaagttgcgtgatagtccaaactacaggccaagagatattgcaaatgatcttcaacgagagtatggactatgcctgaactattcacaggcttggcgtggaagatcaattgctcagaaggaactttatagtacacactcggcggcctgcagtcagttgccttggttttgtgaaaggattgtagagacaaaccctggaagtgtggcaactgtagtggccttggaagattcaaagtttcgtttttttgttgcattccatgcatcgctccatggttttgagcatgggtgcaggccgctcctttttcttgaagcgataactgcaaagccgaataagcactggaagctactggctgctgcttcagttgatggtgaaggtgatgtgtttccagttgcttttggtgttgtggatgacgagtcgcgtgaaaattggcattggtttcttgagcaactaaaatcttcacttggcacatctcgaaccatcacattcatatcgaatggagaacatggactttgggatgtattatcttcagttttccaagagtgtcatcatggctactgtgtggagtctcttattgaagaatttaagatgcaactggatgatgcatggactgaggaactaaaagattcgatggttgagcatcttaagaaggccataaattcatgcacagctgatgagttcaatcagtatattgagctcatcaaaagtggttctgacaagcttgctgattggctcttggagatcaaacctgagcgatggtcagatgcttttttcaagggatcacgtcatgggcagtattcttgtaatatttttggcactgtgtctgagtggattcccacgagatatgagctttcagttgtgcaattggttgacacgataagatgcaagctgatggagatgatgtacacacgcagagagtcttccaatgcatggactgaggtattaacaccggcagccaatcagaaacttcaggaagaggtgaacaaagcccacaccctcaatgtccttccagcagaaaacggtgaaaatggcaatgtgtttaaggtctgtgatgactcagttaatgttgtcaaccttgacacatgggaatgcacctgccaaaggtggcatatttctgggctgccatgcatgcatgtgattgctgtattggagcgcactgggcaatatgcatatgactactgtgtgaagtacttcacaacagaatgctaccgcttgacctattccttgtcaataaatcccatacctgatgttattgtgccgcctacattaatcgacttagctcagagcccagcaacatacccatgcccactgcgaacccgccgtcgggttggccggccaaaagagaagcctgctgatcctcgcattgcaatcaagagggcagtgcgctgcagcaggtgcaagggttatggacacaacaaggcaacctgcaaagttcctatcagcagtttcagcacgtagtatttactcatcaaatcagttgtgcagtgtgcattagtgtggagagttgttcgtgttattctctgcaatgttagtgttgatgtttcttttgatagtctgtgatacatgctagggatgatcttagcttggctgccaagagaggagtctgctgatcctcgcattgcaattaagagagcagtgcgctgcagaaggtgcaagggttatgggcttatggccaccacaaggcaatctgcaatgttccgatcagcacatagtatttaatcattggatcagttccgcaatgtatattaaggtggagagttgttcgtgttaattctccaaaatgctagttctgatgtttcttcggatagtctgttatacatgcaagggttgatcttagctctaaattgatctgtattttcaccattgcttagactaactgtattcagcttgtgagtaaaacgccgtagcttatactcatgttgctatccactttactcactttcttttccgttgtgtctgctgtgtggcttcctcgccatctcggcaactgcaagactanaattagctattctcgttccttggagcactacattattttgtttgctgttcatcaacgtcctgaaattacactggttctttcgggattagtttcttattattggcagaacactgaacattgacctttttcc

SEQ ID NO: 117695 - DNA, 389 bp, Zea mays
  Clone ID: MRT4577_38826C.1
ggggggggggggttttttttttttttttttttttttttttttttttttttttttttttttttttttttttggtttttttttttttttttttttgggttgggaacccaattaaggggtaaattggaatcacattcccaaaaaaaaaaagggggggggcaattattgggtcgggtaagttaaaggctaatttttggtaccataccatgggcattgaaaaagaatttgggctcacagtttttatggggtaaaaatacaacaaaagggggcagatctttttaataagtcccatcaaaagtcccaagggaaaaagcccgggagggaatcacaggggatttattatccgctttatttcccaaaaactccttggatcgggctccgctttaggcctt

SEQ ID NO: 117696 - DNA, 171 bp, Zea mays
  Clone ID: MRT4577_38827C.1
gaggatgccacaccaagcgccaaactaacaattggacaccatgcaccaggattagaggggggcctcatggatggtgggagggtccccccctacaacccacaccacccaaacacctttgattagaccaccaccattcaggcacctctcggaaccaatccaagaaccaatcca

SEQ ID NO: 117697 - DNA, 235 bp, Zea mays
  Clone ID: MRT4577_38828C.1
atatgaatcggtctcatggatttgtaccgttttttattgtcatgccgggccaggcctatcttaattaagcaagaacttaagctggctcaaaagaactccgtaaatggaccgctgtgggcatggtccaatggtgccatgacgggcagggaccagcggctcatgcggatcatcgatgatcggatctagcctcgaccgcacgttagaggatactctctatggaatgaacctacacagg

SEQ ID NO: 117698 - DNA, 650 bp, Zea mays
  Clone ID: MRT4577_38829C.1
atagtcggactcgtagctcgacctcgaactagctgtgcaattaactacgatagaaacttggctgatgatctcaagatggctgacatatgcatgctgcaactgaccacaggtcatgtgatagcaactgccggagcaaaggcgtcgatcgcgcacgcggacaacatgactaccgttcaccggctgctcgcggcggaccatgcccgctcacactccgataggacgagcaacgtgcccctgcacctccatgactccccgtcgtcgcatgtaggcctgcagagcacagcgaactgagaactgctgtcttgcatgcccgcgactccgtggtgatgatatggcttgcaaaggacggacccgcacacactgcttgctgctcccccgagactccgcgatgttacttggtgctgcacataacgagtacgaataactgcttatgaacccccgctactccatggtgctgatgtgacgacgacagcactgccgcaaactgagatcgtcatgagaagatcgatgcatgctgatggatagtgggctctaaataaatgctagcgtatcgtccctgacgcgtgacattgctctccgcaatagtacgcacgtgtacaggggctgcatgctgctacatctgcatgcaccggagtaccgctatgttcgct

SEQ ID NO: 117699 - DNA, 487 bp, Zea mays
  Clone ID: MRT4577_3882C.1
aaaaaaaaaaaaatttttggacccccgggggggaccggcccccgggggaaaaaaaacccccccaaaaggttttttttttttggggggggaaccggttcgggaaaaaaaaaaggggcccaaggcccgttaggccggaaggcaaaaaccccccaccctccctcccgggtttttttttcaaaaaaggttaaacaagcgggcccgcccggttgggggaaaaaaccccagcccccggaagctaaaggaaagggcccttccaaggggccccgggggggtttgccccggagggggggaactccaaaggggggggggggggccggcccagccctaacaagggccccggggtttaatggggaactgggggggggggggggcgggcaaaatttcattcttttttgcgcccaggcgggggcctcttggtttttttggaacaaacccggggaggcttggcggcgaggccttctggggggagaggtttttctggttttgg

SEQ ID NO: 117700 - DNA, 516 bp, Zea mays
  Clone ID: MRT4577_38830C.1
cttttgactagacagatgaaatttgtcctgaatcaacgttcgcttgctatgacccacgatggtgctatgggtggtgtttcccgcacacttactatatatgccagtgactgtgtaacacgaattttaccctggagagacgctacccctttcacaatactgcttgcaaccccaaaactccctcatatgatattcttgtggttctgatccctgcatcgcattggacctggtacccgtgctacacttgctcgtaaagatcttgactgtatctgacttctactagtaggatttccgactgaactatgttaggacacagtaatattacactttcgacacgtatcgctgattgagatcttctcccctagctctgtgatgtgcgggctgagctgctgggtactggaaagcatgtcaagaacaaaatcaagttcggccctgcgacgtcgtgcgatttagaagcagagatcatctcgtcgtggaggatggactaattgacgtaatccaacctggcgagatccacga

SEQ ID NO: 117701 - DNA, 469 bp, Zea mays
  unsure (1)..(469): unsure at all n locations
  Clone ID: MRT4577_38831C.1
cccgggcgccngnncaannngnggagcaggaagncggggccgcagacacggggagccncgngagngacccaagcaagccagcaagcganncaacacnncacgcgcancnncagnacganccgcaaaccacaagncgagcaacccnaaaannnnaagcaaannanncgccncggcnccccgcaaaccncncaacggcgcgccggggcccgcncnncnnngcgacggcgaaanaggnggagaacggcggcgagcagccccggggacagggcggcggcccnccaaanaacgccgggcacgcaaagccgccnccgggagccaggccgccaaggaggnnccgacgcngcaggacggcgccnnccaccgacgcggcgcangaancncccccgcggagccagcaggagccgagccngcagcgcggcaccacccagcgggcgccgcccaaggagcggcngcggggcgcgcggccgag

SEQ ID NO: 117702 - DNA, 198 bp, Zea mays
  Clone ID: MRT4577_38832C.1
gcaccaaaagtggagtctagctctgcaaacggttggctaccatcactatacggagattcataattggttccatgctcacgggtggactgaccgactgacgacgacgagggtgatacgttctatatcaatagagacggaattgaatatatatctcacagcgataaaagggcgagtaggactacatagggggagttggtg

SEQ ID NO: 117703 - DNA, 432 bp, Zea mays
  Clone ID: MRT4577_38833C.1
gggaaaaggccacaaaacaaaaaaaaaaaatatttaaattcaacccggggggtaatttgcaccccccccccccgggggtttggcccccatattcaggaccccaaactaaaaatggatcaggaacgagcatggtcccaaaccccggggcccaaaacaacccaggggaaaggaatttggaccaaaaccccaatgggggggacgctttgccaataacccccgaaaggggggcacccgaagaaaaaacccccccgaactggggtggtttgggggcccccaacttaagggggaggcctttccacaaggggttaaaaaaagaaaaagcccccgggggattcccaaaccctaccacaaaaaaagggggggcggggttaaaaacccggggggaaaacaaaaaaaaaaaaggggtcctggaaaacttggtttttttaaaaa

SEQ ID NO: 117704 - DNA, 139 bp, Zea mays
  Clone ID: MRT4577_38834C.1
aggacggctgcgctcagtcactttgacaggttcatcgtcatgctggcaatgatcaaaaggggggctgctatcaggcaagaactcgccacgctgaagaatgcgtccacagggtaaatcccttctggtggatggcatgtta

SEQ ID NO: 117705 - DNA, 358 bp, Zea mays
  Clone ID: MRT4577_38835C.1
cggctcgagaacaaagtaccggaacgggtagtcgagcgcctgctcatgtgcgcgtatcacgcccggcacgaattcggcctgccccaggtacgcaaaaggtgcccaaccagggtacacgacgtcgacaatcatgaggacggcttgggctggcgcccagatgaagatgttgcctggctggtgattgagaccctggtacgagagttccagcgtctggttgcccacccgcagcgagtactcctcggtgaaggtgatgtcgggtagaggccggttcgggtccggggtggcgtgcagaatctcgctttgtgaggcgtgtgcaatacgcgtcacattgcgtccgtagacgtacgcagcaccaata

SEQ ID NO: 117706 - DNA, 581 bp, Zea mays
  Clone ID: MRT4577_38836C.1
gaagacaagtaaatgttcactaaaatttatcataatgcatgtgtactaaatacacatataacactagcgtgttgtgacaccaaagctctaagcacaagggaaacgcttacaaaatctgaccatgggcatacatctcatggggccggcactgctgacaatgttgccggccctcagagagacttgttgaggtacccctcctttccaagctcaccatagctcaactaaggcgctccatttcttatagtacctaaccggtcctttttatggctttagggcccgtgcttactatgtgaaggtgctccatcagcattcccactagatttaccgtgtaaactggtttgcccacaccgactgactactaagctctttatcatacgtatcacatttacctcatctgatataagctgtacaaatttccaagcggttcactttatgagtatcaatcaaggtacttctggaaccaccttcggaaaaagcataaacgctaaacgaccacacatgcatcattgatcgatgcttcgcttattggtttattctctgctaacggaggtgatgagctgtctaattgctgacatgctcct

SEQ ID NO: 117707 - DNA, 381 bp, Zea mays
  unsure (1)..(381): unsure at all n locations
  Clone ID: MRT4577_38837C.1
cgtcgctgcacgcgtattttagcttggnatcctctaaacggccgggggggggtttttttttttttttttttttttttttttttttttgggggccttctggggtccctggttaaagggatgagttaattgtacatgcccaattaaatgtttctttttgtttccaagcttggctttgaattggccccgntcaagctagggggcggtgggggttaaccggggactgcttggcgggggcgaaccgggggccttcctgcttgttggcgccctgcccccccattccccgccgtctgtcatttccttttcttgggggggggggggggggcctctttcgtttcttcctcttcctcttcttcctcctcttgttcctctttggcgccctcc

SEQ ID NO: 117708 - DNA, 448 bp, Zea mays
  Clone ID: MRT4577_38838C.1
caccgatgaacggttattgacctgcgtcaagcgctgatcttaacactgcactgcgggtgggctctcaaagacaacatgaaggtgggcccaaaacgaagtcgccaccactgacattgccattgtggcggtgatgagcaagggcatgtggaggcctgtcatgccagggaggcaaggcgcgtaaggaccccgacaagactaagaaggctcgcagagctttattcgtgggcatgagactgaatctttgtaaggtagccgtaaggtagaaataaccctcagaacaagtgtgtggtctgggtaccagaaagctggtggcaacaggaggaaatccgctgtgcgagctggtcagggctccctgtgtagtcaatgcttacaagttcaagcttgagttcaacatggccatatatgcctacaacaagggcgagagcactggatgtaacaaggcttctgc

SEQ ID NO: 117709 - DNA, 131 bp, Zea mays
  Clone ID: MRT4577_38839C.1
tttttattcactatgattgcaagacgcacgaggggtttatctccgacaagactggggagccaataaacttatacaatcacaatcctgaggatctatctttatcaatactgttcaaccgaatctattgctag

SEQ ID NO: 117710 - DNA, 450 bp, Zea mays
  Clone ID: MRT4577_3883C.1
accttgaaaaaaaacacacttatttttctccttgaccgggaacattttttttttttacaaagggaccccttaggattatgcccaaggtacatcgatcacgacaactgggctttccttgtgacttgctttggcagtgcctcgagagacaaaacattatttcctgctcccctgctcaaaatcagctaaaaccggagggggcgggcgcaccattgcacggttcacctcctatacaggctttaaggggtggcagatgacgcgacactctgatggccttttatttttgacagggaggcccctcacgctaggactttcttggcagggcactgagtttattaagggggggaagcccggggccttcaccgtggctccaccctcaggaaaaccgtgggtatgttctttgtttgctagctttgcacagttggctgcatccacagaaccttcataaattat

SEQ ID NO: 117711 - DNA, 424 bp, Zea mays
  Clone ID: MRT4577_38840C.1
agctgagaagctcataggcattaaacacaaatcatatcaaatattgacacaatcttatatctattaggttaactgatggatcctccaaatcacaatttcattaataactcattggaataatttccatatggctactcacaatttaactcccttaggcccatttctcatttacttcattgtcaatttaaggaacaataagggaattgagtgcttcattatcacattgccatagtaaactatggactttcacattgttacgcatcacacaccgaagccatagccttgccatggtcttacacggttcacatatcataccgaagccatatccagacatggtcttatacggaatcacattatcacattataccgatgccatagcccagctatggtcttatacggagtcacattatcacattgaaccgat

SEQ ID NO: 117712 - DNA, 457 bp, Zea mays
  Clone ID: MRT4577_38841C.1
actcctatgggcgattgggtccctcgaggccggccgggcatcgtctcgtcgcggcgtcgtacatacatgccgcaccggttcttgcttacacagcctgcatgcatgcatgcatgacaggggcggcggaactagaactggcctgttcatcggtgccaggtgacaatttttttttttttttttttttttgcaaaatcagtgagctttgatgtgccctgatgcacgagcggtcattcgcaaacaccaggtcgcttcaagagtttcctgatgaagaacgaaggatacacaccaccagagtagcactggcactttcagtcatggaacccgagttaatctgtcatggagacagacacagggacaggggagagaggtttgctgtcgatgtccatgtcacctattagcctatattactatttagatacttcaagtgtgcaaaaaaaaaaaaaaaaaatttgcggcc

SEQ ID NO: 117713 - DNA, 411 bp, Zea mays
  Clone ID: MRT4577_38842C.1
ggttggtggcaaggcaaaaacactttcgtttgtatggtatgtgcaggcacggttcaaagcaggggcaggtttacaagcggtgaccagttcaataaacatatgaacgaattgaccgcctagttacatacagaggggaaaccttgcatgggtgcgcgagccacaaatacagaaacgacgcggccagtgacatatactatattgtccgccccggcccctatagtttaagcggattccatgaacaaagggcatatatatgtatctgcacttgctgtatgtatgaagctaccatactgatgactcataggtattaaaaaaaccacttgtggtcgctactactttgatcactctgaaaagcactgttccctgtataaaaaaaacaacactgtgtgtggtaaaaagaactgggcttgc

SEQ ID NO: 117714 - DNA, 216 bp, Zea mays
  Clone ID: MRT4577_38843C.1
aaaaccggccgacccagcatacgttctatatatctatctacactatacattatcaaactacatacccattcatacggcggcttatttttttatattctcacctaaatataatccactttctctcatactacaacttaatcacttttaaaacccttcctatacccaactaaatctccttacatcacattcaactttcaccatcatttttaatatctc

SEQ ID NO: 117715 - DNA, 670 bp, Zea mays
  Clone ID: MRT4577_38844C.1
ttgggtacctcgaggccggccggggcttgttgacagacagaccattaaccctcgttactgtcgcgcagacaccacctcacacttcagatctcccccggcggaggaacaggaatgtgaacaatggagtcactccaagggcacctcggatgtcaccatccgcaccagcaagttcatgaccaaccgcctcctgccccgcaaacaattcgtgcttgaggtgatccaccccggccgctgcaacgtctccaacgtttgagttgaaggagatgcttgccaatgcttacaacgttgaatgaccctaacaccatctttgtcttcaagaacctcacccacttcggatgacgaaagtccaatggtttcatgctcatctacaacaacctctaggctgccaaaaacatcgagacgaaatacagactcatcaggaatggacttgatactaatgataacaagaaccgcaataaaatgaaagagcttaacaacaggttcaataatatcctcgatgacaataacaccaaagctggtgacaccgagaagaaatagacatgcctttacatttgtattaatgttctgggctctgtgagatctatctacaatgtcataaatatggtcgtgatacgatctgctacacccttgatactgaagagaatgattgtaattcctccgctctgaagtg

SEQ ID NO: 117716 - DNA, 303 bp, Zea mays
  Clone ID: MRT4577_38845C.1
caaatgaacacatcaaatgcatgcttcgctgctgatatcggaaagacatatagacgctcacgccttggattgcatggacattaccgggctgtcccaggaggatataccatattgatgggtggaagaatgcatactataccgctcatgcagcaagccttatttcaacacaatcgaacgagaccccaaaaaaaataacaggatttaatcatcaatatacacttgggccgtatagcccctcgcacacagcggtggtctcgagctggtgggctgacgatgagacatcttcgagggcggtgttgcgca

SEQ ID NO: 117717 - DNA, 470 bp, Zea mays
  Clone ID: MRT4577_38846C.1
cgttgaaataggatgtgtgctctatgcagagtgttccccgataaacacttatttcttttattcaattgtctacatagatagcaggtgtgacttagtatacagaagcaatgactattcatgattccatacatatgggatcaattatcgataccattttgtaatgaaattaaaggaatgctatgagcaaaacttagatcaaaacgatgtggcagaaagcaacgtgcgacttgaaggacatgatcgattgagtattagcctatgcattattttccataactacgaaaatgctatcggctagacatagtctgttctattccttccaaaccgaattttcgctgtgttgtgtgtaagtaaagcaactagaacacgatggaactcgagaggacagaatttctttttgatcaatgtacagagtctacggttagggaaaactagtaacttaggacaactttgtcactctatacttaata

SEQ ID NO: 117718 - DNA, 373 bp, Zea mays
  Clone ID: MRT4577_38847C.1
cgcacacgcacgaccacgcgacccgccaaacacagcccgcagagacgcgactatgagggccaagtgggagacgaatctcatgaccaggctgaagaagaagcgcctgaagatgatgcagagatccaactaagctaataggcatagatcctagtagtctcatcataattgtgtatcgtggcttcgatacatgagtgcatcgatagatgtaagattctatttatgcatagacgttacgatattagttcaatggctccgtttgcaaacctgcacttgataggccatctatcctgcactctagctatatatcatatcgttgtgcttagacatatccataattctgtgctaagaacctatcatgatggagctttatgaa

SEQ ID NO: 117719 - DNA, 439 bp, Zea mays
  Clone ID: MRT4577_38848C.1
gtgcactaaggggttagggcgttcaggaggcccgatctacgccgctacaagagggtaattctgcttggaaccatgtccgaggtttagaactcccgtgaaaggcctaaagaggaagcttgccaccttactcctataaaagagatgggtttctagcttaaagccgaagacgtccttctcgtgggtttacatagagcgggcttttcgaccctgataagaaagggcagttgatgatgcatggggatgcttcatgtactgtaactaaaatcgaagatgtcgctaatgttctaaacaaagaatgttgcagaaactaaaaaacttttcattttgcagactcaataacggatgaacactgccataccaagaggcagattttgctgtatattgagtgctgaatactatgtggatgctttagaaaagttgttgaggctgatgctttatg

SEQ ID NO: 117720 - DNA, 416 bp, Zea mays
  Clone ID: MRT4577_38849C.1
tacgaacggtaagggcgactgccagcttataggaatcgcaaccaagacgaagtactactgcatggggctggagcccctccaccgtgggcagatcattgccgatgacgatggtaaccgtaccacgccatggggccagcgcttcacccactcccaacgcctaactggagatgcggaccacaaccagcgcgacatgaaccccatcaccccgtgtgtgagccgaagacttcatggggagacaagcaacatgatgcactggtacagaatgccctcaaggtgccggcgctacaggccattactacatgctcgggaaacgccaaagacaggactgcgcacaggggcgacgagaagccgccggctacgcgaagagagctcgagcatggctgttacgaaaaagagggagagtggtgaaacttacc

SEQ ID NO: 117721 - DNA, 692 bp, Zea mays
  unsure (1)..(692): unsure at all n locations
  Clone ID: MRT4577_3884C.1
tttccggggagtcaccaacaagagtagtagtcggagccgtccgtagtagctagcgtacgtacgtgtgagtttgtgaccaattcagagaagcctcgatcatcgttcgcttcgcttcgcttgtgtgtcgatatatatggcgagatcgccgtttgttccgatggatcaggggaaagagcaaggcgccggacgaggagcggccggcaataataaggagcggcaggaggaggaggtgctgctggtgcacagccaggtgcggcggatcaagaaggaggacgaggaggccttcagggagcgcctcctgaagctgcgcctgctggagacccagcgccatcatcccggtcccggtgagcgagtgactagtagcgagcatccgtcgacacgcggttctctcggctgcccgcgcgcccgccgccggttgtagatatcgctaggcgcgtacgtagcgagcgtgaccagtgttcttggggggtgttagtgagtgagcctgcccgtgctttgcgcctgcgcgcgcggacatgggatcggagcttggtagacgacgacggtatatagtaggtagcatcgccatgtgtacgtactgcgtggttcctggtacagtagcatagcatgctctgtttctgtatcctgctgtgctcttcttcttggtggtggngggntgtgtatgtatatataaatatatgtttacgatgaac

SEQ ID NO: 117722 - DNA, 674 bp, Zea mays
  Clone ID: MRT4577_38850C.1
gatttcttctactcaaatatcgagacgatggctagtcacctcttctccgcagaacggaaatggcgaccgttccagggaatctgatctgtcagattgtgaggaagaaccccttcttcctgccgtaactccttgccgacgtgaatgccaagtactgctcaccaaggagcccggacaactcgacgagttacgcgcctacgactactatggattatcctacaacagaacctgatcgatccagtcatctgctgtgaaatactcctatggggccgtctctactaccacaccttatactgcaagacgccctcgtagctcagcctacactctgcgatgccgacagcattaccaccagatgcgcatgctcgtgactacctctctcgacactactagtacagctctgatctgacaaccgaccattgcgaggctgagctctacgaaccgctgcctccgtactgcctagtactggtaccaacaagaagaacatgcacgctacgctctaagcctgggatctgcgcatcgggcacatagactcatgttatatctatcccatgcgctcccacagttttgatacttgttataactagacgaaatcgtcttaagatgctgccagtttgtcattctatagcaacattccatgacaaagatcgcttggcacttgattgctgctttgtttgtac

SEQ ID NO: 117723 - DNA, 397 bp, Zea mays
  Clone ID: MRT4577_38851C.1
gctgatctgtagtttagatacagaagcttgagccaaaaatatcgaccaaggtcatttctagaaattgttggtcaaaactttgttgtacagtcacttagtaatgctatcgcaagggaaagaatagctccagcatatctgttccatgggccccgcgggacagggaaaacatcttctgcaagaatactttcagcagctttaagttgtactgctactggagagaccaagccctgtggagtttgtactgagtgcagtgactttttcactggaaatggaactaatctaattgaggttgatgctaccaacagataaggtgtaaacagagtacgccatttggttgaaaatataccagcttctgcaacttctttgcggtccccagtctttggcgtggctgaatgcc

SEQ ID NO: 117724 - DNA, 309 bp, Zea mays
  Clone ID: MRT4577_38852C.1
aacagccttaggggcaacattttcaacctcaagaataagctcaatcctcaagtaggcactcacagaatcctcaaagcagcttcaatcgtccaccggcaccaagatgtggcaagggaggctacaacatacagaagcagaaggaggtggcagatgcttgttccaagaacacgatcagtaccaagaacaaccttcggcgtccaatgctttggctcacccttagtctggtcattggggttctcaccagccaaatctcctagtcccccaccatatgaataacaacactttggccaacctcaacattcaacacat

SEQ ID NO: 117725 - DNA, 480 bp, Zea mays
  unsure (1)..(480): unsure at all n locations
  Clone ID: MRT4577_38853C.1
ttcatattctcatctgtagaaatatattctgcttgtaagcctccattgagtttggagttcaataaccgaaacaaaaatgattggcttcacattgaagtgaagaatgtccttcttaaatggaagcagttatttacaacaattgaaaatgtaatacaagacttgagatcaagatactctagtcaagccatgggggaagacaccaacgtttcagtagatgaggatgaggggttacttttggaggtgtccaggatgcttacacaagagaaaaataaagttgaggtttctctgagggagtttagccgaattgccatacctgagagttttgcacatgggatccttggtttgaactggttgtaccagcaacttcttcttgggttctacatttgggatcttcggttgcttcatattctgcagtacactaaagttaatactgcatcttcagacaattccattcatgaaagcacagcanagaatgaaccg

SEQ ID NO: 117726 - DNA, 486 bp, Zea mays
  Clone ID: MRT4577_38854C.1
cccagggaagggggaataaactcactcatgggaaagggccaggggtacaacaaagtggagcctaaccagaagggatccttttttaaaagggaaagaccaaagcaagaattagggggtctttttccagagattgaaaaaaaaaaaaaaaaaaataaacggcccattggggaagtggtttttttttttaacctaaggaaccgagctgaaaaatggcccaaccaagtaaacccaacccatcctggttggaaagtcaaatgagggggaaagcaaacaaggagacgctaccaaaggaattcgggttttaagctgacttcccctcccaaaaaattttggacaccttttaaatttggccatgaggcggaccgtttaaaaaaaggcttaaaaatggctttgacctcttcaagggcgaccttgccaaaagggaaaggatcttccaacagcattttgggaaccaaatccccgggggggaaccaaggctggaatttc

SEQ ID NO: 117727 - DNA, 2066 bp, Zea mays
  Clone ID: MRT4577_38855C.1
agctccggtttcttccgactgcgagcttccaagtggcgactgcccgagtgcgagaagagggagagaggcggttgtcggtacccactcctgccgttggttcatagtaggcatgggtgttattacagtgctggtcaactggttgcaacatttctattttggaataatgggggagaagatgactgagcgcataagaaggatgatgttctcagcaatgctacgcaatgaaatcggatggtttgacaaagaggagaacaatgctgatacactgtcgctccgcctcgcaaatgatgctacatttgtccgtgctgccttcagtaaccggctttccatatttatacaagacactgctgcagtatctgtggctctccttattgggatcttgttgggatggcgggtggcacttgttgcactcgcaactttgccagttcttgtcatatctgctattgcacagaaattgtggcttgctggcttctcaagaggaatccaggaaatgcatagaaaggcttcgctagtgcttgaagatgcagtccggaacatatacaccgtagtagcattctgtgctggggataagataatggaactctacagactacatcttggcaagatactaaaacaaagtcttgtgcaaggactggctattggctttggctttggtctctcgcagttccttctttttgcgtgcaatgccttgcttctttggtacactgcaatttcagttgaccgacaacgtctgacaatagccacaggactaaaagagtacattctgttttcgtttgcatcattcgcgttggtggagccatttggactggcaccttacattcttaaaaggaggaaatctcttacatcggtctttgaaattattgaccgggagccaagaattgatcctgatgataccaccggcttgaaaccacccaatgtctacggaagcattgaattcaagagtgttgatttttcttatcctgttcgccctgacattcttgtgttgagtaattttaatcttaaagtgagtggtgggcaaacagttgcagtggttggggtttcaggatcagggaaaagcaccattatttctttgattgagagattctatgaccctgtttctggccaagttctgctggatggtcgagatctgaaatcatttaaccttagatggttgcgcagccacatgggcctgattcagcaagatccagttattttctcaacgacaataagagagaacattatctatgcaaggcacaatgcaaccgaggctgagatgaaggaagctgcaaggatagcaaatgcccatcatttcatcagcagcttgccacatggatacgacacccatgtgggaatgagaggggttgatctgacacctggacagaagcaacggattgccatcgctagggtggttttgaagaacgcacctatattgctgttggacgaggccagctctgcgatcgagtctgaatcgagtagagtggtgcaagaagctctagacactctggtcatgggtaacaagacaacgattctcattgcgcacagggcggcaatgatgaagcatgttgataacatcgtcgtcttgaatggcggtaggatagttgagcagggcacacatgactctctgatggaccagaacggtctatatgttagattgatgcaaccccattttggcaagggccttcgccagcatcggctaatgtaattattcttttgagtttgtttaggtgtaaattatcctaggggatgatcaggtttccttgtgcggccactcagtcaggggcccttttcggcacatgaaaaatgctgggagttgccgccctgttgctgttccgagtaagccgacctggtcttcttgacaaaaaaataaaaaaaaatagcttgcagatccaagtaattctggaaatagttagcaagtttggagggcattgtaattgttgtaatatatgagctgaaacattctttcagaggctcgtgcttgtggtgtctctcgcctctgtaatattagtgttgcaccgacatgttcacggagcgtgtaattttgggagccacgaaccgacagcaatgcaaccacattccccccccccccc

SEQ ID NO: 117728 - DNA, 251 bp, Zea mays
  Clone ID: MRT4577_38856C.1
gcatgacgggcggggacgtttttatctgccagaggatacatcagaacgattaacggtcagttacattcatacactaggacactgcgacacaggtggggcggactagccacatgaagttaagcggacgtgacactgacacatacaggggaacacttacaagttaactaagacagttggacaggagatttaagaacagccatgacagaactcgatgcattgcgttctatgcaactccggatccatggagcgcc

SEQ ID NO: 117729 - DNA, 262 bp, Zea mays
  unsure (1)..(262): unsure at all n locations
  Clone ID: MRT4577_38857C.1
accgctgattacggacctganatcatgagatggggattgatggattcactcctttttgcacatttatannttttcgtgattttgtactggttctgtactcggtaattgnnatttgtgcgaaccagataccctcagaacaaaagcatgtacanagagattcttaactgtatctgaacttatgaacgacgttctaaaatattgaagctggcattatcttcaattggcgaanaaaaaaaaaaaaaaaaaaaaaaaaaaanannnt

SEQ ID NO: 117730 - DNA, 307 bp, Zea mays
  Clone ID: MRT4577_38858C.1
cggctcgacgcatgcatccacgggtacaatgattgacaacaatgctctaacagtttacactaatataatactcaattgtgactgtgttcaagaagctgctatgtagacagaccgatacttcatcaaaagtgcaatcagtcacactaatcaaggatgctttactcactactggaacagttatatgaagtgaactttcgacatgcagctgtgtatctctacattctacaatgatcagcacctgattacatgcatcatctgcacatcagtctgatcgagatcatcgcatcaataaaagtctcatacaagg

SEQ ID NO: 117731 - DNA, 712 bp, Zea mays
  Clone ID: MRT4577_38859C.1
gtccgcccacgcgtccgctgcaatcgagtctgaatcaagtagagtggtacaagaagctctcgacactctggttatgggtaacaagacaacgattctcattgcgcacagggcagcaatgatgaagcatgtggataacattgttgtcctaaatggtggtaggatagttgagcagggcacacatgactctctgatggatcagaacggtctatatgttaggttgatgcaaccccattttggcaagggccttcgccagcatcggctagtgtaattattattgagcttgttaggtgtaaattatcctagggcatgatcaggtttacttccgctcttggtgcagccactcagggcccgttttggcacatgaaaaatgctgggaagttgccgccttgctggtgttgttctgagtaagcggaatgcagacctgatcttgacaaaaaaaacctagcttggagattcaggtaagtaactgttggaactgtagggcacaactcattctggaaatagttagcaagtttggatggcattgtaattgttgtaatatgagttgaaacattctttcagaggctcgtgcttgtgatctctcgcatctgtaatgttagtgttttgatcatttaatgtgtgtatattgttcgattcttggtcggtccgagtcttgtagccgtgatgaaaagctttttacatggaaattctgagcttggcgttaatttagaaa

SEQ ID NO: 117732 - DNA, 843 bp, Zea mays
  Clone ID: MRT4577_3885C.1
gggtacctcgaggccggccggggagtcaccaacaagagtagtagtcggagccgtccgtagtagctagcgtacgtacgtgtgaccgattcagccaagcctcgatcgttttcgcttcgcttgtgtgtcgatatatatggcgaggtcgccggttgttccgatggatcaggggaaagagcaaggcgccgggcgaggagcggccggcaataataaggagcggcaaggagcgggaggaggaggaggaggtgctactggtgcacagccaggtgcggcggatcaagaaggaggacgaggaggccttcagagagcgtctcctgaagctgcgcctgctggagacccggcccagcgccgccggcgccggcggcggcgtggcctggcgagccccgcgctccctgtcgccgctccgccgtgccggcagcgccatcatcccggtcccggtgagcgagtgactagctagtagtaaaagcgtgcctcgctcgctggccggcgtgcgtggtgtgtccgagcatccgtcgacacgcggttctctcggctgcccgcgcgcccgccgccggttgtagatatcgctaggcgcgtacgtagcgagcgtgaccagtgtcttgttggggggtacgctagtgagtgagcctgcccgtgctctgcgcctgcgcgcgcggacatgggatcggagcttggtagacggcgacggtgtatagtaggcagcatcgccatgtgtgcgtggttcgtggtacagtagcatagcatgctctgtttctgtatcctgctgtgctcttcttcttggtgttggtggtgtgtgtatgtatatgtaaatatatgtttatgatgagttatgagagggagtttatt

SEQ ID NO: 117733 - DNA, 383 bp, Zea mays
  unsure (1)..(383): unsure at all n locations
  Clone ID: MRT4577_38860C.1
nnntttnnnttttttttttttttataatttggtgtggggattttttttttttggtttgggggcactggaaagtgcatcactgtataactttaaaacttttaaattactcaacaaaaaagaggagggaccttttttctgtttcaatggacaaaaaaaaaataccgtggacatttggtttttatttacaacaaaaaatttcaacaacaacaacaacaaaaaatctggcgtaatttgcccctgacaaaacatttaatgaaaaggggcccccaacttaattggaatacaagccacacttcttcaagaacgggcccttttttttggcgaagaaaaggttgacccggacccacaagaaccaaaaaatccaggcccacaagatggaccaa

SEQ ID NO: 117734 - DNA, 491 bp, Zea mays
  Clone ID: MRT4577_38861C.1
attggccaaaccacctttttcccaaaattgaaacccttggcgttggaaggggccattcggggcatggcccacccggcccccaaggggggggggggaccccccgagccgcaccgccgcaaaaggagggaactacctgtgggggggggcccgggggcggcctaacattataacaccggcccccgcccgggggggcgccgaaagggggaaaacccaggccaggggcggggggtaaagaggggacccgggcgaggacccaagctgggggaaataagggacaaaagggggtcccggggggaaaagggtaacccctcgcagtgccaaacaaaaaaccagccggaaaaaaaaagggtaaagccggggggccccaaggggggggcaaacccacattagtgggggggggcaaagggcccgctttccagcggggaaacccggttggccaattgaataaaagaaccggccccgcccggggagagggggttcgcgaatggggg

SEQ ID NO: 117735 - DNA, 237 bp, Zea mays
  unsure (1)..(237): unsure at all n locations
  Clone ID: MRT4577_38862C.1
cacctgtatactgtaatggtcttgggtcttggcaactgattaatgatnngggtattttgttaattttaantgganattggaatatattaattatttttataatttttaaattaatatttatatttttattttaattttaanaagaatttaatgttttaaacacaacagacaacaccgctcaccgcttatatatatatatagatggtttccgaggggccttctcccctcaccgtccac

SEQ ID NO: 117736 - DNA, 843 bp, Zea mays
  Clone ID: MRT4577_38863C.1
cgaacatattcccctagattgctctcctgacactatcatcttccacctgccagcttcactctcgagcctgcactccatctgcttgtgaagcttctcaagattctcgcatgcctttactcctcctctcactctctctcgccagcttgcttgctaaacaacctccaaattcggcacgagggccgacagctcaactcctctaactagcctcccgccgcaattcacaagcgcccggagaaagaaaaaagaaagaaacattggaggcaccccccgatgaggccttcgccacctctgctcctgctcgtgctcctgcatttcgcgctcctgtccaccaacgccaatgggaacggcgacctgcgcggcgacgcgatggcgctgctggccctcaaggccgcgctcagctgccgcccgggcgcgctgcggtcgtggtcggtggccaatgccgggtccgtgtgcgcgtgggcgggcgtccgctgcgcggccgggcgcgtggtcgccgtcgacatcgccaacatgaacgtgtcggacggcacgcccgtgtcggcccgggtgacggggctcggcgcgctcgagaccatctcgctggccgggaacggcatcgtgggcgccgtcgccgcgtcggcgctcccggcgctgcgccacgtcaacgtgtccgggaaccagctgggcggcggcctcgacgacggctgggacttcgcgtcgctgcccggcctcgaggtgctggacgcctacgacaacaacttctcggccccgctcccgctcggcgtcgccgcgctcccgaggctccggtacctggacctcggcggcaactacttcaccggcgagatccccgcggcgtacggcgcg

SEQ ID NO: 117737 - DNA, 218 bp, Zea mays
  Clone ID: MRT4577_38864C.1
ttttgttttcaccttaatttttttaggggggagggggtttatttttggtcgtgaactgcaaaaaccagaagtattggtctcaaaagactatgattacgcttgaaggacgggcacgaactcattttggtgtatacatagcatcaatggggctcattgaataggggagataggtccggcgcgttaaccggaggaaaagactgagtttcaggtgacgagca

SEQ ID NO: 117738 - DNA, 147 bp, Zea mays
  Clone ID: MRT4577_38865C.1
atgggtgttcttggcacccttgctagaaatctggacgcccttgttggagagcccttcttccctggacgatcagcagtggctcacctactgggtcctgtattccctgatcgccctcttcgagctctcatgctggaaagtcctgcagtg

SEQ ID NO: 117739 - DNA, 557 bp, Zea mays
  Clone ID: MRT4577_38866C.1
tggttccggatagctaacaattcgctaggttcagttcactcgccacccgctaggttccatcatcatcattcatcaacagccgcttcgttgctctccacagtctccacgccgccgactcctgcgacgcacagacactggtcacccatggccggccgccgccgccgctgtgtgcatccccgtcaagcacggttgttgccgctgccttccccaggagagccctcgcctctggaatccaacactctcaggtccgcctgcgttcgttaccctaacggcctacaccctcgctccatgccccccctgtttccattcggttcacgtttcgttgggtagaccggtagatgtggagagagatcgaagcagacagcaggcagggtccggagttccggacatggattcattaatggtcatgcccttataatgctgcccaaataaaatgtttatagtgctgcctaaataaaatgctcaatggactcagagtcttcttgcctgatgtttgttgcgagctgctaaagcatgtcagttgtattaccatagaaataaaaatactgcgtttatgt

SEQ ID NO: 117740 - DNA, 641 bp, Zea mays
  Clone ID: MRT4577_38867C.1
ggttccccaatctttaaatattaatagagctcctgcagagatctggggggggggggggggggggggggggctaccccgcagcggcgctaggctaggtggacgctctcagttcttctacgtcattagtcgacacatatcgaccagcgaaacctgggggcacttacactccagcaacaatcacagacgtagttctagcaatcatccgagctctagcagtcaccgcggcatcggttcgaccccgaacgtccctcttttccgagcgcttattccggtctttttttcgagataactatcaccttacttactcagcaggaggttaaggaagttaacataaaggaagttaattttattactactactactaaggaggattttggtaacaaggaggcttctaataatagtaagggaaaggaggttacttctactaataaggaggttagtaaggttatttttcttaaggttattcttgaggttatcaaggtttctttataaatattttaggtttatcatattattacttctatcacttaggttaaggttaaggttaaggtttgggtttatcataataaggtttaggatactattcaggttaaggataaggattatctttaggtttaggtttatattaaggtttgtaagtt

SEQ ID NO: 117741 - DNA, 142 bp, Zea mays
  Clone ID: MRT4577_38868C.1
agctaccgccgccgccgccctacgctaggtgctgaggtccgagtcgttctcgatctcccacaggagcgagcgtgcaagataggatacaaccgccacagatgtggccgtagatcatcctcatcgtcttcgcgacgcaccaatc

SEQ ID NO: 117742 - DNA, 1191 bp, Zea mays
  unsure (1)..(1191): unsure at all n locations
  Clone ID: MRT4577_38869C.1
cccacgcgtcccgaatggaatcggcgattccggccccggccgggacctccaccaatccaaccaaccattggccattgcagagaagagattactttaagaatgggctactcgaagcgcattgcactggtacttgtagcggctgttgtagcgctccacgtccatgtcccgatggccacagcagcgaactccaacctcttccgggactacatcggcgccatcttcaacggcgtcaagttcaccgacgtccccatcaacccgagggtccgcttcgactacatcctcgccttcgtgatcgactacaccaccgcgacggagccgcccaccccgaccaacggccagttcaacatcttctggcaggactcggtgctgacggcgtccgcggtggccgccatcaagcagagcaacccgaacgtgcgggtggccgtcagcatcggcggcgccaccgtgaacgaccgccctgtgttcttcaacatcacctccgtcgactcctgggtccagaacgccgtctcctccctgaccaccatcatccagaagtacaacctggacggcatcgacatcgactacgagcagttccaggccgacccggccaccttcgccgagtgcatcggccgcctggtcaccacgctcaagagcaacggggtgatcaggttcgcgtccatcgccccgttcgacaacgccgacgtgcagcgccattaccaggccctgtgggcgacctacggaagcgtcatagactacgtcaacttccagttctacgcctacggcgccagcacgaccgacgcgcagtacgtcaacttcttgcttcaccacggcgcccaccaccacgtcggtgcccatcaacacgtcgctcagcgcttgccagacattgcagtcgcagggcaagctctacgggatcttcatctgggcagccgaccattccaggagccaaggcttcaagtacgacacacaagcacaagcactgctcgccaacgcccctgctggctactagtagatggctaccataccttcaatgcgtttaagttggatttggatttcattttcaggtgaacaaataatattattatgtatggaataaggctgtcattggaatataatacggggctatttctatattcctgtgttctctataaaaattaaacaattcttacaaaaaaaaaaaaaaaaaaaaaaaaaannnnnnnnnnnnnnaaaaaa

SEQ ID NO: 117743 - DNA, 859 bp, Zea mays
  Clone ID: MRT4577_3886C.1
cggacgcgtgggctcgcacgcagcagcccctctgcctcctccctctctcatgctcatccatctccggcgctatatatatctataccgccagccgggccgggatcgagtaccaacaagagtagtagtcggagccgtccgtagtagctagcgtacgtacgtgtgaccgattcagcgaggtcgccgtttgtgtgtcgatatatatggcgaggtcgccgtttgttccgatggatcaggggaaagagcaaggcgccggacgaggagcggccggcaataataaggagcggcagcagcaggagcaggagcaggaggaggtgctgctggtgcacagccaggtgcggcggatcaagaaggaggacgaggaggccttcagggagcgcctcctgaagctgcgcctgctggagacccggcccagcgccggcggcgtggcctggcgagccccgcgctccctgtcgccgctccgccgtgccggcagcgccatcatcccggtcccggtgagcgagtgactagtagcgagcatccgtcgacacgcggttctctcggctgcccgcgcgcccgccgccggttgtagatatcgctaggcgcgtacgtagcgagcgtgaccagtgtcttgttggggggtgcgctagtgagtgagcctgcccgtgctctgcgcctgcgcgcgcggagatatgggatcggagcttggtagacggcgacggtgtatagtaggcagcagcatcgccatgtgtgcgtggttcgtggtacagtagcatagcatgctctgtttctgtatcctgctgtgctcttcttcttggtggtggtggtgtgtatgtatatattaatatatggttacgataaaaaaaaaaaaaaaaaagcccct

SEQ ID NO: 117744 - DNA, 264 bp, Zea mays
  Clone ID: MRT4577_38870C.1
ttccggttgaccttttccaagaccccattatgttggcggtcttgaacctcaacggccacagcggcattttccgtattaagggcagtgccagggttcaagtcggcaggcaccaccggaccaacgggttcgaagaccttcttcgtgccgggcaacttgttattgtaccccaaggcttacttgttcccaacaaaggccaaggaggaggcttccaatacattggcttcgaaaacaacccttacaacattgtcaagcaccttggcggga

SEQ ID NO: 117745 - DNA, 273 bp, Zea mays
  Clone ID: MRT4577_38871C.1
tgtatccaaatgtttgatgtattttcgcaacatcatgtacaaaaaggtactactaacatggccgatgtttttatccaagccatgactaaacttaacagacattattctcgtcaaagacacatgccagtgccgacgccgaagtattgcaatgcaaatatgttacgcaatgctaatgcatgacccaaggtatttgaaggaccgctattctcataaaaataaaacgtcgaagctgaaatgaacaaacaatgcgataaatgcgtttacaagaacgca

SEQ ID NO: 117746 - DNA, 391 bp, Zea mays
  Clone ID: MRT4577_38872C.1
gcgagagatcttgattaggcgcagtcccaccgacccgcgcggcggtcgccctacatgtcctcgcggccgactatcaatctttgtacagttgctcttttcaataatcaacacgagccgtggaggtagcgccagaggaggccaaagttatatgacatatgtctctcgaagcggagagcccgccaaaccagcagtggcaccagctgcaagtgctccacctgatgcgaaaccatctgctgcaaagactgacgcggccaaacaggctgctgctggggttaccagccacaccaataagctccacaggggtgctgggccgaacactggcaacttccatacggaccgttcttaacccaagggccacgctgctcctggcggtggctattacctgggctac

SEQ ID NO: 117747 - DNA, 267 bp, Zea mays
  Clone ID: MRT4577_38873C.1
agcagtggtaacaacgcagagtacttttttttttttttttttttttttggaaaaaccatttctaagctcaaaatccccaaacctttccagccttggaagggctaccaaactttcaccaatattcaaggggcgaaccccccacacttatcaaaaagaaaccggaccctaccccaaccccttttttggatggggcgcaattaaccccttaaccccatttggacctgagttggggattaaggttcccctggttgggtgggggggttgggt

SEQ ID NO: 117748 - DNA, 565 bp, Zea mays
  Clone ID: MRT4577_38874C.1
aattcggcacgagcggatatgcctgctggaaccacaccatgcaaagggtagtgatggtagctcgtgcaagaggattgccgaagagttgacaacttctatttctagcatgctgcttgagttctgcacacgcagtgaaaaccttcttagttttctgtccctaagaatccgcgagtttcctgatatgttagatgcattattattgtcagacaggttgcttgacaagaaggttgccagaaaattgcatgagtttttattgaagcttatcagtgaccctgcttttaagtatgagtttgccaaggttttcatacactactaccctatcacatttggggaagttattaaaggctgtaatgattcactactggaagactatgcactgatgacaactttttctgtgcaaatattgactgtgcctacattgactccaaggcttgtgcgcgaggttgatttggtggatgagctccttgaatgcttgacagatctggttgtctcttgcctcggggaggatgggcgggtgacagacaacaaatggggggatttatttgggtgcttgtattgggatact

SEQ ID NO: 117749 - DNA, 1012 bp, Zea mays
  unsure (1)..(1012): unsure at all n locations
  Clone ID: MRT4577_38875C.1
gaacttgacaagaagggggaaaatggctttggtgaatctgtaaagccattctatcacctgaatgcactgagtgatctcctaatgcttcccaaggatgtgctcatggataccagcagtagcaggaaagagctttgccctacctttagctcatcaatcatcaagaacatcctggatgtctttttaccagatgaattttgtccagatcccattcaaggttctttacttcaagcactagagttggaggaccacctggaggttaacaagggcatacggtcgatcccgtgcagcgcatcgccaattttgtacaatgcccctgtatctggggcaatactaagcgtcatcggtgatcctaggaagagcgggtccgccatccttcacaagtccaacacgagcgatgacgagcttgatgagctgagctccccacttaccttcatctccaacacctcatcagacccgcttgcgaagctgaagcggatcagcaactcgaccacagcgaggtataggcttctccatgaggtgtggaagctggatgaccagtaggacttgatcctatcaccaccatggttctcccctctgtatataggtttgtttttttgcatatgattccggctcatgtataagatttcagtctatttgttatgttatgttacaagaagatgaggggcaagcgttgaatcttaataaatccgctgtgtctaaatgcaagagtgttcggtatgtgttgtgctagggtgtgaatcatgtgttttgcagatgtangcaattcaagtggcccaacgtgcaggcccatttcttctactccccacccgcagtgcagcggtgctgacgcagtgaaaatttattgtagtnccatactgctggggcgtgatctgatagancagtgtaacggtcagaagggttctatgtaacacctgcacccatgtgctattctatcccctaacccctactngctctcacagaatagtaaaggtgaatgcaccttctcacagcaaaaaaaaaaaaaaggccccta

SEQ ID NO: 117750 - DNA, 346 bp, Zea mays
  Clone ID: MRT4577_38876C.1
ccatgcgtccgccccgccacaagatgaagtgttgattgatccacccgataaagggaagacagctgattcagagatatgacctcacatcagagcagccgatgctgttacaatcgaagaggacaagcttcggccggtccagctcacttaaactactacgaccagcggctgcaacagcaagtcacaggctgatgactacggacgtggctatggtggctacaacaagtcggtcggtgatgacgactactgccgcagcggtggctatgggtacggcaggttcggcggtgacgactacagctcaggcaccggtggtggtggctacaacaagtccggcggttgctgatgacta

SEQ ID NO: 117751 - DNA, 665 bp, Zea mays
  Clone ID: MRT4577_38877C.1
tcacatctgatcctaaagttcttccaatttcttctgggaaatacagcttcggtgctggggtccaactgaaaaatgctattggcagctggtctagatgtcttactgacttgtttggcatggatatggacgactatcaagaacttgacaatgagggtggtgaaaatggctttggtgaatctgtaaagccattctatcacctgaatgcactgagtgatctcctaatgcttcccaaggatgtgctcatggataccagtagcaggaaagaggcatgaaatcatatcttgttcaaaggactgctctgctctatattagaatgtcttattgaaacgttttttaaaatacctatctcgttcaaaagggtgctctatattttaatgacttattgaaacgtttttttaaacaatatcttactgtcatgtaatgttttacagctttgccctacctttagctcatcaatcatcaagaacatcctggatgtctttttaccagatgaattttgtccagatcccattcaaagttctttacttcaagcactagagttggaggaccacctggaggttaacaagggcatacggtcgatcccgtgcagcgcatcgccaattttgtacaatgcccctgtatctggggcaatactaatcgtcatcggtgatcctaggaagagcggg

SEQ ID NO: 117752 - DNA, 679 bp, Zea mays
  Clone ID: MRT4577_38878C.1
cggccgctcaggcggcgggcgggaccgttcccgcctcctggccagaacacaccacttctcagtcgtcaactagctgctagctaaagcttgcgctgagcttaggtagcacctcacacgcgcctaactcgatcagttctctctacgagaagtcaagctagctgaggattgtcgagtacgtagtagcacaatttaagtgatggcggtaggcaacggcggcgccaagaaagtggtggcgcccatggaggtgtccgtggaggccgggaacgccggggacgcggcgtggatggacgacgacggccggccccgccgctccggcacgttctggacggcgagtgcgcacatcatcaccgccgtcatcggctccggcgtgctctcgctggcctgggccatcgcgcagctcggttgggtggctggcccagctgtcatgctcctcttcgccgccgtcatctactacacctccaccctgctcgccgagtgctaccgcacgggtgatccggccaccgggaagcgcaactacacctacatggacgccgtccgctccaacctcggcggtcccaaggtcatcttctgcggtgtcatccagcacgccaatctcgtcggcgttgccattggctacaccatcgactcctccatcagcatgcgggcccatcaggagggccgaactgtttcaccgccatcg

SEQ ID NO: 117753 - DNA, 1285 bp, Zea mays
  Clone ID: MRT4577_38879C.1
tccagctcccacccccacccatcccttgcccgttcgtcctcctccctcccctctacggaacagaacagccctgcccaaccaaagaaccttgagagccttgaggtggggtagggtgtgtctgcctggcacagagagtagcagagcagtgcagagcaaagcagtcaggcaagcagcagcaatgccgtacacagctccgcggccgtcgccgcagcagcacagccgtgtactgagcggcggcggggcgaaggcggcgtcgcacggggcgtcgtgcgcggcggtgccggcggaggtggcgcggcaccacgagcacgcggcgcgcgcggggcagtgctgctcggcggtggtgcaggcgatcgcggcgcccgtgggggcggtgtggtcggtggtgcggcgcttcgaccgcccgcaggcgtacaagcacttcatccggagctgccgcctcgtgggcggcggcgacgtggccgtggggtcggtgcgcgaggtgcgggtcgtctcgggcctccccgccaccagcagccgcgagcggctcgagatcctggacgacgagcgccgcgtgctcagcttccgcgtcgtcggcggcgagcaccgcctcgccaactaccggtcggtcaccaccgtgcacgaggccggcgccggcgccggcaccggcaccgtcgtggtggagtcgtacgtggtggacgtgccacacggcaacaccgcggacgagacgcgcgtgttcgtcgacaccatcgtgcgctgcaacctccagtcgctggcgcgcaccgccgagcgcctcgcctagagagacgagaccagacgagacgagagccctgctggcggctggcgccggcgccttgtttcttgactccgtcgtgttcttttgccctccaaggggaggagatcagatcgatccgtgaactcgattgaggttctaggatagcctgtgtttcgttttctttttcttttctctgtttgcgacacagagtacaaatcattgtatgggtgttgcctgatatcattaacccttattcatcacatcacatacatgtacaacctttaaattagccgtctacctcccttccctcttggcataggtaaaccactacttgaggagaatgatattagatgcaaatttgtgctgtgtgtgttcctgcggttttagcaccgtttctgcagagaaatttatggaaacctgaggacagatcgggtaggtggggtcaattcacgagatcagtatactgtggaacgagttgcacgaagcagatgcacatggaacttgataaggagcattcctatttcttctact

SEQ ID NO: 117754 - DNA, 597 bp, Zea mays
  Clone ID: MRT4577_3887C.1
attgggtacctcgaggccggccgggcatctcaatctatcataaacgttccagcatttttacgctcaagcgctacaaatctagcaatggctgtgtccaccatgaccatgtcctctctcctccatcggccgtcacccgccatacaggcgggaactgccgttctgcgagggccgccatccccatgcgcaagaccgaggatgagcccaacggggcggaatgccgaagcccctggtacggccccgaccgcgtgaagcacctccgacccttctccggagaggcccccagtgacctcaccggcgagtaccccgctgactacggatgtcacaccggcgtactgttcgccgaccccgagaccgtcgccaagaaccgagagctgcaggagaaacactcccgctgaggcatgctcgtcgcgctcggctgtgctgtccgcgatctgctctcccgtaacggagttgagctcccggaaggcgtctggttcaagggcggctcccagatcttcagccaggtcgcactggactaccttggcaaccccagactgactcacgaacagaggatccttcccatctgagactgccattgctagctcatgctggccgtcg

SEQ ID NO: 117755 - DNA, 166 bp, Zea mays
  Clone ID: MRT4577_38880C.1
tcgttggcatctgccatgttgccacacaggggggggtcttaagagggttcttggcggatgaaacacgttcacagcaagatctcgggctactatgcggcgtggactgctgacaacggcaactgcggtgattaggatatccctgcgcgtggcctgtccatgggctccc

SEQ ID NO: 117756 - DNA, 616 bp, Zea mays
  Clone ID: MRT4577_38881C.1
tttttttttttttttttgaagaaacactgcatggatatatagagagagagagagataaaaaaggggtagtacaatgtaaatgtacagcctacgtagggtagaccagcacgtacacgtactcatcgatcacgcgcatgcacgggctgcgactccaacaaaaaattggagcagccacgtcgtatgccgtatgcggctacagcaggcaataaatgtatcaaggatcctacgtctttacacaggcatgcgatcatgcgctagctagttcacgatgcagtgcacacacacacagacaacgctacaagagcatcggcagagaggccggccgtacgtcgtcgtcgtcccgtcgagacgccaacaacggagagcgctggccggccggccggccgaagcgctagcatagctcgatggtaacgatcgaccggcacgcgcgcgcgttcgtctgtcgcgcgcgtcgcgttacatgtcgccgtggggcagcgcgtactgccacggcgcgtggaaggccgggtaggcggcggcgccgagcgcggcggcgcggtgggcggcgcgctccagggactgcacctgggacttgaggaacttgacgtagtggatggcctcgttcagcatggacgcc

SEQ ID NO: 117757 - DNA, 393 bp, Zea mays
  Clone ID: MRT4577_38882C.1
aaaaaccaatcatgccgtttataaaacccctgttttaaataaaatcggggggaaccaaaaagaggggggaaaaattttggccatgaaccccttttttttttggggattgaacaattttttacattttggggcaaaccgaaaacccgggggggcttacattttttcggacacctaaaggggaccgggggggccttcctttttttgcggggaaaaaatttggggggtaggccccaccctttttttttacgggggccgcaattggggccccgaggttttttaaggggcccttccccgggaagaggggcttggcaaaaaaatcccacatggggaaaatgggggggggggcgctttttagcctccttacccttaaccccggaaaaggcccggggtttt

SEQ ID NO: 117758 - DNA, 285 bp, Zea mays
  unsure (1)..(285): unsure at all n locations
  Clone ID: MRT4577_38883C.1
tcttctttttcccnagcatttgtagtagtattattattggtctgtgtcgtgtcttgagtacgtacgccgtgcttcaggttcttgtctgtgctcggctacaaagggtacggtccttcaagtttgcagttttggtctcccttttatatatatagggtacgttgcacgtagaatatatggtctagctagctaggtgcaggttcgtggatgtacctgtactcgttggaggactgccaagttctgctcgtgtctcgtgtgccggtgaatgttaagtttataccttacagg

SEQ ID NO: 117759 - DNA, 262 bp, Zea mays
  Clone ID: MRT4577_38884C.1
tcgacaccgaaccttgtagaatttcccaagcgcgatggatctctgggagagggcgcggtccttcgccggtgaggcggcgaagcggtcgcaggagctgtcgctggaggcggccaagcggtcgtcggtgctggtgtcggagacggccaagaagtccaaggagatcttctcggagaccgccatcaagtcccgcgagatggccgcggaggcgaccaagcaggccgacctcctcgccggccagatcatgcacctcgcctcggacatc

SEQ ID NO: 117760 - DNA, 271 bp, Zea mays
  Clone ID: MRT4577_38885C.1
atccttggctccgtgctcgtccgtgcacccatccacgagctgcatctgcgaccagtggcgcacagtcatctcctcctccttggtggtcggcaatggcctatgcaagatagcagtggtgccatggcctcctgcgcatagcccatccatggaggtcgcatccctgcgcgggcccgacgtgcctcatccccagtcgagtcgccgtctccgattctgcagaggacgcgcaacaacccacgccggcggccaccgctctctaggccgcgcgactttc

SEQ ID NO: 117761 - DNA, 292 bp, Zea mays
  Clone ID: MRT4577_38886C.1
gttggcttctcactacccctccggttcggattccggctcgtgaggttctccgggggtcaggatcgagggtgaacggagcgagatgacgcagtcggatgctgagtaccgctcattcctcagcaggcctcacatgcgccacggactaccactccgtacacatcgcctacatcacctacggggaagacctcgagtccaagatcatgctcgatccggacacgcagaggtacagatgcttcggctgcgtcaccatcttcacggacgatgcaatgctgcacgccatccagggcatgaa

SEQ ID NO: 117762 - DNA, 595 bp, Zea mays
  unsure (1)..(595): unsure at all n locations
  Clone ID: MRT4577_38887C.1
ctcttggcttgctccttcccatgggggcccagccgagctctctaccctcaccgtggctctgaaaccacaggccggagcccctctcctacacatggcgcgctcctcaaacaccaccagtgggctcgccgtcggttcccccagcgccgaacctctgcatctaccccatcatcacctgctcgatgctagtgatggccgccgttggtgctatacatacttccccgattgtcggacgtgcgcgtgctccacctgcgtcgagcacccactagagctcactggtgccgaccctgctccagactggacgacgaagtatccgagctgcgaccctactacctccagcacccagctcgctccctccccaaccgaatctcctagcactcgggcttgctatatgcgagcgcgcagatatgtgcctgtcacgtgttcgactcagccgagcaccgtctgccccagcgtgactcgccccctggccgccggttcgtcctcagccctggacgccattctttgccgntcacctcgcccaacgccggtccggctgccgtctccgatcttgtcctcgattacccccaatcgtcgtggggcacgtgcctacaagcag

SEQ ID NO: 117763 - DNA, 351 bp, Zea mays
  Clone ID: MRT4577_38888C.1
aaatctctaaaaaaactaccttcttctctcaatgaaaaactcttcaattctcttactattctgcttcgctttcttttatcaaacttttgccactcaccttgtaatcgttggtcagcttgcctattacgaaggaacagaagaagaatgggtctggtggtctcatgcagctgaagaggcagctgaagaagctcttgaatggaacactgaggagctagaagaagatggctgggtcgatgtagacttagatgttgcagcttccgatcctcaaatacagcaagcccagaattttggcattcaggcagtccttcaaaaaagcctaacagaagggctgattacagatgtgaacttcag

SEQ ID NO: 117764 - DNA, 251 bp, Zea mays
  Clone ID: MRT4577_38889C.1
cctgcagtaccgttcctttaattcccgtgcggccgcgcgcgttcgtgaagaaacccttcgttgggtcatcccatgccaagggcattgtcctggaaaatattggggggggggccaagcatcccaactgcgctattcgtttgtgtgctcgtgttcagcttgttaagaatggcaagagaattgttgcctttgtgccaattgacggatggttgatctacattgaggaaattgatgaggtcttgattggtggattt

SEQ ID NO: 117765 - DNA, 336 bp, Zea mays
  Clone ID: MRT4577_3888C.1
cctcatctagcatatcagcaaagaggaccaagggaatgtttttgcaataggtcccgccgatccacggccgcgggatgacttgtacacagtactcgaccacgaaaaccatgacgaaacaatcgcggtctatactacaaagatggttgcagaacttcttggctgcagcattgaagacctcaatcgagatctgacataccgccacatgaaagtacataatgaaacccttacgcacaaacttaccctagctaatgcaactgacacactataggctgtagccaaacaatagtttgccaattggcttgaatggccttgtagaaaaaaaaaagaagtctctct

SEQ ID NO: 117766 - DNA, 164 bp, Zea mays
  Clone ID: MRT4577_38890C.1
tacctagtatgcttattagcaacgtaaccactgacttagatatagaaaatggacgaaaaagaggatgtctagcccttacacaaacaaaagagctgaactgccataaaaatacatgttaggattatcggggaagtaataaatatctaagaaaacccacaataatg

SEQ ID NO: 117767 - DNA, 404 bp, Zea mays
  Clone ID: MRT4577_38891C.1
cccacgcgtccggcgagccaaacgtgacgtttcggcctgaagaagaaaaaccccatgcgcttagagcgtctgcaacaacgtgacctataaaaatgccctataatttaaaaataagtatattttatagaatttagggcataaacaaaacacctcgctctaacagtaacgcccagcccactacggtgtagtatatttgagtcacttgagagggtgccctatagtttttaaacaaaaatttatgaaataggggactggtggagtagattttcctgggtagagccccatatttcaatttggggggacttttttgagacattggtggagatgctcttaggggacgtttgggttgcatggtataaccggatgaaatgagacgatccccccaaatatggtggttggggtcc

SEQ ID NO: 117768 - DNA, 660 bp, Zea mays
  Clone ID: MRT4577_38892C.1
ccggccggggagacttgagagaggagagcgaccgacgacctcgaagcttggcctgcgcggtggtgacgatggatgtcaaatgccggcgtctggaggggaaggtggccgtcgtgacggcgtccacgcaggggatcggcctagccatcgccgagcgcctcggcctggagggcgccgccgccgtcgtctcctcccgcaagcagaagaacgtggacgaggccgtggaggggctcaaggccaaggggatcaccgtggtgggcgccgtctgccacgtatccgacgcacagcaacgcaagaacatcatcgagacggccgtcaaggatgctgctccccacctacgggcagggtcatctgtgatccttatttcttcaattgctggttacaatcctgagcaaggattgacaatgtatggtgttacaaagaccgctctctttggtctcacaaaggctcttgctggtgagatgggacccgatattcgtgttaattgtatagcccctggttttgttccgacacggtttgctagtttcttcatagacaacgagaccattaggaaaaagcttaacgagaggactatgcttaagagattgggttccgtggaagatatggcggcagctgccgcattcctggcatctgacgatgcatcattcatcacagctgaaacca

SEQ ID NO: 117769 - DNA, 2152 bp, Zea mays
  Clone ID: MRT4577_38893C.1
gaccgacgacctcgaagcttggcctgcgcggtggtgacgatggatgtcaaatgccggcgtctggaggggaaggtggccgtcgtgacggcgtccacgcaggggatcggcctagccatcgccgagcgcctcggcctggagggcgccgccgccgtcgtctcctcccgcaagcagaagaacgtggacgaggccgtggaggggctcaaggccaaggggatcaccgtggtgggcgccgtctgccacgtatccgacgcacagcaacgcaagaacatcatcgagacggccgtcaaggtcgcaactgtggaagggggttccagtctttcagggcttgttttgttgtcctcgtatttgctcagtccaaaatagttcattttcagatggattacattgcattgtcagcttcctcttgttgctaagcgatcccatcaggcctccctgcggttaacgttttgctgaaccttggggaagagggggattcctgtcaactctgtttttttcctagtaggatctggctctgttgctcacccgacattacctgcctgccctcgttagtcgccacctcgtattttctctagctgcttgcttaatactagcttcgtgctaaaatagtactctctccgttattttttatttgtcatgtttaatataaaaatgaactaacgagcgacaaatatttaattacggaggtagtagtcgttttagaaaatttgtagattcgtacaattcttgatgcatgtgttttgtatgtgtgtctagatttatcatctatttgaatataaacataaagaataatagctaaaccgactaatattttggaatgtagtacattttttggtgcaacggcattgtccaaactagctaagaaacatgggttcatggttggtaaaacacagacattgatagatacatctttaaactgggtaacagtgagatctatttgtgcataagtgcaaataatgccgctactagagctagaattgtctttttcttaaattatgaactaagacaacctcatttatacaaatatctactggaatttcacttatgagtataacgctcttttatcagtttagtcaatagcttttccaagcttacgaacagtagcgtagtatatatttatcatgtgaaagtgaaagtctcgagccaaaaggccgtgtcatttctcttttatctgttcatcttgtgacattgaggttgatggctagctcaacttgcatttacttcattagtacttcgacacacagtggtcataccttgtcttattcgcttgcatctaaagtgtacctttttcgtatctcaaatcacttgttttgttgatcatgttgtacattattttagtttatgttcatgtcttatatattgaaaagcatttgaggatgtgaggattcgtgtagcagtaatcaactgattatatggttgcagaactttgggcacattgatattcttgtctccaacgctgctgcaaatcctactgtgaatgtcatacttgaaatgaaagaggttgttctcgataagttgtgggatattaacgtcaaggcttctattcttcttattcaggatgctgctccccacctacgggcagggtcatctgtgatccttatttcttcaattgctggttacaatcctgagcaaggattgacaatgtatggtgttacaaagaccgctctctttggtctcacaaaggctcttgctggtgagatgggacccgatattcgtgttaattgtatagcccctggttttgttccgacacggtttgctagtttcttcatagacaacgagaccattaggaaaaagcttaacgagaggactatgcttaagagattgggttccgtggaagatatggcggcagctgccgcattcctggcatctgacgatgcatcattcatcacagctgaaaccattgttgttgctggaggggtgccgtcgagattgtaaatttggctcaagtttgtaccgattgttactaggttggtgacatagcaactatactgtaataatccactctgaaaatgtgggtcgtgctaagttggccaccgttagatctaataattttttaggtgtcttggtatttgtttgagataataatctactcagattatctgtcacttagttcaaattttattggattatataatataaatagataatcccaaac

SEQ ID NO: 117770 - DNA, 364 bp, Zea mays
  Clone ID: MRT4577_38894C.1
ttcaccgcatgatcgagtggggaactgttcatacaaaatttggtgcacagatgcttgtcaaggaagaggggcttggagaggaaataaaatatgagatgcctaaggcttgggtgcagttcactggtttacctaaggaacttagagagtactcagtaatctgggcggttggttctatgctaggcatctcaaaagaggtggatatgctgtttactcggaaatttgacagggcaaggctgaaggtggccgtgcttgactcgaatttgattccgcaagtagttgatgtggtaattggagactacttatatgaactgaaattcagggtggagtcagaagctgaaggtgaccagcctttgccgatggatat

SEQ ID NO: 117771 - DNA, 516 bp, Zea mays
  Clone ID: MRT4577_38895C.1
aggagacgctggccgaccgcgcgcaccgctaccggggcatcgtgctcgtcatcctcgccccgctcgcgctcgtctctctcgtcctcctcctcatgccacgctcacccgctggcaccatgggcagcgcccgggatagacagcgagatcgagctcttcgtccaggtacacactcccccgcccggtgacccgttgccggacctggagtcacgctgcctagactcgccgctgggtggattcgtcgaggtggaggtcggattgtgaccacgccgtccagttaggacgtcgtcgtctccagatccaggggatggggttgctcggcatggcggccaagggcccctcgcccacgcgtcgcctcctgccgcagccgcacttggccgtctcctcgctggtggcctccatggctctgatccacccttcctcaacacccaaagatggttgacgtcaccttcgccgtctcctcgccagtggcctccaccagccccgcagtccaagacaaagccgcgacatgagtcaacc

SEQ ID NO: 117772 - DNA, 930 bp, Zea mays
  unsure (1)..(930): unsure at all n locations
  Clone ID: MRT4577_38896C.1
cgccgctcagccgccgnccggttacttactgcntgtctaccactttctcatcttcctgggcccctcgacttccctcccacagtcccaccttgccctcctgccttcccgacgacatcccctctgcctccgaccaccctccctcccacctagcccaccttccctcccgatgaggtaacctctgcctttgattccgttcgactatgcccgacctcagtctctgccgcatccaccgtcgtggcctcacccacggtcgccttcccgatccgggcgagcctcgccgtcatccccaccgccgcgcccttgtcggcctccccgtcgctgcgcctcgcatcggcgtcgtccatcgtcgatgcgtccgggtcctcctccccaggctccggccactccgggctccccaatccggttgagccccgtcgacatccccactgtcgcgcccttgctggcctccccgtccccagtctctgccgcgtccaccggcgtggcctcacccacggtcgccttcccgatccgggcgagcctcgccgtcatccccaccgtcgcgcccttgtcggcctccccgttgctgcgcctcgcatcggcatcgtccatcgtcgatgcgtccgggtcctccccggcctccgccactccggcctccccaatccggttgagccccgtcgacatccccactgtcgcgcccttgctggcctccccgtccccagtctctgccgcgtccaccggcgtggcctcacccacggtcgccttcccgatccgggcgagcctcgccgtcatccccaccgccgcgcccttgtcggcctccccgttgctgcgcctcgcatcggcatcgtccatcgtcgatgcgtccgggtcctccccgacctccgccactccggcctncccaatccggttgagccccgtcgacatccccactgtcgcgcccttgctggcctcccc

SEQ ID NO: 117773 - DNA, 1381 bp, Zea mays
  unsure (1)..(1381): unsure at all n locations
  Clone ID: MRT4577_38897C.1
ggcgatgaattcgtattactggcccaatccgtttgcttatttgggctggggggcaccacaagtttttgcctattgacaggttgatcaggtagacatggccgaagaggatgcgatccaaaatggcctctgtgcattaaagttccatcaagtatttatattatctgatcgcaagagccgatgacttgcatcgagatgagtccttacttcgggaacaaaagctcataaggtcaattgtttccgaagttttcgctgatgcttttggttcgtcaagctccaccaaaaggcagggggcatatgttggacaccaaaatgagcggacggtccggcccttgggcccgaacggtccgcgtgtcccgagtgaaagggaaatagggccaaaccttttcctaaatgattttggtggttgaattgcccaacacaaattattggactaactagtttgatctagattatgagttctacaggtgccaaaggttcaacacaaaccaacaaaaagtccaacaaagggttcaaataaaaagagcaaaagacaaccgaaggctgccctggtctggcacaccggactgtccggtgtgcaccgnacagtgtccggtgcaccaggtggatccgggctttcttctttctctttcttactctaagccttgtaagcgaagcaagagacaccaattgtgtggtgatccttgcggggtctaagtgacccgagaaatcaaggaagaaagctcactcggtctaagttaccgtttgagagagggaaagagttgaaaaagacccggtctttgtgaccacctcaacgaggactaggttctttggaaccgaacctcggtaaaacaaatcaccgtgtcatccgctttacttttcttggttgattttttttcccctctctctcggactcgaattttattctaacgctaaccccggcttgtagtgtgtttaaagttgtaaatttcagtttccgcctatccaacccccctctaggcattttttcagtttggatttaatatttttctgaaaaataccaaatttattgcagacggtaaaatatcgaataaaaacggtaatttctggaaatggtcggaagagggctaaagcgttttcgtttttgatttcgattttttatatcgattttgtttccgtattttgagtagccgtttccatttagacctaaatttcggtaaaacttcgaaaacgattcctggtatccgaaaattaccgtttccgttttgtacaaattccaattgaaaccaatatttcttgtaccaaaaataaatgctattttgtcacacaaaaatagaaaactagactgactcgctatagaaagatatgaacatatgtagaggttactgcagtcgaagactggattttctttggtctaatgctaaat

SEQ ID NO: 117774 - DNA, 1805 bp, Zea mays
  Clone ID: MRT4577_38898C.1
agttagtcatcctacagaatatggcgtggcttcacagtgcatcgacgcgacaaagctgtgaatccatcatcaacggagtccccgggttccttcctacattcgttcgttccacgccgccgtagaaagcaacccggagtccccaacgccaccggcaccggcacggcgaactcgggcacgcaccacagccagccggccggttcggcaggcaggcagagaggattgcattgcactgcttccatctcccctgcccgccccgccgcggcagatcccgaggcggctcgcacttccaggtcaactcaaagtggccgcgcccgcctagacgttgtcttctctccctgcactccccgccacgacgcagcagcagatccaccatcgacgcgcgcgccgcgcgccccgacgcggaacgctggatcccgcgcagcaggaggcggccaaccagtcgccgtcgcccccggcccccaccccgcctgccgcagcaagcggcgtccgctaccgcacgccctcgtccccggacctcctcctccccgccgacgccgccaagatgcgccgctactccgcgctgcccaacggcggccgccaggagacgctggccgaccgcgcgcaccgctaccggggcgtcgtgctcgtcatcctcgccccgctcgcgcccgtctctctcgtcctcctcctcatgccacgctcacccgctggcaccatgggcagcgcccgggatagacagcgagatcgagctcttcgtccaggtacacactcccccgcccggtgacccgttgccgatggcggcgctccggcaggacgagcccggcaggaacgagacccactcgccctcagacccactccccagggatcgggcgttcgcgtcgctgagcaacatcgccgacctcaagtccgtggcggacgcggcgacggaggacttggacgacgagttcgaccacatcgacgagagccactacgttgacacggaggactccacgaagcacaagaagaagagcccgatattccgcagatgcggcgagcttgcggtgccccttaccctccccctcacctacgatagcgatccctccccctccccctcctcctcccccgatcggttccccttcggtcgccgctacgacgtcgggttcttctctcttcccttgatatggcgccccccctcaatcgaccattcccgcagcggacccacaccgacccgttcgcgccggcctctggaagaagaatccaccgaaggcgaaaacgacgacggaggtccggctgactcgtctgggtctttgcaacagcggcaagcgggttggagctccgcttcgggcaggggagaaccacgtggagacctggagtcacgctgcctagactcgccgctgggtggattcgtcgcggtggaggtcggattgcggacacgccgtccagttaggacgccgtcttccccagatccaggggatggggttgcttggcatggcggccaagggcccctcgcccacgcgtcgcctcctgccgcagccgcacttgcccgtctcctcgcaggcggcctccgtggctcagatccactgcttcctcaacacccggagacggctgccgtcgccttcgctgtctcctcgccagtggcgggcggaatttctctaattatcttgctctatggcatattttataggccaatagttcttatcttcctcctgctcgtgctcattgtcacatcacagtttgagtggaagcagcatattggtgaggctgaggcgaatccaacagctacacgaaggaggcaacaggcgcttggaagggaggatgctgttaaagagaaagtcgtcctattgtag

SEQ ID NO: 117775 - DNA, 2399 bp, Zea mays
  unsure (1)..(2399): unsure at all n locations
  Clone ID: MRT4577_38899C.1
aattcggcacgaggccgcgtgccccgctcccccagcaacgccggcttccatccacccccgcgcaccgctccccctttccccctttccttgcgcgatgcgagcccacaaatcacgccaatccatggcagcccgcgtgccccgctcccccgcagcgcctggctcccctttccttgcgcgacgcgagatcggcgagattgccctcaacgcgctcgcgtcgcgccgcggatcccccaccctcctcccctctgcacgccgccatcaactcgcaccggccctcgcccgtgatccatcctctcccccgcggcaatgatatggcgtcccccctcaaccgaccattcccgcagcggatccgcaccaacccgttcgcgccggcctctggaagaagaatccaccgaaggcgaaaacgacgacggaggtccggctgactcgtctgggtctttgcaatagcggcaagcgggttggagctccgcttcgggcaggggagaaccacgtggagacctggagtcacgctgcctagactcgccgctgggtggattcgtcgcgatggaggtcggattgtgaacacgccgtccagttaggacgctgtcgtcttcagatccaggggatggggttgctcggcatggcggccaagggcccctcgcccacgcgtcgcctaatgccacagccgcacttggtcgtctcctcgctggcggcctccgtggctctgatctactgcttcctcaacacccggagctggttgacgtcgccttcgtcgtctcctcgccagtggcctccaccagccccgcagtccaagacaaagccacgacatgagtcaacccaagtccggtcgcacctacacagatggccgtacccaacgtgagtcaagccacgtcggttcccctcccttgcgtccgcggcgtgatatgagacggtgagatttcctttctccctctcccggtgagttcctggctcgcatttggtagtccgtcgtcgacgtggccgtcggatccctgggttactcccgcagtcccgctctcttgtggaactggtacatccgtttcggtttgtggttctgtaattgctgatcggcgtgatgaattttaggccaatagttcttatcttcctcctgctcgtgctcattgtcacatcacagtttgagtggaagcagcatattggtgaggctgaggcgaatccaacagctacacgaaggaggcaacaggcgcttggaagggacctcgccctcgcgtcgcctcctgccgcagccgcacttggccgtctcctcgctggtggcctccatgcgagaaaatctaagaaactgaaatccaacaggggaatttccctttcggctgctgcgaaactgcagccaaccaaggagtggaggagtaggagtagcggcagtcaaagcgtggcgggcggacgggcgggcaagctggaacccattggatcggtggtatcaaggaatcggaagagggacccggctctcccctccccaccccgcgtcccacgtcggttcccctaatctgcgtccgcggcgtgatatgagacggttctgtaattgctgatcggcgtgatgaattttaggccaatagttcttatcttcctcctgctcgtgctcattgtcacatcacagtttgagtggaagcagcatattggtgaggctgaggcgaatccaacagctacacgaaggaggcaacaggcgcttggaagggaggatgctgttaaagagaaagtaatattggcacaagagaaaaacattcagcagcttaatgagcttattcagagccttcagcttcagctattgcattgccggggcagtaacagttctgctcagaccgcctcaagccacagcgaagtggagggacatgaaatgattggtgactgataacctctcatcccctcccctctgttgacataggtagtttgcttcagagtataaccaagacaagaacagaagctcttcaggcaatggaaactcttgttgtcgccttacggtgggccggtagagttactggtattatgtgctttacgttatcagtatcacctccttttgcattctcacccagcgtgtacagggttttagtatgttggtctaggttactttgctgatcaaggttcgaatgtatttgttcttttaaacatatgcactccgatctttatatgatggaccatttctttgtgtcaaaaaaaaaaaaaaaaaaatgactcgagactagttctctctcgtgctctgtgcaagattcaaaattttacccagcaaattttgttctttgccaactacgggtgacaggtgacagtgtgctctaaattttacactataaacgctagtttgggagccacanaaccggaaaggattgtacaggctaaaatttatttcttatttaaatttgattaagaaagatattttagtccttccaatccta

SEQ ID NO: 117776 - DNA, 358 bp, Zea mays
  Clone ID: MRT4577_3889C.1
tcccacccgttgatggccttgattgtcaccaccttcgatcccttccagaagtctcaagtacaccgccaaccgtgcccatagcccaccactcctccagaatcctcggcaacatcatcaacggcagaacgatcccgctcatacatgtatagccggcctaccgcaacaagaagttcgagacactttcatacctgccaccgctttccaccgacgacctgctgaatcatagtcactacctgctgctcaacgactggatacaccttactctaactaaaacaggtcggattcgtgtaccgtgaaaactccacctacccttgctactacaaccgccagtactggaccatgtctgaatctgcccata

SEQ ID NO: 117777 - DNA, 153 bp, Zea mays
  Clone ID: MRT4577_388C.1
gtgtacatgatcagagtggagctcaacggtggagacattagagccatctatgccaatcgcgatggcagtagtgaagtggctgtcgttacagaggccgtctccgaccgcaatatcgcgggtgcaagacgagctgcgcgcaagcgatgcgcacgt

SEQ ID NO: 117778 - DNA, 361 bp, Zea mays
  Clone ID: MRT4577_38900C.1
gtctgatgtttgtggcttcccacgaaataagaaagtacatttctaaaaaaaaaaaaaaaaaaaaaaaaaaaaaaaaaaaaaaaaaaaaaaaaaaaaaaaaaaaaaaaaaaaaaaaaaaaaagaggaaaaccaaaccccccagtctggcgacgtcacaatacagatggcccgaccttccttttaaagggcccaaattggacaaaaccgtggcgcatcccaataaactggccttgcataaaacccccctttcccggaaaaaccctgacgtgaacaaacccaaacgccttgccctacataaactttgcacaagctgactgaataacgaacaaggccctaacgcataacattaaccacaaatggc

SEQ ID NO: 117779 - DNA, 766 bp, Zea mays
  Clone ID: MRT4577_38901C.1
cctgtgaaatggaggaagactatgttgagccgaacccatttccatttcattttgcgaatcaccctcggcgagacccggacccggaccggagcaccatccgtctccggcatcttaacccgccgtccgtgccccgtcgcccaccgctcatccccgccgcgatggggagcgtagacctggtgctgaagtcagcgtgcgagggctgcggctccacgtcggacctctacggcactgggtgcaagcacaccacgctctgtagctcctgcggcaagtccatggcgctttcccgcgcccgatgtctcgtctgctctgcgcccatcacgaacctcatccgggaatacaatgtgcgggcaaatgccagcacagataaggcattctctattggaagatttgtaactggtttgccgccattctcaaagaaaaagaatgctgagaacaaatggtctcttcataaagaaggcctgcaaggacggcagcttactgacaaaatgctggagaaatacaacaggaagccatggattttggaagatgaaactggtcaatatcagtttcaaggtcatatggagggatcacagtcagcaacagctacatactatttgttaatgttgcatggcaaggaatttcacgcatttcctgctggttcctggtataacttcagtaaagttgcgcagtacaagcagctgactctggaagaggccgaggagaagatgaataagagaaagactagtgcaactgggttatgaacgttggatgatgaaagcagctacaa

SEQ ID NO: 117780 - DNA, 280 bp, Zea mays
  Clone ID: MRT4577_38902C.1
cccacgcgtccgagcagagttacaaaacatgtcgatcatccatacatccatagctgtaggcgaggggtccgtcaatgccgcgcgcagcaagaatcgcgtcttggcaaccatgatcaagcgctgcacggacgggagcgccttcaccaaatgcgatgcctgcaacaaagacgtccaagacctcctaatacacatgcacactttcaaccgtcaagaaaagatcaggatgacgctcgaagcgcatgtagtacaaaagaccgaccatgtacccagtgctgaccga

SEQ ID NO: 117781 - DNA, 431 bp, Zea mays
  Clone ID: MRT4577_38903C.1
aagtaaacacagctggtaacggtgattcccaataaagcagatcaacacctggagcgggtacaattctctcgtattggcatccaaaaatactaacggaaatgtaactggggcacacaaagacaacatgtatggtatgagataaaataggctggagcattgtcaagccaccaacattatctgtaccccaagggaaggactgatcaggaagtgacgcctcagatcttgtttaagtcaaatatttcttaaattttaccgtactcagtaagtgaataaggacacaacatagagctcacagaacagggtccaacgagacaaagacctggacgataggcattatgagtggcaggttcttgataccatatccaacaggaacaaggttggatacgccccagaggagaccttcgatcaggcacacctttaacatcttcatc

SEQ ID NO: 117782 - DNA, 178 bp, Zea mays
  Clone ID: MRT4577_38904C.1
aaaaggtactggaaccagtcccacgctttttttttgtacgacataataaaagggggctcagctttttcaagtacatggaaaaaattctttagttttgacgatatacctgaataataaaagggagctttgccttaacaacattagttttaacaggaaaacatgacccgttttacgtttt

SEQ ID NO: 117783 - DNA, 310 bp, Zea mays
  Clone ID: MRT4577_38905C.1
ccggccggggccgtgcgggccccctccgccaggatctggtcatcgcgcgcgcgggcacggactcgtgttgctgaccggtgggccccgttcgccgggtccttcttcctctgctgggtgccgcggcgtccgtattccaaatcgccgcggcgaaagccaaatcctcggccgggattttcgccgcagatcttgctactcgcacccacctgctcggactctgccctaggtataaagccagacctcctcgcccctatccgctccacgccaaccccctggaagcttggggcgaagcttggagctccgccgtgcggcc

SEQ ID NO: 117784 - DNA, 475 bp, Zea mays
  Clone ID: MRT4577_38906C.1
ccacgagcccggcaggcaagcagcccggtgccgatggactcctcgggctccgcctccgcctcgtcctacaagctgcagctcgccctcgcggcactcgttggcgcctccgccgccgcttcagcggcctactacctgcactgccgtgccgtcgcgcaggttgctcgctccgcctccacgagccgccgtaggccccgcgcccccgcctccgccgctagcggcggcagcggcggcgtgaagctccctccaccgcgccgcgctgccgtcggctcagcctcgcttcccgacctctctgcgttctatgatgtcggcagccgcggcggcggcgggctcgccgccggcgggtacctcgtggaggaggaggaggacgacgatgcggatggggtcgtgggcccgcacgtgaacggtggcgcgctcgaccccgcggagttccttcagataccccagggcttgcctagactgcacgtgggccccgacg

SEQ ID NO: 117785 - DNA, 543 bp, Zea mays
  unsure (1)..(543): unsure at all n locations
  Clone ID: MRT4577_38907C.1
tttgttgctactgctnaaatccccctcacactcacacccctctcctaatcatccgcttaaacccacgagcccggcaggcaggcaggcagcccggtgccgatggactcctcgggctccgcctcgtcctacaagctgcagctcgccctcgcggcactcgttggtgcctccgccgccgcttgagggggctactacctgcactgccgtgccgtcgcgcaggttgctcgctccgcctccacgagccgccggaggccccgcgcccccgcctccgccgctagcggcggcggcggcggcggcgtgaagctccctccaccgcgccgcgctgccgtcggctcagnctcgcttcccgacctctctgcgttctatgatgtcggcagccgtgggggcggcgggctcgccgccggcgggtacctcgtggaggaggaggaggacgacgatgcggatggggtcgtgggcccgtacgtgaactgtggcgcgctggaccccggggagtttcttcggataccgcaagggttggctagactgtacttggggcggcgacggtgg

SEQ ID NO: 117786 - DNA, 1896 bp, Zea mays
  Clone ID: MRT4577_38908C.1
cctcgagccggcgggaaccagacacaagccgccgccggacgacctcctcctgcctccaccgagcctgcccctgccggctgctggcccgccatgaggaagcgcctggagccccgtctcgtccgggcgctggctaccgccaccacctccgcggcgccttcatcgtcctcgaagccggtccgccccgcggcgccgttccttgccgtgctcctccgacggggccgagcggacgccgcggcgctcctcaaccgccgcctccgcgcggctcccgtcacggaggcctgctccctcctctccgcgctcccggacgtccgcgacgccgtctcctacaacatcgtcctcgccgcgctctgccgccgcgggggcgacctgcgccaggcgctctccctcctcgccgacatgtcgcgggaggcacacccggccgcccgacccaacgccgtgtcctacactatggtcatgcgagggctctgcgcgtcgcgccgcacggatgaagccgtcgcgttgctccgctccatgcaggccagcggcgtccgcgctgacgtcgtcacctacggcacgctcatccgcgggctctgcgacgccgcggagctcgacggggcgttggagctgctgggcgagatgtgcgggagtggtgttcatcccaacgtgatcgtgtacagctgcttgcttcgtgggtactgcaggtccggcaggtggcaggatgtaagcaaggtgttcgaagaaatgtcccgcctaggagtcgaaccggatgtgatcatgttcactggtttcatcgacgacttgtgtaaaaagggaaggataggtaaggctgtaaaggtgaaggacataatggtgcagcgggggctggagccaaacgtagtgacatacaatgtgctcatcaattgcctgtgcaaggaaggatcggtaagggaggcactggcattgaggaatgagatggatgacaagggtgtggcaccggatgttgtgacatacaataccctgatcgcagggctttctggtgtgcttgagatggatggggcaatgggtttgcttgaggagatgattcaaggagatactctagttgagcccgacgtggtgactttcaactcagttatacatggactatgtaagatcggtcggatgagacaggcaatcagtgttcgtgagatgatggccgagagagggtgcatgtgtaacttggtgacatataattatctgattggtggattccttagggttcacaaggttaatatggctatgaatctaatgagtgaactgatcagttctggattggaacctgattcattcacctatagcatattgataaatggcttcagcaagttgtgggaagttgaccgtgcggagatgttcttgcgtacaatgacacaacgtgggataagagccgagctatttcactatattcctttgcttgcagctttgtgtcaactgggaatgatggagcaagctatggttttgttcaatgaaatggatatgaactgcggacttgatgctgttgcatatagcacaatgatgtatggtgcttgcaaatcaggagatataaaagcagctaaacagttgcttcaggatatgcttgatgagggtctggctcctgatgccgtgacatattccattctaattaacatgtttgcaaaattaggagacctagaagaagctgagagggtgcttaaacagatggctgcaagtggctttgtgcctgatgtcgctgtatttgattcactgatcaaaggctatagcgctgaaggccagataaacaagattctggatttgatacatgaaatgagagccaagaatgtagctattgatccaaaatttatttgtacccttgtccgcctccctcaacagatgccgctgctctggtctgccaccaccgccttggtcgctcgcagccatcagtcttga

SEQ ID NO: 117787 - DNA, 326 bp, Zea mays
  unsure (1)..(326): unsure at all n locations
  Clone ID: MRT4577_38909C.1
ctagcaacatagaggcacatagtgtaccaacaatggcagccaaaatatttgcctccttatgctccttggtctttctgcaagtgctgctacggcgaccattttgccgaatgctcgcngctcctatagcttccttcttcccgacctctcaccagcgggtctcggatgtgaaaaccatcttaacctcggatcacagatccatggattacttatacctgtctccatatagctatccatcttggctatgaaaatagcaactcaactggtaaatgtgattaaaggttatacatgttgatgttatgaaaatctacatcttgtacaattataca

SEQ ID NO: 117788 - DNA, 573 bp, Zea mays
  Clone ID: MRT4577_38910C.1
ggagcttgaggtggcggacccgagacgagcgcggtggaggggatgggagccgacgccggtgcagaggcgacaagagcggagggagccgtcgacgcgcccatggagagctcttccagaaggagttcggagcgaacctcgacgaatgacgggaaggggcgctgccgcttcaggcatgtgttcttcctgcccccaggagatctttttgtggcaattatgccagagtcgtgaagcaaattttgcaaggcctgaccaatatgcatgtattaccctccatctcccactactcattctgtcagttttatctgtgttctagatatgcttatacctgaatggtattttttcttctgttttttctcaagttgtggctcaggttgcctctggagaagtccgagcctatggatgatgatcttgataaaataaataataacagccacacgatattttttttgacaattgagtgtgcctggaacatgatataaaagtattttagcattatacacaatgcacatgtgtatgtgttttctttagttacagagtgaaattgtagactcatgggatttatggaattcattc

SEQ ID NO: 117789 - DNA, 527 bp, Zea mays
  unsure (1)..(527): unsure at all n locations
  Clone ID: MRT4577_38911C.1
taggggccttttttttttttttttttccagaatgcatgcctctgctgtttgtttttttaaatttagctgagagggagtagctctgctgcgtctgtcgggcggcgtcgccgccggcctggacttgggcgtccggcggccgctcgtgctcgacgagttgctgcaggactggttctctttccctgccccggaccggtcatcctggctcggcgaggtagtgttgacgacgggctttgttggcgtttgcttgccattggccacgccgttgtgcggcgacgatggacgagcgttgggaggatggtggctttctgtcgcgggtgagatgtcagaattcagcaccgggttcggcggtgtgagctgcgccggcacgggagcatcgccgccggggagttgggtgttcttggcggaggagaagacggtcgcctcctggtagattccctgccggaaactcaccacctgctcctctagccggacgacctcctcctccaggaccgccacctccgngggaagggctagcgtctgaaacgcca

SEQ ID NO: 117790 - DNA, 503 bp, Zea mays
  Clone ID: MRT4577_38912C.1
acagaaaacagaaccaaagagggggatcatccaagggggcaaaaccgggggggggggagcccccagcccaaaggcggaaacgggggggaacatgagaaaccaacagattaggagtcgggggggaaacaaaaaaaaaaaagggaaagcaccggggcaggattccggggaaaaaaaaacaacgggtggacgcagaagactggcggggaaaagggggcgaaaagacgcccggctgagggggaaaacagggggggggcaagctagcactgaattccgccaaaaacagggagagtgggctggaagcagcaaggcacgaacaaggaaccaaaggtcgagaaaggagggcatcccggaagagccgagtaggcccccgaaggagcaaccacaaaaaactgggggtaccccggagggagggaacgataaaaaaaaaccggccgcgggggcccaaccggaaatttaagagagcaagcgggaagcggggcaaaatctggaataagggggagaaa

SEQ ID NO: 117791 - DNA, 287 bp, Zea mays
  Clone ID: MRT4577_38913C.1
aatacataaaacaacttatataatattttattcatatttggactaatgggcttgataacatacaaaaagatcaacatcaaattttataaatatctattttaaaatattaaatttgttctaacagctcggattaccactttcatccctaattccgagtacatgtgcaggacatgggaggattcctctttcctcatgccaaagcaaagtgcttaatagacaccaccagagacagatttattcaaaacttggtttcctaacactctttgctaaatatttggattacacaa

SEQ ID NO: 117792 - DNA, 234 bp, Zea mays
  Clone ID: MRT4577_38914C.1
gatacacataaataacggcacgatttcacactaatattaatggagatcatctcggtaaaaggtatatcgataaacctagacacaaacccaatgacatgtgctagtcctaacctaacgtgatcagacataccatcccaatgccttttttacacatcccagccttgctcatgtccctccaagaacacgctaatgacatccctccttgccggcgccgggtttcatcacacatacatg

SEQ ID NO: 117793 - DNA, 248 bp, Zea mays
  Clone ID: MRT4577_38915C.1
ggggaacgtatgaacccgcctatcactacctagcttgagagcaaaccactcactggcacctggatttattcacagccccgacgtgctgaaagtaggtgccccagtccggcgttggacgctccaccatatacgatagtaggatcttggactggtagaagaaggagcccaggccgaccattggcgccccgtggttgacagctgcagttcaccatgctgaccctgacggagatgatggccctggcgaaccc

SEQ ID NO: 117794 - DNA, 307 bp, Zea mays
  Clone ID: MRT4577_38916C.1
ccggccgggacacctcccgaactccgaactacaagtttcgcttctcgtcgcgacgactgggcgagaccgccgccgccgccgccgcctgagctaggacggttccctggagaagctgacatcgtcgtcgctgtcgctggcggggaggttgtctggccggacgggggccccgcggcggcgccggcctcgatctggtgttgagaaatggctgatggtgaggacatgcagcctcttgtctgcgactatggcactggtatggccaagggtggttctggtggacacgatgctccacggtctgcgttccgtggta

SEQ ID NO: 117795 - DNA, 287 bp, Zea mays
  Clone ID: MRT4577_38917C.1
acgcaacaattgcagattacttttacctgggttgaggggtccattttattcccaagggccaggcaaccagtccttaaattacttggttaccggcaagcccaattcccgtcttaacgaggccacccttaattgagctttcacaacattaccaacattccaatatattttagaaccggccacattccgaggccggaattctttaggcgggctatacaaatgtgcaccgcgcactgtaatgtccaacaacacgattgtggcagcaaacatataaaagaaaagcgcggggg

SEQ ID NO: 117796 - DNA, 507 bp, Zea mays
  Clone ID: MRT4577_38918C.1
gcacgagcctccattcattcacacaccacacctcccgaactccgaactacaagtttcgcttctcgtcgcgacgactgggcgagaccgccgccgccgccgccgcctgaggtattgccaccccttctttcccctcccttcctttcatgctgtgcgaagctgagcatcggaaccctgacctaaagctatttagcggcgtcgctcctctgcggggcgacacgtgcggaaccagcgccgccgccgcaagagttggcccgcctcgttctttacaatatcgccttcgcctgagcacgcggccggaggcccgcgtcggtgcgaggatggcggcggcgaggtctctcagcttttctcgcccgttctcttaagcgtacttgcctcgtgcctgcgccagctaggacggttccctggagaagctgacatcgtcgtcgctgtcgctggcggggaggttgtctggccggacgggggccccgcggcggcgccggcctcgaactggtgcgctatggccggatc

SEQ ID NO: 117797 - DNA, 589 bp, Zea mays
  Clone ID: MRT4577_38919C.1
ctctaaaccgcaatcttgccgctttccttaagagatgaaggataatgctcagtgatggaacttattacgatcgtatagttaggcatatacgtaaggtaatgccccaatttgaagattttgtgttggatgccttgccagggaatgagttatttgttcgtttgaattggtctgacaattaccgccctgatcatttatttgggccggaacagatatcaggtggctctcttcgttttatggctcttacggttttattgcttcagccaccagaattattgcctaaagtgattgtacttgatgaacctgaattgggtttgcaccccgaagcaattaccgagttggcaggaatgatcaaacgtgcttcaaaaaacacacagattgttgttgcaacccaatctacacggttagtagatgagtttgatgccgaacagctgataattgttgagcgtgataatcagactggagcaagcacctttaaaaagttaaaacatgaaagtttgagtgaatggcttcagcgctatagtttatctgaactatgggagaagaacgttcttggagggcagccgtgattagattacacgtaacggctgaa

SEQ ID NO: 117798 - DNA, 286 bp, Zea mays
  Clone ID: MRT4577_3891C.1
gtagctggagcttatgagattcgcggggatctaaaaaagaatgttggttcaaatgcaactggcagcaccaactgtcttgctggacttgccatggttgacgatgaggaatccggcaccgttggtagatctggtgacatcggttgatgctacaacatgctcccagaagactgccgatggtgcttcgatgaaggattggactggaggaagacggtgctctccacaacatagttcctagtttcactggcgcatcaaaggttgatggaaaagtcgtgcttgaccttattgg

SEQ ID NO: 117799 - DNA, 299 bp, Zea mays
  Clone ID: MRT4577_38920C.1
agaacacgtgcttaggtacgtttgtggcgaccacgaccatctaggccaaactcagcggtgcgcccagaaaaggcaacactggctacaactctagatactcaacgttagcatggacaatattttacgcaggactaagctatctattctagaagtcatggcttaggaactgatgtataagacatgcatgcttagtgccgcactgtatcttggcttccattgcgctataatgacagtgatgttgcatacataaacgatggtcaagtcgttgttatggctattcattatctgcatacataggt

SEQ ID NO: 117800 - DNA, 814 bp, Zea mays
  Clone ID: MRT4577_38921C.1
ggccgctttttttttttttgttttcgatgctaatcatgttgatatcatatggatggaggagtcatcaagcaataatatagtacatgattttgaatttggattgcaacctgtactgtgtactgtctccctcccctccctttatggcgtttaattatgcgtctattctacctagtactctttacttactacaagtagtagtacctttcttcgcaccctgcaccgcacggcaagttcgtttttttctccttttttctttttttctttttgattgatgaggaggaagaaaagaaaatagctcttcagtattcagacaggaggcgctgcggcctttccctctaactccagctccagctgctcgacgtcggcggcggccgggttcttgaacctgtaccagcgcgcgcaggcgacgaagtagactaggttgaccgccgccatggcggctatgagcaggtagtagaggtcgacgtggccctggttgaggtcctgcgccagccagtcggggcggccgtcggggcctccggtggtccggtgcacgacgctgaccatgagcccgctggcgtagctggcgatggcgaatgccaggaagagcatggcccccgcgacgctgcgcatgttctccgggaactgtttgtagtagaagtcgacctgtccgatgatgccgaaggcctcggacaggccggcctcgagctgctgcggcacgagcaggaagcaggaggcggagtcgccgatcctgcggcggtggcgctcgactgcggcggcgacgagcatggtgacgatggagaggacgatccccgtgccgatccgctgcagctgg

SEQ ID NO: 117801 - DNA, 395 bp, Zea mays
  Clone ID: MRT4577_38922C.1
tcgtcccaagcctctacagtgagtcgtactatcctcacgtagaagcttttttccctcctcccctttgtacctctcccctgccctcgttgactgacaagaaaaagttgagcaaccatggttaactttactattgaccaaatccgtgccttgatggacaaggttgcgaacgtccgcaacatgtccgtcattgcccacgtcgatcacggaaagtcgaccttgacagactccctggtgtcgatggctggtatcatctcccaagcccgtgccggtgaagcccgctttacggacacccgtcaggacgagcaggaccgtggtatcaccatcaagtcaacagccatctcgctgttcttcgagatgacagaagatgacctcaggggacgtcaagcaaaagaccg

SEQ ID NO: 117802 - DNA, 731 bp, Zea mays
  Clone ID: MRT4577_38923C.1
gccggccgggtcggcatctcaagccaccatcgacctatcagtttccctacgtagcagtgcaatacattaatgagccgtgatgcgaaggataccatggtgcctctcctccacggacttcgacggaaaggacgtgaacgagctgactccttacgccttccaggatgtccgctgtgatcgatgcccaatacgatgttgaatgccaatgcgacggcatagtcctgttcagcccgtgaaacaggtcactcgacctggatgatgtacctggcccactgtccctcgatacggcgaactacctgaggagctagttcccgtagggactacggcctgctcacaccactgagggctagtcccccggacccgcgagacattcgacatagaaccttatagcatgcaggtgatccactcccgctgggccatgatgcgatgtgctccgtatagcgacttcccagttagctgctcgtccgtgaccgcgtctagatcacgcgagggcgtgtgaatcaacggcggctcccagatcttcaccgatggtggactgtactacctccggaacccgaggctcatccacgcacagaggatcctctccatctgtgcctgacatgtccagctcatgtgcgccatcgaggtctaccgcatcaacattgtgccgctcggcgaggtcatcgacccgatctatcccgatggtagcttcgacccggtcgaactcggcgacgacccctaggccttcgctgagc

SEQ ID NO: 117803 - DNA, 366 bp, Zea mays
  Clone ID: MRT4577_38924C.1
tttttttttttttttttttgatgccccgagatcgatcgatcgatctttcaagttttttttcaggcagcaacagcaacaagtaaaacaaaacgaaatttaaatcgtgtggatcatggatggagccaagctctgaaagccaactaaatcaataagccggaattgtgtatgagcagagagtggggtgtgcgattatctattttcaaatcgtcttcctcctccggacctgacgaccgacgctactgtatgcggtcgcgcgggcatgtcatgtgggcaggggccggcgctgctggcggtattctatttggtttggctggtgtgtgtgtgtatatattccccttgcccatgcgggggatcccgcatccctaa

SEQ ID NO: 117804 - DNA, 309 bp, Zea mays
  Clone ID: MRT4577_38925C.1
gatgtttgatggtttctgaattagactaccacaaacacaaacaatgttccgaggggggcctggatacaccaggctttctggccctaacatgtcatggtcaagcagaatcatcagctgcgctgacctaatcttagcaaagtcacacgccggatcagcctgggtacatccaattattccgtaacgtgcagaggatcaataccttgcgctcgtgcattccatccttggagggctctgcctgtggcgtttgcgtcatgtactcgtagatggaggctaagcgaaagcgttatacgatcacaatgacacacaaca

SEQ ID NO: 117805 - DNA, 226 bp, Zea mays
  unsure (1)..(226): unsure at all n locations
  Clone ID: MRT4577_38926C.1
caaaatcgacagaccctcggaaagccaagcctgngtaattcactcagagcagcccaaaggtgggggagatcttatcaggaacctgggcgccattatcaaatagtgacactctgaacaagctgtgaactaagctcaatgtggatggatttagagggcgcatctaacgcaaatcaactcaatcttcataaggctttggaatcattcattattattggtatgcataaaa

SEQ ID NO: 117806 - DNA, 226 bp, Zea mays
  Clone ID: MRT4577_38927C.1
aggatagtaggctttgcctattagaattcttattttgtgtaagcataatgttgcttatatatgatatctcaaaagtatctactgatcaattgataaaatcacaaatgtaaatgtgtatagaggacttagcaaagctctcttggacacaccgattaggtttagctttcgaagtaaagcatttaatagcctttttctttacccttaccttcggcagtctcaataccaa

SEQ ID NO: 117807 - DNA, 424 bp, Zea mays
  Clone ID: MRT4577_38928C.1
gccccacgacgctcatctctctctgcttgtcttctccctgctcttgctcgcgtccagccatggcgcacccgcttcctggctcgcctacacgcgcgtcagctcccctctgctcgtcgcgcgcctgctccctagagctcgcccctgcgcgcttctctgcgctccgcgcgtcccatctctctggtgcctcgcccagccgtacctccaactcggattcaatccagttcgcctatctccctgtgctcggctcctggttggagctctctgacgccgcgcctgtccaagctcccatggccggtgcttggtcccaactcgctgcgtactgtttgccgcactccctggcgctcgccctgatgcctcgctcggccgcctctggtccccagcagcggagctgcttcttccccagccggcgctcctccagtcgcct

SEQ ID NO: 117808 - DNA, 377 bp, Zea mays
  Clone ID: MRT4577_38929C.1
gattcccgggtcgaccagcttcgacaccgtacgaccgtactgatcctggcgccctgccgacgcgagacgagcggcgcagaattgtcaccgtgctatgagcagttaggtgcacgagctccgacgaagacaagactgactgcagcgcagtgaggagctgaagctgagctctaatcctcgcgtaggaacgtcaccggctgggcacccaaaagctctcaagataaggtggtgcgcaccttgatcgacacgtgatacagagatctcgcagaagcagaagtcggcgttgcgggaggcgtacaagatgaagaacctgctaccccctcgacctgcgccctaagaagacccgtgccattcgccggcgtctgaccaagcaccagatc

SEQ ID NO: 117809 - DNA, 142 bp, Zea mays
  Clone ID: MRT4577_3892C.1
tactgtaccgcgtggcatgcggaacgtcattagcttctttcttatagtggtcaccttaaaattccatatccactgggcccggtcgtttttacaaacggtcgtggacttgggaaaaaacctctggcggttaccccaactttat

SEQ ID NO: 117810 - DNA, 1723 bp, Zea mays
  Clone ID: MRT4577_38930C.1
ggtagtacaatctaactatagtctcaacaaaggagtgctgtagatgtattatccaacattatcaaggaatgtctgcacgatcatttgtacattacgagatcaaactttgcttctcatctgcaattttgttttgatggaagttcatgctgctatctctctgaagagtgggagggtgaaaatattgttttattttatggtctcgtagtattgtttaatctgctgaagagtgacaactttatttgtttccactgtaaaagaaagttagatgcggggattgtgtgccatgaatgcagagatcattacaacgaaggtttggttggagtccttaaacaagccttgtgtcagaacatgagcccagggcccaagtcttatattgcacatatactgagtatgtttggcctctgtggttttccaagcaagctaggaggaaatatgagaaatgttttgtgtgacagtgagttagttgatctggaactgttgcttgcagatggcgaatctctaagtgctcatgcggctatcctatcagcaagatgtcctaaattattaccatctgaaaaaacttttgtccgtgatgggtcagtaacttatgaatggggcagaaggtcatgctatcatgttcgaatgtctgatcgtgtcgatagtcacgctctgaagaaaattttggagtatgcatacactgggttggtcactgtagatgatgccactgttaagcctgtaaaaacacttgcaaagtattgccatttgagatcgctacacttgatgcttcagaaagagcaacctagatggcactcatgtcccatatatgatcttactacagcactcgaaccagctaaacattcgttctcggacatcattttggaggcccaatcaaatgacaaaatggagtgtcaccatggttcgtgccagttatcgactcctcatattcatagccataaggtcattctgagcgtgagctgcgaatacctccgtgctttgttccagtctgggatgcatgagaggtagctttgcggagactatcagagttccggtcggatgggaagcactgagaaaactagttcagtggttctactcaggcgagctgcctagagttccacctgactgccgatggaaggctatgagtacagaagagaagctatctatcctgaaatcgtacgcggagctgtcgtccctggcggacttctggttcgtggacgggatgaaggaagagagccttcaagtgttgacctcgtgcctgaattcctccagcacggacgcctccctcgccttcatcggcttcgcggcgaacttgggccagtgggagctggtggaggccgccatcagcagcgtggcgcatctgtaccccaggctgcgagactccggtcggttggagcagctcgatgaggacgtgctcaacatgctgcggacagagcatgtcaggtatttgcagcaccgcagtgcaagtaactgaatccttaatgtcatggagggtttttttccccgtccactggtggtcgcatagcggtcctgttgtggtggtgtatgcacagctgttgcgttaaaaaaaaactgtacagccacttccgttgaagcttatggcgtcatgaacggggctcatctccgttgaaacaggtactctctccgttcttttttatttgtcgcgttttagtaaaaaaaatgaattagcggacgataaatattagagaacggatgtagtatattagtattggttgataaaaaaaaataa

SEQ ID NO: 117811 - DNA, 1853 bp, Zea mays
  Clone ID: MRT4577_38931C.1
cccacgcgtccgactagttctagatcgcccagaaatctggccaccctcctcgcgcggaacgacccgagggtgccccgtccactctcgtgtcggtcccgcgatgggcatgttcgcatcggccgcaaagagatacagcaacggcaagaattttctccgcagcgcgggcgtgtgctgttgttcgccgtccgcctccgcccagcttggtggtgtgcgcggcaaggaagagacatcgacgtcggcgccagctttcgcgccggatagcaacaagaaaaggtggaggaagaggaggttctggagaaagaagatgaaggccaggaaggagatcggcgggctggtggacctcgtcaacgatatttcggccaagtcagaggagagcctaggggttagcaaccaaaacatgcccagcagggcgctgacgttcagtcagctgagcgccgcaacggacgggttcagttcgcagaacctgctcggagaaggcggctttggacgggtgtacaaagggctcctcgaggacaccggagaggttatcgccgtgaagcagctgaacagggacgggctccagggcaacggcgagttcctcgtcgaggtgctgatgctcagcctcctgcaccacccgaacctcgtcaagctgctgggctacagcaccgactccaaccagcggatcctggtctacgagtacatgcccaggggctcgctggaggaccatctcctggacttgcccccgagctggaagcccctgccgtggcacacgcggatgcggatcgcggtgggcgcggcgaagggcatccagtacctgcacgaggtggcaaacccgccggtgatctaccgcgacctcaaggcctccaacatcctcctggacgcggacttcaacgccaagctctccgacttcggcctcgccaagctgggccccatgggcgaccagagccacgtcagcaccagagtcatgggcacctacggctactgcgcccccgagtacgccatgaccggcaagctcaccaagatgtcggacatctacagcttcggcgtcgtgctgctcgagctcatcaccggccgccgcgccatcgacatggccaggccgtccgaggagcaggtcctacttaactgggcttcgcctctgctgagagacaagaggaggttcgtgaagctggccgacccgttgctgggcaacaggtacccagtgaaggcgctgtaccaggcgcttcgccgtcgcgtccatgtgcctgcaggaggacgctgccagccggccggggatcagcgacgtcgtcgcggcgctctccttcctcgccgacccgcaatactaccctcccggaggcacggaagctgaacacaagagcacgcatagcgggacagacaatgatagcagtcctcctagggccgaaatggtcagggcagacgacgacatgaagcatagatgaccgtagagggggagctaattaacgggaaacatggcaaagggaggatttgcagagctgtctgtctgctctcttcaatcttcctttcgtaaaaggtacaccacgtaggcaggatgtaacatcattcaaggagttattgaccgatgctgatttttagcagcaatgcagcatgaagttgagctaactgtatgacacagattactcaggtgagagataagcgggtatttgtgtcgtactgttagctcaactccccccccctgcaggttcctttatgtctaatgcctgagtccactacaaaaaaaaactaaagattgctacagagaccggagtactgagcaaatcggggagctgttcgcccactataaggatctcgatgtatacacatgatgcgacctagcgtgctaagcccaaaaaagaagaaattgagagaaccgtgaaaaa

SEQ ID NO: 117812 - DNA, 303 bp, Zea mays
  Clone ID: MRT4577_38932C.1
ggcccggatccggtggaccaacccttccggacccttggcttgttggtaattttttgcaacgacaactgcggaccaaattttgtggggttgggaactaaaactgcacggatttgacatagttgataggttttggcattcgccccacctctttttctcaaaaaaacatttggagttgacatttttttttgatttgatggttttatgttatttttgtcaggttgaatttcttgtttgaattttttgggagggttttttttaaaaatttacaaattgttggtttttattattttatattatttttta

SEQ ID NO: 117813 - DNA, 347 bp, Zea mays
  Clone ID: MRT4577_38933C.1
gacccactcgtgcgatacatcttccagaactaggcaaaagctcttcaaggctctcaagttctacaactctctgcggggccatgggcaccttcaagaagggggccgtcctagcgcttcccacggtcgccaccgaccacgacctcatcgtcaatgccaactagatagcctcacgccccgacattccaccacgtcactgtcccccgactcaaaaccctcgtcgccgacatcctcagtttcagttcattacgtatatccagtattagctaccatctcttcgcctgtacgatgacaccgcttaattccctctattaacccagctctcgtggagatttccccccgacgcatta

SEQ ID NO: 117814 - DNA, 339 bp, Zea mays
  Clone ID: MRT4577_38934C.1
acattgctattcgttgcatcgttcctgtacatgtccatacaagtcttgcatacattgaccgcatcacaccactcaagctagcatgaatgtcagtagcagctggccaaacagatgggttgttacttacagagcttgacacacccgatagacaggcatccgtatacgctcaagagtttggattggtgaagaaaattctcatttcatccctagaacagagataccatgatgctgcatcatggaacgaccaactgatgcggctgacgtctaagcggaacaacagagcctgatagcgttgcatgtctggatcgtgtacatattgatgatgcccacctgaactcc

SEQ ID NO: 117815 - DNA, 1873 bp, Zea mays
  Clone ID: MRT4577_38935C.1
aacacgcgtccgcccgagggtgcccctcccactctcgcgtcggtcccgcgatgggcctgttctcatcggccgctaagagatgtagaaagtgcaagaagttcctccgcagcgcgggcgcgtgctgctgctcgccgtcggcctcctccgcccctgctggtggtgtgcgcggcaacgaagaggcgtcgacgtcggcgctggcttccgcgccagatggcaagaaaaagaagaggtggaggaagagaaagttctggagaaagaagaagaaggccaagaaggagagcgacgatggcagcggcgagctcgtggatctcgtcaacagcttctcggccaagtccgacgtgtgcaagaacgtgaatgcggccgaggagatcctacggggctgcaaccagaacatgcccagcagggcgctgacgttcagccagctgggcgccgcgaccgacgggttcagcgagcagaacctgctgggagaaggcggcttcgggcgggtgtacaaggggctcctccaggacaccagagaggtcatcgccgtgaagcagctggacaggaacgggttccagggcaaccgcgagttcctggtggaggtgctgatgctcagcctcctgcaccacccgaacctcgtcaagctgctgggctacagcaccgactccaaccagcggatcctggtgtacgagtacatgcccaggggctcgctggaggaccacctcctggacctgcccccgagctggaagcccctgccgtggcacacgcggatgcgggtcgcggtgggcgcggcgaagggcatcgagtacctgcacgaggtggccaacccgccggtgatctaccgcgacctcaaggcgtccaacatcctccttgacagggacttcaacgccaagctctccgacttcgggctcgccaagctgggccccatgggcgaccagagccacgtcagcaccagggtcatgggcacgtacggctactgcgcccccgagtacgccatgaccggcaagctcaccaagatgtcggacatctacagcttcggcgtcgtgctgctcgagctcatcaccggccgccgcgccatcgacgtcacgaggccgtccgaggagcaggtcctcgttcactgggcaacgcctctgctgagagacaggcggaggttcatgaagctggccgacccgttgctgggcaagaggtaccccgtgaaggggctgttccaggcgctcgccgtcgcgtccatgtgcttgcaggaggacgctgccagccggccggggatcagcgacgtcgtctcggcgctctcgttcctcgccgatccgcaatactaccctccccaaggcacgggagccgagcagaaggccacagccacaggtcgagagagtaaacccaaggaggatactacagacaaggatagcagtcctcataaggccgaaatgatcagggcagacgacgaaacgaagcatagatgatgaccgtagggggggaaggctaacgacgggaattaaagggaggaacactgcagagctgtctgtctgctctcttgaatcttctttttgtaaagcgtacaccacgtaggcaggatgtaacaacaacattcaaggagttatcttgactgagatgcagattttcagcagcaatgcagcatgaagtcgagctaactgttccacacaaactactcagcaaaaggtcatgggagaggtctcaagcagggtgaccctcctcctcctcctcccctcctttttgttctggcgattgacccactacaaaaaaaatctaaagattgctacagagaccggagtactgagcaaatcggggagctgttcgcccactataaggatctcgatgtatacacatgatgcgaccttgtttgttaagccgaaaaaagaagaaattgagagaattgttt

SEQ ID NO: 117816 - DNA, 343 bp, Zea mays
  Clone ID: MRT4577_38936C.1
cggccacgcgtccgaacaaggaatccccctatgactcatcattcgtatctcctactctctctcgcctctgcctccgcagttgttttcaccatctactcactaaaccccttcaaccagcagttgctttctcgcaggatattacaacgatctctagcttaactcaaaattccacttactgagcttcgtgcagacgatcaccaagttctacacagacccccacaagcactcgtaccgcttgtacggatccaaggtcaacctgctccgcgcgcgccgtaaccagatgatggacccgtcggaggagcacggcgtcactaagatctactacctcaccccggcagagttt

SEQ ID NO: 117817 - DNA, 219 bp, Zea mays
  Clone ID: MRT4577_38937C.1
aggagggaaaaacaattgaaggggcattccccttttgaattcatatcattattacaaggatgttccccaagggaacatatagtgcttattgggtgggccaccaggccctggatgtaacatgacagcaaggccccattggactacttgctttagcataatgaacaccccgctccctcatgatgcgccaattacataccggctcatattttatcttccccc

SEQ ID NO: 117818 - DNA, 727 bp, Zea mays
  unsure (1)..(727): unsure at all n locations
  Clone ID: MRT4577_38938C.1
ctgcttcttttaaatacaaacaaacgtctatttcaggtgtacaggacgataggccagaagtacggagtgaattactcagaggatgagattctgatgcggtaccggctagcttatgcgcagccatggggtcgatcgcgtctgaggtaagccccacccaacttgtgactgttcatcgtagtatggcacatgtctcgtgcttttgcgtaaattcaaacgaatcctggacctatggtattaaaagtggttacaagctgctgatcgttcacttcagaggcttgaatcttttggaacaaccagacttcgaagtggttccctgcatgcaaaccaggggaaatttagtaccgtaagcaatcttataactgggagaacaagtcagtaactgggattagttgtcatcacaaatcttccagatctagtcccgagaacaggattcgctcccaaacagcatagttctgctgctttatttatgccactgctaaaaatacccccaccctccaaaaaagaagaaggaacacttcattcctaggttcctgcatctataaggtgggaaggttaatgcgttataggacgataaatacagcacagttgacaaaagtcgcttgatctggntttttggggtgattttcaagcatactcctacataatgattaaagtacttccaggctctttctttacacctatcaagataaataatcttggtcaatagttatggccggccgatttttct

SEQ ID NO: 117819 - DNA, 463 bp, Zea mays
  Clone ID: MRT4577_38939C.1
tgctggttttcgcccttaagcagtggtaacaacgcagagtacgcaggaaagatttaaaatttcaagcgtattgtaacaaagttatgaattgagactatcctctctaaaaataataataaattgtaaatataaaatgttggctatatacttaaactataataaacaggataatgagttattctatataaattactcctattgagttatataactatgtgaattccatgcttattaaatttcgtgcatacaaatacttattttagcaaagtaaataaggagtaaataaatgtaaagtatttgcatccatgctgagttttctctgattgtgcattttaaataagttttgaacttcgaagcctacttgaattttaatttatattgaaactagaaatagaaaacaaaaaaaaaaaaaaaaaaaaaaaaaaaaaaaagtactctgcgttgttaccactgctaaagggcg

SEQ ID NO: 117820 - DNA, 270 bp, Zea mays
  Clone ID: MRT4577_3893C.1
ccgaagaaattaaaatttgggatgggcaaactccactggcaatgcccgaacttatttcatcccacccaggccccattgccgtcaaacaccaccatgtttgaatagaattcaaagggggaatacatacaactttttttgttcagtgaatctccacaaagcttttctactttttctggttggaaaagcctgttgacccatacccttcgggcgccttttccaactgttgagcaaaatccttttgccttacttgtacatacggttgggccaatg

SEQ ID NO: 117821 - DNA, 613 bp, Zea mays
  unsure (1)..(613): unsure at all n locations
  Clone ID: MRT4577_38940C.1
ccggccgcgatgccacgctctaccaacggcacaggttgcgcccgcaatggcacttcgtgtccgcctacttgtgactccaaccaccgcccgtcccggatgctccccaggaatgggcaggggcctgttgcgctccttgctcgggggggagacgctgctgatacaggccgcggcggccacggccgcacgttgcgtccgtgacgcgcccacgcgnngcggacgcccgaacatggactcgcatctagggtcccccgaccatgcacgcacatctcgccgtgcactggacagcagcccttcccgtcgactcaggctgtgatccatgggccctagcatctaacccgtatagcctgcgttgccaaccggcaagcggcgctgccgcacatgccaggggccgatgctacgccgcggaaggcatactccatgccgggggggctgaccacaatacgttgcgctcaacacgcccttaatggtacaccgatcggacaggcaagatcacttgaccggccccatcaccactattcataacttgagcgtatcctcatggcctggcgccgaaggccgacgatagaactgacatcatctatcaacgacagcgtaaacaccgaccccatgcttg

SEQ ID NO: 117822 - DNA, 360 bp, Zea mays
  Clone ID: MRT4577_38941C.1
cccactcgtgctcacagtcatcctccttcgtcaaatacccttctaccttacaccaattaccatcagggtcaacgttacttccaacttgcaaaactccacaataacaaagatcaaatctaagattattactcctattacaacctctaccctacattcacttcattccctacaaaccaaattatccaccctctcctctccacacaaagcttcaccttaacactattagctttcttcactccaatctactactacctcaatatcactattacaattaacacctctaatatatatattataccacatattctacccacaataaactccacatcattattaatataacttccatatatataactc

SEQ ID NO: 117823 - DNA, 326 bp, Zea mays
  Clone ID: MRT4577_38942C.1
tttttttttttttttttttacggattaaaactaaacgaacataggaaaaggcatatcgtactaaatttcaaaaccattttctcatcccttccgtatcgacatctttacatggtagtattctatacagcaacttcctgtcaaatgatcacctcaccaaataaatgtcgggactttttttttttataccaggtatacaacaacatcaagacatacatacactgatacacctatgctcaaacacaggaatcacttgcggatgacattgccagccaacaacccatccatccataacgatgcatgccatgatttccacgatagccacatgc

SEQ ID NO: 117824 - DNA, 1205 bp, Zea mays
  Clone ID: MRT4577_38943C.1
aggtagcgaaattccttgtcgggtaagttccgacccgcacgaaaggcgtaacgatctgggcactgtctcggagagaggctcggtgaaatagacatgtctgtgaagatgcggactacctgcacctggacagaaagaccctatgaagctttactgttccctgggattggctttgggcttttcctgcgcagcttaggtggaaggcgaagaaggcccccttccgggggggcccgagccatcagtgagataccactctggaagagctcggattctaaccttgtgccagacccgcgggccaagggacagtctcaggtagacagtttctatggggcgtaggcctcccaaaaggtaacggaggcgtgcaaaggtttcctcgggccagacggacattggtcctcgagtgcaaaggcagaagggagcttgactgcaagactcacccgtcgagcagagacgaaagtcggccttagtgatccgacggaaaaaaagtggaaggcccccccctcaacggataaaagttactctagggataacaggctgatcttccccaagagtccacatcgacgggaaggtttggtacctcgatgtcggctcttcgccacctggagctgtaggtggttccaagggttgggctgttcgcccattaatgcggtacgtgagctgggttcagaacgtcgtgagacagttcggtccatatccggtgtgggcgttagagcattgagaggacctttccctagtacgagaggaccgggaaggttgatattctccacagcctgaagtctattctcttctatagtatcttttgctacgtgataatcagcttcgtcttctgccgaagctgctgttcttattgaccctgctttagcttcttctggggttatagcttcatcaccaaataataatttgaacggtgtaaaacctgttgatcttgatatagttgtattgtggctccacaccactttaatcaactcatctggccactttcctctgggctgattgaagattagcttcattattcccgtcattataacatcatttgctctttcgaccaacccgtttgactccagatgcctaactgatgcaaaatgaatcttcgtaccaatttgatcacagaaatccttgaacgttttggcatcaaactgtgttccattgtccacagttatagccttcagctcttgataaacacttgagtagtggagaacaaactccat

SEQ ID NO: 117825 - DNA, 382 bp, Zea mays
  Clone ID: MRT4577_38944C.1
cgggagaacgggaacaactaaacatctgaggcaagcagagtcgcatacattcttgcggtcctagtcccacgatcatacacaagcgcatgcatacacacacgtatacatacgatagattacgtcgaccacgcttatgggtgcgtcacacgcagcgcatacagacggacgcgcgcacaacacggcgggcgctcttgattactctcacacgcacgcgtagcacacggggagggactacgatacgggacgatcactcagccccagaggggggcttcatctagacgacggtcgccaaggactgctagcggaccctcttctcatcagggcgctcgcgagaacgccaagccgcccgagccaaggatcggcgacgccatgacctactcct

SEQ ID NO: 117826 - DNA, 479 bp, Zea mays
  Clone ID: MRT4577_38945C.1
cgaagcaaaaaacctcgctcgctagctatgtgaagaaactatcttcgttataaaactttccggcggcgttttccgacttccgagagcaggttttgaggtggttttatgcgccaaaacatctaaccggagtgtcgttgtacggtgcttagtagttttcaataacacgcttcagttatggggaatgcttgttgtgttgctactcgagacaaaatggttgtgcctaatacatcagcagtcgagaattttcaaagaaacaatgtgaggtattctcctaactggagcttccgatgggataatagaggaggacgcgtggcaagggaagagacctctgttagtttgttatctgatcggattagtcgtaacgatgtctctgatgtcaaatctgaaactgctcttgtatcatcacaaggttctcctttggacaattttcagacgcagtcatggcagaaatctcctgcttctgatcaatcattttcaag

SEQ ID NO: 117827 - DNA, 202 bp, Zea mays
  Clone ID: MRT4577_38946C.1
gggaggcaaggggtatagtgatactgagataaaagtgtcccacgggctgggtgggcgggtgggccttctttccccagtttaagttacagaaagggtcaaattccaaaacatattacagaaagaatcctgttggtagaggaattcaccacaccattcgcaaaaagaatcagggttcacaagtcaaccaaatccaaaaaaccaa

SEQ ID NO: 117828 - DNA, 505 bp, Zea mays
  Clone ID: MRT4577_38947C.1
aaaaagggtatcgactcagggtccattgctaaaaatctggacccaaaaatttttgcgattttttgtaaagaaaaatggagagaagaaaagaaattcaaaaaaaaaattttacggccgttttttttctttcgccgacctcccctgtttttttttgaccaccccccccctgggtttttttatttgccgggtttttttccctgcgctcggcgggggaggctccagttttttttgccggccgtttgttccacctccttgccccgcgccgggaaggtctgggtctccctgctgggtttccggcccccgtcagaagctcctaaaatccctgctccgtttaaattttgccgcccccctggacccctgttttttttttgttcggcccccctgcccttgttcgctcggttcctcccatggccagctcgccggggatgccctgccccagccggctttagctccctttccctgagctccttccaagccgcccccttttttttttttgtttttgggc

SEQ ID NO: 117829 - DNA, 318 bp, Zea mays
  Clone ID: MRT4577_38948C.1
gaggaccactaggggttattggaggggtattaattttggggtcaaaaatgaaaaattaattcaaccattcactttaatcattttggaaacgaaatagggtaaacaacttgaaacaactaatttggtaaacccaataaacaagaaataattcaatggcttggacaacagggaaagatttggtataacaaaaattttgctaaaaaaaacaaaaaaaagggggagaaaaattggtttttttttataaaacaaaaaaattattttcaaaattttaggcaataaaaaaacctttttttggataaaattggtgggaatactaat

SEQ ID NO: 117830 - DNA, 301 bp, Zea mays
  Clone ID: MRT4577_38949C.1
gtagttgatcgcgccaccgacgatggatgcctggtcaccctgcgcgcgcggcgcgcgtaaataaatgtaagcacaacaacgcagatgctgttatgttaccataccatccacattgccaaacatagcaacgacggcctagctaggattagaatgcgcgcacgtacataccctgtgcgcgtaggacggtttttttagggagcggagcacggagaggtactctttcatctggcgccggcggttgcgctagacgagaatgtgggtcatgcgctgggtctcgatatcctcctagttcttgacggac

SEQ ID NO: 117831 - DNA, 125 bp, Zea mays
  Clone ID: MRT4577_3894C.1
ataaatgttgtttgaatttattcatgattaagccatatgcggatcgacgatagttttgggtaacgagaacacaactatcgtgcgaccgcatatggcgtaatcatgaataagtggggtttgagttt

SEQ ID NO: 117832 - DNA, 380 bp, Zea mays
  Clone ID: MRT4577_38950C.1
aacccggggggacgccaccacgcgtgctgacgcggcccgccacgcggccgggaggaaggccatcacaacaggagacagagggacagagacgcgagagcacagaacgtgcgacgagaccagcagcacagacacacgagccccgacgttggacgacaaaccaacaggacgagggacgaacagtcacaccaagcggccggggagggggcacacgagcacagcacgcaaggagaagagcagcaggaggaggaggaccgtacaagacacgacaacaacagaggacaaatcatgatggagctgcggacgggcaaacgccccgacgaccgacacgacggcacgagccggccatacacagagaaggagaaagagaaggatgagcggac

SEQ ID NO: 117833 - DNA, 1154 bp, Zea mays
  Clone ID: MRT4577_38951C.1
ggggtacacctccgaggccgcgccacacgaccggcattcaaactagggtttactcctgccgctccgagaaagcaaacaagcgtcagctccgccggcttcctccgcgctttctccccgccgccgccgccgccgctccttccctacgccaggcacgccaagatgaagctcgtcaggttccttatgaagctgaacaatgagacggtcaccatcgagctcaagaacggcacggttgtacacggcaccatcaccggtgttgacataagcatgaacactcatctgaagacagtgaagcttacactgaaagggaagaaccctgtaacacttgaccacctcagcgtgcgaggaaacaacatccgctactacatccttcccgacagcttaaacctggaaaccttgctggtagaggaaacccctagggtgaagcctaagaagccaactacaggaaagcctttggggcgtggtcgcggccgaggtcgtggacgtggtcggggccgggggccacgctgagctttatcgttcccctgctgtcggctcccttgccagacaagtttcctctacaatgtaaaacatctttcctctgcacgctgtgtgaaagaactgttgcatcgttacccttctgatgaacgtggactgaaatatctcaatctcagtggttcttgtgaaatcaacgctgtctacctggccccccctactcatgcctatcttaggtttacactctagttaatttgtaatgttttttttctcccccgtggaatacatgtaagctgccgcagagctttggatgtttaaggttgtatgcttgggttgccacatggggattattgatctggaaaaataaaaaaaaaaaaaaaacggacgcgtggggttgacctctgcttaatctaaaaaaaaaaattgaaactaaattaccattgtgctgctcgggggatcgcaaaagttttcgttaaagaagttggctggcacaggtctctctcactcagacgacgtggcccctgtatacttttttgctgtattggtaaatatttgctagctgtatgttctgatttggcaccaaaatgagccattagtttccgtaagtagagttggttaagttagagaagattagcttatgaacagagagatgaagatattagtgctgtgtgactggacataat

SEQ ID NO: 117834 - DNA, 952 bp, Zea mays
  Clone ID: MRT4577_38952C.1
acctcgagccggccgggaaaggcccactaagccgctcgaaccgcttcggcgcctcccacccctcggacagaccagccttcaaactagggtttactcctcccgctccgagaaagcaaacaagcgtcagctccgccggcggcctcgcgctctctcccccgccgcaccttctctacgccaggactgccaagatgaagctcgtcagattccttatgaagctaaacaatgagacggtcaccatcgagctcaagaacggcacggttgtccacggcaccatcaccggtgttgacataagcatgaacactcatctgaagacagtgaagcttacactgaaagggaagaaccctgtaacgctggaccacctcagcgtgcgaggaaacaacatccgctattacattcttcctgacagcttaaacttggagactttgctggtagaggaaacccctagggttaagcctaagaagccgactacaggaaagcctttggggcgtgggcgcggccgtggtcgtggacgtggtcggggacgggggccgccacgctgacaggtttcccctgctgtgggctctcttgcaagacaagttccctgtacgatgtaacctctttcccccgcacgctgtgtgaaagaatgttgcattgttacccttctgatgaacgtggacgaaatatctcaatctcagtagttcttgctgtgaaatcattagtacgctgtttacctggcccccctactcatgcctattttaggtttacactctagttaatttgctaatgttttttttctcccccgtggaatacatgtaagctgccgcagagctttggatgtctagggttgtatacttgtgtttgccacatgggggggactggggattattgatctggagctatgcctgtggctggctctgttagatcttgacctctgcttgaaactaaattaccattgtgctgctcgggggctcgc

SEQ ID NO: 117835 - DNA, 165 bp, Zea mays
  Clone ID: MRT4577_38953C.1
gcagaagtgttacacaggtggtgggccctgggttgcttaatcagggttcccgaatataataggccattgattgctagttgcacctatatatacttcaaacgagtgagggaatacatgggagagagggacatatctgatatcgacggggtttctaaaggtacaaca

SEQ ID NO: 117836 - DNA, 360 bp, Zea mays
  Clone ID: MRT4577_38954C.1
gagctcactattctttggccgccctctctttttcataattacttgggaaaccaattactttcaaatcgatggtaacccaatgcctccgagaggatccttcaaaagctgagacactgacattaatgagacaaaacttgcttaagtacatggctcatgtggccaccaggacccgaaggcatttctgttaagggatgcttacaaaactacaagccacctgaggtgaaagcccgggatttatcaacggtgaactttgaagttagatcatggattcttcaaccacacagaatactgaaggccatgacttggacaagggacccaaaaccagttggcgtcaaacacccaggctgtcataggggttgc

SEQ ID NO: 117837 - DNA, 1070 bp, Zea mays
  Clone ID: MRT4577_38955C.1
cctcgaggccggccgggaagcgcccgggctcccggtccgagagcagccgggccttcaaactagggtttactcctcccgctccgagaaagcaaacaagcgtcagctccgccggcggcctcgcgctctctcccccgccgcaccttctctacgccaggactgccaagatgaagctcgtcagattccttatgaagctaaacaatgagacggtcaccatcgagctcaagaacggcacggttgtccacggcaccatcaccggtgttgacataagcatgaacactcatctgaagacagtgaagcttacactgaaagggaagaaccctgtaacgctggaccacctcagcgtgcgaggaaacaacatccgctattacattcttcctgacagcttaaacttggagactttgctggtagaggaaacccctagggttaagcctaagaagccgactacaggaaagcctttggggcgtgggcgcggccgtggtcgtggacgtggtcggggacgggggccgccacgctgacaggtttcccctgctgtgggctctcttgcctgacaagttccctgtacgatgtaacctctttcccccgcacgctgtgtgaaagaaccgttgcattgttacccttctgatgaacgtggactgaaatatctcaatctcaagtggttcttgtgaaatcaaccatgtctatttggcattcgtgtgtgtgtgttagggtttacactgtagttaactcgtgatgtctttcccctggcatacatatatggtgccgcagaacttcggatgttctaggttgtatgcttgtttcacatggggattgttgatctggagatatgccttgcagtcgtgtctgcctctatttgatcttttagctctgcttgaagctgaattcccgtcgaccggagatactgattttgctgaagatctacagcttgctctcatacgacgccctgttggcatgcattgtgttttctgatgtgctgacaaacatgctcggtaaaggaaaggatgttttgtttgccggagatactgatcatctggagctgcccaaaatatgaagaggtgggagaggaaattatt

SEQ ID NO: 117838 - DNA, 748 bp, Zea mays
  Clone ID: MRT4577_38956C.1
gccgcgccaagacggacgtgcagctctcggacgggtgcatgatcccccgcgacggagctgctcatcccgatcatggccatccaccacgacgccaggttctggggccccgacgccgcgcagttcaaccccgcacggttcgccggcggcacggccagggcggcgaagcacccgctggcgttcatcccgttcgggctgggctcccggatgtgcatcggccagaacctggcacggctggaggccaagctcaccatggcgatcctgctgcagcggttcgagatgaaggcgtccccgaactacatccacgcgccgacggtcctgatgctcctctacccgcagtacggagcgccggtgatcttccggccacgttcggcgcatccggcagcctcatagcgcagatgcttcgcctgtcccccacattcttttgttgattgaaactgatgggaacgccgcaggtctgcctggtgctcgaaagccataggacgtgtcccaaatactccttccgcgaccccctgtgtatatgccaagtgatactagaagccaagaagcactaactttttgtcctagcctgcgcctcggggcctacccaggttgcccgccggaaatgccctcgttaatagaccagatcaggcccagccttttttgttccctgccccatggcgtttgtgtggtatgtgtatgtatttgtaatctgtatagaggtttgctattccatcttctacgttcctagtagagacgaaaatgcaatggg

SEQ ID NO: 117839 - DNA, 1677 bp, Zea mays
  unsure (1)..(1677): unsure at all n locations
  Clone ID: MRT4577_38957C.1
gtgttggttatttaccccgtttaccactgagtcctccgcaagccattcttcccgacatggcgatacccacggccacgcacgcgtcagagatgaggacgacgacaatcaggatgagggtttgagcacggacgaccccctctccatcgtccgctctaatttcttcctcccccgtcagcaacccttgtagtctctgctaccgtcagcccgtacgcgatcaaagccccgctgcactgcggccaaccgtttctggcaccggcaccggcaccggatccgccgccttcgtcgtccaggatggcgatgatgagccggacgcgggatctgctgatggaggggttcgaggggctggtgcgggatgggtcgttcaagtggggcctcccccgccgcggggacacggccatggacgacggcggcgacgacgacggctccctctccgtgcagcgctcctccatcgctggcctttccttcaaggccaacgccgtcgtcgcccgctgctcccgaatccttggcgtttctaccaatgatctacaaaataactttgataagcaagcatctgattccataaagcagccaaaaagctacgcaagaaattttttggagtactgctgcttcctggcacttgctcagatatcacaagtgacagggtatcttgctgacaagagctttcgccgcttgtcttttgacatgatgttagcttgggaggttccctattcttcaagccagctcactgttaaggctgaggtagatagcacagttagctcagaagcttttacaagaatagcacctgccatcccaaccattgctgatgtagtaacttgtgcaaatctctttgatgtactttcatgttcgagcggaggccgtctttcattttctgtatatgagaagtacctttcagaattggacagagcggttaaaaagatgaagacacaatctgagtcatcacttctatcaaactttcggtctcagagaggagaaaggattctggaagttgatggtacattgacaacacaaccagtacttgaacatgtgggtatttcaacgtggccaggaagattaatactcacagatcatgccctttactttgaagctcttcgggttgttacctatgataagcccaaagtttatgagcttgcagaagatttaaagcaggttgttaaacctgagctgactggtccatgggggtcacgtctctttgacaaagccgttatgtacaaatcaacaaccttaacagaacctgtgatcatagaatttccggagttagctggccattctcgccgagattattggctggccattatatcagaagtactttatgcccatagatttgttaggaagtttgatataagcggaattgacaaagaggaaacaattctgaaagcagtacttggtattatgaggttacaagccattgaagagttacattttgaagttccaaatcgttatgaatctcttttgttgttcagccaatgtgacaaacttcctgggaggtgatgttatacttgaaacattagccagttctatagcatcaagaacttcagatcgaactaacaacctggcacagtagagaatgcatgctgtcctgtcaacctgngcatggtatcccagttatagtggtgagcgtttgtttgttgtgagtttgttgtggggaaatagtgcttgcagaagctgttactgatcatg

SEQ ID NO: 117840 - DNA, 439 bp, Zea mays
  Clone ID: MRT4577_38958C.1
ggaaacgaagcccggggtaatagattgggaacaaaaaaaaaactagggggggggtgacatggttccaactaaatgaaggaaggaaggaatgggccccaaaaacgggccggggaatttacgaggcccagaaaactcacgagggacaacgggaacccaaaaaattcccttactagctaaaccccgggggcgggaaaaactttacacaaaaagctggaggaggacgggcggcccctgcccgggggggggggaacccccctcggggggggccccaatggggccccctaaccccgggcccatttggaaacccaccccccaaacggggaaaaagggggtcgccggggggggggggccctcctttgccggggccggggggggcatcccaagcgcaaggccgtgccggccggccctaaaggggtttggccggggcccccccaaggcc

SEQ ID NO: 117841 - DNA, 360 bp, Zea mays
  unsure (1)..(360): unsure at all n locations
  Clone ID: MRT4577_38959C.1
gggaacaaaagggaccaacaacaaagggggggggaatcacaaaaaaacaaggccttgcgggggtacaggacccagttcccacaaaagcagagcagcgctcttctgaaaaaccagcaacatctaactacaacacagggggaacatcaacacaagaaacccccacaaagggggagcgggcagcccaagaggaggggaacctggggacggccctggggccccaaaaaacggggggcttggggagcccgccggggagcaccaggcgcaccgggggctggaacccccgggacgggagggggggcctattggtgtgccgcgcaaccttgggggcctngagggccagcttctgcaaaagccgctggt

SEQ ID NO: 117842 - DNA, 285 bp, Zea mays
  Clone ID: MRT4577_3895C.1
gcggcactcatcctaaatacaacgatcacacccctggcggttgatgacatgctgaccagcgacttattagataaaccctctcccacctagcaatacctatctcataccatcaacgctctttaccccaacttcctgtgctgaactcagatcaagtggtgcatccacacctccctctactgcagcaccgcactccataaccagatcatattccactttagtttcaccccaaaccctccaaacaatcgcgtcgagaactccattatcccacaatctctatataaccat

SEQ ID NO: 117843 - DNA, 137 bp, Zea mays
  Clone ID: MRT4577_38960C.1
aattgccgggtcgacgagtttctagtcggtggccggcctcaaattttacacgagacaccaggagcgctagaccctggagaaagacgctatattgaggatgacatattactaatacaactatatgtctatgctaggag

SEQ ID NO: 117844 - DNA, 540 bp, Zea mays
  Clone ID: MRT4577_38961C.1
gtattcgtttttatgtaaatgcatcggctcatcactgctggccggataccaggccgagcagggcagcacactctggttacatgactaagagatcccgacgccgcagtactggccactcgcggcccggtccgggtgaccaccagtggtgcccgcgcagcctactcctgacaagtggtgtaagaatgcatctactctggccgagcaatgagcatgcgcggtgcagctacgccaaggtacctgcaccggtcagtaccaaggcactacgagcgtccactccttcacgattgggagctccgaccgaatctgcagttcccgctctagctcttgagaacaaaaccctgtcacacaatgaggacggatgcttagtctgcagctcagtaacaaccctctggggtgaatcctcctgggggtattcctactcatatgagctctctactaccatctacactctctagaactaagctcatcacaaggacgttcggtgcatctttcggctatatatgcagcttctgtcctgtatatgatctgcagtgtaaacat

SEQ ID NO: 117845 - DNA, 602 bp, Zea mays
  unsure (1)..(602): unsure at all n locations
  Clone ID: MRT4577_38962C.1
aattcggcacgaggcgtagctcttctctcctaacccacggcgccatgccgcccgtcttccccctccttttcgttttccttgccgcgccatcgtcgcctgcgccaccgcagcgacgtccacctcgacgtcgtcttatgcggacgcgctccaggccttcagggccgcacctcaccgtaccgcccgaggccggtctcttcttcaccacgtgcagcgccaccgcggcatccccctgctgcttcaccgtctgtcaactgctccgaccacaatgtctcggcgctctccctgccgatactcaaactgttcgccgctacgttccctttctgacccctctgtgccgacctgccttacctcatcgcgcttttcttgtcgtaaaactttcctcgagtgcgccatctaccaagttaccaagagcaccgctctccaagagctcaacttcgagttcacctgtttaacggtcgccgagatacacttctcgccagttggcgttcttcttaatctcttcanttcagtcacatgatttgacgatgctgtacctatgcgctatgtcatatacacgctgggccttaatctgatcaagattaaccaattcctgctcctggatc

SEQ ID NO: 117846 - DNA, 463 bp, Zea mays
  unsure (1)..(463): unsure at all n locations
  Clone ID: MRT4577_38963C.1
gtcttgggctttccttgttctttttttttgttttttcttcttgctgttttaaacttcccaactctcgctgtcacanatccaatcctgtcaaatgcccgacgtggggggggggctcggctcctgcttctagacccaaaaacttggggatcccccggctgccccgttcaacaaggctgccccccagtccaggcggaacaaaaaagggtgaagggccccatatgggtaaactgaaacttctttttgccatatatttagggctctcccccggcggaaataaactacccatccatcttccattcttcctctaaagcccttcggagaggatgcctccctggggggcgaagaagggggcaaagacacgggtctcggcagccatggccttggtgagggggttcagcgaggggcctggggtgtccttggggggatcaccggtggggtgacccccgacgggagccccgggggg

SEQ ID NO: 117847 - DNA, 993 bp, Zea mays
  Clone ID: MRT4577_38964C.1
cattgcgagtcccgagtcgactctctcccgtttcccggccgtccccttcaccaatccaatccaactccaattcgtcctccggtcctccccctcgaggcctacgcacaatagattcgatctcgagtcctcgaatcctgccttttcctctggtcaggaaagcatgagcttgatttccggcgcttctcgccgtcgagctcgaaccagaagataagaagaatccgctaggggcgagccccatagaagatggccccgcacccgcaggaggacaaatcagatcggcacagcagcggcgccggtgcgtcgagggagcaggaacggcggccgtccaaggcatggggaatcctcatcttcggcctcatcggcgtcaccaccgccagtttcgctattactcaagttcgcaaaagcatggactggttctacactcagttgaataaagtgcagtcaacatcatcttggacttggaggtatacaagtaataactcaagtcgtggaagcttcagtgaggaagctaagaaaagatattatcagcgaatgcagcaggaatatgaagaggaacaagagagagttcaaagaataaggcatatgcagagtgtcttcaacagagagaggaataaatttggacgaggttatgaaagctggagggagaatggccctcctcgtggctacaattacatccctcgggatgattgatcacgagcgacaccatatacagatgcagaagtgaagactgcttttagaacaaaagcgatggaagtgcatcctgaccaaaatcaaaatgatagagatgctgcagaagagaagttcaaggaggttgtcaagtcttacgaagcaattaaatcggagagaaaaaacggtgtaagttgatgcaaacttccagtgtggtcggatcaagtggtaaagactgggaccggatcacgcgggaatcagttgtgccttgtatatgtaatcaattgttgccggcagcttgataaaatggttcttctgttgctgttg

SEQ ID NO: 117848 - DNA, 1536 bp, Zea mays
  unsure (1)..(1536): unsure at all n locations
  Clone ID: MRT4577_38965C.1
tccgnaactttcctgtttgnattatgacctatatatctgtcctagcttgcttaccttggttagtttaacttttgaatanacttattgttcctttcctttgacctcgaggccgcccccgggatcccatggcacacggtcgtttgaggcattgcgagtcccgagtcgactctctcccgtttcccggccgtccccttcaccaatccaatccaactccaattcgtcctccggtcctccccctcgaggcctacgcacaatagattcgatctcgagtcctcgaatcctgccttttcctctggtcaggaaagcatgagcttgatttccggcgcttctcgccgtcgagctcgaaccagaagataagaagaatccgctaggggcgagccccatagaagatggccccgcacccgcaggaggacaaatcagatcggcacagcagcggcgccggtgcgtcgagggagcaggaacggcggccgtccaaggcatggggaatcctcatcttcggcctcatcggcgtcaccaccgccagtttcgctattactcaagttcgcaaaagcatggactggttctacactcagttgaataaagtgcagtcaacatcatcttggacttggaggtatacaagtaataactcaagtcgtggaagcttcagtgaggaagctaagaaaagatattatcagcgaatgcagcaggaatatgaagaggaacaagagagagttcaaagaataaggcatatgcagagtgtcttcaacagagagaggaataaatttggacgaggttatgaaagctggagggagaatggccctcctcgtggctacaattacatccctcgggatgattggtattggcagaccgatacttctcactcagaacataaaaataggcggacgtacacaccggcaggacctagggtttatcctatgtcgcatcactatgcagttctaggtcttgacagatcacgagcgacaccatatacagatgcagaagtgaagactgcttttagaacaaaagcgatggaagtgcatcctgaccaaaatcaaaatgatagagatgctgcagaagagaagttcaaggaggttgtcaagtcttacgaagcaattaaatcggagagaaaaaacggtgtaagttgatgcaaacttccagtgtggtcggatcaagtggtaaagactgggaccggatcacgcgggaatcagttgtgccttgtatatgtaatcaattgttgccggcagcttgataaaatggttcttctgttgctgttgaggacctgtagcacgagttccatttatgagcttgcgcgatgtagatttggataggttcaaaaaatgtgctttttgttcatttagccactaacttgacgtgctcacgtcataaatgccataaactgggcaagtgctcagcccacaaaggcgagcacttttgttgcgaaaaaaaaaaataaaaaaaaaaaaaaaaaaagcggcctatatagatcatgagacgttcctcggtattcggtaacaatagaaatgacagagcccccagctctttgctgatttttcctct

SEQ ID NO: 117849 - DNA, 1334 bp, Zea mays
  Clone ID: MRT4577_38966C.1
aaggaggcggggccgagtagcagggcggtgttggtgacgggcggggcaggctacatcggtagccacgccgtgctacagctgctcaccgcgggcttccgcgtcgtcgtcgtcgatagcctcgccaactcctcagagctcgtgatccgccgcctgcgctcgcttgcgggggaacacgctaaaaacctcgcgttccataaggttgatatccgtgacacagatggattgaaaaaggtttttgcttcgacaagatttgatgctgttattcattttgctggactcaaagctgttggagaaagtgtacaaaagccattgctttattacgaccataatgttgttggcacaataaatcttctggaagttatggcggctcatggatgtaagaagttagtgttctcatcatcagctgcagtttatgggtcacctaacaacccaccctgcactgaagattttcctctcactccacataacccatatggaagaaccaaagtactttaatccggttggggctcaccccagtggataccttggtgaagacccatgtggaacacctaacaaccttatgcccttcgttcagcaaattgctgttggcaggaggccatcactaacaatttttggaaataactacgcaacaaaggatgggacaggggttcgtgattatattcatgtggttgaccttgctgaaggacatcttttcgcattaaagaagctttttgaaagctcatctaacataggatgtgaggcgtacaaccttggaaccggaaaaggaacatcagtgttggagatagtcaatgcatttgagaaggcttctggaaagaaaatccctttggtcatgggtcaacggcgtcctggtgatgctgaggttcttttttcatcgccggcaaaggcggagagagagctgcactggaaagcaaaatatggcatcacagaaatgtgcagagacctgtggaactgggctagcaagagcccttatggatacgcggcatctgagtctcccaagctgaatggcagttcacgctgagcaacacgattggtccttgtggaatcacttgtacatgagacagtagtgcctaccaggataaatgtagatctagtagggcagtcatacagagaaaagttctataggcctaggaaagaaatgttatcttgctgtccttagcataagctcctatagtggatcttccatatgcttatagtttatgaaaattgttctaggagcattgctgtagtcaagcagctaattcgattcttctatttcttgagttgtgttgcctaaaatagagcatgatatagatataattatcacaagaagttgcacatcatacaattttttttgg

SEQ ID NO: 117850 - DNA, 675 bp, Zea mays
  Clone ID: MRT4577_38967C.1
ggccgctttttttttttttttttgtttgatgtttttttatctatttcaaatcatatgtattaaagtgagatggtacaaattttaaactaaactctatttcactccaacacatatgaatgaatggacatccaagcaagctcgcaacaaaagtgctcgcctttgtggtctgtgcacttgcccagtttatggcatttatgacgtgagcacgtcaagttagtggctaaatgaacaaaaagcacatcttttgaacctatccaaatctacatcgcgcaagctcataaatggaactcgtgctacaggtcctcaacagcaacagaagaaccattttatcaagctgccggcaacaattgattacatatacaaggcacaactgattcccgcatgatccggtcccagtctttaccacatgatccgaccacactgcaagtttgcatcaacttacaccgttgtttctctccgatttaattgcttcgtaagacttgacaacctccttgaacttctcttctgcagcatctctatcattttgattttggtcaggatgcacttccattgcttttgttctaaaagcagtcttcacttctgcatctgtatatggtgtcgctcgtgatctgtcaagacctagaactgcatagtgatgcgacataggataaaccctaggtcctgccggcgtgtacg

SEQ ID NO: 117851 - DNA, 1692 bp, Zea mays
  Clone ID: MRT4577_38968C.1
atttcctcgcctccccctgaccccctctcgtccacgcctcctcccctaccattcgcagttttggacacttggttgtcgtttcgtcccgcagatccgcaagcaccgggccagtagagagagagagagagaggagggagggtcgcggcctcgcggggggtggaggagatgtctgtggcgaaggaggcggggccgagcagcagggcggtgcttgtgacgggcggggcgggatacatcggcagccacgccgtgctgcagctgctcaccgcgggcttccgggtcgtcgtcgtcgacagcctcgccaactcctccgagctcgtgatccgccgcctgcgctcgctcgcggtggaacacgccaaaaacctcgcgttccacaaggttgatatccgtgacaaagatggattggaaaaggtttttgcttcaacaagatttgatgctgttattcattttgctggactgaaagctgttggagaaagtgtacaaaagcctttgctttattatgaccataatgttgttggcacaataaatcttctggaagtaatggcagctcatggatgtaagaagttagtgttctcatcatcagctgcagtttatgggtcacctaagaactcaccctgcactgaagattttcctctcactccacataacccatatggcagaaccaaacttatggcagaggagatatgccgtgatatctaccattcagatcctgaatggaatatcattttgcttaggtactttaatccagttgggggctcaccccagtgggataccttgggtgaagacccatgtggaactcctaacaaccttatgcccttcgttcagcaaattgcagttggcaggaggccatcgctaacaatatttggaaataactacgcaacaaaggatgggacaggggttcgtgattatattcatgtggttgaccttgctgaaggacatcttttcgcattaaagaagctttttgaaagctcatctaacataggatgtgaagcatacaaccttggaaccggaaaaggaacatcagtgttggagatagtcaatgcatttgagaaggcttctggaaagaaaatccctttggtcatgggccaacggcgtcctggtgatgctgagattctcttttcatcgccggcaaaagcagagagagagctccactggaaagcgaaatatggcatcacagaaatgtgcggagacctgtggaactgggctagcaagagcccttatggatacgcggcatctgagtctccgaagctgaatggtagttcacgctgagcaacgccgattggcccgtgtggactcacttgtacatgagactgtagtgccagccaaccaggataaatgtagatctagtcggtcggtcatacagagagaagttctataggcctaggaaagaaatgttatcctgttcctcagcataagctcccatagtggttcttccatatgcgtatagtctatgaaatttgttctaggaccattgctatagtcaaccagctaattcaattctatttcttgagttgcgttgcctaaaatagagcatgatatagatatcagcatcacaaaaagttgcagttcatacaaattttcttttgtaattgtattgtttctttgagacaatttctgtattattagtatttcttttgaaataaatatgtaatattggttagtgagacccgaaaaaaaaaaaaaaaaaaaaaaaaa

SEQ ID NO: 117852 - DNA, 1295 bp, Zea mays
  Clone ID: MRT4577_38969C.1
gcacgaggtgactggagccacagtagtcttttttgcatatgttggatttgatgcggttgctaattctgctgaggaagccaaaaggccacagagagacctacccattggtatactaggaagccttatagcatgtgtgttgttatacgttgctgtatgcttggtcattactggaatggttccatatacattactcggtgaagatgctcctttggctgaggcttttgctgctaagggcctgaaatttattactgtattgattagtattggagctgttgctggacttacaacaacacttcttgttggcttgtatgttcagtcacgtttgtactttggacttggaagggatgggcttttaccttcagtatttgctgaagtacacccaacaaggcatactcctgtacagtctcagatttgggtcggttgtgttgcagcagtcatggcaggcctctttaatgtgcgtgtgctctcacatattctttccgtcggcactctgaccggttattcagttgtatcagcttgtgtgatcacactaagatggaatgacaaaggaactagtcgtcgctcccttggaagtatgtcaatttggcaagagggtgttctaagtcttgtcatagttgctctttgtggttttatagtgggactttgctatcgctttaactatgctatagcctttatggttgtagcttttctgatagctgttgctgccagtttcgctctccagtttcgtcaggtctatgtggatccacctggcttttcttgtcctggggtaccgttggttcccattatttctgttttcttcaacatggtcctgtttgctcagctacatgaagaagcgtggtatagatttgtcattcttagtctcatcgctgtgggagtttatgccggctatggtcagtacaatgctgttccttccagctcagaacactctactattggttaccatggcattccttctgaagccgcatgagctatgttcatccccggagttcttcgaacatactgtatggtaccaacatacaccatcgtcaccgaagtttgaacctgttgcttttttttttgatgttttgcacagtgcatactcttgtagttacgcttagtactcctatacctatatctagacagtgaatttcacagcctgtgttgtgcccaccacaccattcgtcaggaagcttgccaagtgcatagaccttgtaaaaatgcaaatgaaaataaagaactgcagctgcattgtttgtaggaactcattgtcatgcactatgtataattctgtgtatattgtgaagagttcaaaaaaa

SEQ ID NO: 117853 - DNA, 563 bp, Zea mays
  Clone ID: MRT4577_3896C.1
cgcctgcgctccctcgccgccccagttccccaccccctgctcacccacccgtcccctcctgctcgcccatggatcccatcgctgtcggcgacgccctccccgacggtcctcgggtatgagatgctgcacgccgccgccggaagcggcgaggccgaacacgccgttcagcagcatagcgagcgcatctcagaagataatcctgtgggtaggttgaaggtcttcatttatgacttaccaaggaagtacaacaagaagatggtcaccaaggattcacggtgcctcagtcacatgtttgctgctgaaattttcatgcatcgtttcttgctctcgagtgctgtccggacactaaatcccaaggaagctgattggttctatacaccagtttacactacttgcgatttaactaacgctggactgcccttgccgtttaagtcaccacgggtgatgaggagcgcgatccaatatatttcaaacaaatggcccttctggaataggactgatggagcagatcatttcttcgttgttccgcatgattttgcagcatgcttccactatcaagaaga

SEQ ID NO: 117854 - DNA, 812 bp, Zea mays
  Clone ID: MRT4577_38970C.1
aataaatttggacgaggttataaaagctgaagggagaatggccctcttcgtggctacaattacatccctcgggatgattggtattggcagaccgatacttctcactcagaacataaaaataggcggacgtacacaccggcaggacctagggtttatcctatgtcgcatcactatgcagttctaggtcttgacagatcacgagcgacaccatatacagatgtttaagtgtttgacttcacctgctgcagactgcttttagagcaaaagcgatggaagtgcatcctgaccaaaatcaaaatgatagagatgctgcagaagagaagttcaaggaggttgtcaagtcttacgaagcaattaaatcggagagaaaaaacggtgtaagttgatgcaaacttccagtgtggtcggatcaagtggtaaagactgggaccggatcacgcgggaatcagttgtgccttgtatatgtaatcaattgttgccggcagcttgataaaatggttcttctgttgctgttgaggacctgtagcacgagttccatttatgagcttgggcgatgtagatttggataggttcaaaagatgtgctttttgttcatttagccactaacttgacgtgctggtgtaaggacactacacgctcttagccaggttagcaagaaaaggctcagccccaatcttacagatgcaggcaaccaaataatccctatataaaaggcggactagatcatgagacgttcctcggtattcggtaacaatagaaatgacagagcatcaagctctttgctgaggaaaaaaaaaaaaaaaaaagcggcc

SEQ ID NO: 117855 - DNA, 382 bp, Zea mays
  Clone ID: MRT4577_38971C.1
accttcagctcgaacggtgaagccgtcgccgttgtagtgctcataagcaccgcagtagactgacatggggggatttgtgcaagacccacaagagcaatgcgtacttcctgcgtttccagctgaagctccagagaaggccgcgctggcaaaacagactacaggcgcagcataaggctgattagccaagacctcaaccagtacaagacgccctcgtacagatgttgatgtgcgatttaccaacaaggtactctcaccacagatcatctctgctagcataacatgtgagatggtgaccgcctctgcgttactcgcatgagttggcacgatatggtcctgaagttggtctgatcaactatgcatatgtctactgtactggtcttct

SEQ ID NO: 117856 - DNA, 2365 bp, Zea mays
  Clone ID: MRT4577_38972C.1
ccggccgggacgcctctccgcatgacgcaagagccgacgtggcggacccgtgggtgggcgcggacgccaacgacgcgacggcccaagtcgcgacgccaccagctccccatcccctcggacgccatggaggaagctcgcgaccacaggctctcctccaccgccggccgccccttcctctctggcttctgcgccgcggcgctccgacgtaagcccctcggcgcccgcgcctccgccgccgccgccgccaccggcgagggccttgtgcggcagctcggcgtcctcgacctcgtgctgctcgggatcggtgcgtccatcggcgccggcatattcgtcgtcactggcaccgtcgcccgcgacgccggcccaggtgtcacgatcagttttgttcttgctggagctgcgtgcgtgctcaatgccctgtgctatgctgaactggcgtctcggttccctgctgtggttgggggagcatacttgtacacgtacgcagcgttcaatgagatcaccgccttcttggtcttcactcagttgatgctggattaccatatcggcgcagcaagcattgctcgcagcttagcaagctactttatcgagttcttggagctaatcccgctcttgaagggccaaattccaagctgggtaggccatggggaggagttttttggtggtgttgtatcaattaacatactggcccccgttcttctcatcatcttaactgcgattctctgctatggtgtcaaagaatcatcagcagtgaacacgtttatgacaacattgaagataatcattgttatagtcattgtatttgctggtgtgtttgaggtggatgtatcaaactggtctccgtttatgccaaatggtttcaaatctgtagtgactggagccacagtagtcttttttgcatatgttggatttgatgcggttgctaattctgctgaggaagccaaaaggccacagagagacctacccattggtatactaggaagccttatagcatgtgtgttgttatacgttgctgtatgcttggtcattactggaatggttccatatacattactcggtgaagatgctcctttggctgaggcttttgctgctaagggcctgaaatttattactgtattgattagtattggagctgttgctggacttacaacaacacttcttgttggcttgtatgttcagtcacgtttgtactttggacttggaagggatgggcttttaccttcagtatttgctgaagtacacccaacaaggcatactcctgtacagtctcagatttgggtcggttgtgttgcagcagtcatggcaggcctctttaatgtgcgtatgctctcacatattctttccgttggcactctggtatggaaacttcagtaaatatttcaatcacactgtctaattcccatcatcgaacaatcgcatgtaactgctactttttccccttatttctttctgggagcagaccggttattcagttgtatcagcttgtgtgatcacactaagatggaatgacaaaggaactagtcgtcgctcccttggaagtatgtcaatttggcaagagggtgttctaagtcttgtcatagttgctctttgtggttttatagtgggactttgctatcgctttaactatgctatagcctttatggttgtagcttttctgatagctgttgctgccagtttcgctctccagtttcgtcaggtctatgtggatccacctggcttttcttgtcctggggtaccgttggttcccattatttctgttttcttcaacatggtcctgtttgctcagctacatgaagaagcgtggtatagatttgtcattcttagtctcatcgctgtgggagtttatgccggctatggtcagtacaatgctgttccttccagctcagaacactctactattggttaccatggcattccttctgaagccgcatgagctatgttcatccccggagttcttcgaacatactgtatggtaccaacatacaccatcgtcaccgaagtttgaacctgttgctttttttttgatgttttgcacagtgcatactcttgtagttacgcttagtactcctatatgtagacagtgaatttcgcagcctgtgttgtgcccaccacaccattcgtcaggaagcttgccaagtgcatagaccttgtaaaaatgcaaatgaaaataaagaactgcagctgcattgtttgtaggaactcattgtcatgcactatatgtataattctgtgtatattgtgaagagttcatatcaaattgccctgcccccgtcttttgccgttgccctacaaaaaaaaaaaaaaaaaaaaaaaaaaaaaaaaaaaaaaaaaaaaaaaaaaaaaaactcgaagagggcccggtacc

SEQ ID NO: 117857 - DNA, 432 bp, Zea mays
  Clone ID: MRT4577_38973C.1
tcggacgcgtgggacgcggtcgcgcctccagcctcccctacccctactcccctcgcgcccagggaggagcccgagtcgcggcgagcgaagattccctccgattgctctcctcctagaacttccgatcggctcgtgatggccatgcagcagcacgcggcgtcggcgtcgagctccagcttggggctgcaccttctcgcctcgccctcgtccatcagggaggccacccacaccaaggttttcgtgggcgggctcgcctgggagaccagcagcgacaggctccggcgcttctacgagcgcttcggggacattctcgaggccgtcgtcatcaccgaccgccactctggccgctccaagggatacggattcgtcggtgacattccgtgaagccgagtccgcgagcaaggcctgcgaggaccccacgccggtgatcga

SEQ ID NO: 117858 - DNA, 542 bp, Zea mays
  unsure (1)..(542): unsure at all n locations
  Clone ID: MRT4577_38974C.1
aaaaccaaaactttattatgatgcatatattatatggtcataccacacatgaataatgtgtngtacgacttactagcattattacatatataagatgagagagggtatggattagaggtagatttcccaaatatcatgtaatcaatagtagggcgcgaatggcaacgggagacgccacaagggttggagcggcagctgggcagctggtactggtactggtagagtccacccatggccgaaatgttctgcgccatcatcatggccatggggttgagaccctgggctgccaacaactgctgctgctgctgcatcagagctggctcgtacaggctgctgatggcggcacccgaacgctcaagctgcatcatcatctgcagctgctgcgcgacagactgcacgtgcatcatccttatctgctgctggcagcactgatgcccgatcggctgatacatggcgctagtctgctcacacccggcgtagtaaggcgccaccgccagagggctgcactgcggctgccctaagtactccacgtaggggtacag

SEQ ID NO: 117859 - DNA, 719 bp, Zea mays
  Clone ID: MRT4577_38975C.1
aaacctagccgccgccccctgcttcactcagagttcctcttttctctcccaccaggccaccacgaaccctagccgccgcccctcgctatggcgcgatgccgtgagccgtcagctgtgacgaccaccgcaccgaggtgtgccgcgcgcccctgacctagaagactggcgtcccgagatgcagcccttaccggtgacgaccagtcgaccaccatccccgatcgccgtgccccgtgcgtcgcaccgcctagcccgaccctctttgcgtcgctccactgcctgtgacgcagccatccgccaacggtgctccatctcctggcgacaagtgtaggtgttggctgctgcagttcgtcaccacctctcgtcctcttccaggctggttaccggatcgccggctgctgctcttcccatgctctacctagcagctgaagatgctttctatactggaatctgaacatgaggagttgaatgagaaagatgatgcatttgtgagtgtagaggccgaggcagaggcagatgtagaagcaggagacgaatcagtcttacatagcatcattgaagatgaagatgccgaaggagaagttgccgaaggtacaaatccagaagctgctatgttgaagtactaagccctgatggtgtttgctacctgtcgattccatgggctgatgttacttgatcttactttctgctgtcaaatataaatgagtacgcatgcctgaatc

SEQ ID NO: 117860 - DNA, 484 bp, Zea mays
  Clone ID: MRT4577_38976C.1
atttgtgtttgctaccatggaagcacgcacaaaacgtgagtttgtgtgtgtacctgctttgattaaaagggtgagggaagggataaatgaactgggacttgatgatcaggtcgctgtcagcgcatgctcacacccgggatagtcataagcatgcaggagacgtcatcattgacagttctgacgccaagggagaagtgactgggcattggtatagtcatgtcgttactgatgataagcctgccttgctgcatatacatattggacaaggagaaggtgtggaccatctatgatggggacatatgcgttcatctgtggagcaccacaaaccagctctctagcttcggaacatggaaaatggtgtgcgaagaataccttgaagaaaccagaacagatggtgctatatttcaaccctgcagcagctaggtgatgcttccaacgcaaaaatggctttacctgctgtcttactgacctgccaaagaaaaac

SEQ ID NO: 117861 - DNA, 335 bp, Zea mays
  unsure (1)..(335): unsure at all n locations
  Clone ID: MRT4577_38977C.1
aattcggcacgaggcactcccgcacagcatctgagcgctcactcttgcagcatcgatgatccatgtacctgcttctagctctagcgctagacgtgagaccgagccactcggaccgggcagccctgacccgtnccgcatgcgacccatggcgcatgaacaagaggccagacccccaccgtcgcggagaccagcgaagcgccccgagtggagaccccggactccggccgcacacgtgcccgaggacgctgctcacgacgccgatgccgacgtaccagagccagctgncgcggnacagacacctccagctgccgccgctgagcccgtaccagagcacc

SEQ ID NO: 117862 - DNA, 376 bp, Zea mays
  Clone ID: MRT4577_38978C.1
cccacgcgtccgcgatctgaacctcttccagctacactcatgatgacaattcgcaccccctcgagtccaatgaccatggttctcggaaagtgtgtccgtctcgtcgagtcacggcgcggtacggacgcggccaagatggtagtggtggtcacctaccgccttgtggaacactgtgcaggtcacatgcaccgcaggacgacatcatcgtgcatgtcaagaagttggtggcggcgcaaacggggacgcgcaccgagaagatccgcatccacatgtggtacaacatctacaaggaccacatcacgctcaaggactactaggtccactacggcatgggccacgagctctactacaactgatccgccgcgcttctctccct

SEQ ID NO: 117863 - DNA, 455 bp, Zea mays
  Clone ID: MRT4577_38979C.1
gggcgcgcaaccaggtgccatgtccactttctttaaaggtggcaccaaaaaatgcgacaacctatgcaaaaaacgtgcatccatccaaccagcgcagctgatgcctactaagccaaacctattacctttctactggcgttccatccaacggtacacacatgtttattggcttataaccataaaccgtacacatggattactaacaggcattgtacacatacactgttgggaatcacaataataaccggttaccaacatttttcttcttcacggcgtagactgtggacacggacgataccatgcaatgtacgccccacttgttgggaacaatggaacccctgcttatcttgctgtattacctgctccccccaggtctgctcccagtagttcttgataaaccagaacagcttctgcttgaggtgaatgggtgcttaaacccaaagcaccatatccaa

SEQ ID NO: 117864 - DNA, 1765 bp, Zea mays
  Clone ID: MRT4577_3897C.1
gtaccctcgacgccggccgggatgactggtcgcagactcgcagggaaggacccattctctcctctcctccccggtcccctcttcctcattaacaaaatctctccttagtttccccaacctgcttctgtttaccgaattcctaaatccaatccccttgccaagctctctctttgctgcgggaggtcgaggccggagaggtcttctgggatgggatcaagaaaggggtggttccccgtggccctcctgctgttggccgcctctgccctctggccgccggtcgccgccgccgccgccggaggcggcgaggccgaacacgccgttcagcagcatagcgagcgcatctcagggagtgctggtgatgtgttagaagataatcctgtgggtaggttgaaggtcttcatttatgacttaccaaggaagtacaacaagaagatggtcaccaaggattcacggtgcctcagtcacatgtttgctgctgaaattttcatgcatcgtttcttgctctcgagtgctgtccggacactaaatcccaaggaagctgattggttctatacaccagtttacactacttgcgatttaactaacgctggactgcccttgccgtttaagtcaccacgggtgatgaggagcgcgatccaatatatttcaaacaaatggcccttctggaataggactgatggagcagatcatttcttcgttgttccgcatgattttgcagcatgcttccactatcaggaagaaaaagctatcgagcgtggaattcttccattgctgcgacgtgctacattggtccaaacctttggacaggagaatcatgtttgcctgaaggagggttccatcattattccaccctatgctcctccgcagaaaatgcaagctcacttgatttccccagacactccacgctcaatcttcgtttacttccggggacttttttatgacacggggaatgaccccgagggcggatactatgcaagaggtgcgcgagcttcgctatgggagaacttcaagagcaaccctctgtttgacatttccacagaccaccctgccacttactatgaagacatgcagcgcgctgtcttctgcctgtgcccattgggctgggcaccgtggagccctaggttggttgaggctgtggtctttggctgcattccagtcatcatagctgatgacatcgtgcttccatttgcggacgcgatcccatgggaggaaatcggcgtctttgtcgaggagaaggatgtcccaaagcttgacacgatcctcacgtcgatgcctatagatgacatcttaaggaagcaaaggttactcgcaaatccatcgatgaagcaggcaatgttgttcccacagccagcgcaaccaagggacgcgttccaccaaatcttgaacggccttgctcggaagctcccgcacccagagggtacgttcttacaacctggcgatcagcgcctcaactggaccgctggtcctgtgggagatctgaagccgtggtagagaagaatagctatcttcttctttgataatccaagctttgccacgagcaccccttaggactaatgcacgcttcatgagatgttatgtaatcaatatgctgtgcgtgctttaggtgcaaaatacaccttggccgtgcttagtccttatgaacgccatgtaacttattgatttcccatggaaatgaaatggtatatttatcttgctaaaaaaaaaaaaaaaaagcggccaaaaaaaaaaaaaaaaaaaaaagaaaaaaaaaaaaaaaaaagcggcc

SEQ ID NO: 117865 - DNA, 799 bp, Zea mays
  Clone ID: MRT4577_38980C.1
actcccgtccagccgtcctggctcctaaccgcaccacacacacccgcatccagtcaccgccgccaactccggccgccgcgttgccacctccggccgtgtccccgcgcgccaccgcagccagccgcctccatcccggcgcgcagtgctccacccctgccggagctgccgcctagtcgcgtgcgaggcctggccgccgcctgcgctccttgtggaggagctcgccttcgaggcctatctcctcgctccgcgctgctctcctcgttccgaagcgctggcacagcaacccacctcccgtcctcccctgcctcctctcgtccgggacggggatgcagacatgcagtccctgctcacccgggatctgggaccccatgggcctgcgcgcctctatcgtcaccaacgccggctatacacctccgggactccgcctcgtcaccagcaccgactgggtgcacgcctctgcctcgtcaccagtgtgtggcagtgctcgcggccatacgcatcctcccgagctccgtgcatcaacgtggcggcgctcgcgaccgtggatgagcccaagtcgtctccatctcctgctgcccttctccatggctgagacgtactcccctccgttcatggcgctgcctccaatcagtgcccccatccgtcctcgacaaggtagctccacagccctccaggttagcttgctagttgatctacacatgtggtgaattgaagatgcatatgtattgtgctttgtgcgtgcttgatggtgattcgcgtggaatttcgctgaattggagcgacgaagatgcatatgtat

SEQ ID NO: 117866 - DNA, 620 bp, Zea mays
  Clone ID: MRT4577_38981C.1
atcgcgctgcacaccaggctgccgcatactgtcaaagcgaggtatgggaggttcgcgtgatcaacatgtccgcatgtcactggcactaccggtgttgcacacgcccgtacactgcgcggacaagacggcacgcgaagcaagctctacatcatctccttaaagggaatcacgggccgtctcaaccgcctccctgacgcctgcgtcagcgacatgcccatggacaccgacaagaacgaagagccccacctcctgaataaagagatggctgccgacagccacctccagcgaaatccgaggcgtcttaatgacgacgactacatgtacttctaatataatgatggagagtttgtgaatcccaagggtgagatgaaatgttctgcaatcacatgaagctattcgctaggaccgagatgacctttgatctaccatacctaggggaccaaatgccatcgcttgagagcctgttggaatgcggtcatacttgagtatgatcatctcaattgagagacgcacctggtggaaggccgacattggacatgatggttccttttatgttagggcactcaattttggagagccaataaaattgtgtaacctggttgacccaagattgctgtttg

SEQ ID NO: 117867 - DNA, 399 bp, Zea mays
  Clone ID: MRT4577_38982C.1
cccacgcgtccgttaatttcggttgaaatgatctgtatttcgcattacttgcgggcttggttcatacgtgttggaactacagttacgtttttctgtgttctagacttttctttaactaagttaatcctgtttgaatcatcctgtttcatttgcagtgagaaaattatagaacctatccattgatgtctcatttatctgtattgtgagaaaggtcccacaaatattcgttttagatgttgttggattagcggagaagaaacttgcagttcccctaaggccctaagatccattattttttgttcttttgttgtcacattcttcctgttgccttgtagagtttcacaccagggctgtggtcacaatacaaagcttatgaggatgcagttgtggagaacatta

SEQ ID NO: 117868 - DNA, 1308 bp, Zea mays
  unsure (1)..(1308): unsure at all n locations
  Clone ID: MRT4577_38983C.1
caatcgttgagactcccatgtccctgaagttggaaatcaccagccatctgtaccaaggatgaagcaattggcacgcacaattaccaattcatcttcatcctcgggaaacctgggtctgaatcatacagtattcggaagggtaaagcagattagcctttcatcctatcttaggcattctttgcatactggaggtggttctgatgcaccgagtcctgcacccatgcatcaccatggtcatcatggcgatcatcaccatcaccacagtcatgacgacaacaggcatctagctcctgctccagctccagtacattttgctatgccgcaacccagatatggtgctccacctccatctgggtgtccatacagcaaaaacaagccaaataaaagagggcctgttacaattacaccagctgctgagcctgcagctaatgatcaccgatctacttccattgctttaccaccacatccatcgtcaacttcatctgctagtcgctctcgacatggtcccagtatgcagggtggagctcctgtttctcaccctcctgctctaccagagccacctttgcccaccgtttcgttcgctcatccacatcttccaagtgaacatggaacagggataagtcctgctccaagtgaagaggcggcaacactagcagatcctgctgggatgtcacaagtggcacctgcacctcatgcatcttacgccgccaggatgcagggcgatgctccctgccgctggattctttttctcctcgcgctatgcaccataacgagcctgctagtacgatgaaaggagtacacgggccggccaacatcagcaaccgccgccgctgtttgtacgtgctaaagaggaccgaccgcacgggtctcccaccggcaaggcgaccatcagaagaccataacgagctcgcccctcgttgcttggtagctgtcagtttgtcgctgcatgtaaatattggatgggtttacaaaaccgcgagacgcgtggtggtcaaagccacagggggtggcaggcccttgtccagcgtgtgtgtagtgctgctgccgctgctgctgattctcaagtctgaattcggcagacgcggcctcgtcaaaagtgtaaagaacctccagttccggagggttcgttccgcatctatccacgcgctcagttttgctgtggcggtagttcatgtgtctgtgcttaacgtgtcgtataaagttgtaatatcagctaagatcgtggagtcgtagaatcaagcaaaatagaagtccaaaaaaaaaaaaaaaaaaaaaaaaaaaaaaaaaaaagggaataagccannnggg

SEQ ID NO: 117869 - DNA, 370 bp, Zea mays
  Clone ID: MRT4577_38984C.1
ttttatatcgttccttcaaattttttttttttttttttttttttttttttttttttttttttttttattcatccaagctgtataatttcatcatcagcttcaagcacctgttaacttagagtgctccaatacgcttaggcccaattacaaaaagttacatataccaaaataaaactcgacaatgaaaattatctacctagagtaaattttgaatagttggcgccctttcacttaaaacaatgaggagcaaaaagctatgaagtatggccctttgacctgaaacattaggctaaaaatacggacgcgtgggcggacgcgtcggcggacgcgtgggcggacgcgtgggcggacgcgtgggcggacgcgtggg

SEQ ID NO: 117870 - DNA, 335 bp, Zea mays
  Clone ID: MRT4577_38985C.1
gtatgcaaacaattagattgagttaagtgaacacactgcacgaaaactattgcgccatatcgatatggcctaagctgtgctaattgctctctcctcacgggcattaagacagtttgtgcaactcatgcatgcagtgaaacatattgggaggtggaagtgtaagacgtgctctcatcttttctagaaacagactagaacttgaaacttaagattgccgaccaatccttacaactgccgttgcatcttccagcttgccgtctgagtagcccagacacacacccggaacatcttagtgagacaacttgctacttcaaaacctatacaggtgcaccatg

SEQ ID NO: 117871 - DNA, 558 bp, Zea mays
  unsure (1)..(558): unsure at all n locations
  Clone ID: MRT4577_38986C.1
tcngacggccgcccgggcaggtactacatatattactggcaagaccctacgtaacatggacaacactccatcatggaactactaactgatagcataagtagatcagctaccaccaatgacgggcgccacgtagagaacactgattatttcagggcacttgacgaccagttgagcggtaggaatacgctggacggaacccgctcgagacaaactatgggcatattcatgcacaatgtccatcagactgagcgtgcatctagcaggcccaaatagggctaaattgagcctattgacagtcgaatgacaattgactgacaactgttttactgcgtaaaacactgggaaaacccaacttatacccaacttaatacatttgcatttcatccgcttttctacaagtgacgaagtaccgaacaagcccccttccaaacggctgcccaacctgagtggagaatggacgggcaatgtacccgcccagtaaccgcgcattaagcgcgggggacgcgcagggtacccgctacacttgccatacacttaccagcgccttattgcgctctc

SEQ ID NO: 117872 - DNA, 187 bp, Zea mays
  Clone ID: MRT4577_38987C.1
atttcatgttgtggatattttgaaccatcgtaaattgcttcgtgcttctgatcatctatatgatttgctggatttaagggcggagtctggtttacttagaacaaggctagaagggcaagagaaggagattggtcagctaagaaagcaaataaaaaatcttgaagagaaggagaaggtggcaaatgaa

SEQ ID NO: 117873 - DNA, 188 bp, Zea mays
  Clone ID: MRT4577_38988C.1
gcttttgaattctggtacccgcggaccggggaaaagcgtgatttatgaggccacacctctttcttataagcccaaaactcgcaaacggaaaaatatacggtttctttatctgggggggggggactccgacaacaaaactgtttttgttttatacagaccaaatgacctgggggggaagccaaaagcta

SEQ ID NO: 117874 - DNA, 409 bp, Zea mays
  unsure (1)..(409): unsure at all n locations
  Clone ID: MRT4577_38989C.1
ccgctttcgggcttcatttttctgcccgttgggtngggtgctttgtgggggcccgccgcggcgcgtcggccgggcgggctgggcgcttggcncggncccttggggcgcgaacgccctaacgtgggtcggggcgggcggcgcgcngtggcgccggttgcttgcttggtttctgncttngcggcgttcagtctttttgggtggtgggggttgcttcgcgcctctggcttttcttcctgcgcgatgtccttttgcgtgcttccccggttcctctcgttctaggttgcctttctgtcgcggtgcggtcttcggtcgggttaatctctcctgtctttcgtcggtctgttcccttctctcgttccctgttggtgggtgtactttctctcccttgtttgttcgtgcttcgctttgt

SEQ ID NO: 117875 - DNA, 625 bp, Zea mays
  Clone ID: MRT4577_3898C.1
cacgcctgcgtgtaccgggctgctaatacacggtcgacctcagcgttcttatttaaagcacaaaatgtaccagcctggcttatcaaaggtgaagcctacactatgctacaagaactttatgatagagctgttactgataccatatttaaaaaaggctccaacgctgatatggttgccgttataacgctgttcctttcaccaaaggaagttggttgattggcaaaaccagttgttgaagcctaaaggagccaacatgcagtcaaaggtggtattttaactgtatcaactttggttgtatcacaatagataaacgtattacatcagctacctgggtgagaatttataggcgcagatgttgtgaatacaacagctacaacaacgctggctagcagaccaatgtaacaaatttcaggagcaagacagtatgtcattgaatcaactagctgcattgaactctgctatttaaatgcaacaacaacaactatccattgatgcaagtaatagactgctacccctagcagtttgttgcattgaaccatctgacaagattgaactctcctgcttatttacagcagcgacaactactacgcattcagagcgatagctggagtgagccctgctacct

SEQ ID NO: 117876 - DNA, 481 bp, Zea mays
  Clone ID: MRT4577_38990C.1
aaacaacgggaaaaaccaggggacccaactccatataggcggaagcagggtatacaggggagggggggggaaaactgggccagttggttaaaaccccccaaatcctaaaacaaaaactggggtttatttaaatctaaaattcggtccccccgaaacaaattattggaaaaggggaaaaactccaattttttttaaaaagccttatccccatcgattttttttaacagaactaggcagggggggggactttatgccttttttaaccgggcgcagggtccaaaccttttccacgcaacgagccttggattttatccgggccttgatttttttgaaggctggcccagggtcatccgaaagggggggccattttcctggggatccttctaaagggtctctttttttttgggggatatttttttcttaccgggcggggctggcttatctccggcgccgctcagctcgaaaaaaatctcgcgcccag

SEQ ID NO: 117877 - DNA, 257 bp, Zea mays
  Clone ID: MRT4577_38991C.1
ccactctcggcggcgcgcgcatctctcctctcttcttgcccttccttcccccaacccacacagccaggtgggaagcttgtgtaccaatacaccaagaagagggcgagcggtcccaagtgccccgtcaccgggaagaagatccaggggatcccccacttgagacctgccgagtacaagaggtccaggttgtctaggaaccacaggactgttaaccgtccttatggtggagtactctctggaattgctgttagggagag

SEQ ID NO: 117878 - DNA, 1593 bp, Zea mays
  Clone ID: MRT4577_38992C.1
atgccggagccgtccaccaccgaagggcaacgtatccagggcaagctcaagggcctcttggaaaacgccgctgtccaacaagccgagagctctgcctctcggaggcgaggagacccctcggagcatcgtgcaacaccctcccgacgcgtgagggaggcctcagtccacaccgagcgcacacgggacaggacgcctgcggccccggatcgcctcggcgacgagcagcaccgccgcgaccgtcgagcccgactcggggaaggggtgcgccgaggctaccactccaggcgtggaggactctacgacaattaccaactggcatgccagttgggagggacggacgacgacaacctcatcatccgcaacctcccccttttcctctccgacgctgcccgggcatggatggagcatctgcctcccgcgcagatctccgactgggacgacctagacaagcagcctcagggaggacagaaggaagacgtccccgaggcatccgtccagcgtggctcgaaaaagaaggccaagaagagggcgcaagcaaagcgcgacgccgttgacgtggatctcgtcgctgctaccgagcacaggaaccctcggaagccccccggtggggccaacgcatttgacaaaatgctcaaggagtcgtgcccctaccacaagggtcccgtcaagcacacccttgaggagtgcgacatgctccagcgctacttcaacaaggctggaccctcggccgaaggtggcaaggaccaaggcaacaacaagaaggggggcgacaaggacgaggagttcccggaggtccataactgcttcatgatctacggtgggcaagtggcgaacgcctcggctcggcaccgcaagcaggagcgccgggaagtctgctcggtgaaggtagcggcgccggtctacctagactggtccgacaagcccatcaccttcgaccaaggcgaccaccccgactgcgtaccgagcccaggaaggtacccactcgtcatcgaccctgtcatcggcaatgctaggctcaccaaggtcctcatggacggaggcagcagcctcaacatcatctacgccgagaccctagggctcctgggggtcgatctatccgtgatccgggccagtgcagcaccatttcatgggatcgtccccggtaagcgcgtcttgccccttgggcaacttgatttacccgtctgcttcggaactccctccaacttccgcaggaaaactctcacgttcgaggtggttgggttccgagggacctaccacgcggtgttgggaagaccatgctacgccaagttcatggtcgtccccaactacacgtacctcaagctcaagatgtcaggccccaatggaaccatcaccgtcggatcctcataccgccacgcttacgagtgcgacgtggaatgcgtggagtacgccgaggccctcgccgagtccgaagccctcatcgccgacctagagtgcctctccaaagaggcgcccgatgcgaagcggcgcgccggcaacttcgaaccagccgaagcggttaagtccgtccctctctaccccagcaacgacgccggcaagaaagtcaggatcggctccgagctcgaccccaaataa

SEQ ID NO: 117879 - DNA, 430 bp, Zea mays
  Clone ID: MRT4577_38993C.1
aattcggcacgaggcttttatacatcgaccgtgtacactaggacgagagccatccaagtgcaggctaacgctgtgattggataaccagatgaccaaggctttattatgaccaatctcatctggcatagaactttcctcgctttagtcctaaggcaggagccgcgaagcctacagcacgagagcggggaagtgctaccgactctacgaaaagggtcggactagcgagctcctgtggtgctggtgagcagcgcgccacattgaggagcatcagtcctttgaacgggcaacaggaggtaccaccggtgggtggacagactggtcacactacgcccatcgggacaagcaactgcttgctccagtgtctgctaactgacagatggaaggacagccttcgtggactgctgctgcactacctcttatgctgaataac

SEQ ID NO: 117880 - DNA, 1124 bp, Zea mays
  Clone ID: MRT4577_38994C.1
gtggcatcaatcagggtgcccaagacccaacgcgccaggagggagcttctcaagcacgcgcccaagcttgttgagaccagcaagaagacactgatcctccatggtaccaagactagtgctgtgttgaactctgtgctgtcagatatttaccacctaaagcgtgataatgctgtgaaatataccaagaagaatgacaacattaggccttttgaaagtggtggagaatcttctctggaatttttctccctcaaggcagactgtagccttatagtgtatggttctcattcaaagaagaggcccaacaatctgattttggctagaacgtatgaccaccacatatatgaccttgttgaagtaggagttgagaactacaagtcaatggaatcttatgtttatgataagaagctagcaccattacttggatcgaagcctttctttgctttcataggggaacactttgagagttctgaagagctgaaacatttgaaagaagtgctgcttgatcttttcagaggagaggtcgtagagaatctgaaccttgccggtgtggatcggatctatgtgtgcactgcaatctctcccaccactgtctacatgatgcactgtgctctccgtctaaaaaggtcaggtacatctattcctaggatggagctggtcgaagttggaccttcaatggatctggttgtaaggaggcacagacttccagctgaaagtttgaagaaagaagctatgaagaccgctgaacatgctaagaagatgaaaaatgtcaccaaggatccagtgcagggcaagctgggcaaggtctacatgccagaccagcaggttggaaagttgaccttatcaaacgacgtaaagggactaaagagggagcgccgcgaagccaagaaaaatcaggactcaaagaagcaaaaggtcaaccctgagtaaagagcactgaagtttacctttgtatctgtttccaactgctgtgttatccaagtagaagttgctcgctgtcagattagtgccatcttgttaggctaaagatctctgtacgactttcacatcagtattgtgtaccaatccatgttatgacataagcatggaattttgagaatgtgttatcctatcaaatatcaaacgtc

SEQ ID NO: 117881 - DNA, 876 bp, Zea mays
  Clone ID: MRT4577_38995C.1
tgacccattcgtccgcatcgagccaatgaatctagccgtccgctccctgttgcctcccaagccaaccatatccactctcggcgccgccgcgcatctctcccctcttcttgcccttccttccccccaggccccaacccacgcagcctcactaggggtctaccggcggcggcgacgagatggtgcagcgcctcacctaccgaaagcgtcacagctacgcgacaaaatccaatcagacccgggtcgtgaagaccccaggttcgccccatctggtgggaagcttgtgtaccaatacaccaagaagagggcgagcggtcccaagtgccccgtcaccgggaagaagatccaggggatcccccacttgagacctgccgagtacaagaggtccaggttgtctaggaaccgcaggactgttaaccgtccttatggtggagtactctctggaattgctgttagggagaggtgagtaaatagaggcgggcatattgtgttgtgaaagcccaggatctgtcatcttgtaatcttatgagctactactctatgtagaattatccgtgctttcttggttgaggagcagaagattgtcaagaaggtcctgaaaatacagaaaaccaaggacaagacagctgcaaagtagagctccaggaatggaagcctagacactgcgagaagtaattttggtggatggaaaatctgtttgccttgtgtcgagcatttagcatgtgagacatgcctgttgaagtgtttgagtttagagaccggaatccctttcacctttgaattgttgctatgtcgggacatctgctccccttgatgctttgttatgaattgagatcatatctgggtaagataatcttgtctcacaccttggcttgtagc

SEQ ID NO: 117882 - DNA, 1201 bp, Zea mays
  Clone ID: MRT4577_38996C.1
gttttctagggtttaggggtcaggccgcccggtgttgtgtcgtcaggtagccgcctccccacctcttctgcttgttctccgcggcggcggcttggatcggagcggaggaagaagatggtggcatcgatcagggtgcccaagacccaacgcgccaggcgggagcttctcaagcacgcgcccaagcttgttgagaccagcaagaagacactgatcctccatggtaccaagactagtgctgtgttgaactctgtgctgtcagatatttaccacctaaagcgtgataatgctgtgaaatataccaagaagaatgacaacattaggccttttgaaagtggtggagaatcttctctggaatttttctcccttaaggcagactgtagccttatagtgtatggttctcattcaaagaagaggcccaacaatctgattttgggtagaacgtatgaccaccacatatatgaccttgttgaagtaggagttgagaactacaagtcaatggaatcttatgtttatgataagaagctagcaccattacttggatcgaagcctttctttgctttcataggggaacactttgagagtgctgaagagctgaaacatttgaaagaagtgctgcttgatcttttcagaggagaggtcgtagagaatctgaatcttgctggtgtggatcggatctatgtgtgcactactgcaatctctcccactactgtttacatgatgcactgtgctctccgtctaaaaaggtcaggtacatctattcctaggatggaactggtcgaagttggaccttcaatggatctggttgtaaggaggcacagacttccagctgaaagtttaaagaaagaagctatgaagaccagcaggttggaaagttgaccttatcaaacgacataaagggactaaagagggagcgccgtgaagccaagaaaaaccaggactcaaagaagcaaaaggtcaaccccgagtaaagatcactgaagtttacctttgcattggatacaggtcaggttaagaaaccccggtttgtatctgttcccatctgctgtgttatccaattagaagttgctcgttgtcagatagtgttaaatagtttagggccatcttgttaggctaaagacatgtgcacgactttcacaacaatattgcgtaccaattcatgttaagacgtaagcatggaaaaatttgagagtgttatcctatc

SEQ ID NO: 117883 - DNA, 1566 bp, Zea mays
  unsure (1)..(1566): unsure at all n locations
  Clone ID: MRT4577_38997C.1
ttgccggccactcgcagctcctccctctgtcccctctcccaaaacccctctctctccacgcttctccctcactctcccagccgctgcagccgcgctgccctccgccccggcgcccgtcgcgctgccctcccatctccctccggtgttgtgttgtcatttgtcaggtagccgcctccccccccccccccccctcttcagcttgttctccgcggcggcggcggcggcggcttggatcggagcggagggagaagatggtggcatcaatcagggtgcccaagacccaacgcgccaggagggagcttctcaagcacgcgcccaagcttgttgagaccagcaagaagacactgatcctccatggtaccaagactagtgctgtgttgaactctgtgctgtcagatatttaccacctaaagcgtgataatgctgtgaaatataccaagaagaatgacaacattaggccttttgaaagtggtggagaatcttctctggaatttttctccctcaaggcagactgtagccttatagtgtatggttctcattcaaagaagaggcccaacaatctgattttggctagaacgtatgaccaccacatatatgaccttgttgaagtaggagttgagaactacaagtcaatggaatcttatgtttatgataagaagctagcaccattacttggatcgaagcctttctttgctttcataggggaacactttgagagttctgaagagctgaaacatttgaaagaagtgctgcttgatcttttcagaggagaggtcgtagagaatctgaaccttgccggtgtggatcggatctatgtgtgcactgcaatctctcccaccactgtctacatgatgcactgtgctctccgtctaaaaaggtcaggtacatctattcctaggatggagctggtcgaagttggaccttcaatggatctggttgtaaggaggcacagacttccagctgaaagtttgaagaaagaagctatgaagaccgctgaacatgctaagaagatgaaaaatgtcaccaaggatccagtgcagggcaagctgggcaaggtctacatgccagaccagcaggttggaaagttgaccttatcaaacgacgtaaagggactaaagagggagcgccgcgaagccaagaaaaatcaggactcaaagaagcaaaaggtcaaccctgagtaaagagcactgaagtttacctttgtattggatacaggtcaggttaagaaaccctggcttgtatctgtttccaactgctgtgttatccaagtagaagttgctcgctgtcagattagtgccatcttgttaggctaaagatctctgtacgactttcacatcagtattgtgtaccaatccatgttatgacataagcatggaattttgagaatgtgttatcctatcaaatatcaaacgtcttctgaggtctgcaacaaactctataccctgagtgtcgcttaaatttagcgatccaaacgttcgctgcatcctccagcaacgaacggtaaaccagacgctaagtatcggnccatgtaagtacaccctattttcagcgattcactgtgcgtca

SEQ ID NO: 117884 - DNA, 281 bp, Zea mays
  Clone ID: MRT4577_38998C.1
ggcgtcacctcctcgtccaactacccctacacgtggtcgtcgtcggggtacaatacccagaccttccaggtgagcagggaggtgcacgacgcggcggagagggacgtggcgaccgtttgactgagaagaagacggtgtcgagctcagcatgctgccgccggcaggacggatcactgacggtggtgcacgtggagcccggggggcgggccagtcggcagtcgggttgcgcgctttcatcaggagtcaaaaggggcttgtggcaacgcggctcacgatcgaat

SEQ ID NO: 117885 - DNA, 1643 bp, Zea mays
  Clone ID: MRT4577_38999C.1
ccacgcgttctccgaaacacagtgtgtcgacacgctaggcacctactctcccagcacggtgaagcgcgcgactggccctcacggccaggtgacccgggcgggctgctctcccctctcccaatcccctctgggctcgagggggaaaaaaaaaaaaaaaaaaaaaaaaaaaaaaaaaaaaaaaaaaaaaaaaaaaaaaagggccggcctcgaggccggccgggactctcaatatggcgcggggttttctagggtttaggggtcaggccgcccggtgttgtgtcgtcaggtagccgcctccccacctcttctgcttgttctccgcggcggcggcttggatcggagcggaggaagaagatggtggcatcgatcagggtgcccaagacccaacgcgccaggcgggagcttctcaagcacgcgcccaagcttgttgagaccagcaagaagacactgatcctccatggtaccaagactagtgctgtgttgaactctgtgctgtcagatatttaccacctaaagcgtgataatgctgtgaaatataccaagaagaatgacaacattaggccttttgaaagtggtggagaatcttctctggaatttttctcccttaaggcagactgtagccttatagtgtatggttctcattcaaagaagaggcccaacaatctgattttgggtagaacgtatgaccaccacatatatgaccttgttgaagtaggagttgagaactacaagtcaatggaatcttatgtttatgataagaagctagcaccattacttggatcgaagcctttctttgctttcataggggaacactttgagagtgctgaagagctgaaacatttgaaagaagtgctgcttgatcttttcagaggagaggtcgtagagaatctgaaccttgctggtgtggatcggatctatgtgtgcactgcaatctctcccaccactgtctacatgatgcactgtgctctccgtctaaaaaggtcaggtacatctattcctaggatggaactggtcgaagttggaccttcaatggatctggttgtaaggaggcacagacttccagctgatcaaacgtgtgcagggcaagctgggcaaggtctacatgccagaccagcaggttggaaagttgaccttatcaaacgacataaagggactaaagagggagcgccgtgaagccaagaaaaaccaggactcaaagaagcaaaaggtcaaccccgagtaaagatcactgaagtttacctttgcattggatacaggtcaggttaagaaaccctggtttgtatctgttcccatctgctgtgttatccaattagaagttgctcgttgtcagattagggccatcttgttaggctaaagacatgtgtacgactttcacaacaatattgtgtaccaattcatgttatgacataagcatggaattttgagagtgttatcctatctgacataagcatggaattttgagattgcgttatcctatcaaacacccaacccctcctgaggccgcatgcccggtggctgggggagcctgcgtggctgcgtgcccctccgttggagctcgccatcctgatggccttcggcttccgccttgcctccttgaatatgctatctgttgttgctgtatcctacagtatatttgctagtcc

SEQ ID NO: 117886 - DNA, 396 bp, Zea mays
  Clone ID: MRT4577_3899C.1
gccgcaagtgctatgcgcggcttccgcccagggcaaccaactgccgcaagaaaaagtgtgggcacagtaacgagctgaggtcgaagaaaaggttcatgtccaagattggcgggaaatgatcggcttttgtcattgcgtgacatatatggagcatcagctgaaatttcttagacgcttaataatttttactttaacgccgtggatgtgatattttactgaataaagttgtagtagaaacaaaaaattcgtgctactcttgatcgagatgtttcttcatatacgccctttcgctgtggtttgcttaggctaatcacaatgaaggtttcatgaggtgtttcatgtatttattagcttgacacatcagctatttcgatgacatgtcacatcatttaataa

SEQ ID NO: 117887 - DNA, 341 bp, Zea mays
  unsure (1)..(341): unsure at all n locations
  Clone ID: MRT4577_389C.1
tgcttctcttctnnnnaagtagcggggcagtgccgtccntttctcctntcgacccacgcgtgcgtcctatctcatccctgaaatgaagtacttgcgcataccatgttctgacgatgtcctcatcagtggggggcaagccattcttggaggcttgccatgccctgaggggtaacctgtttgattttgggaagatgttacagcaagagacctcaaggagggcgatgacagctggatagatccacccaatgacacgctatgttatgaactatttgaggttgctgagttgtttacagtaaaacactttatgcacttttgtcccataacagcatgtgattcatgat

SEQ ID NO: 117888 - DNA, 370 bp, Zea mays
  Clone ID: MRT4577_38C.1
gtttgttaaggaaagcgggaagggaggcgagagagggagacagggaaagctctctttctactccttctcctgtggaattcagtcatttgtccctgcagtgctcgcacgggttgccacgtgattcgagagcggaaagaggacgagcatgacacggacggcgaaggaccagaggaacccgatgtgggaggtcgcgctgggtaccagaaacagaagcgtcttagacagaacactcacaaagaacaaacatcaactgccggactccgactacagcgtcctaaaaccggctcaaaacaaggaagaactacgaagactgactggccatatcgagaactatactatcgactacaccctaccagtggtggtacggtat

SEQ ID NO: 117889 - DNA, 765 bp, Zea mays
  Clone ID: MRT4577_39000C.1
aattcggcacgaggaatgcctgaaacgtaatgagaaagttcttcttcctaagtggcaggatgcattcgaggatactccataggccgagtagaaagccactgttcttgaaaaacagggtgcattgaaggacacttatatattgaagaagatgataaatcatacttgtgcgtgaattatctttttttgtttgatattgaagtaatttgaggtagagggaggctaaactagaactactccctatgcgtaaggtaaaaacgataagtagacttgatttgatcgattgtgggggcttcaatcggtcgtagcccttcatctatataaaggggaggtctggacccgttacacgtcgtttcctgagttaatcccgcggatttagctaacaaatcccgcaagaaactcggaaccctaaaaggttctgcgcacgcgcggaccgtcgagcctcaggttgacgaacatatgccccgtgccttttggtggaggttgacgaaccaaaagcatatgaactaagtctgatgcgagtcaccggcttttcaatccaatatggtgatcattcaatagagccccaatgcataaaggccgtttcggattgcatctttctcggctatgaccatttgatcaatggatcaaaatgaatagaatggaggtgccctcagcccgaatagacgaagggactatgcatataccacggtttcatcgtcgtatcattccatattttgacatgacaatatatcgatgatgagtaggcggggtgaaagcatcctggca

SEQ ID NO: 117890 - DNA, 281 bp, Zea mays
  unsure (1)..(281): unsure at all n locations
  Clone ID: MRT4577_39001C.1
agcagtggtaacaacgcagagtacgcggggagaactggggttcaagcatgtagaattttaaaatcggttcatttgtctggacaatgttcctgactagtaatgtgatcgcaagacaaacgatgttatttccctctctggttatcaatatgtccatctcttcacaaaaaaaaaaaaaaaaaaaaaaaaaaaaaaaaaattaaaaaaaaaaaaaaaaaaaaaaaaaaaaaaagncctctgcgttgttaccactgcttcgcgtactctgcgttgttaccactgtt

SEQ ID NO: 117891 - DNA, 734 bp, Zea mays
  Clone ID: MRT4577_39002C.1
ccggggttaacttcttttacccccgtgctttatatcccgttgatgaaaacggatcacaccatctctccctcatgcttccccgctggagcgattgctcccggtggctcggcgccaatagaggcgccgccacctgactcggccgacccccatctcgctcgacgagatcgtcgctggtatccgcggttggaagcatcactagcgcctgatttattcctaacgcccttctcgtgaacccccaggtatatcttagagaatgttcatgccaagagtggcaacatatcgagaagccatgccaccatgccttatgccaagagtggcaacagacctattgatcattcatgtgatgcacctgctgctattccaactgaggtgccaacaccagtgttttcttcagctgaagttggtttgttgatgtccaccccgaggaaaattaggagagctgtcaataagcttactcccaagaagaagatgcatggcatgtagacagcttcaatggtgaatgtcgactgtattttgtttcagaatatctatggcatgaagacagcttcaacgcatgttaactgaatgtatctgtctttcctttcagttatgtgttgtttcagaaacaaatgtgcatgtgattatgtgaactgaaggtatctgtgtaaaaaaaaaaaatgaaaagtgaatgttcgtgttaattgaaggggtcggttaaaaaaaaaaaaaaaaaaaaaaaaaaaaaaaaaaaaaaa

SEQ ID NO: 117892 - DNA, 537 bp, Zea mays
  Clone ID: MRT4577_39003C.1
tttttacatcttacagaacataacaactttttttattactcacagcccacaaaagctttttttcatggccacaactcaaccaaactcaaccaaacggacccttagtcttggggattatctagttttcagtggttgtttaggtctggtcattcttacttttgagtcagcggcatgtatgttactctgttttaaattataagatgctttggtttttctagataacttttgtcatctatctagacatagtgtatagcaaaaactatgtatctaaaaaagtcaaaaacatataatctggaatggagggagtagttaactgactaactgttactgggtggagttagtgttgtactttaatgactaactttaatgaaatgatatgatgctcttttgtatatttgaaaaaaatatatacactgaccacatcatgaaaatgagcacacctggcagtcctagggtggtaataggctttaaattttacactatagaatttaagtatcgaatcggactaggatcgggtcctatttctattcatttttg

SEQ ID NO: 117893 - DNA, 375 bp, Zea mays
  Clone ID: MRT4577_39004C.1
cagacgcgggctcgaacgcggaaacccgaagcctgcgacggacgcctgtgacatgacggggctcacaagcaatgcgatgagagcctcgaacactgatgctgactactctgcatggcgcatagtgagacatgaagatgtcaaagggcttacaatgctatagcatacgcacctggagggtccatcaacgtcacctagctgatcacctacggccctggcagaacacacagcgcgcttgctgtgcaactcgcatgagcctaggagtgcggcagcacttcgaatgtgaccaacctgatacgctgagacgactgttctgtacgtccactaaactctacatgcccttgctgggacgacctgaccattcatgtgcatgcgcat

SEQ ID NO: 117894 - DNA, 1303 bp, Zea mays
  Clone ID: MRT4577_39005C.1
cattgggtacctcgaggccggccacgcgtccgcaccgctcgtgtactgcccgctactctaatttgtcctctacacttgaccactgcagctggcttggctcgtgagggattcgttaggggtggacgggtgggagagtagagaagagcgtagacagacagggacgccgcgtacgtgcggtgtggcattgttcgagggccggcgcagctgtgcggtgggggaggaatggacgagaagctggcgatggcgatggcggcgagctccgagtgcagcagcggctgccagtccggctggaccacctacctcgacgaccacacctcttcctactcctgcggcaccgcgcgcttcagcggcaagccgtgccagccgtactactgcgagtactactcggaggaggacgacctgtctatgatctccgacgcctcctccggcccgcgccagcacagctccgccggcaacgacgtcgaaggtggcgccgccgctgcgcacgccaatgcggagaggaaggggaggcgtgaggagacggccgccgcggcgaggcggcagaagaacaagagggctgccgccgccgccgccgccgcgtcgtctctgctcgaggacacggccagctcgccgcccttctttgtctactccaaggcgacgagctcgggggaggccaacggcggctatggcggcgctgatgatgcccagatgacagagatgggcaatgccgccgacttctcgtacgccttctccaccacgacgggattcaagtctcccttaaacggggctgctttgagcggctacatgcaaatgcagtactccccggcccccgtcaagccgatgcccagacgacaggtgtgcagaaatgcgtcggagaaaaaaaggtggtgactgcctgcccgatgccggttggactttgtccgtgctccgcgtctttttcctcgctcggcggctttttgttgtgtacctgtcccagaaaagccataggaaatgggcaggcaggctcgagtgcgtttgcaaatcttccccggatctccaagagatcttcccctgcgttgcgatgggtctattaatctccacctgctttgccacctatctctctctctctctctctctgcctgtctgtctgtcccatgtagtatgtttttcttcttctttcacggtggccccccgcccctgttgtgttcctatctccagttagtctccccctttttagctgtcattgcagtgggaaacaacaacaacctgaggcagaacaaaaacaaaacatgggcgccgacgtgaaaaaaaaaaaaaaaaaaaaaaaaaaaaaaaacccccaaaa

SEQ ID NO: 117895 - DNA, 279 bp, Zea mays
  Clone ID: MRT4577_39006C.1
aggccgcgtgcagtcgggtcccggcagcggctgcagcgctctcgtctactgcggatctcggtgccctctccatttcgtttctggagacatggcatccggtgtggctgtctctgatggtgtcatcaaggttttcaacgacgtgaaggtgcgtaaggcttcaacgccataggagttaaataatcgcaagaaggcggtgctcttctgactgattgatgactataagatcatcatcctggagattggcgaggagatcctgagtggctatgtggtccatactgt

SEQ ID NO: 117896 - DNA, 248 bp, Zea mays
  Clone ID: MRT4577_39007C.1
ccttaataaatttcgcgcagaaacgaatctattgggggtctgtttaacattgggggggttctaacataaaagaccgtttgagcggcatggccttcagaggatagatagaccacttgagcgtcaaggaaatattggagtgccaagcacaaactacctgaaaactactctgtctatcagagatcatacgcataaatttattcatccacaggcccagttcgccttgccagcgacaaaatttcgtatactca

SEQ ID NO: 117897 - DNA, 1851 bp, Zea mays
  Clone ID: MRT4577_39008C.1
cattgggtacctcgaggcggcgggatgctactgccctccctttcatgttccctcctatgctgtaaaggacatagtgcatgtgctgaacattatcattgcctgctcgaattttgaacagatctacagcccatctacactcaatattgtctaaccctgactgggttgttgtattaatatatacttaagtacatgggctgggccaaggcccattataacacatgatctaacatatatgacagtgctagcttattccattttttcatacaagcatcacatgccaataagctataggcctatagccttggaggttgtcgaaatgtcattttttggcattcatagaaggcgttagagtctaggctttgaaagtttcttgtggacttgcaactcgattacttacctaacagtggtagagattggaggtcaaaatagcacatagtgccttcagcaaatggtgtgtgtaccatggaggtaaaataatgacaagggggagaatctagatggacatctggattgggtccttttgactactataagacattgaatgtgtcccacactattaatgtaaactctggaatctgaagttacctttctgctcgggtaggttgttttgaaagcataacattttttctttatgttttgaattttttttatgtccctgactcagtttctgtagtacggcgtagagagcatatcggaagttctagtcgaaggtctctctagagtgaagaggtgcaccgatgaagggcgtgctctgatgtcactcgacctccaggtactaattaatgggctgcagcacatcgtggcatcaaatgtgaggccgaagctgcagaccgtggacactttcataaaggcttactatctaccggagaccgagtacgtccactgggcgcggtctcatccagaattcagtacaagtcaggtagtcgggttggttaacctggtggccaccatgaaagggtggagacggaagacgagactagaaaccgtggagaagatcgaggcggggccatagactcggtgtcaggtttttttttttttgtataggctgtgttgtttgcttcagctgcacatagagctgtaatttcccccctcattttcttgactagggacatggaggaatttctagggagctccaacaccttctgctagagtacggcgtagagagcatatcggaagttctagtcgaagttctctctatagtgaagaggtgcaccgatgaagggcgtgctctgatgtcactcgacctccaggtactaattaatgggctgcagcacatcgtggcatcaaatgtgaggccgaagctgcagaccgtggacactttcataaaggcttactatctaccggagaccgagtacgtccactgggcgcggtctcatccagaattcagtacaagtcaggtagtcgggttggttaacctggtggccaccatgaaagggtggagacggaagacgagactagaaaccgtggagaagatcgaggcggggccatagactcggtgtcaggttttttttttgctgtgttgtttgcttcagctgcacatagagctgtaatttcccccctcactttcttgactagggaattggagggaatccatgggagaggaaaccccttcctatccaattttgaatagcaaggtgttttctcccccatagatctactccatttatctgatcatcaaatcagcccttaaaaccattttttgtcgattctttcacccatcgcccgctcacccatattgtatatttttaagcgttgaccctgtattatatcaagcgagttgacactcccaagaaggaaaagaactgtgcaccaccctacatggaacattggctcaataaatatggctcgaac

SEQ ID NO: 117898 - DNA, 2066 bp, Zea mays
  Clone ID: MRT4577_39009C.1
gccggccggtccggggactgcccgtcccgtgccgccccacttgcagttggagtcgccactcgcttgctgtggtcgggtactcgggtcggcccaccgcctcctaggcctgtgtccgagccggcctaccccgcctctggccaccgcctcgccgcccgcgtgcgcccccctccaactcctatggccgcgccctcccacctccacctccacctcccgggctgcccccaaaccctagccctgcccctgccctccccggggggtttctccgcttggcccggcctccgctcctgctcccgctcccgccagccccgcatccgcccggtcgccgcgctcggacccgccgacgccggcgacctgctcggccgcgttgaggcgttcctctacaccgttgcggacgccgccgttaacgcggagcccgtcgcggcagccgcggacaccgggaccaaggaggccgccgccggggactggctctccggcatcaccaactccatggagaccgtgctcaaggttctgaaagatggtctatcagctctccatgttccttattcatatggctttgcaatcattctcctcactgttcttgtcaaggcagctacatttcctctaacaaagaagcaggttgagtctgcacttgcaatgaggtcactgcaacctcaagtgaagaccattcaacaacgatatgctggtgatcaggaaaggatacaacttgaaactgctcgcttatacaagttatctggtgttgacccacttgcaggatgcttgcctacccttgtgacaataccagtttggattggtctatacagagctctctcaaatgtagctaatgagggacttctgactgaaggctttttttggataccttctctggctggtcctacaacaattgctgctcgacaaaacggccaggggatatcatggctttttccttttactgatggccatccacctcttggctggtcagatactttggcatacattgtgttaccagttcttcttgtcatttcacagtacatatctactcaagtaatgcagccaccacagagcaatgatcctaaccaacaaggtgctcaggctgtaacaaagttcttaccattgctaattggttattttgctctttccgtgccttcaggactaagtctgtactggcttacaaataatatcctcagtactgcacaacaagtgtggcttcaaaagcttggaggtgcaaaaaatcctgtcaaagaatatattgacaagctttcaagagaagaaacgactactgttcagaagaatgattctactcttcagagtgaacctctctctaaacatagtaaaccccagcctagccaagagccgaaaccaagtgggccacaacgtggtgaaagatttaggaaactgaaggaggaagaatctatgagaaaagaggttatgggacaaggtaaacaatcagaacagtcaagttctgaatctagagtcgcggatggaacacaaaattcggatgtgtcttctggagaccaaaaagaccaacaggggtctcatgaaaatggaccggttgtagctagtataaaatggtggagtcaaccatagtcgaaatgaaaagactcagaacttatcctcagaaaaggaagcagctgacgatcactcacctgatgtccacaaattaacggaccgagagaatggcaatgacgcggtatagagtggatgttagcgatctactgctctctgaagatcagtgagtatcgtatctgcttcatcgacgtatagctgggagatagtgaccaacagtttcacgaacagctactacaggagagttgagaatcaacacgaagaagatgcaaacaggaggcaaaattgtgcaaaccacggtctaggtctaggctcatttatttatttttgtggctgtgctttaggttatgtgaagcatatggcatatatatatagtagtagatgaaagatttgagatctcaaaggatttatgttgttcagctgggatgggatggatgtacaaggtggctgtaataaatgtacacctgattttgaccgtgcaattcgatattttacctcatgtaaataaataaaattcataaccc

SEQ ID NO: 117899 - DNA, 483 bp, Zea mays
  Clone ID: MRT4577_3900C.1
gggggggggaaacaacttcatgagcttgcttttggtaggacacatccccgatcattaaaaaggatagcatgggaaccccaggccacctaaggggggattacttggtactagcaaaaattcccaactggatgcaacagaacctttatcactttatcctaacccctacacatgggacatggaaaaaatttttacaaaacttaacttttgcaaaaaaaaaatatggccctcgttaaggggcaaaaataggcttttttatttgatacaggcaaaataaaagggtcctaaaccagttttggctgaaatttcaagctttttcatgcctcatttattggaaatacagcattgcgaaaagcttcccaagctttttcatttgacacgggcataaaaaagagggttttaaaaccagttcaagctgaatattcaagctttttgatgggatcctttattgcagggacagcattgcaaaatgcttcccactggtcc

SEQ ID NO: 117900 - DNA, 1990 bp, Zea mays
  Clone ID: MRT4577_39010C.1
caagtaatgcagccaccacagagcaatgatcctagccaacaaggtgctcaggctgtaacaaagttcttaccattgctaattggttattttgctctttccgtgccttctggactaggtttgtactggagacctgtgtatcattatattaagtaagaagaagagaggttcaacatagaccagttacaagatacaatcctctttacagaggacggaagcagagatacataaaaagttccattataacaaatttaggctacaactaacctgaaaacagggagcaacatgaccagccaggaggctatgactaagagccctcaacaggagcagtgaggaaggcttacaaataatatcctcagtactgcgcaacaagtgtggcttcaaaagcttggaggtgcaaaaaatcctgtcaaagaatatattgataaactttcaagagaagaatccaccaatgttcagaagaatggatccactgttcagagcaaacctctgcccaaacttagtaaagcccagcccagccaagagctgaaaccaactggaccgcaacgtggggaaagatttaggaaactaaaggaggaagaatcaaggagaaaagagattccggggcaagcagaacaatcagaacagtcaagttttgaatctagcgtcgtagatggcgcacaaatttctgatgcgtcttctggagacaaaaatgatgaacaggagcctcatgaaattggaccgatcgtagctaatagcaacggtggagttaaccatagtagaaatgaaaagactgagaatttttcatcagaaaaggaagcagctgacgatcattcctcggtaagcaaacctatgttaccggatgcccacaaattaacggaccaagacaatggaaacgatgcagtatagagagtggatgttagcgtagctagtcgttctgttgcatctgacgcgttcactgaaaatcagtggctcagacgtgtctgcttcatcacgctgaggtatagctgtgaggcatagtgagcaatagtttcacgaacatctatcaagaatcacacgaagatgcagcaggaggcaaatttgtttcaaactataaaccacgatctagggatgagaaaaaatgtaagttgataaaaaagttttttttttatcttgtcatgccttttgtcttgtgtccttggaaggattaatggataagttaagttgtatttaacccgaaagccttcagttgtccattcttctgtgttttttgtgttcagatttaggaaactgaaggaggaagaatctatgagaaaagaggttatgggacaaggtaaacaatcagaacagtcaagttctgaatctagagtcacggatggaacacaaaattcggatgtgtcttctggagaccaaaaagaccaacaggtaagagtatattttgttgcttggtatatggttttgtttcagcaggtgaagtccactttaactcgactgattacggatattaatttaacaggggtctcatgaaaatggaccggttgtagctagtataaatggtggagtcaaccatattcgaaatgaaaagactcagaacttatcctcagaaaaggaagcagctgacgatcactcacctgatgtccacaaattaacggaccgagagaatggcaatgacgcggtatagagtggatgttagcgatctactgctctctgaagatcagtgagtgtcgtatctgcttcatcgacgtatagctgggagatagtgaccaacagtttcacgaacagctactacaggagagttgagaatcaacacgaagaagatgcaaacaggaggcaaaattgtgcaaaccacggtctaggtctaggctcatttatttatttttgtggctgtactttagagagagagagagagtagtggtagatgaaagatttgagatctcaaaggatttatgttgttcagctgggatgggatgtacaaggtggctgtaataaatgtacacctgattttgaccgtgcaattcgatattttacctcatgt

SEQ ID NO: 117901 - DNA, 265 bp, Zea mays
  Clone ID: MRT4577_39011C.1
gcaccggctacggcgaccatagccctccccgcggcagccgcatcggctacggcgaccgcagcccgccccgcggcgaccgcattggctacggcgaccgcagcccgccccgcggcgaccgcattggctacggcgaccgtagcccgccccgtatcggccgcatgcgcatcggctacggcaaccgcagcccgccccggcgcgagcgcgctggctacggccaccttgacgcgtctccccgttgcgggcatgcaccccacaaggactcctc

SEQ ID NO: 117902 - DNA, 792 bp, Zea mays
  Clone ID: MRT4577_39012C.1
gggggggttttttttttttttttttttttttttttttttttttttttttttttttttttttttttttttttttttttacccccctttaaacattcgggggaaaaataaaaatttattcaagacttttaaccgggcataaacgtaaaaaataggggggactaaagcagggcatcgacttcagcttacgtgtattgaacaccattagtgttgacagagcgatcgacaatagcataaaatactgaatttaacccacgcgtcactgaaatactatattctacaaaatagaactaattcaaatatattcggccactaaattcctcgaagcacacctcgcaacactggtatttctaacttaatcttatacgtctacgaagcgtcttattttacgatcataaaattaatagtaaaaatagcgaatcagctcaccacatctcaatgcaatttggtagtcgcttgaatgacgatggccaggggtccgactgggcgagctggagcagagagcagggccgagaacgacggtggtctctgattgacattgcgtcgaacacttagagcacaccgaacgaaatagacgatgtcgcagctggggctgcgcagaaaaactcggctaccaaggacgcagacgcacgttggcgagctggagagagtcgcggcttgcgacggcgagcagagcgtgcgccatggcgaacagaaaccggggcgccgcagttgccagggagactcacaacagggagagcgcccccgctgcagcagccagcgaaggaccccgagccggacgctgggtcgaccggg

SEQ ID NO: 117903 - DNA, 401 bp, Zea mays
  Clone ID: MRT4577_39013C.1
ggaaaaaaatatatatatcccaaaggccgcaaaaaaaaacaggggaactaaccacccttttttacaggaggggggggggcattcaaatcacttttttacaaaaaaatccccataatatttttgcccagaaaaaacattttggccaacccaaaaaccaaaaaaagctccctaggggccccccattgcccaaaggaagccaaaatctcaatcagggggcgagcggggcaaatcaaccggggttgggcatggataaatcgaggccatcaacccgggtgcccacaatgggggggaacccctcgcccagaaacctttccagggggtccaggccgcccctaatggtttaacacacgggagggagctccggggaacccccccgcacgtgggcctccctgtccccaaaa

SEQ ID NO: 117904 - DNA, 624 bp, Zea mays
  Clone ID: MRT4577_39014C.1
ccggccgggaagatgtctagactctcgctgtgcattgaccagcgcagagacaagtacagcagtcagcgagaagcccatcgtgtgttgtctcagacccagtgacaacgatgtctgtcccggtcacaacggccgaggacatcaggaataacagccactctgctgctgtgcgacgctcgacagcggacaggccaccgttcactgtgaggtatatcaagatggtcatcccgtcgcactgcttccagagctcgaggctcacgtccttctcgtacctcctccacgacctcgtcgtcccggccgctctcctgtaccttggcgttgccgccatcccggaggtcccgagcggcgcgctccgccgcttctcggtgtgctcgctctactggagggcgcaggtgagcgtgctgactcgagtctggggcatccggtacgagtgaggtcaccacgacttctccgactacccgctcctgaacgacgtcgcctgcttcctgctccactccgcgttgctcgacgcccttcttcgcctggaagatagtcatcggcgacactgcggcaacagcgcatacatgcaaaactactagctgtacgtggcccataccctcgacgcagctgtggtggtacactccgctc

SEQ ID NO: 117905 - DNA, 396 bp, Zea mays
  Clone ID: MRT4577_39015C.1
aaaaaaaaaaaaatcttcagtcgtcgctgcaagccttcaacccgtgctaactgcgggggaaaaaaaacatgaagacgacctgggcagaacgtccccggtcgttgctgccgtcctggtggcgctcgccgtcgtcgccgcggccgtcggcccggcgccgaagcggagaggccaggagatccacctgttcgaggccacggtccgcttcccggacgacggcgtggacgagctcgactacaactaccgcctgctcgccaaagtgctcggcagcgtcgaagcagcgcggagagcaacgtacgacagtgagctcggggtattcagcgcgctcatcaccaacaaccaggcccgtcggctgtcaaaagtcccaggcgtgctgaaggtcacacgactcgaggaccc

SEQ ID NO: 117906 - DNA, 1293 bp, Zea mays
  Clone ID: MRT4577_39016C.1
tgctactatgacaaaagctgtgcaaaagttgattgatgaggaatttgaaggtattgtccatttgcggacatcatcatttcaaaagagagtttcaacagcacggcatgaccttatcaaactttctggagcagaaaacaaacttgaggctcttctgcaggttcttgagccaagcttggcaaagggaaacaaagttatggtgttctgtaatactttaaattcaagtcgtgcagtggatcattttttaactgaaaatcatatatccactgttaactatcatggagaggttccagctgaagagagagttgagaacctgaacaagttccgcaatgaagagggggattgtccaacattagtatgcactgatctggcagctagaggcctggacctggatgttgaccatgtcatcatgtttgacttcccatcgaattctattgattaccttcacagaaccgggagaactgcacgcatgggagccaaagggaaagttacaagcattgtggctaagaaggacgtagctttagctacacggattgaagaggccatgaagaaaaatgagagcttggaagctctcacgactaacaatgtcagaaggccaaccagctcgcagagtgtgaacacgaaagggaggccctcaaggttggttaagacttcaaatgctcttaaagttgtcagtcagaagggtagaaggggagtatcgctatctagcaggtcatcccgggctcccaaggatacaacttcaacccgaaggcgctcgccaccgaagagccaggcaaaggcaacaaaatcgtcagcccctcggaaagccaagccggtgaaacccactcagagcagcgcaaaggtctcgaagagcaaagcaaaacctgaggggcgaagatcaaagagtgacactctgaacaagctgggaactaagctcagtgtggttggatttagagggcgcagctcaggcaaatcagcacaatcttcataaggctttggtatttttttttattattgttatgctaaaaaggttcttggaggatttgcagcctgtaaatatctgagactaagtttcatcatttctttttctccttgcgggtttataagtgaagaccacaatctgagatatgaacgcagcactgctatgtaatattgtactgcactcagcagaatgttggaagaatacttttcattaccaaaaaaaaaaaaaaaaaagcgtgtatttacgtattattgagtgccccttatgctaagggttgatttgcctcgtttggatcattggaattgaattccattctaataatagtaatttaggca

SEQ ID NO: 117907 - DNA, 862 bp, Zea mays
  Clone ID: MRT4577_39017C.1
ttgggtacctcgaggccggccgggagactttctttctctcaaccttgaccattagtcagaccaattagcgcgtcaacccttctgtcacacattactcggcaatcatggcgacagctcgtgagcacaacgacgtcgagcgcggcgcgagttttgagaagagcgtaaacggcaccagtgcagtcgatcacgctggagcaaggcccaagcagaggacgccctatgactatggcggcaaccctcttgcccatgttgctaccaatgacccagaccttcgccttgccgcctttggtggtgaattccagcctggtctctaccgcccgccgaaccgcaagtttgccaacccagctcccctgggtctctcggcttttgccctcaccacctttgttctgtctttgatcaacgtcaagacgcgcagcattggccacccaaacattgtcgtagcgcttgcgtacggctacggtggtcttgttcagcttctggctggcatgtgggaaatggccgttggcaacacattcggtgctacagcactctcatcctacggaggtttctggatcgcctttggtatcgttctcacgcctggtgtgtttgaaatcgaggagattctcgtcaagagcggagatttctacaactcatttggtctcttcctgatgggctggttcatctttaccttcctccttttcctctgcaccctgcgatccacggtcgctttctgcttcctcttcttcaccctcgacatggcgtttatgctcctcggtattggatacctccaggccgacgccaacggccctcaagagtcgtgcattgttgctgggtggagcgtttggcctcatggccgcttttaccgcttggtacatgcgcttgc

SEQ ID NO: 117908 - DNA, 1175 bp, Zea mays
  Clone ID: MRT4577_39018C.1
ttgggtacctcgaggccggccgggagctggcaagctacgctataaacccgtccgatcgctcgaagtcgaagcaccgcgttcctcgtctcgcgtcttcttccactgctccctcccacctccgctcccagcttttcccattctcgttgatacgagcgagagtcgagacaggtcaaaaggagattgagtaaggaaaagaaaaaaaaaatcgctgctcccgaggcacggcggcggcgagcgtgcgacacctccggcggctccacagatccggcgaccgatctccggccgcctgcggatgctccggggccggcgcggtaaggcccaggggtccacgctcgtagccagatctcggggcgctgctgggaagtggggttcgttccgtccctgcctccctggtggtggggatggggtggtccgcggggctgtggtggctcgtggccgcgctgtgggtggtggcggcggcggcggcggcggcggagggtgaggtcgtggtcgggtcagcgccgaggcggcacgcgtacgcgtcgatgatgtacatgggcactccacgggactacgagttctacgtggccacgcgcgtcatgatgcagtccctgcgccggctcagcgccgacgccgaccgcgtcgtgatcgcctccctcgacgtcccaccgctctgggtccaggcgctgaaagatgatggtgtaaaggtggtctctgtggagaatttgaaaaatccatacgagagacaagagaatttcaacatgtcaatccaagttgaccttaaacaagctgtatgcatgcagagctatatcgaggtgggcatggcagatacatgactccgacaacattttccgctaagtttggatagttaatttgcattcacattgtcaaattctgatggccaattcaaatgtacaactaaacctgcagcctgagagcaagagtggttgtacacaatggaactatctggaaacctctagaatccttgaatgtgttatcttagacatgtaggtgacatatacagtggaaaaggggggagggctgtagaattggtgctgaactgaagaggaactgactggggtcagttgttagttattttgatttattgttcctctgaaaagccaaggcatttttggctttgtttgtaattgatataatatgttccttcccacatcaattgtagggttgaatccccc

SEQ ID NO: 117909 - DNA, 941 bp, Zea mays
  Clone ID: MRT4577_39019C.1
cggagtagcaacccaatgagcataatggagtgcttaactcttcagaagaagagtgcagctgcagctggattagcgatgagttcagatgttgagggtggtcgcattgactatgtctttaagattgtcgtcatcggtgatgacgccgtgggtaagagtcagttgttgagtggtttcgcacgcaacgagtttagtctggacagcaagggtaccattggtgttgagttcgccactcgtagcatccgcttcgaggataaggtcgttaaggctcagatttgggacaccgccggccaggaaagatatcttgcaatcacaagtgcctactatcgaggagctgctggtgcattgctggtttatgacgtgactcgtcatgcgactttcgagactgtgggaaggtggttaaaggagctcagagatcatactgactccaacattgtcataatgcttgtggggaacaaggcagatttgcgtcacctacgggctgtttccactgaggatgccaaagcatttgctgagaaggagagtatttttttcatggaaaccagtgcacaggacactaatgtcaaaacttccttcgaaactttgttgactgatatctatcgaattttgagcaaaaaaagcttggttgctgatacttatgttgatagtctaactgttgctcggcttcttggtggtactaaaattagtgttggaccgggaggatgctgcagttgataaccgccagttggttcgcttgggtgctatgaaaagctaatttctctaaggcgtggagatagtttaattgagtttttttgctgagaaaactgtggttaagcacaccacagagaaaaactgtgtcataagcacacctttgtttgtaatggaaggggggggttttagccgtgtgtgatttatgtgttctggatggttaatggagactggacagtgaaaaatggtaacaacat

SEQ ID NO: 117910 - DNA, 416 bp, Zea mays
  unsure (1)..(416): unsure at all n locations
  Clone ID: MRT4577_3901C.1
tacctcgagggacggcgggncgggccgtcataaagaggaattctgccgtctatttgccggcgagccagtgtcgccgcaggaatctgccgtctccattgctcccctctgtgaagaccgacatacccggctccactagaccgtagtagctgtcggagaataggcacccggctttcgcctcggggtcaggcactgtctcttccatgagaagactgcgcctctcctgcatctccggcagatgcagagctagcagcctaagtctcagaggttgaggagggggttcgagggcggagtatggtgacgagctgcctcatcggcgtcatggcagggtgcgagtgcgcagaaggaaattcagctggtaggcataacggccattcgctcccaacgacgtcgaagttgtacttctcacaagctcaccg

SEQ ID NO: 117911 - DNA, 263 bp, Zea mays
  Clone ID: MRT4577_39020C.1
atgacgcgtggcccaacgcgtggacaacgacatgcttatcaaggacgctaccgtgaccactcacggggacagatacaacacggatggcatgcacatggaccactaacccaacatcaccatcaaccacaccttcattgacgtagacaacgactgcatctgcatctgtgccgactcctccaatgtgaacaacaccggcatgacctaaaaccctggccaccgcatctgcatcgacaacctatgtcagtacacagacaagatcgacg

SEQ ID NO: 117912 - DNA, 1922 bp, Zea mays
  Clone ID: MRT4577_39021C.1
atgggggacgtcgcccaccaccacgtccacgaccccgcgtccttctccccgctctcctccgacgccggcctctccccgcacttccctcccgcgctcgcggacggcggcgccggcgcgctggacctgtccttcacctccaccgcctccgcctccacgtcctccttcaccaccgcgaccacgttcagcgcgcggagctcgctgtcgctgccgtccttctcctcctccacctcgctctccccgcgcccgcactcctcctcggcgtccccgcactgggcgcacctcgccgcggcgcgcgccgccacgcccgacggcgtcctccgcctcgcgcacctgcacctcgtccgcgagctgggccacggccacctcgcgcgcgtcttcctctgccgcctcaagagctccccgcccgcgtccccgctcttcgcgctcaaggtcgtcgacctccgcgacgacgacccctcccgcgtctcccacgtcctcgccgagtcgcgcgtcctctcgtgtctcgaccaccccttcgtgcccacgctctacgcgcgcctcgacgccggccgctacgcctgcttcctcatggactactgctccggaggggacctgcacgcggtgctccgccgccggccgggcggccgcctgcccgtcgccgcggccaggttctacgccgcggaggtgctgctcgcgatcgagtacctccacgcgctcggcttcgtgtaccgcgacctcaagcccgagaacgtcctcctccggggcgacggccacgtcgtgctctccgacttcgacctcgcgctcccggcgtccgtggagcccgccgtccgcctacggcaggtgcggaagcagagccgccgcaggaggatcgccctcctcctgtcgtgcttctctggccccagcaatggcggcggcgaagacgaagaggagatcgacggcaaggagcggttcgagttcgtggccgagccgacggcggcgagctccaaggactgcgtgggcacgcacgagtacctcgcgccggagctcgtgagcgggagcggccacggcaacggcgtcgactggtgggccttcggcgtcttcctctacgagctcgtctacggccgcacgcccttcaagggccacaccaaggaggccaccctcaagaacatcctctccaagcaggccacctaccctcagctggacggcgaggccgacgcctcgcagctgcgggacctcgtggggcggctgctggagcgcgacccgcgccgccgcatgggcgccacgcgcggcgccgccgagatcaagcggcacccgttcttctccggcgtggactgggcgctcatccggtgcgtggcgccaccggtggtgccggacagggacgccgcggcccccgtgggcggcggtgacaggaaggcggccaagctcgggagctggagcagcatgagcagcaaccgcggcagcaagaagcggaagagcagcagctttgggaggagatccaccgtccgccacatccacctgcgaggaaaggcagggggtcttccgcatgctcatgagctggaaccaggagagccggttcagcaacaagatcaagacgacgacgagcaaagaaagatgaacgaaacgaagtgttcttagcttggtgtgattattcggggggttgcttgctggagggtttttgttcgtttagtgtctagccttagcttacttattacttttgttagtactctactagcagagtacatgcatagagtcagtggtgtggctgtggcgtggatcagatcattgatttgatcgagctgtacaaatagcgaggcgatacatgtcactgagttgatcagttgacaaggtggtttggaccatgttgaggcacggagaaacttcatccctaagttttagtttgtctggctttgctcgtcattttgtacttgttcttctcacatatttgttgcttagaatttacttcc

SEQ ID NO: 117913 - DNA, 365 bp, Zea mays
  Clone ID: MRT4577_39023C.1
atttatgtgcttggaaagacccacctacgctcggccctgcctctaccactaatctaatccgcgctcgtactcagcgcacctcaaatccgcgagggggcaccaaaccaccctaactttcccgactccctgcttcggcacaactcgccaaaagccattattgagatctacccggacccactcaacaacttcgacgactaaaaaaaaacctattaaaaacaaaagggttgctttctcaaaagaattaaatccatgcatctccgtaccttattctacagtctcctcacagcgctattcatacctaacctatcggtatgtcccccataatcctccgatcgcgaaaatttcgcttccatttaatccaactc

SEQ ID NO: 117914 - DNA, 347 bp, Zea mays
  Clone ID: MRT4577_39024C.1
gtagcttttttattcaccgatcatgatgaatggggggggtatgaagtgtattttggcgcaccaccaacatacccggtcatactgcaagcaccgcaggagtggaatataaaacaacacccattgccgctcgctggtcccgcggagccactcacaaatgttccttcataaccacgcccaaggggacggtgcacgtatccacgctacaaaacaccacggagacatgcaaatacaatacacgccccactcctgcttgctcctgcaactatgatgagagtcgctgctgcatcatatacactccagatgatggccgaagccatcattctggacgaaaatgaagccactactac

SEQ ID NO: 117915 - DNA, 627 bp, Zea mays
  Clone ID: MRT4577_39025C.1
caggacccaataacatataacggggcacctggttttcccctaaaacagcaatttttaacagctaaacgggggaatacatcacctttgccacaaatttttaatcctgatccagcttccttgggtttttaaacaacccggccttttggggcctaaaaaaaaagaacactagcgtttgggggacctgcgcttccaaaacattttaacagttgcaattgggttttaaacgagagccaggggccccctttttaagtcaaccctaaaccctgcaacattggccttttaacagtttttttgtatgtctggggctgatatgccagggttgtctccaacaaatccttgagaggggtttttgggtcccaacctacctgcttgtggattatagccatgggggggatccttttggggctataatggaatccttcaccgaaaaactgactcgagctcacgtaaataatgggctcatccaggggggcctttcctgaaacatttgcgtaaacctttgtcataattggggccaactccctaacggaaacttaattgttgggattcccaacattgaaaatgtggccattggctcgagcgggattttcaatcatcagccctacagtttcgatagcatccttgatg

SEQ ID NO: 117916 - DNA, 327 bp, Zea mays
  Clone ID: MRT4577_39026C.1
aggacgcgtgggcggacgcgtggggcccggcctccgcaccagagcgcgaacctggccagcgagttgagcgcgatggcgagcaccagcgccaggaacagcgccgccagcaggatcaccgtgttggtgtcgaacgtcgcgtcgacgaccccgggcgccgccgcgcgcgctcctccgacgccgccagtgccgttcaggggcggccccggcgcctcggaggagtcccggtggtccacgtcgcagcacgtcgctcgcacgaaggcacgcgcattcctgccgtgctcagtccgcggcagcaactgatagctagtcgccaggcgcgttccggga

SEQ ID NO: 117917 - DNA, 571 bp, Zea mays
  Clone ID: MRT4577_39027C.1
ttgactattctactaggattatagaggattaggaacaaactatgtcgaatttttatcaacaactttattctaaaaaacagggttgggcgtcgaatttatactgcagagtatcacaaattatactacgtgcctgtccaacaaaaaacagaaagcagtactcctacatacctaactcctacaagttcagggatttccgtttccaaacactatgacacgggaggattctagattttcgatcctagggttaaagggaaggggcatagatacccactatgattcttaggaggaacgtttggtaatggaactctatgctctttcttatgagcactcagttctattcatcctctttgattctttaaaacaggaacctaaggaactaaacctgagcggaacagaacagaggaccgttggattagcacaggatcgaccaaccagcgattccgatctgcgatactctataagacactactatttgtatgtattctcaagcgatacacgatgtctatcctaaattatggagagtcatctcactccttgactatggacctgcctatatgatacaaggcagaag

SEQ ID NO: 117918 - DNA, 281 bp, Zea mays
  Clone ID: MRT4577_39028C.1
acgatgatcgagtagtaaagctcctcattctgctcgagcacccaccacggcggaccttccgccttgttactccacaaccctccttccttgctcttccttgtcgcgccgtactggttcgcgccgccgcggtgctgactgtcgtagacatgaggtcgtctctctcgcgcaacgaggccaaactctttaaagacatcgtcgtaagcacaccacatatccgctctacatcgtgtctacacttctagatactagacgatatgcgccccgcaaatatgttgggttcg

SEQ ID NO: 117919 - DNA, 534 bp, Zea mays
  Clone ID: MRT4577_39029C.1
gggggaacgataaattttatttaaagtttttcaaaaaaaaaaaaaaaaaaaccggttgtccttttggcgagatctggtagggccttcctttttacagatgggatttcacgcaggacctcatcccatttgaaaaaaaattttaaaccatttgctaaggcaggaggctttttttacaaccgataaatttgataatcgggattttgggggaacggccaaaccagggggggtgaccatttttaggagggtggccttttaacactaaccggggccaaggcgggaaataattcatgcctaataaacggggtcataatttcctagggggggggggacaataaaagcctccattttttagtactgggcaaccgttcctttttacgcgcgaagtagcttttttttttttagtttcacacccagtttttcctttgaggggggtttccactcacccttattaggaggaaaccaccatgcctttagtttatccttatggaagtcatggttggatacaaagcgaaaatttacttgacggggtgaatt

SEQ ID NO: 117920 - DNA, 432 bp, Zea mays
  Clone ID: MRT4577_3902C.1
actagttctagatcgcgggcggccgctcgcgatctagaactaggttttttctttattaaaaaaatattgagactagctaaactgggccacctcaaggcccaacacgccgggcagtccagctggctggtgagagaaactagggcaccagggtgccgagctcggaagttgcagcagagaagggagtaggggcggcggcagttcaagagaagtcgtgctttgcgctgctcgttggtccgatctgctcgcaaatcagttggtctcatctccacttcttgtctccataaaagcatggccggaaaatcgctggtgttggaactcggctcctctactttgttcgcaaatcggtctctaacgttcctatattcatcttgctggtggttggaagctggtagaggtggtgctgctcttgtacaacgaggttcttccgtgctc

SEQ ID NO: 117921 - DNA, 815 bp, Zea mays
  Clone ID: MRT4577_39030C.1
cattgggtacctcgaggccggccgggccgcgtcgtcttccttcctgcaatcctgcccctgcccacgccgtcttcctccctgcaatcccgcccccacccgcgccgtcttccttccccgcatccaacatgccggacgcgcgccagccatcaccgtcgggaatcccgcccgcgagcccgcgcacccgccaacccctgtgccccccgagatctcgcattcgctccatatatggaaggccaccacacgccatgcccagccatcctcggattccgccacctcctcctcctcctcgccctcatgcggctagtgatggattccgcgtccctgtgccccgagatctcacattcgctccgtctatggaaggccaccacgcgccgtgcatcctcggattacgtgccccttcctcggacaccatgccctcgcatcccgcctcgggatgcctgtgtcgtcactacccccagcccccgcgccatcaacgcgcctccttcctcccccgaaacgccgtgcccatctgtcttctcaacccccacgtgcatcgtcatcccctcagggaccgccgcacccgtcccccttgcctacccgcctgcgagacagccgctgttgtccacctgcctgacgccgctcgcgatgaccccctcgattcctgggtcttcacgacccacagcgcgacgctctacaccgaggacggaggatagctccatgaccaccttctccatcgggagagtcgccgccaccgcaagggccagatgctcgacatccacaagggcaaacgtgaggaaagcctccaaagaagcgtcacgatggattcctcgcctcta

SEQ ID NO: 117922 - DNA, 579 bp, Zea mays
  Clone ID: MRT4577_39031C.1
gaggctatgtacttgtctgcattttgtatatcatagtgatgtctgtcgatctgtatctattttttactcccgtcgtaacgcacgggcatgttactagtataatcttaagtgaacaacatcctgcggcgtccatctaaccactagccaaatttaagtgccctatgagccctgactatgatgagcagcagctgctcttctgctgtattggctgtcctttcatgtgaacatggactgtgggtctcctctccaccgttggttgggttgccatcctgcagcagtagcacggcatcaatagtaatttcaatcagccaaaaaccaacgcagaacagcagtacagcacaaaaaggagctatatcactgatacagctgtcacatggggagcatgcacactccatattactagagcaccgaaaagaagcataatgccacaaaaaattacacagctatccacccacatcacttgggacagctaacattaatgtcaggaggatgtcctggattatttacctaaacaataattcaaaattttaaaacttaagcctctagctctagtagcccgaaaggaaagcacataattgt

SEQ ID NO: 117923 - DNA, 280 bp, Zea mays
  Clone ID: MRT4577_39032C.1
tcggccacgcgttcgcccacgcgttcgcccacgcgttccgacttattgatctacacacatacatagtttcttttactacacgaagaccaacattggggaagccttgcgaagatacggagaagtggggtggatacccccggcgatcgtccggatctgagggcttcttccgacccgctgatccaggggaaaggcaccggggacaacagcagctgcattcggttcattttctttatttaacttggaacccattgccaaccggaccaagaagggcccttggggt

SEQ ID NO: 117924 - DNA, 510 bp, Zea mays
  Clone ID: MRT4577_39033C.1
aaaaacggagggcggttttacggagattaacatcagcggggccattagtccttatcccctgacggaggaaccccagggaaaaaggggaaatttacgggagcccttcccatcatttatgaccctaaaacctttatcctttaaaaaacggttttgcttctcgacaaaatattaaaaacttttttatcctgctgcttgcaaggggggggaaaaacaatacaaatttccaggtttttcctgggggacaagaaaaaccccattttttctcattcttatttattcccaggggctttcttttttttacaaaggattggggagccttttttttttaacttggggggggggacttgctcaatattaacgactacgggaaagggaaaaaagctgggcctcgtttttttttggtgtacaggggacctaaccattgccatttaagaggggggggagggcgccaatgcgactttctcctggggaaaaaagcttctaaacacggtgaacaaattgcttcccata

SEQ ID NO: 117925 - DNA, 533 bp, Zea mays
  Clone ID: MRT4577_39034C.1
ccgccccctttctcggttttttttttcctttttttttttttttttttttttttttttttttttttttttttttttttttttaaaacggagggcggttttacagagattaacatcagcggggacattagtccttatcccctgccgggggaaccccaaggaaaaagggaaattttacagcagcccttcccatcatttatgacccaaaaacctttatcctttaaaaaacggttttgcttctcgacaaaatatttaaaacttttttatcctgctgctggcaaggggggggaaaaacaatacaaatttccaggtttttcctgggggacaagaaaaaccccatcttttcccatttttattaattcccagaggctttcctttttttacaaaggattggggagccttttttttttaacttcgggggggggacttgctcaaaataaacgactccgggaaagggaaaaaagctaggcctcgttattttttgctggacaggggacctaaccattgccatttaagaaggggggtaggggcccaat

SEQ ID NO: 117926 - DNA, 469 bp, Zea mays
  Clone ID: MRT4577_39035C.1
tcgggttttctttactttctttggttcatgaaccttccaaccaacctggcaaaactggttgggttcacgcccgccacccccgggttgttgagccgggggtgggtctttccccaaggccgaacccaaaggtaatttgaggttgtttccaaaaacaagggattccaaccaaaaaatagaattggtgccccggaaagaattttgtggaattggcccgatttcggaccccaatcaattttccacagttaacggcttggtggtggaccaccgtgaattgcaaacttgaaggttggttaattaatggcttggactgaaccaacaaccatgaattacttgttggaaggcaaaaaaaggtccagcctaattttttcggccaaaaaatataaaaaaagggtggacagaactccttaaaaaaggggggccggttttaaagaatcaaagtttactaacgcgggcatgcaaggtaatagtt

SEQ ID NO: 117927 - DNA, 145 bp, Zea mays
  Clone ID: MRT4577_39036C.1
catactaaatctaacacaaaccatgtttaaaaaaccccgacacgcatgaaaacactacttcagcatacttggggggagggtcaatttacatcccctgaactttattacaccgttccatacttaggaggccttggacggcacctac

SEQ ID NO: 117928 - DNA, 350 bp, Zea mays
  Clone ID: MRT4577_39037C.1
cccacgcgtccgcccacgcgtccgcggactcttgggcggacgcgtgggctgcatcgagggtgcgcacccttcttgcgggcctggttcttgaagtcgtgcgtgcaaggactcattgggtctgccatgtactctgctgaccagtcagtggattctgctaaacaaatccagcacatttggcatcattagcctatgtttttccgagatgaactgcaatctaggtcgtagacgcaacctgtgggcattctatcagtccatgtagcagatcgaatgatcaacccatgagatttacaacagaagatggcaaacaatgtggtacatgcgatcagacgcattaaagctatatcgccaca

SEQ ID NO: 117929 - DNA, 339 bp, Zea mays
  Clone ID: MRT4577_39038C.1
ggggcaccatttccctatactctattcactcacgtcactccgggcttatttactgagcagagcggtgggcatccgagcgagacggcgagcgcggaaggatcggaattccgaaggttggacatggctgcgagcgcagagaaggcagctgtggtgcgacggctgatggcagcgaaggaggtgtacgtgaagaccttatcgggaattgtcctcgagacggggtgaccaacagcgacgtggcgcagctgctgcagggcgaggcgcagctcagggagcgacagggtgcccgcgctgagggcggacgtgactacggttacggacgagctcatggacctcatgatg

SEQ ID NO: 117930 - DNA, 334 bp, Zea mays
  Clone ID: MRT4577_3903C.1
tttgggctgatttagtgcttgtattagagaggacgccacgggactataccacccacaaattaacatgggtaacgtccggaggatgctcaagacccgcctcccgcggcggcgtattctcgctaagcgatatataaagacccacgaacacacgctcaggcgctttagcgggctaaggtcacggaccgatcgaaatccgcgtcggagtagtccctatcgaacgggacgacataagcgcgggctgcgccggcttaatatccttccgccgtcacgcgaagtccgctctacgggaagaaggcggccataagaccctcgacctcttaacgttgagaggaga

SEQ ID NO: 117931 - DNA, 398 bp, Zea mays
  Clone ID: MRT4577_39040C.1
agaagatgaacctaccttatttcttgggtaagccacagacattagacaaaaaactttatgattgaactataactgaaaaataaacctacaaaagggcacggcctatgatggggtgtacggaaaatgctactgaggctgtacaagcaagttagggtgtaacggaggggagttgtagcataagcaacatggtgactgtgttttgctcagcgtgctgaaacaaccgcttccaatgaggttgatgtaaggcacaggccaagcctcacaccttttagaaggaagaggggctcgagaggaggttgctgacaaacatcctggaaggctgatgctgttgcaaagatcacctgaacaaaagcaagctgatcagattcatccttgccaacgatggggaggcggacatg

SEQ ID NO: 117932 - DNA, 387 bp, Zea mays
  unsure (1)..(387): unsure at all n locations
  Clone ID: MRT4577_39041C.1
gaacaacgcccgggtcgaccgctagactagtcatcggccgccccaactttattttacccatttgggtggcctaatggtgggttgaatatgctttttttagatgcaagttnggaaaacaaacaatagtagcttccgcttggaccctgtcttaacagcctcaagcatgggatcattaatatgccttataggggcggcaaagggtgcttgctggctgattatgtatccaacgtaacaaatgatttgtttgatgctacacttcttatagataccaatgattcttactctccaataacttgtggccctgaatctggtggaccccatcattctcaaacatagactgagcactttgagatcgtacactcctctgttaaaaaaattgaaacagag

SEQ ID NO: 117933 - DNA, 494 bp, Zea mays
  Clone ID: MRT4577_39042C.1
agcagtggtaacaacgcagagtactttttttttttttttttttttttttttttctttttttttttttttttttttttttttttttttttttttttttttttttttttttttttttttaaaaaccccccaacaaaaggaaccaggatttaaaagggccattaaacagccggcagccccccaggaagaaccaggatttacgggggcccctcgttaggaaccattaaagccagggcccgatttttccgagggggattaacaaacccaaaaccccaattcgggggggttcttttttttccccgccccgaggggggaacaccaaaccccaccccgctttggtttgaaaaccacgggttctttcctttttttttttcccggccgcgggggggggggggggcaccgcacctctgggcattggttccgctaccagaaaaagggggggcgccttgggccccgaagggagtttaaaaaattccaaagggggcgggatttgggaa

SEQ ID NO: 117934 - DNA, 354 bp, Zea mays
  Clone ID: MRT4577_39043C.1
caaaaaattaacatatataaattcacagatgaaaaaaaccctgcaataaatactgcagggacataacaaaagccggctcccatgcaaaaccaacagtcacagcccccatgatggcccaacccggggccccggcgtgtacatcgccacactacctcgtgagatgaacaaatagagcctggccacccggccgcggacaagacgccaccccccccagtattgcccaggggatggaggacctcggaacaagcctcaccaaggttcgaaccacctgagacattgaaggggtaaactcggagtgagaccacccacacattgccacaccatccggaaaccgggaaaaggaattggcgccct

SEQ ID NO: 117935 - DNA, 430 bp, Zea mays
  Clone ID: MRT4577_39044C.1
tccggcgccgctcccgctccgccccagagcatcgcccgccgccacagggtacggcgacctcatgtatcacctctcagcttacaatcatggacggacgccgatgccgaaccggaggttgccgcccgagctcccaagaacaggacatcccgtaagtacagataccgcggcgtccacctagatgcgcttctcgacatgcccactgtacaacatcgtgcagctcttccccgcgcgcgccaggatgaaggtactagagggctctgaggaggaagcccatggcgctcatctagaaactgcgcaaggcgaaaaagcatgcccctgctggccagaaacctgagccagtccagagccctctccggaacatgatcattgccccatgacatgattggaagcattgcagggtggctacaacgataacgacctttcagccagg

SEQ ID NO: 117936 - DNA, 979 bp, Zea mays
  Clone ID: MRT4577_39045C.1
attggtacctcgaggccggccccccgggaaaaaagattctctctccttttctttttcttctctccacccgcttctctctgttgatttctggccggggttgcctggcttggttctccttctggctgctcgctcgcctgcaaccgccaagggagaggaagcaagaaggattggaccgccgtccgccgggacacctcttcctgatccaaatccaagggacggacagctaaagtagctgtggaatatggaagtcgagcaggccgccgaagtaagcgctccagagacggctgatcttaacgtgcctgctaagacgccggcacacgatgatgataaagaaaaagtacccaatggtaatacaaatttgcaagtcaaggaaacacacaatgatgaagacgatggaactggatctgatgggtttgaactgatagatgtgaaggaaaactttgactcagcaaaagtgggggaagaaatcgctgcttcaagaagtactacggttgatacatctcctgttacagaacaaagtgaaacacaagaagaaaaaataacagcacctgaagaacaatcagttgcagcaaacacaagacatgtagagtcctcaatgttgaaccaacaaacagaacagttggaaaagctgacaaggcgtattgaggagcttgaatctgaaaaagataaactagtaaaggacttgacagaagcagaaaacaaacagagcatgcactacagttctctacaagaagctcaaagctctctttctatgaaagataaggagctggctgaagcaacagagtcgctgaaggagctgggttctgagcttgaaacctcaaaaaagaggattcaagaaattgaagctgaattggattcatcagcagataagcttcgtaaacttgaagagctgaaggatgaaagaagcttgcatgctgcacaggaggcgaagagggcttcagaacttgataagatgctggaactggcacagtcaaacacg

SEQ ID NO: 117937 - DNA, 372 bp, Zea mays
  Clone ID: MRT4577_39046C.1
ctcttaaaccgaaagtttccaaaattgcctcacaaaaaacccacaaggattaccccccagaaaggaaggggaaccccaaacggcggacaccacggccggggccagtgcttccaggagtttggtcccaggttaaaagcctacggatttcaccccccggttgcccccaatctgaattaacccaaaagggggcccaaaaggccaacccttcttaagaggaggacatttttatcaaccgcaagccgtgacgcagagccaccaaacccgggcaaacaaacagggtggcctttcttcaagccactgggaccaaaaggcctgccttggcccccccaccaaggccaacagaccccactttaggaggattcagccggttgg

SEQ ID NO: 117938 - DNA, 488 bp, Zea mays
  Clone ID: MRT4577_39047C.1
gaagaaaagcgcatcacagggaatatctatgacacttttatactcatgttcttgtgtttggtgggtgcagcctacacaaatctggagtttgaacacacgacaggtgatatgcttatcttttgtggatggactgttcgcttggcttttgctgattgaattggagctgcacttgtagtttggtaacgtttatatacataactatgcggattgcgttagctagaatatgtcttccagtacctgggtgacaatgggctctaaattttagagtgttgtagatttgttttgttgcaaatgtggcatggcatggcttggcttgcagcttcgagtactggtcgttcgagatccttgtgctgtttgcagggctgatgcccgactctcatctcagcacttccatcattgcaatgtgccaaaacaccgaaaccatatcatacatgatcacctatggcttcgccgctgtcatcagcacaagggtgtccaacgagcttgga

SEQ ID NO: 117939 - DNA, 285 bp, Zea mays
  Clone ID: MRT4577_39048C.1
tccacgcgtccggaagaatcgtagggtactgaagaaaatataatatcctaaacattatcttctattatccaatcgacattttgggtccagacttttggttgtcatttctacttcaacagaatattctcaccaatgaaaaaatatcctttttatgcctaagaaacgaagctgcaacacactagagctatcgtgctcgtggcaagacaaagccttcttttgtgatgatggaatccaacccgttcccctattctaaggcatccttacggaattctattgctatatgac

SEQ ID NO: 117940 - DNA, 298 bp, Zea mays
  Clone ID: MRT4577_39049C.1
gtcaccaaaccaagggaacaagcaccttgttttcccttttttataagcacaggaaattattacatgcacaaaacctcgacaaagcaccaacttattaacaagcgtaaaccatcattcattgcggcagctaacaaattatgtgcggctgggctttgattgaaacctttacaaacatgcctaggcggcatatccaaagatacctgggacgcctatgacaaagcggtagccgacgttgttcttctaaagccagtacatggccgtgttgacgtattccattttgaagacctccacctgggcc

SEQ ID NO: 117941 - DNA, 408 bp, Zea mays
  Clone ID: MRT4577_3904C.1
tttctttttttttttttttttttttttttttttttttttttttttttttttgcaaaaattgccccaagcccaccatgagaatgccatggaaacactccggccccaaccgttcggggaaccctgggccgaacgctgggcttaccccggggactaccgagggattcctggccggaaaccgaagttttaccaggtttgcctttttgaaagttgaataaaccccggcaaaataaagttcataaaaaaactcggtgcgaaattggaataccccggcaattcccagcttgaaacgaaacggtagcataatgtgttacgcccggggtgccttaggagagacttatttgtggagggtcaaaatttgctttttttgcggggaaaatttggcgaacctttggtcctagaaatattaaa

SEQ ID NO: 117942 - DNA, 392 bp, Zea mays
  Clone ID: MRT4577_39050C.1
gggtgccctatacccaacccaaaaatccaaaccaaaagaaaaaaaaaaacatgcctaggaaaaaacatttaacaaaaaatctcttgaaaaccctaaaaagaatacattggttaaacaatttaacacacctaacacaaaaatttatgggggaacctacaacagaacttcaaataaaccaaacccaattatattcccacccaaacttctggcttgtactgcacacaactacctacacaacgtgccccactaaaagcccaaatgggtacaacctgcctggaattcccccaaaaaaagtaccctgaaaactcatttccaaaacatacttgaaaaaaacgggggctgaatactaatgtaatcctaacatccatggttcgatgccagggcggggggct

SEQ ID NO: 117943 - DNA, 178 bp, Zea mays
  Clone ID: MRT4577_39051C.1
ggtcaaggctaaacaaacaggaagaatttgacggttatatgggctgttgattaccagttacaggcaaggggggtttgttcatgtgcccaaaaaaggggtaacctggaacgatccgaaatcactttatgaaaggctgtatgatgctatttatgataaatgggcagagcctaaaggtccc

SEQ ID NO: 117944 - DNA, 332 bp, Zea mays
  unsure (1)..(332): unsure at all n locations
  Clone ID: MRT4577_39052C.1
gagaggaatcgactgaaattatattacttgtttgtttgatgccgttcacaagcaacactccacgatacataaacccttcgcagcagcaaggcataaacgaccacacacagctgagaccgaggcacacgcgtgcgacagctacgcccactctgaaccgttcacacggcagttggtgcgtcggacccttgcataatggtattctgcactttagcgactgcttgctcgtcgtggtccagctcccttaacaagatggtgactatggttccagatggtgtactactgacaccctcctgctcacttagngtggtcatgcggccggagcgacatgaaca

SEQ ID NO: 117945 - DNA, 419 bp, Zea mays
  Clone ID: MRT4577_39053C.1
ctgtctgcggtggagccgccaccaaaatgcagattttcgtgaaaacccttacggggaagaccatcaccctcgaggttgaaccctcggatacgatagaaaatgtaaaggccaagatccaggataaggaaggaattcctcctgatcagcagagactgatctttgctggcaagcagctggaagatggacgtactttgtctgactacaatattcaaaaggagtctactcttcatcttgtgttgagacttcgtggtggtgctaagaaaaggaagaagaagtcttacaccactcccaagaagaataagcacaagagaaagaaggttaagctggctgtcctgaaatattataaggtggatgagaatggcaaaattagtcgccttcgtcgagagtgccttctgatgaatgtggtgctggggtgttta

SEQ ID NO: 117946 - DNA, 285 bp, Zea mays
  Clone ID: MRT4577_39054C.1
aagggggaaaaaccccacccaatttttggtttttttttgggaacccccggccggggggggggccccattttggggtccctgggcggggacccccctgggggggatttccaccccccgggggggcgttactaggggatccggggcgggacccaaggtgggggaaaacagggccaaaggggtttccgggggaaaattgttttccgctcaaaattccacaaaaaataggagcgggaagctaaaaggggaaagccgggggggcctaagggggggcctaacccccattag

SEQ ID NO: 117947 - DNA, 797 bp, Zea mays
  Clone ID: MRT4577_39055C.1
cattgcgaacctcgaggccggccggggggagtgcaaagcgtcaacgcaaacagaccaagatccagaagcaagaaagtgtttatagcctagccggtgcgcgcgcgagagggatagccgattatcatcaagctctgagctagcagagaagatgagcgcgtcgtcgtccatgaccaagaaggcgtcgtcgttcgtggtggcggcgagcatgagcgcggtggaggcgctcaaggaccaggcggggctgtgccggtgggactacgcgctccgctccctctacaaccgcgcggccgccgccaataaggtcgtcgccggccgcgccgtcccgttgtcgttgtcgtcgtcccagaccgcgggcggcagtggcagcgccgcggccgccggtaggtccgccaggcccaggcgatcggaggaggagaagatgcacaaggcgtaccacctcgtctgctggggccctaactaattgttaggggcattctcttattaattactcctttatacacgctgtccgattcctccacttcttgttcgtacacatacagagatgtatctgcaaattttgtatgtgtaatccgtcctctggtggctgatgccacgagaattgcttattattgttgggtgataaacaaatggaaatgagaaattttgtgatgtgattagtgattgcctcctggctcttgcattctcgctaatctcagaccgaccgtcttacgcgcgttagcactggttagtggagcagctgaactggactctatgagtgaggaatcatatgaaaattaatactatctttattgtcgaat

SEQ ID NO: 117948 - DNA, 313 bp, Zea mays
  Clone ID: MRT4577_39056C.1
ctcgtttattgcgccaccagagccatgcggtgcgggctctccaggaggctgctgaggcataccaagctggcctgcatgaggacaccaacctgagcgccatccatgctaagcgcgtgaccatcatgccgaaggacatgcagctggtaaggaggatccgcggcgagagggcctaatcgacacctcaaacagcgggacaaaaaaatgaagtccaggggtaattgaaaatctggcgccattgcaaggacataagagaagggtccgaaatgtggatcgcaaaacaaaagagagcaaaacccccagaaaaaaacagggg

SEQ ID NO: 117949 - DNA, 336 bp, Zea mays
  unsure (1)..(336): unsure at all n locations
  Clone ID: MRT4577_39057C.1
ccgggccgacccacgcgtacgattgtagtctcgtgtctgacgattctctatatgcatctatgatcaccatgccgatcccggccacagcccgaaacgcggacctgccagacatacacctgatgcagcagcagcatgactcatcagccgccggtgccgacgcactgacgactgccgacctctgtgatgccgccgccttgtccttaacgaagacacatgcctttcggcaacgactactgaaaatgcgattgcgtgaaggtcaaggtctgggttggtgagaacgccgaccactactacgtnctctgcaggctactgatcagcaggatgctcacagtcacc

SEQ ID NO: 117950 - DNA, 483 bp, Zea mays
  unsure (1)..(483): unsure at all n locations
  Clone ID: MRT4577_39058C.1
caccaggggaacccgcagcgcccgccannggccggcgccgaggcccccgcgcatccagggcnggcgancgnggncangggagncagcggcggcggcaaancaaccgncgcggcaaggcncgccgaagcccngggcggcagcnncancgaagcggaggggggcgaggccgaggcaaacaaagccaangagagcgcgggcgngccgcncnccgacgccgaccgcgcgccgnggcnggagncggngcgggacgccanccgggggcggcnggacggcggcgaggacgnggccgncagcggcncggcgcngcggcncgggnaccgggangngcnccgcgcggccgaccgcgccnacgagccggggcgccccgccgccngcngggggaggggcgngngccngngggcgccggcggaggggcncgcggngagggggcngcggggggcgggggaaggggagcacnncangccggcgagccggcggcggggc

SEQ ID NO: 117951 - DNA, 570 bp, Zea mays
  unsure (1)..(570): unsure at all n locations
  Clone ID: MRT4577_39059C.1
agctttttttttttttttttttttttttttttttttttttttttttttttttttttttttttttttttttttttggaaccggggaaaggcacctcttatttcgggggggccccctccctcccccaaaaaacttttttttgggattgccacccaggggccatctaaaagagggccccccccaagacggggcggggggggggggccgctgggtttgccaaagccgggtggcccaggggcaacaaacgggggggttgtgagaggggggcgggggttgcccccaaccgcggggcgaacggccgcccccgttggggggtcatgaaggaagcccgggttgctgccccttgccggctcaccgggggccaattttgctgccgccatctaccccgggggttcccggcggccccttggcccacgggaaaaacccctgggtgggggggtgcccgcnttctccctggctggccggtcttgctgcgtcctgccgttggcccccggcgtcccggggcccaccccgttggccggggggcacccgccagcgccccaccgggggtgaggggcctccccgcccacttc

SEQ ID NO: 117952 - DNA, 382 bp, Zea mays
  Clone ID: MRT4577_3905C.1
ccactcatcctcccactcattctcccactctttctcttattcctaattctttacatactttaggcataagaataatcactaagggcgctgctttcttaaaacccttcaaatattcacattttattattattctacttcattttatttatatccggtacgtggtaatatatacttattccaatacttcacttaatataatattcttttaccttttctaaaccttctactactccatttcaaatcttccattactctttaaccaacttcacaccccctattacaaaattttaaatttactattcaacactctttccttacataccttaaacaccattctttcccccattaaatccctttattaacttataatttaaattctttt

SEQ ID NO: 117953 - DNA, 631 bp, Zea mays
  Clone ID: MRT4577_39060C.1
gaggggggtagagaatctgtatatcccagatgcaaacatgctctttggcagccactcacgtgcaccacttgaaggtccatgggggcatgtcgaaattggcggcttaatccaatagtaatttgtttttcttctatttagggtttgttcgcttttctctcaatccatgtggattgaatgggattgggtgggtttagatctcaagcaagttaaagtccttcatattttttcgcgatctcgtctgatccgcatggacaggaaaagtgaacattgttttattgctgttaagccaaagcgctgttagagtatttgcataggagttagaaaaattacatcctacaagaatgtggcataaggaaaactaacttttgtctttagcagcttcagctgcttcttcattcagtttctgtttacttgaaacactagatttcgctagtatctccccttgctcttggatggttgtatacatggtttgagtatccaacaaaaaacgatcaccaccatgcctagcaataaatgaaactgaaatgggacacttatcatgtgtacccaaaggaatagaaacctggcaacatcctgacatgctagctaaagataaaagacgtagtgtctgagaattgtagatttcagatga

SEQ ID NO: 117954 - DNA, 408 bp, Zea mays
  Clone ID: MRT4577_39061C.1
ccaggggaaatttttttttaaaaaaaaacccttttcctttggccccccattaaccccgggggggggggccccccattttggtggaaagcttcagagttctgaaccaaattagcccaaatcccggaccaactaaaaacccaacccccttaatatgcccgggccccccttttgaaccaaacccgggggccaatcccggctcatgtggcttgctccaaggttggcaacctttgatttgccagcccccagggccccatcagtttctttaacattgccaaggcaattaaaagcacccttaaggaaatctggcccccaaccttaaacatggggggacaagttcctgaaaagccaacagccccatttggagccttggggcccaaataaaggaagggtaccctgagggttccccta

SEQ ID NO: 117955 - DNA, 650 bp, Zea mays
  Clone ID: MRT4577_39062C.1
agcagtggtaacaacgcagagtacgcgggaactgaaataaaaaactgaaaccgaactcgtttgttttttcattttctagtaaaccgattggttccttatgtttacaaaaccgcaagttttttaaagctgtaccgatgtcgaaaaaatggacacccaatcctaaccaccgctttcatccttaaacctttagaagcgtaaggaaactatctttgtctatagtatttctgaaaagatggtagtgacacattttattccccggcaaaatattccctaggaatcttacctataaaatctgtaacctactgctttagtttgttccctaggaactggaactgtagcaggttctagtagtgccccggaaggattatcactgataaaagccagacttcacattgtctatgctcactgtttgacactgctcacatgcccatgccattcatatcccctttgcatatttgggactccataaccaaatagtttgttgtgaaactgcagtgtttaacgcttacatacctttgcaggtgttgtccgaattgcctgtctggacagccagttatgttatgctgtttgaatgaaaaaatagcttctttttcttcatctaaatgcgtgcagcctatgctccatctgtaatgtaataagaggcaactgac

SEQ ID NO: 117956 - DNA, 349 bp, Zea mays
  Clone ID: MRT4577_39063C.1
cggacgcgggggggtatgtccgatggaaagtaccatctgggcatcgttaagcgaacccttatcaggagtcgaaaggtaatggacgatacatatcaaaagatctcgaggcatgccaagatgttcaacatgaggtggacaacaagcctcaagtcgcatctaacctatgctgaatcctgcgaactagtagtctggcaaatcttctgaagaaccacatgctgtacctggggcggagaaaaccgacccaccatttgcttatagcactggcctacaagaggaggcgaaacggataagcatagaacactggaatgagagatgtattcggtgacagacatacttgatgaactgtgat

SEQ ID NO: 117957 - DNA, 244 bp, Zea mays
  Clone ID: MRT4577_39064C.1
agaggggaaaaaggccttattccaaaggacctgtttggtagccccgtaagaattacaaggcatagaaaagggtttccaaataaacttttggtaaggctggggataaaaccccttttaaaaaattggggagcaagggtcctgggcaaaaattaaggggggccccccaaggttctcttttttttatgaaagccctgtatttggaaggccccaaagtttttaagttttaaccccccactttttgggg

SEQ ID NO: 117958 - DNA, 742 bp, Zea mays
  unsure (1)..(742): unsure at all n locations
  Clone ID: MRT4577_39065C.1
cctaccaggagatcgccaccgcctacaagatcgccgacgtcaacctcatcaccgtcggccagaagctctggatcccgctgccctgcagctgcgaccccgtggacggcgccgccgccgtcttccacctcgcctacatcgtcgacggcggggagaccacctccggcatcgccgccaccttcggcgtcaccgaggacacgctgctcaagctcaacaagatcgccgaccccaagacactgcagaaggaccaggttcttgatgtcccgctccctgtttgcagctcatcaatcagcaacacctcggatgatcatgatctgcgcctcccgaacggcacctacacgctcaccgcgcaggactgcatccagtgccgctgcagttcaaacaccttccagctaaattgcaccgcagtgcaaggaaaaaaagggatgcccagcagtgccgccgtgcagcgaagggctcaatcttgggcagacaagtggtgccggttgcgacttcaagatgtgcgcttacagtggttattccaacagctcttcactcagcatacagaccactcttttcaaaaaccagacagcaccagcttgcgagaaagcaggatcttttgaggtcggcgttcgcagggtcccatggtggaggatatctgctatctccttcacatggtgnntgatcttggtatgcttcctttgatactgaagacgcccactctagctggtatatatatcttgaaaaaaaaaaaactcatgatagc

SEQ ID NO: 117959 - DNA, 759 bp, Zea mays
  Clone ID: MRT4577_39066C.1
cgattgggtacctcgaggccggccgggtctctcctctctcactccctgccagcccctgactgtcagccagccagccagcctctatacaggtcaacagagctctctttcatcactcctcatcatctactctttccataggttccgctagccccagcttactcctgcaataccactaccatggcagcagagacagaaaacatcctccagaaggtcgactctctcaccgaggagcacaaggatggcgccgccaagaagggccaccgcagagtcagctctatggctgctgacgtctaccgcattgaagacctagagaaggagggcaagcacattgatatctcaattgagacacagaagctcaactggaagctgaacaaggcacccaccactggtgaggacccatcagtactgaagctgccactcaccgagcccaagctcaagtctatcaccctacacttcccgcttggcctagaggtcgtcgcacggaacatgaagggagtcaccatcaaggacgcattagatgccatccacaagcagttcaagaagcgcgcagatgacgagttcgagaagccctacctcatgggatttgagtgggacccatcacagtgctacacagcgcttcatcgtccaccagacggccaaccctaccgccccccaacgccttcgcttctggcggaaagaagaaaaagccaacaaggccgagggcgcagaaggatcctaggggaatgaatcgcccccttcccaatcttcgaattttacata

SEQ ID NO: 117960 - DNA, 326 bp, Zea mays
  Clone ID: MRT4577_39067C.1
gcgaccggcccggttcgtcacctcacatggataatcacagggggtctggtacgataccaaatttggctccctccttagccacaaaatttaaagagggtagaaccttcccgcgattatggattgcggatacggattccattgatttgaagggcactaaaattgggcctgccttgtaagcaaacctaacatcccgttcttttaaagggacttaattatcattgctgacgaagttactgtaatttttgttttttatattggcttttttttttaatttgtcttagggatttacctccgacgccaacccctcttacgggggctgccttttt

SEQ ID NO: 117961 - DNA, 917 bp, Zea mays
  Clone ID: MRT4577_39068C.1
gggtacctcgaggccggccgggccggggggagcgggcgagcgactgcaggcagagggtttcgtccgaaccctagtgtcctccacacgccgtcgccatggccgccgtccgcgccgccctccgcctgcagcgccagtgcctcgccgccaacccctttctcttctccgggcatggcctccgctaccgcaagcttgaggtcatcctcaccacgactattgataagctggggaaagcaggcgaggtggtcaaggtggcgcctggccacttccgcaaccaccttatgcccaagatgctcgcagtcccgaacctggacaaattcgccatactcatccgagagcagcgcaagctctatcaacgcgaagaggaggtcgcggtgaaacaagtcacggagaaagatgatgatgcacggctacaggaagaaagaatgaagcagtaccaaacggcagcgaagcggctagataacgcactcttggtgttgaggaggttcatctcgactggaaacgagctgcgtactcctgtaacaaaagacgaaattgtttccgaggtggcgaggcagctcaacatcaacatccatccggagaacctgcatctgcactcacctttggcgtcgctcggcgaatttgagttgcccctccggttaccgcagaacataccgtgcccagaaggtaagctccagtggactctgaaggtgaagatcaggagaaaatgagcgcaggaactggggaagtttcttttgtccccccacaatctggtgtatggtaccaaaccattgttatgcaaagtttcctttgcataacccggtcccagtttagctccgaaacattttttttctgatgtataataaaagagtaaggttgcagaaagattgaatagcttctacatctttcagttcaaaaaaaaaaaaaaaaaactcgagagt

SEQ ID NO: 117962 - DNA, 276 bp, Zea mays
  Clone ID: MRT4577_39069C.1
ccctcccgtccgtataacgctcaggagggtcacgtaggcggagcttattttaaacaacctttgtttttataccctgcacatttcagagggcatgctcttttctttgggtacgaaggaagatgtttgctccttactaattttgattctaagtcttgcttttgcagtaatactttgcgctggtgcccttctacattcatcgtctttatcacttatttcctcggttggcaaccttgcaacttttctttgcatttaatcgtcctgtttggtggaacagca

SEQ ID NO: 117963 - DNA, 160 bp, Zea mays
  Clone ID: MRT4577_3906C.1
gcagatgccgcccgagctgcgctacctctcgggcctgggcatcacctccttcacgagcccgcgcgtccggaggctgcgcacgtggctgtaccggctcttgccgtcggtgtcccacgaacccttctatccgcctcctactacaactagcgcctcgtcggcg

SEQ ID NO: 117964 - DNA, 995 bp, Zea mays
  Clone ID: MRT4577_39070C.1
ccctgtcgacccagctttcgccccgcgtccgcgccttaccgctttaacaactatgttttcatgtctgtttaactcatctgatatatggattggactgaacagttgccttggaaatttactcttttctctacttgctagtctatgttttgatcatgctgcataatttatttattgttaaaaaaaagaatagccaccactgtttttctgctgtgtaatatgagttcaccagcttcttcttggctcttaaaattgcgacgttcatacttctgcctactataatcaacatatttcttaactgcatgatcgaattctatctgcatgagtttggatctaaaaattcccgattctgctcgaagattgattgattttgtgtgttttcctctaccacacacttcctatttttctttttctgattgtaatattttgcttgttgattaccatttgaacagctacaggaagaaagaatgaagcagtaccaaacggcagcgaagcggctagataacgcactcttggtgttgaggaggttcatctcgactggaaacgagctgcgtactcctgtaacaaaagacgaaattgtttccgaggtgcctttgcagctctagataaccccatgcgtcatcctgaaatttcagttttcccatgacctgcctcacttcacctacaggtggcgaggcagctcaacatcaacatccatccggagaacctgcatctgcactcacctttggcgtcgctcggcgaatttgagttgcccctccggttaccgcagaacataccgtgcccagaaggtaagctccagtggactctgaaggtgaagatcaggagaaaatgagcgcaggaactggggaagtttcttttgtccccccacaatctggtgtatggtaccaaaccattgttatgcaaagtttcctttggcataacccggtgcccagtttagctcccgaaacatttttttttctgatgtataataaaagagtaaggttgcagaaagattgaat

SEQ ID NO: 117965 - DNA, 515 bp, Zea mays
  unsure (1)..(515): unsure at all n locations
  Clone ID: MRT4577_39071C.1
gtatgctacactagaaaaagtagcgccctantcgggcgctgtatcacatatatatatagtatgctgagtattcaacttatactgagaaagagtgagtaatacaatgatcgatagatacataagctcacaatctcagtcatggtagatgcaacctgatgacaacactcaactattgtctgcttattcacctgtcatccagtgtagtgaggttctaggtagcatcagcatgcccataattgtaggtcacagaagccaattgcgtcatcatcatctgatttcatcacaaggcttgaccacggtggaatccagctagcaagttattggcatcaagaagaaaattgattactcaatgcagctcaatgcttctagaattaaagtccttcaagctcaggatgatttggtaacagatatgttgaagtcagcaagcaaagagctactgcgcataagtagagatcacctcacttacaagaagcttctcaagacacttattgttcanagtttgctgcgcctgaaag

SEQ ID NO: 117966 - DNA, 451 bp, Zea mays
  Clone ID: MRT4577_39072C.1
attcggctcgagggtagactatagttgttctgctcctctggtgtgggcgcgtacaggcggaacgagaatcctactgagatgttcacacggtgggagcagctggaggtgtacctgttgttcatagtgacgggcttaaagttgccattctgtggcttggatgtatgaagaaagatcagtaagagctcaggagcatcgataaacaacataacgagaccatttactcctctcaagacacagcgactgggacgaccacactccacgcatgcactatcatgatgaggcctggcaaggactgctggaatgatgtgtcctggtaacatgatcttcactgcaagtacagtaagcatgttcattaggctactactactactacttgttactgcgactgttacaatgattgtgctagctaaatactgttgaggacatccatgacatctaaaaatacttagag

SEQ ID NO: 117967 - DNA, 105 bp, Zea mays
  Clone ID: MRT4577_39073C.1
cccacgcgtccgagcttccagttgcctgtacacttcattaaatcgagcactagcaacggagatagctagatagaggaagactaatattactagttagcactagat

SEQ ID NO: 117968 - DNA, 302 bp, Zea mays
  Clone ID: MRT4577_39074C.1
cctcccattctctccgtgaccgccgccgcttcctcatcccccagactctcgcctctcggctcgggaggcggttgcgaaaccccaaggaactatattcctgccgtgacattcaaacacagtcaagatggtgaagtttacagcggaggagctccgcggaatcatggacaagaagaacaatatcagaaacatgtctgttattgcccatgttgatcacggcaagtctacccttacggattcccttgtggcagctgctgggattattgcccaggaagttgctggtgatgttcggatgaccgataccc

SEQ ID NO: 117969 - DNA, 310 bp, Zea mays
  unsure (1)..(310): unsure at all n locations
  Clone ID: MRT4577_39075C.1
aaaaaaaaaaaaanaaaaaaaaaaaaaaaaaaaaaaaaaaaccatgtgagacctcaaggcggacgaacgccacaccataaatattgaaattcacaacacaccaagagaaggcactagcaacgacctaacaacaatggctaccaagatattagacactaccttgaacttcttgcactttttgagaacgaaacaaatgaagtcattattacacaatgatcacttgaatcctaaggccattattccaaaagacctcccaccatatacttagatgggatcaaaacacctagatgtgttagactacatgatacaa

SEQ ID NO: 117970 - DNA, 413 bp, Zea mays
  Clone ID: MRT4577_39076C.1
gcggccggcccgacgtactcatatgacagtgcaccatagcagactgagctgtgggctcgacgacgtggcgaacacaggtgcattcctggctgctatcattgtgttctagccctctccggctggacatgttgatgttgacacagctgctcactacaatggaggcttgcgattgacagacctaccatagctgtataaactgtgggatgcaggtgagagtagacaacgctttgctgctgcctcgcggaaacagacctgggtacagatcgtaggtagatattatgatcagaagtgaggccataaaggggctactgtaatgcactgtccatgtggcctgtctttgctgtaaggaacatgatacccacgtacataatgcgggaacgctcttatgtcaattcatatgactcagaagcacg

SEQ ID NO: 117971 - DNA, 488 bp, Zea mays
  Clone ID: MRT4577_39077C.1
ctttgcaacagaaagtgactaattataacaaatgctaaacaaatttgggaattgaattttaagtggaatgtttgccatccacttatcctgccaaaactgaactctcactccattttccacattgaaacgaatgaacttaagaaaatcatctctaactcccattataccagaccagaagtgggaaatcagcagaccttttctttatcagagagaatggttgatctctcaggtatttatttcttaacaactgttgccactgaccatcttcattaattaatctataccaccacttgctaaggagacttttgttttgtactttaagatctttaactcccaacccaccctgttccactggcctgcaaataaccttgcactttgttgacctatactttatcctctcttgaccactttgccagaaaaatctagatctgaattggtcaagtttcttcagcaccttattaggcacttcaaagaaggataacatatag

SEQ ID NO: 117972 - DNA, 203 bp, Zea mays
  Clone ID: MRT4577_39078C.1
cccacgcgtgcgggagcattcgagaagcttcacatggggggcgaccacacgaaggatgaggaccaccacaagagggacgacgatcaccacaagaaggatgatggctagcaccacaagaaggacgggcgtgagcataaagaaagcatggaggataagatcagggacacgatcaccgtcgagcaccacaacatggccggcgacca

SEQ ID NO: 117973 - DNA, 495 bp, Zea mays
  Clone ID: MRT4577_39079C.1
gggtaccgggcgctttcctcgagttttttttttttttttttttttttttttttttttttttttttttttttttttttgggtgggtggggggtttttttttaaaacccccccccccccggtggaactaattttgggggaacaaaaaaccaagggtccaaagttaaaacgtccccccccaaccgggatttggggggggagcgacccccacaaaaatcttcagttgaaaaaaaaaaggggggggggggaaaaatttattaaaatacattccccccacataaattttgccccttaaaaaaggggttttggaccccccgcctggtttttggggccccccccccttccaaggaaaaaaggtaaggctcgttttggttccgcataaccccccaaaaaaaggaaaaaggaggagggcttgcaaaaagggggttttaacgcgggttttcttccctttaacctcctttttttcattggggggggaaaaataaatatttaatttcc

SEQ ID NO: 117974 - DNA, 286 bp, Zea mays
  Clone ID: MRT4577_3907C.1
agagttataaaacggaacctccatacagacccgatctagaccaccatcagccatttcctgggaaccgccaccggtacacagggggccctttcttgttccttattgggacccagcacaaaatgtttatccaaacataaaccctttatcaaccccgactatagctgtcgctcggccccgatgtgaacaacggcggcaaggactggacggacctaccttggccccagaccaccgactaccttctaaggttccagaggcccacccctaaccaccttgtcatcaggcgtat

SEQ ID NO: 117975 - DNA, 159 bp, Zea mays
  Clone ID: MRT4577_39080C.1
tgttatgaacttttggtttatgttgaactttatgttagatttgtcatatctatgtggatttgtgatatctgtggacttcgatatgtttcatgtgtgatatatatgtggattgtgatatagacatgtggatttgtgatatatatatatatatatatatat

SEQ ID NO: 117976 - DNA, 542 bp, Zea mays
  Clone ID: MRT4577_39081C.1
acctcgaggcggcgggagcatttccccacgcagatgctagctattacgtcccttgccaaggcagtaaagaagcatctgaggtgggagcgatgtctgaagagagctaccaccaccacctgttgcagcaccgcaaggtaaaggaggaggagggcgcctccggcgaggtcgactacgagaagaaggagaagcaccacaagcacatgggagaagctgcggcagctcgacgatatcgctggcgaggcgtacgccctgcacgggaagcacaatgacaagaaggacccggagaacgagcacgggcaccgaggtcaaggaggcaggaggccgccgtcgccgccgtgggctccgccgggttcgccttccacgagcaccacgagaagaaggacgccaagaagcacgcccgcaacggagccgtctcaggctgactcagccgaagcagcacgacatcgacacgggtgctgtttcatctgttctcccaggctcgtcgtcgtctactgtgtgccaagggggccttgagttgaggatttgagctaccgatagttgca

SEQ ID NO: 117977 - DNA, 165 bp, Zea mays
  unsure (1)..(165): unsure at all n locations
  Clone ID: MRT4577_39082C.1
ctnncgtcgctgtcaattatgccgtcctgtccggagacccgcgtgacgtgtcggctagcaacggcgacggagacatgggcattctccacgaatctgaaagtagtttcgacgcggaaggtggcgagcttttgaacgacgtcgacaacgagcaagactacgacgttg

SEQ ID NO: 117978 - DNA, 310 bp, Zea mays
  Clone ID: MRT4577_39083C.1
agcagtggtaacaacgcagagtacgcgggatgaacttggaggtgagtacactaataccggagtgcagtggaagtctttgcatggtccaagttcacctttccctttcaattcacctttgagactatattaagtaaactcaaacacaaatgttagtctcaaggggtcaagttgtagcatttctccccctaagtatgtgcatcactcacacatggacttgtgaggtctggggatcccttgcacaacttgagcaccaaaaaaaaaaaaaaaaaaaaaaaaaaaaaagtactctgcgttgttaccactgcttaaa

SEQ ID NO: 117979 - DNA, 442 bp, Zea mays
  Clone ID: MRT4577_39084C.1
ttttattttaaaatctattttattcctaaaagaatatttttaatttccaaatgaaggttttgaactgataaggcttaggtcgtgattgtccagagcccaaaccctaacctatagagtccgaacccttacccttttttgcgggtcccatatgatagctggtccaggtccaggataaggatctcgtgggaacacctagcgctttctggcaaagaccatgatctggtttccatttacgaagatccgggcccgccttgctgctactagggggaaggctgctgctaatacgggtcaggtcgctcacattccgatacgagcttgatttggtcgaagaaaagacaggtttgcttgatgaaatgacgcttctccacgatgatcgtggccttggcctatattaatgaggaccctctgattgcgaaagaaactcctaaaaacgaataagttt

SEQ ID NO: 117980 - DNA, 408 bp, Zea mays
  Clone ID: MRT4577_39085C.1
ttttgttttgtttaatatcaaatacatagatctccaaccatcaaattctatcttcatccatatacacacaagctgcgagataattcagcaaatacatttatatatctcatttagctcctttaccttcccttcaacaccaacatagcccccttgggggggggctcctacacaaacctctaaaacctccccattaatttttgcaccaggtccatttcctccaagctatcctaaagttcctccaccactttatgatactgaatcatgccctaataattccgctcaagctggcatataccataactgaatacccactcctgccgggcacttaacatctggcttttttacccgagcctgagcggaacgtccaccatctggacggggttctgctctaactgcaccccgccggaa

SEQ ID NO: 117981 - DNA, 255 bp, Zea mays
  Clone ID: MRT4577_39087C.1
gggttgtatcaaattatattattgtggcccaattaaaattatgggtacagaaaaagcaatcggatcaaccaacatgcgtgggggcgcccgtacctgagcacaaagactgacaccaaacatgcagagagagataggaaaccgaaaaactctgtttttctttttgggaacacacaccacacaatacctatgggtgggaggcagaccggactcgcccatgatcgggaaaccaccaccacaggctggatagactataat

SEQ ID NO: 117982 - DNA, 521 bp, Zea mays
  Clone ID: MRT4577_39088C.1
ctcgcccgagggtcccctcagtcagcagacgcaccctcggctcatccgaagcccagcttaggcagactttgtcgtgcagcgacctcagccggatcgccctaccaaccgaccgtatcgcatgcgcatttaatgcggggattgcctaacaccttatcctgacacgcgtgcctcagtcggcaaggtcgaagtgaccgcagttcgcccctttactaacaggaaaacaacactgttcgccccgctccggctactgtgccaaccatcagggtaaaattgagtcacgatctcccacgagttcggcctcgggcgcaacagggagctccgcctcgcccgacctcaggcctcggcctcagcctcggcctcgggagaaggtctccgccttgcccgaccccaggcctcggcctcgggaggagtcacaacctcgcccgacctcagcctcggcctcaggagaagcctccgccttgcccgacctcagcctcggaccgactacgctacaggggatacatcattaccctacccctagc

SEQ ID NO: 117983 - DNA, 370 bp, Zea mays
  Clone ID: MRT4577_39089C.1
atcggttcaagaacacgccggaattgaagtctcgcattgcacttgcacaccgccgagagcctcgatccatgcctccgcctgcccctgccatcgccgtcgtgccgctgccgccgagccgccgccgcttaccggctgcgacggctgctactgactgatcgctctggatgtagctataggtacctctcgctcgattgacatgctgttcatataacctctaacaagcctcaagaatcaaacgcaaacaaagaagccgccctgccagcggctgccactggcgccggaggcagcaaccgctcgttagccaggatggcaatcgcggtcggccattttcacgacctcaagccccccgccgtgcggaaccggcactaca

SEQ ID NO: 117984 - DNA, 164 bp, Zea mays
  Clone ID: MRT4577_3908C.1
gctacggactgaaatttttttttttttttaaccatggtattaccatactgtattattacatataaacacagacgcaaaaagggacccgttgaaccagcctattgggggagaccaaacaaacaccgggggaatgcattaacccatattttgcgaagaataaaagg

SEQ ID NO: 117985 - DNA, 238 bp, Zea mays
  unsure (1)..(238): unsure at all n locations
  Clone ID: MRT4577_39090C.1
acaccaccaaaggccaaagcgggacgggagccacagaggtggctagcaagaaaccggagatggcggcnatagcggcggccacccaggcggcggcgacggtgctactgctcgcggcgctggtgctggcggcgggaccgggcggggcgcggacgcacacggcgtggtcgacgagccagtgcacagctgcactggatagcctccccctgctgctgaggtacaatagggtgaacgcaggttc

SEQ ID NO: 117986 - DNA, 697 bp, Zea mays
  Clone ID: MRT4577_39091C.1
ttggggacctcgggccggccgggactcagcctattctcattgtggaaccaacaaatctccaagctctcccaatttagaaacgagagatggccatgacgatgaccctcggttccatgctcatcgccgccgccgcagttgtcggcctgtgctccgtcgctcccgctgcatcagcgcgcgaggagccactacagccgcagatcgtcggcgggtggaaaccgatcaagaacgtgaacgacccccacgtccaagagatcggccggtgggcggtttcggagcacatcaagacggccaacgacgggctgggcttcggcagggtggtgagcggcgaggagcagatcgtcgccgggaaaaactacaggctgcgcattcaagcgacgaaggtcggcgggcagaaggcgatgtaccgtgcggtggtgtacgagcagcttaccaacacaaggcagctcctatcgtttgatccggcgaactgatctaattatggcgtcgctggacaacaacggttcgagtcgccttctaggatttcagattaaaattctgcaagtaccgcgtgtaacaaaccaactgatgtgttgccctagtcatatcgtggaattagaataagatccagcctatctttatctgtttttaatgttaaaaggaaataatgaactcagagtcgagataaaaataaaaaaaaaaaaaaaaaagcggccaaggc

SEQ ID NO: 117987 - DNA, 441 bp, Zea mays
  Clone ID: MRT4577_39092C.1
cggcagttatcgatgggccacgaaagttcgacgacgggggggtcgagttcaagatccagctggcacgatcctggacatgccgaaggggtagccataagaagggtactatgaggaggtgcacatatcacagacactgcacatgctataacatatgcactactatctgaagagggtgttgactaaggactccggaggataacaggacgcactggtacacgtgtcacagcactactacgacaccgggtatgaatcgaacaccatatacctaaatgatctcaacggaccagagcttttgtgggaaagaaaatagcatccatcaagagtgggctggatgcaagtgctattcctgctgctagaaaagctgatttgagaggcaagggttcaaaagtagaaggacgaaactaggaaggcacagaagaaatgggggagcaaaataaacaa

SEQ ID NO: 117988 - DNA, 492 bp, Zea mays
  Clone ID: MRT4577_39093C.1
attcggctcgaggccagacataatgatccttgttctatcggaggcatgcaacctcatcagcgagattgagtcctactacaaggagagcccggatcacatgcgacgcgtggcagacacgctcgcattctgcaacctggctctcgatgcctaccatcggggctcactggcgaccattgtgcaccgaaccacgtggtccgaactgaactggttgccgcacagacctcaacatggaccgactagacctcttgtactgcaccatatctggcataggaggatttaatctcatctacttcggcatctgcgccaggcggcacacgttcatgggaaccagcatctgatccgccatggtgaccatatatcgcctatctcatggctgtacaggtgggagcagtgtgataactatgatagggcctgttttttttgggatgatcactacataccttagtgactggtgcttccatttgaatcatcagctgatcaagcgcctgatga

SEQ ID NO: 117989 - DNA, 473 bp, Zea mays
  Clone ID: MRT4577_39094C.1
cacattatattttgtaaatgttttttttcaaatcatggtttgctccttacataataccccttaccatttcattggttcattcaggatattgctcacactgccacccatggcgatgggtgacactacgttactaatctcctgtaaatgacaaaactagcgagccagggggctacacagggggtccattacatagttactacggggcatactttccttagtgttaaacaccccccgcctgtggttttaaagggaaggaacctggtttttgtacatgtagcccactcatcgccattagttgttgctgtacctgggcccccataagctcagtgagctcaacctgcgaatggtgctacaggaaggactgcaagaccacaccgtatgtcgcttggtaccggggcagagtttccacctgcctgatctggggggaaaactggtgctgcaacgcctgacactgtgacaagccgtagggcgtc

SEQ ID NO: 117990 - DNA, 113 bp, Zea mays
  Clone ID: MRT4577_39095C.1
cctttacacggctccaccgtgcctatcaaccagaccggcacacccgatttgtcccatattacgcgtcctcgatgtaatattaatgaaagtgaccggttacttggttgaactgg

SEQ ID NO: 117991 - DNA, 370 bp, Zea mays
  Clone ID: MRT4577_39096C.1
aagcagtggtaacaacgcagagtacgcgggcaactgtaaatacaagataggtgtagtacgtacattttttttctttttcatcaaacattgttacgcattcattgtactgtctcaagaaaatacaaaggtaaacaacaaaatcactccatgcaaaaaaaaaaaaaaaaaaaaagaggggggggataaaaaaaaaaaaaaaaaaaaaaaaaaaaaaaaacaaaaaaaacaaaaaaaaaaaaaaaaaaaggtcctttgcgttgttaccactgtttaagggggaattttgcaaaaatccataaaattggcggccgttccagcatgtatcaaaagggaccaatccgccttatactaagccctattaaaatcattt

SEQ ID NO: 117992 - DNA, 291 bp, Zea mays
  Clone ID: MRT4577_39097C.1
cagcagccgggatcccatgggggcaaggcttacttaatttcttcggggtatgctatggcccacaagaacaaggggagggcccacttcaccggctacaacccagaggacaagcctggggcatataagaaccccgccgattatagcctactaagggagaacaccgccctggcataggagggccatggcccacattacaccccaaggaatggggacatccacagaaattgcattatgagggtcggaggaaacaagaatcatggtcggaaccggattgcccatggggcaataaac

SEQ ID NO: 117993 - DNA, 867 bp, Zea mays
  unsure (1)..(867): unsure at all n locations
  Clone ID: MRT4577_39098C.1
gccggccggtttcgggataagtacacacagagcgtataaaactctagctgttgtacgtccggccgtcgtcccgtgcaaactagcgtgctactccgacgagcgagaagccgagaagagcagctagcatcgggcagtttcttgtcgatccatccggccgccggcgccggcgcgaggtatgtaaaagtgttccttccccggcctgtggccgagacccagtagcagcgccggcgccggtagcgtcgtagcgacgacggtgacccggccagggttgattcgattcttcgcttttcttttcagtagttctgctttcgctctgtagttcacttttatgcaccagggattcttgcttgacctagaggattaggcatccatagctgacgccgcagatccaaccacaaagcgacccggctagtactggggtcagcttggcctttcagactgttgcacagtaaaagtagacaaaatactcaaggactgagcatctcgagcagctccggtaaggctgaattcaacgatactgtactatctaaaacgtcgtctaaatatggtggacactcttttacgttatatagagagattatcttgtctactctatctatttttatattttaaataacagattaaacaaaactaaaatatgtttaaatatttgatggtatgacagatacatataaaaatctaaagcaaaacacgtctttaatttaggtctttaacagatgagatatagataatattattanagagaaataagaaatgaaggacttaatctttttaaaaaatattgtgccacaccccctnaaatattatattgagagacataagacaattttcttactatagcagattcctaatagcctatttattccc

SEQ ID NO: 117994 - DNA, 370 bp, Zea mays
  Clone ID: MRT4577_39099C.1
ccgacgccgatgcgttcgacattgcacggcggcagctgctttccctaccggagggcgacggtgaccttcccgacgacttcggctcacatccagtggacgtaccttcaacacaagcgcctgagccgcgcgtacttcttcgctccaggcctggcgccgcgccatgtactccgaccccaagaacttcaccggcggctgggtaggagccgagtgagctctacttggcatacgtccgtcccggcactcgacgacgctaacaccaccgacggtgagggcatcgacctcaacggcggagacatcgggggttacctccccgaggagcttgggaagctcaccgatagcgccttccatcacattaactccaaccgctgct

SEQ ID NO: 117995 - DNA, 856 bp, Zea mays
  Clone ID: MRT4577_3909C.1
agatcattcagagcttcctacatcgctcccggctccccgcccaccgcccgccactggattttagctaccgcccgtaccggcagctccagcaagagtagcaagagtgccactcacacacacgtcacactgcgtagtgcgcaaggctccgaccttgatgcgcgtacccgccacggtccatggcctccgccgtcgccagtaacctccccgtcgccacgccagccgccgtgccggtgccttacgggaggctcagcccgcgcgtgtcattcagccgcgacgcgcccaccgacctggtggatcccgtcgccatggcagtggccacgccggagcccgcgatctccaaggacttcattgacttcgagttcagcctcggcagctccgccaccatgctccccgccgacgagctgttcgccgacggcaagctgctaccgctgagaaaggcggcgactctgccggatccggaggccgccgcgccacccccggcgcagccagaggaggcaatgccggcgaccagcacggagccgatcaaacctctccgcgccgcggcgtctgacggcacagacccctacgcgttctcgcccaaggcgcccagctgctccagccgctggcgcgagctgctcgggctcaggagagcgtcggccgcgcagagcccgagcaccaaggcctcggcgtcggcgtcgcccgccgcggccaagaccccggcatccgcggcgagggcgacgaactccgcggcggcaaggtcgctcaagctcctactccagcggaacgccgggcgcgcatcgggcgccgcggcgtcggaacatgcgtcggcgccgctccctcgcgacagctcgactcggaagggtcgctgtcgctggcg

SEQ ID NO: 117996 - DNA, 253 bp, Zea mays
  Clone ID: MRT4577_390C.1
gtgttttaattaacaaagagaacgagacggtgagcacttcgaagcactgactaccaggctggctcacatcctgggacgaactattcgtgcatatttaagtgttcacgagcacataatatgtgaagggagaaccacccaaatcactatatggctctatcaggttgtggcgctattcaccttcggaagagctccacttagcttatgaccacaactactggtagaagagcactttggtgaactagaggcgaccttt

SEQ ID NO: 117997 - DNA, 442 bp, Zea mays
  Clone ID: MRT4577_39100C.1
acccaaacgggcatgcatgagaaaagatggacagaaaggaacaggaaccaaccaacacaggggaggggagggtggagcagggggaggcatggggcaccgggccactgacaccgggccccaccaccattaccacccgaggcaaactttatttagcccaagtaacttgaagcccggaccggacacgtccacgcgaaaggaactggtagctacgtaccgggctacgtacgagacacacacacacacagggggagacgccagtaaaaaccggagcgtactgaaaaaaaaaaacccgggtaaaactgccatgtacgcgcgcgagggaataccccggcaagggcgcacgccgatcccctgggccctggccgccgccgctgggtgcgcacgggctaactcggtggccttttggggctcctaaagagcaaaaacctcctccgcctggggg

SEQ ID NO: 117998 - DNA, 604 bp, Zea mays
  Clone ID: MRT4577_39101C.1
gccggccggttttcgattagtcgcagtaagcggcagtcagctagacagccagtcggccgtggacagtggcgacggcgaggcgaagccgtatttggaacttggaagcaaccgccccgcaggcgcgagcgccgtcgtccgtctcgcctcgcctcgcctcgcctggcactgcacgcgcaaaatcgcatcgcatcacgagctctactctccccggctccactgcccgctcgctctccgactccatacaggcaaaccgcgccgccgcgcttctaacccccacccaacttctgcctccgatcccaccctcccagcccagcgcgtcaagtaccccgcctcggttcgctccccgtgtgatctggttcccacccgcggccatcgcatcgccgccgccgccgctgcagaacctcgcgctcgcggcgcgggatctcgcgggccccggccccacggtccggcgatcgggatgacggcggcgcgccggcgatgaccggctcggcggcctcgctgggcctgcggtccgggagctcacggatccctcgctgcctccgccgtcgtcggcagtggcgggaggaaggccggcgccaccgcctgacgcacgctgcgcgaacag

SEQ ID NO: 117999 - DNA, 290 bp, Zea mays
  Clone ID: MRT4577_39102C.1
gcaaacgatgtgctttttactgaaacggaaaggcagcaaaaagacggcgggcgccaccaccacacatgaacaacctcggcggcattggatacggtgaacaatgaggtcatattcgagagagactaaggcacggggcatgcggataacaacacgctcagatgataccaactaaaccaccccctcataaagtactgcaccaccagcaatggacggacacacccatcaaatgaaagcgctcgcgcttgaacagatcaacatcgcctagttgccagttgggtgacgcacttgaa

SEQ ID NO: 118000 - DNA, 2232 bp, Zea mays
  Clone ID: MRT4577_39103C.1
tctcggccggggcaccctctcactcatcgacccccgccgtagtagatggctagatgccaaaatcccaaatcccttgcgaacctcctaaacctaagcgatggcggtggcggcatcgccgtatttcctcttgctcttcctcttccattcattagctgcactcgcctccctcgcgccaccgccttctcagccaccaccgccgcgggtgcctcagaaagtgcaggtgtggcccaagccggtgtccatctcgtggccgttgccggcatacgcgccgatctccccgtcgttcaacatccgcgcctcgccgtcgcacccgtcgctccgtcacgccatcgcgtactacacccgcctcatccgcaccgagcggtacacgccgattatgccccccgtcaactacaccgtctcgggcgtccccatccgcctgctcgcgctctccgtctccgatcccgacgtcccgctcggccccggcgtcgacgagtcctacacgctctccgtgccacccaattccagctccgctgacatctctgccgccactccctggggcatcatccgcggtctcgagaccttctcccagctcgcctggagcagcggcgccgccgacgcgagcggccagccgatcgtccccagcgagatagaaatctccgaccaccccctgttcacccaccgcgggatcctcctcgacaccgcacggaactactaccccgtccgtgacatcctccgcaccatccgcgccatggcctccaacaagctcaatgtattccactggcacatcaccgactcccagtccttccccatcgtcctcccctcggtccccaatctcgccaacttcggctcctactcccccgtcatgcgctacaccgaccaggacgtccgccgcatcgtccgatacgccggggcctttggcatccgcgtcatccctgaaatcgacatgcccgggcacacggggtcgtgggcgggcgcgtacccggagatcgtgacgtgcgcgaacaagttctgggcgccgacggcgaagccggcgctggcagcggagccctgcacggggcagctgaacccgctgaaccccaagacgtaccgcgtggcggaggacgtgctgcgcgacctggcggccttgttcccggacccgtacctccacgcgggcgccgacgaggtgaacacggcgtgctgggaggacgaccccgtggtgcggggcttcctggcggacggcggctcccacgaccgcctgctggagctgttcgtgaacgcgacgcggccgttcctagtccacgagctgaaccgcacgtcggtgtactgggaggacgtcctcctggggcccaaggtgtcggtcgggcagacggtgctgccccacgacaccaccgtgctgcagacgtggaacaacggcgccgagaacaccaagcgcatcgtggcggccgggtaccgcgccatcgtgtcctccgcgtcctactactacctggactgcgggcacggcggctgggtgggcaacgacagccggtacgacgtgcaggagaaggagcacgatggcatgccgctgttcaacgaccccggcggcacgggcgggtcgtggtgcgcgcccttcaagacgtggcagcgcatctacgactacgacatcttgcacgggctgacggaggacgaggcgaggcgggtgctgggcggcgaggtggcgctgtggtcggagcagtcggacgccgcggtgctggacggcaggctctggcccagggcctccgccgccgcggagacgctctggtccgggaacaaggggtccaacggcaggaagcggtacgccaacgcgacggtccggctgaacgagtggaggtaccgcatggtggcccgcggcatccgtgccgaaccgatccagccgctgtggtgcccgatgcacccgcgtatgtgcaacctctcgcagtagcagcctgaagcgcgacgcctttcgactttcttttagagatagctttgctgcttcctgcaagctgccatggacagaaactggatatgcagggagtcatacagggaggcggaactttgcaagaacagtcggtatcgatctacggatcaaggtccggatgaatcaagagaccagaataaaaccaaggcatcgccaatgtaccatgaccatcattgatttcatcttggtttgctcagtagtgtcataaattaacaggtgcattattagctctgcactaaaaacttcccaactcccaagttaaacgaaattgagagacaaaaaatcatctttagattttc

SEQ ID NO: 118001 - DNA, 285 bp, Zea mays
  Clone ID: MRT4577_39104C.1
aatacaaaacaagcaattcaacatgcacgtgttacaaatacaataccatactgaccaaattccaattcttatcataacaacaacatggatagcttttacatatctcctttctccatccatttttattatattttggatatacacacactttttctctctttgggggggggggggggggaaagcaactccaaccacattcattttcttatatcaatgaataatttacatcctccttattgcccgatatttcctttacgccctttggaccaagtgcacctggcggtc

SEQ ID NO: 118002 - DNA, 629 bp, Zea mays
  Clone ID: MRT4577_39105C.1
aaacaaaacatagcaccatctgggaccttcagaccattatactttatcatacgtcacagagacagcacgaagcagcccgcatcgagcgaccagtggggtgggtgtgcttcggctgcccctcggcttttccgtgtgtgatgcgctcgcgatgccgccacacttcacacgcagtacagatggcggggtgctgagggcatgcgcacgccagcctgccagcctgacctgcactgctagcctgccagcctggccgcactctcgccatccatcctggccacactctcgccagcatcctggccgcactgctcgccaccagcctgctcgcacgctcggcgccagcctggtccacgctggcaccagtgcgcccatgtgccgtcatcgttgatgtgccgtggccataatgctacttaccctactcaaccgtcacggtctcagcatcatcaccagtgacacgcgatgacagtgccaacagacgcatcgaaacctggccaatgcagggaacctgcagcgccggcagcctccgccctggccaggcgtgagcatctgagcatcaggcgcacgccgtaagccctactgtgcatagtgcagcagtgggagcaggtgcagcagtagccgaggacctaccacggaca

SEQ ID NO: 118003 - DNA, 440 bp, Zea mays
  Clone ID: MRT4577_39106C.1
aattcggcacgaggcttactggtcctgcctccttctcctgccaaccaactcacctctgcctgccacttctcctggtgcctgctgtgctggctttctacactagaggaggacatacgataccattactgcgcctatccaggctctgaccaaccactttcttatgctaatattgtagaagggcgcaataatatctgcccgcatgtgtcgcaccgagccgaatcctctgtcgtctgccgctggctactggccagggcccctgtcggagcgccgcccgctgccccctgtcggctgagcatgacaagacctgcagatgggatgcacatgctgttgccaggagttcttcatatgatgctgactgacctgtcaggaaacgactctcactctcaccgaacgtacctgagatctactcacagttcctgattataggctacttttgaaga

SEQ ID NO: 118004 - DNA, 1483 bp, Zea mays
  Clone ID: MRT4577_39107C.1
gtatataaaataatgtcctactcctaccccgccaccacgccgcggcagcacaagcccctctccgcccccagccagccctcctcagatctcaatcccggcgctccctccctccctccctcctcgcctcgggacagcgagcgccgccgtccgccgtccatggagcacgacgccgaggcgcgccgcgggttcgccaggatgggcttcgggtgcaagcactaccggaggcggtgccggatccgcgcgccctgctgcggcgacgtcttccactgccgccattgccacaacgagtccacgaaagacgggcacgagctggatcggcacgacgtccaatcggttatctgcctcgtctgtgacaccgagcagccgatcgcgcaggtgtgctgcaactgcggcgtctgcatgggggagtacttctgcgcagcctgcaacttcttggacgatgacgttgacaaggagcagttccattgcgacgattgcggcatctgcagagtaggaggaaaggagaacttcttccactgccaaaagtgtggatcctgctactcgacgacccttcgcgacaggcactgctgcatcgagaactcgatgaagaacaactgccccatctgctacgaggcagtacctgttcgattcgctgagggagacgtcggtgctccgctgcggccacaccatgcacctgcagtgcttccacgagatgttgaagcacgacaagttctcgtgccccatatgcgccacgcccatcttcgacatggacaagttcttcaaggccctcgacgcagagatggaggcaagctacttgtacacgggaaaggtcagtgcgccttactgccagcctgatgctgtcctgtatgacccaatgcaaccaaccttcccagttctggtctattcttcccttcttctgtagaacaaagtagccctctcgtcttctcgtataaatggcacagatccagagagaggagacttggaagcggccggcgccggccccggcccccagacgccaagacgctcggcaacaagatccgccgtgtcagtggctcagtgcccgtgctgatcgatgctcgtgtgtgtgtgtgtgctggtgcagggatgggtcgtgtgcaacgactgcagggacacgacgcaggtcttctccggcatggcgggccacaagtgctgccactgccagtcccacaacacctgccgggtggcaccccccgtcctcccgtagccaccaccaccaccacatcattgttgttggaattggatgcagccagccaagatacccccggccccagcagctacgctattattaccagtagcgcctgcgcttttacgcaccgctccgttccagtccatgatgaactgcataatttcgtgccatgcaggtatgtacgtacactgttattggagatcggaagatttatccgactcgggacgcattatttgtaccacaacaaaacacgtgttacactattgtaataccagatctggatacgaaacttttttt

SEQ ID NO: 118005 - DNA, 460 bp, Zea mays
  Clone ID: MRT4577_39108C.1
ggggaccaaacttttggaattgggcagggaaaattaagtccaacccttcatgcggggggggggaaccccagctttttgaattcaaagaataaaataagcccaagaaaacttaatcgcgggcaaaagcttatgttttatcacaaattttcaagatccaaacaaccatcaccttaaaacttttttaaagcaaaggggttggagcttatattttttggagggcctgaacaccacgggcgaaaggaaaaaaaaactccccaatgaaccttacagtttttgcccattaattattggaaaaccctaattttttttatagctttgaaaggtttttttccctcacaaaacgaggaaaacgttggaaaaaaaaagggccctaaaggttttttagttaaagggaaaccttctaggaaaaaagggcgggcccaaaggttttttaataacaacagggaacttgttttttttg

SEQ ID NO: 118006 - DNA, 343 bp, Zea mays
  Clone ID: MRT4577_39109C.1
cccagtgtaacgcaacacgcaacacacaaatcgaggggcatcaccgaaaaacccgaggctagcacacgaaaccctgaaccggccaccaaaaacaccgcagaatgcccaaccaaacgagcccgaaagaacgggcctcgcaagggtggccgaagacaaacaaaacaacagagtccttgaagaaccctccgctgacgagggaaatgagacgcgcattcgggcggctgcattaaacccaaacgagcaagaggaactgagccccaacgatatgatggccagggcccgtgagagagacgagaacgcgaacggctaccgcctcgctaacaccgaccaggctaccaataac

SEQ ID NO: 118007 - DNA, 517 bp, Zea mays
  Clone ID: MRT4577_3910C.1
ggccgcttttttttttttttttttctttttttttttttttttttttttttttttttttctttttttttttttttttttttttttttttttttttggtttttaaaccccaaatattcatgggaaaaccaaaaccaaaatgggggggggcccatacaacaaaacgacaggtaaagcaggactttttgggaggcccggcctttaaaaacggggcttggtaaaaaaccacctgtttttgccgggcttgaacccttccccaagggcccctttggcccttttgcagggggggacctttttttcgggggtaaaaaggggctcgggcccaccgggggggaaatccttgaaaaccacccccagggggtaacgggggggcctgaggggagggaaatttaccaacttgatgaaacacttgacccgcgaattttttccaatctttttgggggaggccctggggaacaccttttttgggtacctggggaggcccggcaccaggcaagggccctaagggcgggccgggggg

SEQ ID NO: 118008 - DNA, 193 bp, Zea mays
  Clone ID: MRT4577_39110C.1
ggggacaatacagaagtcaggggtttttaaacctataagctaggtaccatacacaaagacttgcagaagcaaaattctacataatgaccatacataacactgatggctacatgacatagtgtgaatgcagtcttaggatacaaagattagtcagatagagatggctcatgacttcatgccaatgtgataattt

SEQ ID NO: 118009 - DNA, 458 bp, Zea mays
  Clone ID: MRT4577_39111C.1
aaaaaaacaaaaacaggctttaattggcaaaaaacaaaaacatcgggccactatccttaaaaaaacagcatggaccgccaggccgaacggacatgcggccaaaggtcaaagctagcattaaacccccagcccccgaaagaaacaaagctgccgaaacaagcaagcgggtttctaccctcttacaaacaaacaaacaggaaaaccgggattcacaaaaaaagatatatccggttaaaacaggacgcaaccaactagcctcaggcgacaggcttttggttcacttgccgggacccggaaaacaatgggattgccgagcccgccatgccaaaggagggctttgaaaggaccatgctcttccttggggggaaccagataatccaaaaaaacccaacccaaccgggggcaaccaaaattccaacaacgggggagaaaacaggcgcaaaaagacaaaaaagcaa

SEQ ID NO: 118010 - DNA, 570 bp, Zea mays
  unsure (1)..(570): unsure at all n locations
  Clone ID: MRT4577_39112C.1
ctcagctaccaaaagtcgtacgtcgtctacctcggcggtcacgcgcacggccgcgcgggcgcggcgctggcgtcctgcagggcgcgcgccaggagctcgcaccgcgcgctcctgggctccgtcctgcgcagcgaggcccgggccagggacgccatcttctactcgtacacccgctacatcaacggcttcgccgcgacgctggaggaggatgaggcggcggaggtctcgaggcatccgcgcgtcgtgtcggtgttcccgaaccgaggccacccgctgcacacgacgcgatcgtgggagttccttgggatggaggaggnnaaggtggccgggtgaggcccggctccatctgggccaaggcgaggttcggcgagggcgtcgtcatcggcaacctcgacaccggtgtgtggccggaggccggcagcttcagggacgacggcatgggcccggcgccgcccgggtggcggggaatctgccaggaccagcaggcctctgacgacgcgcaggttcgctgcaacaggaagctgatcggngcgcggttcttcaacaaggggtacctggcgacggtggggc

SEQ ID NO: 118011 - DNA, 379 bp, Zea mays
  Clone ID: MRT4577_39113C.1
ccgtcaccccccccacagcccccgccgcccggactgcaccccaaaaccctgaccaacccgccgcgtcggtagagctcactgtcctcatgccctggactgagagacactccttgcttgacattccgcgacccgagcgctggttcagacccggcaatcagcaggctctggccccattgcgtgtaatacggtaatttgaacagcaaggtcactgaattcaggtgtttctttcctcgaggtcgccgtgtccttgacacggcacgaccggcggcaatggcgacaaacgggcagggaatcagcgacgggcggggggagagatcagagcgaagtacaaaacagagcgagtgagagagcggcgaaggctctcccctcgtgccgaatt

SEQ ID NO: 118012 - DNA, 438 bp, Zea mays
  unsure (1)..(438): unsure at all n locations
  Clone ID: MRT4577_39114C.1
cacacacagcacagnacacaacacaccggcncacgcagcgagcgcctgtcctcttggtgtcccagcaccgggccaaggcaagacagagagtacaccggcgatcctcttctctgaggcggcggggcggttgaccgccctcatggagcgagaaatcgctgagagtgcctagagagctggtcacagacccatgcgacacgaaggagaagatctgctggagggggggggctacggcggggcccaacatggatgaacaggcctaaacgcccacacaacgacggggtaggaggggacagcaagagcgccaaatcgggtatggcagagctgaccgctccacctgcaggagccacggcacggaggcctagtgctgcggaagacccgcatgagcctggtctgaggggatgaggtccagaacgggcaacaggcggagccacgaacgag

SEQ ID NO: 118013 - DNA, 535 bp, Zea mays
  Clone ID: MRT4577_39115C.1
ggatgcataaaaaggataagaaacaactcctatttcgcgaggcacgccatgaagaaacaattcgtagacactcaggcgcattataacctaacagaactaaacgtacattatatttgtctcgaatgaaaaagaaatgctaatgctggacctcatggccctctaattctgagacatatggcaatcatgtgccgtggtgctacttagcccattgtatcctcaaatcgaacttttttattgggcgctgagaaggagaaaacgaacttacgggccacaaattttcctacacggagaggttcccacgaatgggagaaaggaggaccatccaccatagcagcctgcctctgctgggaaggctcagctgcggtaaaggggtaggcagttactggtggagaacatgtgactatgctttaacccattggaggggcacgaggacctgtgccctattcttgggccggaaccagattgcagcactgggctgtttgatacgcatcttgctgaacttcattagacagacaaacttcttcatctccttcct

SEQ ID NO: 118014 - DNA, 300 bp, Zea mays
  Clone ID: MRT4577_39116C.1
acgcacaccatctagctggtgtgttcccttctaccttcttgacacaaccacaggggttggcgttctaccagctcgttgcgcctaactgctggcgcctgttatacaactgcatcaactgctgtgattcaaccaactctgtttgacaaattcatcaacgatcgatcaacaacccatcattggtggtgccctattttacattcttatgcgtatagtcataatgagtttgatatgatcttatggctatccagatatagaaagtacatttctaaaaaatattacacagttacattaaaggccttt

SEQ ID NO: 118015 - DNA, 174 bp, Zea mays
  Clone ID: MRT4577_39117C.1
gtagtatcgtgccaagtagcctgcagcaccggtcgttagctgttctgagtaaaggatgacaaatgaggtggtctttcatacttttcaacaaaacactaacacaaagaaaaagggctcccataatcagcaggtgtcccttgttaccaacctatgatctcccgacccaggcccaaa

SEQ ID NO: 118016 - DNA, 265 bp, Zea mays
  Clone ID: MRT4577_39118C.1
gtattctaccaccagggccagtgttgtatagccgcatccaggatttttgtggaagaatcaatttatgatgagtttgttcgaaggagtgttgagcgggctaagaagtatatccttggaaatcctctgcaccccaggagtcactcaaggccctcagattgacaaggaacaatatgataaaatacttgacctcattgagagtgggaagaaagaaggggccaaactggaatgtggaggaggcccgtgggggaataaaggctactttgtc

SEQ ID NO: 118017 - DNA, 819 bp, Zea mays
  Clone ID: MRT4577_39119C.1
acgtatgactatggttgatgacccaaccacgaacgccgttgtgtcatggagtgccgccaacaatagctttgtagtttgggatcctcatatctttgggacggtgctgctgccaaggtacttcaagcacaacaacttctccagctttgttcggcagctcaatacttatgttgccgttcttccgtgtttgtttctgcggctgtggaaccatgcacggagggatgatgcggccgtgtgaaagggcttcagaaaggtggatcctgacagatgggaatttgctaatgaggagtttctgagaggtcagaggcacctcctcaaaaacattaggcgtcggaaacctccacactcatctccaaatcaacaatctcttggctcttacctcgaggtaggacactttggatatgaagaagagattgatcagctgaagagggataaacagctcttgatggctgaggtagtgaagctgaggcaggagcaccaaaatactagatcagatctacaggccatggaagagaaattacaagataccgagcagaagcagcagcagatgatggcattcatggcacgcgtcatgcagaaccctgatttcatgcgtcagctgatctcccagcggaagatgaggaaggagctcgaggatgccatctcgaagaagagaaggcgccgcattgaccagggacatgaagctggtagcatgggcactggttctagcctggagcaagggccacagggagtgtttgaaccgcaggagccggtggaatcactcgccaacggtgtgccatctgatctggagagttcgtctgttgaggcgaagggattggaggt

SEQ ID NO: 118018 - DNA, 382 bp, Zea mays
  unsure (1)..(382): unsure at all n locations
  Clone ID: MRT4577_3911C.1
cggaannaaggcccggggggacgagcacacaagacagcggcccccagggcacaaaaacaaaanaaacacacaaaccagcgcggggagaacacgagcagggaggggggcaaacaccaccaaancaacccccacaacgaagacagcaagcagccagcgaacacaacacacaaccacaagcaaccagggccacgcccagcccacaacaacgcccagagaagaaacaacaggcggcacgcgcaccgggacgcaaaacaggagaaacgggaccaaagacaccgccgcaaagcgaccaaagacaacaaaaagccaccgaaaacagggagacagggcccggaaccagggcgccggcaaacgcggccccgacaggagcggcaacggggac

SEQ ID NO: 118019 - DNA, 3183 bp, Zea mays
  unsure (1)..(3183): unsure at all n locations
  Clone ID: MRT4577_39120C.1
cattgggtacctcgaggccggccgggttcgttctgagctctctctctctctctctctctccctacccaccaaatctcgcagtcgcagcaggtcctaggtgctcccgaggaatccattcccaatttgcgttcccactcccaccaccgcttcttcccgtatcccttgtcctccctaatttcctctcacaaaaagcgggtgcggcttcctgccactcacctcggtctcggggggcgccgtgcggcgggcgcccgtgctgctggtttcgctccaggggagaaggggcagagggagtagagcaggttaggtccgtttgcgttttcttttgcgggtttgtaggtcaaaagctccgcgagcactttccgctccacctcctcacgctcggaatcaaatcgatgcccccctgatttggttcctggtatcggtgcatgagcttgctccaagagatctcccttttggttcggcgtcaggggttctgtgaggtcacgcggcttcttcctcttggcgctcctcacatgtccgggcgcttcgatctctgcccactgcgcgagtgattctgctgctgcagcagctgttaggtgcgcgcgggccgttatggggtgaaccgaagcgttcctcgcagggctgtgggtttattacgccgcctgtttgcttccccgcaccttgtccttgtgcccatacttctttgcttttgtcacgcctgaaccgtgtcttcttgtagtatctgaggcttggcagttggcaagtacaaactagcaacttgcttaggtataaagtatccagtgtctggtgcagagcccaaaggggtcacgaatcgttgatgcatagatctgcttctggctgagataaggctctaagttcgctctgttgatggggctaccatgagccacgggaacgggatgttgaattctgtcaaggtggagaggtggccagcagcagtcgctgcaaatggccagcctaggccgatggatgtgctccacgacggcagctcgccgccgttccttaccaagacgtatgacatggttgatgacccaaccacgaacgctgttgtgtcatggagtgccgccaacaatagctttgttttgggatcctcatatctttggcacggtgctgctgccaaggtacttcaagcacaacaacttctccagctttgttcggcagctcaatacttatggcttcagaaaggtggatcctgacagatgggaatttgctaatgaggagtttctgagaggtcagaggcacctcctcaaaaacattaggcgtcggaaacctccacactcatctccaaatcaacaatctcttggctcttacctcgaggtaggacactttggatatgaagaagagattgatcagctgaagagggataaacagctcttgatggctgaggtagtgaagctgaggcaggagcaccaaaatactagatcagatctacaggccatggaagagaaattacaagacaccgagcagaagcagcagcagatgatggcattcatggcacgagtcatgcagaaccctgatttcatgcgtcagctgatctcccagcgggagatgaggaaggagctcgaggatgctatctcgaagaagagaaggcgccgcatcgaccagggacatgaagctggtagcatgggcactggttctagcctggagcaagggccacagggagtgtttgaaccgcaggagccggtggaatcagtcgccaacggtgtgccatctgatctggagagttcgtctgttgaggcgaagggattggaggttcgacagggtgtttcttcaggtggttctgagcatctgaatggcaggccaagcggagagttaaatgatgatttctgggaggaccttctgcatgaggggggactcggtgcagatgcaggcaatgctgttggtcaggatgatatgaacatggacatggacccagatgttagcctgcctcaactgaaacaacatggtcccagacattagccgctcttgtgctatcacaatggctgtgactgtgagtatctttacagttatgctcgttatatccctgtggtgtacctgtttcgacgttcgtctctcgaccaaatgtcacgtcgactgcagtctccagttgttaatacagtctgttcagcacgctgatttaagtatttgggtcaagatgttcatataatcctgtggtatccagagatattatagtttgttttcgtaactgtttgcgcagagaccatgctatgttgcctgcaggctatcagtgtatttgttctaacagatcgcgacgctggtacaacgcagtgacctgccagactgggccactatgagattgtagggaaagaccagatagcttgtgtatgtaaaagtggtcattctatcattctatgtatgctgatccatagtagcctatcatgtgcaacgctattgccctttgggatttggcatttcactgtatataacatatcatcggctcatcgccgtattgccgcatcaaaaagaaaaatgaattacccaaagcggaaaacccacgcgtccgccnaagacaactatctgatcacaggctactgctacgacgtacaatggtacccactggtattgacagggcaactgataggtagctcgtgttcataaacctcataacaggaccccgatggaaatgttccgttctactggggcgttgacaccggcgggcgtcttgtggtctctgacgacgccgagctcgtgaagagtgcctgtgggaaatcctgtgccccgttccccaaaggcttcttcttcacgacgtccggagggctgaggagctacgagcaccccatgcacgaggtgaagccggtgccgagggtggacagcaagggcgaggtgtgcggcacgacgtacacggtcgacgcaaccgccaggaaggagaccagcatcccaagggtcggcagcgccgccgattggtcttcgcagtactaaaattcgttatctttctctgtgtgtgttgaacgggttcgagcgcaggtagcaggtgacacgggcgtgggccgtgtttgttcgtatggaaaccgtgtctggtgtttgttcgtatgatttccgttgctgctttgctgcacgcctgtactgtgacaagaattactgcctttgctatcaggaaataaatttgtagagtttagagttgttttaaaaaaaaaaaaaaaaaaaaaaaaaaaaaaaaaaaataaaaaaaaaaaaaaaaaagcggcc

SEQ ID NO: 118020 - DNA, 165 bp, Zea mays
  Clone ID: MRT4577_39121C.1
cgtggtgttgttttttttcgagttaatctgcagagagattgtagtcaacagggcatagatataatcgacgagagtatacacaaatccattctctatagaaccaaaaggtacggcgggaaaagtgcatggtgacacccaggggcagaacactatccaccacgcggg

SEQ ID NO: 118021 - DNA, 820 bp, Zea mays
  Clone ID: MRT4577_39122C.1
ttggctccctcgaggctgcggccgggccggggagcaatccttcaaaaaaaaagaacagaaagagcaagcatcgagagcgagccgccattgcctagaggactcggcgagagctccattcgattcgagactcgagagcatagccgtgcactgggaagaggaggtctaggagcagatgagcgggctggagctggagctgggcctgagcctaggcgtcctcatcgacgtcgtcgacgagcagtggatgcgcgacaccctccccgccgatgacatccccgtgccgccggccatggcagtcaaaactgaggacgccgaggatccagcgcccgccaatcaggaaagccaaccagcacaaggggatgtatggcgtgattttgccttggaaaatctctgattctttatgctctacattctacaagtgcctctagagatggagattctatgctaagggtttaggagctgcatggtggatggtacattgtgctttctgcgccgtgcttcctgaaagtctatctgaagttagtttaaaatatggtttatgcaagtgttccagatatttcccacgatggattcgaggcttgtgctgaacttgtgctagcctagcctgttataagatctatggtaacgatgactgcaatttatctatgcaagtgatccagactgttggcacatgctggcacgccttgtgataacctactgctgaatgtccccataaccttttgaggctcgtgcttgatcgcaagtgtttctcgacctagcgtgaagagaatgtttcggtacttgtaaaaaaaaaaaaaaaatttattatatatttttaaaaagg

SEQ ID NO: 118022 - DNA, 1295 bp, Zea mays
  Clone ID: MRT4577_39123C.1
tccattcccaatttgcgttcccactcccaccaccgcttcttcccgtatcccttgtcctccctaatttcctctcacaaaaagcgggtgcggcttcctgccactcacctcggtctcggggggcgcccgtgctgctggtttcgctccaggggagaaggggcagagggagtagagcaggttaggtccgtttgcgttttcctttgcgggtttgtaggtcaaaagctccgcgagcactttccgctccacctcctcacgctcggaatcaaatcgatgcccccctgatttggttcctggtatcggtgcatgagcttgctccaagagatctcccttttggttcggcgtcaggggttctgtgaggtcacgcggcttcttcctcttggcgctcctcacatgtccgggcgcttcgatctctgcccactgcgcgagtgattctgctgctgcagcagctgttaggtgcgcgcgggccgttatggggtgaaccgaagcgttcctcgcagggctgtgggtttattacgccgcctgtttgcttccccgcaccttgtccttgtgcccatacttctttgcttttgtcacgcctgaaccgtgtcttcttgtagtatctgaggcttggcagttggcaagtacaaactagcaacttgcttaggtataaagtataaaccagtgtctggtgcagagcccaaaggggtcacgaatcgttgatgcatagatctgcttctggctgagataaggctctaagttcgctctgttgatggggcgaccatgaaccacgggaacgggatgttgaattctgtcaaggtggagaggtggccagcagcggtcgctgcaaatggccagcctaggccgatggatgtgctccatgacggcagctcgccgccgttccttaccaagacgtatgacatggttgatgacccaaccacgaacgccgttgtgtcatggagtgccgccaacaatagctttgtagtttgggatcctcatatctttgggacggtgctgctgccaaggtacttcaagcacaacaacttctccagctttgttcggcagctcaatacttatgtaagttgttaactctatagatgctttggtttcatgttctatgatgcggttgaggtgtgctggaatcctactgccttatttgtggagtgaattaccgttaggtactgtttgttttcgtgtttttaaccctgtaagcgattgcaccactataggttgccgttcttttgtgtttgtttctgcggctgcggaaccattcacggagggatgatgcggccgtgtgaaaggtcgttactttccattcaaaa

SEQ ID NO: 118023 - DNA, 732 bp, Zea mays
  Clone ID: MRT4577_39124C.1
gcaattggcgccgtatctcaagttgcagaggcacgcagggaagaaggaatatcccatcccaattcccaacaagaaactcaacctctgaaccgcttgcatatctctctaacgtgaaggtttctgaacatgtatttcgtcgatacaggtactccatccgattaagctctgtttgatggttgctggccggattgtttctctcaaacgaacggctcctaagggattgtttcgtcgatacaaccctatgatccggttaatcactatgagtaacccgccgcgtctcgggggcctccgagccccgatcgaccctgcactatgcccctctcgccgccgcggctaaacatggcccgcctctgctattctgggggagggaagcggcggctctcgctggtggagtggtgctgggcgagggtgagggcgacgccaggcgtggcaccgcggcggaggggggacgtcgcgttctcgtgggctgggcgcccgtcatcctcccgtaagatattttctctgccaccctctcggattatgaacaatgctgtggcattaggctaccgatgcattgtgtgtgatcctaccatttcaagcatgaacaatgttgcggtattgtactgcatgtctgcatctcagcaaatacaactagcatttttctaaaaaaaactgtaaatctcgttcaaggaacaaacatatcggaattcagtgatcctttgtcaccttaaaaaaaaaaaacaaaaagaaaat

SEQ ID NO: 118024 - DNA, 370 bp, Zea mays
  Clone ID: MRT4577_39125C.1
aattagcataggatcagatattttactcgctttcattcgttcttgtttttcttaagataaatgaacatgggacatgacccctagtgatatgaaatttgaatgttgggcatcgaaggtgtcgacaaaatcagaacagtacatgcttgtaattggatatttgtgatacatgtatgaccgtgtaaaaaaaaaaaaaaaaaaaaaaaaaaaaaaaaaaaaaaaaaaaaaaaaaaaaaaaaaaaaaaaaaaaaaaaaaaaaaaaaaaaaaaaaaaaaaaaaaaaaaaaaaaaaagggggcggccgttttaaaggttcaaagtttacttccccgtgcttgcaacgaaatagtttttttatagggccaccaaaatta

SEQ ID NO: 118025 - DNA, 829 bp, Zea mays
  Clone ID: MRT4577_39126C.1
gtcgtctcatcccgattcccgacacgcttgtgttgtggcgattggtaagctcggcggctcgtggcagcgggaacgtacgaggcaaaggagagtgagggcgaccgcgcggatcgcatcgcagctctgggcggagggggggtcttgcgcggagatgctggcggtgttcgatcgggcggtggcgccgagcccggaggggctgcggcagccgggcgccgcggggggcggcagcgcggcgggcctcgcggaccggttcagagaggcgcgccccgacgcggtcaccgtcaaccttggcgggtccggcgtcctggcgtactcctcgagcaaccagaaccccctcctccccaggttgtttggagcggtggacggcgtattctgcatgttccagggaacaattgcgaacgttgccgtgctcaagcagcagtatgggttgagcaaaggcgctaatgaggtcagcatcatcatcgaggcttacaggaccttgagggacaggggcccttatcctgcagatcaggttgtgagagacataagtgggaaatttgcatttgtcctgtatgattgctccactaagtcggtcttcatggctgctatgcagctgttcagttattccgaagacatctatctgatcaaaggctactgctacgacgtacaatggtacccactggtattgacagggcaactgataggtagctcgtgttcataaacctcataacaggaccccgatggaaatgttccgttctactggggcgttgacaccggcgggcgtcttgtggtctctgacgacgccgagctcgtgaagagtgcctgtgggaaatcctgtgccccgttcccc

SEQ ID NO: 118026 - DNA, 362 bp, Zea mays
  unsure (1)..(362): unsure at all n locations
  Clone ID: MRT4577_39127C.1
tcggttccctttatttttttttcttccaaacaaaacancgggngcagcaaacggggtcctttagaaacaaccaccggtttcttctagaaaagaaataaagggtataggttcaaacgttagcccttctgtcctgccacacctgatgtacaaacatgtatgtaccacctccctagggcgtgcatgatataccatgccatgcatgcggactttagaactcgaacccgtggcatgtgcggggtgccggctaacttgagccacaaccgcgtcgtaaacgaacggaccggcggtgaactgctcggcgctcttgcgggcgatgacttgtaacccaggccaggtgaccctgttgctggtgcctgcaccgg

SEQ ID NO: 118027 - DNA, 1092 bp, Zea mays
  Clone ID: MRT4577_39128C.1
ccggggtcgtcatcatcccgattcccgacacgcttgtgttgtcgcgattggcaagctcggcggctcgtggcagcgggaacgtacgaggcgaaggagagcgagggcgaccgcgcggatcgcatcgcagctctgggcggagatgctggcggtgttcgatcgggcggtggcgccgagcccggaggggctgcggcagccgggcgccgcggggggcggcagcgcggcgggcctcgcggaccggttcagagaggcgcggcccgacgcggtcaccgtcaaccttggcgggtccggcgccctggcgttctcctcgagcaaccagaaccccctcctccccaggttgtttggagcggtggacggcgtattctgcatgttccagggaacaattgcgaacgttgccgtgctcaagcagcagtacgggctgagcaaaggcgctaacgaggtcagcatcatcatcgaggcttacaggaccttgagggacaggggcccttatcctgcagatcaggttgtgagggacataagtgggaaatttgcatttgtcctgtatgattgctccactaagtcggtcttcatggctgctgaccccgatggaaatgttccgttctactggggcgttgacaccgacggccgtcttgtggtctctgacgacgccgagctcgtgaagagtgcctgtgggaaatcctgtgccccgttccccaaaggcttcttcttcacgacgtccggagggctgaggagctacgagcaccccatgcacgaggtgaagccggtgccgagggtggacagcaagggcgaggtgtgcggcacgacgtacacggtcgacgcaaccgccaggaaggagaccagcatcccaagggtcggcagcgccgccgattggtcttcgcagtactaaaattcgttatctttctctgtgtgtgttgaacgggttcgagcgcaggtagcagggcgtcgcacgggcgtggcccgtgtttgttcgcatggaaaccgtgtctggtgtttgttcgtatgatttccgttgctgctttgctgcacgcctgtactgtgacaagaattactgcctttgctatcaggaaataaatttgtagagtttagagttgtttt

SEQ ID NO: 118028 - DNA, 754 bp, Zea mays
  Clone ID: MRT4577_39129C.1
gagcatctgaatggcaggccaagcggagagttaaatgatgatttctgggaggaccttctgcatgaggggggactcggtgcagatgcaggcaatgctgttggtcaggacgatatgaacatggacatggacccagatgttagcctgcctcaactgaaacaacatggtcccagacattagccgctcttgtgttatcacaatggctgtgactctgtgagtatctttacagttatgctcgttatacccctgtggtgtacctgtttcgatcgtcttcgaccaaatgtcacgtcgactgcagtctccagttgttaatacagtctgttcagcacgctgatttaagtatttgggtcaagatgttcatataatcctgtggtatccagagatattatagtttgttttcgtaactgtttgcgcagagaccatgctatgttgcctgcaggctatcagtgtatttgttctaacagatcgcaacgctggtacaacgcagtgacctgccagactgggccactatgagattgtagggaaagaccagatagcttgtgtatgtaaaagctgatccatagtagcctatcatgtgcaacgctattgccctttgggatttggcatttcactgtatataacatatcatcgccgtattgccgcaaaaaaaaaaaaaaagggcggcccatttaagtttgttgtcttcccttttagcttacacatgtaccggctcggtcagtgcccgaggatctatttgcgtgcaaaatgttcttttttc

SEQ ID NO: 118029 - DNA, 102 bp, Zea mays
  unsure (1)..(102): unsure at all n locations
  Clone ID: MRT4577_3912C.1
tgctagctcttgtcttgtcanttatttaccttcacggagccgcctagctagccgagtacaggtggagtggaatgcgtggtgcactgccaaccaaatcaaact

SEQ ID NO: 118030 - DNA, 139 bp, Zea mays
  Clone ID: MRT4577_39130C.1
ctctaacaatttttcaatgggtggaacgaatccactagacgggggcagttacaaaacaaaggggccccccctacaaagctctggaactcccaccggatagagcaaaaattggggccaacggtcggaaaaacgatcggat

SEQ ID NO: 118031 - DNA, 145 bp, Zea mays
  Clone ID: MRT4577_39131C.1
gagtgaggtacacagcactgatctgttgtaactgatcgggtgcgggcgtaaaacaagtcggcccaagtcccaacaacggatcggaagcgatccccattccacatccaccaaatggccgacgccgacgctgccgccgtccccgttg

SEQ ID NO: 118032 - DNA, 360 bp, Zea mays
  Clone ID: MRT4577_39132C.1
tgggctcagcagggcttggataacgaaggggggctgagtaattaacgtagaggtgccagaactgagggctacagcgtgcgcagtctccgctggagtcacggttctagccacatccagagatgacgacctgtcggtagtccgacgtcatcaacgactgtttcaggatctgctcgggctaactcgcttctgcacagcacaatggcctctctcaggacctcactctagggatgaccatttgaacctctctgaccacacgggtgaccacagggctgaccacatggaacatgggacgatggaaagggctgttctatgccgctggaccagcccagactgtgactagagtcctccatactgtcctgt

SEQ ID NO: 118033 - DNA, 201 bp, Zea mays
  Clone ID: MRT4577_39133C.1
aatagactacgcatgtgtgctatgaggagcttatcgagagacagatattttatggggcacaaacgggcaaaagctcggttgattctgatttccagtacgaatacggaaccgagaaagcgccaccgatcgaacctttagattttcggggaggtggtagccgtgctctctctatgtctacgatatggtcgtactttaattttc

SEQ ID NO: 118034 - DNA, 162 bp, Zea mays
  Clone ID: MRT4577_39134C.1
taatgcggcggcgactgccgtgctggtgcggcacgttggcacctgtgagtgggtggagtcttgacttgacgcgtgaaccacccttggaaaaaggcaccgccgcgacgccacgccactccaccctcgtggcctttccgtggcgacgtttcggttgctacacgc

SEQ ID NO: 118035 - DNA, 960 bp, Zea mays
  Clone ID: MRT4577_39135C.1
ctcgactcctctgttaaaaagggttatgctaatgacaagtcaaacataaccctttttgacagaggagtcgaggacattaatacaacacaatgcggcacaaatatatccttctatagaaaaaaacctaatctatagttttcaggcaccatgtcactcatgtctccattcccaaggatggatctaagtaaaatggatcccgcgactctgaccctccttggggcagctggttgtgtaatgctgactatgcatttcactgtgcaattggtgtcacaacatctcttctattggaaaaaccccaaggagcagaaagctagacttattattgtgctaatggctccactatatattatctcttcctttgtgggtcttcttgatatccagggtagcaagacattttttacattcttggatgctgttaaggaatgctatgaagcactggtgattgctaagtttatggcattgatgtacagctacttgaatatatccatcagcaagaacatagtccctgatgaaatcaaagggagggtgcttcttcattccttccctgtttctgttttcctggtacctttcttattccttgagaacgatccggtcgaagagcccgaggaattcgcaggagaagcccctgagcagcagtcggttggtggagccccgcaacgtccgcttggagcacaagactttgaagcttctgaagtattggacctgacaatttgttattgtgaggccagtgtgttccattcttttttttttctcgaacaatcaaaagagctgcgtatcattatattaatagaagaaaaaggcacatggccagacccacacacccataaacacacacacgctcacacacccaagaacatctaggcacagacctttccattctgattattgcacttcaggttcttgggctgtaccacagctgggtcagctggacgtttagtattatactgaacttttcagtct

SEQ ID NO: 118036 - DNA, 172 bp, Zea mays
  Clone ID: MRT4577_39136C.1
agcgtggtcgcgggcgagacccgctatgccgattacctggccgtggctgtcgcgtgcatatatagggctctagtggccctgtttggagttgtattgcagttgactggcagcggttttacagggaaaacactggtattaccctggttattcccattttagtgggggggggggt

SEQ ID NO: 118037 - DNA, 1646 bp, Zea mays
  Clone ID: MRT4577_39137C.1
acctcttaaaggttggtcgttttttggtttttttggaaaagtaaaaaagctgaatctttaatctaactttaaacttcaggaatatattccgataaacacaaaccggagtacattacatgctcctctacccctacagaccttgatctccaccctttttttggaaagatctccaccctaattaactcaataaaaaacaatgactaggctatttgtgcgtccatcaccgttcgtttgcttaaaatttgcacttcccaggtgtcctagctgctactatgtacacaactgctgagaaggaaaatggacaaggatagacacacacaacaatgaaactatgggaaaatttcaatgctcaaaacatgatgccaatatgccgtactgctcactggatagggaaataaccatcggcaacatgatctccgaagtcctaactcaagatatgttcggtcaccaataccagaaaatgattgggcctcaagactcaagcatctggaactgatagaaagtattgtgacataaaggccctgaatctcattttgtactccctaggtaaaattacagttggggatagattctttggaacaacaagagatgtcttcacccaagattccagctgtttgtcccaggtatattgtctcaaataatctataattccaaatacaagctctttcttctctttgtcaactccaacaagcaaggagtaatccatgacattcatgttacttaggaaagatgtgtcgttccaaatagcgcgttccatgaggtttttagtttttccttgaatgtagattggcatggtacgcatgtcttcaataaaattttgatccaacagtaccttttcagaattttctgaatcaggaatatatcgtgagaaaagagcacccttcagatcatatctgcgtagtatattatgtccaaacagaagattttccataaccatgaagttaacccttgtctccttgccattcctagtttccttaacctgatatattcctagaattttcgcaagacaagtagggttgcttgaaacctcagatgcaccaaaatgcttaaagtactcaagaccaaactttaagaacgagtcaaattcagtcttcttgatttgttttatgataaatctgtcatccattgatttcgcaaagaaagccttactctttccaccctgtgcattccagtttttgcagcggcttattgacgaaatatatgcaagttctgatgggcagcacatcttccgaagatcatggaattgttttgcatatatacaaatgacagtatatttgcttctcagagctatcttttcattgttcagatcgatttcgtggtgcagatcttttaaagctgacagaaatgaatcataaaaccctgatgttaattcctcagttggtgcaaaccttgaaaatttatggttgttttcgaaagactcatttgaagacgacatggatggcagcatagaagcatttttatccaagatctagatgcagcttcatgtgagaacccgccgcgaccaccggacatgtccggtgcaccagggggactcagactcatgctcgtcaccttcgggaattccctggggcgacttggctataattcaccggactgtccggtgtacaccgcacagtgtccggtgcgccaagggaggtcggcctcag

SEQ ID NO: 118038 - DNA, 826 bp, Zea mays
  Clone ID: MRT4577_39138C.1
gtgagcggccacaccttcttcgcataaaatattatggtaactttgacagacctttaggcaggtttttgcgtgaccagctatttgatcagagcaagctttgccaatcttgtgagctaccaccagaggcccatgtttattgctatgtacatccccaaggcagtttaacaatatctccaaggaaactttcaataaagttgcctggcaatggtgaaaatgatggtagaatttggatgtggcatagatgcttacgctgccctcgagtcaatgggctccctccagcaactaaaagagtagtgatgtctgatgctgcttggggtttgtcttttggaaaatttttggaacttagtttttcaaaccatgcggcagcaagtagggtagccagctgtggtcattcacttcacagggattgccttcgcttttacggcttcggtgaaatggttgcttgcttccgatatgcatcaattagagtccactctgtgtatttaccaccaccaaaacttgattttacttctgagcatcaggaatgggtagaagaagaagcaaaagaggtggatgactcagctgaacttctgttctctgaagttctgaacgcactccacaaaatttcaggaggaaggccaattacaggttcttttgatggcaacttgaagatccttgagttgagaagaaatattggagaactggaagagatcctggtggcagagaagactgactttatggagtcattaaagaatctactgaaaacagatatgagaaaggaacagccgttcattgatattcttgatgtcaacaaactaaggaggcacttattatttctgtgttactt

SEQ ID NO: 118039 - DNA, 640 bp, Zea mays
  Clone ID: MRT4577_39139C.1
gccccccaaggttaaaattttttttaaaccttgattccaaacccgcaacctttatttttttttccaaaacccgggggaaaaatttccggtttgttggaaagggggggaggcacccaaccttttttggggttgagggggggctttcccccgggttaaatccaaaagggaattttaatttaaaaacccccccccctgggattttttaaaaaagggggcttttttgcggccccttacccttaaaaaaaaccccaaaaacccccttttacggtgaaaaaatttgttggggccctttccaaatttttccgatttggggggggttttcctgccagggtttaaagggggacccaaaaaccccagttccccctaaacactgggttttaaacgttttttgaacccaaatttggggccaacccctttttgggaattaagcccccctttttcctttttaggggcttttttgtggggggaaaaaaatttttaaggaaacccctttgccctgggggggggagcaacttcccttttgggtcccccaccccgtttgcccttaaaaggacataattttgatttttaaaaacccccgggcttttaaaaggttttggaaaaaagtttttgggggccccttgttttaaacaggcttttt

SEQ ID NO: 118040 - DNA, 843 bp, Zea mays
  unsure (1)..(843): unsure at all n locations
  Clone ID: MRT4577_3913C.1
tcggcctctcctcgattaacaaatcccccaaccactccagatccccaaaaccctagccgcccccaccctccggcgatggcgaacccgcgcgtcttcttcgacatgacggtcggcggcgcaccggccggtcgtatcgtgatggagctctacgccaacgaggttccccgcacggccgagaacttccgcgcgctgtgcacgggcgagaagggcgtggggaagtcgggcaagccgctccactacaaggggtcgacgttccaccgcgtgatcccggacttcatgtgccagggcggcgacttcaccaggggcaacgggacgggaggggagtcgatctacggcgagaagttccccgacgagaagttcgtgcgcaagcacacggggcccggggtgctgtccatggccaacgctgggcccaacaccaacggctcccagttcttcatctgcaccgtgccgacgccctggctcgacgggaaacacgtcgtgtttgggcaggttgtggaggggatggatgtcgtcaaggcgattgagaaggttgggtctcgcagtgggtccaccgctaaggaggtcaagatcgccaactgcggccagatctgataggtgtcgagcttgccgccgccgccctccgtcgttcgtcatcggctcgtcgtcctcccccctcctccttccatgctcctgttcaattcccttccccttcctcgctctgaataagatggcgtactgtcggtgatctgagaggtggtttgagtacttgagtctgaatttgtgtccctagtgtcgtttgtgtcatctgtccgtttaatcgttgggggtgactagggtttcataggtggccgatccgnggatctg

SEQ ID NO: 118041 - DNA, 269 bp, Zea mays
  Clone ID: MRT4577_39140C.1
cccacgcgtccgcaactattcatccgcccacaccctgtttatttctttctttcaatgcctctttgaaattgtttccattggatttggatgacgctttctgttgctgctagtaggggggaagagcagagcagggaggtatggtgtattcatcagtcattgctgatctctttcttcctcagcagagtcattgctagctggaaaactgacaaagctcgcagtgcttggctgtctttaacagttaactagtagaataaagatgactttttttt

SEQ ID NO: 118042 - DNA, 313 bp, Zea mays
  unsure (1)..(313): unsure at all n locations
  Clone ID: MRT4577_39141C.1
tttattccacaaattcacggggtgggtctttctttttttttttgttaaaacaacaaactaaaaggagagccctaaaagagaccctacacgaatatttcatggacatgacagcacagttgaagatattcaaatctgcccttccagtgcgcacgagttttgtaatgtgggagatcatgcttgtcttatactaagggacactcgaactgacactgccccagctgttaatgttgagaaagctcacagtggagacgttcattgngttgattgcaaccccctcgatgttaactataacttaacagtgtctgcctaaaca

SEQ ID NO: 118043 - DNA, 364 bp, Zea mays
  Clone ID: MRT4577_39142C.1
ggtgctggtcgggggtaacagcgttttctgaactctattaatactaggaaaacaaaacacagagatacatcaacgccacgatcacagccgtgtccatcctcacgacccacacgacgcccactcttctccgtgtgattcgctcagctcgaacaacctccggctgaacgctaactgactgaatgacgcctaactgaacactagctaactgactaacttgactcagactgaaactcaaacgacagggactagccagagttatctaacagtcagtagtctaaagcttacacatgatccaccacctccactctcctatcatttgattatccccgaaaaggtacaactccgatcgcttcagctacttttg

SEQ ID NO: 118044 - DNA, 332 bp, Zea mays
  Clone ID: MRT4577_39143C.1
gaaaaaacggggcccttgtccaggacccgaaaaaaaaggggcccggtggccagggcccgaacccaaaacccccggtggggggcccggccccaaaaaacagcttgggggaaccgggccggaaaaaacaatttaaaaaactcgggaaggacggaaactttttaaaaaccttccttccgggaaaacttcaaaagaccccttccttgggggacccgggggaggaaccagaccaggggggccttggggggggtttagggcgttttcagccgtaggaaagggcccgggctgtgttagggagactccccgggcccggggaagtcctgggaggggggccg

SEQ ID NO: 118045 - DNA, 902 bp, Zea mays
  Clone ID: MRT4577_39144C.1
gcggccggccagccagcgcgcgagaggacgtacggacgaacagctaggcggaggcgatggacggccaacgacgacagcaatggccgaggtcgcgctcgggggctgccgccgcgcgtctcctcctcctgctgctcctggcggtgtccttgggtgggcatggtgatcacggcgcggcggctgcgggcgtcgccccggcagccggcaacggcatgacggagctgcagaagcacgtggcgttcttcgaccgcaaccacgacggcatcatcaccttcgacgagacctaccaaggtctgcaggacgtcggagttggcgctgtcacggccaaagccagcgccgcgttcataaacggcgccctcgggcccaagaccagacctgacaattccaactcctcaagcatggatatctacgtagagaacattcagaagggcaaacatggaagcgacacaggcgcctacgacgctcaaggaaggttcgttcccgcgaagctggacgagatgttcaccaagcacgccaagaccgtaccgaacgccctgacgaaagacgagctcgacgagatgctcaaggataaccgggagaagatggacgtcgcaggatggctgggagccaagtcggagtgggagatgctgtacaagctggccaaggacaaggacgggcgcctgcccaaggacaccgtcaggaccgtgtacgacggatccctcttttaccagctggcggcgcaggggaagaagggctgattcgtttacgttaatttcagtaatcaataacaagcaacgttttttttttttttgtcgtttctgaatgcttgcctgtgggctgtgtaagaaagcgagtgggtcggactcaatggcaggcaacggttttgttttttttatttattttttttttaacggatcggttctact

SEQ ID NO: 118046 - DNA, 224 bp, Zea mays
  Clone ID: MRT4577_39145C.1
aaaaaaaaaaaaaaaaaaaaaaaaaaaacaaaaaaatattaaataaaaaaaaatataaaatgggggggtaaattatagcaacctgggtggaatctcaatgatatctacccctttttctcatgtttaacgtacacttacttggtgtccgaagctaatcggtttgcttttctttacctatatctaatttctttggctttgtctgtattgtcccatacttctgtttt

SEQ ID NO: 118047 - DNA, 284 bp, Zea mays
  Clone ID: MRT4577_39146C.1
tcgaagcggcagtgcgtagagaggatcgtcgaacagaacagcatgaagatggtcatcggtctcgtcgtgtgcctggctctgtcagctggcagcgcctttgcaatgcaaatgccctgcccctgcgcggggctgcagggcttgtaccgcgcttgcgcccgcctgaccaccattattggcgcccgcgggctgtacccctaccccgaggtcctgaggcagtcccaatgcaacccgttggccgtgggtccctactactcctggtgttggtagaccagctccattgtcca

SEQ ID NO: 118048 - DNA, 339 bp, Zea mays
  unsure (1)..(339): unsure at all n locations
  Clone ID: MRT4577_39147C.1
cacacactcactatacactgctctgctgcaccaaggggggaggagctagctcctccctagcgctcagcgncagcaatggccaccaccggcgcgtatcagcctactcaagtccttcttcgcgggctcccggttacattgggtcacgcgcaccaccaccccgtcttccgaggccggggccacccctcgctccggcagtggtcccatccgcacgtccatatgctccntgcacaccccgccctaatacctgacgttctttcggctcagccccatcacagcgtacatcgtgttcccctagatgaccctgcgctacatgacggacatgatcacccacgccaacac

SEQ ID NO: 118049 - DNA, 480 bp, Zea mays
  Clone ID: MRT4577_39148C.1
ggaaccggaaacggcagcagcaacgggaggggcaaaaaacggaagccttcccaggacgaaaagcattagatgggtcaaacccaaacccaaactacaggggtttcaccccaacttaaaatcgaaacacaagattttttctaacgggaaagggaggcccggggcaccgggggaaatcctagctaatcctccgggagcccgccgggggggaccattggagggggactgggggcaacagggaagttgggggcaacatcaaagccaaaatcgggttgaaaatatgaggggaccgcagctgagtcaaattccatatcaaaccccaaagcatttagctcgcccataagttcttcctcggaaacggaataagggaggggggagcttcaaccaaaaggttctgggatctcatggcccacgcccataaaaacgggcatttcatctggcatataaaaaatttcatcaatttggacaggtttaatcattccc

SEQ ID NO: 118050 - DNA, 101 bp, Zea mays
  Clone ID: MRT4577_39149C.1
aaagctgcagtacggtcggaattccgggtcaccaccgtccggactagttcagtcgcggaggaagtcggatctagaatagtacttagtattagatcgcgacg

SEQ ID NO: 118051 - DNA, 505 bp, Zea mays
  unsure (1)..(505): unsure at all n locations
  Clone ID: MRT4577_3914C.1
gcctgtgttgttggttttttttttttttttttttttttttttttttttttttttttttttttttttttttttttttttttttttttttttttttttttttttttttttttttggaaaaaaaagctttgttgttgggaaaaatttaactttaaaagggagggggggggggggttaacattggaaaaaaactggaaatgtaaaaaaaaggggccaacttaaaataaaaaggtttgggggtggaaaaaatttaactttgaaaaaaaagccttgggcagttaaaaccatttttgactcccgaaagggattaaaaaccttggtttttttttcttgaaaagggcaagtggggaccccccaaaaaccttaaaaactttaaacctgaccccaagaatgttttcacaagagtggccctttagggtttcgaccaaatccaaaaataaaaacctaataattctcccgaaaggagtttaggcaaccatttttngggcaaagggaagaaatgtttttt

SEQ ID NO: 118052 - DNA, 477 bp, Zea mays
  unsure (1)..(477): unsure at all n locations
  Clone ID: MRT4577_39150C.1
aaaaaaaaaaaaaaaaaaaaaaaaaaaaaaaaattataaaataaaaaaaaaattaaaatttggcccgttcgccctttgttcctttcctccccccagttgtgggccttggcggccccttcgttgcccccctttggncccgctttcgggggggtccccnccccgttcgccccccccntttgtggggtaggctttaccttcctccggtttgattccaatattaccatattccccggggggggtcccaattttggaaattttttgccggtttccttcctttttttctcagttccatgctgaattgggggtggtccttcgcccgggccctttccttccccgtggtgggggggccgggtgcgtgttcgggggggggcgcccccttgatttttccaggccctttggccttggccccttttttttttgggcggcctgggcccgtttctccgccaattcctgttagccggttgccccggggggctc

SEQ ID NO: 118053 - DNA, 302 bp, Zea mays
  Clone ID: MRT4577_39151C.1
cccacgcgtccgctcacgcgttcagtgacgcgtggtcggtcacctgaatgaacaggaaggtggctcttgttcttggagtgcgtcaaacaaacctttgttatcgcgattactcacttagaggcaacaattttgacaggacagtgaaactgtcctgcacctagtcattccacaccttatttttttcctcaattaatgtctacttcgcggacttgcatagtatcactaatgtggtgcacgggagtcgaaagcttatctaatccacgtaatgaaacagacgaacgtcagcccaccagatcacctta

SEQ ID NO: 118054 - DNA, 298 bp, Zea mays
  Clone ID: MRT4577_39152C.1
gccttcggaaatgtttgaccttcaacctcaatagtctcaccacgagactcgttgtagcaagggatacataaatagtggcgtgtatcaccagtacctacagcgtagtatggtgcgtttcgctttatccgagctccacaaggagaacaatacattggtggaggttcaaaagtaagtttctctactctacagagctggcaagagttctcattctcagaatgacccaatagcttgattcttttcagctttagccttactctgaccaacccacagctttagactgtcaatatgtacatctact

SEQ ID NO: 118055 - DNA, 263 bp, Zea mays
  Clone ID: MRT4577_39153C.1
catactcccctttttgccaatatggcatgtctttcgtctttttaagaatcttatcatatgttctttcaaaaaaccaccgctgaccgcttcttttatcgggaccattgacccctgacaaattttttttttaccaaaaaacagggaacctcgagtttgctatagtgttggtcccattccccacatacttagctgggaacccacccagggctttggggatcagaacccaaacctccaagtgcgttcctctacaagttactttaaat

SEQ ID NO: 118056 - DNA, 355 bp, Zea mays
  Clone ID: MRT4577_39154C.1
atgcaaaaaactacaaaaggggggaacatttatgcttcttttaaaaaaaaactggagtaaccctcatttgaccccagtcggggggatgaaccgaaggaaaaaaaagaaccctcatatgaataatacatcggccctgcaataatccccccggaaagaacaagcaaattccccatacgataccagcacaaccgggccacccttttaaacgtgaactccaggcccccaaaccttttacagaaccaaagcctaaataaaacatgttgttccctgctctgaaacattggggtcctgatacaaaaaaaacatctccatgaaactagagctgaagcctccccccccccgactgggcatatat

SEQ ID NO: 118057 - DNA, 1139 bp, Zea mays
  Clone ID: MRT4577_39155C.1
cgggagacattgcttccctccggacaaaatgagatcagcggcaccaccgtgccaacttcccagcccaaaccccgacgcgtccccacctccgtcgccgatgacaccgcgtgccccgcagcttcggcatcacccgccgcacctcctcctcgccgaggctgtcgcctcctggcaccccttccacaagaagccctgtctcacggaccgctccacggctcccccctcctcggcccgcctccctgatgcggagactccgacgcctgccccctcggggggcggtagcggcggatccttccggtggttcgggctccgcaagcggcgccgccgcggtccgggctcgcggtccgtgtccggccgcagcagcgaccgccggagatccggcacgtgctccgacttccatttcacgtgcggcgccggtggtggtggcggcggcggtgccactgactccagcggggagatgtgggcgtcggatgtcggggaggtgcggatgagggacgtgccgatggcgacggagttcggcccgtcgcctgttggtggggttggtgtctggagtggtggggtcggcgctgcagcggaggcagcagtcaccgattctgaatatgggagcgaacctgggtaccgtggcgacgtggagctgggatatggagatgaaatcgacgaagaggaggaggatgggaggcagcagctgttctggggcggggtgattggagatatgaacaaaatgaaaatcgatggcgacaataactttggggagcagaagagccatcaccgatgcaggcgcaagaagcatgatgtgaggattttggattccttgagttgaagagcttcataaggctaaaagtggtgaagcgtccatgtgttggttgtagtgttccttcactagcagcagctatttatcgatagcatgtctttgttgcagcatccactgatagagcagacaactagttactagtgtttcgacattttgtatggcacagatgtttcataatagttccctagtatctgggcgagaatttccatgagtttatctatgacggcttcaaagtgtagctaatgtgctaagaacatgtgttttcttggttgtttttggtacacttgttaaaaaaaaaaaaaaaaaaaaaaaaaaaaaccccccccccacc

SEQ ID NO: 118058 - DNA, 328 bp, Zea mays
  Clone ID: MRT4577_39156C.1
ggctcaatcacaattaggactaggacaacaaaaacaaaacggttcctgttctgtcctgcagcgatgcttatgtgacacatacaccggctggcagttggtgttatgtccataccgtaaaatggctggcttggtgcctttgaacaccataaaagttatacacacataggaagccatgggctggatcatcgcattccaaacgagaccaagcagcttgtgtcatccatgatccattgaacaatattcgctagaatcgaataggatgacgacggggcgcagacaccaggaagcgcatcattttcaatacaatcaacaactcacagctgaatgg

SEQ ID NO: 118059 - DNA, 292 bp, Zea mays
  Clone ID: MRT4577_39157C.1
agacaattaaggtagctgtagaggccattacacattatggtatgaggttcaaacctgctactttccatgatctacgagaaccattgcttgcgaaggttgtcaaagagatagatggtgcgaagaaaaagaacgaggatgcatggagtcaatatggcttgttggtcacctgctctaattcctaaaagggaccaaaatagggcaaaacaattaatgacaaggggccttcattccttcaatctattcataagatagattaaaggaagaagattataagaatgatgagatcttcgaa

SEQ ID NO: 118060 - DNA, 391 bp, Zea mays
  Clone ID: MRT4577_39158C.1
caaccaaaaaaaaggccccacacaacagttttttcgcccgggaataaaaccaggggggggagagccgaaggggaaccaaaccaaacggaaccagtggttaaaaggaggcccttttggttctaaaccaaccgggggcaacgggggggggaaaaacccccctcccaaaacccaaaggggcccggtttatcctttctttcgtttaagcccccatccttggccaaaaacctaaaggaccccccggaaaaaacatccggcaccaaccctttttttttcccagagaaaatacggaggggaccttcgggcacccccccccccggggcccccccctgttgggggggaacaatcggaacccccccccccccaagaaaaaaaaaaacggggagggttcaag

SEQ ID NO: 118061 - DNA, 277 bp, Zea mays
  unsure (1)..(277): unsure at all n locations
  Clone ID: MRT4577_39159C.1
ngcgacagcaacaacagcaccgaccagcacngagccaacaagaagnggngaacccaggggccgnacagcaacagcaggggcaggcaagcaacccacaggcacaggcaaacggagcagcagaccaacaacaacaacaagagcaacaggnncggccagcgcncaggcaacnagccanggagaacccngccgccgaccgacaacagcaacaacagcngncaacnagcccgcacgaggaggggaaagcaccnacataccngcaacaacaagggcngcaaca

SEQ ID NO: 118062 - DNA, 261 bp, Zea mays
  Clone ID: MRT4577_3915C.1
ttacaaggcaactggttgggatgcaccattttgtttggtgaatcccaaggtggatacagcccacagcttactaagcgcatctaggaaaggtgcatttatgtagaaacaccatgtcattataaacccaaaattgcgtacctcttaacaaagtcgtgttacattgttccattacaattactcatgactgttgttagggaccgcaattctatgcttagatctgtcaaccatgttttatctagattgatccattactggatcaac

SEQ ID NO: 118063 - DNA, 595 bp, Zea mays
  Clone ID: MRT4577_39160C.1
gcttgaaaaaaaatgtctgaattgaatcattgataccatatcaagtatgagtttacaaaatcaaccacagccaccacatgggatgtttggccaggtttgcctaaatcccgaagaagtaaaacacaggggatacttatggtggcacgacaattctaaagactcttaaaattctccctgataacaaaaatgtttgttcaagttgtcgccgtgatgctcagccaaacatattgggaagaggcctcactgccatgaatgcatcgaccatctgcacaaaacagaatcgtcaaagcattgcaggaaattcatacaaactcacatgaggccgattatagtttcattcagtctgggaagtgacaactacaaaactatgtgcaaatactacacaagcaatgccatgcatgtgcgcgcgcaccacacaagacaaacagattgttaatctcgcttggaatcaaggtgccagaaaccaatcgtgcagggtcatacatttggtatcgaaaaatgacatacgtagctctcctacgtctttcgataaaaaagaaaccaatatgcaagacagcagatctaacgaatcatgtacctcttcggtcacttgagc

SEQ ID NO: 118064 - DNA, 194 bp, Zea mays
  Clone ID: MRT4577_39161C.1
ccaaaaaaagccgacgccgaccaacctacttaattctcgacccacccctttggtctttctttgtgtaatataccctgggggcgtcacattgtttgggggcctgagaagatgcctttggaaattcaagatagtgaggttaacattgtgatcgtgtgacttcggcccaaactaaacaccttgttacacgcatggtg

SEQ ID NO: 118065 - DNA, 362 bp, Zea mays
  Clone ID: MRT4577_39162C.1
cccccgcctgccgccgcctcgtgctctcgtgctcgcgcgaccggatggaggatattcggacgacgactccaccgcgccaaccgacccctctcgcctctctcggtctctcctccgactcaccccgcgcccgcggcgagaaataaaagagaaatcccccgacgaccccgacgcgccacccgcaaatctcgctctccccgctgcccgcccgcccgcaccccacccctcgctcgcgcgccgcggcgcccgcgcgatccgatggcccccgccgccgcagcagcagaagcagcggggccctcgcctcgccggcgcctcgcggcggccgtcctcgcgctcgcgctcgcgctcgcctgtgtcctcgcgca

SEQ ID NO: 118066 - DNA, 2047 bp, Zea mays
  Clone ID: MRT4577_39163C.1
ctcgaggccggccgggccgcgaatatcataattctcttgagaggaggagaagagaggagaggacagcaccggccccgcgacagagagggagaggcagaggcagccagaggcggaggatccgggagcaacctcgccggcggccgccgcggtgatgccggtgggggagttggctgcgcggccaggcggcgccatggcggcggcggccgtgggaggggacgacgctgtcgtcatgcagctggccgccgccgagggcgaggagaccgtcatcaccgtcaactgccccgaccaggccggcctcggctgcgacctgtgccgcaccatcctcgagttcggcctccgcatcacccgcggcgacgtgtctacggacggccactggtgcttcgtggtgttctgggtggtgccccgctcctcgtccatcagaatccggtgggcgagcctcaagaaccggctcatgtcgatgtgcccttcctcctactccatcccgttctacccggacatgagccagccgggcccctcgcagttctacctcctcaagctcttgtcaccggaccgcaaaggattgctgcacgatgtgacgcacatactatcagacttggagcttataacccacagagtgaaggtgtcgacgacgccggacggaagagtcgtggacctcttcttcatcaccgacggcatggagctgctgcacaagaaggagaggcaggaggagacctgctcgacgctaatcgctgccctgggcccttccataagctgcgaggttctgtcggcggaagggttccagcagggattctcctctctcgcgccgaagatcgccgaggagctgttccgggtggagctagcaggcgacggcgagatgtgctcgagctcgcttattagcgcagagctgaagaaggtccagactgccaccattaatttcgacaactccctcagccccgcgcacacgctggtccagatcatatgcgccgaccagaaggggctcatctacgacatactgaggacgatgaaggactgcaacatccagatattttacgggcggttcagatcggacaagaaaggcgggcggccaggcagcaaaggctgccgagaggttgacctgttcgtgaaacaagtggacggcaaaaaggttacggatcctgagaagcaggacgctctgcgggcgcgcctgagatccgagatgctccacccgctcagggtcatggtcgtcagccgcggaccggacacggagctcctcgtcgccaacccggtcgagctctgcgggaagggacggccgcgcgtgttctacgacgccaccctcgccctgaaagcgcttggggtctgcatcttctcggctgagattgggagacaggcagcgtccgagcggcagtgggaggtgtacaggttcctcctggacgacagcagggagttcccgttgacgaacagtctcgctaacaggaaccgtgtggtggatagggtgaggaaaacgctgatgggatgctacaactagtagggctcctctcctcggtgtcgacctgtctgtctctgccaagaataatgcaaagcttcaaggcaactaactggtgtttctagactccgttgtcgtcgctgcccacagctagctgcctgcttcgtcgtctcaaccccgtcgcagctgcgtgggatttcagagctagcacaacaaagccgtgaatgacttcgacacacacaaatgatgctgcctgtgtgtgccatggatccgttgtatacatgctgagaaagagtagacagagagagaagagcatgtttggtgggaggtgcgagccgccggagcaatgattgagcttttgtttggttcaggggggtgggattactggatgctgacacagatacatgaatctctgcttcaccaccttgtttatatctccttccacttccacacacaccttccctgtatatgattgccccgctagtagcactttgtcttcaagagagggagacccttgtctcctcatgcatgtaatgtaagcgcagtttgtacttggatgcatgctaattttacttaactattatgcagagaaaaaaaaggtgttcc

SEQ ID NO: 118067 - DNA, 2388 bp, Zea mays
  Clone ID: MRT4577_39164C.1
ggccgggccgggtttggtggtctgtcgtcacgcgcaggctgcgggcaaagcaatggcaggtgggccctgtcgcgctggccgatccagcgctgactcagcccccgcaccgcatacatgagagatgagaagccgccacccgccgctgcggctgcggcgcccgcgccaccacgagtgacccatcgtgctcggatcgtacggcctcaaccgcaaaatccagtatttaagcgctgcggaacactcgtcgagaggagaggacagagcagaggaccaccaccggaccgggctggagctggaggcgtggcggcgccggcgcgtccatcaggaggagaaggggcagggatggtgctgggcggcggcatggcggcagcggccgtaggcggggacgacgccgtcgtcatgcagctgggcgccgccgagggcgaggagaccgtcgtcaccgtcaactgccccgaccagacaggcctgggctgcgacctctgccgcaccatcctcgagttcggcctccgcatcacccgcgccgacgtgtccacggacggccactggtgcttcgtggtgttctgggtcgtgccccgctcctcgtccatcaaggtccggtgggcgagcctcaagaaccggctcatgtccatgtgcccttcctcctactccatccccttcttctaccgggacgtgagccagccagagccaggccccttgcagttctacctcctcaagctcatgtcgccggaccgcaaaggattgctgcatgatgtgacgcacatactatcggatctggagctcataatccacagggtgaaggtgtcgaccacaccggacggaagagttgtggacctcttctttatcactgatggcatggaactgctgcacagaaaggagaggcaagaggagacctgctcggcgctaactgcaaccctgggcccttccatcagctgcgaggtcgtaccagcagaagggttccagcaggggttctcttccctcccgccggagatcgccgaggaactgttcagggcggagctagctgacactgacagcgaggtgtgctcgagcccgctcagcgcggagctgaggaaggtccggacgacggccactgtcaacttcgacaactccctgagccccgcgcacacgctggttcagatcgtctgcgctgaccagaaggggctcatttacgatatcttgaggacgatgaaggactgcaacatccagatattttatggccggttcagatcagacaagaaagggtcagccagcaaaggttcatcaggttgccgtgaggtggatcttttcgtgaagcaagtagacgggaagaaggtgactgatcctgcgaaacaggacgcgctgcggtcacgcctgaggtccgagacgctccatccgctcagggtcatggtcgtcggccgtggacccgacacggagctcctcgtcgccaacccggtcgaggcctccgggaagggacggccgcgcgtgttctacgacgccactcttgctctgaaggcgcttgggatctgcatcttctctgctgagatcgggaggcaagcggcgtccgagcgccattgggaggtgtacaggttcctcctggatgacagcaaggagttccccttggcaagcagcctcgctaacaggaactgtgtcgtcgatagggcgaggaagacgctgatgggatgctacaactgagacttgggtgggtgccgatctgtatctgtctgcaagaatccaacgaagcagtgcaagtgcaatgcaaggcgtcccccatccacagatgcattagcatgctgtgctccttccaggaggtctgcctgggggatggtttgaaaccagagttacgcgcaggacgctgatgggatgctacaactgagacttgggtgggtgtcgatctgtatctgtctgcaagaatccaacgaagcagtgcaagtgcaatgcaaggcttcccccatccacagatgcatttgcatgctatgctgcttcctggagttgtgcacggggatggtttgaaaccagagttgtggacagcacagactggaatgaatgaacatcttgctgccatggatccattgtctacggaaaaaggagcatgcttggtgtggaggtgcgatgcaatggcgggagctttttttttttgataatggaagaaacatgttccagccttttgcatcatatcaaggatgcatatggcttcatagcatattcaacctgacaaaagcagcaacaagtagcaatgaagcacatggttctcatgaacaataataagaaactaagaggcctcaatcctagcattgcatcgccatccatgtattgtaaaaatgttcattgccaccacttccaatgcgtgacaaatatctttgatatcttggtgtaaaaaaaaaaaaaaaaaaaaagctattgtttaaagaaaataaa

SEQ ID NO: 118068 - DNA, 766 bp, Zea mays
  Clone ID: MRT4577_39165C.1
aattcggcacgaggcagtagcgctgtgggatctgagcaagcgtgcgttggttacccgagtgaagtctccagagaagtgccttctgtattccatgagaatgtggggagactctgttagagagtttcttgtggcatccgggaccattttaaacgagattctcatatggaaattggcaccgcaagttctgggatcctccatgttcatcttggtaggctcaaggagcatgaaggctcaatattccgaatagcttggtcctctgatggatcaaagtttatgtctgtttctgatgaccgtagtgctcgcgtgtggactttgagtttcaaatcacagggtttcgccaatcatacagccagtcacgacaatgttgaaattataccaaaactcacactttttggccatagtgctaggatatgggactgctatgtttctgattctatggttataactgctggtgaggattgtacttgttgcatttggggaatggatgggaagcttatcaagatgttcaaagaacacattggacgaggaatatggcgatgtttatttgacccacgctcactgcttgtggtcaccgctgggtttgattcagcaatcaaagtgcaccatctatgcaactccatttttcatgacatagtggacgataaaaaggtctctggcctgaactatgattctgagatctttgtagtatcctctccttctgtttcggggcagtatggtcccctggataggtgtgatgtacttctttatggtttcacaaattacatga

SEQ ID NO: 118069 - DNA, 115 bp, Zea mays
  Clone ID: MRT4577_39166C.1
tcgtgccgtgctgccgactgttaccatgcagcgcctctcgcgaaggctaagccttttctctataagaaccagtatcgcggcatccggcagctgccgtggtgcatgttggctgtgg

SEQ ID NO: 118070 - DNA, 2940 bp, Zea mays
  Clone ID: MRT4577_39167C.1
atggagactatagcagtggcagggtcactgtcgttggaggccgtggcgctcgcattggcatcagcgattgtggctcatggggaagttggacaattaatatcatcggacgaactacccgacaattatccgaatcttgagctcgatgatgttgccggaaaaaagatcctgagactgcgcgttcctgccaagaaatccagttggcctgacacatcattacaagcagcaggactgccatttgttctaccccataaaatgaagtccgttgatcgtcctcccgctaatcccaaacgcataacaattgagtcaagccaagaattctttagtgttgagataccacggccggcctctattggagttcctccaaacacaaagcattctgatcagtgtcctgcacctgtcgagaaaccatctgttatttatgaagccaatgaacaaactggatctggcaatgacgacgatgacttcatgacacctacaaagaagcgtaatgctgctggaagtcatatgaatatcttacggaagacatgcacaaagaggccgaaagtattagaaactccacggcagaaactcaatgttagatgcaaccctcaggatgtgattataactattaagatattgaatgagaggcaacgacaagccgttgctagaaaaggattttccaatattcttgacatgacacttgatgcactgggtagccgttctcatcttcgttggttgatggataagttggaccacaaggatatgactattcgccctggagttggcaaggaactaaaaattacgaaagaaactgtccaccttatactaggccttccgaatgctggcggtggtaagccactaggaatcgatgaagcagtggcgggtaataacttgagggctgaacttggattgtccaaggatgagtttgttgttgcatctcttcaggaccgattgagaaaaggaaatgatgatgacctctctatcagatgcttctttttgatattgttcaatagattgttgttccccacttccagctggggcatatccaaccatgaagtgttattgacggaagaaatggaccgtttccacgaaatagactggtgccacttaatttataatgacctatgtgaagctgcacaaaagtggcatacaagaagcacttctaatgtgtccaccacgatttatggatgctcagttgtcatactattgtactatttggaccacttgcatgatgctgcagccccccccaataaacgtggcacaccccgcataaaattctttgataaaaacattatccaagctctgacaaaagctgataagaggaagccacgccaaagtggtgaaccttttggccattgtgagttccgaagcttttctgaaacttgctattctgctgtccctagtgtgcagtttcaatcagagcatagggacaggacaaacatttttgatgtccctcgtcccgatccttgtggtcatcatactattcatatccagctccctttgatcaaggatatgctttcaagtaagataaagcagctccaaccacgtgaccgaccaaaattcattgaaaagtttgttgagtatgattctgaagttggcaaagcgtgttcagtcataaaaagtactcttaccaagatggttgtgaagcagtatgaactagcggacacatttgctgagttaattgatgatgtccttcgcgcggagtctggcgacccagacaatgttgcggaagcgcctcaaacagataaacctccagatatatctcagcatatgtcgtcagaggaacagacccatgagggtacccagaatacccaggacatgactatgccttcacaacccaatacggagttgacaggtacccagtttgaagaaatacacgaaaagcaacaacaaatgcgtcgtgcatttgagggctgccctgacgatttggagacgaacataaccgcaaatgctgaagaccagggaggagacattggtccatctcatgacactcctactttcacgggcccccttttcgatcagacacctagtggtcatgctgcagatggtgaggaaacacatagcttgcacactacacatgaccactctgtgccacctttaacagaattggactgtgctcggtcgcttcgtgattttttgtgctcctcaaaagctgacccaaacaggaatatcatagaattcgatgaatgtattggaaattgtctcgatatacaacaatcatttgcagatgggatgtgtctggatactgttttcatgcagtgtttcatcatgggttttcgccatgacaaaaacaatatttgctcgtccatcgacaaagacagacttgtactggatgtcaatgttggtattctcctcaactttgaggagcatgaacggtacagtaagtctcctcagatttttgatcaaactgtccttgatgcttatctggacaagaccctgccccaactggacaattttggtgactacaaaacgattatggtccctattcttcatatgggacattggacattgtatgtcataaatatccagttacgatgtattcacatattagattcaaatccatatggtccggagttgggtggtacttcatggaagatgtttcattactccctaaaggacatagggaccaggaaactaccatgggctagggttataatgaacagattgaacaaatctttgcaacaagtccggcccaattcacgcatcccaaaatttggaaatttcccaattgacatgccacctatgtgtcccaccatgatagctggctctaatgactgtggcttttttgtcatgagatacatccagtactatgaccatacagatggttctatcaagcaatttataaaacgagaaaactctggtgacctacgatctctggctctacattacctcaccttccatagcaagaacaagtgcctcccgttgcctctagaaattcaaaaattcaagtttggacgctag

SEQ ID NO: 118071 - DNA, 906 bp, Zea mays
  Clone ID: MRT4577_39168C.1
ttgtaattgtatttaatcagatcaatagaatataaaaaggtagagtatatttggcagcaccaaaaggtccaaaactcagtgttcatgttgagtttttttgtgagcatttgggttatccacggatcatctccaaaactcagtgttcatgttgagtttttttgtgagcatttgggttatccacggatcatcttctttgtctccaacaaggcatgccgacaagtagatgattagatttggtatcagagccactatgttgtcaaggccgtgctagcagtcatgcagcggaacgaactgcctcggcaccgcattgccgacaggagatgaggagtggctctagcaatgacgactacaacccggtgatctaccgggtcatgagagagtggcgacagtaggcagtactcgttgctgaccaagaccaactactattcatggcatgtggatggcagtgaacatcagcaccgtcaactacactgacaatcgcaatgctctagaagccatcacccttggtgactagttggcgtacctccgaagatgcaaggggtgatcgcgagcaaggcaaccgctaagattgctagtcgcactcaaaaaatgcacctcaccatggaccgaatgcgccaagtgaaggcgaacacgctacaacgcaagttcgactcgcataggttcaacaacggctcaaggcaatgcccgctgactcaaggtgacgacagagccacagaggagatgacatcaattgaggagaacaagacgtgggctcatgtcgaccatcctccaagccatcacccaattgacatgaagtgggtttacaaactaaagcgtaatgagcaggcatcatcgtcaagcacaaggcccagattgtcagcttgtcgccaaggggtagatccagcagtcgggaatagaaaacgatga

SEQ ID NO: 118072 - DNA, 556 bp, Zea mays
  unsure (1)..(556): unsure at all n locations
  Clone ID: MRT4577_39169C.1
cacccctccccataaatgcactgtatcacccctgccttcctctggagaacttgactgtctgccctgtctgcaggcactcgtcttcttcctggagagaaaaagcagaagacaatacaaagatgtccaagatggcggaggagaaggcggcggcagtgggcggactcggaggagccggggcggcggacgcggcgcagcagcagcagctggcagcaggggaggccgcggcggcgcgggtgcggcccgtggagacgctgcttcgcgcggcaccgctggggctctgcgtggccgccatgaccgtcatgctccgtaaccagcagagcaacgagtacggcgccgtcggcgctcggcagcaagggcgtcgagatcgccgcctacccgcgctgaagccgctggaggaaggcctcgttgcaaatctctgttatgcgtagtcgatcatgtaataatggcttatcgcatatatacttcgttgatagtttgctgtcacatatgattagtacagtgctgctgctgctgctgctaaattgtgcttgactgggtaattatatagtttgcntca

SEQ ID NO: 118073 - DNA, 423 bp, Zea mays
  unsure (1)..(423): unsure at all n locations
  Clone ID: MRT4577_39170C.1
tcgccgccgccccgccgngnngctcgccgacaccgccccgccggcagccaaaaggccgnncaagaggnncgnggagagcgggcgagcggcccnngnaaacnacggcaaggagnanggccgccncgncgncaacgncgacgncgncgaccagaacagggcncnngnngangcccccgacanggnncgnngccaaaggagcggggggggcnnncccngacngacancaaganngacannaaacgngncccaaagaagacnacacngancaaggcaanggaggaagcngangngaaaagcaagngggaganaagcatanggggcaagaagcnganngnncagaagaggagagcancacncaaggacnnngacaggnncaaggncangnnggcgaagaacaagaggggcggngccannaggcaagag

SEQ ID NO: 118074 - DNA, 591 bp, Zea mays
  Clone ID: MRT4577_39171C.1
cctcctgtccctcatctcctcgtaccgccttttcagcgcctacgaggcgcccccgtcgtcggcgctcggcagcaagggcgtcgagatcgccgcctacccgcgctgaagccgctggaggaaggcctcgttgcaaatctctgttatgcgtagtcgatcatgtaataatggcttatcgcatatatacttcgttgatagtttgctgtcacatatgattagtacagtgctgctgctgctgctgctaaattgtgcttgactgggtaattatatagtttgcatcaaaaaaaaaaaaaaaaaaaaaaaaaaaaaaaaaaaaaaaaaaaaaaaaaaaaaaaaaaaaaaaaaaaaaaaaaaaaaaaaaaaaaaaaaaaaaaaaaaaaaaaaaaaaaaaaaaaaaaaaaaaaaaaaaaaaggggggggcgttttttaagagaaccaaattttactcccccgggtttgcaaaagaaaaattttttttttggggcccccaaaataaaataaatggcccgcgttttaaaaacccgggaatggaaaaaacctggggttccccaaattaaatcccttggaaaaaaacccctttttcccaggtgggag

SEQ ID NO: 118075 - DNA, 1344 bp, Zea mays
  Clone ID: MRT4577_39172C.1
cctcgaggctcggcacaaaaaaaaaaaaaaaaaaaaaaaaaaaaaaaaaaaaaaaaaaaaaaaaaaaaaaaaaaaaaaaaaaaaaaaaaaaaaaaaaaaaaaaaaaattccttaccccttctcgctttgccgtgacctcctccctctctcttcctgcgccgactaggtcgacgatgaccgcgacgagaagagatttgaccgctgggctgatctgctcacccctccccataaatgcactgtatcacccctgccttcccgcgagttctccagagagagccgggagaacttggctgtctgccctgtctgcaagcacctcgtcttcttcctggagagaaaaagcagaagacaatacaaagatgtccaagatggcggaggagaaggcggcggcagtgggcggactcggaggagccggggcggcggacgcggcgcagcagcagcagctggcagcaggggaggccgcggcggcgcgggtgcggcccgtggaaacgctgcttcgcgcggcaccgctggggctctgcgtggccgccatgaccgtcatgctacgtaaccagcagagcaacgagtacggcgccgtcgcctactccgacctgggaggcttcaagtacctcgtctacgccaacggcctctgcgccgcctactcgctggtatccgcgttctacactgccgtgccgaggcctgccaccgtgtcgcgctcctggctcgtcttcctcctcgaccaggtgttcacgtacctgatcctggcggcgggcgcagcggcggcggagctgctgtacctcgcctacaacggtgacaaggaggtgacgtggagtgaagcttgcggcgttttcggcagcttctgccgtcaggcgcgcacctccgtcgccatcaccttcggcaccgtcctctgtttcatcctcctgtccctcatctcctcgtaccgccttttcagcgcctacgaggcgcccccgtcgtcggcgctcggcagcaagggcgtcgagatcgccgcctacccgcgctgaagccgctggagggaggcctcgttgcaaatctctgttatgcgtagtcgatcatgtaataatggcttatcgcatatatacttcgttgatagtttgctgtcacatatgattagtacagtgctgctgctgctgctgctaaattgtgcttgactgggtaattatatagtttgcatcgttcttgtgtgtcctggatggattgagcttaaaattcttattaaaattcttactacagacgtagtttctgtgcaaaaaaaaaaaaaaaaaaaaaaaaaagcaaatcgcgagggggtaataatatatgattcacacttgaataccaacgataacaagtatggataggttagtaccg

SEQ ID NO: 118076 - DNA, 184 bp, Zea mays
  Clone ID: MRT4577_39174C.1
tctacccactcatcctcgatattcttactataaaatatcacatatttaatccaacctttcacatatacaacacttggcaatttcaagatttctatactactcctctacattatcaaacatttatacaatgcaaaaatactaactcttgcaacaactttcttttaatcttatttatatattattt

SEQ ID NO: 118077 - DNA, 237 bp, Zea mays
  Clone ID: MRT4577_39175C.1
cccactcatgcggctcccaatcattgcgattatgcactggttcctactgacactctggtgggtcgtgcatggcgcgagggaagaaccaatgggcatctatgcctactcgtcctggcctcctgggtccttgaacctcaacaagccggcctcaacgggcaatgccgagccttacacaactaacgctgtacacagccgcatgagcatcgctctgcacacgcactagtacgccgacaaccg

SEQ ID NO: 118078 - DNA, 596 bp, Zea mays
  Clone ID: MRT4577_39176C.1
aacccccgcgtgcgcccacgcgtccgtgaagagcgccttcaccaacatttttgttaatggactcggcgaggttgacagggtgagcatcgaccggtccagcgaccctggcgccgtcctgattcagctcgccagggacacggagcacctggccttgttcgagcgcaggaacttcagcccggtgctgaggcggtggcaccccgcgccggtcgcggtggccgcggtcaccctgcacggctgcttcggcgtcgtgctgaggcagtacctggccaaggtgaccatcctcaccgaggagctcgtccgcgtgctccactcggcaagcaggctggagaaggcactggcgcagatgacggccgaggacgcggcggactgcgccgacggccgggccaagggtatcgtgggcgacatggagcccttcgaggtggagtccgtcgtgatgggactgctcaaggcctggatggacgacaagcttgggcttggcagggactgcctcctccgagccagagacactgagagctggatacccaagtccaaggaggaaaccgttcgccgggtcggcatggagctgatgaagctggctaagttgaccatcgatgagt

SEQ ID NO: 118079 - DNA, 218 bp, Zea mays
  Clone ID: MRT4577_39177C.1
gctttatcctttactaaccacgggtaattattgatgtttgagtgtaacacacacactatacatgccccaaaccctccagacaacttgaataacatttttgccctaacataactcacacactactgaaacaatactcacacctcacaattcactagacgtcttgggtgaccacatcatcaaatacatcctattgaaatctaatcagtgtgcaatgatgc

SEQ ID NO: 118080 - DNA, 573 bp, Zea mays
  Clone ID: MRT4577_39178C.1
gaccggtaatattcgccgcggagtgttcgagaatcggaggcttggacttcgagtgcctcctcggtggcctcgcgtaaagcacggcggcgcgaagacggctgcggaattcaggtgctttccctgctttcaacgccggctggtttcgtctgacccgggaacattgcttggtaagcgcacccagctccaacacacctcgccgcccaagattgacctgcttgccaccacatctagcgcgcttaccttggccacacgcccaatggaacgaaccatttcatcgcgttggcgttgctttggagtgacgtcaggtgtgtgaagctgcccaactgctttcttcgcgaggtacttgcacgggacaattgacaaagcctgtatggtccaaggaactgaagttgcagacttcctccgaaggaatagtttttcttcctttcaccggactacaattcggtgccattcgtcaggaattgagggtcaactgactaactctgctcgcttctttcccaagctcagggttcctccacaactgtccagtgttcatcgcaagctccttgcaggtttacgatggaactaggaaac

SEQ ID NO: 118081 - DNA, 1275 bp, Zea mays
  Clone ID: MRT4577_39179C.1
ggccgctttttttttttttttttatccttgaatgtgccaatttaacaaaggaaaaggcactgcaaaacatcatctgctggctggcactaaggaatgacaaaatatatcatatccatgctacaaggaaatgaaaagatgacagacatctcaaaggatttttatggaatatatctaaatttccgacaggagcaagtcgagcaaatgacgtggatatatgttctatcatgtgagcttagtcctttgtcaccactcaccactcaccaggtcgccagcatgccacaatcgccggtttttggtttcagtctccctgtgcatttccactcctacagtcccacagagattacaagaataagcctcagctaagtcaactgctcaacgtatttgtttgggaatcaatgcccagcctgcagactaaatcccatacacggttcacaactccatctgacataatcgaaaatgcatcttttgcagctctttgacgtgctcccagagtgctggcatcaccaagcagttcttttagtgtttgcagcagttcaaattctcctgacacgtcaggcgtaggagagcccgcgatgtgcgccgagctgagcaggcagcaaaggcacatgcgcagcaggtgagtggctaggatggaaagtagtcatctgattgattgcgcatgcagcaaacatagaaggcgaccgcctgattgattgtgcatgcagcaaacatagaaggagattggctaggagagaaagccgcttttttttttttttttttcgctgattagtatccttcctattttgattagatcttcaatcaaggagaaccttctccatttgtgtaagccgccggctatatatagccatgtatggtggcacttggaaatcaaccaagaattacctatcaagtctcttcctctcttctctaaaccggcgaccaggagaacttctcctgtcgacgggtagctcggcgtgggggcataaccctgccggcaaccacgggtcaaggctacgatctacgtagccgaggtcctcctaccttgggcaatacccggccggacatggagacatttacactgagggctagtctggcaatcatattttcccaagggatctctatttctcctaatagaaattaatcaatttgcccttagaaaaacaagaatctgtggcgaaataagagggccaaactaggcgcctgaagtacaaactatagtaggttcattgcggcctctccacgcttccacatcaagtggatcgacctctcgatgggcctgagcatgcatctcatgaa

SEQ ID NO: 118082 - DNA, 104 bp, Zea mays
  Clone ID: MRT4577_3917C.1
cgcatgcgtttggtttcaccaactggaagtggtctcccgcaaaatccacatccgacaaaaggtgcgcactgacaacgtggacgtgatggaggtgctgatagtgc

SEQ ID NO: 118083 - DNA, 221 bp, Zea mays
  Clone ID: MRT4577_39180C.1
ccatactatgaagctgtcgcctgcgccggccggaattcgtgaccacctcgcataaacatcggtttgctaattatagtctgtcttgacaaggaaggttgtgatgctggagaactgatgggttgagacgcgaactgggcatctgccttgtcataatcactacagcttagagtgctgataagatctgggagattgcgtggcgagtgatagcggcagtcgttgat

SEQ ID NO: 118084 - DNA, 443 bp, Zea mays
  Clone ID: MRT4577_39181C.1
cggacgcgtgggcggacgcgtggggttttggggagagcgggtataagcatcaagttagttgctgcgagaagataaggaaagataaagttcaaatatgtacggtacctgtttttcagcttccaaggttgcttcataactttgtagtgcagcctctagagctctaaatgtacgatttctactccagaatgatgcgaaggtatacctgatccttcctgaaaaattatatggttgcttaagtttaatggtaaaattctcttcatagttctccatcatggtaggtgaaaaaacatggcacatatgtgatggtgctttgtctgaaggagtatttatgcttgaaaatagtaaactcaacctctctgattgaagttttcagaaatcttgcagacaaaacccataaggctacttttataattaggtatgtgcttgcatctaacttattaaaa

SEQ ID NO: 118085 - DNA, 262 bp, Zea mays
  Clone ID: MRT4577_39182C.1
cagcggggctaccatatcaccccgcgcacgctcggactacgcgcgccgcagcctacagcgctggtgagacgagtacggaggagcaacacagggatggtcggttgcctcgaggacgagcaggaggacccgaacttcctcaaaccaccacagcaccgatcgcactacgggcaccgccaccgctgtcccttccagcgtcggtgagacgagtagggaggggcaatgcagggatggacagtggcctggacgacgagttggaagacgc

SEQ ID NO: 118086 - DNA, 761 bp, Zea mays
  Clone ID: MRT4577_39183C.1
gtcgccggcggcgtcggcgccgccgtgggcaacccggccgacgtggccatggtgcggatgcaggcggacgggcgcctgcccctcgcggagcgccggaactaccgcggcgtcggcgacgccatcggccggatggcgcgcgacgagggcgtgcgcagcctctggcgcgggtcctcgctcaccgtcaaccgcgccatgatcgtcacggcgtcgcagctggccacgtacgaccaggccaaggaggccatcctggcgcgccgcggcccgggcgcagacgggctcgccacgcacgtggccgccagcttcaccgccggcatcgtcgccgccgccgcgtccaaccccgtcgacgtcgtcaagacgaggatgatgaacatgaaggtggcgcccggcgcgcccccgccctacgccggcgccgtcgactgcgccctcaagaccgtcaggtcggagggacccatggcgctgtacaaggggttcatccccaccgtgatgcgccaggggcccttcaccgttgtgctcttcgtcacgctcgagcaggtgcgcaaggtcttcaagggcgtcgagttctgagaccggcgacgaggaaagatgatgacgacaacaaacgctgcgctgctagttcgtcaccgcgttcgctgccaagaataacccgctgccaccctacctagaggcggcgactactattacgccctttgctttcatgcgcttcctgcatcctgttgtgtctggatggatttgaccaaatgcaaattgccaacatttttatt

SEQ ID NO: 118087 - DNA, 1572 bp, Zea mays
  Clone ID: MRT4577_39184C.1
ggccgccgtggcgccgcagccggcgctgcgcccggcgctcgccttccacgccgggggccacgccgtcgcgctcccgcaccaccaccaccacgacatcccggcgccaccgcggaagcccgggccgctggccgtcggcgcgcagatcctgcggtccgagggcgccgcgggcctcttctcgggggtgtccgccaccatgctgcggcagacgctctactccaccacgcggatggggctgtacgacatcctcaagaccaggtgggcccgggagaacggcggcgtcctcccgctgcaccgcaagatcttggccggcctcgtcgccggcggcgtcggcgccgccgtgggcaacccggccgacgtggccatggtgcggatgcaggcggacgggcgcctgcccctcgcggagcgccggaactaccgcggcgtcggcgacgccatcggccggatggcgcgcgacgagggcgtgcgcagcctctggcgcgggtcctcgctcaccgtcaaccgcgccatgatcgtcacggcgtcgcagctggccacgtacgaccaggccaaggaggccatcctggcgcgccgcggcccgggcgccgacggcctcgccacgcacgtggccgccagcttcaccgccggcatcgtcgccgccgccgcgtccaaccccgtcgacgtcgtcaagacgaggatgatgaacatgaaggtggcgcccggcgcgcccccgccctacgccggcgccgtcgactgcgccctcaagaccgtcaggtcggagggacccatggcgctgtacaaggggttcatccccaccgtgatgcgccaggggcccttcaccgttgtgctcttcgtcacgctcgagcaggtgcgcaaggtcttcaagggcgtcgagttctgagaccggcgacgaggaaagatgatgacgacaacaaacgctgcgctgccagttcgtcaccgcgttcgctgccaagaataataacccgctgccaccctagaggccgcgactactattacgccctttgcttgcattgcatcccgtgttagacttgtgctcatgcgcttcactgcatcctgttgtatctggatggatttgaccaaatgcaaattgccaacatttttattaattaaaattgctaaaaaaaaaaaaaaaaaaaaaaaaaaaaaaaaaaaaaaaaaaaaaaaaaaaaaaaaaaaaaaaaaaaaaaaaaaaaaaaaaaaaaaaaaaaaaaaaaggaagtcggggcccttttaaaggaccaaagttaacaaccccttccttgcaacgtaaaagtttttttatagggcaaccaaaataaaattaactggccgggttttaaaaacgtcgaaactggaaaaaccctggcttacccaaattaaatccctttgaaaaaaatccccttttcccaagttgggtaaaaacaaaaaagccccgaaccaatcgcctttccaaaaatttgcccaccctaaatggaaaatggaaccccccttttagcggccattaaaccccggggggtgtggggttaacccccaggttaacctttacatttgcaagcccccaagcccccgctcttttcgtttttttcctttcttttt

SEQ ID NO: 118088 - DNA, 451 bp, Zea mays
  Clone ID: MRT4577_39185C.1
cggcacgcgtccgaaacgtcctcaacggtggctcgcacgtctttttccgccgctttccaagattcagggctgtccttgtgaggcccctaccttctaccaggccatgcgccagggagccgaagtctaccagaagctcaaggcccttgccaagaagacctacggacagtccgctggaaacgtctttgacgagggtggtgttgcccctgacatccagaccgccgaggaggccctcgacctcatcaccaaggccattgaggaggccggctacactggcaagatcaacatcggcatcgatgtcgcatcaagtgaattctacaaggccgacgaaaagaagtgcgaccttgacttcaacaacccagacagcgacaagagcaagtggattacatccgaacaacttatcgacatgtacaagtccctgcccgaaaagtaccccattgtcaacatcgatgac

SEQ ID NO: 118089 - DNA, 329 bp, Zea mays
  Clone ID: MRT4577_39186C.1
gccgggctgggtgtggctggggatgaggctgaggccggggcggttgactagggtagggggatgatggcggcggcagatgaaccggcggcgtcacatgcacccccatcctgagccagaccgtcaagttcctgaggcatcattgcacaacggacggccacgccctactgcccgcctcacagccagccgtcgcgccgagcactgttgccagcatttaaggcggggggagccaaaccaccaggacccagcgagctcttgctgggaccttcataccatcccccagcaaccgacggcaaccgcccaggttgggacagtgaatctacagcaccata

SEQ ID NO: 118090 - DNA, 366 bp, Zea mays
  Clone ID: MRT4577_39187C.1
aaagcacaccaagctgtcccccgcaccatctccgccgcccgctccaatggcggcgtccgggcagctcctcagtgctgccacccacgggcgaccgccagatcggacgccttctcacagcggcggaacgaagggcatcggcgagttcaggttggagatcaagatcgctacgtagcagagggaatgcccgaatgggaggggtgcgtgccacaacgtgcgggcgaacggagaatctctatcaggtaggccaaaaagaaggagaacagagccagcatatcgatggtggactactgggactatcacgtcgagccttaccgaacaactggctgaaggaatttggggaagggttgtaatatgggacggtgtgta

SEQ ID NO: 118091 - DNA, 253 bp, Zea mays
  Clone ID: MRT4577_39188C.1
attaaaactaaggtgaatatcacctctactattttcaatattattatttattatttttcttgttatttatttatgagaggaataaatggcttaattgaaattttctttcccattttctattcctaattccaaattcaattattcaaactcaaatttatactcctgttttaaatttcagattttccaaatgtctcaattgagatctaaatgtgaatatacaccatattattttaagtattactattttattctc

SEQ ID NO: 118092 - DNA, 339 bp, Zea mays
  Clone ID: MRT4577_39189C.1
aattcggcacgagggttccgcgagcctctctgttactatgacccactcgctgcttagtacgctgtccttgctttatatctcatcgctctggacatattgacttcccacactgcgcctgatcaacctctcctgacctccagggtcagcgctccattatggtcaactctcttgccaccgcggatgtctttcccctagttgtacatgctgctgtgcgctctccattctctttccgcattactgcgtgacacttgccattccatcagagaggggccctgtcctctgcgccatggatgtactactctccccgttaaaaggactgatccttgataggttactccc

SEQ ID NO: 118093 - DNA, 481 bp, Zea mays
  Clone ID: MRT4577_3918C.1
cggacgcgtgggcgactggccatggaagtccgacttcttgcctcggcacgtccaataactggtctcaatggaagtggaggccaatcaggtaatttctcatcacttttggtgccagccgcaaccgtgggggcattaggttatggatatatgtggtggaaaggcctctcattctccgaccttatgtatgtgaccaagcaaaatatgtccaatgctgtttcaagcatgacaaagcatctcgaccaagtgtctgctgcccttgctgcgacgaagaaacatttgacacagcggattgagaatttggatgggaaaatggacgagcagaaagcaatatcatccgaaataaaaaatgaggttattgatgctcgtgataaactcactgatattggttataacctgaactctctccagcagctcgcttggggtctcgatgggaggtgaatgctatagagaccaagcaggattttgcatgcgctggtgtgat

SEQ ID NO: 118094 - DNA, 392 bp, Zea mays
  Clone ID: MRT4577_39190C.1
acgaagaggagattggtaaacagaaatggtttgccggttaaggtgctttgagtgtaaatgttgaccatgttggtcttgtgggatagccagcaatatcgcactcactccgactcaagtgttcgggactgtttggttgtcgtacgagaactttgtctatagcctatgcaactgattctatacgtccttttcgtctctgttagacaacatccaagtagtcacttcacgcgttacttcccttttttcgaaagaaatatggaaaactacaaaaaccgttgcggttattgtgttttttttttttgcgtgtgaccgatttaacgtgttcgttcgccgcgtttacgtttctaagtgctttgaatggtgttttcgccttttaggattgatttggtgacaag

SEQ ID NO: 118095 - DNA, 362 bp, Zea mays
  Clone ID: MRT4577_39191C.1
atgatataaatccaatccatgcatcactccagtcgttgcaaggttgaacattcaagatgcacttgtattgatgtcacctcgtctagctcctgttattaccactagcgacctaacttggaacaaggcagacacccgatccttacattatgaccaccttaccagcacgacacggttttgggtcaaaacatccatttctgacacatagtaagaactcagcacattgtgtagtgacctaccgttcacatgcaacacaagagatgccttcagcgatcataagctgtacaagatataggagaccacgtttgccgacttgacagactaggatgaaccggacttgctgcaaccatatgatcgccctctgg

SEQ ID NO: 118096 - DNA, 415 bp, Zea mays
  Clone ID: MRT4577_39192C.1
ccggccggggaacatagctgcgaaatccacagaacacgagcgccttgtgtaccacacaatgtagtcctgccaagaggatcaccgcgggcttgctgagcgtggtcctagtggctctgatgctctgccaactctgcaccaccgcctccgccaaccagaaagacatccacgtcctgcagcagagccgacggatccatcgacggcagcagccccgtaaccgagagccacgtggtctagccgaacatgaagcatacgacaatccagtgagctgtctccggacacgggaacgagatgagggcgaacacacaccctcgcgcacactgataacctggcctcacgaacaactacaaccaaaaccactcaccctgcatctcccccctagccatacactcacccccacacaaaaacaaaccacacc

SEQ ID NO: 118097 - DNA, 893 bp, Zea mays
  Clone ID: MRT4577_39193C.1
ggccgcttttttttttttttttttgtctcaaaataaagcataagatcatttccgattcattggtcaccaacaataaacgccctactacgtatatcaagtatctcatatacctttctatatatcgtcactcaaatctgtcagtactattggctaatacaaagatcactaaacactccggttcatgtttatccggctacggaacctcctaatgaacatgtcacaggcctcatcgatgtcatggtccatgttgaactccagaccttcaacctcccgcttgctccttatgatgtcgatgaccgatggctcttcaggcgtatcaagaatatcaagatcatcgtggtcgtcgtcatcgtcatcgtcatcctcctcatccctgtggcagtagccatcttcaaagagcgaatcaatccagtcagggtaaccatggtaaccttcctcaaacatggccacatcaaacagaccaggaggagctgtagcatcatgatcaccagctgagtcctcgcccttcgtcattgccttaggcgtcgtgagagccttgctgcggtgctccaccctagccggcttctcccggctgtctgtcgcgacaagctcatggatctggcgagacatcgcaccgaccatcgctaacctccggcgcatagaggccagaatgatgagctttgttcttagagcaacagtcttgctcttaacggacgtcaccgccttcttcaagagatctggggcacttttgctgatcctcatatttgatgtgtggaaagcttaatgaagctgcttgccaaaaggatttacttaggatctgagttgctgtgcctgaagctttctatgaggggatagtatatgctatatcagcgagagctgggagatagacagctactgtagtttcagatgctccg

SEQ ID NO: 118098 - DNA, 1596 bp, Zea mays
  Clone ID: MRT4577_39194C.1
aattcggcacgaggcgccggcgccggtcgaagcggagcaaaggacgtcgctggtggtggaggcagaccaggctgctcaggggaggctgcctccgtcgtcgagcaaggcgctggttttccccgcgcggccggggtacggcacgctcggccggaggtgccgcgtgcgcgccaaccatttgttcgtccaggtggcggacaaggagatctaccactacgacgtcgtaattagtccagaatcgcagtcaaggaaaagaaatcgttggattcttaacgaactcgttaaattgcacaaggattacttgaatgggcgactgcctgtttatgatggtagaaagggccttttcactgctggtccgctaccgttcaaaaccaaagaatttgttctggaactaaccaatcctgagagagcaaaccagggggcgaaagagtacagcgtgaccataaaagatgctgccaaattagatctttacagccttaggcagttcttggctggtaggcagagggaactgccacaggatactgtccaagccctcgatattgctatgcgagaatgcccaactgaaaagtatgtatccatctcaaggtcatttttctctcagtcatttggacatggtggtgatattggcagtggtgtggaatgctggagggggtactaccaaagtctacgtgctacacaaatgggattgtctttaaatattgatatttcagcaactgcattttacaaggctcaaccgattttggaatttgcaattgagtacctcaacatacgtgacacctcaaggcgtttgtctgaccaggatcgcttaaaactgaagaaagtcctcaaaggagtacgtgttgtggcaacacatcgtcgtgatatagccatacattacaagattactgggataacctcacttcccttgaatagtttaacgtttaatcaagatggggcaagtgtttcagttgtccaatactttcaacaccaatataattacagtttgaaacacattaactggccatgccttcaatctggcaatgatagcaggccgacttatttaccaatggaggtttgcagtatacttgacggtcaacgctattctaggaagctaaatgagcgccaagtcacaagcatcctgaagatggcatgtgagcgaccaactcaaagggagggcagcattttagaggtagttaacaggaacaactatggtaatgatcattgtgccaaagaatttggtattaaggtgacaaatgaacttgccttggttgatgcacgtgtgctgccagctccgacgcttaagtaccatgactctggacgagaaaaggtgtgtagtccttccgttggtcagtggaacatgaacaacaagagattgatcgatggagtatccattcagtattgggcttgtgtgacttttgcttctcgcttgcatccaaatgacgtgcgcatgttttgcaacaacttggttggggcgtgcaatgatatgggcatgcaaataaatgcgagaccttcggttgatgttgggcaagcacgcccagataacttagaaactgcactcagaaatactcatagacaatctgcacaaatgcttgcccaaacaggcgcgaccagacagcttga

SEQ ID NO: 118099 - DNA, 418 bp, Zea mays
  Clone ID: MRT4577_39196C.1
cacacgcgtcagcccacgcgtccggtgttgtggcaacacatcgtcgtgatatagccatacattacaagattactgggataacctcacttcccttgaatagtttaacgtatctattcagttttaattgatattctttttcttaattcatgctgcactgttttttaatggcacatgtttaaatattcatgtttgtttatataggtttaatcaagatggggcaagtgtttcagttgtccaatactttaaacaccaatataattacagtttgaaacacattaactggccatgccttcaatctggcaatgatagcaggccgacttatttaccaatggaggtttgcagtatacttgacggtcaacgctattctaggaagctaaatgagcgccaagtcacaagcatcctgaagatggcatgtgag

SEQ ID NO: 118100 - DNA, 950 bp, Zea mays
  unsure (1)..(950): unsure at all n locations
  Clone ID: MRT4577_39197C.1
cattgggtacctcgaggccggccgggaccccggccctgctggcccttgtctgcctgccactcctccctcctctcttcgttgcccctgccgtattcactttcactcgttcgtccatccttccacgccccccacagaaccgtctccccagcccggcgcctcacggtcgcaatttattgcttgcgcaccgcctcgccgctttggcgtggggcgtttgcctgtgtggcgctgggcatgtgccgtgcccgtggcttgcttcgtcgtgctcactagtcacgagagagggaggaggctctgcttctgctgccgcttcttcttctcctgctgctcttccggagataagcagggggccgggacagctgactagctgagaggcatggggatggacgccggcggcggcaagctgccgtacagctacgccggccagcaggacggcgggaagctggtgaagagcgtcagccgcgtggagccgcgcaggttcggcctgggcctcgtggcgggcttcctcctcgtcacctgcgcctacttctccaccgccaagttcgacgccatccagatcgccatgaccagccgacccgtctccagcaatgcggccggggtcgccgccgccgccgacacctccaacgcctccaggcagggattagatttgggcaacaaaggcccgggcgcgatgtccatggccgaggaggggagcgaggccgaggcgctcgagaaagacggcggcaaggcttcttcaccttcggggccaggcgttcctgccgctctccttcctcccgtgtcgtcagaggaagccgcgaacagcacgcaggaatcaggcggtcttgaggacgaggagctacaggtgcaggatgcagttgccagtggttccgggaggagcaaagactccgnagccgncgncgccgncgncacacgnagngccaatgtcagctcaccctctgtggttcactctcacc

SEQ ID NO: 118101 - DNA, 2398 bp, Zea mays
  Clone ID: MRT4577_39198C.1
cagtcgcagcgcagtcaagcaaggcacgtcggtccaagagcacgacgagcagacgacgctgccggcccggccgtgctgctcctctgagtccgagatctgaaggcgcggcaggaaggaaacgggcgggcgagaggatccagcagccctcccccacgcgcgcgcgacggttagcgcgtcccagatctcggtgcggcgcctcccgcccggccctgccggcgagagcgcggcccgatgatgggatggccgttcctggaccagcggcggccttcgttcaagcgccggcagcagcagcgcccgtggtgggtgcgcctcgcgctttctctcctcctcgccctcgcatgcgtcctcctcctcgccgttctcctcggctcccccgaccccggcgcctcgccgtccacctccgccgcgtcctccggatctgagaccacctcctcacctctcctccgtcagagaacttacctggagggaatcacggatgcgctcaacatgactgacgaaatgctgagcgcccgctcgttctcgaggcagctcatggaccagatttatctagccaaaacatatgtcgtcgttgccaaggaggccaacaacctgcagtttgtggcggagcttagtgcccaggtacggcgggcgcagagcatccttgcgcatgctgcagcctatgggggcacggtgatggagcaggaagcagagaaggcgatcagggatatgtcggtgctgctcttccaggcgcagcagcttcggtacgacagcagtatcacaattatgaagttgaaaggccagattcagtccctagaggagaagtcgaaagttgaggtggagaaaagcacaaaatatggccagattgctgctgaggagctcccaaagggactttattgccttggtgtccggttaaccatggaatggttcaagaatcccgagcttcagaggaagttttcggataggagcccagcagtgcagagcaatctgagggataacagcctctatcatttttgtgtcttctcagacaacatccttgctgtttcagttgttgttaattctacggctataaactcgaggcaccctgacaaggttgtttttcacttagtgactgatgagttgaactatgctccgatgaaggcatggtttggcatgaatgactacagaggggtcactgtggagatacaaaaggtggaggactttacctggctcaatgcatcgtatgttcccgttcttaaacagctacagaatgctgctacacagaagttctacttctctggcagtggtagtcgtggaacaccaattaaattcaggaacccaaagtacttatcaatgcttaaccacttgaggttttatattccagaaatatatcctgaattgcagaaggtggtatttcttgatgatgatatcgttgttcagaaggacctatcagaattgtttactatcaacctcaatggcaatgtgatgggtgctgtagagacttgcatggagacattccacagatttcataagtatcttaaccattcccatcctctaatccgtgctcattttgaccctgatgcttgcggctgggcatttggtatgaacgtgcttgatctggttgaatggaggaacaagaatgtgacaggcatatatcattattggcaggagcgcaatgctgatcatactctatggaagcttgggtctttaccacctggacttcttgctttctatggcttggttgaagcattggatcccaaatggcatgtcttgggacttggctacacaaatgtggattttgctactatcaaggaaggtgcagtactgcactacaatggaaatatgaagccatggctcaaaatcggaatggagaagtacaagagcttttgggataactatgtggactattcacaccctttgattcagcagtgcttcatgcgttgattgatgtgtatcaacattagaatttttgtaagcttcatggtagatatgttccgagcacatgctccaactgccacacggaaacattgtagttaaatcagttggcttttctctcaagttacaatctctgacaaaacatcagtggatgtctatagcatctgtagttgatggaacacaacaattgcgtatctctagccacaggtaaacagcacacgagctgagactgctatgcagtaggctgctacttgaactacatccactacacagatcataacttgcgaccatcgatgtaattttcccattttttattttttgggtgagacatagccacagaatggagatggtgtagaattgattttaaattattgatgtgttacaacaagttttgtgttacctatccatatttattgggtgttaaagacttatggcagctaagcccttttctgtttatttatttatacatgttgagaagtaaagtctgatctcatttgcggctctaaag

SEQ ID NO: 118102 - DNA, 426 bp, Zea mays
  Clone ID: MRT4577_39199C.1
ggaggacatgtaactttttatattctggttggccacttacgtcatccaaaaaactgtacttatggcaaccacggctgatgactcgacactaaaatagggcacccccaatgatgtgatgactggaacgaggctgtagggcatcggcaaaacaacagggacaaagggcaacaattgggggacaccgacgagggcagcggagggacccggaaactgctggtagcaaggcacacattgccgctgtgtgctagaagaaccgcgacttgctgaacctagctagctgaacggtatgaggattgggtggtgcaaagagacagggggaccaagcgcggcaacgccgtgtaaccggagcagggggtccacctggataagctgctggcaacactggggtcaaagcgactggcactggggggaacaaaacggggggcc

SEQ ID NO: 118103 - DNA, 236 bp, Zea mays
  Clone ID: MRT4577_3919C.1
gatagggcagcaccaagaagcaccattttttccttaggattaacttaaaagcaatcctgacaggagaaacaggattcatggatcaacagtttatgctagtttatgcatggataatgtttgacctctgattaacaccgctctaccaactgacgcataagctcttgttgataaaaaactccgatgggcgacaactgcctagtgtaaagcttatgaacccttttgggtagggaaaacat

SEQ ID NO: 118104 - DNA, 273 bp, Zea mays
  unsure (1)..(273): unsure at all n locations
  Clone ID: MRT4577_391C.1
gacatttgatcagcgtcccgattatagtttcttgaggcatgncgagagagaattgattgttcttctggtctatcaannngaanatacgtatgactggactttgttgaactgtaagcaatcccagaacgctaacgttcatcaacgatgctctcgcatttgctgattgttctccctccgtggcagcatgatgcatgcgtaagcagccagccagttgcaacaaacgcgcacaagcaccaagctggtgttgcacgcccaattaatgcttcatgcctg

SEQ ID NO: 118105 - DNA, 508 bp, Zea mays
  Clone ID: MRT4577_39200C.1
gaccttccagcctgaaacagaatcgcgcaaaagctggaaccgaaggtcgcggcggggctccgtgatctgcgctggctgatgtggttacgagtcttcgcgattcttaagcacgggctctaaccgcccctgtataaagccatgtgccgcacctctgggccaccatcgccatgggcaaacaacgtacggggagggagagattccgctgccacttccgaattcgcgtcaacgccgcgcccggattgctgcgactgggagggaggggcttcaccgagtctccgtggtctttcggctaccttcacagtgggaaagaaccactgggtggtcggcgatttcccgccggcctcgtggtgctgccgtggaaccgcgcgctcccgtggccggaactacctgtgtcgcgacccctgtgaggtcacgagaatctgaagatcatcctggtacctggaatctcaagtcccaggtcaagaccaggtactgcaggatgatgctcatggaggatgctgcgatgagt

SEQ ID NO: 118106 - DNA, 247 bp, Zea mays
  Clone ID: MRT4577_39201C.1
acgaagtgcatgtgtccatgaggccaccctcgtcctggtgccaatgaaacctgtttccaaggtgtgtgatggatgcccttgcagtagttattactagtccattcttgttggcacctgactgatgttttgttttctcctaaccctatagcttgcggggggagacacacatacggtgtggaggtttgccgtaaggctaaggctactgcacaacaaatgcagctcagttttgctaattttgatgggaaac

SEQ ID NO: 118107 - DNA, 263 bp, Zea mays
  unsure (1)..(263): unsure at all n locations
  Clone ID: MRT4577_39202C.1
ctttnnnnnnnnntantttanttttttttaaaaaaaantttttaatttgtgtttatttttagagggtacacccggggttctcactatgacggaggaataaaaaaaaaacacctgggacgatttaaacttttttcaccagaagtgccaaaaaagacccaaaaattgaggaaattgtgagtgccccccggccagaagagaactttattcattcaaccctaatgggtttcccaaccaaattaaaccaaaagtcattattttgctgg

SEQ ID NO: 118108 - DNA, 261 bp, Zea mays
  unsure (1)..(261): unsure at all n locations
  Clone ID: MRT4577_39203C.1
cggccgcccttttatttttttcccagaggaacaccccagggngggatacttaattagaaggggggggagtacacaagatgtacttaaacaaaacaaccgtttatgaccttagaaaacgctggccgacaccagggatggccgcacgatgcccggtggcagggcagcctcccaaaaaacgaaagagggaacgccacacacgcaaggacacatacggaacgattaataccaccaaaaattaacaaacgaggaaccatctgaccg

SEQ ID NO: 118109 - DNA, 717 bp, Zea mays
  unsure (1)..(717): unsure at all n locations
  Clone ID: MRT4577_39204C.1
gtccactaaatttagcggatagagtgctcctcctctcgtccaacaatgtccttgaagttatccgctaaattgtaccggcgtcttcagagacgctaaatgtggcggatcacgggcatcccctacacgtcggctcgtcttccttcccgcgacggggcggaattttccccctcacgttctcttcccgtcgcaaaggtcttgtccatggcgccggctagtttccggtgggatttctcggaggcggtctcggagctgggatcgaggggaccactcgggtcgaaggtgcctcctcgcgataatcggccaagcgctgtgtgccctcctcgaagctcagtgccgagaaaatgaatcgcagcctggatctgtcatcctcgtcgtcttcgattcaatcgacgcttctagatccaagccagcgaaggtgattgcctcctcttccacgcgatcgggttcctttctacatttcctcagccatgctacagatatgaaccctaaatgttggggaacgtatagaatcataccatttttccatgtaacggcttcaaatgtaggattatttcagttttttttggttttgaacctaccaaacttgtgtacccaaggttttagtggcatgcagtgcgaccggattcaatatggcatccattcttgaatttttgtggtaaaaannnnnnnnnnnnnnnnnnnnnnnnnnnnnngaaaaaaaaaaaaaaaaaagcggcc

SEQ ID NO: 118110 - DNA, 249 bp, Zea mays
  unsure (1)..(249): unsure at all n locations
  Clone ID: MRT4577_39205C.1
tttaagtgactgtacagtgccccntaatggcgagactgcgttgcgggaaattcctttacctgcatagttagacagctaaatagggccaaanggtgatgtgcataacatagtgagtagcgatatgcaaggatacagactgaggattgatagtacatgggaggaggcttagcgagtcagtgataagcgcggcacagtgcaaagctgcagagctatgtttacgaccactgcaacgtatccgactatataatg

SEQ ID NO: 118111 - DNA, 696 bp, Zea mays
  Clone ID: MRT4577_39206C.1
cgtgttcctatggcacgtccccgcgacgcgaggaccatgcgtcctgcgtgggtgcctacatcccgtatggtactcacgccgccgaaccctgctaagggcactatccttgtccacagactacgacgggacgacctccttgatgaaccaatatgggaacaagactaatacacctcactgacaaggggtagctagcggctgcggatagcctcaccaaggaggggcagtcggaggacaggctctttactgtggagatatgggacactgcgtggccaggtaaaggttctagacactaagcgccgcattgtaccggggagcagatagctggggcctaggctaagacgctaattgtatgaaatcatttgacaacgcatgaataacaggggagaggagtggctaattgaggctagcccataagatgctgataaggccctttctgggctgccgtgtacaaaggggggtacaaatgggccaacagccgcgtgcgatctgaaaaaaatgcacaggcgtggtgtgctcccaaagggaacataccgaacttcgagacgtccgctaaggacagaaccaacgcggaagacgcccttcagcgtatcgagaagaatgctccgaagaatgcgtcagacgacgaactgaatgatccacataccgtgcgactgtgtgagcggcaaccgttcccagtgatcatccgggtgctgttaa

SEQ ID NO: 118112 - DNA, 370 bp, Zea mays
  Clone ID: MRT4577_39207C.1
agcacaaatttatatatttttctgattatgagaaacggagagaaatgtttttttcccgctggcttgcgcatgccacattgggctgctactgcccaaatcacatgagcccaccctggcattcacactggacatggacacaagcccagcagacccttggaacatgaaaacggtggtcagattacgcggcatcgacttggtctggtcaacgaaatgcgggtcgtccaagctcccccgattgactggcaactggcatgtgtattttgcaatccaaccatggcctgagcaagaaacggacctggaggacacatgacctttgttctcttccattacctcatctcctgtgctccgatccgatcatccactcctgtgc

SEQ ID NO: 118113 - DNA, 701 bp, Zea mays
  Clone ID: MRT4577_39208C.1
aatgaagatgagcaaatgatatgatttattaaaggttgatattatatatggtttattgaaaataagagtaactgctactgaaagtaggatttattcattcattgcctattcatctaagtattcacatatggacgttaaatgacgacgggtgatgttccttctttattcattcgcaagacgggcgagctgtacatcgccctcgagttacaacctagacctccgcagttccagcttggcgattgtcccgagatggacctcgtcggggccgtctgcaatccgcagtgtcctagccgttgcccataggtgcgacaagaccgtgtcagacgagacaccagctgcgccgtgaacttgcatcgccatgtcaagcaccttcagggccatatttggagctgcaaccttggccatcgcgaggataccacgtgctttcttgttcccatgtcgatcgagttgatcggcagcttcaaggactaaaagccttgcctgctccagttcaatccgacactttgcaagatctgataaaaaggaaccatgctgtgcaatcctctttccaaatgcggtcctgtttaaggccctctctaccatcagattcatgccacgttctgctgctcctactagcctcatgcaatgatgtaaccttccaggaccaagtcttccttgagcaatctcaaaaccacgcccttctccaagcagatgcgtgggac

SEQ ID NO: 118114 - DNA, 441 bp, Zea mays
  Clone ID: MRT4577_39209C.1
gaagatgagtaaatgatatgatttattaaagatagatattatatatggtttattgaaaataagagtaactgctactgaaagtagggaaaatacatcctatatagtcattactatttattcattcattgcttattcatctaagtattcacctatggacgttaaatgacgagggtgatgttccttctttattcattcgcaagacgggcgagctgtacatcgccctcgagttacaacttacaacctagccctccgcagttccagcttggcgattgtcccgagatggacctcgtcggggccgtctgcaatccgcagtgtcctagccgttgcccataggtgcgacaagacagtgtcagacgagacaccagctgcgccgtgaacttgcatcgccatgtcaagcaccttcagggccatatttggagctgcaaccttggccatcgcgag

SEQ ID NO: 118115 - DNA, 139 bp, Zea mays
  Clone ID: MRT4577_3920C.1
gcggcgaggacccgggtctggcgctgtgggccgggagccgtggggcggcatggatgggctggttgtcgccgccggcggggacgtctccctgcacaacttcagcgcgaggctgtgggagcagctggtccacttccgcgtc

SEQ ID NO: 118116 - DNA, 2622 bp, Zea mays
  unsure (1)..(2622): unsure at all n locations
  Clone ID: MRT4577_39210C.1
aattcggcacgagggattgggaactatctactttggggaatcagatgtgtgatgttgcttatagctgcttggtatgtacttccttattttgacatcaatcgcctatatttagtgtaaatcattccttttgcatcatatcttttcctgttatattccgacaatggtagttcattgaaatttgaatgtgatgctgtttggtgtactcgttcaaaaagacattttacttttactccgctcagggctcgagctagttccaacgaagaacacatttttttgtaccatattttccttttttactgcagagtgatgaccatcaatagaaactgttgcaagagataagagttatgtaagatgttctgtgtaaccctttaaagcccgcccaaattgagtggatctgatctctcttctattgcagggcccctctaatgcagtaaactgtgcttgttaagcttactggtctccttttatctggggccttattatcactgcctctgaatttgtaccataccccatgctcaatagcgatatataaatattcattntattgcgtttttcttgctttttgnttcacttatatggtatgttacttggttggttgnctctgatgactttcctgttcaatcaacctcaagatggacaattcatccagaggttgattgtgcatgtttgtagaactcagcctccattgggtatatgtgatcttcaaacatgcaacctcaacctcaagatggacaattcatccagaagaagaaaatcttaaagcatggcaaagaaggagggcctatggaacttgtttattcccctcgacagtgcagcgagagctagaaacctattgtttgaagaccattctcaaatttcccttggaagttcgaataatcttttgctgggcgcgggtcttacaaatcttgaatatggatatttgtgtgagattatgggacgttcagttgggctccacaaatatttaactgtggtgcacctgatacaggtaacatggaggtcctgttgaggtatggcactaaagagcaacagaagcaatggctagttcctttattggaagggacaattcgttctggatttgcatgacagaaccacaagttgcatcttcagacgcgacaaatatagaatgctcaatatccaggcaaggagatttttttgtgataaatggaaggaagtggtggaccagtggagctatggatcctgggggctcaaacgtgtgatgaatgtgatagctgctttccatatattatagatgcagcacccagtgcaaggacttcttatggagggtttcaagatactggcattccagatgggattcctcaactggaagagtacctttctgtatactgctcttttgctgcaagaccctggcctgctgcaaattggaagttctacattgctttttctttgtttcgtggggcatctatctatgcaggagtatatcacagatggactatgggtaatgcatcaggtggtgagcgtgctaaatttgctggcagggttgctaacgctatggttgactgtgcctgggacttcataaatagagtaaatgtcctgcaagaactgccttctaagggttctcaagtcttaggagcatcgtggcaagaatttcacagagaggaagaaagttcaacttctgaaaagaatcaaggaaaatttgttcctagtgaaaaggttatgcagcttcgaaagaaactaataaagtttatcgaagatcacatatacccaatggaggctgagttctacaaacatgcacaatcaacctcaagatggacaattcatccagaagaagaaaatcttaaagcattggcaaagaaggagggcctatggaacttgtttattccgctagacagtgcagcgagagctagaaagctattgtttgaagaccattctcaaatttcccttggaagttcgaataatcttttgctgggcgcgggtcttacaaatcttgaatatggatatttgtgtgagattatgggacgttcagtttgggctccacaaatatttaactgtggtgcacctgatacaggtaacatggaggtcctgttgaggtatggcactaaggagcaacagaagcaatggctagttcctttattggaagggacaattcgttctggatttgcaatgacagaaccacaagttgcatcttcagacgcgacaaatatagaatgctcaatatccaggcaaggagatttttatgtgataaatggaaggaagtggtggaccagtggagctatggatcctaggtgcaaaatcctgatattaatgggaaagacagatttttctgcacctaagcataagcagcagtccatgattttagtggacatcaacactcctggggtgcagataaagagaccattgttagtctttggttttgatgatgcacctcatggacacgcagagattacatttgaaaacgtgcgtgttccagtaacaaatatcctgcttggagaagggcgtggttttgagattgctcaaggaagacttggtcctggaaggtacatcattgcatgaggctagtaggagcagcagaacgtggcatgaatctgatggtagagagggccttaaacaggaccgcatttggaaagaggatgcacagcatggttcctttttatcagatcttgc

SEQ ID NO: 118117 - DNA, 613 bp, Zea mays
  Clone ID: MRT4577_39211C.1
cccctttattgttttgtttcgcatcacacgaaataaggaccacacaggaacattccaaggcacagcccagatgtattacatacgaacggtcacactaaactttatgtggacacacctaaccaaccactattatcctgtaaacagacccactggtgcacaccactactgtagagttctaaaacctcaagagtatccttgaacagagtcacactctataccaacttggacgacagttttgttaatacgttcaatggcacacctgtcttctgagctgacggagagccaacttttgccgctcttatcagataaaggagttttcagccccaaactttcaagaggtctgttcttgcctgccttatgcttctcaggaggggaggcgtcttcctcctcatggccactggtatcatgttgagcggtggaatcatcatcatcgccttcttcaggagacaaaccctgaccctaatcacaatcgcctgtctaggactggttagaatcatcaggatgattctaatgagaatcatcggcatccttgctattcatggacggcggacttgattatgaagctgaaggaactgacttttcttgactgatatgggtgtgcccattatttttt

SEQ ID NO: 118118 - DNA, 287 bp, Zea mays
  Clone ID: MRT4577_39212C.1
ggtggggggttcttttttttttttttaaaatgcggagcgaaagatctgccatacctttaccaacagacatactgctcaagtgtttctgtgtgcacatcttttgaatgaccatgcatttgacagcctacccggatgtgcccattcgtaacaaactggtgtggaagatcgttgtacacttatggtgctgtgcaacacagggctgtgagctttttaggacctagccagcagcacaggccaggccatgttcctgtaatagagtaggccgctgtagttggggggcactaaaa

SEQ ID NO: 118119 - DNA, 1069 bp, Zea mays
  unsure (1)..(1069): unsure at all n locations
  Clone ID: MRT4577_39213C.1
tgatcccgccatggcgccatctccatccccgcttacctcgctcggccgccatcatggaaggtccgaccccgccatcgctgtccccacgcggttgctccaaggaaggaaactctgatcccgctatccccgcccccgctctctctcgccatctccgtgcggctgctccaaggaaggaaggtccgaccccgccatcgccatccccgcgtggctgccttcccctctcgccatccccgcgcggctgctccaaggaaggaaggtccgaccccgccatcgccatccccgcgcgcccggtcgagcgccaccagccgcataagtctgggctagcgccgccggccaccattggctcggtcgagcacctcatgcccacgacggtcagtcgccgccttcatggctcagagtcgtcggtccctgcccaccaaggtcaccatgggctcgacgacgatggcaacaaggtcaaggtcgtcatcacaacccaaggtagtagctcttcaatcccccgccattccccaccacccctccaccgtctccaccgcacacagcatgcccgactctattctcctccccgaaatccccgtggcgcgcagatctagccccggctcctcgccggcacaaaccacgtgcgcgccctcgacccatggcatccccaaatcccgcccccggttcctctcccttcccgttcgcggacgacgcttccgcgcgttgacgtacgcgtccccaaatccccggttcccctcccttcctgttcgcggatggcgcttccgagccctcgacccatggcgtccccaaatcccagttcctctcccttcccgnncgcggacggcgcnaccgcgcgacgacgancgngaccccaaggccngccccggnnaggcgcccccccacancgaggcaccacaccancgccacgggggaccgacaacgncgacagcgcgnggccccaacgggcgcggaccaacccggccaaggnngcccngcngcngacggacaaggacccggagncggaggagagcanggacgagcggnggagcagcgngcacaccgngncgcgggaccccacggagaagcagagcag

SEQ ID NO: 118120 - DNA, 212 bp, Zea mays
  Clone ID: MRT4577_39214C.1
gttgtcaagtgctctctgtaacaccatcaacagaacaatggcacacttgccttgtgcggagtccatatgcaacaaacacaagtcacgaaaattacagtgagccattagttagaccctatgcgtactagcactaacttcgtcgagcaacatacgccaagtagacatattttggctatgctgaccaagccatttctcgcgcctactcggggtgc

SEQ ID NO: 118121 - DNA, 407 bp, Zea mays
  Clone ID: MRT4577_39215C.1
ctatggagagccgccacgactcactaggacgagaccggctctggagagcccgcaaggaggcgactatgagtgagccaagtggaagaagaagagcctggggagggtgaagaggaaccgccgaaagatgacggatagatccagtaccttcatggggattgtggatggtggtgacaacatggatggggtacgattcttctatgcgtgggcgttcatggtacagatttcacatcctagatccccttctgcggttggcatgggtccaatagctcggcttggaaacctggacttccgtacgacatctatcgtggattctagctatatacagagttttgcggtacgacaaatcagggagtcgctttgagtacctactatgatggagctttatttgctggcaaaaaaacaaagaa

SEQ ID NO: 118122 - DNA, 297 bp, Zea mays
  Clone ID: MRT4577_39216C.1
aaccccttatttttattcttgcaaaacacaacagtcccccaccccccaaagtttatttttattgtccccaaacattaacaaatcaggccccattttatagttcaaaaccccccccctttttaatttttatcagctagccatttccaaaacactggggatcccaaccagtttataaaaacctctttatcttcgccccccccaaatttgtctccaccccccttttgaactctacatcgtgccctaacttatcccacacctccattgcccccccgacagggtcaaaccttaacattttta

SEQ ID NO: 118123 - DNA, 284 bp, Zea mays
  unsure (1)..(284): unsure at all n locations
  Clone ID: MRT4577_39217C.1
ttcgacccactcgtccgcccacgcgtccgcccactcgttcgcccacttttccgcttctttcccctccccttcctgtcagtncgtcttaaaacggttttgcgcacaccttgtcgttctcggtttcctcttctgccggtctgcccagtcctcacggcttcctttttctttcgggccactcttcggcctcttacttgctgcgctcggcctttctgcgcattgctcctctgttccccccgtcagtccgttcctgagcccagccgcttcgcgttcccttgattccaccc

SEQ ID NO: 118124 - DNA, 245 bp, Zea mays
  unsure (1)..(245): unsure at all n locations
  Clone ID: MRT4577_39218C.1
ttcnttttttttttttttttttttttttttttttttttgttttgggttttttttttttttgttttttttttttttttttttcccaaaaatacaacccggccgagtttttttgggcgggggacccaattccaaaacgttgcacccggtttttccctttgtccccggccggccaaaatttaaaggtttaaagggtcccgggtacccacaaactcgcgcttgggggaaaacaccccctgggttttttc

SEQ ID NO: 118125 - DNA, 522 bp, Zea mays
  unsure (1)..(522): unsure at all n locations
  Clone ID: MRT4577_39219C.1
ccgggcctctattccttccctcaccaccttgctactccgatgatagcctctactttcattcttcctcgcatacgcgcgcagtataagagttgaaaccgatgaacaaaaacatattctcgatcaagcacactcttaacttgcgtggaggcgaccaaagcgactactgccggcgggccggctagccatcagctgatcatcgctcctagttgcagactctgtgggtggagccaacgtctacagcgggacggtactccgtctcctgctgcctgcaggacgctctgatgcgaacaaggctggcaagaggggctttgaggacaccataagatctccagctgtaactgcccacctacgngctgtaggaagctgccgatgacgacgtcgccaatgcggatccggccgacgagaatgtcaaaaggcccgccgaggcacccaccgatgatgcccatatatcatccgcacccaatgcacaagctgtgggctgatccacattccggtcataacgcatgaacttcatgaacgtcc

SEQ ID NO: 118126 - DNA, 677 bp, Zea mays
  unsure (1)..(677): unsure at all n locations
  Clone ID: MRT4577_3921C.1
agccttcgctgcggcggtggaagattaggaattgagcccgcggcaagctcggggagttactgtgaatccatctgattcccacccacccgcgcagacgcagctgcattccgcgatcccaggcggcgggaggcggctcttgatgctagagatgctcgctccgcgtcgttctcggcagcaccgacggcgggtaggtggaggcagagggccccggtgagaacagaagtgtcagtggtgctggtgttcccttaccttcgccgcttcgcgagtgctgttctttccttcagttgtcggcggcaatggcgccgggcctgaggctggcctacccgtgggggagggatgtccggcggggcacgccggtggtggtgaccatggagaaccccaactactcggtggtggagattgacgggcccaggcggnnaggcgctccgggccggcgtgcctcccatggacaaaggccgaggccggggccggagcgccaagcagttcacttgggtgctgctcctccgcgcacaccgtgccgccgggtgcctcgcctcgctcgccgccgtcacctgggcgctgccgtctgccgtcgcgaagcgtttccggcggggccgccgccgccgagggcgtcggccgcggccggggctggctgctctacaggttcatcaaggtgctcttggcgctctccttgctcg

SEQ ID NO: 118127 - DNA, 662 bp, Zea mays
  Clone ID: MRT4577_39220C.1
tctttaaatattaatagagctcctcagagatctgggggggggggggggggggggggggatgtatcccatctcatggtaacctccccccctgctcgggtattacgcaccacttaccctggctaacgcccgcccttagctgggacagtagggggacgactgaacccgaccccatctactaccaacacagaccccaagttcgaaaccccaaagatgcaacagacgacccagcgcgccccaccttttacgagggcctagccttagccaacaaccccgtccagagtagatcctttagcaaggtcacagctgcccgccagggtaactttacttggataacactaagagcagagttccgacgagtagacggtgactacgataaagactgggaccgggttttggtagggttctagtcttagaacttctaagtaggaggaggtcgcaatagtcaccgtgacgatcggagacccctacgtacctactaagaccggtagtgaggtccatgggtttagggccacagtgcttccgaaactcgagggatagagggacgcgatcaccgcgacaactgaaggaacgaccgtaaccaaacatacggggacaacggctacgtagggaaggtcctggttgacggcgaagccgccacggacccaataccggggtttaaccct

SEQ ID NO: 118128 - DNA, 277 bp, Zea mays
  Clone ID: MRT4577_39221C.1
caggaaagggctccaaggccacttcgtttttttttcaaggggcaacatcccttccaggaaacaaagggggcaccacacccgtttgtacacacacaaccaccaccacggttccctttaaaccgtcgcaacgcaaactattaacagtccttcaaactactaaaagcgacacccggttcaatgatggaacaagaccttgacaaggtgggtaaatttaactcttgaagcaaaaagcagtaacgaaccccctcctcttagaaaaagcaaacttttttttttt

SEQ ID NO: 118129 - DNA, 344 bp, Zea mays
  Clone ID: MRT4577_39222C.1
tcacccttttctcccgccacgtggaccgcgacgccccggccgcggccacgcaccagcccgacgacggccccgccgaggcggacaccgggacagcgccacgcgtgcgcagcccgcgcacgagcaccatctacaacgaggacgccgacgggcatctcgatggccaggcagacgacgcccaccccggcatccgccagcgcaacgaacgccacgtcggccacgggcgcccccagcgagaacaccggcaccgccggagacacgtgcccgagagccggctacacagcgctgccagcacaggcaccagcaaggccacgcctgactggcgcacaaagtccgggacgacaccg

SEQ ID NO: 118130 - DNA, 300 bp, Zea mays
  Clone ID: MRT4577_39223C.1
accctcgggctggccggaaccatgtgtgtgcagtgtagacgagcgcgtacgtaacttattgggaggttgcgcgtacggcaactcccgtcgcctccgcgctcccctaaccgcctcccccttgtctcatggtggaagtggaacaaccctccgcctgcgccgctgcgaagtaagtgagaagggaaaacaagaaacgatcgagggagaggaggggacgacgtacggagcgagggaggtagcggcgctcggcatggacgcggtggcggcggcggcggcggcggtggcggcgacggtggtggagga

SEQ ID NO: 118131 - DNA, 516 bp, Zea mays
  Clone ID: MRT4577_39224C.1
aaacaaaagccggaagtcggcagctatttgaactctaaaaactggagatcttggaatcttttgcatgcgatacatgccgccaaattacaggactggagcatacggttccaagggcatgaaacgagtagcgttatttttgtccctttcatgcatttcactacctgaagctgggctgacaaacacacaatactcaagactcaagaagcacgcaatactgcagtgcgcgcacgcccgcaaacaacagagcacctcaaaagcgagggcgggtaccccctcacagcaacaggccacagcttttccgcggccacgcgtgaaaaggccacgtcggcacgtaggcccaaaaaaataacgcgtggaaatcagcgtccacgtcggctccggacaccccatgatggatgcccacccccgcaggggggcggtgcggattccaagccggttggtggtctggtagcacggcagcagccagcaggctcagccgctcaagtgcccaatgcgctgcggcggggcggtggcagt

SEQ ID NO: 118132 - DNA, 288 bp, Zea mays
  Clone ID: MRT4577_39225C.1
cctccgcgctccttccatagaagccgccgcagacccacctcggcctaatgagtcgtaccccttctcctccctgtgtggcgaccattcgtcctcttctcaccctcctctcctgcctgtcagccatcgtcctcttcttctcccctgcgcggcgggcgggattcctaccccttcccttctccctagcttgcctcgtaccaatcggatccaacaccatcggttgccatgtcaaagcgagttcggctgcttcaaggtgctcggaaaggggctgatgctgtccaaccccatcgt

SEQ ID NO: 118133 - DNA, 179 bp, Zea mays
  Clone ID: MRT4577_39226C.1
aattcggcacgaggcaagcaagcaaccgtggccacgccgcggcgcgaccctgacgcccgccgtctacgggacccgataggactactacccacacccctaaagtgggttacgtggaccgaaaaccgaaacgctagacttaaaagaaactgaatgagagtaggtgcttgtacttaagcgca

SEQ ID NO: 118134 - DNA, 879 bp, Zea mays
  Clone ID: MRT4577_39227C.1
gagcgaggaaccctaaccctaaccctaaccagttccgatccgcaaggtagggtaggctcccatacatgacctctaatcactagttcctttcctaatccgttgcttgatctctcgagtcttgggtgattgatctgcaggcctgcgtcgatggcggcttccctccgcgcggcggcgacgaggatgctgcgcccggcggtgcttccaggggaggggcgtcgcctgctcgtccacacccagcagctttccaaatccacccgcgcctacgaggaaggaaaccatgccttgaatgaataccgtgcgtcgcttatccagcagaggaaggagcagctgtacgttctcattgccggcgccgaggccaattcccgcaccttcttgctgaacaaaagtctgctcaaggatctctctacacaagtcaagcctagaccagaggaccctcaatggcgcaagatatgtagaaccaagaaggtgaccgacttcactaggtcggcgggtattcttgttatttctgggctcacttattatgccttgatttcccgtcctgaaatcgtaaggtatggtgactatcttgttactgctgagagtgtgcccatgatacaagagaggctggagaggcaagtaatacaagagagactgcggagagttgctactgctgagggagtgaacaagcaagatggatatcagcctgttggtactgccgagggagtggacaagcaagatggatatcagcctgttgctacagctgagggagtgaacaagcaagatggatatcagcctgttgctagtgctgagggagtggacaagcaagatggatatcagcctggtgctactgctgagggaggaacaagcaagatggatatcagcctgttgctagtgctgagg

SEQ ID NO: 118135 - DNA, 434 bp, Zea mays
  Clone ID: MRT4577_39228C.1
ggggggggtttgaattaaacacaaatgtgttttcaatacaaacgcaaggcccaacaggcaggatataatcaccagctgatgcccaacttaagtgaacttgggcttttagttttagcaaagtgaacaaaatcaatagggggccatatgtcatattataggggtagagaactccaccacagatttcagggggccctataaaccagttgttcgttcaagatacaggaacaatggggccaggtggcggagactaagccattgataaataactgggggcgaaaatgtcttcccttgctggagaagaggggctcacttctgtttcacaggtacttttttgaggaagtcttgtttttggtcttttgcgagtacaacaccctcttgacaaccttttggttttcaaccagaaaagcacggatggttctttttgtaactgcagt

SEQ ID NO: 118136 - DNA, 276 bp, Zea mays
  Clone ID: MRT4577_39229C.1
cgatgcgccgaggccctgctgctcattccgcagccataccggattcccggattctccttgctcatgcgtacttctcctcagcgccgcccgcccagttctaggacccgcgcgccgcctggcctcgcccgagccgctcgccctgatcatgctcccagttcgtccatatctcacatcacgtccaacactacgctgctgctactcctatcccacacgcatagcactagcacctgacagatcgaagggatccacattctagctcttggagcatgctgccat

SEQ ID NO: 118137 - DNA, 641 bp, Zea mays
  Clone ID: MRT4577_3922C.1
ggccgcttttttttttttttttttcttttttttttttttttttttgcttacatgaacaagcagtgtttttttgtttcggttgaccggtgctcaacgtaacatcacgtagtggggtgcacgggggacgcaggcagtaaacatgaggcagagacaaggacacggcccgagagacgaagatggatagaaagcaaattaaggaaccagaaggggcacaacaccacaccaacgacgagcactatgaaaccgtgactcggctatgaatggactggaactgtactgtactggaccattagcaggtggaggtcaatctagttctggaggaggacatcaagaggggcgcggaaattacttgggggcaggctccttgatgacaggcggcccagccacctagccattggtcttgtcaaactccatggaccaggtgacgacggagccacactgggcggtcgatttgcgcggagtcacctgcagcgtgaactagaaggttttgtagaactacgaaagctatggcgacacgacgcaggacgacaacaccttgtttttgtgggtcgaccgctgaagcttctacttggtgaacgagaccataggcaccgactaggtgcactatgaggaggctgacgacggcggccgacttgacgccg

SEQ ID NO: 118138 - DNA, 322 bp, Zea mays
  unsure (1)..(322): unsure at all n locations
  Clone ID: MRT4577_39230C.1
atccactcgacactacatcgtcgatgcttcttagcagaaggaactgtagcctgcaaagaactctacacgagcgctagtgctatgacaaccttatcctactatacgcttcgagctcattagtccnnnnnnatnatcgtctcctggtactcgctacgcctacaacttttaaaacacggtgcgaatgtacacctcctgtgtgcacctatacaaaaagagttatttaccatgctctggtttctcccgtgactacggagggtaactgatgacccatcacctgctctatggtacggcatggttccacaaaaccatcgcaaagatggag

SEQ ID NO: 118139 - DNA, 191 bp, Zea mays
  Clone ID: MRT4577_39231C.1
gacacgcacgcgggcatagcgacccgcagtgtcgccatgggcgtggccgtcacgttcgtggccatgaccgcgctctgtagcgcgccgtgcgcagcggagttgaacaggctgaactacccggccaggagtaacggatcgctgaagctgctcatcgtcggcgactgagtgtcgcatggagactcataaccagt

SEQ ID NO: 118140 - DNA, 266 bp, Zea mays
  Clone ID: MRT4577_39232C.1
atcgcgagcgcccccttttttttgttttttgtttttttttgttttgttttttatttcgaggcttttttttttttttttggggcttttaatagtttttttgggccaaaaaaatggacctttaaaattgttaaagtggaagaccggtgctaaaaatggtttccgtaaatgagcggtgatcataaagtgcccggggaaccagactttcgggagggtgattcgatccttgtttgggggatgctaatacagctttgtgtcgcgcataattt

SEQ ID NO: 118141 - DNA, 674 bp, Zea mays
  Clone ID: MRT4577_39233C.1
ccggccgggcatggtttccacacatgctattgggtggccgcccgcgcccacagacaagtcctcctttcacgtcaaccgcgtgtacgaccacccagctgactcggacgattccctggagcatacgtgctcacgagatgcccgccccttcttcgaccaccgaaccagggacaacgagaagacccccgcgtacgacggtgactccaaaacctactggagcactcgcctccgggtcagggatgaggactcagacgaacttaaccgaggagagaggcacaccagactaagaaacaccttgccgatggctgggtgatctccgtcggcgccctccgactctactataagttctcagcgtgaacaaagactcccgaccacacacagatgtccaagatctccctggatgacactgatgcggtttacagccgaaccctgggtgacatattgcataaacactgccttgagaagagtgagcatctcgactcctacttaggtcaacgattacaacaattcctccaactctcctaatgaccgtagtaccatacgtaacgcgaccgatctagctagctccggagcactcgaccacacacctgtccaattctggactgcatgcgtgaggaatatgatggctcacgataatgactccctctccggaccttgctagctgcttgcttgtgccg

SEQ ID NO: 118142 - DNA, 114 bp, Zea mays
  unsure (1)..(114): unsure at all n locations
  Clone ID: MRT4577_39234C.1
catactcagtgacactattggctactgtcgctacgactcanagtcaattacggaatggttgatagacatatgtacgatcacggtgcgctcaatgttgtacacgcacagggtgtc

SEQ ID NO: 118143 - DNA, 158 bp, Zea mays
  Clone ID: MRT4577_39235C.1
tctagatcgcgagcagccgcactttttttttttttgaagattagagctggatatagggggttacacttgtgctgcgggttaactttgctcttttaaccccgggattttgtaagttttggggttgaaacaaaattttgggaatctcctaatttcccggg

SEQ ID NO: 118144 - DNA, 267 bp, Zea mays
  Clone ID: MRT4577_39236C.1
cggacccggacatctgccccgcgcgcccgctcgtgccgcgagcagcgcgcgagcgcgcgcggggcatggccagggagtggaaggacgccgcctagaagaaggggggcgtggagggggccaagccgccctacgcgcacgccttcctgcacacgtcgccacgttcgccgtgcgggataaagaggacctgccgctgttccgcaagattgtcctcagcttctcttggagccaaaagatgccactacttgtccttactctcaggcttggtga

SEQ ID NO: 118145 - DNA, 289 bp, Zea mays
  Clone ID: MRT4577_39237C.1
attccaaacacactgcccttgcttctaccgttccccagtgcgctccctctctcgccatccatctcgtgcacgactgggcaaccgttgccgctgtcgaggtgcccaggtcttcatcggtccctcgtcagttcttctccggcccttcgccgccgacaagctcccccagtacttatgttaccaaagcaaggctagtaaatcataccggaaagaatggtgatggcgtcttggtcttgggtctgctagatgcatgcctactgccttatcgcaaagctagcttacctgctactgg

SEQ ID NO: 118146 - DNA, 288 bp, Zea mays
  Clone ID: MRT4577_39238C.1
ctgaaagtatggcggcgtcgaaggtgaagcaggacatgcccccaccagggggctacggccccatcgattacaagcggaacctgccccgccggggactgtcgggatacagcatgtttgctttgggcatcggggccttgatcttaggctactggagaataatgaggtggaaccgggagcgtaggcgcctgctgatcgaggacttggaggccaggatcgccctcatgccactcctccaggcagagaaggaccgcaggaccctgcagattcttcgggagaacctggaggagg

SEQ ID NO: 118147 - DNA, 254 bp, Zea mays
  Clone ID: MRT4577_39239C.1
cggaccccaaggagtacaccaagacagcaagcaagtgtagtactattgaatagtcattctctatccctgtcttgtgtatttctctctagatcaattgttggcgcgtgttctagccaaaagagagaggtgaagtgttgctgcaataaagagttagtgagcgtgatcttgagcaaggctttcatgttgtgttcttctaccgtcgagctattgagttgtgattgtcgtggttctgctgtactgcaacaccattggat

SEQ ID NO: 118148 - DNA, 533 bp, Zea mays
  Clone ID: MRT4577_3923C.1
cattgggtccctcgaggccggccggggtcttctacagaagcaatacacccagacgtcttcgccctaggcgactgcggcacaatcgatgcagcaaactatcccgccaccgcgcaagtcgcaagccagaaagccgtctggctcgccaaacaactgaataaatcgtcaaccctacaaagttcagcaaagggcttcacgtaccgcgatctaggcacgctggcctacattggtaattggaatgcactgttccagggcggcggcaagtggggaggcagattacaaggttatgtagcgtggattatctggcggggagcgtatatcacgcgaacggtgagtttgcggaataaagtgcttgtgcctgtgtattgggttgtgaattgggtgtttgggcgggatataagtcgattttgaaagtccctgtcctggtcaatgtaaaatgctcaaggagaagaagaagaagaagacaaaaacggaacaaattcaatgtttgcatacaacaacagggtatccataaaaaaaaaaaaaaaaaagcggcc

SEQ ID NO: 118149 - DNA, 352 bp, Zea mays
  Clone ID: MRT4577_39240C.1
aataaatgcaccactgatacgaaaaactttttttgcattgcatagcaaagaaaaaaatgagcagcagcaacacactgcacagggtgtcgtggcaaaacgtacgtcgatgagcaccttatgtgcgagatcgagggccaccacctgagctctgccgtcatagtcggccacgacagcgccttttgggcccagagcaccgtattcccacagttcaagccagacgagattaccaacattattaaagactttgaccagccttggtttttggccctcatcggactattccattggcccaccaagtacatggttatccaaagcgagccctgctcttttatccatgggaagaagggattct

SEQ ID NO: 118150 - DNA, 986 bp, Zea mays
  Clone ID: MRT4577_39241C.1
cttgatccaggtggctgccagcaagacgaagatctacatggtgcttgagctcgtcaacggcggcgagctgctggacaggattgcggccagtgagggaaagctcccggagcaggaggcaaggaggctcttccagcacctggtcctttcctctactctactctactcactcactcatcactcccaggcggccaaacagctccccaggtgctaattccttatgccgaatgcctgcaggttctgcagaacagaggattgtactttacttggagctttatgcaagctgtgtggagtacatcacgccgctaagagacagcatgtcatcagtgtttccctcagcacatttagcttttgccagcatcgacctgaatgcacacactgtctttgcgatcacaacggccttggcaattctcccaacagtctgtctcaggaacctcagtctcctctcgtatctttctgctgacggtgtgatggcgacaattgcagtcatcctctgcctgttctgggttgcctgttctgggctctgatactcccatgtgcgtgctacctctccatcaagaagggcgcagtgccattgtgggagatcatcctgtgcatagtcatcataatgatcggcgtcgtatgtgcatgcgtgggatcatacacctcagtcagccagatgattagcagcaccaaatagcgcacgctagctgatatttatctagtgtctatggatccttccaaatgctttgatagagttggaactggcagcttttcgtagctaagtttatttgttccttctttatggcagaaatttggtaagagagagtttagttgtgggaggacaggcggcgaaggagtaatatgagtttagtgtggtgcttttgtgactgatcatctctggagcttttatgaatgatctagctagctatctgtaaatgatctagttgtgaatgatattataattgtgatgcttttgtgaatatataaatgtggtgacttttgtattt

SEQ ID NO: 118151 - DNA, 161 bp, Zea mays
  Clone ID: MRT4577_39242C.1
gaagaagtaaacagagaattgataaatttacatgacatggggggcatattttagcagtctcaggatctgagggaggggaaactaggaagaacatgcggaaatgcccacaacgacttgtcttgctaacaacagctgctacaacctgaaccctaaaactaagg

SEQ ID NO: 118152 - DNA, 1077 bp, Zea mays
  Clone ID: MRT4577_39243C.1
ccgggtgacacattccttctcgagcttttgacaatttccaatttgtaaatttttcggagataatgtccaagaacatggcacaatcaaggaaagaggctgcatttgctctttcagcattgatggagataccacaacagtataaagcaaccgtggaattaggaattttaggtcgtcgctcttccaagtctcccaacagagttcctctacctccgccttccgcaagtcatgatgcttattcctattcatctaaaagctttagcaaaccaaccacctaccctcagagttcttcatcctcatcagcctatcctcaatatggaactccacatacagccaccccggccgcaccttcgtccacttatgacaaccaggtctgtcctatctgtcttgtgaaccccaaagacatggcgtttggctgtggacaccagacctgctgtgactgcggacagagtctcgagtcgtgtccaatctgtcgcactcccatcaccacaagaataaagctatactagcaagtggtggctttggatcattgccaatgggtggtatactggagccaccctgcctcacactggaggatcgcgacggcatgtcccaataaccgtcggaacacccgctccgtagatcgattggagctaaggattgcagggccaagcttggatcgattggagctgaggattgcagcgttggtctatcggacagggttgccccagtattcatatccacgagtaatgatccaaatcgcagcttgcaaaaaacaatctctatataaacgagaagaaagagagaggagaacacaaaggtagtggtgtggtggagcagtcaattgcgtgtcgggccatgacacgcaacttcccttggtgccttcgttacttgtcaaaccagcaacactagttgtacatatcagaatttcgtgcttatctggacttctgatgccaggcttagaggattctttatttgtgcgcgtacttttagtttcgtccgagatatatgttgatttgttctttgcttgcaattgtgtaaaaaattcaatccgcaaaattttgttttggtgaatcagaaaaaaaaagtatttggtaggtg

SEQ ID NO: 118153 - DNA, 678 bp, Zea mays
  unsure (1)..(678): unsure at all n locations
  Clone ID: MRT4577_39244C.1
tgctgnaataatatggctagcatgngaaatgttcctaatcatggttcagctcgaatcgattgcatacaaaatgattatgtacgtatgagggcattccatctatgcataaaacgtttctgctagcaggtagagccattaagtctgagtatctgataattggcaatttatcaggcgataaatttaaaccaactattatctaaatccttcaattgaagctctgattgggaacatattatgctaatgatttccttgctgactgtttgtcttatttcattgtcttacaatttgatgaaatgcctcacctcctgctaatgatttccttcattctatcaggcaaattctctttccaacacaccagatacatatgaacaagacatctcgattattgggcgaacactatcgaaattcgatgaagataatctgattccatgtttcggatttggagatgcatcaacacatgatcaagacgtctttgtttctctcctgacgagaaaccttgcaatggatttgaagaagcttttggacaatgcagggaacttgtaccacattttcgattagctcggaagctgctatgccttgttcggccatttaattgcattgttcatatgggtttacactaattcttaaaaggatcaacaccctttgcaccgatgtgaaacaaagtgggggaccataccc

SEQ ID NO: 118154 - DNA, 689 bp, Zea mays
  Clone ID: MRT4577_39245C.1
cattgggaccctcgaggccggccgggacatcgtcttctgcctcccgacctccgggataaagaagtcggatgcgatgtttctcggagctcagatggatggccagagcaccggcgatggcagtgccggtgcgccgccgatttacagcaacaatggcggttacaaaccgccgatctacaactacggcggcggaggttctcgttggccggcgacgacaacctcgtccgcgagcagcaaaagatgcatgcagccgtggctcttgctagtgctcgtctccttttctctgaaggcgctcggctgatcttgttcatgcaatgccttctcgagaagagtttgacgaagaaattaatggaagatcgatctgatgactggtgaacatgcatgttagcagttatggcttctggatcgacgaaaagaccgcccgatcgagaggctgaagagggccttttctggcatttagttctgtgccattcgagctgatgagagaaaccggctggctaatagctaagtattggttgggtggtagataagacattagctgatgatctaaacaatagctgattttcagcggctaactgttaggttctagtgaacaaagagaaaaatgttgtatagattcaaacgactttgtaaatcattggttcattttaattgcagtcagattgagataaaaaaaaaaaaaaaaagcggcc

SEQ ID NO: 118155 - DNA, 2667 bp, Zea mays
  Clone ID: MRT4577_39246C.1
cggaggacggagcgctcgtgcggaccacgaggaggaggagagagagaggctggaagccctagccccgacctgattgtgtgcgtctgcaggggattgcggcgatgcgtaacacgtctctgctaagagagagagccattaagtctgagtatctgataattggtaatttatcaggcgataaatttaaaccaactattatctaaatccttcaattgaaactctgattgagaacatattatgctaatgatttccttgctgactggttgtcttatttcattgtcttacaatttgatgaaatgactcacctcctgcagcgctgcacgccagcgtggaaactggacaagctgcctccgccaaatccacaccaaacgggacggtcgccggacgaagcatgcccgatactcccctcccctcgcccttcctgtccccgcggccagggccgccggccctgtcccgcctgtcccaccccccgccccccacgattctcccgctgctagcgccccgtggctggcggtcgctgccgctgcgtggtcggcgggaccccccccgccgcacgcgggaggctcgcgacggcatgtcccagtaaccgtcggaacacccgctccgtagatcgattggagctaaggattgcagggccaagcttggatcgattggagctgaggattgcagcgttggtctatcggacagggttgccccagtattcatatccacgagtaatgatccaaatcgcagcttgcaaaaaacaatctctatataaacgagaagaaagagagaggagaacacaaaggtagtggtgtggtggagcagtcaattgcgtgtcgggccatgacacgcaacttccctccgtgccgtacctgtaccagccccccgccgcactagtacctgctccggcgccgcaggttgcgaagccgcggcagctggagcggcggtactcgcgtattgccgacgactatcactcggtggaccaggttactgatgctctagctcaagcaggacttgaatcatcaaatcttattgttggcgttgatttcacaaagagcaacgagtggacaggcaaattctctttccatggacgcagtctacatcacattagcaacacaccaaatccgtatgaacaagccatctcgattattgggcgaacactatcgaaattcgatgaagataatctgattccatgtttcggatttggagatgcatcaacacatgatcaagatgtcttctgtttctctcctgacgagaaaccttgtaatggatttgaagaagctctcgatcgatatagggaacttgtaccacatttgcgcttagctggaccaacatcatttgcaccaattattgagatggctatgaccatcgtggagcaaagtggcgggcaataccatgtcctattgataattgcagatgggcaggttacaaggagtgtagatactgcatctggacagctgagttcgcaagagcagaaaactgttgatgccattgtgaaggccagtgaattgcctttgtccattgtgttagtaggagttggtgatggcccctgggacatgatgaaggaatttgatgacaacattcctgctcgagcttttgacaatttccaatttgtaaatttttcagagataatgtccaaaaacatggcacaatcaaggaaagaggctgcatttgctctttcagcattgatggagataccaccacagtataaagcaaccgtggaattaggaattttgggtcgtcgctctttcaagtctcctgacagggttcctctgcctccgccttccgcaagtcatgatgcttattcctactattcatctaaaggctttagcaaaccgaccacctaccctcagagttcttcatcctcatcaccctatcctcactatggaactccacatacagccaccccagctgcgccttcagccacttatgacaaccaggtctgtcctatctgcctcgtgaaccccaaggacatggcgtttggttgtggacaccagacctgctgtgactgcggacagatcctggagtcgtgcccaatctgtcgcactcccatcaccacaaggataaagctatactagcaagtagtggtttggatcattgacaatgggtggtatactggaggagccacccagcgtcacactggaggatcgtgtcagcatgcccatagatcgattgcaatcggaaagctggagcggcactccatagatcgatcgattggatctaaggattgcagggacaaagcatggatcaattggagcgaggattgcagggccgttgattcatcgctcagggttgtcccagtattcatatccaccaggaatgatccgaatctcatatcgcaataaataataaaaaataataaacgagcagaaagatgagaaacacacacaaaaaaagtggtggcgtggaggatcagacgattgcgtgtagggtcatcacacgcaactcagcttggttactactctaatctgcaactttagttgtacatacccaactttaggatcagaggattccttatttgtgcgtgtgcccgtgtttttttgtttgtttcgtgatttcgtccgagatatgttgatttgttctttgctagcaattgtgtaaaaattcaatccgcattttttggcgccatcgaaaaaaatgctatgttgtaaatttggccaacaaaaaaaaaaaaaaaaaaaagcggcc

SEQ ID NO: 118156 - DNA, 337 bp, Zea mays
  Clone ID: MRT4577_39247C.1
gggcggcgggaaaaaaaaacatgactggcgttaaaccaccaccactcaaaacaacatggggttccacaacttacgatgatttacccccttttcagagcatgccagttacccccaaattacacgcttttcaagcctaatagtcttaataacacactttacagcaccttaaagctttacaaccaaaacgtgcagcttcaattactggaccgggcaaaagggaaaaagaaaccccaaagaacccattcacttgcccatttaaactcaactggttaaaattatggatttaccaacctttggctgtcgcctgctgggatggaaaaaggcttattattttttt

SEQ ID NO: 118157 - DNA, 406 bp, Zea mays
  unsure (1)..(406): unsure at all n locations
  Clone ID: MRT4577_39248C.1
gccacgcgtccgctcctgccaaggctctctgcgagcacccgcggcggcagagcccgtgcgtgctccttaactacttggcagcgcgcgaccgcttgctccggggccggatcctctaggcgggcctgcaccccttctacatccgcctcccctcgccggacggcaccagcaccgacgtgcacctgtgggcgccgacgcggtacgagcggacgtccgtgctcctcctccactgcttccgcgcgtcagccacgtggcagaaaaccacgtacctccgcaagatactcgcggccgggctcgaatgcatcgtcccggacctcctattattcggcgcctccttgtgcacgggtgacgaccgntgcgacaccttccacgccaggaccgtgaaggacgacatggactgcatgggcgt

SEQ ID NO: 118158 - DNA, 465 bp, Zea mays
  Clone ID: MRT4577_39249C.1
tttttttttttttaaaaattttttttttttttttttttttttttcttttaattttttacccggtaatttttggcggatccgtgtaggctaacgagagttccctaaagggagggggagaaaagcgagatagaaaaatggggagagaaggggggggggggaaaaagtgacacaaaaacaatacccagaaaaaaaagccgaaagcaaaaagggcaaaaacaggggggccaaaaaaaaaaacaaaaaaacactaagtgccataagcccagtgccaaaaaaaaaaaagggaaacccaaaaagaaagcggcaaaaacgaagaaaaaaacgggcggggaaaggaaaaaaaaggagggggccccagggaggagggagactgaaaaaaggagacgggcaaaaactgattgcccttaaaagagtggcactaagagaaaaacaccaaacggcccaagccggggaaaaccaccatgc

SEQ ID NO: 118159 - DNA, 340 bp, Zea mays
  Clone ID: MRT4577_3924C.1
gggcaaagtcaatgtttgcggtgaagtaggacagtgctgatattactgcgtctggtgatagggcctttgggcctggagcacaagaagaaggtggagtccaagaactcgctggagaactacgcctacaacatgcgcaacacgatcaagggatgcttggcagcaggctctgatatgatcatgacaagaactaatgttgggagcccgcatgctgaatctatgacgacagacattattaccaagattgtatgccggctggggcttgattaaaccatgtcggaagtttccaactccaacacctcggtgtgactaatcagacatattggtccaaggttacggactg

SEQ ID NO: 118160 - DNA, 498 bp, Zea mays
  Clone ID: MRT4577_39250C.1
gttacaaattgatgccaatgaattgatgtgtagcagtggagttacaaatagatgccaatttattgatgtttaaaccacgtgttggaccaaaccatgacatagctatgcttgctttaatgacaggagatactgtacttccagcggtatatcatccgcttcagctgtaacaaatattaaattaataaccaaagccactttgattccagactgacctaacctattctcaacagttggttacctactgaaaaaataatgatcttctaaagtgaagcctcgctacacatgtttggaggcgtactatgagaaataatggatgctatcaattgcgtagaagttggggcaggcatagtggttgttcttgcaagtttcccaatggacgatgtcgacagaccattcatctttaagatgcatcttgagagcctctaccatggtattcatgctcttgttggacaagtccttgttagccgtatcattaatgttgacatcccacacgtgatg

SEQ ID NO: 118161 - DNA, 358 bp, Zea mays
  Clone ID: MRT4577_39251C.1
cggactcctgggttcccttatatgatagcttttagggaaagggggttgtttttctggggggagtatagttgaagttcagtgacgtcaaaacttatcgaaggtcgccccacattatgtctgctaagtgcaagcttcacaaatcatacattcatactgttggagtgacccaatatatcctggtagaaagcaactgttgagcacatagatcttgtatcttagacctcttgcggagattttttttttttgcattgccacaaattagcgagcgaataactatagtgattagagattgtgaagtagatgcattgtgcgttagttgaaaagccacaatagtcaagcattgcacttactgtactag

SEQ ID NO: 118162 - DNA, 275 bp, Zea mays
  Clone ID: MRT4577_39252C.1
aaaagaaaaagagtttttttagggccccgctttaaaaaaaaaaataggcgggcccctagacaacagggaattaatccgggcatccttaaaatttccatttttacatttttttcccccgccctttaagctcttttggcccttaaaaccggcctgtttggtttgttttttttctacccggtttcccccccacaaaccacaaacgatgccctttgttttttacccatttgcaccgggctttttatccccctggcgggaactttatgcaaatgggcggt

SEQ ID NO: 118163 - DNA, 694 bp, Zea mays
  unsure (1)..(694): unsure at all n locations
  Clone ID: MRT4577_39253C.1
ngaaaaaaacgaaaagcccaagagnntggggggatnncttatttcaggnaatagnaaaccaaggnagaaaaagcgaggcattgagtctcaaattatttagaggaaaaccaccgtttttatagtatgtgttgtgaacattttaggcaaagaatgcccttgatgattttacaaaaagaatctgatcgcgaggataacaagcgggaaaagcttttttccactattttgcgaagccaaggaaaggagcattctcttgaaaaccttttgcaactaagggaggatttgagggacccggcggcctgtgaggcactccgccccatttttcgggagttgagtaataaactataaagtcgtacctaatcaaaatggggtggggcaaatatctttcctggtgtaggtttctcataggaaaccgaggcccctactttccttctaagggtaggtagggggaaagaagagtgggttagcgggcttctttcacttgttacttttcctaagagtcacccatactagaacgcacacggaagatatggcttcactatggatttccttttcgtgctatatgtcaagcggaccagcatttgaaagtgctgcgaatcgatgagatgccttgccttctcccaggactagactgtcatcgaattggaaagtgtaggaagcattcttgtgcgggttgttttgagcttccttgctttct

SEQ ID NO: 118164 - DNA, 474 bp, Zea mays
  Clone ID: MRT4577_39254C.1
gggggggggggttttttttttttttttttttttttctttaagaaactatttttatgttttttcatatatataatgtttgtacattgggagaatgacgacaagccaaacgatccgatggagccccgcaatactacgtacaagggggggggggggggggaccaccaaattgcttgagctgaacaatccaaggaaggagcatcatcaggggacttcgacgggccatggggcgctcttcttgagctgcttcttggagcccaaccaggggaccccgtccttgggtgcgaaaataggagcttctggcttacgggccacggggggggagcttggaagagaccctctgctgggtaagagcatgagcccctgagccttctcagctgagacggggacaaatacctggacagaaccagcataaaaaatcgtcaattgggctggctttggcctcaccacatcccttgggccatagaaaccaacagt

SEQ ID NO: 118165 - DNA, 1247 bp, Zea mays
  Clone ID: MRT4577_39255C.1
aattcggcacgaggatcgccgccgctccgatccatcatccacgctcgcattatctatcccttctgattaaaattaatctccgtgacgatatcgcactgattccttcttcctcgttcccgctgagcggtcagcggctgcagagtgcagactgagtgatcgctacttctacgcgcgccgcgagcaccaccgaacaagtagcaaccggggtggattgagcgtggtcccaacacgggccagaattccgccatgatgaggccatcgccgccgcggcgcctatccctcgccgcccccttcctcatcctcctgctgctcacgctcctctcgccgcctcgagcggcggcggcgggcggctcatccgcgtgggtggcgctccgcggggcggcgggcagccgaaaggcgtctccggcggagcaggaaggggcggccgcggggctgctgcgccggctgctccctttccactctggcagcttcagcttccagatcgactccaagggcggcgtctgcggtcaatcaagctgcttcaggataagcaacgtcgttgacggctcgggcaaaggtggagcggagattctgatccagggaaccacagctgttgagcttgcatctggcctacattggtatttgaaatactggtgtggcgcacatatctcctgggacaagactgggggtgcccagctggcatcgattccttctcctggatctctgccacgggtgcagggcaagggagtcaagattgagcgtcctgttccgtggaattactatcagaatgtcgtcacttctaggtactcttttgtgtggtgggactggaaaagatgggagaaagaaattgactggatggcgcttcaaggaattaacttgcctttagcatttactggacaggaatctatctggcagaaggtttttaaggtagtgtgacagacacatctacatctctgaaatgttctatcaaagtttcaccttatattttataaaatatacttccattagtttttacagtttatagcactatagtacttcaaattaaaagaaaggcagacccagcgctagaggctcccacatgagtggggtctggggaagggataaaccgagggaagcatttcccctgcaaatgccgagagtccgcttcgaacgcgcgacatggtgactcagtgagatagttcttgccactgcattagacctatagtactttaaattattgagaaaagtttgattgatggtgggctatatgtttaagctgagcagaatct

SEQ ID NO: 118166 - DNA, 378 bp, Zea mays
  unsure (1)..(378): unsure at all n locations
  Clone ID: MRT4577_39256C.1
atattgtgggttttctggtcgtttttttcttnnnggtttttttttcccacagaggaatttggttttgcgggaaccccccagtttcctccacatttcccaattttttggctttacaaattttacataaaaaaaagggccctcaaaaaaatgggggcccttgcaaaccctaaattttcttttcctctttccagggggggggggctttgaataaaagtttactttaagtttatttgggccgccttgtggttttttgcaccaacagaaggcttttttttttttggaagaaaaacatgcgcccctcccgggggggggatttaaaaatgttccccccctcatttggggtttaaaggttggttttaacaattagccagccttggg

SEQ ID NO: 118167 - DNA, 603 bp, Zea mays
  Clone ID: MRT4577_39257C.1
ctttctctcgtcctaaggaaggtcactatccgaaacaagggtttgcttcacacatgaagctatccttctcatcatcatcgagagcttgcagtgttgcactagagacatgttgtaccaccatccttacaataggcttgctgcaccggcaacaggtggaagcagttgcagttttgactctgcggcgctgccaaggtgtaaattttgaggaccttcaggcgcttgcctcactcaagaagctgcatatatcccatctagacataacagatgagcagctgggtacttgtttgcgaggtttacggtctctggcctctctggagatagacaactgcagcaacataacatctcttccacatgtggagagttcgagcggattaacgacgttgcacattcgacagtgctccaagttgtcctctctgcattccttgccgagttttgcagcactggaaagcatgtcgatcgacaattgctccaagctcaccttagagtctttccctgccgacttcagcagcctcagttctctgagaaaattgaacataatgtgctgcacggggctggagtcgctgccaagcggtttcccatcttcactgcaagttcttgatctga

SEQ ID NO: 118168 - DNA, 375 bp, Zea mays
  Clone ID: MRT4577_39258C.1
ttgaagttgaaggtggcttcccgtcatgggcgcacccgcggccaccgtactaatgatcctgatgcgcccaaggtcgagcacagttgctagaatgcaatggcgaatgctgtgcgtgcactgcatggtcgttactgttccattgaagacgacgacggccggatcggagtggcgcaccattagtaggttagtacatatgatgaagtgtgaccgtcgtccctagtgctactttgttgccgtgcaataatcagatgtcgttggtctcatcatcagcttcgattcatgtgctgttgcatctttcatgcaatattgtttgacaactttgcattgtgtgttcttaaattaaatctctcttgtttaatcactttgaatttgatc

SEQ ID NO: 118169 - DNA, 106 bp, Zea mays
  unsure (1)..(106): unsure at all n locations
  Clone ID: MRT4577_39259C.1
gactccaaatacattatgttgttcaacgtgtagacagatacttaagagtagcgggactgtatantgcaatacacaatgcactgagttctcccatcgagtgagaata

SEQ ID NO: 118170 - DNA, 430 bp, Zea mays
  Clone ID: MRT4577_3925C.1
actcatcgcgaccagcacaaggactagatggaacggctgatccaggagcacgcggagaggctccggcgcgcgctggccgacacccggcggcggcactaccgttcgctcgtcggcgcggccgaggcggctgctgctcggcggataagggagaaggagtcggaggcctgggaggccgcgcggcgccgcgccgacctggaggatcgggtcgcgcggctgagggcggaggcggcggcgtggcaggcaaaggagctcgcggaccagtccacggccgcggcgctccacgcgcagctgcagcaggcgaggggcaaggccaccgacgccgaggaagggggcaacgcggcggacgacgccgggtcgtgcttcgtcgacccggacagggtggtggagatcgccccccccgtcgccaggccgtgccggtcgtgcaggctgc

SEQ ID NO: 118171 - DNA, 1211 bp, Zea mays
  Clone ID: MRT4577_39260C.1
atatagttaaagttaaattttgtataatgcatcttttgtggtagagcaacttttgattggattgtgcaaatatatatattttcctcgatcgataatatggagaaaaaaggaactatatatttgaaagaccaccgtgtgggcgtcccaaccattaagtttgtgacgaagctagtgagcagctcagaaggaggcagaggcacgcggtggcgtagagaaagaggagcgagagtcaggccagaactgggcgctcttgaccttggagatgctgttgaggacgcctagcggcgtcacatctcccaccaccgtcaccttcttcgtcgcgatgtcgatgtcgaaagaagtaacgccttccatcttggagaggtgcttcttcaccttgccagcgcaccccttgcagtgcagagataccctcaaaaccactacctggtgctgcgctgttctcgtggaacatgatctcaccaccacagtgttgtcagcggcggcgacgacatggcctccagctatctctgacgacgaagaggaggaggaccctgcgcctgatgcagacggctcagcgaataattccagtggcggcgccacgagctgaagccttcttgacggaacagccggcgacgcggcatcgccgtggctgctggggaatgtgtctgtgtcatcctcggcggcggcgtcaacgaaggagggccgccgcggggacggaagtggcggcagggagtcgacggcagtggtttcgtcgtcggactgcatcatgagcctggaggagttgagcaggaaccgggacgagctcgcggacgcgtgggggaacgggtggagcgccttctccttgccgtttctcctatgctccgacgacgagctaccgctaccagcggcggctgctgctgctgtgttcttcttcttcttattcctccttttgtctttgccatcgacgtcgtagtggcaaatctgctgccgctgcttgtaggaggaggacgaatctttggtagtactgaaactagagctgggtctgggtggcttgggcaccggtggcgggagacgccggtgagggtcccggaggtgcggagagtgccggtcgatggcgcggccattggaggggacgacggaggtggcggccgccgaggagcaggacaggccctgcagcctctccttcacgtacttgtccttccagcgcaacaaggaagccatgtgtgaaccaagatcagcccggcccggccggc

SEQ ID NO: 118172 - DNA, 794 bp, Zea mays
  unsure (1)..(794): unsure at all n locations
  Clone ID: MRT4577_39261C.1
cggcccgggctgccatcaacgccagatcctagcccgccattaatgccgttaacccgagctcgagatcggaggcggcggccccgtgttcgcgccaggagtggccaccgtacgtgtgacacgcgccgccgccgtttataaaagcacaccgccgctcgctcgctcgcccgcccgcccgccaccactcactcggctcgggttctgctctgcacctcagtacctcacactgtcaccgcgcttctgtgacctgacgaccttcggcggcaggatgctcacgtgcatcgcgtgctccaagcagcagttcgccggcggcggcccgccgctgcacgaaccgccggaggacgacgatgtagttgacggaggaggcggcggcacggcgacgcccagaacacggcacgccatcaaggcgctgactgcccagatcaaggacatggccctcaaagcgtcgggcgcgtacaggcactgcaagccctgcgcaggctcctcggcggcggcctcgcggcggcaccacccgtaccaccaccgcggcggcagcgccttcgggggctccgacgccggctcggcctccgaccgcttccactacgcgtaccgtcgcgcgggcagctcggcggacgccacgacgtccatgagcgtgcgcacggacttccctgccggcgacggngaggacgacgaggtggcgtcagaagccgctggcggatgcggtggcaaggacgacgacgccaaggagtgggtggcgcaggtggagccccgcgtgctcattaccttcgtctcactggcgcaaggtggcaacgatctaa

SEQ ID NO: 118173 - DNA, 299 bp, Zea mays
  Clone ID: MRT4577_39262C.1
gtctcaaacatcactgccaagactttattaattattcgaatccaccgtggacgactcacaaaagcgagggacccaggatgaacaaaaaaaaacagctttcggtttacagtttttacacaccgctgacaaacaatggttatacgcctgaagcttgttgcccatgtaacagggatttattcccccgatcttataaggtgcgcctttgagttttttcttttctatctggaacccaagctttgatataacacccctttctagattaagcctaaactcttttttcctagcccttttaatttgga

SEQ ID NO: 118174 - DNA, 417 bp, Zea mays
  unsure (1)..(417): unsure at all n locations
  Clone ID: MRT4577_39263C.1
caagtgnnaactcagnanaagaaaacctagcgcggnncgggcgaagcatttgcaagggccgagcctnngcaggggcccggnagnncggagacccggagggagggggagacccgtcgcttnngcgatgtcacncnnggcagcatccccgccgnnccgaaacccgnnccgtcgtctgtctgtcnnngtcgcaagggcgtcccccgagccatgcgagcaggagcgatgccatnccgcgcccgtctggcgcccgtcccgnntcccgtcgtccctaccgccnngtctgggagaaagggagnncggtaangggcggctttgcagcttttttacgacgtnncgtctgtcggtcgtcttgcccaccttgcctactnnngctgctgcctnngctgcaagggggaaggaaataagggaacccggaaa

SEQ ID NO: 118175 - DNA, 1836 bp, Zea mays
  Clone ID: MRT4577_39264C.1
atggcttccaacgacaacgatcgccgccccaccgacgacaaggcttccatcgccctcctgcgtcgcatccgtgccggagagcacgtggatttcgtccatggcgtggacgtgtgcgatgctgctccagagattctcgtcgcgaacctggaaccggtgccgggctatagcagcgtctggtacctctactgtgccaagaaatatacgaacaagcgaggccagctcagcgggtaccgggagcgcgccatcaccggtggtggcggcgcgtcctggcacccggagataggccgcaagaacgtccagggatccggtggcggcacgttctgcaccttcacctacggtcgcaagcacaagacggaggagcgctccactagatcggtcgtcgtcgtcaatagactgggctggaagatggtagagtacgatgacttggccgaggccgacgccgccagcaactacgtgctctgcaaagtgtatcgaacggctctcgcgaaagggaagtcatcgttgccgtcctcctcctcctccggccagaacgagaatgcctcctcgtcctcgtccaagccgccgacggccaagaagaggaaggcctgtggcggtgaccaccccgaggctgcgccagccagcaagttgatccagcagcatgcgcagcaagtcgaagagaaggcctgtggcggtgaccaccccgaggcggcgccagccagcaagttgatccagcagcagcaagtcgaagagttaaacgtcgaagactacgatatagacatcatggagatgttaccagacgtgttatcaggcgagccggtgccggagctaggaatgcagcagccaaccgacgccaggacggagcacgacggccggttcaacatcgtcgaagagttaaagatgttgccagacgagccggtggcggagccgggaatacaacagcctaccgacgccgagacggagcacgacgtccggttcaaggtctgctgctcgtcagagcacgggcacggtagcggctctagcttcagcatgagcatcgaagaagagttaaacgtcgacgactatgacatagacatcatggagatgatgccagacgtgttatcaggcgagccggtgccggagccaggaatgcagcagccaaccgacgccaggacggagcacgatggccggttcaacatcgtcgaagagttaaagatgttgccagacgagccggtggcggagccgggaatacaacagcctaccgacgccgagacggagcacaacgtccggttcaaggtctgctgctcgtcgtcagagcacgggcacggcagcggctctagcttcagcatcaacatcgaagaagagttaaacgtcgacgactatgacatagacatcatggagatgatgccagacgagccggaccacccggaagcgacgccagccagcttgatccagcagcaagaagcagatgtgcaacagcacgggcacaagcacggcgttggcttccacttcgagggaatgcaacagccaactaatgtcgccgagccggagcacgacgacagccgatccatccatcctatgtctggtgatccgttgttggctgcccaagtcagcttcgacttcgagggaatgcagcagccaactatagtcgccgagtcggagcatgacgacggccggtccgtccatccactgtctggtggtccggtgttggccgaccaagtcagcttcgacttcgagggaatgcagcagccaactacagtcgtcgagccagagcacgacgacgactggtccatgtccatccagctaccgagaatgtgcagccagtggcggagccaaaaatttttagaagcctgggcaattttaaaagatcatatgatgtaa

SEQ ID NO: 118176 - DNA, 2040 bp, Zea mays
  Clone ID: MRT4577_39265C.1
atgtcttccaacgacaacgatcgccgccccaccgacgacaaggcttccatcgccctcctgcgtcgcatccgtgccggagagcacgtggatttcgtccatggcgtggacgtgtgcgatgctgctccagagattctcgtcgcgaacctggaaccggtgccgggctatagcagcgtctggtacctctactgtgccaagaaatacacgaacaagcgaggccagctcagcgggtacaggcagcgcgccatcactggtggtggcggcgcgtcctggcacccggagataggccgcaagaacgtccagggatccggtggcggcacgttctgcaccttcacctacggccgcaagcacaagacggaggagcgctccactagatcggtcgtcgtcgtcaatagactgggctggaagatggtagagtacgatgacttggccgaggccgacgccgccagcaactacgtgctctgcaaagtgtatcgaacggctctcgcgaaagggaagtcatcgttgccgtcctcctcctcctccggccagaacgagaatgcctcctcgtccaagccgccgacggccaagaagaggaaggcctgtggcggtgaccaccccgaggctgcgccagccagcaagttgatccagcagcagcaagtcgaagagaaggcctgtggcggtgaccaccccgaggcggcgccagccagcaagttgatccagcagcagcaagtcgaagagttaaacgtcgaagactacgatatagacatcatggagatgttaccagacgtgttatcaggcgagccggtgccggagctaggaatgcagcagccaaccgacgccaggacggagcacgacggccggttcaacatcgtcgaagagttaaagatgttgccagacgagccggtggcggagccgggaatacaacagcctaccgacgccgagacggagcacgacgtccggttcaaggtctgctgctcgtcagagcacgggcacggcagcggctctagcttcagcatcaacatcgaagaagagttaaacgtcgacgactatgacatagacatcatggagatgatgccagagttatcaggcgagccggtgccggagccaggaatgcagcagccaaccgacgctaggacggagcacgacggccggttcagcatcgtcgaagagttaaagatgttgccagacgagccggtggcggagccgggaatacaacagcctaccgacgccgagacggagcacgacgtccggttcaaggtctgctgctcgtcagagcacgggcatggcagcggctctagcttcagcatcaacatcgaagaagagttaaacgtcgacgactatgacatagacatcatggagatgatgccagacgagccggaccacccggaagcgacgccagccagcttgatccagcagcaagaagcagatgtgcaacagcacgggcacgagcacggcattggcttccactttgagggaatgcagcagccaactaatgtcgccgagccggagcacgacgacggccgatccatccatcctacgtctggtgatccgttgttggttgcccaagtcagcttcgacttcgagggaatgcagcagccaactacagtcgtcgagtcggagcacgacgacggccgatccatccatcctacgtctggtgatccgttgttggctgcccaagtcagcctcgacttcgagggaatgcagcagccaactacagtcgccgagtcggagcatgacgacggccggtccgtccatccactgtctggtggtccggtgttggccgcccaaatcagctacgacttcgagggaatgcagcagccaactatagtcgccgagtcggagaacgatgacggccagtccgtccatccactatctggtggtccggtgttggccgcccaagtcagcttcgacttcgagggaatgcagcagccaactacagtcgccgagccggagcacgacgacggccggtccatgtccatccagctaccgagattgtgcagccagtggcggagccagaaatttttagaaggctggacatctttaaaagatcatatgatgtaa

SEQ ID NO: 118177 - DNA, 394 bp, Zea mays
  Clone ID: MRT4577_39266C.1
cctgaagaatagcccattggtttctttctgtcgtaaccatatagaccatattatgccattacaagatagttttgctttaaaaaaaaaaaaaaaaaaaaaaaaaaaaaaaaaaaaaaaaaaaaaaaaaaaaaaaaaaaaaaaaaaaaaaaaaaaaaaaaaaaaaaaaaaaaaaaaaaaaaaaaaaagaaaaaaaaaaaaaaaaaaaaaaaaaaataaaataaaaaaaaaaaaaaaaaaaaaagggggggggtttccaaaaaaaaaaagaatgggaaaaccttggcataaaacaaaattatttaaattggggggcatatccaaataatccggtgtggaaaaaataaacaagactgaatggaaaaaaattcccaaacataacgaacccttaaaggtc

SEQ ID NO: 118178 - DNA, 1935 bp, Zea mays
  Clone ID: MRT4577_39267C.1
atgtcttccaacgacaacgatcgccgccccaccgacgacaaggcttccatcgccctcctgcgtcgcatccgtgccggagagcacgtggatttcgtccatggcgtggacgtgtgcgatgctgctccagagattctcgtcgcgaacctggaaccggtgccgggctacagcagcgtctggtacctctactgtgccaagaaatacacgaacaagcgaggccagctcagcgggtacaggcagcgcgccatcaccggtggtggcggcgcgtcctggcacccggagataggccgcaagaacgtccagggatccggtggcggcacgttctgcaccttcacctacggccgcaagcacaagacggaggagcgctccactagatcggtcgtcgtcgtcaatagactgggctggaagatggtagagtacgatgacttggccgaggccgacgccgccagcaactacgtgctctgcaaagtgtatcgaacggctcccgcgaaagggaagtcatcgttgccgtcctcctcctcctccggccagaacgagaatgcctcctcgtccaagccgccgacggccaagaagaggaaggcctgtggcggtgaccaccccgaggctgcgccagccagcaagttgatccagcagcagcaagtcgaagagaaggcctgtggcggtgaccaccccgaggcggcgccagccagcaagttgatccagcagcagcaagtcgaagagttaaacgtcgaagactacgatatagacatcatggagatgttaccagacgtgttatcaggcgagccggtgccggagctaggaatgcagcagccaaccgacgccaggacggagcacgacggccggttcaacatcgtcgaggagttaaagatgttgccagacgagcctgtgtcggagccgggcatacagcagcctaccgacgccgagacggagcacgacgtccggttcaaggtctgctgctcgtcagagcacgggcacggcagcggctctagcttcagcatgagcatcgaagaagagttaaacgtcgacgactatgacatagacatcatggagatgatgccagacgtgttatcaggcgagccggtgccggagccaggaatgcagcagccaaccgacgccaggacggagcacgacggccggttcaacatcgtcgaagagttaaagatgttgccagacgagccggtggcggagccgggaatacaacagcctacctacgccgagacggagcacgacgtccggttcaaggtctgctgctcgtcgtcagagcacgggcacggcagcggctctagcttcagcatcaacatcgaagaggagttaaacgtcgacgactatgacatagacatcatggagatgatgccagacgagccggaccacccggaagcgacgccagccagcttgatccagcagcaagaagcagatgtgcaacagcacgggcacaagcacggcgttggcttccacttcgagggaatgcaacagccaactaatgtcgccgagccggagcacgacgacagccgatccatccatcctatgtctggtgatccgttgttggctgcccaagtcagcttcgacttcgagggaatgcagcagccaactacagtcgccgagtcggagcatgacgacggccggtccgtccatccactgtctggtggtccggtgttggccgcccaaatcagctacgtcttcgagggaatgcagcagccaactatagtcgccgagtcggagaacgatgatggccagtccgtccatccactatctggtggtccggtgttggccgcccaagtcagcttcgacttcgagggaatgcagcagccaactacagtcgccgagccggagcacgacgacggccggtccatgtccatccagctaccgagattgtgcagccactggcggagccagaaatttttagaaggctggacatctttaaaagatcatatgatgtaa

SEQ ID NO: 118179 - DNA, 318 bp, Zea mays
  Clone ID: MRT4577_39268C.1
ctttatgtagcagaaagaaatagtgtgtgtttgtgtcttgacaagccgtctgggtccgggaccggggccgtcggtacgcgcgtgcgggacgcgtggcggttatcatcttattgctaagtcagatttcttccttggaaagcttgctgaggctaaccagttcttaaagaagaatgatcaaataaaagtcatggggtgcaggtgtgggaatcaatctcaggactcaattttatcattctccatggctatctctgaactattgcggcttaaagctgctggcaatgaagcattccaatctggtaaatatttggaggctgtgga

SEQ ID NO: 118180 - DNA, 880 bp, Zea mays
  Clone ID: MRT4577_39269C.1
attacgagccctcgccccctccccttctccccgctcgcgccgccgctcacatccctccctcctcctcctccccttcgcggcgccacccggacgctcgagcccccgaccaaccatggcggcagcggctggagaggccccgcgggcgctgtcccagaaggagcaggacatacagatgatgctcgccgccgacgtccacctcggcaccaagaactgcgacttccagatggagcgctacgcctacaagcgccgctccgacggcatctacatcatcaatctgggcaagacatgggagaagctccagctcgcggcgagggtcatcgtcgccatcgagaacccccaggacatcatcgtccagtccgcccgcccctacggccagcgcgccgtcctcaagttcgcgcagcacaccggcgccaacgccatcgccgggaggcacacccctggtaccttcaccaaccagatgcagacctccttcagcgagccccgcctgctcatcctcaccgacccaaggaccgaccaccagcccatcaaggagtctgctctggggaacatccctaccattgccttctgtgacactgactctcccatgcgatacgtcgatatcggcatcccagcaaacaacaaggggaggaacagcattggctgcctgtactggctcttggccaggatggttctgcagatgaggggcactatcctgccagggcacaagtgggatgtcatggttgatctgttcttctacagggaccctgaggaagccaaggagcaggaggatgaagctgctggagctccagagtatgctgccatcactgattacggagctgcagctggtctatggggtggtgaccagtggacctctgacgcacctggctccccggctgttact

SEQ ID NO: 118181 - DNA, 628 bp, Zea mays
  unsure (1)..(628): unsure at all n locations
  Clone ID: MRT4577_3926C.1
ctcctgcaccgctgatgccacccagggggggggggcgctgcacatccccgtcgtccaccgagacgcagtcttcccaccccggcgcggcgctccaccgggcagcttccgctgccgccacgccgcccccgacaccgcgcagctggagtccctccactcggccaccgccgccgccgaccgggtggggtcccccgtcatatcgggtgtccccttcgacagcggcgagtatttcgcggtcgtcggcgtcggagatccgcccacgcacgcgctcgtcgtcatcgacacgggcagcgacctcatctggctccagtgcctgccctgccgccgctgctaccgccaggtgaccccgctctacgacccgcggaactccaagacgcacaggcggatcccctgcgcgtcgccgcggtgccgcggcgtcctccgctaccccggctgcgacgcccgcaccgggggctgcgtgtacatggtggtgtacggcgacggctccgcgtccagcggcgacctcgccaccgacacgctcgtnctccccgacgacacgcgcgtncacaacgtcacgctcggatgcgggcacgacaacgaggggctgctggcgtcggcgggccggctgctcngcgccggccggggccagctg

SEQ ID NO: 118182 - DNA, 185 bp, Zea mays
  Clone ID: MRT4577_39270C.1
ccacgcgtccggaaatggcaaccgttccaggggatctgatctggcaggttgtgaggaagaacaactccttcctggtggagcatttcgggagcgggaatgccaaggtgcatttcaccaaagagccgaacaacctctacaacatccactctttgaaacacttgggtttgggtaacaagaatacttgg

SEQ ID NO: 118183 - DNA, 187 bp, Zea mays
  Clone ID: MRT4577_39271C.1
gtgagcgccgccggctcggccggtgagaactccgaggttccagacaacgtgggagactggcttcgcggcgtctaccgcttcgccaccgatcggaacgacttccggaggaacttgatcctcaatttgggactctttgctgctggagtttggctggccaggaacttgagtgacattgatttgatggcac

SEQ ID NO: 118184 - DNA, 684 bp, Zea mays
  Clone ID: MRT4577_39272C.1
ctctcaccagcggtgtctttggtttgtgaaaacccaattgtccagccctactggatccatcagtgcaatgagcactatggaataaatcaccgttaatgcactcctaagaataacatccatacatattcagtgcagaacctcatatacagacaggagactcttatggcagcactccattaggctacaaactcatccaagcctatcaacaaactggcacacagacattagtagctcagcgaaaccctttgcttggctctaactctcagccatcacgcagactatcttcgcattgcagaccaacctatgggtcagttgaactctgttcccttagatgcgtcaacaacgactaccattcaaccagctacctgctgactacccccatgaatcttttccattcaaccaactaacatcatggaactctactgcttatttacagcagctacaactactaccattcagagctgataattggtgtgagccctgctaccttcttgacacaaccacagaagctggcgccctaccaacacgcagcacctaacgctggccccctcttacaactgcttcaagtgctgccattcaaccaacgttgctttggcaaacccagcagtgatttaccaacaacccatcattgagcggagccctcttccagatttgttatgagctatagctcaatagtaaactgtg

SEQ ID NO: 118185 - DNA, 448 bp, Zea mays
  Clone ID: MRT4577_39273C.1
gaaaggacaatctgcaggcgtacctacccgaagtgagaggcaggacataaggaacgatcccccgtcctgggagaaagtcgagctcgtgccaaggggcgttagccccatcgacaacggcggacagatagcactataggtcgctcctccttatggccagctagaaatactgaagggctgaacactatcagcaactattgctatccatgcacagagcacaaaaggagcttgcttgcttaaccagttttgcagctagactaacgagccgggaaaagtcatattgaccttccctatgactgaggataattcgatcctactttcaaggtatacgtgaacatgcatcattatttatcacaaacattactgtctgaggatgcacaatagtgaaatttgaaatttaggatactgctgggcaagaaacatatgctgacttgtggccactttactacac

SEQ ID NO: 118186 - DNA, 385 bp, Zea mays
  Clone ID: MRT4577_39274C.1
aaaaagaaataaaaattaataaaatataaaaaaatatacaaaaactttaattacaatcaaacgggacttaaattgtgaaactctatagacgggacggactttttttattttttttttttttttaaaaaatattcttaaaattataccacataaaaaattaaaaaatttaaaaaaacaaatttaaatactaaaaaccaaaaaatgaaaaaaaatacttttgtaattcaccacaaacaaactaacattaaaagcatatgaacccaaacttcacacaccattagtgatgacatacatagaaacaaaacagaagaaaaacacgacacgggccacggggtgatccaaactgtggcaaaaaacgggaccatacaaaaataacggccatata

SEQ ID NO: 118187 - DNA, 305 bp, Zea mays
  Clone ID: MRT4577_39275C.1
aaaaatggcaacaagaaggaacatatccaaacatagcagttatggaaagggggataaacccacaagaaaaaatggaccggggggggggggggggccccacagggaaccctgcctcagatcacacaggtaagccctcatcattcgaacaaggtcaagaaaaccagataatattattaaaaggggaaacgctccttggccatccccactcctcaaccaaaaggccagcatcggcccccccggttgcctttgggcgagcctcttactgacccacccgggggggccccccacggaggggcgcgcccggg

SEQ ID NO: 118188 - DNA, 482 bp, Zea mays
  unsure (1)..(482): unsure at all n locations
  Clone ID: MRT4577_39276C.1
tctccttaagcaatntaacaacacgtaccntggatattacttataaaaaatctttnttgaaatatacatgacaaaattctacattnccttnctnaantcaaaaaaaaaaaaaaaaaaaaaaaaaaaaaaaaaaaaaaaaaaaaaaaaaaaaaaaatttttaaaaaaaaaannnnntttgggggggggggggaaaaaaaaagaaaaaaaaaaaaaaatacctttcctttttaaaaaaattttaaancnccaaattttccaaatttccatcaaatttnncnccccttctncctttcttttatnannccccaattccccctatatttnnctttttttccatttcatttccccctctttttaaaacttctttcctttaaaaacccttcctttccccaccttaaatcccctttccccacttcccccttttcccccccttttttcttttccctatatttccccccccacttccccccttctcccccct

SEQ ID NO: 118189 - DNA, 293 bp, Zea mays
  Clone ID: MRT4577_39277C.1
gaggaaaataattttggggctttaataaaaacttttggcaattttgcccaatgtcttttgccaagttgttttttttaaacaataggggtttgggtggccttcccccaacacaaaaataggggtagattccccttctttatgttttgaaaaaataccttgggttcggcctcaaaaatttttttttgaactttgggggaaatttcaaatcccgggagttttttttttcccaaggggacttggtttttgggggaacggggcgggccttactttactgaaccccacaaagttgtttt

SEQ ID NO: 118190 - DNA, 257 bp, Zea mays
  Clone ID: MRT4577_39278C.1
agaacgaggccttatttttttttttttttttgattaaaaccaaaactttattatgaccatgcatatattattggccataccacacatgataatgcgtgacgacttactgcattattacatatttagatagcagagagatggatagaggagatttcccaaaaattatgaattatccatcggtcggtatggtagcggtaacgcctcaggggtgaggagccacatctggacgggtggtacggccagagtccacccctggc

SEQ ID NO: 118191 - DNA, 147 bp, Zea mays
  Clone ID: MRT4577_3927C.1
gccctttttgtggggttttgtgttgtgttgtgtacagaggtctcgagtcaagttagggcactagcaatgcgagagaggcgtaccagagaacgcacgcgcctacggtatacggctgccgagtttacatcggctcgcggtgtccttttg

SEQ ID NO: 118192 - DNA, 262 bp, Zea mays
  Clone ID: MRT4577_39281C.1
ccagtacaagtttgatgaccaaaagcgcaatttgtttatatcaagagattctgcaaaatataatttctacatatgaaaaggctcttcctctagaacattgctctgccatgtgttttctctaatgttctatagatggtggattgagacgttgcacaagtgctcacttagacagctcaagttttgtataaaagtaacatttaggaggttaggggctcctgcatgaatgtatgcaaaacatataaagctggttaagcacctgcat

SEQ ID NO: 118193 - DNA, 293 bp, Zea mays
  Clone ID: MRT4577_39282C.1
cggacgcgtgggcactttttgactaggactttatttatgtaaccgtttgacaacaaagcctatctgccgtgaattgtcacactgcggaggccttatagaaagccacttacgcaattaaagattcaggaaatgacatcgaagggttagcagagcgcagatggcgtgaatctgtaccactgcagccaaacacttcacagcagattttgtagctattgttgttggtagagggtttccgcttctcttgtgtaactgaaagctcgtctttatttcaatcactatacctttcttgacag

SEQ ID NO: 118194 - DNA, 445 bp, Zea mays
  Clone ID: MRT4577_39283C.1
gtagctcggacccaaaattttcgttcgccgtgcacgtcgagcttcgtcacgtccgcctctgggtcttcgtcacatcacccgtcccctcgcgctccccactcacccccacctcctccgctctcgcaagctagacaggtgggagccgccgtcgtcgtagatgtcgaaggacggccccgactccgactcgttgtcgtcgtcgcagatatcgaaagacggccctgagtccgactcaccgacgttgcagatgtcgggggacggctccggcggcggggacaggtgggagccagatctgagcggcggcagcggctgaagcagcaggcgggcaccgccggaccaggtgctggggaacgtgactcggaggaggactccgactcgccgccgtcataggtgtcggaagacgatccctgctgcggggactggtgggagtattaccctcaaattagcg

SEQ ID NO: 118195 - DNA, 444 bp, Zea mays
  Clone ID: MRT4577_39284C.1
aacacacgagccaacaactcacgcgggaagggggcaaaaaagcggggcaccgagcagaaaaaagggcacccgggcacaaggggccataatgcaaagcgaccccaggggggacaaacttccctcgttaaaaaaacaacagagactataaaaggggggggcacacccgggcccggccgcaagcgagaacacctggagggggacaaaagacaccccccaccccaaaaaccccgggcccaaacactcccccgggggggcggggccccccacccccgggcgccccatcccaccacctaaaaaggcggacccgcggggcgaccccggaaaaccggaccgggacccgcgggggcaccacatttccccatagggagggggataagagcgggggggaaaaaaggggacagaggtgtcccgggggaaaaagggatccgcgcacaattccccaca

SEQ ID NO: 118196 - DNA, 489 bp, Zea mays
  Clone ID: MRT4577_39285C.1
accggatgcaggtgtattacgtataatattgacaagttgcactgcagggcaaaccaggggcggagccagcccttattgggggaacaggggccccccccccttcttgggggtctaaaagaaaaccgccccatctgccgggggccccccagtggtcaccccccgaaacccctaaaaaaaccccccaattctttgttaaaaaaggggccaaaacaaaccccactttaaaaaaaaaaaacccttttttttatttttcccaaaaaaaaaaaaaaaaaccggggggccccccccccccttaaaaaaaaaaaacccgggccacccttaaaataaaaaaaaaaaccaaaggtttttcccccaaggtgtaaacaagagggccccccggggaaccaaaatcccccaaggggggtgaaccccaaaaaaaccaaatgcgccaaaagggaccaagcccctaaccccccctttatttttttttcccccaaaacaaaaaggggg

SEQ ID NO: 118197 - DNA, 422 bp, Zea mays
  Clone ID: MRT4577_39286C.1
tacggattcgaattcgagccacgcctcacgcgtacgaacgtgaccaatgatacacaggatggtttatctggtgctgtaagttctggggggcgagagcgctgacagagattatctgaagagattgaggcttcaattatctgggtaaactgttcacagtcgctgcttctgccaggctccatggggcggtaacaaacgtaaaggatttggacgtgagcttggacaacggggcattgataactacctgagcgtcaaacaagtctcggagtacatctctcatgagcctcggggatggtgtcgataccactacaagctgtaaactgtcttgaaagattgtttggtccataagaataaatatatcttgatgctatacataactaacccgtgctttaaatggagtatgacatttcgaaaaaggcacatta

SEQ ID NO: 118198 - DNA, 446 bp, Zea mays
  unsure (1)..(446): unsure at all n locations
  Clone ID: MRT4577_39287C.1
tttctcgcgtccgcggncgcgtgcgcccgcgcgtgcgacgccgcgttctctgctgcgtggggggatgcttggaggtattgtcggtgggtttaggagaggatgggtgggggctacttgatggtgatctggcagggcgtggggaagtacgatgttttttgttttgtggacggtaggggggaggggggggtcgacgtttttgaggtggggtcctgggatgctgtggtgagtgctgttcgagctgttggtcggcgcggtgttgttcgtggtgatcgccgtgttgatcgtcatgttgatcatgcatgatatggacgtgtacaccttggtctgtgacgaaaaatttgtggtgggtggagatctttggtgatcagcgtgggccttgtggggcatgttcttcttggttttttcctgattcgtctgcgtgttaatgggctggattttttacatct

SEQ ID NO: 118199 - DNA, 216 bp, Zea mays
  Clone ID: MRT4577_39288C.1
tttaacaaaccgcggccactccaaggaaggtgatcttcatcgaagggacggggggaccgcaccaggggatctcacctggctgactgtttttttaaacaactcctttcgggagaagcagcccacgaacggtattgctaatgagcgtctcaccaaggcacccagcaaccattacaaataacacttctacaggtgctcaggctaaacaaacaagaaaac

SEQ ID NO: 118200 - DNA, 2715 bp, Zea mays
  Clone ID: MRT4577_39289C.1
atggccggttctaaagatcacaccgatatctccccggacaatatcctgaaaccggatgttgaaagtttgacggccgatgagcaacagcaatacgaggactacatgcgtcaagcgagggagaaattcttatcacaatacacggtggatcgccaccagaaagttgtcaaacatggagagaccgacctcgcatctcttctatcttcgcttcaagtccccaacgtaagtaaacccgacgacatccaatttattaaacagtatgtagatcatcagcagaatcaaatgaaacaacagattggagggttagaagagtcaattagaaaattaacgcatacgttggagaagtctgttgctcctagttttccatcatatgagactagtaacaggatatctatgtataatacatcggcaacaaatggggatttgcagacccaaccattatatggtatgccgatgaactcatatccagggcaagtaccaccgccgccatccctgcttggcagatcggcgcccctgaatacggtcggaccatccggcccatacgcgaaccgtccggcttgctctgtcggacagtccggggccgtcctaggaccgtcgtcgtccctgtttggcagatcggcgaccctggacacggttggaccgtccgagatgctacccggaccgtccgacccttacgcggaccgtccggctttctatgccggacagtccggggtcgtacccggactaccgcgtggcgccccaataatggcgaacacgaccggccagttcggatgtaccaccgtacaaaccggatacacatatgcggaacctgctgttgcacaccatgcaccaaattattacacaccacaacagcagtatatttcgccttctacatatttaaaccataatgcaccatataatcacagaccgatcaacactatcgatcggtcacggcaagaaggtcggtatactaatacccgaccaaatgagccccacagcccaggatccggtggtctaccaccggatgcaatggaaaaaattagggaagagatgactgaactatttcgagataagttcggagttaatgtagccagagtagggcaatcataccaaaagccatataatcatcggtttgacattgtcccatatccacaaggggcaaggataccagaattttctaagttttctggtgagaatgggagaagcacatacgaacacataggccagttcctagcacacctaggcgaattggctgatggagaagcatttcgtgttcggttattttctttatcgcttactggtactgcttttgcatggtacgctgccctgcctcctaattccattaattcttggaatgagttagaaaataaatttcatgaacatttctttgctggggaatatgaattaggattaggtgacttagcttcagtccgacaaggacgcgaagaatcgattaatgattatatccggaggttccgggacactagaaaccgatgctttcggatccatgttgcagacaaagagctagcagggctagcttttaatgggttgctatcctacttaagagacaaattagatggaacccagttcttttcgatagcccagctacatcagcgggctttagcctgtgaaagccgatttaaagagacatcaaaatcggccgcccgtactatacatctaatagagcgtgatagttcagatgatgaatccgcagatgtatataccgctgagtttatttggccaacaaaggccaaatcttcagcatgttcttccttacagccggttcaaaagaatcggcaagaagagattaaatctacctttaatgttgccaaatgcgataagatatttgatgagctacttaaaaatggcaacattaaattaactcataatatccctcctatagatgaattaaagaggcgtgcttattgtaagtggcataattctttctctcatgccaccaatgactgtaatgtttttcgtcgacaggtacaatcggccataaataagggccggttggcttttcaggaaatgcaagtggacacacaaccatttcctgttaatacaatagatgtcgcatgcgaaaagattttagttcggcccgaaatggctgataaaagcaaaagcaaagacatcatcattgacgatcctcgcacgtcaaatatatcgcaaaaggagattgctcgaaaggctccggacgataaggctaaaaggtccggaggcaccggggggcaggcacaattaatgagccaagcacgacagcctggcctgagcatcacagacggtatgacacctacgggcggacggtccggtgctcagacagacggttcggctaactctgccgaacaatccgcctatggccaaaggcgtcaacctccacacaaagccttaaaagggaaagagacgcaacggcaaagcacatatggtcggttgatcaaaactgactctacttttgatcagttgctctccaagaatactagcaaaaagatcgttctacgtgatcggtcaacgaagaaacctcggtcacctgctaaaacaaaacgggtaaacaaaacggctcgaaaggcgacacaacaagcatcgcctattcattctatgagaccagggtacttttcacctatttactcatcgtcggtatattatcctgttcaaacatggaatggcacgatgatgaatccatggtacatgtatagtcccttcgtctatccagactggggggcacctccattctattccttttga

SEQ ID NO: 118201 - DNA, 750 bp, Zea mays
  unsure (1)..(750): unsure at all n locations
  Clone ID: MRT4577_3928C.1
cctcgaggcggctagcttcattgcggggatggtgttctacttcaaggcgcggcccgaggccggcgactacaccatcttcatgggtcttgacaagtacgagaacgaggacctcatcaaatacggcttccccgaggacatctggttccatgtagataagatgtcctctgcacatgtgtatgtgagattgaataaaggtcaatcaatggatgacatgagtgagggtttgctggaagactgtgcgcagcttgtcaaagctaattccattcaaggtaataaagtcaataacattgatgtagtttatactccatggtacaatttgaagaagaccccttcaatggatgtgggccaagttggttttcacaaccctaaattggttcgcactattaaagtggaaaagaggatcaatgagattgtgaaccgcttgaataagacaaaggtggaacggaaacctgatttaaaggctgaaagagaggctattagtgctgctgaaaaggcagaaagaaaggcacagcttagagacaagaaacgtagggaagagatgaagatttccttgaactgcttctgtcgaagacagaaggggtaccacaggcttgtgagatactggatctaaatgactcatgngcaggccatggtctgttattatctcctcttgctgttgtggtctatgtaaaccttgtttacttgctgaaaaacaacggtgcatgctctaactgtggttgatgtaatggtctgttgcccatcaagttgaaa

SEQ ID NO: 118202 - DNA, 571 bp, Zea mays
  unsure (1)..(571): unsure at all n locations
  Clone ID: MRT4577_39290C.1
tttttnnttttttttttattttattttttttttttatttttttttttttttttttttttttttttttttttttttttaaacaacaccgcttaatggggggaatccacggggcaccaccccccagggggggaccccccccccgggccccggggaaaacccaagaagggagggactaaatcaaaaacgggggggggatcccctcgggcggggaagccccataacccccaaaccgaccgggacgtaatttttggccccccccccccggggggcggccctaaacctccctttgggtccccgggggcttgggccaaccctttaaaacccccccgtttttcgggggggacggtttcgcccccgcccggtgaagcgggggccccggttccttgcccggccccaaaacccgggggggtttcggggccttaaggaaacccttgggggggggggggcacccaacaaccccacttgggcggaacgcggccgggagctaaaaacggctggccccgggaaatccggaaccggccccggagggcgaccaagttttccttaagggggggggaaaaaaagctggggg

SEQ ID NO: 118203 - DNA, 113 bp, Zea mays
  Clone ID: MRT4577_39291C.1
tcgctcacacgttcgagcactccagctgcatcgactaggaccgccgtatcgatttgcgtaacaagggactggatgaggaacccctaggaaggcgaaaatgatctaccgcaact

SEQ ID NO: 118204 - DNA, 676 bp, Zea mays
  Clone ID: MRT4577_39292C.1
cttggggtaccggcgccctttctcgagttttttttttttttttttttttttttttttttttttttttttttttttttttttttttttcaaacccccttaccctttatttgttttcccggcaggggaaaaaaaagagtaccaccccgacggggggtaggatgccctggtcattgccctgccccacccctactttttacaacctgaaaaccagggggcgctccgaaaataaacttgaccaaacccccccggggttgaaaagccaggcaagggacaacttcctccacgattaatggggtgggcccccttattaggcagccggccgagcccagcccagttgagatcgttccaaccgacgacgggggaaaattttttttttgtttgcagtagggggatctttagccctacctaccccgggttgggggaaaatccacggttggtttttggttggggggggggggggttcctcccgggggtaagccccgcccccccaacagggaaaccatttccccgccctgccaaaaaaggaaaagcgcccccccgcctttttggacggggaaccccataagcgccttccgtttgagtagggcctgggcctgcaactgggaaaacgtgttggcctgcaccggaacaaaccccgccaacgcaagcacggtccgccacggaaggggggggggtt

SEQ ID NO: 118205 - DNA, 840 bp, Zea mays
  Clone ID: MRT4577_39293C.1
acttactccgccggttatgcaggcgaatatgcggccatcagatcccgtccctggatgtcaccgccccacgccgttggcacggactccccatcccgtcgttggatggagggtgccgctggaagcggccgtgccaacgacgacttgccgcccctccggccctcatcatcctcgtgcttctcccgcaccggcgtctccccgccgcatcggcaccttccgtagcaggccaggaccggagccgagaatgaggcgtccgcacgcgaccatctctcccttctagcgccttcgacgcgcccccgactgttgccgccaacttcattggaagcttcacgatgatccaggaaaacagtctagctactagagatttgagctgaagcacaagcctttcctcttggaattgatttagaacccaagggaggagttcctatcatcaatgctagctgtacattcaaatgcatatgcttgtgagctctgctctctaaacaccctaaagataacagatgttattttgtactcttaacaggtctcccatatggtaattgtctttataaagcaccctatgatatttctagaaagtaaggtcatgtaggaaaatggagcgctccatctttggttattctctactcaggtttgagaagaagcacatcccattactattacatggcaaaagcggctgcatggcaaggagaaagtcgcaactccgccatggacttatgtggcgatgggagctgagagatggcaatgcatgctggtaatgctataaggccacgccagggtttgtgacattgccaggtgccgggatgtttctacaatgggcccttgaagatccctttaatggaaagg

SEQ ID NO: 118206 - DNA, 134 bp, Zea mays
  Clone ID: MRT4577_39294C.1
cttactcgcactgtgtctctgtctatcggtggggatctcaaacaacagggccgtcctctatttcaacctaagctttcgttaatctataacgcggacacaaccatccactaccacaccggcagaaacgacacata

SEQ ID NO: 118207 - DNA, 271 bp, Zea mays
  Clone ID: MRT4577_39295C.1
caaagcagcaggcggcttcgagcgggaggggggcaaaatgagggcggcaatggcgatggaagcgaggaggggacaggtggagcgggagtccggacaggaccgagtcctacgaggagtggcaggcagggcgggggcgaggacgacgcccggcaacaaatcgggccgccgacctggacagaaacgatgcggagattgggaggaggcgagcgagcgctgctctcagtacttgcggaatccgggcggtgggagggagaaggtggacgctactttg

SEQ ID NO: 118208 - DNA, 428 bp, Zea mays
  Clone ID: MRT4577_39296C.1
accacaaccatggacggtggatctaccacttgtggcaccggaccaaagcacagggggccgggaccgggttccagttaacaatccaggcttatcctgtccacccccagatggccagaccagacccgaccgcccgccagggcaccaccagttttcttgggtaaggtggtggtaaatggatggcgggaaaactaaatggtggttaccttctttccggttgggctggtttccgtttttatggttaaagaaccgaccgctatggatggtatattggaccgagggggaaccagcttgcagcctttatggggaaaggtttaatatgctttggcagggtggaagttggattttgggggatcaggcctgcagcattgtaagggactccatgcccatgaaaaaaattgggttaaatgggaatgtttcagggtttaagg

SEQ ID NO: 118209 - DNA, 331 bp, Zea mays
  unsure (1)..(331): unsure at all n locations
  Clone ID: MRT4577_39297C.1
tgttggttttttaaaacttatgctccggtttttcacaggcancataaacagaacccaacgggaactacctgggtgcgaaaaaaactgtctagcagatctgctcttacagattagaatgatccaccctgctacggagatggctgagaccgactcacgaaggcatcagcttacaccacgaccatgaccacgctacaaagcctggcacgcatggtgaccgaacacatggggtgggttagacgacctccactggactactacagatccaagaacattcggtcggggtccctgtgaggtgcgtagttgccttcgacggtggcggcgcccgggaacc

SEQ ID NO: 118210 - DNA, 742 bp, Zea mays
  Clone ID: MRT4577_39298C.1
gagggccgcgattcgctcccggttgtccccccgtccacgaggcgtttcggcgcttgatctcgctgcggtagtgcggttacgttcgacccaggttcttcttcccagttgctcggctgttacttttgtggtctctttctttctttctttttaccgtcctgtctgtctttttttttgtgtgtgcgtgtggttttccgccgcttcaacgcaccaattcttgatcttctttacgcgggtctcccgataacactaaactcgggtggttcttgtctgttgcttcaccactctgctgcggtgctgttttgcgcctgcgcaggagaacataccgatcgaggaggtgttcgagaacctccgatgcaacccgcagggtctcaccacggagcaggcggagcagcgcctcgccatcttcgggcccaacaagctggaggagaagcaggtgaaggaacccgccgccttggcttccatgcgtttctgttcctggtgctccgtctcgcaccaagcttacatgatggatgtgtgcgcgtgtctatgtgtctgcaggagagcaagttcctcaagttcttgggcttcatgtggaacccgctgtcctgggtcatggaggcggtcgccatcatggccatcgcgctcgcgaatgggggagtaagttctgccgcatcttttttcacaccgtgtggacatggccttcagccctcagagcgggcgttctggagactggcgtcagaggttttccccggccggcctcgag

SEQ ID NO: 118211 - DNA, 1113 bp, Zea mays
  Clone ID: MRT4577_39299C.1
accgcctcagcgacccggcggtcctgcgcgggctcgaggaggggtggacgccgcggagatcacgccggcggacgtgagcgagggctgatcaagaaccgcaggagcggcaaggcggaggcaatgcgggagctgctggacgtcctcaaggcccgcgccgagaagcgtcggcggggcagcgcctccggcccggccgcggcggggaaggcggccggcggcggcgagaacgaggaggaagaggaggaggaggaggagaagcgggcgctggagagccccaatgaggggaaggagcaggccggcactgacagccgcgggggcggcggacaagacgaggacgcggacggcaagaaacaggtgtgagcagagcaggacggacggccagggccaggccgaggctggaaacgaacgaggagggaaagcgaaaggttcaaaaattttccctgttccgtggccaatcttcaccggagaaatcgatgcgagaaaggaacttgtaggagagcattgcttttttggttttgttttggttttgattattctttgtttatctcccacttttgatttgattgatgctcgtcgttgatgtcttctctctagctatatctagttgtaataagaaaaatcaattaattctagtggtggcgtcattttattatcaaaaaaaaaaaaaaaaaaaaaaaaaaaaaaaaaaaaaaaaaaaaaaaaaaaaaaaaaaaaaaaaaaaaaaaaaaaaaaaaaaaaaaaaaaaaaaaaaaaaaaaaaaaaaagggggggcccggttttaaaggacccaagtttactaccccgtccttgcaacgtaaaattttttttttagggcccccaaaataaaattaatgggccgcgttttaaaaacgtgggaattggaaaaaccctgggtttcccaaattaaatcgctttgaaaaaaatccccttttccccagttggcgaaaaaccaaaaaggcccgaaccaatcccctttccaaaaatttccccaccctaaaaggaaaatggaacccccctttaaccggccaataaagcgcggggggggggggggtaacccccagggaaacctttaaatttgaaagggcctaagcccccgtattttacgtttttttcctt

SEQ ID NO: 118212 - DNA, 1362 bp, Zea mays
  Clone ID: MRT4577_3929C.1
tgggcgaagaaagaagtatgaataaaacaaaatttgaagacgcctaacagcccgactgcttcgtttccacgcgcacgaaaccctagactagataaaaagttcccctttccctcaattccccaacttccctcgccgcaatctctcgccgcctccagtccagagccaccgtgagatctgcccgattccgccgcccggacccggggactccctcccctcctcgatccgttcgggcggccggccggcctagcttcaagtgcggggatggtgttctacttcaaggcgcggcccgaggccggcgactacaccatcttcatgggtcttgacaagtacgagaacgaggacctcatcaaatacggcttccccgaggacatctggttccatgtagataagatgtcctctgcacatgtgtatgtgagattgaataaaggtcaatcaatggatgacatgagtgagggtttgctggaagactgtgcgcagcttgtcaaagctaattccattcaaggtaataaagtcaataacattgatgtagtttatactccatggtacaatttgaagaagaccccttcaatggatgtaggccaagttggttttcacaaccctaaattggttcgcactattaaagtggaaaagaggatcaatgagattgtgaaccgcttgaataagacaaaggtggaacggaaacctgatttaaaggctgaaagagaggctattagtgctgctgaaaaggcagaaagaaaggcacagcttagagacaagaaacgtagggaagagatggagaggcttgagaaagagaagcaggctgatatcaggagctacaagggtctaatggtccaagagaagatgacttccaacaagcaaatcgcttctggcagcaagaccctgcaggaacttgaagaagactttatgtgagaggcggacattataaatgccatgctgaagatttccttgaactgcttctgtcgaagacagaaggggtaccacaggcttgtgagatactggataatgactcatgggcaggccatggtctgttattatctcctcttgctgttgtggtctatgtaaaccttgtttacttgctgaaaaaacaacggtgcatgctctaactgtggttgatgtaatggtctgttgcccatcaagttgaaatggtaatggaattatggtttcctggatttttttcaaacaataaagacatggcagcagataacttacatattccattctttgcaaaaagaacggctcaggaacttctttgtttgtgtaagagtgttatagaaatgaaccacacttagcttacatttggagattctttaaaaaaaaaaaaaaaaaaaaaaaaaaaagaaaaaaaaaaaaaaaaaagcggcc

SEQ ID NO: 118213 - DNA, 647 bp, Zea mays
  Clone ID: MRT4577_392C.1
accttcccaagcaaaccctaatcgactgccacggtggaggcaggagcaggatcgaaggtgcgccaccaagcgggagctggccgtggccgtacctgagatccgagcctccggacctcaaaatccccccgccgccgccgccgccgtcgctctcgcgccgcggcaggagggtgatgagatcttcgcgggcgggcctcgctcggtcataagatgctagccggcggcgttggcagcaacagaggcggcagctcccatctctcctcttccggagcggacctacgcggaggccggagcttcctcttcgggaacacctggttcatgctctccgcctacccggcgcgcctgctgcacaccgccgaccgccgcgcgcccgccgccgccttcgtcgccgccgccatccaccggacgccccgggtcgtgcgcgcgcacggcggcaccggacagggcctgctgcagcggggcatcgtcatggccgcctgcggctacgccttcgggcgggccgacctgggcgccgccgccaagcgccagctcgagaaggactcctcgtccgtggctgcccacgcctcgcgcgtcgtcgccatggggtcgcctgggaccgcggccaggcccgacgtctcgttcaagtaccggggattggagtactgtaagaa

SEQ ID NO: 118214 - DNA, 660 bp, Zea mays
  unsure (1)..(660): unsure at all n locations
  Clone ID: MRT4577_39300C.1
ctcgctgctcaactccacaagcgccgcgcccaatggcgnngccaagcagcggcacccggcnnagctgccactcctnngcccctcctnncgccgcggcccgtcnnngcgtggtcgcttacctgcgcnnngccgccgccnnngccgcgggccacccgggcacctgnngcacgctnnncggcctncnncggcacaaaaagcccgcgnagnngcagcacaaaactagcanncgcggcnacccgggggnaaggggcnggcngcnngcccaagnncgtggnntggcgcctcnnccggcaccctggcanntggcgnntcgtgccaaacctngnnttccagggncnnagctgnnggtgtacccgaacgaccanncgctgcncnngatgtaccgaacgcnnggcggggtggccccctnntcgtggaagccccggagnnttcgaactgggccagaaagtatnnggccggcccccgacaagggctgtaccnntcaagtannncggtggcgcnnccggcgtcccctgcgaagctccnncgaggttcaaacggnngcaggacnnttgctgagnngcggtggaaaaggggaaagaagatactngnnttcgtggggggacctccatncanngcctgaaaccagtgggaaagtcgcttggcgtgcatttgctgcgc

SEQ ID NO: 118215 - DNA, 205 bp, Zea mays
  Clone ID: MRT4577_39301C.1
cctccatttttggggttttttttaaaaacgtgtgggttacaaccccgaccaggcaaacaagaggagcaccagcggggagcgagccacaacctgggagccacaagaaccaggccgagggaggccggcaagatgaatgaacacaaaaaggccggactcaccggaggacggtgaaaccccagggaaccatgaacgcggggcctcagcc

SEQ ID NO: 118216 - DNA, 185 bp, Zea mays
  Clone ID: MRT4577_39302C.1
tgtacgcgctctctctcctcaggacgacaatcgaccatctgtgctatggttgcagggtggccccatcctccgccgtggctccatcgtcgccactgcagccggcgcctgtttttgacgtgtacatagattcactcgttttacctcattttgttatttttcaaacaaagccctgtggaaggaaatgg

SEQ ID NO: 118217 - DNA, 2111 bp, Zea mays
  Clone ID: MRT4577_39303C.1
ctagtagcggtggtctctcctcccctcgtccgtctccctcccaccattccacgctcccgccgtttcccaggggccagggccgacccacgccgcgccgggatccttagatgcggccggggcggcgccgcgagccgtgagcgcggttcctgccgtggcgatgggtttccgggccggccgcggcgggtggccgtgtttgcggcggcgggactggcggtcgccgccgccgcgtccggcctcctgctccgccacgctgcgcaggatacctgcgaaacaatggaccagtgggcccagcaccctcaggcagagacagcaaagagccggatgaaaggaaagcagcaggcaacacgaccaacccagcgctgtaccagagcaaagaggtggtggtgaggcttgtggggatagtgaacagagctatctccgccctttcaaatcgaaggccgcatcacaagcacccaggacagttcatgccttacctgtgctccccctacgactcaaacctcaacgatagaccgtgcaagtatagggaggccacgtttgaaaacgcgacgacagcatggttgaactacacgtgcatggctcaagacacggacttgtgctcaggcaacaagaccttaacctacgacatctacggccaactcgtgctggctgcaaacgtgagctacgcgctgtaccactacgcccccttcctgctgaacctccaggactgcaagttcgtccgggccaccttcagcgccatcgcctcgcggtactgccctcctctggggcacgacctcgtgctggtctccgcgggtctggcgctcattccctcggcctttgttctctgcctcgtctggatgctcttcgcggaccgcccccgaagggaggaggtgtccgatctggagtatctgtgaagacagcagacaattaacaaatgatagtcgtagaagtccgtatcatgtcagttgtattgatttgcatagccgtggtgctgcttgttcttgtgttccttggatcaggcctagagaagtatggaccgagatatacagtttacatatttgttaccttatgctggaaagctgtggcggctctctttatccttctagggattttcctgatactaaacagcgctgcgcaggatacctgcgaagcaatggaccagtgggcccagcaccctcaggcagagacagctctgagcagcatccttccgtgtgtggatgagagcacgaccaaccgaacgctgtaccagagcaaagaggtggtggtgaggcttgtggggatagtgaacagagctatctccgctctttcaaatcgaaggccgcatcacaagcacccaggacagttcatgccttacctgtgctccccctacgactcaaacctcaacgaccgaccgtgcaagtatagggaggccacgtttgaaaacgcgacgacagcatggttgaactacacgtgcatggctcaagacacggacttgtgctcaggcaacaagaccttaacctacgacatctacggccaactcgtgctggctgcaaacgtgagctacgcgctgtaccactacgcccctttcctgctgaacctccaggactgcaagttcgtgcgggccaccttcagcgccatcgcctcgcggtactgccctcctctggggcacgacctcgtgctggtctccgcgggtctggcgctcattgcctcggcctttgttctctgcctcgtctggatgctcttcgcggaccgcccccgaagggaggaggtgtccgatctggcgtcggggtcgaggatcgcgccggtagacagctctccgtcgtagaagcaagcaagcaagcaagcggcgcaacgggatgtctatgactatgagtgaggctgcttggtcgcatggtgaccagagtttagtacagttcccttccatggctatgtaaaatagtttcggtatagcgagttccgggagacgtcgttgaagtgcggagaggagggggagaaaccggaagcacttcgggtgggggacaaaaggccccattttgcagtggagagagttaggtggaaacgagtgctctgcttccttctatcgtatgtcagatcgatgcacccatggtgtatgttgctgccaggacaaacgggatatcgatcagggtcccatgacc

SEQ ID NO: 118218 - DNA, 1205 bp, Zea mays
  unsure (1)..(1205): unsure at all n locations
  Clone ID: MRT4577_39304C.1
gaccggtggtctctcccctccccggctccccctcgtccgtctccctcccacccttccgcgctcccgccgtttcccaggggccagggccgacccacaccgcgccgggatccctagatgcggccggggcggcgccgcgagccgtgagcgcggttcctgccgtggcgatgggtttccgcgccgcctccgccgccgccgctgccgcggtggccgtgtttgcggcggcggggctggcggtcgccgccgctgcctccggggactcgctcgccgacctcggaggcgcggcgagggagatcgaaagcgcaccagaggtgaagaacttgggaccatgggcaaaggggctgctgaaaggcatgccgcaggcagcggcgggaccggcagccatggcgcctgttgcgaagtatccgctggttctggcagaggaccggacgcggcggcaggatgttctcaggcatctcaaggggtatgaaggagggtggaacgtcaccaataagcactactgggcgtctgtttcattcacaggtgtttctggatttcttctcggcgctttgtggttcatatttttcgggatagctgtggctggacgatgctattttggaacaagaatgtccaaaagaaaggtttcttatgcagatgtagtaggtcctgtgttgcttggggacttcacacttgctataatagttgggtgcattctccttctgtatgggcagagtaaattccatgaagaagctacgcggaccgtctattttgttgtgaaccaatctgatttcactattcagacactaaggaatgttacagaatacttgtcatttgcacagacgatcactgtggcagcactctatcttccatcacatgttcaaggtcaaattgacagtttgaaaggggacttgaacaaagcagctgacacaatatctgtgaagacagcagaaaattacaaaatgataagaaaagttctccatgtcatgtcgggtgtattgatttgcatagccgtggtgttgcttgttcttgtgttccttggatacggcctagagaagtatggaccgagatatacggtttacatatttgctaccttatgctggaaagctgtggcggctctctttatcatgtctagggattttcctgatactanacagcgctgcgcaggatacctgcgaagcgatggaccagggggcccagcaccctcanggcagagacagctctgagcacat

SEQ ID NO: 118219 - DNA, 656 bp, Zea mays
  Clone ID: MRT4577_39305C.1
ccggccgtggtaggtgctagatagaactgaaaaccgacgagcgatctcctctccctctccctctccaatccattctccagcgcagagaagtaaacatgtgctgaccgatgaaatatgtcgtggaaggggtacttggactaatacctgatgtgcgagatcgagggccaccacctcgcgaggatggccatcatatgacacaacggtgccacctgctagcagagcacggcgttctccgactgcaagactaaggatatgggcaatatcatgaatgactttcacgagtcaggtgacctcgcgacaacaggcctgttcctcggagctaccaagtactatggacatcctatgcgagcctggtgtcgttatccgtggcaagaatggatcaggaggcatcaccgtgaacaagacagggtagggactcgtggttggcatctactacgagccgatgaggactgggcagtgtaacatgtctgtcggaaaggcggtgcgactacctgattgaacagggcatgtaactactacgtagcagctggaatgcatgtcgacgacgatgcattcgagtttcgacgtccaatgaatagaacaacatagcaaagggcttcctcccggcgtatttgctttgaatcttctcctccacgccataagatatctagcaattg

SEQ ID NO: 118220 - DNA, 301 bp, Zea mays
  unsure (1)..(301): unsure at all n locations
  Clone ID: MRT4577_39306C.1
cccactcgtacnctnacacatgttatgtctcgcagcctcgaacgcaagcggccggccttacaagtatttgtgtgggacccccacgaactaagggactatgtatacaacatggatgaacatgctatatacaacaacatagccaaacgcttggtctactaaaccgtaaaaaacacaatatgcaaagacaaatacatatacacacattgtgtaagtctgcgatacatgtatgcatggcaaggaataaccagctcacaaactaccgaactacttaccaatgacgatgaaaaacgggaacttaatg

SEQ ID NO: 118221 - DNA, 434 bp, Zea mays
  Clone ID: MRT4577_39307C.1
cccacgcgtccgtgcgttggccacaaccacaaccttatcttctggccgcgcgcctgcttcttccgcacaaattgtccagctccctctgcgtttctctctgctcgcctcggcctccaactccggccatggtggccaccggaagcgcgtctcccggctccagctcaacggtctgcgttctccctgctctcccaagctgcgcgcccctgtcctgttccctgcgcgcgctgttcctgctcgctttggcatccgcgccatggagccctgcagggacgggccggtaaatttagaggccctgtactaaaattcagaagaggtcctatttcatagaaaaaaaatacaatcagaactatattgtaatagaattcatatattctaaattgcaaaacatttactagatgtgtttgaaaagcagcaagctagctgctaactaagtt

SEQ ID NO: 118222 - DNA, 629 bp, Zea mays
  Clone ID: MRT4577_39308C.1
tttttttttttttttttgaaataactgatttatccttgcagatcaactaatgtagggtattcatttagcatgttctggtgtgtcccaaaagtctcggaacacatatctcgaatgttactcaacatcagaaaagtggcaacctaaatcctgccaggaatgaagagctgtgaagctcttttcctcagcaatgtggaccgctgaagctggtaatgaactgcatgcctagaaatgatgcccgaatctgataatggccaaggacgacttgatcaaacaatgataccccgccgcagaaactcggaactgctaggcatgatacattcagatcggccggtggataacgctctggtcagggacggcgccgttgtggtttcaggcggcaaggtgaagcaacgggtggcgctgaagttgctgcggcacaccgagtgcagtgagctctctgctgtcagacgatactgaatgcgggttttatcaaggatttgtttggccttggatgtccgattcgacccgtgttgaggaaaggtgcgttcgttcgtgaaattatctgttttttttttgctagaatcagtgtggatttgatgataaattcaattgcccgatgataatacgctgcattttttctcgtgccgaat

SEQ ID NO: 118223 - DNA, 117 bp, Zea mays
  Clone ID: MRT4577_39309C.1
agggcacaaaggacccccaccgaatccgagggttcaaacgaccgacggcgaacatggcggcggacggcacgtcggcgctggaagaggccctaaaacccttccaagaaagatcctccg

SEQ ID NO: 118224 - DNA, 537 bp, Zea mays
  Clone ID: MRT4577_3930C.1
ccggccaggacggcgggggtgggggcgccggcgcccgccacgggcggcgtggtgttcccgacgaggctggacaggaccgtgagggtggccgtggcgcggcccagggtctcccggagccaggaggagaaggacgacgaggaggaggtgctggtcgtcgacggcatccaggtcgcgtatcacctgaggtacgtgaagttcgacgtgttcgtgaaccagtgcgcgggcggggacggcagcacggcggcggccgagtgcgcggggagcttcgtgctcacgccgcacgtgatccagcagaaccaggaggaggaggaaggaggaggaggaggagactcgccggccaagacggcggcgaggtttggcatcaccgacttgctggacgatatcggagctgacggggacgttacgatcgtcgtgtcgctcgttccgaggtgcgccggcgacggggtcaccgtggacggcgtcagtgtcacgtacgttaagtgaaagtagtgccgcgcgctagatgatcaatacaccctggtgatccgtttatataca

SEQ ID NO: 118225 - DNA, 1204 bp, Zea mays
  Clone ID: MRT4577_39310C.1
ggaaaatatatgagatacaacatatggctagaaaccattttagtctcataggagaatacgggatttaaaaaaaccaacatttcatacggggcctaaatgaagtaatggtatttcggcccataaatcccaagaacgctgggcgaaagaaaaatgaagcaggtcgaggtccagggtggaggtgcagcaggcctaaatctgatggacacaggccggttcagaaaagagaggagtcctgttgggactctgggagggcctagctagtcgctggtcgacgggccgagccttttgtcccaccctacggaaaacagccacgtctggacaggcgtagcgtaggtgcctgctgccatcaaccactaccgcgtccaggtccattccaaaagacagcctgtcgtcgagttcatcggagacaggcaggcctaaaaggctagtaagggcctgggactaaccagaccaggtcgtccaacacgctaggcagcccatcaagttggttctcctccacgccgacgccgctatgattttttcccttgcaaaacccatgctcgctaatgatggaaccgagaaaagaaccacagcgttctgactgagacacctgggcaatgagttgagatgattttttccagacagaaacctgctgcgcccacttgaactcgtaggatggtggctacggtctctacctgtcaacctcgacccaatcgggttccttaacgtacaccaccttctcccgggctgttgtaaactgtactaactactaatataggcaggctgtagccatgaatgacaaggatagctgcctggagtacgtcctccaccagattagagactactcctgcagtcctgctataggtcagtgcagctagcggacaacgcaattaattgcgacaacgagaacgtaacaccaaccgataatattgcatggccgcccccggacccccttttcgtcgtatgggagcaacttttttttttctgttgttgttgtcgtgcaacgcactgtggctccggctgtacgtgacagggatgttgttttttttttttttgtgtgtgtgtgtggatggatggagggggcgtgggtgctgctgcaatcacgcaatggtgtgtcccatgcatacacgaccgggacgggacagacaaactttcaccagctaccaagcgcgttttcagatggcggtctccattttcaagcgggagcagcactgatcaacacagc

SEQ ID NO: 118226 - DNA, 410 bp, Zea mays
  Clone ID: MRT4577_39311C.1
agtgcaccaccaccaccaccaccatggacagcaagcctagggcaaccggaccaggccaagggtctacaatgctccaacaaatagctccactacccaggattctatggaggctggccatagtcaccactccatgacatccctgtcttcctcaactacagattgctctacatctccccaccctactggtaatcaaggcaatcaggcctaccagaatcgaccagcggctgctaataccttgcactttgaacagaacggagctatggacgtaaatttaaccgtctactccaatccccgccaagagactggcatagctggacatacagcataccaggtttctgctaatacaggccctgcacataacatgactgaagggcacctgccaatgcggcaaagggctgatagggaggagt

SEQ ID NO: 118227 - DNA, 2093 bp, Zea mays
  Clone ID: MRT4577_39312C.1
ccggccgggagaccgctctctccgcggacgcaccaggcatctcgtgtatcgtcctcggatccccgcggtcatccccatctcagccgccgttgtccgccttcccctcgacaacaagcctgccgccccgagctgcctccctccgtccgttcggtatcctttagccagttagcctcttccttccgtctgccaccggcacgttctctgccctcgggtacctcgtctgttcagtcttcagagctgggttcggtctattcctcatcctctcttgttgatccggagtgccttaagttttggccgtcttgttactgtctgctgttccacagtcgacgaatcacgaatgctaatggaggaagaatgcgtagaggcaccgtcgtacatccacattgacagcaacgctttctcctacagaaagcataagagtcagacagaggaggacatagctgtgtgtgagtgccagtatgatatcttggatccagagagtccatgtggagaccggtgtttaaatttattgactaacacagaatgcacgcctggctattgccgttgtggtgtgtactgcaagaatcagcggttccaaaaatgtcaatatgccaggacaagacttgtaagaactggagggcgtggatggggccttgtggctgatgagaatattatggctggtcaatttgttatcgaatattgtggagaagtaatatcatggaaggaagccaaacggagagctcaagcttatgaaacccagtgtttaaaggatgcctatatcatttacctcaatgctgatgagtcaattgatgcaacaagaaaagggaaccttgcgagattcatcaaccattcatgccaaccgaattgtgagacaaggaaatggaatgtccttggggaagtaagagttggaatttttgctaagcaaaacattccttttggcacggaattatcctatgactacaattttgagtggtatggtggtgtgatggtgcggtgcctctgtggagccgccagctgttctgggtttcttggggctaaatcacgtggtttccaggaggccacgtacctgtgggaagatgatgatgacaggttttctgttgagaatatccctctttacgattctgctgatgacgaacctacaagcattaacaaggaaatcctcgtatcaagtgatggcatggttacccaatacagcaacatcagcagagtacagagtaccgaaaatcctggaaacactggaacaaatgaatttgcgccaattatcgtcgacgaactgacaagctcaaatggattagcaccaatgaacgttgaaccattgactgtaagctcaaatgagttcacgccatcgaacgccatgccaatggtagctcgtctagtcgagaatgggtcaactggatacagcgcacaggacactcacgacgcttctcagaattcagcgcccaaagctgcaaatcacgcgaaccaaactggacctcagaacaacagcaaccattcagcgttggtccctgtgaagcccgcgccgaaacgccgtggcaggaaaccgaaacgcgttgtgcacaagcagctggacatcccagatatctgcgaccggcttacatcgtctgtggcgtgcgaagaaatactgtactgtgaggaagtgaagaaccatgccgtttctgaaatcgatgccctgtacgacgagataaggcctgcggttgaagagcacgagagggacagccaagatagcgtctccacaagcctcgcggagaagtggatcgaggctagctgccgcaagtacaaggccgaattcgacctgtatgctgcagtactcaagaacgttgcctccactccactacggtcgaaagatgatgtgggcccaagagagcagaacgggttgaagtacctggagaacggctcatgattttttttagctagaagcgtggaatattacgtacgccttcaatttgtagtatagggattgcatttttttttaactgtggttggtcttgtatttaggtagaggcattgtaaggttacatgattttaaatagcgtggaatcatgtcaaacgcacatttaaaaaaaaaaaaaaaaaaaaaaaaaacttggaaccatgcatgaatggttgataaatat

SEQ ID NO: 118228 - DNA, 1628 bp, Zea mays
  Clone ID: MRT4577_39313C.1
ctcgtctgttcagtcttcagagctgggttcggtctattcctcatcctctcttgttgatccggagtgccttaagttttggccgtcttgttactgtctgctgttccacagtcgacgaatcacgaatgctaatggaggaagaatgcgtagaggcaccgtcgtacatccacattgacagcaacgctttctcctacagaaagcataagagtcagacagaggaggacatagctgtgtgtgagtgccagtatgatatcttggatccagagagtccatgtggagaccggtgtttaaatttattgactaacacagaatgcacgcctggctattgccgttgtggtgtgtactgcaagaatcagcggttccaaaaatgtcaatatgccaggacaagacttgtaagaactggagggcgtggatggggccttgtggctgatgagaatattatggctggtcaatttgttatcgaatattgtggagaagtaatatcatggaaggaagccaaacggagagctcaagcttatgaaacccagtgtttaaaggatgcctatatcatttacctcaatgctgatgagtcaattgatgcaacaagaaaagggaaccttgcgagattcatcaaccattcatggaggccacgtacctgtgggaagatgatgatgacaggttttctgttgagaatatccctctttacgattctgctgatgacgaacctacaagcattaacaaggaaatcctcgtatcaagtgatggcatggttacccaatacagcaacatcagcagagtacagagtaccgaaaatcctggaaacactggaacaaatgaatttgcgccaattatcgtcgacgaactgacaacaagctcaaatggattagcaccaatgaacgttgaaccattgactgtaagctcaaatgagttcacgccatcgaacgccatgccaatggtagctcgtctagtcgagaatgggtcaactggatacagcgcacaggacactcacgacgcttctcagaattcagcgcccaaagctgcaaatcacgcgaaccaaactggacctcagaacaacagcaaccattcaacgttggtccctgtgaagcccgcgccgaaacgccgtggcaggaaaccgaaacgcgttgtgcacaagcagctggacatcccagatatctgcgaccggcttacatcgtctgtggcgtgcgaagaaatactgtactgtgaggaagtgaagaaccatgccgtttctgaaatcgatgccctgtacgatgagataaggcctgcggttgaagagcacgagagggacagccaagatagcgtctccacaagcctcgcggagaagtggatcgaggctagctgccgcaagtacaaggccgaattcgacctgtatgctgcagtactcaagaacgttgcctccactccactacggtcgaaggatgatgtgggcccaagagagcagaacgggttgaagtatctggagaacggctcatgatttcttttagctagaagcgtggaatattacgtacgccttcaatttgtagtatagggattgcattttttttaactgtggttggtcttgtatttaggtagaggcattgtaaggttacatgattttaaatagcgtggaatcatgtcaaacgcacatttgatct

SEQ ID NO: 118229 - DNA, 2976 bp, Zea mays
  unsure (1)..(2976): unsure at all n locations
  Clone ID: MRT4577_39314C.1
ggtatcctttagccgttagcctcttccttccgtctgccaccggcacgttctctgccctcgggtacctcgtctgttcagtcttcagagctgggttcggtctattcctcatcctctcttgttgatccggagtgccttaagttttggccgtcttgttactgtctgctgttccacagtcgacgaatcacgagagtgcttatggaggaagaatgcgtagaggcaccgtcgtacatccacattgacagcaacgctttctcctacagaaagtgagcagttctgcgttagttctttctcaatctgtccaatgtgggttgaactttgatgggactgggtcgcaacatttcctctcgttttctgttgttntgggaatgttatacttcctggctacctgtgttatcttttggaggccttagagtctgacagaggaggacatagctgtgtgtgagtgcccgcctgatttcttgggtcccgagagtccatgtggagaccggcggttggatttaaacccacccaatcccactcaatccacatggattgagagctaaccgaacaaggcctaaaaagaaatctgttaggtttagcttttggtttttgccccctaaaagccaaaagctaaaccaaaaagctggatctagaaagcagctttttttaaaagccgattttctcgcagtgtaaaactgaaagcacctctagacctgcttttagcggcttttggatggaactgtaaaaatatatgtggaatattttttagctttttagtggttttcactaaacggttttagctttttagcacttcactgtccacatcagcttttttcacagatcacaacccacaacagcttttttcactgccacagcccaaccaaagagaccctaagtcttgcatgttgcttattctttacgttacagtttaatagcaattatgctgacacttaatctcttttgatagcggttccaaaaatgtcaatatgccaggacaagacttgtaagaactggagggcgtggatggggccttgtggctgatgagaatattatggctggtcaatttgttatcgaatattgtggagaagtaatatcatggaaggaagccaaacggagagctcaagcttatgaaaccccgtccgccagtgtctgcagatattctctcgcttctcatatttgaattgtggcaaactggcacttttttagctagctataacatctagcttctgtaactgcaggtttaaaggatgcctatatcatttacctcaatgctgatgagtcaattgatgcaacaagaaaagggaaccttgcgagattcatcaaccattcatggtaagtttgtattaaaggcacagcatacttgaatttcatcttgcttcttatgtgtgtgatttgatcattgattttttctgtcattgacttgtaagtaattaagtctaatagttcactattgaagcatacagccaaccgaattgtgagacaaggaaatggaatgtccttggggaagtaagagttggaatttttgctaagcaaaacattccttttggcacggaattatcctatgactacaattttgagtggtatggtggtgtgatggtgcggtgcctctgtggagccgccagctgttctgggtttcttggggctaaatcacgtggtttccaggtgggcgaacaaatttatgttgtgcatgtgacttcctatttcatgcttgacacttgacagtagtgttcgacagaaggaatcaccgctaccttttagttgttatatgtcaatcctctttgtcagacattggaatgactgattgcactctggttttctgcatttgcttatttgctgacataacgttttgagccttcatgctatctacttattgcttggaagattgacattctgcatcattatctggtcatttttgcatttccttgtaagttgatatttgatatgttcattatgttcctaatgtagctttattgattggtatgttgcaggaggccacgtacctgtgggaagatgatgatgacaggttttctgttgagaatatccctctttacgattctgctgatgacgaacctacaagcattaacaaggaaatcctcgtatcaagtgatggcatggttacccaatacagcaacatcagcagagtacagagtaccgaaaatcctggaaacactggaacaaatgaatttgcgccaattatcgtcgacgaactgacaacaagctcaaatggattagcaccaatgaacgttgaaccattgactgtaagctcaaatgagttcacgccatcgaacgccatgccaatggtagctcgtctagtcgagaatgggtcaactggatacagcgcacaggacactcacgacgcttctcagaattcagcgcccaaagctgcaaatcacgcgaaccaaactggacctcagaacaacagcaaccattcaacgttggtccctgtgaagcccgcgccgaaacgccgtggcaggaaaccgaaacgcgttgtgcacaagcagctggacatcccagatatctgcgaccggcttacatcgtctgtggcgtgcgaagaaatactgtactgtgaggaagtgaagaaccatgccgtttctgaaatcgatgccctgtacgatgagataaggcctgcggttgaagagcacgagagggacagccaagatagcgtctccacaagcctcgcggagaagtggatcgaggctagctgccgcaagtacaaggccgaattcgacctgtatgctgcagtactcaagaacgttgcctccactccactacggtcgaaggatgatgtgggcccaagagagcagaacgggttgaagtatctggagaacggctcatgatttcttttagctagaagcgtggaatattacgtacgccttcaatttgtagtatagggattgcattttttttaactgtggttggtcttgtatttaggtagaggcattgtaaggttacatgattttaaatagcgtggaatcatgtcaaacgcacatttgatct

SEQ ID NO: 118230 - DNA, 144 bp, Zea mays
  unsure (1)..(144): unsure at all n locations
  Clone ID: MRT4577_39315C.1
cggaggaatcaccctgtaatgttgaaaagagctagcgaattttacagaacaaaacaaanngagaaccagaaaaaataaaaaactcccgcattccaaacaggccctgaaatcatgagactgaaaaccgacctgctttattaattc

SEQ ID NO: 118231 - DNA, 293 bp, Zea mays
  Clone ID: MRT4577_39316C.1
aacctcgtatcgtgccactttctcagtcacctccagacaacgtctaccgctcgcgctctactcgcgttcggtaaggtcgtttagccatggcctcggagacggagacgttcgcctgccaggcggagatcaaccagctgatctcgctcatgcatcaacacgttctactccaacaacgagatcttcctcatggagctcatctccaactcctccgatgacttggacaagatcatgcttgagagtttgacggacaagaccaagctggatgtacagccagagctgttcatctacattgt

SEQ ID NO: 118232 - DNA, 440 bp, Zea mays
  Clone ID: MRT4577_39317C.1
ggaaaccaaggggtttggttttactggacatgttgccggaatgaggccaggggtgtgtgccaggcactggcggggctctaaaaaatggatctgggcgcgtgggcgggcgtcgtggctgaaaaacccggtgacgtgcgcgagtgcccactcgtcggtccacggtgagagcggggaaggcggaactgacaaggcaggtccacggcgcaaaaagagaaaaggggacccccgggggcaatggctcggcactggcgaaccaggcccgcgagacaaaaagagagagagcgaacgggcgaaggaaactggtgcccacaggtcggccccactgggcaacgagcgataaagggagggcgcgcgcgagggaaaactgccgttgacggcgcaggcgcgcaggcacccgttctatctgggcttagtgggccgactaggctgctttctccttt

SEQ ID NO: 118233 - DNA, 1742 bp, Zea mays
  Clone ID: MRT4577_39318C.1
gcacgtctgccactcgctcgctctcttccacaacccgcttcccccaaaaaccagatctaccacctgctcggccttagggcgcttcttgggccgagccctagcagtccggaattccgatctcggccaccacctcctcttctctcctctcctctcctgaaagcaatctcaaaagttcagcgggtagcctatcaagatggccgaggaaactgccaatgacgctcaggtggcacaagataacgagattgctctcagcaatgaggcaatccaaggtgatgagttggtccatgttgaagagctgtcccaaggtgatgatttggttcaaggaaatgagctagttgtttctgaggtgacaactcctactattggaaccagacgcaggagaaagaagtctttggtatgggagcacttcactattgaagccgtcgcaggtggggccactagggcatgctgcaagctctgcaagcaaacctttgcttacagctctggttcaaagattgctgggactagccatctcaagaggcacatcaccttgggctcttgtcctaagataaagaatcaagagcagaggctggcgctgccttcaactggagggactgacaatgatggcgagggaactatagagcggcgaaccaagagacgctacagatacactggttatgcaaatgctgcttttgatcaggaccgcagttgctcgtacttggcaaagttgatcattcagcatgactacccacttcacattgttcaacagccgccatttgccatttttattgaaagtctgcagccacgtttcaagattgtggatgttgaaacgatggaaggagaggtgtatgctgtttatcagaaagaaaaggagaacctgcttcaagcattcaacactatgcctggaaggatcagcctcactataggactgtggacaactagtcagactcttgggtacgtttcacttgcagggcagtttattgactctgagtggaaagtgcaccgaagaatgcttaacttcatgatggtgtcatctcctcattcagagaatgcacttagtgaggcaattagcatgagcctttctgactggaatatgaaggacaggctattcaccatcacattggataatgaatgctcctcacatgatatctacagtgcaaatctgagggatcatctctccaacaagaacaatctcatgcttaagggacagctctttgtcgtgaggtgctatgcccatatccttaatgctgttgccctagatgtcattgcttcaattcatggtgttgtatacagcattcgtgaaagcataaagttcataaaagcttcttctgcccgtgaagagaagtttgctgagattgctctgcagctggggattcccagtaccaagactctctgtttagatgttacaacccagtggaacacaacttatctgatgctgctggctgccttggactataagcaggcttttgctacactggagacatgtgatgataattacaatgaatctccttcagcagagactggaagaaagttgaggctacctgtaattacctgaaactgctatatgactctgcacatagtgtcatggcttcagcaaaccctactgcaaacatctttttccatgaagcttggaaaattcagcttgagctagccaatggcacagaacatgaaaatcccatcttcagcagtattgccaaggatatgcatgagagatttgacaaatactggaaagattgcagcctggtattagccattgctgttgt

SEQ ID NO: 118234 - DNA, 417 bp, Zea mays
  Clone ID: MRT4577_39319C.1
gattagtaaccatcatcgaccagatcaagaattacaccatgagcattcgcaaggacatctctcttcacaaaatgggcatggggttgcatagacatgaccccattgaacatgatacacgttcacagggagccatcggatggttgcccatcctagatgcaccaaacttagcgcggacagttttcagttgcgcggcgctctgaatgagcaacacgaggattagcggccatgggctcgctgtgcatacggtgcaccgttggctcctgcttgcacagcccatacatcgataccaccccctctggggaactgaaatgattatctgactacgactccggcttggccgattgacatgagagggacatctatgagcatcgggatacttagcagagcatgctcgcctttatgaccttcttctagtac

SEQ ID NO: 118235 - DNA, 159 bp, Zea mays
  Clone ID: MRT4577_3931C.1
tccgtactcccggtcgaccacgcgtccgcaaatatcatagtgattaattcgttagtgtgtagtggtttttggactaacacctctgtcaactttcaacgtttgtgcaaatggtaatgattttagcttttgcaatgcatgaatttgcatgacggacctttc

SEQ ID NO: 118236 - DNA, 320 bp, Zea mays
  Clone ID: MRT4577_39320C.1
attcggttcgaggcggattggaccgctttttacgcggagatcggccttgataacatggggcgcatgatcagccctgcgcccgtgtactccaacaagctgcagcacataaaccatgaactggcaagcacgctagccgatgttgttaccgaagccgaaatgaacgggaccttcccctcacacatgcatgatggcgagaccgagctcaaggttaactaccgcaatgagggcgtgcgcctgacactcatgcaaaagaaattgtcctaatctctattccacacgtacgagacaagggccaatgctgagatcaattatcacctgaa

SEQ ID NO: 118237 - DNA, 490 bp, Zea mays
  unsure (1)..(490): unsure at all n locations
  Clone ID: MRT4577_39321C.1
ggggggaaagngccggacacaaacagggacangggnagggggcgagaaacagaaagggganacaaaggccaccgcanncagggccacaaggcgggcaacaaaacccagannaccagcaacagggaaggggaggggcccagaannnnanacaccncggcaggcacccacgagancccccccgggaggaccaggcacgccncgggggcacacaaggcaacaaggggggccaacagcggggcaaccaaannnccgcncaggggggnancaccacaagggggnaaagnaangaggngggggccncnggcggaacncgancaggccnccggacggcggggccgcaaggcccacanagaaggccccggngncagggcnngaagcnaaaccnccaancncgccaaacaaggcaancncgngagaacngcngnagnccgcanaagcaccgnacagggggacaaaanccacgggcnccgcngnngcaaggaagcgcccg

SEQ ID NO: 118238 - DNA, 423 bp, Zea mays
  unsure (1)..(423): unsure at all n locations
  Clone ID: MRT4577_39322C.1
gagaaaaaccccaaaacattatctccttaggggggggggtttcccgaaatccaccccaagcaataggggggaaacattaccgggcgcccgttttaattgggggaacccctttttttgggccaaagttttgagcaaagccaaaaaagaatcccccgaaacccccttgtggggcccaacctttgggccgggccttttctggggggatcccccacggaagcaacccggaaaaacttggggaacccccctttttaagacccccccaaaagtaaaagtccccttggggggaaacaacctttggggaggggggaattcgctgggaaacctcagcttttaatcccaacccgggggggggaacaaggagaaaaaagagcgggcaacatttgaagctttttcnctgttgggggcccccacacaggggggggg

SEQ ID NO: 118239 - DNA, 418 bp, Zea mays
  Clone ID: MRT4577_39323C.1
atgacaaggtttctttctctctttctcgattcaagggccaatctctggcggggtcttttctttttggaacttattcaggacacaacaggtagcggcttggtaataaaccggagggtgacttcgattaatgccgggggagctagcagaccacctagctgcccctctcgagagagtcttattacaggtatcgaacctcaacctcgagggcgctacggtcaaccccagctcgcgcgaacaaaccagcggtgtgactctctgtttggctggggatcgttaacggagtgtcactccggtcccctcatgctctaaaaggtccctcggttttgatgcttgtgaccaacttgatggatgttactcacggcgttgccttggaccttacgcatcgtactggacagctgcttgagcaactgggatcagg

SEQ ID NO: 118240 - DNA, 476 bp, Zea mays
  Clone ID: MRT4577_39324C.1
ggacagccaaggggtaaagaaaaaaaaaaggaggggggaaaaaaaaaaaaaaaaccggataaggagcaccccaaaacccattaattgacacaaaggggaaaaaaaaaaaaagggagaactgggttttaaacaaaaaaaaaaaaaagctttggggggtaaaaaatttttgagggggggaaaaaaccggaaaagggcctttttggaaagcccccccccccaaaggtttttgcacttggccccgggagggggggcaaaaaaaagggtgcaaccaaaacttgcactggaggtcaacggacccggggggccaccccgaaaatccggaccgggacctggaggggaaccaattttcccaaaagggaggggaaaaaaagctgggcgaaaaaaaggaaaaaacgggtccctggggaaaaatgttatcccctaacaaatccaaaaaaaaaaaaagccggaaaaaaaaaaagaaaagcccggggggg

SEQ ID NO: 118241 - DNA, 1107 bp, Zea mays
  Clone ID: MRT4577_39325C.1
gagcatcctacttccttcctctcgtgactaacaccggccgggctccggcgacgcacgcagcccccggcgtgcgctcgcctatctccaatcatccaccgcgccgccgcagaggcctcgtcctcaccttccccgtaggaagccgaagtacagccagcagcgtcgccatcagcaccgatcatggccgactacgagcaggagcaggatatggaggtggaggcactgcaggccatcctcatggacgacatcaaggagatcgacccgagtgagagtgggatcgccaccaccgcccggtgcttccagatcctactctctcctcaggatgatgattttgatgagtcagcttatgtcccagttcaactggccctgatttttgcgcacactgagaagtaccccgatgaacctccactactaaatgtgaaaagtgtacgagggattaaaccacatgatcttgcatccctgaaggaaaagcttgagcaagaggttattataccacatggtgaagctgttactgtagagagctttttggcgtggagagaccgatttgaagctgagttggccttacagcgtgctaaacttatgccagattcagctcttacatcctcaaaggaaaagaaactcacaggacggcagtattttgaaagtggaaggcatgcagtgaaaggagcaagcacagttgctgatgaagatgaagaagaggaggaggatattgaattcgatgatgattttgaagacgatgaagaggacatgcttgagcattatctagctcaacaatcagagaacccagcagcttaaccttctaggccaaacaaagtaccttttcgggcgcagctttaccttaggaagccaaatgttgttatatgttgcaactgtagctctagcgcgcactatttttttatgtttctcatcatttggttgtatttgtggatgctttctagttttatcaagggggctgtgggttctcattaatatatacgctggagagatagaagatcaagctgcctaatacttcgctgtataatttactgtatttttgatcggctactacgtgtattttggcttgtggagcatgttgcgtgtttggggcaaaaaaaaaaaaaaaaagcggcc

SEQ ID NO: 118242 - DNA, 1255 bp, Zea mays
  Clone ID: MRT4577_39326C.1
cccacgcgtccgggactggcccatccacattgagcgagccatcctagttccttcctctcgtgactaacacctcacctcctccggcgacgcacgcagcccccggcgtgcgctcgcctatctccaatcatccaccgcgccgccgcagaggcctcgtcctcaccttccccgtaggaagccgaagtacagccagcagcgtcgccatcagcaccgatcatggccgactacgagcaggagcaggatatggaggtggaggcactgcaggccatcctcatggacgacatcaaggagatcgacccgagtgagagtgggatcgccaccaccgcccggtgcttccagatcctactctctcctcaggatgatgattttgatgagtcagcttatgtcccagttcaactggccctgatttttgcgcacactgagaagtaccccgatgaacctccactactaaatgtgaaaagtgtacgagggattaaaccacatgatcttgcatccctgaaggaaaagcttgagcaagaggcaaaagagaatcttggcatggctatggtctacactcttgtttcatcagccaaagagtggctaagtgagatatatggtcagaatggtggtgatgaggaacctgaagaaactgaagcagaagaggaggttattataccacatggtgaagctgttactgtagagagctttctggcgtggagagaccgatttgaagctgagttggccttacagcgtgctaaacttatgccagattcagctcttacatcctcaaaggaaaagaaactcacaggacggcagtattttgaaagtggaaggcatgcagtgaaaggagcaagcacagttgctgatgaagatgaagaagaggaggaggatattgaattcgatgatgattttgaagacgatgaagaggacatgcttgagcattatctagctcaacaatcagagaactcagcagcttaaccttctaggccaaacaaagtaccttttcgggcgcagctttaccttaggaagccaaatgttgttatatgttgcaactgtagctctagtgcgcactattttttttttatgtttctcatcatttggttgtatttgtggatgctttctagttttatcaagggggctgtgggttctcattaatatatacgctggaggagatagaagatcaagctgcctaatacttcgctgtataaaatacaaaaaaaattgtaaaaaaaaaaaaaaaaggcggccgctcgcgatctagaactagttacgacgcgtg

SEQ ID NO: 118243 - DNA, 1278 bp, Zea mays
  Clone ID: MRT4577_39327C.1
ctccaatcatccaccgcgccgccgcagaggcctcgtcctcaccttccccgtaggaagccgaagtacagccagcagcgtcgccatcagcaccgatcatggccggtacgaaccaaatccggaagcccctttttctccgctttgctcttgctgccaaccgcgtctttgcttgtgtatggttatgatgggccgcgtgggaagactacgagcaggagcaggatatggaggtggaggcactgcaggccatcctcatggacgacatcaaggagatcgacccgagtgagagtgggatcgccaccaccgcccggtgcttccagatcctactctctcctcaggatgatgattttgatgagtcagcttatgtcccagttcaactggccctgatttttgcgcacactgagaagtaccccgatgaacctccactactaaatgtgaaaagtgtacgagggattaaaccacatgatcttgcatccctgaaggaaaagcttgagcaagaggcaaaagagaatcttggcatggctatggtctacactcttgtttcatcagccaaagagtggctaagtgagatatatggtcagaatggtggtgatgaggaacctgaagaaactgaagcagaagaggaggttattataccacatggtgaagctgttactgtagagagctttctggcgtggagagaccgatttgaagctgagttggccttacagcgtgctaaacttatgccagattcagctcttacatcctcaaaggaaaagaaactcacaggacggcagtattttgaaagtggaaggcatgcagtgaaaggagcaagcacagttgctgatgaagatgaagaagaggaggaggatattgaattcgatgatgattttgaagacgatgaagaggacatgcttgagcattatctagctcaacaatcagagaactcagcagcttaaccttctaggccaaacaaagtaccttttcgggcgcagctttaccttaggaagccaaatgttgttatatgttgcaactgtagctctagtgcgcactattttttttttatgtttctcatcatttggttgtatttgtggatgctttctagttttatcaagggggctgtgggttctcattaatatatacgctggaggagatagaagatcaagctgcctaatacttcgctgtataatttactgtatttttgatcggctactacgtgtattttggcttgtggagcatgttgcgtgtttgggacaagtaatttatggaaagatattcaataaaaaaaaaaaaaaaaaagcggcc

SEQ ID NO: 118244 - DNA, 195 bp, Zea mays
  Clone ID: MRT4577_39328C.1
gtgtacgactagacagtggctgctatcttcacgcgcgagcatactgccgctataggggcggtatgaattgcctgcgaatcgcggtctaagcacactatggaaggatcttcctccatacttcctaatttcggacagaagagatgcacttccttgcatcaagttatgtacatacgcggttttgtgtatatctggttt

SEQ ID NO: 118245 - DNA, 388 bp, Zea mays
  Clone ID: MRT4577_39329C.1
atatactcctataaaatatgttcggcttttttagtgaccactgataaggggtttggattgagtcttttcctagatataaatcgttaaagtgaatagtcttgtagatagttggagagaagtatgatctatctttgctccaatgtttgcaatgaatgatacttttgagctacatagcactttatttgcttgtaaagtaactgagcagtattatatgcttgacgcctttacatcactacaactacttagagcaaggctaataatataacctgctgttggttgtatagatctttgcatcttatctctcgcccactcatatagtagttaactcttgactattaatacatggctcacttactgtgacaaaatctcttgcatcttatgcttaagc

SEQ ID NO: 118246 - DNA, 149 bp, Zea mays
  Clone ID: MRT4577_3932C.1
aacactttgttccggcagtgcctcacatgtaatgtctgcatggtctccggcacaggcgtgtgcgcgaagcgcatggtggtggacgcgcgccaccacatgctagggacggctctccaagatcatacccaaggatttttttagtgggcaag

SEQ ID NO: 118247 - DNA, 462 bp, Zea mays
  Clone ID: MRT4577_39330C.1
taggggccttttttttttttttttttgccgcaaacatgcaacacggatacatgttgtagcacaggaatcaaagtttttagtgtatatataatatatcggagacaatacaacaaactcaggtagaaatacaagaacgtatctgatcatgtttttttttccagcagaagcctactgaggtagaagaacattgaaagaaaacacgaggctggactccacccgaagtctgccagccaaacattggcctctaccaaaatctcgaaactacacatcgtatctacccgagaggagaatctgcttcttcgtgatgtcgtagactagaagtgcacccacagctcctctgtagtacgcacttgtgattgcacggtacctctcttgcccagcagtatcccatatttgggctttgatggttttcccttcaacctgcagggtgcgggtggcgaactcgaccccgaaccggccggc

SEQ ID NO: 118248 - DNA, 1144 bp, Zea mays
  Clone ID: MRT4577_39331C.1
actggcccatccacagtggagcgagccatcctagtttccttcctcttccgactcacacctcacctccggcgacgcacgctgccgctgccgccgccgtgcgcccgcctatctacaatcttttaccgtgctgccgcagaggtctcgtcctcaccatccccgtaggaagccgaagtacagccagaagcgtcgtcacaactcacaagcactgatcatggccgactacgatcaggagcaagagatggaggtggaggcgctgcaggccatcctcatggacgacatcaaggagatcgacccaagtgagagtgggatcgctaccaccgcccggtgcttccagatcctactctctcctcaggatgatgattttgacgagtcagcttatgtcccagttcaactggccctgatttttgcgcacactgagaagtaccctgatgaacctccggtactgaatgtcaaaagtgtacgagggattaaaccacatgatcttgcatccctaaaggaaaagattcagcgagaggcaacagagaatcttggcatggctatggtctacactcttgtttcatcagccaaagagtggctaagtgagaaatatggtcagaatggtggtgatgaggaacctgaagaatctgaagcggaaaaagaggaggttattataccgcatggtgaagctgttactgtggagagctttctggcttggagagaacgctttgaagctgagttggccttacagcgtgctaaacttatgccagattcagctcttacagccacaaaggaaaagaaactcacgggacggcagtattttgaaactggaaggcatgcagtgaaaggagcaagcacagttgctgatgaagatgaagaagaggaggaagacattgatttcgatgatgattttgaagacgacgaagaggacatgctttgagcattatttagccgaacaatcagggaagtcaacagcttaaccttcttggccaaagaaagtaccttttcaggcacaactttaccttaggaagccaaatgtggctatatattgcaagtgtagagcccactattttgtgatgcctgttatcatttttgtatctgagtggatgctttcaagctctatcaagggggctgtggttctcattaatatatatatgctgaaggagtt

SEQ ID NO: 118249 - DNA, 226 bp, Zea mays
  Clone ID: MRT4577_39332C.1
tttttttttttttttttttttttttttttttttttttttttttttttttttttttttttttttttttttttttagaaagcaacaaagactcgatggattttatattcacattgctttaagcgattttttcacaaacacacttagaaacacattggattaaatatgcagcataaaagggttgatcgaactttgatttttacaatggcttgttttccataccttaacg

SEQ ID NO: 118250 - DNA, 213 bp, Zea mays
  Clone ID: MRT4577_39333C.1
atgcaaacctctaatagtgagtcgtattaaatcctcaactctggcacgcgtgcaacgcttgcacagtcatggttaccactagtccagtctcgttcaaattcatcactgcttgccactactcatgcgcctatccgtaatgtccttgttaggcttgggcgacacttatagcattttcacaggccacacgcctaccgctcagtcgcagttggccca

SEQ ID NO: 118251 - DNA, 354 bp, Zea mays
  Clone ID: MRT4577_39334C.1
gtgtaaataaaatgaactttcttggtagcgcaaagaactgaacgcttattcataaaaatttaaaaagacgcgagtgcctggatgtgctgcggatcaaactaacatcgactgtgcttgccatgatgaggccatactcctggaccatggcgctcacgctcaagacactgctatactattaccgactgatgactaggatacaaggagctcggaagcgtctgacagccgttggatgactgcttccacctagcaagcggtgtagaggtcgtacttgaaggcaaccttgtcaatatccacgttggatgaggtcatcttcagtggcataacctgctggacgatagaaagggctatggacct

SEQ ID NO: 118252 - DNA, 355 bp, Zea mays
  Clone ID: MRT4577_39335C.1
ccggccgggccggggcgtccctctcgagcagtctgcccacgtgtccatgtgctgaatatgagccttatcgcacatcctcaccgcgagcacagcgcataaatccaccataatggctccgtgcctaacagcgccctagaagatgtttcatctctgcgccagctcgatactcactctgcgctccctgaggggatcgcgcaccaagggggaaatgaagaacacctactgggaggtctagctgtcctatttctgcggatataagggttgctgtatctgtgggagacgttgcattcttctacccatcaatatggtatatctacttgtgtacgaaaaaagaaacagagaggtccctagaggc

SEQ ID NO: 118253 - DNA, 627 bp, Zea mays
  Clone ID: MRT4577_39336C.1
tcactagggtttatctcctctcgccgcagcctccaccgaagccaagagaggagcagggcgaaaggaggccgtcggagatgtcggagaagaagcgcgcccccggcccgcgcaaggacgaggtggtgacccgcgagtacaccgtcaacctccacaagcgcctccatggatgcaccttcaagaagaaggcaccaaatgccatcaaggagatcaggaagtttgcacagaaggccatgggaaccaacgatgtccgcattgacgtgaagctcaacaagcacatctggagcagcggcatcaggagtgtcccgaggagagtccgtgtcaggattgcccgcaagaggaacgacgaggaggacgctaaggaggagctgtactctctggtcacagttgctgaagtcccccaggaaggtcttaaaggtttgggtaccaaggttgtggaggatgaggactaaaccccctgtctgtcgtatcgatcagttagaacttaatacatatctgctgagagcatattgggaagtcttgctttagcttattgttatctactgttcatgatgttccatgacttcttgatagaagatttgagacgttggatattttgttcaagtgcttgaagttttgatgtgttgtttc

SEQ ID NO: 118254 - DNA, 671 bp, Zea mays
  Clone ID: MRT4577_39337C.1
ttcacatgctggaatgattgggactaccaggccaactccctatcacatcctgcatgacgagataggcttcaatcctgatgacctgcaggagctggtgcactcgctctcttacgtgtaccaaaggagcacaacagccatatcagttgttgctcccatctgctacgcccaccttgcagccgcccaggttgggcagttcataaagttcgacgagatgtcggagacttcatctagccatggggggcatacctcggcgggcagcgtccctgtccaggagctgccccgtctgcatgagaaagtgaggagctccatgttcttctgctgagcagcagggaatgtgtcccttggtttttaccgttttgggtgtatggtcgggggttatgaacccatgaacttgttgcgtcacttggttccagcctcaggaagaactttgtaggatttttaagcatcgttgcagttgtgctgggtggcacgctgcaaccattttggctagcttgttgcagcacttggtgccttcctgagaggaagtagacttggaacctggtagcacgtccttaaaccatccttttaagcgttgctggttcggcctaaaaaaaaaaaaaaaaaaaaaaaaaaaaaaaaaaaaaaaaaaaaaaaaaaaaaaaaaaaaaaactcgagaagaggccgcggtacc

SEQ ID NO: 118255 - DNA, 3470 bp, Zea mays
  Clone ID: MRT4577_39338C.1
tacgggcacaccggtgacatgaaatttcagcattgtaatcccacaagccttcagctgggaacggagaagacacgcgcatggcagagaatttcaataataagaagctcattaattcggcacaagtctccgctaggctcctcactcccgctcccccgctcgctgttggtggaaatctagggtttcggtggggttcttgccgctgcggttgttcgtgcggcgcggatttagggagggttctgaggcgagggcttttgccccctcgagcgatttgcagctttgggtccgatacagtgctcatcaaggctcactaaatggagtctcacaatggcgaggccaatgacttgcctccaccacctcctctgattgctggtgttgaaccacttaaagctgatgaaacaaagatgccattgaaacctaggagtctggttcagagaaatggttttggcagaaaggggcagccaataaagctgataacaaatcatttcaaagtttctcttgtgaatgctgaagaatttatctatcattactatgtcaatttgaagtctgcagatgatacaccaggttgatcggttaaggaaatgagggaaagaggttggagaattgaagcagccttgtgcggcataacttggagataaggattttggctaagatggtgacacgtgactatgagcaagtggaggagctccatgttcttatcctgagcatgcaggggaatgtgtcccttgggtttttaccgttttgggtgtatggtggggggttatgaaaccatgaacttgttgcgtcacttggttccagcctcagaaagaactttgtaggatttttaagcatcgttgcagttgtgctggcgggcaccgctgcaatcagtttggcaatcttgttgatgcacgttgtggcgaggcagcagaccaagtaaaccaggaacgtgatagaacgtatttaaaacattcttttaaataaggcgggttaagtctaattaaatcaatcattgtacaatagcaatccttacgattccattgaacttttcgtgcaaccctgagtggactgacattttatttctagttttcgagcagcccggtgtggacatccactcaatatctatgcgtccactattctgatcatcaaagtaggtcttctaacgtacttgattattgccaagcagaaagttgatggaacaattatgattgataggccaaagggcaatcgcatactgaagaacttgatggtcttaaaaactgcagccaaccaggaacagaagattgcgggtcccagtgtgtaccaaaggagcacaacagccatatcagttgttgctcccatctgctacgcccaccttgcagccgcccaggttgggcagttcataaagttcgacgagatgtcggagacttcatctagccatggggggcatacctcggcgggcagcgtccctgtacaggagctgccccgtctgcatgagaaagtgaggagctccatgttcttctgctgagcagcagggaatgtgtcccttggttttacctttttgggtgtatggtcgggggttctgaacccatgaacttgttgcctcacttggttccagcctcaggaagaactttgtaggatgctgaatggtaggatttttaagcatcgttgcagttgtgctgggtggcacgctgcaaccattttggctagcttgttgcagcacttggtgccttcctgagaggaagtagacttggaacctggtagcacgtccttaaaccatccttttaagcgttgctggtacggccgagaaatgggcggtagtaaacttttctgcacgatgcaatgtcagggatcttgtccgggatctcatcaagtgtggaggcatgaagggcattatggttgatgctccttttgctgtatttgatgagaatccttcaatgagacggtcacctgctataagaagggttgaagacatgtttgaacaagtgaaaactaagcttcctggagcacccaagtttcttttgtgtgttctagcggaaagaaagaattctgatatttatgggccttggaagaagaaatgccttgctgaatttgggatcgttacacagtgtgtggcaccaactagagtcaatgatcagtatcttacaaatgtcttgttaaagattaacgcaaagttgggtggcttgaattcgttgctccaaattgaaacatccccagcaattcctctcgtatccaaggtcccaactataatcttgggtatggacgtatcacacggatctcctggacattctgatataccgtctgttgctgctgttgttagttctcgtgaatggcctcttatctcaaaatacagagcatctgtccgcacccaatcaccaaaaatggaaatgattgactcgttgtttaagccacgggaaactgatgacgatggtctgattcgggagtgtctgattgacttctacaccagttcggggaagagaaagcccgaccaagtcatcatcttcagggacggtgttagtgaaagtcagtttaaccaggtgctgaacattgagttgcaacaaatcattgaggcttgcaaatttcttgatgagaaatggaatcccaagttcacattgatcattgcccagaagaatcaccacactaaatttttcattcctggaaagccagataatgttccagccggcactgttgttgacaacaaagtctgtcatccaaggaacttcgatttctacatgtgttcacatgctggaatgattgggactaccaggccaactcactaccacatcctgcatgatgagataggcttcaatcctgatgatctgcaggagctggtgcattcgctctcttatgtgtaccaaaggagcacaacagccatatcagtcgttgctcccatctgctacgcacatctggcagctgctcaggttggccagttcataaagttcgatgagatgtcggagacgtcctccagtcatggcgggcatacttcggcgggcagcgttccggtccaggagctgccgcgcctgcatgagaaagtgaggagctcgatgttcttttgctgagccgtggttttacttttttggtggatggtgaacccctctagttatgtcggtagacgctcttggatgacgctctagttgtggtccaggaaggctcgagctggtacgatgttaaatgttagttttttaagcgtcgctgcggctatgttggtgcctcaggaagacttggaacctggttaggatgtcgttaaatctaccccttatcgttcctggttcgttgggctgttgttcttattgtccgtcctggtgtctgatttctgctttgttgcatgcaagtgtgaggcccagcttgatattgaaaagtttggcgtacatgtcgttcccaaaaaaaaaaaaaaaaaaaaaaaaaaaaaaaaaaaaaaaaaaaaaaaaaaaaaaaaaaaaaaaaaaaaaaaaaagtactctgcgttgttaccactgctaaaaaaaaaaaaaaaaaaaaaaaaaaaaaggggcggcccc

SEQ ID NO: 118256 - DNA, 518 bp, Zea mays
  unsure (1)..(518): unsure at all n locations
  Clone ID: MRT4577_39339C.1
cacgccgnntccgaaaaaaaaaaaaaaaaaaaaaaaaaaaaaaaaaaaaaaaaaaaaaaaaaaaaaaaaaaaaaaaaaaaaaaaaaaaaaataaaggggggcgcccttttaaaggaacgaggctttcctacccgggggcttcaaatataagggcgcttttttttgggggcaccaaactttaatttgggggcccctgttttaaaacaacttagtgggaaaccccttgttttcccccacgtaaacccccttgaaaccaaccccgttttcacaagtgggggttcccccaaaaaggcccccccgaatggcctttcccactagcccggtagcgtaaaggcaaagggggccccccctttggcccccccaaaaggggcggcgggcgggggggtaaccccaagggcccccgtattatttcccaagcccctagggccggttcttttcgtttttttcccctcttttttcgcaaagtggggggggttttcccggggagggattaattggggggcccctttgggggcccc

SEQ ID NO: 118257 - DNA, 355 bp, Zea mays
  Clone ID: MRT4577_3933C.1
tgggatttcggctcgggcctagccgcgagtcccgctttttctacgtggtcctgcttggtttcgtgcgggggactgaataaaaaagcgggggcgggcgccgactagcaagctggtggtcctgggcattaacatcggccgggcccccttgggcgtacacgttgtgcttgtagtgagcggtaccggggcgcggcgtgttcacgggggtagcggtttcctgtgggaactggttatcaactcccaattatactcaaaccattacccgggcgcataaaggcgagagtccggggtgccctacgagcgagctaacatacatgaatcagctatgggcggactggccgctttccagggcgggaag

SEQ ID NO: 118258 - DNA, 2248 bp, Zea mays
  Clone ID: MRT4577_39340C.1
aacttcacttgtgctctctgttcggaaagaagcccggccgggtcggaaggggagcagttctcgccttctcggggaggtcgccagcgggttgggcagaggctttgcagcttttgggtcagacgcagtgttctccaaggctcactaaatggagtctcacaatggcgaggctgatgatttgcctccaccaccccctttggctgctggtgttgaaccacttaaagccgatgaaacaaagatgccattgaaacctaggagtctggtccagaggaatggctttggcagaaaggggcagcagataaagctgataacaaaccacttcaaagtttctctcatgaaggctgaagattttttctatcattactatgtcaatttgaagtatgaagatgatacaccggttgatcggaaagggtcgggaagaaaagtgatcgaaaaactgcagcaaacttatgctgctgaacttgcaaataaagattttgcatatgatggtgagaagagcctgtttacaattggtgcccttcctcaagttaaaatggaattcactgttgtggatgaagacgtttcaactggaaagactcctgcaaatggcagtccaggcaatgatagtcctcctggaagtgacaggaaaagggtccgaaggccttacaatacaaagacatataaggtcgaactatcttttgcggcaaaaatccctatgagtgcaatctcacaggctttgaggggtcaggagtcagagcacactcaggaagcaattcgagtgattgacattattctgaggcagcactcagctaagcagggttgcctattagtaaggcaatcattcttccacaacaatccttccaattttgttgacctgggtggtggtgtagtgggctgtagaggttttcattctagttttcgagcaacccagagtggactttcactcaatatcgatgtgtcgactacaatgatagtgaaacctggtcctgtcattgattttctgcttgacaatcagaaagttggtgatccaagcatgattgattgggctaaggccaagcgtgcactgaagaacttgaggataaaaataagtccagcgaaccaagaacagaagattgttggtctcagcgaaagaacttgtcgtgagcaattattcacactgaaacataaaaatggtaacaatggtgactctgaagagatcactgtttatgattacttcgtaaagcagcgtggcatagtgctgcaatactctggtgatcttccttgcatcaatgtgggaaaactaaagcggccaacatattttccaattgagttatgcagtcttgtgcctttacaaagatacactaaagctttgaacacacttcagaggtcatcactcgtggagaaatctaggcagaaaccgcaggaaaggatgtctgttttatctgatgtgctgcaaagaagcaactatgatgcagagcccatgttgaaggcatgcgggattacaattgctagaaatttcacagaagttgatggtagggtattgcagccccctaagcttaaagctgggaacggagaagacatttttacgcgcaatggcagatggaatttcaataataagaagctcattagagctagcagtgtcgagaaatgggcagtagtaaacttttctgcacgatgcaatgtccggggtcttgtccgtgatctcatcaagtgtggaggcatgaagggcattatggttgatgcaccatttgctgtatttgatgagaatccttcaatgagacggtcacctgctgtaagaagggttgaagacatgtttgaacaagtgaaaactaagcttcctggagcacccaagtttcttttatgtgttctagcggaaagaaagaattctgatatttatgggccttggaagaagaaatgccttgctgaatttgggatcgttacacagtgtgtggcaccaactagagtcaatgatcagtatcttacaaatgtcttgttaaagattaacgcaaagttgggtggcttgaattcgttgctccaaattgaaacatccccagcaattcctctcgtatccaaggtcccaactataatcttgggtatggacgtatcacacggatctcctggacattctgatataccgtctgttgctgctgttgttagttctcgcgaatggcctcttatctcaaaatacagagcatctgtccgcacccaatcaccaaaaatggaaatgattgactcgttgtttaagccacgggaaactgatgacgatggtctgattcgggaagtgtctgattga

SEQ ID NO: 118259 - DNA, 314 bp, Zea mays
  Clone ID: MRT4577_39341C.1
gtccaaggtccagtatgcgcatcagtattctgctcatccttagtctgaaccatgacttgggaagggactcagctgaatgattatggcctgggacaggttacagtctttatcatctagtgtagactacagagtgtgttagttgttgtgcaagtacgtgcaggcgatgtgcttatgagtcagtgtttagagttattcatgtctgcttgccggactagccctggtcctgctggagcggagctgattgccccaatgcgccagttctgcaagctgctgagcacattaaagctgccgccgactgatgacgctatgctctc

SEQ ID NO: 118260 - DNA, 365 bp, Zea mays
  Clone ID: MRT4577_39342C.1
gtcatccgcgagggatagctggagaagactgggcccccaaccaccgtcgggggggccgccggcggcatcgcctccggttttcctcgaggctgatcaacccctgcccgttcggctgtctgcctgtctcgggatgcacttggatttctgaccgtgtgctgctgaagcgtccagattggtacccggagatggatctgcttcttccgtacaagattggggatctcgcggagtccaagtcctttttgaatggttacaggggcgcgtggtttcgttgcaaggtacataatatgcgtgtcaatgattctggatacctggagtgttacttggaatatattgactatgatggggaggatctggattgggttgcc

SEQ ID NO: 118261 - DNA, 804 bp, Zea mays
  unsure (1)..(804): unsure at all n locations
  Clone ID: MRT4577_39343C.1
cattgccgcgctcgaggccggccgggcagaggatctgcttccctcccccgtgcacacaggtgacacgtcatccgcgagggatactcgagagaagactaaacccccaaccaccgccgccgtggccgccggcggcgatcgcctccggttttcctcgaggctgatcaacccctgcccgttcggctgtctgcctgtctcgggatgcacttggatttctgaccgtgtgctgctgaagcgtccagattggtacccggagatggatctgcttcttccgtacaagattggggatctcgcggagtccaagtcctttttgaatggttacaggggcgcgtggtttcgttgcaaggccattcttggtgggagtttcacgtcagtgcgatacatcaacaagtttggtgacatggtctacgaagagatagagttttacgggaggtacataatatgcgtgtcaatgattctggatacctggagtgttacttggaatatattgactatgatggggaggatctggattgngttgccgtcttccaagagaacccagcaagctcaagtcaaaattctaaaggaagtactgaagttatgataaggccttctttccctcaatggtattatgggcatgaacctgatcagctcccagttagtgatgtcacagcagttgttgatgaggcctggaaaataggcgatatggttgattggctcaaggacggttgctattggtctgggacaatactaagtactcaaaaagatatggttaaagcaaaccaaaaagttggtataccgctcgtcttcttcgacatataaatctga

SEQ ID NO: 118262 - DNA, 308 bp, Zea mays
  unsure (1)..(308): unsure at all n locations
  Clone ID: MRT4577_39344C.1
ggagccagtcttggggcccgcttctaccggcagatcgaaagacatccggggatcatcccggtgatcggcttaatctgcctgggcatgggcagcgctgcgctttacttgnctgcgactcgcccttcgcagccccgacgtctgctgggacagatagaacaacccggagccctggaaccgcctgagccccaatgaccagtacaagttccttgcagtttccactgactgcaagntgctgnagaaggaccggccagacttctaagccaggctgggctgccagtgccatgcaagccacagccagccagcccatc

SEQ ID NO: 118263 - DNA, 362 bp, Zea mays
  Clone ID: MRT4577_39345C.1
gtttcagatctcatcaaccttaacctctcagactccactgacagaatcattgctgaatacatatgcgttggtggttctggaatggacatgagaagcaaagccaggactctacctggaccagtgactgacccttcgcagctaccaaagtggaactatgatggttcatgcacaggccaagctcctgatgaagacagtgaagtcatcttatactctcaagccatattcaaggatcctttccgtataggaaacaacattcttgtcatgtgcgatgcgtacactcccgcgggtgaaccaatcccgactaacaaaagacacgctgctggtaatgtctttagcaaccctgatgttgcagctgaagttcc

SEQ ID NO: 118264 - DNA, 338 bp, Zea mays
  Clone ID: MRT4577_39346C.1
aaaaattaatccattggtgaaaaaacaacaataatttagtcaatctttggcaaattttcacactacaaagcttttttttgataaggcagtgcaattggaagacaagatttcaactttttttaacgtaaatacaagatttcaactcacctcagacactctaagtttagcctttccagtcccagaaggaaccttttcactggtagaattatctgttgctgacattccatgtttgcagaacagttctttgtttctctcacagcaatgcacaggatgatgatttcttcccctatacaaggaaccgcctggcaaaaaatgaagaaaatcacttgccaattccc

SEQ ID NO: 118265 - DNA, 628 bp, Zea mays
  Clone ID: MRT4577_39347C.1
catccaaagcctcgacgcgctcgctggctgcaagattgcacagtgcgcgcaaaaagtactctgctctgcaggactggagtaccagaggactacctcagagctggcttcggacagtacccccaaaataaaggcacatgcacttaccacggctaggacagaagggccatacggcgaggccgactgcgtgctgtgcttggtgaccagcatggaatcgcgactctcgctgcgactgctgatgacatcaatagactcccatgcatactgagtattagctatcgtagctggagatgccggatgatctctactatactcattacgaactgggtgcaacataaaaatgtgtagagggagtgggagaacaagaactccagattcctactcattcttgtcgagagcaggatgcaccgccttggccgctactactagggtaccaagaagctcccacccgccggtgaagtacgagtcaactacggggagcactctggcggcctaagcgatatcctccgacggcttggtctttaacacctatgagcttggtctagataatggatatatgtaattctgtgttatgatctggagcctggttacatggacaaggaacctcaactttttctatgtatacttggag

SEQ ID NO: 118266 - DNA, 459 bp, Zea mays
  Clone ID: MRT4577_39348C.1
ttttccacacggccgaggatcacatatggacactgtccatgatgctgggatgcacgacggcatactatgcctttatttgaggagtctaaccattgaaggatacgaaggcacctgagaaactacagaggttaacgagaccaggggaggtcattgcacatcaaaacattaggagggtatcatagaacaaacaactttactgtgaagctctgcgtgtagctgatacactactctgaataattttacatgactaagataggaggggcactacactacaagacgttatgaaaatgaattatttctgagatacttatactgctattagtaaagctagatacagccctctgatatgggggagctatgttgaggtacacatggagcatgaccctgatctggatgcccttcattatgcagtagtcgacgcaaaaggaactgctggacagacacaattgctggaaatag

SEQ ID NO: 118267 - DNA, 383 bp, Zea mays
  Clone ID: MRT4577_39349C.1
gtgctcgttcccggccggccggtcaggatttgacatgccggatgctgatcgaaacggaataaagtccatgtctccaactctccatgtccatgtccttgactccttggacggttgctggcctagtggtgagaattcgtgctccggaaggagatgttcttggttgtactagaagataaggatgctgaagcagcgccagcacgagttgctgtcgcggtagagtatcgaatgcgggacggaagagatggtgtgtgtcggtcgatcctcttaccgtccgtttcatgccaggctgctagctttctgttggaacttggaaccccctgcaataaaatccttaaaatcctcttatccctggatggaaccccccctgcaggcagcagcggcag

SEQ ID NO: 118268 - DNA, 440 bp, Zea mays
  Clone ID: MRT4577_3934C.1
ctcgggggaccataagatatgactacactaaaaagactcagcacacactaactgcaacctcccaaagaggcaagaccagactgaaactggagaccagctatgactcttaagatggtcgtcgcaaagcataaacacggatacatggtacgacatgtacctaccttcaagcatgcattagcaagggaaactgccaccgcggactgatttcatataccattccatatcagaggtaaacacactatgcacggacccctgtaaagcagcacaccacttttgagtccacacatgcatttccaaggatctgctacagagagatggttgctaccagagacacacagtcccttataaatagggtggcacgtttggatacatacgaggacacctgccacctggtccaagaggatagattataccttgacggacgaggtctgggaaaccag

SEQ ID NO: 118269 - DNA, 1062 bp, Zea mays
  Clone ID: MRT4577_39350C.1
cccgctggccgtgacgcacctgctccagcacacgctgcgcagcctctgcggccacgacgacgcgcagtgggtgtacgccgtcttctggcggatcctccccagaaactacccgcccccaaaatgggatctccagggcggcatatacgaccggacaagagggaacaggaggaactggatcctggcatgggaggatggattctgcaacttcgcagcctctgcctgtgaccacgagggcgcagctgctcctgccgccgccgccgcctcctcctcctacacggcggagtgtgctgctgccgggcaggaggccgccaagggcctgcagcctgagctcttcttcaagatgtcccacgacatctacaactacggtgaagggttgatagggaaagtggcagccgaccacagccacaagtgggtgttccaggaggcccaggagcacgagatcaacctcatctcctcctggagcaaccctgccgactctcatccgaggacatgggaggctcagttcaagtctggcatcaagaccatcgctctgatcgccgtcagagaaggcgtcgtgcagcttggctccatgaagaaggtggcggaggacctgagctacgtggtgatgctgcgccggaagttcggctacctggagagcatcccgggggtgctgctgccgcacccgtcgtcggccgcgttcccggcgggcgccatcgctggtttcccgccgccgcagacgcggcctgcagctggccgcctggactcgtcatgccgccgccggtggagctctacgacccctacgcccagtcagcggccgcggcggcgcagatgcacatcgtaccgtcgatgagcagcctggaggcgctgctgtccaagctgccgtcggtcgaccctgcggcggccgcgatggccagcaaagaggagacggacgccgtggagcacggcgagcgccacggcatggccgacgtagtggccgcacggagccgcggcgagagcaccagcgttgctgccgccgccgcagtatcttactacgtgaacgtggccaagcccagcgagggattctagtccgtctccgtctcaagt

SEQ ID NO: 118270 - DNA, 209 bp, Zea mays
  Clone ID: MRT4577_39351C.1
cgaacctccatacataatttaattacataatgaaatattccaaaacatcaattaacttctatctatatttaactgaatcatctggcaataataaatactcctctaatcgttattaattatcctctacattcttcattttcctacttatgccttactctctcatacttacatatataacaattttttgaatcttcatattatcacaacta

SEQ ID NO: 118271 - DNA, 777 bp, Zea mays
  Clone ID: MRT4577_39352C.1
aattcggcacgagggcaaaaccaaatcaaattactctctgcccaggatcctggcatgggaggatggattctgcaacttcgcagcctctgcctgtgaccacgagggcgcagctgctcctgccgccgccgccgcctcctcctcctacacggcggagtgtgctgctgccgggcaggaggccgccaagggcctgcagcctgagctcttcttcaagatgtcccacgacatctacaactacggtgaagggtacgtatttagcagtaaataacactacagtggtttactagtagaggactactggtcaaccatcatatcgcgcgcggtcccgttgcctggtgatgtgcttgtgctttgcgttattgcaggttgatagggaaagtggcagccgaccacagccacaagtgggtgttccaggaggcccaggagcacgagatcaacctcatctcctcctggagcaaccctgccgactctcatccgaggacatgggaggctcagttcaagtctggcatcaagaccatcgctctgatcgccgtcagagaaggcgtcgtgcagcttggctccatgaagaaggtggcggaggacctgagctacgtggtgatgctgcgcccggagttcggctacctggagagcatcccgggggtgctgctgccgcacccgtcgtcggccgcgttcccggcgggcgccatcgctggccccgccgccgcagacgcggcctgcagctggccgcctggactcgtcatgccgccgccggtggagctctacgacccctacgcccagtca

SEQ ID NO: 118272 - DNA, 464 bp, Zea mays
  Clone ID: MRT4577_39353C.1
cccagaagtttgacctacttaaagaagtactccttgtcttggtctaccctccctctctgggacccgtgtaaaaaggcctcttccaagccttaaagacagagcaaccaattggcttttgaaaaaaatgccctttctttcttgaagacaggaaggccctcttccctggtctgtgaccaaaacccttcctcttttttaatgttttgtttggtagttggtacctggtcttaatataatggaatccctttttttttaattattaatcattacagtagaaaacaggcctgtgtagtggtgaagagctatcttacagtgtcacttaatttcgggtttgaagcagcctctccacatttgcagaaggaagaacctgcctcagtttatctcttccccgtacccgctcatgtggaagcctgtggcactggtctgccttttgttttcattatcatattacatactgctctgctttt

SEQ ID NO: 118273 - DNA, 344 bp, Zea mays
  unsure (1)..(344): unsure at all n locations
  Clone ID: MRT4577_39354C.1
ngacagcgttcggagtgctatgtttagtaacggtttgtgcttatatatgtttcatatgagtggtgagtgtcgtcgttgctttacttttgtttcctgtcgatgttgtttgcatgtacatgcagtctacgttagtgagtgagtctatggctggaactggcgatcggccggacgacgtctggttttgccgccggtatgatcagcagaggcggcttcatcaagttgtggatgtgtaattgtgtatgttcttcgtttgaacgagtttataccctgctgttcgtatggcaggagttcactacacaaaaaagaaaaaccatcttacattcaacttttctttttaacaaaaa

SEQ ID NO: 118274 - DNA, 448 bp, Zea mays
  Clone ID: MRT4577_39355C.1
aaaagcgcttccagagttaacactcttgatgagcctgatctggatccgaaggatataacgcccacgcgtccggcatatggagccgagggtgaactaggcattgtattgtctgaaaggttcatggaacatgatgcttattcaatgtttgatggtttgatggacggaggtagtggagtggtctgcatggcagagtttttctctacatcgaaggttggatctagctcaagtctagcacctgtcattgaagcctcagcatctttatttcatttgctttccattgttgagccatctcttcatagccatttcattgagctggatgtagaaccacagtatttcgctcttcgttggctgcgagtcttgtttggacgagagttgtgcctcgacgatcttttagtcgtatggatgaaagtttttgcttgctccaatgatatgctacttagagaaaatg

SEQ ID NO: 118275 - DNA, 1800 bp, Zea mays
  Clone ID: MRT4577_39356C.1
ctcgaggccggccgggggcttgccgtggccctcggctctggttatcccgccaggcgactcttcgactaagcaagagctgctcgtcccatcagccgaacatcgtcgcccttctgactgcccattcgagaccgcggccggaaaccaccaccttctgaaacgcgctggcagctgcaattccgaggctatcttcttgttctacacatcattcgcaatgaggccggcaattgctgcccccgcggctatccgccatgcatcttcaattgcccatccctcccgtcgccagacttgtgccgggaaaactcgctgtttagcttctcactcgcctgcgacatcggcccaacttttgagcccgcgacgaccagcaacaatcactgccaggacaactcccgccagcctatacactctcgtcgcacagcacagaatggcgtcctcctcctcagtccagaagatcaaggtcaaaaaccccgtcgtggagctcgacggtgatgagatgaccaggatcatctggcaggtcatcaaggacaagtttatccacccttaccccgacattgacctcaagtactacgacctgggcctgccataccgtgatgagaccgacgaccaagtcacgctcgatgccgccgaggccatcaaaaagtactcagttggtgtcaagtgcgcaaccattactccagacgagcagcgtgtagaagaattcaagctcaagaagatgtggttgtcgcccaatggcaccattcgaaaccatctaggaggaaccgtcttccgcgcacccattgttatccccaccatccctcgtctcgtccctggatggaagcagcccatcatcattggccgtcacgctttcggcgaccagtaccgcgccaaggaccgtgtcatccccggtgagggtaccttggaaatggtcttcacaccaaagggcggcaagcccgaggtgatcaaggtctacgacttccctgcagagggtggtgtcgctcagacccagtacaacacaaccgagtccatctcgggcttcgcacatgcctcgttcaagatggcgctcgacaagaagctgcctctgtacatgagcactaagaacaccattcttaaagcctacgacggaaagttcaaggatgttttccaagaaatctacgacacccagtataagaaggactttgaggccgccaagatctggtacgagcaccgtctgattgacgacatggtcgctcagatgatcaagagcgagggtggctacgttattgccatgaagaactacgacggagacgtccaatctgacattgtcgctcagggtttcggctctcttggtctcatgacttccacactcatcacccccgacggcaagacgttcgaggctgaggccgcgcacggtaccgttacccgccactaccgcgagcaccaaaagggcaaggagacatctactaaccccattgcctccatctttgcctggacacaaggtctggccaagcgtggcgagctcgacaacacccctgaacttgtcgtctttgccgagacgctcgagaaggcttgcatcgacacggtcgatgttgacaagatcatgaccaaggatctggcgctagcgtgcggaaagaaggatagggctagctgggtcacaaccaacgagtacctggacgcagtggaacgaaggctcaagtcgagtttgaagggaaagctatagacgcaaggagcaggccaaggacaagatatcctggttgagtgatcaccctacgtatccaatgttgagcgcatatagacggatgagtgcttattcccatgtagaaatcaaatctaccaattctcaggacg

SEQ ID NO: 118276 - DNA, 689 bp, Zea mays
  Clone ID: MRT4577_39357C.1
tgggacctcgagccgggattaggtgacactatagacgctttttttttttttttttttttttttcttttttttttttttttttttttttttttttttttttttttttttttttttttttttttttttttttttttttttttttttgttgcccaaaacccccttggtttattccaagggtaccccgaaaccccaaaggggggaacaagacaacttcccgcccaaaaaggggggaacacggctgccttgggccggcaaaaaaaactctccaggatggactgcgccccccgggggtctttccggtccgggttccagggcacgccagccaaggggggggggggttaaattctccccccccaaccgtcggggggctttctttcccctcccgggttcatgggttgaccgacacccccttcctctgcttagggggggagggaaacgggctccccctttggggccctttagggcccccaaattccgcttttggtccctttaaggggggaaaatttgccggtggggaaaaataaggccctaactgtttcccgggggaaattggtttccgccctaaattgcaaaccccgtgggggcccaaaagataaatagaaaaccctgggggggctaaggggggggcccactttccttaattgggaatccgcccaccgccccgttttaaagaaggaaaccacgcgggg

SEQ ID NO: 118277 - DNA, 199 bp, Zea mays
  Clone ID: MRT4577_39358C.1
gcgagcgtccggcaggtaccatagaaaaaccgcacgcagtcgatcccgtagcgggggccactctccgatcaaaggatgggcaccgatacagcgagcaggcctgggccaactggcgaccctggtgatccttcttcaggggaggcaggctctgacacgccaagacgctcgataccgtcggggttttaacacctagacgggg

SEQ ID NO: 118278 - DNA, 271 bp, Zea mays
  Clone ID: MRT4577_39359C.1
aaggttcctgggcctccacctttctacgggtgaattttgagaaaatacgtcaactggagcgcgcttgacaatgcttgtacaggcccaatggcgactggacgcgcgctgtatcacagcatatatgcgcggcgtttgacagcggttacgcgcggaaaaaccgttgcgtttgccagcttaatagcgttcgatacttccctcttttgccttcttttgtaataacgaaaaggcgctttccgagtgcccttctaaatagttggctacctttaagggt

SEQ ID NO: 118279 - DNA, 765 bp, Zea mays
  unsure (1)..(765): unsure at all n locations
  Clone ID: MRT4577_3935C.1
ctctctctggctggctgtcttttctccacttcgacggtaccacgctgaaggcggaagagtgactcatacggtctcaccttcagtgattcagtctcatctcccaaaccaccagtcactcgagcactaaaaaattaaagtcaagagcggggagagcagctacagaaatcaacaaggaatagaaatccatggagactccgcatcatcagtttgtggttgatggatagctaggatggatggatggatggatggaacagtggaatgcaaatgcagctaaagctacggctagattgatgagatcagcagcagattaacaaagaaaacagcttccctatgccgcaaggctgattcagtcagcattagactctgttgatcaatgtcgtccagtcccgaaagacatggcttggtcggtcactccaagtccagccgcagcagcagctgcgggctccgccgccggctccgggagcggcatgccgagctggccgtcgtgcggccccagcagctccgggtcgccggggagcccggcgtggccgcgccgcgccagggtgtgcttgttgttgtgcatccacaccttgagcacgcgccgcttcacgccgacctcctggcagaagcgctgcaccgccgcctcgtccagcttctgcagccgccacccggcgtcctccgcgaaccccaccatccgggccttctgctccgnggngaacttggtccggaaccgcttccgggccggggcctgctgctgctgctgcacctcccccccgcgcacccccg

SEQ ID NO: 118280 - DNA, 368 bp, Zea mays
  Clone ID: MRT4577_39360C.1
acatcctaccccgttggtttcgtgccgctcttatggtggatcagcgcgtacaaatgcatcgtctgctgcgacgacatctacatgctcaaaggctcatgctgcaagtcgctcgccccgttcccgcaaggctgcttctactccaacgccctactagggctcaagtgctacgagaaccccaagcacaaagtcaccgctgttcccgccgacgaagaatagatctgcggtgccactattaaggtggtggaagggtctactgttctgactgcgcttcactgatctatcatcatcaggcggaagcgattctatgataatgcaaaactttgtacatgctttgatcgaaggtagtgtaacatattggtaggcaacaa

SEQ ID NO: 118281 - DNA, 1614 bp, Zea mays
  Clone ID: MRT4577_39361C.1
atggcggcatgcatccgaaagatagcttcagtagagtttggtttgagtcaaggaaacagaagggaagttaaagacacttggtggtggaacgaagatgtccaaaaggctatcaaggagaagaaagattgctacaaacgcttacatcatgacaagtgtgcagacaacatagagaagtacaggatagcgaagaagtctgcaaagcgagcggttagtagagcccggggtcaagcctatgacgacctttatcaacggttggacacaaagcagggagaaaaggatatctataggatggccaaggttcgtgaaaggaagacaagggatgtcaaccaagtcaaatgcatcaaggatgaagcaaaccaactattagtgaagaatgaagagatcaagaacagatggaaggagatacaagaatatgaagttaaagaggcgctaaaaaggattaaggtaggaaaggcgatgggccctgatggtatccctatcgaggtatggagatgccttggagacagagcgataatatggctgactaagcttttcaacaccatctttcggacaaacagaatgaccgacgagtggcggcggagtacgttagtaccaatcttcaagaacaaaggagatgttcaaagttgtactaattaccgtggaattaagctcatgagccatacaacgaagctatgggagagagtcattgaacaccgcctgcggaagatgacgagcgtgacccaaaatcagtttggtttcatgcctgggagatcaactatggaggccattttcttactaagacaacttatggagagattcagagaacaaaagaaagacctgcatatggtcttcatagacttggagaaggcttatgacaaagtacctaagagtgtaatgtggtgggccttggaaaaacacaaagtatcaacaaagtacattaatcttattaaagatatgtacactaatgttgtgacaagtgtccgaacaagtgatggagacaccgatgacttttcaattaacataggactacatcaagggtcggctttgagcccttatctttttgctttggtgatagatgaggtcacaagggacatgcaaggagatataccgtggtgtatgctttttgccgatgatgtggtacttattgaggagagtaggagtggtgttttgcaaaagttggaattatggaggcagacgctggaagcaaaatgttttacgcttagtaggtctaaaacagagtatatgaagtgtgatttcagcgccatggggtatgaggatggcgatgttagtcttgatgggcaagtggtacccaagaaagacacttttcgttacttaagatcaatgcttcagaaggagggagacatcgatgaggatgtcagtcatagaattaaagctggatggttgaagtggcggcaagctgcgggtgtcttatgcgaccctcgggtgccacacaaactaaaaggcaaattctacaggacagcaatccggctggctatgttgtatggagcagaatgttggcccactaaaatacgacatgtccaacaactaagtgtggcagagatgcgtatgtgcgctggatatgtggccacacaaggagagaccgagtccggaatgatgatatacgagagagagtag

SEQ ID NO: 118282 - DNA, 3808 bp, Zea mays
  Clone ID: MRT4577_39362C.1
gttagactgcgaaagacacgaatttgtatcaactggaaaatgacatccccgtataatggatcgagtgtcagagaactctgcttatatacaccaattacctttcaaatcattgaacagaatgcaagttagcatatttcatttttcgtagaacatctccactttttttgtagttcttacacatcaaaatgaagaaatacagcattgacattttcaatctcagtgtagcctcagaaaccacatcttctgatgcatctggtaaagaaagggtgttgtagagcttcatgtgctttcaggcgctcattaggatcataccgaagaagtccttgaagaagatcaattagatctccagcagaatgatcaacatgttgcatcacaaggttctgcagacgaggcaatttccagactgccttcatgctctctcgtgaggccgctccctctggccagtccaaccttactccgcgcttgaagtacttttcagcacgccgatcagctctgacaatcatatgctttgggagaggccctaagaccttctccatcatagccaaatgctccaagttttcatgtgtttgaaagagagcttcccccgaacaaagctcaactaaaatgcaacccacactccacaagtcgcatggatagttccacccaagaccaaggataacttctggtgcacgataatgtcttgtcgacaccacataattgtggtcttggctctcgaaagttgtactcccaaaatcaatcagcttgatagcactagattttggaaggttcttaaagaaagaaccatcctttggtggtcgtatagaaaccttataatcaggcaccctgatagactctgatgaaacaaggagaatgttttctggcttcagatccgtgtgaataagtcgcaagtcatgcataaatgcaacagactctaatatttgtctggcaaattctcggacaaggtcaataggaaatgaacggtagctattctttcgcagaaagtcatataggcttggcccaagcttctcaaatactatacaaatatgattacgatagtcaaaccagttccgtatttgcacacaacggctgccagtaaagtcatgcttcccaagtctctggagcacatcaatttctatcatagcagctcgtaagtatcgcggggaggagggtctcgacttgccagcgaaagttagttgcagattcgtttttcctgtgtaaacggaacagaagggaagttaaacacacttggtggtggaacgaagatgtccaaaaggctatcaaggagaagaaagattgctacaaacgcttacatcatgacaagtgtgcagaaaacatagagaagtacaggatagcgaagaagtctgcaaagcgagcggttagtagagcccggggtcaagcctatgacgacctttatcaacggctggacacaaagcagggagaaaaggatatctataggatggccaagattcgtgaaaggaagacaagggatgtcaaccaagtcaaatgcatcaaggatgaagcaaaccaactattagtgaagagtgaagagatcaagaacagatggaaggagtacttcaacaaattgttcaatggagggaatgagagtgctacaatagaattggacgaaccattcgatgacaacaacaggggttttgtacgaaggatacaagaatatgaagttaaggaggcgctaaaaaggatgaaggtaggaaaggcgatgggccctgatggtatccctatcgaggtatggagatgtcttggagacatagcgatagtatggctgactaagcttttcaacaccatctttcgggcaaacagaatgcccgacgagtggcggcggagtacattagtaccaatcttcaagaacaaaggagatgttcaaagttgtactaattaccgtggaattaagctcatgagccatacaatgaagctatgggagagagtcattgaacaccgcctgcgaaagatgacgagcgtgacccaaaatcagtttggtttcatgcccgggagatcaactatggaggccattttcttactaagacaacttatggagagattcagagaacaaaagaaagacctgcatatggtcttcatagacttggagaaggcttatgacaaagtacctaggagtgtaatgtggtgggccttggaaaaacacaaagtagcaacaaagtacattaatcttattaaagatatgtacactaatgttgtgacaagtgtccgaacaagtgatggagacaccgatgactttccaattaacataggactacatcaagggtcggctttgagcccttatcttttcgctttggtgatagatgaggtcacaagggacatacaaggagttttaccgtggtgtatgctttttgccgatgatgtggtacttattgaggagagtaggagtggtgtttctcaaaagttggaattgtggaggcagacgctggaagcaaaaggttttaggcttagtaggtctaaaacagagtatatgaagtgtgatttcagtgccatggggtatgaggatggcgatgttagtcttgatgggcaagtggtacccaagaaagacacttttcgttacttaggatcaatgcttcaaaaggagggagacatcgatgaggatgtcagtcatagaattaaagccggatggttgaagtggcgacaagctgcgggtgtcttatgcgaccaccgggtgccacgcaaactaaaaggcaaattctacaggacagcaatccggccggctatgttgtatggagcagaatgttggcccactaaaagacgacatgtccaacaactaagtgtggcagagatgcgtatgttgcgctggatatgtggccacacaaggagagatcgagtccggaatgatgatatacgagagagagtaggagtggcgccaattgaggagaagcttatgcaacatcgcttgagatggtttggacatatccaacgaagacctgaagaggcaccagtgcatatcggaataattaggcgtcccgaaaatgtgaagagaggtagaggtcgaccaactttgacgtggacagaggctgtgaagagagacctgaaggagtggaatattgataaagagctcgccgcagataggaaggggtggaagtgtgcaattcacgtgccagaaccctgattgatagtttcgcttttcctccttaatcgtttgaccttttcttgtgtccattttagatcttgctggtccttgtgggttttatctcttttatgtgtttccccgtttcgttgttttcggttctcctttgcctttgtttcccttttctgttctttgggggttgagctctgaggttttcatacggggtttcatctctagcctaccccaacgtgcttgggacaaaaaggctttgttgttgttgttgttgttgttgtaaacaagaccaatcatgatctgaatgattgcttattgcaatatttgctacctcaatgtgcaactgcttgttaacccaggtcattggtccctatcgatctggaaaatcatttctcctcaaccagcttctctccttatcttgtgataaaggttttggagttggtcatatgcgagatactaaaactaaaggtatttggatttggggtactcctgttgagatggatgttgatggttccaaagtttctgtcctttctctagacactgaagggtttggacgggttcggaaggctttggtggtggtgggtaggcttgtgccgaggatcgtacgctttccgctttggcgactgtcttaagctcggtccttatctacaaccttcctgagacggtacgtgaagctgatatatctaggctttcatttgccgttgaaattgctgcagagttctatggaag

SEQ ID NO: 118283 - DNA, 681 bp, Zea mays
  Clone ID: MRT4577_39363C.1
ccacgcgtccgctaatgttgtgacaagtgtccgaacaagtgatggagacaccgatgactttccaattaacataggactacatcaagggtcggctttgagcccttatcttttcgctttggtgatagatgaggtcacaagggacatacaaggagttttaccgtggtgtatgctttttgccgatgatgtggtacttattgaggagagaggagtggtgtttctcaaaagttggaattgtggaggcagacgctggaagcaaaaggttttaggcttagtaggtctaaaacagagtatatgaagtgtgatttcagtgccatggggtatgaggatggcgatgttagtcttgatgggcaagtggtacccaagaaagacacttttcgttacttaggatcaatgcttcaaaaggagggagacatcgatgaggatgtcagtcatagaattatcggcacgtggttgaagtggcgacaagctgcgggtgtcttatgcgaccaccgggtgccacgcaaactaaaaggcaaattctacaggacagcaatccggccggctatgttgtatggagcagaatgttggcccactaaaagacgacatgtccaacaactaagtgtggcagagatgcgtatgttgcgctggatatgtgggcacacaaggagagatcgagtccggaatgatgatgtacgagagaga

SEQ ID NO: 118284 - DNA, 489 bp, Zea mays
  Clone ID: MRT4577_39364C.1
ggaaaaaaattttgtaagcaaaaatacttgatcaaacatttacgggcttttttccgagggtctttaccaacttttaaaaacaaacaaaagggatgctaagggcccccataatacaacaaagcgaaggctcctttgttcaacaaagtcataatgtccccggcgccgggccggcaagctcaggcaacccccacgactttttcgttgatcccccaaagttttttggccttttccggatcgctggcctcctgcaacagttggttctcaaacaaccccgagtccttgttccagctccagtacacccccaatttggggaggttggggtcgttaaccacctgcgccagccttttgccgaactccgcctccaacacaaaccccttggggacaaacttttggaccggcggaaaaagcaggcgaaacaggggaatgggctggggaaacgccccgggggggcgatcccccccgggtaaaggaacccaaacgggatgcccg

SEQ ID NO: 118285 - DNA, 467 bp, Zea mays
  Clone ID: MRT4577_39365C.1
aaaaagcaaatctcaggccccatattagcgagggggtctgtcacaaatgggagcaggaagggaagcaaaagggcaaaacatgtccaaactcaaaatgaacctggggacccaaaggcaccccccatccaaatttattttggggatacacaagcagcaaccatccatgaaaagcagggggaaaaaacccctctactgggtcttgaacatgggggggatcagggcaacaacccggttgctgtacccccactcgttgtcgtaccacaaaacaagcttgacaaaggggtcgttcaaagcgaccccggccttggcgtcaaaaatgctcaacctgctgtcaccaaggaaggcgggaaaaaccaaatcctcctccgcataacccaagatacccttgaggggaccctcggaagcagcctaaaaagctttcttggaatccccaaaggaggcccccttttcgattctggcggggaggg

SEQ ID NO: 118286 - DNA, 3157 bp, Zea mays
  Clone ID: MRT4577_39366C.1
gtatcaattggaaaatgacatccagttaaaatggatcgagtgtcagagaactctgcttatatacaccaattacctttcaaatcattgaacagaatgcaagttagcatatttcatttttcgtagaacatctccacttttttgtagttcttacacatcaaaatgaagaaatacagcattgacattttcaatctcagtgtagcctcagaaaccacatcttctgatgcatctggtaaagaaagggtgttgtagagcttcatgtgctttcaggcgctcattaggatcataccgaagaagtccttgaagaagatcaattagatctccagcagaatgatcaacatgttgcatcacaaggttctgcagacgaggcaatttccagactgccttcatgctctctcgtgaggccgctccctctggccagtccaaccttactccgcgcttgaagtacttttcagcacgccgactgtaaaaacagcattaataaataggttaataagataagcgaaaacagaactgatcagatacctcatcttggatgtatacataaataaaaatgacaaaaagtatgataagaagataacaaaagacttgtacacatactcagctctgacaatcatatgctttgggagaggccctaagaccttctccatcatagccaaatgctccaagttttcatgtgtttgaaagagagcttccccctaatattatcatgaaaaaacaaaaaaatgcaagagagacttatcaagacaagcaccacagagttgcgacagatatggtcaagattaatccagtactccaatgcagagtcttagtaaactaaccgaacaaagctcaactaaaatgcaacccacactccacaagtcgcatggatagttccacccaagacctaaacaagaattgtcatttatcaaagatttaaaaaacaaatacaaaacaaagaaactggtgtcattaagaaaaaaatagaaaataaaggtaaattggccactttgtgtgtgggtcagcggatgtcaattataccaaggataacttctggtgcacgataatgtcttgtcgacaccacataattgtggtcttggctctcgaaagttgtactcccaaaatcaatcagcttgatagcactagattttggaaggttcttaaagaaagaaccatcctttggtggtcgtatagaaaccttcattgcaaattaaaataaagtttagagaaaaaggtgcatttatgcagttgcaattctgcataatctgttattaaattaagtaatcaaattcctgtccacataagaatcagaggaatgcctgccgttgcagttttccataatcccttatttgtcactgtcgcacaggtggtccccacatgacagtgacacgttaatggcaaataaaggattgctaaagaacattaataatgtgtatatgtcctaaaaagaaccttaatcagtaaatacaatacagaagtgtgtcaaagtttaggaatccagtaacaaccttataatcaggcaccctgatagactctgatgaaacaaggagaatgttctctggcttcagatccgtgtgaataagtcgcaagtcatgcataactatagaggaaaaacaaccatcagcttcatttaaagaggactagggaagcacatcagaacttgcaaatccaacttaccaagaccatgccaaaccatagcagtttagtaatctaattatattgttcaaaattcagaagactttatcgcaagtctaatgatgttgctcaaaattcaaaagactagatggttgcatttaagtgtagccagagtaaactgagtactcacatgcaacagactctaatatttgtctggcaaattctcggacaaggtcaataggaaatgaacggtagctattctttcgcagaaagtcatataggcttggcccaagcttctcaaatactatacaaatatgattacgatagtcaaaccagttccgtatttgcacacaacggctgccagtaaagtcatgcttcccaagtctctggagcacatcaatttctatcatagcagcctctcggtatttctgaagggagcgtacaatcttgatagccactgcttcttggttttccaagtcccagcactccaaaacttgtccaaatgtcccttcacccatcttgttaagtatcctatatcttggtgtgagattctctccaaccgcaaaaacatagtgtccatccttgtcatctggtctccaaggaggcgaaatattccgtggcggccaggtgtaataaattgatggtggtggaagaaatgcagtcgtgaaattaccattaattagttcctgcccacaatatagcatcggaattgcctacaaaaataccaagccatgtaaacaacaaacatggatacaaagtagcagttcaacaggggtaaaaaacactgaaggttgatattgtatgtcttttactgaaatgtttagggtccagttgaccagttacacgactcgatattatgtgaagtggcaatcaacattgtccagtagccactaacggaagtacatagctcttgcatattcccacaaaagcgaacgttaactatgtatgcaataataactgggctccccaaatttaataaatgttttatttctatagtcattgtaaagatatgtacactaatgttgtgacaagtgtccgaacaagtgatggggacaccgatgactttccaattaacataggactacatcaagggtcggctttgagcccttatcttttcgctttggtgatagatgaggtcacaagggacatacaaggagatataccgtggtgtatgctttttgccgatgatgtggtattattgaggagagtaagagtggtgtttcgcaaaagttggaattgtggaggcgacactggaagcaaaaggttttaggcttagtaggtctaaaacagagtatatgaagtgtgatttcagtgccatggggtatgaggatggcaatgttagtcttgatgggcaagtggtacccaagaaagacacttttcgttacttaggatcaatgcttcagaagcagggaacatcgatgaggatgtcagtcatagatattaaagctggatggttgaagtgacggcaagctgcgggtgtcttatgcgaccccccggtgcaacacaaactcaaaggctaattttacaggacagcaatccggccggc

SEQ ID NO: 118287 - DNA, 683 bp, Zea mays
  Clone ID: MRT4577_39367C.1
ccggccgagtctcggcctcatctccccacgcaccccggcgcccgcgccgcgccaccttctctcccccctcctcctcctcctctctctctctctctctctctgccacacagcacaccagaagggcagcaggggaggtagagagaggtagcttcgcattctcggtttccctccgcgcgtgtccttcccagcctcgacagagagaagggccaccatcgtccctgcctgattgcgcgccaggcaggcaggcattatggcgccgggcggccggcgcagcaacggcgagacgccgacaggacagcagcagcagcagcgcaggctgacggcaggcgcgggtgcgcatgcggcgggttccccgtgtgcgcgtgcgccggcgcggcggcggtggcgtccgccgcctcctccgccgacatggaccgcgtggcggtggccgccaccgagggccagatcggcgccgtcaacgacgagagctgggtggcggtcgacctcagcgacgacggcctctcctccgccgccgacccgggggccgtcgcgctcgaggaacgccccgtcttccgcaccgagaagatcaagggtgtcctcctccacccctacagggtgctcatcttcgtgcgcctgatcgcgttcacgctgttcgtgatctggcgcatctcgcaccgcaacccggaccgcgctgtgtctggggg

SEQ ID NO: 118288 - DNA, 474 bp, Zea mays
  Clone ID: MRT4577_39368C.1
ggcttggaacctttgggctgatttatgtgcttgtggatgtgcgggtggatgtgcgggttactccttcttgttattacgtctactgttggggaggatcatttctccttctcttcctctttctctttctctttctctttcgcggccgatcattgggctgctggtgaagggtgaatgatgttacgttggtggacttacgtagggtcggacttataaaagtcggacttgcggagggccggacctctcccgcagggtcggacttacggagggagcgtatggtgtctgctgtttagtctgaggcgtgagggtacgctcattcatttgaggattcatgactctacttacgtggatctggcacctatttcgcataggaatagggagaagacttcttcggccgctaagatgcaccggatcatttacgaagttacgattaaaactagcagtaggatcgctaaactcaccaacgacacgaaagaa

SEQ ID NO: 118289 - DNA, 684 bp, Zea mays
  Clone ID: MRT4577_39369C.1
gggtaccggcgcccccctctcgagtttttttttttttttttttttttttttttttttttttttttttttttttttaaaaagctaatctcaggtcccatattagcgagcggttttgtcacagatgggagcaggaagggaagcaaaagggcaaaacatgtccaaactcagcatgaacctggcgacccaaaggcaccccccatccacatttattttggggatacacaagcagcaaccatccatgagaagcggggggaaaaaacccctttactgggtcttgaacatgggggggatcaggtcgacaacccgattgctgtacccccactcgttgtcgaaccacgaaacgagcttgacaaaggggtcgttcaaagcgatcccggccttggcgtaaaaaatgctcgacctgctgtcaccaaggaagtcggtaaaaaccaaatcctcctccgcataacccatgatacccttgaggggaccctcggaagcagccttaatagctttcttgatatcctcataggaggcccccttctcgattctgacggggaggtcaacaaccgagacatccacagtaggaacacggaaggacataccagggagcttgccattcaaatcaggaagaactttaccaacagccttggcagcaccggtgctgctaggaatgatgttaaagctggcagccctgccaccttt

SEQ ID NO: 118290 - DNA, 568 bp, Zea mays
  unsure (1)..(568): unsure at all n locations
  Clone ID: MRT4577_3936C.1
aaaggtttgggtcaggatctcctcaaattgattagngagatatcagttcaaaatggcaatgagagtcaagctatgactctgcaaaccagaaacttgcagcaagtaaggtcggttgttgcctttccggatgccaccgctagtgtagttacggtcttgaggagcttccgagttctacgtgtactagatttacaagattgtgacctttcacaatgttgcagcctgaagtaccttgggaatctatttcacttgaggtatctaggactatgtaacacaagtattacacagctccctgaagaaattgtaaacttgcaacttctacaaatactggatgtatggaacaataaaatgtattgcctaccctcaactattgtgcagctgagatatttgatgtgcctttacattgatggttttactagagtgccaaacgggattgggagcctaacaagccttgaagaactcacatttctaggcatttatgactccactgtggacattatagaagagctgggccagctaacggagctacgggtactgcatatcgttctttttggtgaatggaacgacaagc

SEQ ID NO: 118291 - DNA, 1359 bp, Zea mays
  Clone ID: MRT4577_39370C.1
atgcccgacgagtggcggcggagtacattagtaccaatcttcaagaacaaaggagatgttcaaagttgtactaattatcgtggaattaagctcatgagccatacaatgaagctatgggagagagtcattgaacaccgcctacgaaagatgacgtgtgtgacccaaaatcagtttggtttcatgcccgggagatcaactatggaggccattttcctactaagacaacttatggagagattcagagaacaaaagaaagacctgcatatggtctttatagacttggagaaggcttatgacaaagtacctaggagtgtaatgtggtgggccttggaaaaacacaaagtagcaacaaagtacattaatcttattaaagatatgtacactaatgttgtgacaagtgtccgaacaagtgatggggacaccgatgactttccaattaacataggactacatcaagggtcggctttgagcccttatcttttcgctttggtgatagatgaggtcacaagggacatacaaggagatataccgtggtgtatgctttttgccgatgatgtggtacttattaaggagagtaggagtggtgtttcgcaaaagttggaattgtggaggcagacgctggaagcaaaaggttttaggcttagtaggtctaaaacggagtatatgaagtgtgatttcagtgccatggggtatgaagatggcgatgttagtcttgatgggcaagtggtacccaaaaaagacacttttcgttacttaggatcaatgcttcagaaggatggagacatcgatgaggatgtcagtcatagaattaaagctggatggttgaagtggcggcaagcggcgggtgtcttatacgaccctcggaggtgtagggagtccgatcaaccccgtggcaaatgggtaacacgacttgtgggtaaagatgtgcaacctctgcagagtgtaaaactggtaagggaccaagccctcgatcggccaacaccaagcagcctacatgctagagcttctctaagacgcctgttgggggccttcttctccgccgaaggtcctctaagcaaaaacaccttcggcaagataataagcaagcagatgaacagtacccccatactgttcacgctgacttgtaatcacttgcacgtcattcttagatctttactttctgtcaagccgaagcttttgagaacaagtgaccaacaacacccttggggagggacggcccctaatgatatggctttggtgccacatgtgccgttgctcaggatggccacaaggtacaagttaaggaagtacactatcgccatgtccaagatagcaggtgtacccacaaccattatatggtacatgccaccatctttgtaa

SEQ ID NO: 118292 - DNA, 1796 bp, Zea mays
  Clone ID: MRT4577_39371C.1
atgatgttaaatgagcaagggtcgggccgtcaccccttaagtgacgcgtcgtctcttgatctagagccggtgataagtgagcaaggatcgggtcgtcgcatccttagtagcgcgctacatcggtgcccgggtgtagtggaaaatgagcaggggtctttgcatcttcctcggcgggtgcgaagggtaaggaagctagtcgagccaactagggtccgtgtaggcagttggaacgtaggttccttaacaggtaagttacgagaaatagtcgacgttgcagtgaggagacgggtaaatattttatacgttcaagagaccaagtggaaaggacagaaggcgaaggaagtggaaggtacaggcttcaagttgtggtacacggggactgcagcaaacaagaatggagtaggtgtcttgatcgacaagagccttaaagatggggtagtagatgttaagaggctaggagatagaatcatcctagtcaaactggtcattggggacttggttctcaatgttatcagcgcgcatgctcctcaagtaggccttaatgagaactcaaagagggagttctgggaaggcctggaggacatagttagtagtgtgccagttggcgagaagctcttcatacgaggagatctcaatggccatgtgggtacatctagcaccagtttcgagggtgtgcatggaggcttcggctttgggactaggaatcaaaaaggagaggaaatcctaaactttgccctagcggcctagatgtttatagcaaacactttctttaggaagaggaaatcccacctggtgaccttcagtagtggccaacacactaagccagattgatttcatcctcttgagaaaagaggacaggcatgcctgcttagattgcaaggttatacctggagggtgtgtggtaacccaacataagcttgtcatagctgacttccgtgtttaagattcgtttacaacgaaataagcataacaaggtcactagaacaaagtggtggaagcttaaaggggatgtggcccaaactttcaaggagagagttatcgaggagggcccttgggcagaagagggagacgcaaacatcatgtggaggaagatggcgacatgcatccgaaagatagcttcagaagagtttgggttgagtcaaggaaacagaagggaagttaaagacacttggtggtggaacgaagatgtccaaaaggctatcaaggagaagaaagattgctacaaacgcttacatcatgacaagtgtgcggaaaacatagagaagtataggatagcgaagaagtctgcaaagcgagcggttagtagagcccggggtcaagcctttgacaacctttatcaacggttggacacaaagcagggagaaaaggatatctataggatggccaagattcgtgaaaggaagacaagggatgtcaaccaagtcaaatgcatcaaggatgaagcaaaccaactattagtgaagaatgaagagatcaagaacagatggaaggagtacttcaacaaattgttcaatggagggagtgagagttctacaatagaattggacgaaccattcgatgacaacaacaggggttttatacgaaggatacaagaatatgaagttaaggaggcgctaaaaaggatgaaggtaggaaaggcgatgggccctgatggtatccatatcgaggtatggagatgccttggagacatagcgatagtatggctgactaagcttttcaacaccatctttcggacaaacagaatgcccgacgagtggtggcagagtacgttagtaccaatcttcaagaacaaatga

SEQ ID NO: 118293 - DNA, 407 bp, Zea mays
  Clone ID: MRT4577_39372C.1
cggacacgtgggagacatctggcaagtggtgctggtgggcaacccgcgcaagggctgccaccaaggccaagcgctcaaggaacgcgccggggtcctggtcaacaagaacgttgggatctccgacaacctgggccccggcaaaccgctaaggtactttaagggccttccgctccccgtttgcgccgcgctggtcaagcaactggactccggcgaagacgacgaccaattaactataccaagggggggttcccggcatgctgcacaaaactacaacgattcaaaacgaacgcatgggatgggtaacaatttctacgggaagaaaagggagaaaagggaaattaaaaatgtttcaaaatgcctgattccaaaaaaaaaaaaaaaaaaaaaaaaaagggcgggcgctccaa

SEQ ID NO: 118294 - DNA, 356 bp, Zea mays
  Clone ID: MRT4577_39373C.1
cgctcagttgaggttgtgaaggttacagatgagatgaaggagtttgcagcctatggcaagctccgccttgagcggatgaacaagaaacacctcggtgcccgccagaagaaggcagctgaggcggagaaggaagataagaagtgaagtggccgaacatagtacctgttttgttctattcagccattagtggatgctactaccatcaagtgcttgttctaagttttttttgggtactggaaatagagaccagacaaacattttggtgtcctactgtttgataccttgtacttgtttgcgaactcagctatctaatgggttattgaattcttgcccgtttgcatggttatgccttgctt

SEQ ID NO: 118295 - DNA, 367 bp, Zea mays
  unsure (1)..(367): unsure at all n locations
  Clone ID: MRT4577_39374C.1
ccggtagctaggggtatggcctcgccgcgcacgccnccngttttttctttttttcgaagaagaagaggggaggctgccgccggggacgtctccgccgccgcagtcatggcgttcaccaaggtgcagcgtatcatgacccagcccatcgtaaggcaccttttcgccgatcgcccccctttcctctgggctcgtttgctcttctgtgttctttgcttttcattcacatcagtcgcgctgttcctaatcgggctcgccctacgtttcatgcctggggtggcgaatccctggtgggcgtgcgcggcggcagaacctcatcttccgctttctccagagcaaagcgcgcatccacatctggctcttctagcag

SEQ ID NO: 118296 - DNA, 488 bp, Zea mays
  Clone ID: MRT4577_39375C.1
cagcaacaaagattcggtggtagcactctgtccactccctctcgtttgttgaaaaaacatggagcctcaattttttctcgaggtctcgttacggcttctggtcgtgaaggcctcttcactgctggatacctcggtcttgctccctccattacccgtaacctaatcgaagaaagagagttttccaacacgaacgctcgattcatcggtgcactgctcgctggattgctctttggtactctcagtcatcctctcgacactataaagacttgtatgcaaggagacgtagagaaagagaagtacacatcgctcagagacactgcttctaccttgtacagagaaggaggactacgacgattttttagaggatggggatggagaacaagtagatttattggtggtatttttattatcaatgttggcaaatcgctttttggtccacttctctttcctcaacactttagacagcagaaataaaataaacacatgcc

SEQ ID NO: 118297 - DNA, 1371 bp, Zea mays
  Clone ID: MRT4577_39376C.1
atggccgaagataagaaaaacgtagtccccgcactcgctggtttctacgaagccatggagaggagcaacgtggagaaaatcactgatgaaatgttagctgggctatctggggactccagtgacaacgagagttttgatgttgaaagtgagaacgaagatgccgaagatcggccatggaggacaagtcatgttgtttttgggaaatccactattataagcaaggtgtgcacttacatcgacaccagagatttggttcaggagtatattccttataaggtatggccgcttgttaatgactgggagatgtcgaaagatatcgttgttggctccagcgaaggtggattggtttatctgaggtacacctatcgctacagaagtcaattagacgagccaaattattatgactggcttgaagctgttgaagtgaccagtgacgagctgctgggggcttatacgaaggcagaggacgaagccatgaacactgccttcagtgctcgagggaaaagaagactaaacagagtttttgatgtgataatacctgttgcgaccgccgaagctattgtcgatccggtaaaagaaatagaagcaaagaactcaaagacagaggagcacccaaagctacagagtcccccaaccacgatggggttaacaaaattagcagttgctccagccacaactcctatgaaaggaaggagaatgaccagtgttttggatgctgttctgaaatctacgaagatgccaactcctatttctactaaagcttccgaggacaagattgaagatctaagagaagtaaccactgcaagcgcttctcctgaagctggaccttcgggaactaagccagtagagctagcaaaggaaagtcttctggaaaagctaacattgtctatacccaaagcaccttctcaagatgatttggaatatattgttcaccatgctccggggaaacaactatcagaagagcaaattgccaaatcagaagtcatgacacttaggaatgaagctcttgataaggataaaatcctgctttccttggttgagaggttaaagtctagcgaagctagactatctagcctttctgaagtagagcagaaaatgaaggagtctgaaaagaagaaagaaatagatgcaaagcgtattgctgatttagaatatgcgctatctattcaagtgggattgcacagatccgaagtgcaaggattggagaagaagctcgatgaaatcactgaagatttcaatgtcgaacaaacaaaacatgagatatctgatactgaacggttaagagttcagaaaaatgtcgaggagcttcgtcagacgaaagaggaatgctacaatgttgctatagaatgttgcaataagttgaaaaattag

SEQ ID NO: 118298 - DNA, 586 bp, Zea mays
  Clone ID: MRT4577_39377C.1
cctttcgcatttcaaaacgcagagacgtttctcctcgactccgcctcccccgctcctcaccgccgcgccgcctcgtccattgccgccgccgcatcaattgacccccggaccacgcgaatggccgctgaagactcaaaagatatcctaaagaagcgtctcccaaagaaaatcagagaagtccctgactgctattttctccctcgtcgatcatggccttctgcactggcaatctacggtgctgtatgtgctgctagttttggtgcagggatgcttcttgaggtttggataaacaaaaagatcaaaggtatattcccgcatttcatagcaggagaaagatcaaaaagcctacttgattttcgtaccttaggactgtatctgggaaacttaaggttatgaggtgttctcttctgttattggattatgaattgtactgcagaaagcacagattaggattgcatacctgcttatgtactcatactaatgatattctatgcatcttctcactcttgttcattgcttcatctagaggacagtggcattgtctgggagatggataaatgatgcaatgcatgctttgttgtggtgg

SEQ ID NO: 118299 - DNA, 217 bp, Zea mays
  Clone ID: MRT4577_39378C.1
cccacacttcgtcggggaaggattattttcactcggagctgccacccccttgcttacttcttcactctcgtcactgaccactgtcaagatcgattacttgctttaattcaccaagatctttgacgctattaaggcgaacttcaatgactaatatacctaattcagtaacaaatggtgaagcagaatcatgttctccaattcccacaccaactccaac

SEQ ID NO: 118300 - DNA, 200 bp, Zea mays
  Clone ID: MRT4577_39379C.1
ggaacccccaacacaaaaaagcaaaagcatatcacataatggccggcggcgtgttctcggggctctctggcgcgcgcgggcccgttgcggctggcgtggacgcgggaggcagtcatgggccgcgaccgcctgagcgggtgaccgccgctccggtccactcgctatcccgactcgcgtcgagcgcctcagaacactattcg

SEQ ID NO: 118301 - DNA, 714 bp, Zea mays
  Clone ID: MRT4577_3937C.1
atcaccgcattcccgattacaccatcacaactctgccccaaatccactccaaccagcgacaaatccgaacattcgtctcggaggccaagccacgagcaactggaagattcggtgtggcttgcatccttgaaggcaagtgacgccagtgctatggcaacaacgtcatggtgcggcgtccactgtgttccgatctgccttggcaattgcagtggcgaccttgcttgctgcacaaattgcaccagatcatcctatggtcagcttgctatgattcagcatggttgcggttcttgatcggtaggagtcatctaagttattttcagacaagaagcggattagagcagtagcagtgatcagcaatgggaagagaatattgtgtaggctttttgtttgtggataggtgctagagaaggaatgatgtgttacaagttggcaactggaatttcatgaacgcattgcaaggcgattcaggttgctctgttgtcatcggcccctttttctatttttgcagtaaagcgcataaaaaacatctcgaatggatactgtaaccatttgatgtgcagaggttcacagagtaatgtgattttggttagaactctaaaaaggtagaaaagtagtagcgcttgggtagctccgcggtggttcaagttggcaatcggaattccatgaatgcattacataagcacattgcctttcagaaacattgctctttgaatt

SEQ ID NO: 118302 - DNA, 978 bp, Zea mays
  unsure (1)..(978): unsure at all n locations
  Clone ID: MRT4577_39380C.1
ggggctttggttacacaagactgacgcgtcaaggccatgggctggtctccctatccgagtgcaccgtaatgcaaaggccctcgttgatgtggctattacctcagtggtaggcagtggtgaatctgtgaagttctggtctgatcgttggctccttggtaaaactgtggctgaacactgtccaacccttatccaagtgatttctagaagggctttaaagcgaagaacagtagctgaggggctcacaaatcgtcaatgggtgtcagatattcggggaggattgtctgtaacggtcctagtagagtatctgcagctatggaacttggttgatggggtagttctgcaacctgacatcgcagaccaacacatctggcgcctctctgctcatggtacttattgtagcaaatcggcctatgatgctctctttgttggctctatcccttttggcccttggcgacgtgtctggaagacctgggcccccttaagatgcaaattctttgtatggttggcaatcaaaaacagggtttggacagctgatcgacttgcaaaaagaggtctgccccatccagttgcttgccctctgtgtgatcaggctgaggaaaccatccagcatattcttgtctcctgcgtgttcgctcggcagatatggacgtccatgctacacaatttaggcctccttgccattgtgcctcagcatggatgcactcgtttctcaaattggtggtgccaaagtatcaagaaagtggagaagagtctaagaaaaggtcttaattccttgatcattttggttgcttgggagatttggaagcaccgtaatgcttgtgtttttgaagggggttgtgccctgcacccaacgagttcagagtgctgtgattgaggagggcaacgtctggtgtttggctggtgcatcagctctgcaggacctcctgctgcgccagctccctaggggaccttagcagttnttcctgctggtagtcgttt

SEQ ID NO: 118303 - DNA, 243 bp, Zea mays
  Clone ID: MRT4577_39381C.1
agagcagcagcagcagcagaccaagatcgagggagggaggaagacagacagacagacagagagatggagcggatgacctcgtctgtgcactcctgggtgtgaggaacacaagctctcgtccataggagccaggtgcgcgacggtggtgggcgcgtccctggcgataagcccgcggaggttgtcagggcgacgcacaaggccagcgcccatatggactaggcagcacccctaggcgctgatgct

SEQ ID NO: 118304 - DNA, 499 bp, Zea mays
  Clone ID: MRT4577_39382C.1
actaaaaaaaactgaacggggttactgaactaagccacgggttaaaagtcttttttagatgaaacgtctcacgtttatttttttccccaacgggcgccgggcttttcgaacctgaccagggaccatagggactcactgggggagcagcttcctttcgccattgtcttcgtccttggatccaaatccttcatcgccgtaatcccctttatttcgcgccgcctcagcccgcgccatttccctgtccctggggtaggtgcagtacaagaacgagtagatggcgcagcacattgccatggggatggcaatggaggggtatattgccctggcgagggacgtcccgttgtgcccctccatctggaagtcgatagccgggcgcttgtttaccccggcgccacttgcaaatcgggctagcttgtaaccgtaaaggcgctccccgagggggcccaccaccgggggcgcgaacgaggccagcactgccttaaacgtccggtccaaagcg

SEQ ID NO: 118305 - DNA, 754 bp, Zea mays
  Clone ID: MRT4577_39383C.1
aaaaaaactgatttaacggaatatttacccattacgttacaaatatttgaaccaaacggtacctaaaatcctctcattattcacttttgaataagggaattttagtccctctaatcctcttcggtttttggactccaaaactagcccatagtgtttctagtaaatctgagcaattaaaagctgaaaaactcagcagatgtcttgaaacaaagggaatatctacatgagctcaattacaggtatccgcaaactcagcacaagaatattcatatgtataccacattcaggtattcgtgttctttctgtctaggaagttctccactgcaactcaatttggatctgaccattttttgagtctatgagatggtacttctcattaattctcttgttactgatcacgtctgcaaggttgacatcaatgtagcccaaagtttccttgccatatatcagccctttcttcggggctttacttaggacttcaacatgtagtttatcatttacaggaggctcctcacacacaaactcgaatccatcctcccatcgtggatccctattcttcttgatgaccctcgttttcttctcttcgcctttgaaaattatttttgcataggggtttgtatggtgcttcccctcaagatctttggcttcatgaacaataacataaagcaatccaccaccggctggagtaccatctggagctttttctatcacattggtaccctctgtatcttcggacgcgtgggtcgaccgggaa

SEQ ID NO: 118306 - DNA, 515 bp, Zea mays
  unsure (1)..(515): unsure at all n locations
  Clone ID: MRT4577_39384C.1
catacaaacccatatgcaaaaattattttcaaaggcgaggagaagaaaacaaaggtcatcaagaagaatagggatccaagatgggaggatgaatttgagttcgtgtgtgaggagcctcctgtaaatgataaactgcatgttgatgtcctaagtaaagcctcgaagaaagggctaatacatggcaaggaaactttgggctacattgatattagcctcgcagacgtgatcagcaacaagcggattaatgaaaagtaccatctcatagactcaaaaaatggtcagatccaaatcgagttgcagtggagaacttcctagacaggaaaaagccagaatgcctgaatgtagtacacacgtatgttcctatattcagtttgcggatgtctgtgattgagattgagctcgtgtagatattttctttgtttatggacatctttgttcagatctcctcttagttgctcaaatttccgccaagccctatgtatgcatgtttatggaactgaacctattctttgnct

SEQ ID NO: 118307 - DNA, 2291 bp, Zea mays
  unsure (1)..(2291): unsure at all n locations
  Clone ID: MRT4577_39385C.1
ccctgccctaggggtgttctgtgcgtgtctgcgtgagcagcgacgtgccgacagccgaagcgcccgagccatcccatcctcccctccccccaaaggccaaacccattcgattcctccgccccgccggccgaaaccaagtttctccgcggccgcccggatccccgacccccggccccgagcgttccatgggctcgccttccgcatcgaggcattagcaagcctcgcgccgcactgccgtgcccccgacgcctgcctttgcctcactggttttggaaggaatccaagatgggtgtaatcagcacagtgctgggtttctctggttttggctttgggttctcggctggcattgttattggttacttcctcttcatctacgtccagccaactgatgtcaaggatgtcaaggttcgcccgcttgtagaatatgattcaaaatccttggagggcatccttcctgaaattcctttatgggtcaagaatcctgactatgatagaattgattggctgaataggttcttggagttgatgtggccttatcttaacaaggctatctgcagaactgcacaggatatcgcgaagccaattattgctgagaacactgcaaagtataagatagactctgttgagtttgaatcacttactttgggtagcttaccacccacctttcaagggatgaaagtctatgtcacagaggagcaagagctgataatggaaccatctcttaaatgggctgcaaacccaaatattactgttgctgtaaaagcctatggtttgaaagctactatccagattgtggatctacaagtctttgcatcacctcgcattactctgaagccattggtgcctacatttccttgctttgcaaaaatccttgtctcactcatggagaagccacatgttgactttgggctaaaacttcttggagcagatgtaatggctattcctggtctttacagatttgttcaggagaccatcaagaaacaagtagcaagcatgtatttgtggccgaagacgctagaagtacctataatggatccctcaaaagcatcaaaaagacccgttggaattctacttgtgaaggttgtaagagcccaaaatctgcggaagaaggatctgctgggtaaatctgacccatacgtgaaacttaagatgtcagatgataaacttccatccaagaagacaactgtaaagcgcagcaatctcaatccagagtggaatgaagatttcaaatttgttgtgacagatccagagaaccaggctcttgaagttgatgtcttcgactgggaacaggcatggttnccgttcctatttaaattctgctgtagtttttctgccaacatagttaccaaataatatgcagttttttgttgttgtttataggttgggaaacatgaaaagatgggaatgaacatgatcccacttagagaactcctaccagaggggactaaagttactaccctcaacttgcttaagaccatggacccaaatgatgtacaaaatgagaagtctcgtggtgagcttactctagagctcacatacaagcctttcaaggaagaagatatagagaaagaagatacacagggtgctgatgtgatagagaaagctccagatggcactccagctggtggtggcttgctttatgttgttgttcatgaagcccaagatcttgaggggaagcaccatacaaacccatatgcaaaaataattttcaaaggcgaggagaagaaaactaaggtcatcaagaagaatagggatccaagatgggaggatgagtttgagttcgtgtgtgaggagcctcctgtgaatgataaactgcatgttgaagtcataagtaaagccccgaaggcagggctgatacatggcaaggaaactttgggctatattgatattagccttgcagacgtgatcagcaacaagcggattaatgaaaagtaccatctcatagactcgaaaaatggtcagatccagatcgagttgcagtggagaacttcctagacaggaaggagccagaatgccttgatgttcctctattcagtttgcgtatatctgtgattgagattgaggtcatgtagatatttcttttttttatagacatctgttgttcggatcttctcttaatcgatcaagtttccgacaagaactatgcagacatgttacagaccctgagaacggaactgaacgaatgacgtcatacaattacactcggcaaaaaaaaaaaaaaaaaaaaaaaaaaaaaaaaaaaaaaaaaaaaaaaaaaaaaaaaaaaaaaaaaaaaaaaaaaaaaaaaaaaa

SEQ ID NO: 118308 - DNA, 334 bp, Zea mays
  Clone ID: MRT4577_39386C.1
gcatccctagtccaagtatatcaacttagcacgtttgcttaatcacattgatccgctcgtcacgcggaacgggattactgcatagggccaatgtgtgaacgttgaatcctcaacaattccttcatccccaactccaaatgttgctgaaacacataccccatctgctgatgacgaggactatgatcatgctcacctttttggttaggagacctaacattacaagaatgcttcttaacatcgtgctgcagcttccaatgcttcttacaacaataaacaatcttataagtcatcagttttactagatattaaaccatgtgactattatacttacatt

SEQ ID NO: 118309 - DNA, 266 bp, Zea mays
  Clone ID: MRT4577_39387C.1
ggaggcgttaccgtagtgaggatgacctcgagcttgcggtgcggaggccatgggcggagaagagaaaggggctggcggcgagactctggcgttgcaggcggagggcggcggccatgccgacagtgtgttccgcacaccagcggtcgctccctccctcggacgtcgctgcgcagtcaccacggctcgtcgttgcggatccaacggtagcccaaccaaagtcacgtgacagaccagtttgggcggcccattccagcccacagcggacg

SEQ ID NO: 118310 - DNA, 598 bp, Zea mays
  Clone ID: MRT4577_39388C.1
gtttcgagttagacacatatgtgtcttcctactcgcctacctctcttcctccgacctttctctcttcttccactttcttccggcgagacgccggctccactacttgctacaaccccttgaatgagcgcctttagaacctctcgttcactcggaatctttctgggatgagaatactgcgacgtggactgacatgaagatgccattgacgttgaggctaacatgtgcaatgacatgaccaatgctggaagcgatgactgttttcaacaacttcttctcggactactgacgatgccatgacaccgaccccgcaggtgtgttgctgaccttgaaccctatgcttgcaatgaagggaaaactggcttctacagccatttcttcctgcctgagcaaatcgtcactgtcactgataatgaaatcaccaactgtgttcatgcacactaccactttgttgacgctatagttgacctgagcactctgatctgcactctacgattctcgcgacgattgttctgagtaccagaggttcctcggcttgacatctgatactgtcaccaagcttgtcggaccatggttatattcgctcatatcgaatgctggc

SEQ ID NO: 118311 - DNA, 395 bp, Zea mays
  Clone ID: MRT4577_39389C.1
aaacagggctcgtggtttttcattggcccacttggcctctgatctgcccttggagcttggatctcttatcttagtttatttatattatggatggcatggcaacctggattcagagaaccagtaggtactgaaaaaataatccaaaatgatcgagtatccactgcccaggctcgttactgcaatactgccttcgtgaatcgtgcctctgcctcccaatctggcatggggcagtgggcctcagttcttccttcaccactagccccttttccctttcaagtcccttttgaaattttctctctctacaatttcttatacaaaagtgaatcgaattctgggatttttttaataaaaaaattccgggtacagaaagacagtgacggagatacgaaccaaac

SEQ ID NO: 118312 - DNA, 366 bp, Zea mays
  Clone ID: MRT4577_3938C.1
cggtgagcaaagtgatggacatcgtctgcggcttcgccgcgtatacgcgaaatcgagactgtgagcatagtgatggacatcctgaaacagcagctggcgcttgcggcggaagtggggatgacggcggtgaccaagtttacggacctcggggcccactcgctggacacggtggagattgttctgacgcttgaagaggaattcaagatcaccggcgaggatgacaatgcccagaacattgtcaccattcaggacgccggccaccttatatgctagcttgtcaacccgaatccacgaaaaaataactgatttgttgtcctactaccccaaatcctatgcatggatcggcggtagtgcatgtgaatactt

SEQ ID NO: 118313 - DNA, 269 bp, Zea mays
  Clone ID: MRT4577_39390C.1
acgtttgcttttgacccgctcagcctaaccaagggcgggggctataagacgtggggggtagaagacaaccctggggactccatttacattgacagatgctatacactttctgctgggacagccggtatccctatgcataaggagtctgttgactcccagacggcaattatcgagatcgacactatgacaggcatggaaaggaccgacctgttcaaaaagcccacttaggagaccagggtaacgaaggagcacatgctcaagtgcaatct

SEQ ID NO: 118314 - DNA, 232 bp, Zea mays
  Clone ID: MRT4577_39391C.1
gtcgctataaaaccccctgacagagacgtgtcttatagccgcaaagcgcagcctcattgcgcgggattgctgagaaatgtcggaccttgccggaaagcgcaacctgcgcaggggccgaaactgccacccgaagcactgtaaggacggctaggttcatcggcctcgcgtcgccggtttttaaggtaaagccaggtaaggccaactgttcttaaaaaagaagggaggggggcgc

SEQ ID NO: 118315 - DNA, 444 bp, Zea mays
  Clone ID: MRT4577_39392C.1
gccgcatgaggaaaaaaaaaaaatttgggttttttttctttggaacaacagggttttgggaggatttttttaaaaacaactgggtttttttttggaaatatccaaaaaagggggaaaaaggttcccctttccaaaggccactggaatgttgtatgtgcattcttgcaattcacgctacaggaaactggggagagaaccctctaaagcaaagggaattttttaaggggagggaccaattgctagatattttttggcgcgggggaaaaaaaccaaaccccctaccccggggggaaggcctttggttttttgttcctcttaggggaagttaaatctcagaaaccaaaggggggaaaatgcattccacttgggacggaggacttaaaagacctgttaaaagagggagtcgccgagcctttccaccaacaagttgtactgtgcaagggc

SEQ ID NO: 118316 - DNA, 258 bp, Zea mays
  Clone ID: MRT4577_39393C.1
cagctcatggcgaaacaaaacccgcgtgcctatactgccccctcgcagactatacacgtgtatctagtgtttttgcctctcctcgcactcctcctgaatcttctatacgttctaggaggatgagaggctttcttctcctcctcatccattgcgtccaccaatgtgcagcttattatgacccatcccatcaaccttattttccgtttccttcagatcaaatcacgcatccttatctggctcttctagcataaagacctt

SEQ ID NO: 118317 - DNA, 174 bp, Zea mays
  Clone ID: MRT4577_39394C.1
gcagaccaaccaatcaggcggggaataaacataaacttacgtgaaaagtatgaggaagacgggaactgtgtatattgccacaccgagctctttatttttcagactactgaacacgctttcagtggctgtacatcgggcacgggaccacaggaaaatgggaccaggaacctacag

SEQ ID NO: 118318 - DNA, 241 bp, Zea mays
  Clone ID: MRT4577_39395C.1
tccacccacgcgtacgcgatcgggtgacacaggcaccacactagcttattcgacggctgcagaacggtaggggggagatcacatgcaccccgctcaacccaacctcctaccctttccgacaaggctacgcaaagcgaggcttgcccgctgtaccactgcatgctgctgctgaagacaatcggcaaccagtgacgtcctatctgaactggtgactcaaatggcgcgcatcgcatgccaaccc

SEQ ID NO: 118319 - DNA, 270 bp, Zea mays
  Clone ID: MRT4577_39396C.1
ggataacctggaactccaacaggatgtccctgatcagcacaggtggcgccgtggcgcttgactggtcatggtacatacactagtaagtcggctgacgggctgaggcctttttacagtggaaaatatcagattctttcttaaatgtgctccttggagacgcatatggaagacacgggaaaccctgagatgcaagttctttatctgactagcagttaaaaacaagtgttggacgtctgacagacttgcaaaaaaaaggactacctcactctt

SEQ ID NO: 118320 - DNA, 592 bp, Zea mays
  Clone ID: MRT4577_39397C.1
aaggggcccggataaaacaaatccccccccccgggggtttttttattacggagaaagcggaaaaaggggcccaagcccgggacccccccacccaaaaaacggaccactcatccccaaaaaaaaccgaccggaaaaaaggggggggcatgccgcggggaaccggaaaaagggggccgcccggggggagctcaggggaaaaaccccaggggaccccctcgttgaggccccggaaaagggaacccggcccgaaaaggcccccaaccccgggccaaaggaaccccttcaccttgtttgggcccccgggaaaggggttttccatttccggggggctccagccccatttcccaaaaccgaccattatgtggggggggaacaaggcggccccccccgggggggggaccgggttttaaaaggggcgttttaaaaactgggaaaaaaaaaccctgccccccttggaaagaaggggagggcccccccccttgacgctggacccgggaaacaatttgggggggtcccaccagggcctcacccccgggggggggggagcaacccaaaccccccgcgggtcttggggaaacggcccccccccccc

SEQ ID NO: 118321 - DNA, 352 bp, Zea mays
  unsure (1)..(352): unsure at all n locations
  Clone ID: MRT4577_39398C.1
gtcttngtacttgcctcgtaaacttaagggtccgggtattaaattttgatcctgacttacagaaacgcggcaggacataacgtatgaaaggggtcatccgtctagctacagtgataaacaccgcgaggaacaatgaagtaacagctatccagcaaccgaaaactatttatgcataaacgggtcaagttacacatataatctatgcagattgcctgacttacgacaccaacatctgaacaaaccattggattagatgggttacgtgttatagataactgagcgaacaaacaccccatgattgaacgtaccatagcttggagatcaacagaccgagcttacaggactcagagaa

SEQ ID NO: 118322 - DNA, 531 bp, Zea mays
  Clone ID: MRT4577_39399C.1
aaaggaaaccgacacataggtttccacaactaagcttcacggggggatacaatatttgttccccgccacaagcatcaaattatttgacggttagaccagtttacacaataaaccccgcaaaaccgaaccacagaactcaaacgattttaagcttttggtaacagggagaggtcaggcacaaaacaaacatttgggcagggtataaaaacaaatccttaaacagtcgggagccttgttggacaagttttcgatcccggaacctaaagctattggcaagggacctcaaaaagggggaaatacggggcagggggtaaacactggtgaatgaaaaattcggggtaagacgtaaaacactggggaggctaccattttaatacatttttaactttttcccgccaccaaacacgttgaatttgaaaaaaatgatgtccccgtcctggaccaaaagggtttcccctccgggttggattttccagcagcctttacaggaaattcactgcccagttttttaagattttcaaattttattac

SEQ ID NO: 118323 - DNA, 928 bp, Zea mays
  Clone ID: MRT4577_3939C.1
ggagttcgagcccaccggtctcgacatgctgcggcgcaccctcaagatcccggtctggcccatcggccctctcgtgcgcgccgccaacctaccagtctcgccggaggccgaggccgccgtcgcgagcttcctggactgccacccgccgtcgtcggtgctgtacatttcattcggctctcagaactccatacgagcagagcacatggcggagctggcattggcgttagagtcaaccggccggccgttcgtctgggctgtcaggccgccggacggacacgacgtcaagggcgagttccgggccgaccagtggctgccggacgggttcgaggagagggcgcgcacgagcaacagagggctgctggtacgcgggtgggcaccgcaggtgaggatcctggcgcacgcgtcgacgggcgccttcctgagccactgcgggtggaactcagtgctggagagcgtgacgcacggcgtgccaatcatcggctggccgctcgccggcgagcagttctacaatgccaagatgcttaaagaggagtggggagtgtgcgtggaagtggcgagggggaacatggaggatactatggtaaacagggctgcggttgccgacgtggtggagacggtgatgggccagacggcgaaggctgcagagatgcggcggcgcgtgtgggagatcaaggaggtggtggaagggtcctggaacgacggaggcgggtcatcgaggaaggcgatggaggatttcttgcgggcgatgaatctccggtgaagggaagaacttcgtgtgctgctccgtcttgacctgaatcttgtgcggcattgcaaatgatgctaagttagagcccctttggcggggcactgaacaaagtttctgggccaaatttccaggtagtcgtatgtagggtatcatgcgttgatttgaatgataccattataa

SEQ ID NO: 118324 - DNA, 471 bp, Zea mays
  Clone ID: MRT4577_393C.1
ccccgggtcgaccacgcgtccgcggacgcgtgggcatctggatacgtcgactctaattacaaacatcagaaatatcgagaaggccatcagagattgcttggaccacttcaagagtacgcggcacatgatcctctattatgaggatataatcagcaacagcaatgcattatcccgggtgcaagagttcctcggggtcccggtgaggaggctgatgagccggcaggtgaaaattcacacgaggcctcttccggaccttgtcaagaactgggaggaagttagcagcaaactgaacgggacagagtttgctcacttccttgatggttcagattatgccaagtgatggacggcaggttattcgcatttggagttgtagttgcaaacatgctttagaattcttttgtacagatgagtttgtaatgagcaaggcataaagacaacagatgacgatcacaagtgcaaatggaatcgtag

SEQ ID NO: 118325 - DNA, 1891 bp, Zea mays
  Clone ID: MRT4577_39400C.1
atgaaccgtgcatttgtagactatgccgggccagacaaaggttgcggtcaatcaggatgaattttttttcattgaactcaaaatggtgactgcgtgcacgccctttaattgatttgcactgatgctacggcgaaacgtaatacggttcgtggggaattacagctgaaaaactcgtgtacaccccttctttcctaaaagcatctatcatctctagaactgtacaaaaattcgtgtgaagtcttgtttgagctttccaaagaaggcgacgggagcaccgaacagtggcacactgatttttacgcctttctcaattttccacatactattcacgatgagtatgaaatctggcttggaagaaaataatccaatgtgtatttcttccatgcgcacatcatcatgagctgcttgcaggctgactattctccatcaatcctaaacctctgtagcccaacgtgttcacttgagctgcctgttgacaggcccctctctttgttcagtccagttctccctactcttagaggacctgaacttgagtatcttcggaaagaaccaggggcatctatagcatcataacgcgctgatgaagtgaacagctcagcagatagcgttgggtcaacgtctacatccgtacttgctctactcataacctcgacatcttggatatgcaaatcttggctaaaggttgactcattgaactcgccgccttcattgcataccagctttagagcttgaactacttcacccatgaatgggcgctggtccacctcaggctgaacacacatagaagcaatggctgctacttttgcgatgctgtcaaatggaatgctgcgcccaagtgaatgatctatgattgattccagaccatccctgcttgtcagaagagaaccagcccatgccactaagttttcctgtccaggaggtcttaacatatctaccggtttcctccctgtaagaagctcaagaagaacaacaccgtagctgtaaacatcactctttactagaagatggccagtcattgcatattcaggagcaagatacccaaaagttcccatgacacgagttgaaatatgctcgtttccctcacccaaagctgtccttgctaagccaaagtctgacacctttggggtgaagtcatgttccaataagatgttactggacttgaaatcacggtgtatgacacgtggacttgaatcctcatgcaaatatgcaagtgcgcgtgctgcaccaagtgcaattttgagcctagcgttccaatcaaactgagcagctcccttatctgatccatgcaagtgagattccacactgccattcggaacaagctcataaaccaaacatcggctatgcccctctgtgcatatacctatcagcttaaccaagttcctatgatgcaatcggctaagcatctcgacctcagccaaaaactcccgggtaccttgttgatcgtcccgctttaaaaccttgatagcaacccgttctccatcctcaagaataccttcatagacacgcccaaaaccaccctcaccaataattctggactcatcaaatcctagtgtagctctctccatctcaaccaggttaaatgttttggcagatcctttatatgccaccaaacttgagctgaaggatggtgatgccgaaataggtctgctttctagcctgttcccaatcattgcagaaacaggacctgcatttccaatgcaatcattgaaggggggtgatacaaacagcatcatggttaatgattgaccaaatttaagtcttaaattttctcaaagatggtttgagtgctttaccaatgaagtataaaactaaatacccacccttacatgcaaacatagttttggacaaaaaaacaacattttttgctttctcctcgagccgaattcgagct

SEQ ID NO: 118326 - DNA, 4666 bp, Zea mays
  Clone ID: MRT4577_39401C.1
cgggggtatttttttttttttctttttacaacatcgccttatcgcctgtgtgtcaatatattcgtttttataatgggaaaatctcaagtttatcattaacactcactccaagtagtttcgttcatattttgagctatgagaatcttaccgcggacaacaggaaagctctaagaagtatgtagaacgttgtaaacaaaaactaaaattcaaatagttgaagatttaaaataaaattgttactactaagcaggattaaccttcaacagaggccggcccaaagaacatttctaaaaaattcgatactgctacttcaaagtgttacccatcgtaatcatagcctggaagaaggggttagggatactctacgcattttaactcttcgagagacctcatcctacattgaaactagtggatcatggattttgtgcatcagtctctagtataatgaacaaaaggagtttctgctaggtggtttttatgagccacctcaagtagttaagggtaacaccaaccaatgtaattccatctgccaaggggtagagttatgaacataataaaccccccatagtcttatagagcaagtaggtactgtctctgtttcgagccccggaggctcgagtacagaacgggattcaacaacgtcctggggtacaatccgcggtgcatcaaagccctggttcacatgcgggtaaactaaaagtttcctcccttttgttgctgcaagtgcttggacgcatgttttgcgatatcgtgcagcgttcgcagtccatgcccgacgcagccgatcttcatgttcctggtgtgatatagacaatgaaacagttgcccccatcggctcaccgtctttgttcgaaagcatgacaccacgctgttaactcgggtcgtgaagcgatagaggaggctgctcctgtgacttttcccgggagccatcacttccagcgtgaagtttcgggggtgtgtcgcatccgagcgggtcaaaagcatcttagccaattgactcgagcaagggcctggccagtcgtaggacgcggagtgcacaaacatccctaccctccaaaatcatattcggcgacgttccccctgcgttctctctcccgcgtatccaacaacctccctctctcactcgactaatatagtcaaaggtacacttctgcaaccggctggctctttgcgttcttcttcctgtgggatacagtgggctatgaccagaaagaacacaggcagctcgagggcgctgtaggcgatcgtcagttgccgtcagcggtattagtctggccctgtccactaagctacagggcagagatcgtctgcacctgctctgctgcactgcgtgtcttctccacacgtgtacatccgagtctttggtctaaaggtttatggctagattgttttcataggatgtgctctgttctaacctgtggtgaatcttttgtagatcccgggcctctccgtgtttttctgttaaatttgcgcacttttttttatgagatactcctagaagaagaaacaaatacatgattctggtttgtgtgaagatcccgaaactgccccgcatgacatgctctgcagttataagtttccaaaggttcatgaaatattggttctgcattgctgttttgtggcctgtaagcatcgaactctgaagtctcaatcaagaacctgctatctatcatcaaataagatggatgggaagtacaatgggcatgccttggattgacaatcttgccaaatatgaccatgttttactatttttgttctttcaagatggaccttgttggctgccgttctgaatatctcacatgattcattatcggtatatagatagaagtggcttcagtgggcccttcaactgcacgataagatcaatgttaggaaggcctattacaaattcctgtacggaaatcatgccacgaacaaaaccgaaacatgaaaagcagcatatatttttgtttgactatcagtaaagcaactgcagccaggttaggggatcctgcagtgtgcttgagtgtccaaacaaaaaggcttcgaatgtatagcttcacctggcgttttgttgaaggtagaaggggacacgttcctgcaccctacactagcttgctgtactaaacatttactgtggtttgttttttaaaggtccccaaagttatggactttaagatgctggtatatactggctgggagcacagataagagaagtagcagcactgacatgacggcctcagtaagtaataatgttagttttcattcgctgaggatgggtattattgctagctgtgttctgtttgtgcatactgtattgactgttcatttctcgaggattcgagccatctgttgttcatgtgtgcagtgtgcttgtgcatactgtattgagtgttcatttctggaggaatcaagccatctgtttatgtgtgctagctggataaagtgctgcttgatgtacctacagggatatggccacatggctatgtccggtataggtcaacctgcattacagggttgttaatgtatctcatcctgggttgcgccttgataatgtgacaggcacgaaatggtagtgtaatttgatttaagtagttgagttttgtggaaacacagggcaaagcaacggataaatgcaaaggttgcggccaatcaggatagggtttttccccccattgaactcaaaaaatgatgacagtgcgtgcagttgcgccttgaacgtgctgcaacggcaaaacctattacggaccgtgggggattaaagctgaaaaactcgcttgtgtacacctctttttcctaaaggcatctacacatctctagaactgtacaaaaaatctgtgcgaagtctagtttaagcttccgaagaagtctagttctgcactcccaatcatgataagctgcttgcaggatgcaggctgactattctgaatcaattctaaacctttgtagcccaacgtgctcacttgagctgcctgttgacagccccctctctttgtccagtccagctctccctactctcagaggacctgaactcgagtatcttcggaaagaaccagaggcatccatagcatcataacgcgctgatgaggtgaacagctcggcagatagcgttgggtcaacgaagtctacatccccactcgctctactcatagcctcaacatcctggatacgcagatcttggctaaagctcgtggatccgttgaactcgctgccttcgtcgcacaccagctttagagcttggactacttcgcccatgaacgggcgctggtccacctcaggctggacacacatagaagcaatggctgctactcttgcgatgctgtcgaacggaatgctgctcccgagtgaaggatctacgatcgattccagaccatccctgcttgtcagaagcgaaccagcccatgccaccaagttctcctgcccaggaggccttaacatatccaccggtttcatccctgtaaggagctcaaggagaactacgccgtagctgtaaacatcactctttaccagaagatggccagtcattgcatattcaggtgcaacgtacccaaaagttcccataacacgagttgaaatatgctcgtttccctcacccagagctgtccttgctaagccgaagtccgacacctttggggtgaagtcatgttccagtaagatgttgctggacttgaaatcgcggtgtatgacacgtgggcttgaatcttcatgcaaatatgcaagtccacgtgctgcacctagtgcgattttgagcctagcgtcccagtcaaaccgagcggctcccttatctgatccatgcaagtgagattccacactgccatttggaacaagctcatataccaaacatcggctatgcccctctgtgcatatacctatcagcttaaccaagttcctgtgatgcaatcggctaagcatctcaacctcagccaaaaactcccgggtaccttgctgatcgtcccgttttaaaaccttgatagcaacccgctctccatcctcaagaataccttcatagacacgcccaaaaccaccctccccaataattctggactcatcaaatcctagtgtggctctctccatctcaaccagattaaacgttttggcagttcctttatatgccaccaaacttgagctgaaggatggtgatgccgaaataggtctgctttctagcctgttccccaacattgcagaaccaggacctgcaggttttgttggcacaggtgatgcttcagttaaatggctgcggtttctaagcttgaaataaaccaccagtgcagctccagcacataaaataaaagcaaaagcacttgatagaataataattataattatgcccctgccttttctttccttatgatttaccacatcggcagcaagcggatgtaaacttggatcattaacattgctaagaccattgttcatgcttgctgctggtggtgacggagggagaccttggtaaagaacatacaatacgtcatactttccaaaatccatagggtttatgatgacctgcttattacaaaacctttcaaatactaaaaatgctgtcgcattgtcaaattttggtcccagtggcacaagatcaataaagacgattgtcttttcagggtcatcaggtgcagcatttgcccccataacacgaacttgactttgattcatgaacactccagatgcaatatcttgtgcaagttca

SEQ ID NO: 118327 - DNA, 568 bp, Zea mays
  Clone ID: MRT4577_39402C.1
gctttcgcgccgctctgctgctttttttggcgcgtgatacttatcccctacgcgctcctctctgctgagcttcaccatgggagcgcgatctgctcctccagctgcgcgcagccgcgattctcccagcccccgcgccgactgctcgtctccatggcgcacagacctttctcctccccatctccctgccatggtcatgcctaggctccactcaagcccctccctctcccctctgctcgttggccacgcccacgcccaactccctaccgagcggctccctctgcgtgtcaatgaccccagctcggatcccctccctcatccctttccagccgagctcaggcgatgcgacttcatgttcatggccacgcacccagatgcctgcgcgcccctggttcctgcctctgctggccgggtcgcacgagtgttcatcgtcgggcccctgctcgaccgcgcgttctcccagcgttgcgcccccttcttcttgctctagctcggctccatctcccatggccggcacttggcttccttctcgccacgccttggaccctcctagctcggatctccctctccc

SEQ ID NO: 118328 - DNA, 357 bp, Zea mays
  Clone ID: MRT4577_39403C.1
atcaaataacaatatcacatgacagtgtgccatgttcgccggaacaagcgccaggatgcaacgcacgctttgaaagttacacaacttaaacttaacaaacggactcgttccattatttagacattaaacacctatcatggtaacagaaaacactaccgaatacatatggactagaatacacacggtcttacttggaggtggaggacacaaattatctactcttggtgaagaacctgtcaggctcatcgtccttgtgggataacatccatcatataattattctagctacccgaaccaggtgtgccagatagaaaacccatcacccccactggaaccacccgttgcgccaaagctacc

SEQ ID NO: 118329 - DNA, 824 bp, Zea mays
  unsure (1)..(824): unsure at all n locations
  Clone ID: MRT4577_39404C.1
gctctctcgagtgagtctgcggccgcacgtgtgtgggaagggaactcggcaggagcagaagaggagccgccgccccgccgctgacttgcttctcttcgtctccgccgccgccgccgccgcccgccagatctgatctggtctgctacccccttccccggaccccggccgcggtggtttaattagcagcgaagaagatgggcgacaacctgatggagaaggtgacggcgctgagcgagcagctgaagatcaccgggacggaggtcggcaagaagatgacggccggcatgagctccatgagcttcaagatgagggagctcttcctggggcagactccagccgacaagatcgtcgaggacgccacctccgagaccctggaggggcccgactgggccatgaacctggagatctgcgacctgatcaacgccgggaaggtgaacagcgtggatctggtccgcggggtcaagaagcggctcgtgctgaaggatgcaagggttcagttcctcaccctgtcccttctcgagaccgtcaccaagaactgcgagaaggtgttctccgaggtcgccgccgagagggttctcgatgagatggtcaggttggtggatgatccactgaccgtggtgaataacaggaacaaggcgcttatgctgnattgaggcttgnggagagtccggcgaggagctccgctacctgccggtctatgaggagacatacaagagtctgaaatcagnaggnagtgcgggtttcctggacgcgacaatgagagcttggcccccatatttactccaccacgctcagttgctggaagctgaagctggtacaaactt

SEQ ID NO: 118330 - DNA, 323 bp, Zea mays
  Clone ID: MRT4577_39405C.1
cagatccgctaccgtaaggagggtcgctggggtaccgggcgtccctgagcagcaaggcggcgcgcttcgtgtctgacctcaccgccgtcatcctcaatcccgtctccgagcgcgagacgtcccacctccccgaggttgacgaagtgctagaaaatttggatgatgataaagattccgagcacaatttcgatagccttgatggccctgacacatcttcctttagagcattcttgatctcaccctactttaacacccatggggaagggaagcaagggaagaacgggtctgttaaagtaggggaagcattccatcaggaaaatcat

SEQ ID NO: 118331 - DNA, 306 bp, Zea mays
  Clone ID: MRT4577_39406C.1
cagacggcggggagcgaatccggggcccagttcccgcacctgcctccctcaccctccacaccaccctcctccactccatccacctctccctcccctgcgccgctgttgatctcggagcaacaaaaaaaaaagaacaaggggaagaaatctcctcccccgtgctgttgccgtctgtttggcctcgaccgcggaccgcccgctaccatccaaaaggcggcggcaggctgctctgcccactcggtgccgttgtcgtcgccccagccagcgggatcttgctgctccaccgccggctgccagtgttttcct

SEQ ID NO: 118332 - DNA, 2124 bp, Zea mays
  Clone ID: MRT4577_39407C.1
gtattattacaaggcacatacatacagctgcaataatacatataataaagttgctcggggtgtaataatacatataattaatacaccccgagcaactttattatatgtattattacaaggcacatacatacaataaagttgctcggggtgtcttaattagaaaaaaaaaaaacagaacagaaacacaaacggcataacaaaagaaaacagatccgccaccgggaggagggtcgctcgctaaccgccgcggccaaggcaacgaggtcactgacatagtgaaggggttgaactccccaatcgagacccaccaccgaacgagtccaaatccgctcgtctcccctcgaagtcactccctccagccctcgccggctccgcgtcctccggctctcccacccgagccgagaccacccatccaagcgcgcgcagctccggaagcgacagggccggacgagcgcctcccaaatttagcagccgcggagcgcgtgggcgtgggtccgtaaggagggtcgatggggtacctgccgtccctgagcagcaaggcggcgcacttcgtgtccgacctcaccaccgtcatcctcagccccgtctccgagcgcgagacgtcccacctccccgaggttgacgaagtgctagaaaatttggacgatgataaagattccgagcacaattccgatagccttgatggccctgacacatcttcctttagagcattcttgatctcatttttgtcatcatcgagctctaataacgattcaatggagataattcctgagcagaatggggacatgggttaccctactttaacacccatggggaagggaagcaagggaagaacgggtctgttaagtagggggaagcattccatcggaaaaatcattaacaaggcggcaaggattagtggtttcaaacaaacaactgcagagcctaaaattgacagggaggcagtaactcatactgaaccagatgcacctgtactggagcaccaggaaccaaaggaagttgcttccttcggtagtttgccaactatgtcggaaccatctgttcttttgtcagaactgatgcaaaggattctttatgcctctctcccggttcttgcccagggaaggaactgggtcttgctatacagtacatggaggcatggcatatctttatctactttatatagaaggagcatgctttgccctggtttctcactcttggttgttggggataaaaaaggcacagtttttggtggtttagttgaggccccattgcagccatctagttcaaagaagtatcaggggaccaataattcctttgttttcactaatttacacaatcgccctgtcatctatcgaccgacaggtgcaaataactactttacgatgtgctctaccgactatttggctctggggggaggaggtcatttcgcactttatcttgacgcagaccttttgattggttcaagttctaattcagagacttttaacaacgggtgtttatcgcattcttcagacttctcagtgaaagatgttgagctttggggcttcgtctacccttccaaatacgaggagatgctgacactctgccggactgagaaaccaggaatctgtcgatggtgagtggtgaccaatcccatagccagttgaacagacaaatggacatgtcgcgtctgtacagtttttagtaggctttgagagttgcgagcatttttgtgcgccggtagtactggagacttgctttttctcaagcgacttcgctcagatttgtaaatagtgtacttttgttactgtcacatggcgaaacatgtacgctactagttgttccagtgatgggcactttgaggtaaactgtcactggtggatcaggcttctacccaaaaaaaaaaaaaaaaaagcggccgttcatataaactctttgaggaggttctggatgatgttctaatctacaaatgtgttaaaagatggtcggatcctgcgtaactggcaggatttaccatttaaaaactatgcccccggagaatgaggagaattttatccgacttattacacgttctgatgccacatttgagaagagccagaactgaccacctaccacctcttaaagttaagcaacacaagttgaattcatgctcccatgtggttt

SEQ ID NO: 118333 - DNA, 1033 bp, Zea mays
  unsure (1)..(1033): unsure at all n locations
  Clone ID: MRT4577_39408C.1
catttttgtcatcatcgagctctaataacgattcaatggagataattcctgagcagaatggggacatgggttaccctactttaacacccatggggaagggaagcaagggaagaacgggtctgttaagtagggggaagcattccatncggaaaaatcattaacaaggcggcaaggattagtggtttcaaacaaacaactgcagagcctaaaattgacagggaggcagtaactcatactgaaccagatgcacctgtactggagcaccaggaaccaaaggaagttgcttccttcggtagtttgccaactatgtcggaaccatctgttcttttgtcagaactgatgcaaaggattctttatgcctctctcccggttcttgcccagggaaggaactgggtcttgctatacaggtttagggtgtctctactctgatatgtttttaacttttgaccatacgggtctactgttatctaatgtttatgttcatagttgtgcagtacatggagacatggcatatctttatctactttatatagaaggagcatgctttgccctggtttctcactcttggtagtgttactgtttcctaagtgtctcaaatgttctttcacctccacatttattgaatgtttcatattttaggcgatagattttattttaactccataagttgctatattgttgatgatgtcataattgttttgtctctagaacttgcatataagcccattgatgtaaggagagtgcaacttatcatataaactctttgatgaggtaactcttttcttatgcaactctgttgaaccaatgtgcttgactgcatgactgtgtgtaatacaacaaataccagtagagtagtgtcatgtatgcatctgtggatatattatgcattttttgtagaaaaactataattntaatcgagtgagaacatagtaccatgcttttattgntctcctgctcttaacctgacattgtgtacatagtaatacaaataactttcttttgaggcagtgtaaccacatatgcctttatcccc

SEQ ID NO: 118334 - DNA, 522 bp, Zea mays
  Clone ID: MRT4577_39409C.1
gggcgaccccaagccaggctggactacccgatgggtgtattctataaataactgggggagaacaaacttacgaggattcccctagtaacggcgagcgataccgctagcagaccagcttgagaatcgggcggcactcgctctccgaatgggagctaggagaggggctctcagtgacacaccgggcccaagtagtatggtatgggactcctgtgagggtgatgagggcccttcgtgccgtattttattccaccaagaggtgtcctcaacgaaagaaattgtggtgtaatgcaaaacctgtccatcgtggaactacgatcaacgctaaatacatgctaaagaccgagcgctaaatattcaccggagggatattacaacctgatgggcaatgagaccaacaagcagagaggtgagcctgaggacaatggggaggaatacgatgaacagccaaaaaaaaccgaggccgaccgacgacgacgatgatgagcgactatgacgatgatgagaacgtcgatgacgaggtac

SEQ ID NO: 118335 - DNA, 473 bp, Zea mays
  Clone ID: MRT4577_3940C.1
aaaaatagttcctttctgcgtcaacttcaatgcataatggtagatatgggatccttgtcaaccatgtgctttcctggaccagtttagtttgaaatatttgaaagtagttaagcacagttttctggttaattttacgtaaagggaatacgatggtccttgcaatgctgtattgatggctgcattgatgctatctgaatatttcattggccgaactttttttttagtgtggtatgcatttggaagctaacaactagaatgtctacattaataaggtatgtctttctttaaaagctaacaactagatgagatatagaaggattatggataagcttctagacaactatacatttgttattaggtactgaaagctcttttactttcctgtagttgtcaggtgatatccacgaagagggggagactcataacagaatgctagaccgaatgggagccacatggatacaataaagggcttt

SEQ ID NO: 118336 - DNA, 398 bp, Zea mays
  Clone ID: MRT4577_39410C.1
acgcccacgcgtgcggactagttttagatcggtttaacttgggggctttaaaaaaccccgtcgcgaacggtttgcccagcccctcagagtcttcaatattcccacattccgcccaccaatcgactttacgccagtctcgcactcttctgaaagcgtctcgcgcgcctgttttagaaaggaaggaggacaattacgcagtgctctatgtccacatctggcacgcctgcatctaagtctggaacacccgctctggaaattactgactacagcacgtgactgcagcctgatggccaaaagcctggagataagaccgctgggcatcacgacattgaagacagatgagagcaatgtctgtcagaccatgataatctcgggtcatgcactcatccatggataca

SEQ ID NO: 118337 - DNA, 1209 bp, Zea mays
  Clone ID: MRT4577_39411C.1
agtggtttcaaacaaacaactgcagagcctaaaattgacagggaaggcagtaactcatactgaaccagatgcacctgtactggagcaccaggaaccaaaggaagttgcttccttcggtagtttgccaactatgtcggaaccatctgttcttttgtcagaactgatgcaaaggattctttatgcctctctcccggctcttgcccagggaaggaactgggtcttgctatacagtacatggaggcatggcatatctttatctactttatatagaaggagcatgctttgccctggtttctcactcttggtaatgttgctgtttcctaagtgtctcaaatgttatgttttttcactgttataagaaacggcagcctctttcacctctgcagttactgaatgttccatattttaggtgatagatcttattttaactccataagttgctatattgttgatggtgtcgatttttttgggggtactcatagcattatctgatattatttcaaaaaaaggtgtcatggattgcttattgctacttttccattcttcatcatctgatgctatgttacaggttgttggggataaaaaagcacagtttttggtggtttagttgaggccccattgcagccatctagttcaaagaagtatcaggggaccaataattcctttgttttcactaatttacacaatcgccctgtcatctatcgaccgacaggtgcaaataactactttacgatgtgctctaccgactatttggctctggggggaggaggtcatttcgcactttatcttgacgcagacctgtaatgcctcgcgctatctacgactaatatacagacttctcagtgaaagatgttgaggtatttaaaacattgaagcagtgtgttctgcatctttcttcctgctttggggcttcgtctacccttccaaatacgaggagatgctgacactctgccggactgagaaaccaggaatctgtcgatggtgagtggtgaccaatcccatagccagttgaacagacaaatggacatgtcgcgtctgtacagtttttagtaggctttgagagttgcgagcatttttgtgcgccggtagtactggagacttgtttttctcaagcgacttcgctcagatttgtaaatagtgtacttttgttactgtcacatggcgaaacatgtacgctactagttgttccagtgatgggcactttgaggt

SEQ ID NO: 118338 - DNA, 810 bp, Zea mays
  unsure (1)..(810): unsure at all n locations
  Clone ID: MRT4577_39412C.1
attcttgatctcatttttgtcatcatcgagctctaataacgattcaatggagataattcctgagcagaatggggacatgggttaccctactttaacacccatggggaagggaagcaagggaagaacgggtctgttaagtagggggaagcattccatcggaaaaatcattaacaaggcggcaaggattagtggtttcaaacaaacaactgcagagcctaaaattgacagggaggcagtaactcatactgaaccagatgcacctgtactggagcaccaggaaccaaaggaagttgcttccttcggtagtttgccaactatgtcggaaccatctgttcttttgtcagaactgatgcaaaggattctttatgcctctctcccggttcttgcccagggaaggaactgggtcttgctatacaggtttaagatgtctctactctgatattttctaacttttgaccatatgggtctactgttatctaatgtttatgttcatagttgtgcagtacatggaggcatggcatatctttatctactttatatagaaggagcatgctttgccctggtttctcactcttggntaatgttgctgtttcctaagtgtctcaaatgttatngttttttcactgttataagaaacggcagcctctttcacctctgcagttactgaatgttccatattttaggtgatagatcttattttaactccataagttgctatattgttgatggggtcgatttttttggggggtactcatagcattatctgatattatttcaaaaaaaggtgtcatgggattgcttattgctact

SEQ ID NO: 118339 - DNA, 117 bp, Zea mays
  Clone ID: MRT4577_39413C.1
ggcactaacgactccccgaccgtttcggaaggcacaaacccgcatctctcctgatttggcataacctcgcgcaaccatcacagcacagctgcacaggcaaccctgaggcccagacct

SEQ ID NO: 118340 - DNA, 798 bp, Zea mays
  Clone ID: MRT4577_39414C.1
aaaagtccagccgctcctttgcttttcgagcgacgcaagcttcctctgctccccccacgtttgtgagctgttttctgtctgtgcctttcttgcaggcggccgcaggagcgggagcgtgtcgtcaggctttgctctgctgccgtgccaacaagggtaaaaggtaggcgccgcgccacgccatgggcgcccctcgcgcctgaccatgcactccaggctgctcaagaggctcgccaagaggatcatgtgagccgccgcgcgcctgcggaaatgtgggagatggacgcgctgctctactgcgcggtcgtcgcgctggcgcttcactgcgtcggctgtggctgctccgcgatcaaccttgaaggctcagcgctgctcaagttccagtcgagggtgcaggaggatccgcatggcgccatggcaggctggagcgcgcgggacgccgacccttgcggttggaacggcgtccgctgcgccgatgacagggttgtgatgctgaacctaaaagatctctcattaagaggtaccctgggtccagaattaggaagtcttggtcatctgcaggctcttatattatccaacaatttgtttagtggactgatacctaaggaaattggtgcactcgcaacgttggagatattggacctaagttataacaactggactggggaagttccacagaagatagcagaaattgcatcacttaagcatttattgctttccacaacagatttcagtggcccgtagtccaaaattcccatgggaactttgatcaggaagctgattttgacatatatgatcatc

SEQ ID NO: 118341 - DNA, 643 bp, Zea mays
  Clone ID: MRT4577_39415C.1
ggacaaccattctctacttacctttgctactctgattcttttctaaacttttcttaatcttttctcatctatttccgcttcactctgattattcttaacttttcattctaaagacaaatggggatttcacactttgaaatctggtacctaaagtgacctttagaaataggagaccaactcttaggaacaaaaacaaaactattttttttatatgcttggatgcttgttcttatgatatttgtctgatttggatctttgaatgagtgtgatgggttgtggagtaatgtccacaattacatttacatatacatataggcataaatataaataaataaataaatcataagatgactatacaaactaagaatgttctccattaaaagtatatctagccaaatagctccatcttgtcttgaaagattctttcttatcttaatagactcatcttgtcctaataagcatatctatccccacctaacatcaaacaagtttttgaccaacatcatgtagtctatctcacctatatctatcttaaccatattcccccaacttcgatgatatacactgaccccgactcaatgagaccaagaccggagaaggaaaagatcaaccacgtcaaggaaggagagaagtcaaactcaat

SEQ ID NO: 118342 - DNA, 360 bp, Zea mays
  Clone ID: MRT4577_39416C.1
atcttcttttgcgtcgccagtcgagcttcatcggtcagacaccatttgcaagcttaatgtcggagacaacggatttggtcgcattgggcgcctggtcaccatggctgctcttaactctggtaaaatgcatattgttgccatcaattacccgttaattgacctcaactgcatagtatacatgttgcaatatgatctcacgcatggcaaattctatttcaccatcgacgctcagaacttaaagcctgtcattaatggatatctaatcaccatcttacaagagctagatccctgcaagatcaaatcctgctatgctgatgctgagtacaaaatgcagtccactggcatatttaccaccatgga

SEQ ID NO: 118343 - DNA, 296 bp, Zea mays
  Clone ID: MRT4577_39417C.1
catatttagtcgattagcattaatatggggaagtgacccatgctactgattgggaccaatggacccatgatgcaccccttcattttggataaagtgattcattaaaccaaatacaaaaaaacaaaaaaaaaataaaaataaaaaaaaaacaaaaacaaatcatataccaacaaaaaaagcatataccaactacaaatcaactaacacctacaaatacatataaaacatggggtgcccctccctactgctttccaccccccagatataaatccatgacccgcccccggatcataccc

SEQ ID NO: 118344 - DNA, 219 bp, Zea mays
  Clone ID: MRT4577_39418C.1
tatttggcgcggcgccaaacgatggcaacataaagcattattatatcagggctcactcacatacaacaatttgagaggggccaaccccggtgaggactgctgggagaacacagtgctgtctttcacccaacgagctgtgtggggcgctgcttgttgtaggtgtcagctggggcgagccctcactgcaggcggctgctgcaactgtaactcatgctggtg

SEQ ID NO: 118345 - DNA, 686 bp, Zea mays
  unsure (1)..(686): unsure at all n locations
  Clone ID: MRT4577_39419C.1
tgggtcaccgttcccccctcgggtcgacccacgctccggngggaggttttaggatgaattggcagcagcaccggtgagattacccgagcgcgatgcggtcgtccaatgggcagaccacgctcaaatcatttatcttcaagcccagggttgtcgatggagtaccgccgccgccgccgccgccgccggagggggtgatggaggcgccgatctgtccgccagagctgccgaagcgggagattgtcagagttaccaagacgaccattaaggagaaggcgagcgcgttctcctcggtgggctccacggggaaagacgggggcggcggcgcgggcggcgctttgagcgccgcggtcttcaagcggttccacggttcagccccacgagcgagagcggaaggcgaccgcgtgcaggcaggggaagacggcgacgtcgaactcggtggcgcaggcgacgcccggctggacgtcgaggaggccgggggggagagccgccgcgggcccaggagtaagcggaagagcccccttggcggccacgagtacatgagcgaggccaaggccagacgagtggtggtgctcggcgacgacccgaggccgcggccggcgactacgcgggggcgtaggaggcgcacccgcggcggtgagggtgagggctctgtacaaccactacgcgagcggaggcgggtggtggca

SEQ ID NO: 118346 - DNA, 351 bp, Zea mays
  Clone ID: MRT4577_3941C.1
ctgggggtttttttttttttttttttttttttttttttttttttttttttttttttttttttttttttgggaggcaataactgacatgccagggaccaaaaacaaagggggcactggccccaacctaaccggggcctttatacaccggttttttccatatggggcaaagggttctcacttttgggaatggcacctacacaacccggaaaattttactttttaatgaggaaaaatattgacaaacatattggtttctccctcaaaccatatttgacccaacctattcaaaaagtgggtgaaagctttccctgaaaaccaccaaaaaccacccctcaagatggaaaccccccc

SEQ ID NO: 118347 - DNA, 230 bp, Zea mays
  unsure (1)..(230): unsure at all n locations
  Clone ID: MRT4577_39420C.1
cgtcccttgcacgcctacctcaccncnnccttttttttttttttttatattattnnnnntttattaaagggaggagtcgacagatagtcctcggtgctgacgcgtgaggacactggaaaggnnnnnnnntgaanctnnnntnactactgaaaangngcactnnnnnnangnngnnggatctggntctcgtgttccggctataatcaagataataactgatttttttggga

SEQ ID NO: 118348 - DNA, 348 bp, Zea mays
  Clone ID: MRT4577_39421C.1
atgccagtccgtccgtccagcgtccactcgcccaccgtttccgctccatccccggcggcggaagggaaggggaaggagaaggagtgcgagggcgccaacgacgaggacgagtgcatgatgaggcgcacgctggccgcgcacaccgactacatctacacccagcagcaccacggctggtccaatataatccgtcctaggttacatgcgttgctctcgtacgtgtgttcgtgtccgtccgtgctcgtgtcgtgtactcgtgtgtgtgtgtgtgtgtgtgaaacgccagcgcgtgctgcttctgctgcgtcgttattacctgcgtgtcaaataaattcttttttttgtccc

SEQ ID NO: 118349 - DNA, 751 bp, Zea mays
  Clone ID: MRT4577_39422C.1
gcccccacttccccgttcgagagacgaaaaccgaccttcattccttcttcctggcgaggagggcgacggtgatggtgctcgcggcggcgctcgcggtcctcctgctggcgtcgtcgtcgtcgaagacgtcccccgtggccagcgccgcccgggacgacccctcggcagcggcggcggcggcggccgtcacttcttccccgttcgagagacgaaaaccgaccattcattccttcttccatggcgaggagggcgacggtgatggtgctcgcggcggcgctcgcggtcctcctgctggcgtcgtcgtcgtcgaagacggcccccgtggccagcgccgcccgggacgacccctcggcagcggcggcggcggcggaagggaaggggaaggagaaggagtgcgagggcgccaacgacgaggacgagtgcatgatgaggcgcacgctggccgcgcacaccgactacatctacacccagcagcaccacggctgatccaatataatccgtcctaggttacatgcgttgctctcgtacgtgtgttcgtgtccgtccgtgctcgtgtcgtgtactcgtgtgtgtgtgtgtgtgtgtgtgtgtgaaacgccagcgcgtgctgcttctgctgcgtcgttattacctgcgtgtcaaataaattcttttttttgtcccggaaaaaaaaaaaaaaaaaagcggccccgccatgtttgtaataaagacaagagtctaataagatgtgaatttaaacatgaaataaaat

SEQ ID NO: 118350 - DNA, 162 bp, Zea mays
  Clone ID: MRT4577_39423C.1
aacgcacacaagcggaggacaaccagacacccagagagcggaacccgcaaggcgaagggcaaggcgacggcaacgcaagccagaggcagagcgcgcagcgcgacgatcgggcagcaggacgtggcgtcgccggcggcggcgaccgtggtcctgctgctcctg

SEQ ID NO: 118351 - DNA, 628 bp, Zea mays
  Clone ID: MRT4577_39424C.1
aaaaagtcctttttttttttttttttttttttttttgtttttttttttttttttttttttttttttattcaaacaaaccaccagggaaaaaaaaaggttttttttccgggtttccataaaaacttttttcaaacttttttaaaaagggccgccctataaggggggggggggggcaaacttttaaacattccacaaaacttttaacccaaagccggggggtcggccccccttaaaaacccccccagggccgggttttggaaaccggggggaccaggggaacccccggggcccaccctgacaaacaagtgaaattcagcccctaaaccagcggaaaactaaaaaacttgtttaatgggacccctaaccgggggggggcggaacaagctttttatggggagcgatcccccccaatgaaaaaggcaaaaaaagacggggccccttttttggaggaaaaaccctttctgaaaaacccatttggattacccatggggggaaaatcccaaggataaatccccgcgggaggcctttaatttacccacttactggaaacacgcccccttccaatttcccggcaagaggggttaaaaagggggccacaattttgcccaaaagttcaaaattggctaaa

SEQ ID NO: 118352 - DNA, 702 bp, Zea mays
  Clone ID: MRT4577_39425C.1
ggggtaccctcgggtttctggccgggatcacgtctggtggtgatacattaacttgttgagagttatacccctatgtaccatggaccccatcataattgagcatggtgtgccttgagaaatagatatggtgaatgtattacatcactaggcacaaaaccaacaatacctacacaaatggtgtagccaatactcacactgattattgatgatgagctccaagcaaggttcccatgcaaagagaagcgacaggcaattcagtggtatgttaagctcatacgttgagatgaatacattgcagagaaacatccaacaggctatggatagcaatgcgcttatgaatgataactttggggcgccaatggaggatatagacatgaacaacatggacatgtttcatgggtatatactatacgatgaggaggggatgaatatggtataggaaccacgtgcacaagcagaatattgttcctaagaaaaagaggcaacacccagtgttaggttggacacaagatgagcacaagaatttccttcgtggcctagaagtgtatggtctgtggtaacgtggaagaacatatctaagtactgtcgacccacagggacgccaatacagatctgcagccatgcacatgagtaatgccataggaaagagggcaccacaagaaaacagcgatctagcattaatgatatcgggctgtatgacac

SEQ ID NO: 118353 - DNA, 184 bp, Zea mays
  unsure (1)..(184): unsure at all n locations
  Clone ID: MRT4577_39426C.1
ggcggccaagctgtggaaacgagggagacgaggaggacaagggaaagaaagcctaccggcgtcggggctccggctcacctcggacanccccaaaaaaaatctcgcgtggccgccggcggccaccaccataactgccatgatcagcatcctcgcgcaggaccgcctcctcgggttcgccctgggt

SEQ ID NO: 118354 - DNA, 260 bp, Zea mays
  Clone ID: MRT4577_39427C.1
tacctctgagccggccgtgccgggatttctctctccaccacctgatcaataatagtcctcggtctcgagatgaacggtgcatcaatgagactacgtagcggcactcactgtctattcttgatcgtccatctaaatcaacgacaacggcatgttctcctacctctcccaagcgccggacacggcaagacagtgaccacacggagtacggcgctgagaaacaccacataaagcctcgccatccaccgatctctactccgata

SEQ ID NO: 118355 - DNA, 685 bp, Zea mays
  Clone ID: MRT4577_39428C.1
ccggccgggaatccggctgatttcctcgtcggctcatcctttccccgaacccctcgtcagagtctcgccatgcgctcgacccacctcgtcgacggcgaccttgcttcggcctcggcgatgggaggccactccgaccgtctgttcagggcgctggctgtcgcttccctctacattcttatccgccggtggcgcgcctttggggtcggcctcagcgagcggccggcgccggcggagatcgctgccgtggctgcgctctgcacctccgtggcgtggctgtacgttctcccagcccttggtctccgccggagcacgcaccgacgtcggcaccaagattagttgacaagtggctgttgttgcgttgctggtaaccatccctattctccctcttttttaaggtttggatttggaatccaatttgtcaaacacagcccgaggaaatgtatgtgtaagtacggatacgaatggttgaaatattagtcactaagaatgatcatgtaagtacggatctaacggtccagttcaagattgggctgatcccaactgttcaatgatttactggttcatatgtcagtgtatagacatggtaacctcaaaccagttacctgtatggtcaccagtgactggacaaagagaatttctcaaggttgtttgttcaaaaaaaaaaaaaaaaaagaggcccgcggcc

SEQ ID NO: 118356 - DNA, 1424 bp, Zea mays
  Clone ID: MRT4577_39429C.1
ccgggctcgagtttttttttttttttttttttatgaaacaagtcattaacataggcactcagaacatccaccaaactcattagccaggaagtttggttgagctagtttgtgttttctagaacaaactaaactacaagcaataccacactgctttgtaaatattttttgggttttcccctacattaactcctcgaagaagcgcaaaaggtgagatgattctgcagaaccgtgttggccattcccgcgtgaggattgtcagcacgctacacgtcaatgacagctttcttcagggcacccatgtatgtcaaaaccttctccacatgagatccgtagtaaagagagaatattgcctctgcttgagcgaatgtggctgcggcgcttgccccatctcccagggacagcagaatcgaaacaagcttaataagctcgtgagcaatgatgatgtgttttgggtggtacagcttctcgaggatctgaattgatgcttcacagtgctttcgtgctagttcttggtctccgaccttcgcaaaggcctctgcgattgtgtcttcggcctgcgcgagagccttgctatatgggtgcctcaacttcttgagttgtttaagagattgtaacgcctctgtgatgagagtcttgtctaggaatgtatgtttcttcaccctatcgatggtagattcttccctgtgtgatgtagccagagcagacgacagatcaatacaggatctacaactcatgcaacatccatgatctatgttcagactgacaccactattttgcaagagagatttggcgacattctccatatccatatcaaccttcgatacatcgggcaatgatagtttgcagacataagatcctccaagggaaacattcacgaaattctctttggacctgtagtaagttgattccgatatggcaccaaggcagttgctttgtggacaacagaatgaattcataacaaggtctgataggtttagctctgaacaacttgaacattgacaactgaagtagtaattctcttgaagtgacttctgtctctctgaaatatgcatctcgccaacctgtggaccatatgacagttcaactgggctcccggactttataaattcagtagttctcagcacgaacgcacgtgaaagaaaatatgcgtgcacattgggctgacatgagtgattgaacaggctaccagatacataaagagcttgtgcaaccctgacctgctccacactacacatttttgcaccttcagctacataaaaacctctatttattgtgtgctctgggcctctgtccatcgacctcatacagacaatagcaattgaattgactttgatttgaaatatcaaaagaaccagctgtgatacagaatcttctgtccacaaaaggtctgatctataatgattttggaggcataacaataggac

SEQ ID NO: 118357 - DNA, 216 bp, Zea mays
  Clone ID: MRT4577_3942C.1
gggttcaaaaattttggcccccgatttatttgcagcgtactggtggcatgtagggggtagacaaaaaactacacatccctaaaacaaaggggatcggctttataaaaaagagagggctttccacactcatgcaaattccgggaagccaaacctgtcgttgcccaaatcaaacacccggggggaagctcccaaaaaaacctccccaaaaaaccaaag

SEQ ID NO: 118358 - DNA, 256 bp, Zea mays
  unsure (1)..(256): unsure at all n locations
  Clone ID: MRT4577_39430C.1
catgcgaccaacctttttctgggcacaccgaaggggggggggggcatcgaaggggcggcctacgtagggaccagngttttacgtggcacatacggtcatgggagcttttgggcgcgggggacgaagctnttnggagcgggatcatacagnnggtggcactacagcggagcggcaaggggcgggcgaggctcaccagggatcattgtcggagtgggtngaggggctggcactccctaggggtgatggcaccggggac

SEQ ID NO: 118359 - DNA, 134 bp, Zea mays
  Clone ID: MRT4577_39431C.1
cgacacagcaactaggaggcggcccttcgcgaccaaagctagccatattacgagagcaaagggcaaaggcaggaagaaagccaaaaattcaaaaccacctgccaaggagagagcagatgccatggaagactagc

SEQ ID NO: 118360 - DNA, 144 bp, Zea mays
  Clone ID: MRT4577_39432C.1
cggacgcgtgggcggacgcgtgggcggacgcttggtcagacgcgtgggcgtggcaatgaggggcatcttggatgccctactagcgtggccggcgaggcggttgtgttcacggtggtgaaccagtgccgagttcaccctgtgggc

SEQ ID NO: 118361 - DNA, 452 bp, Zea mays
  Clone ID: MRT4577_39433C.1
gggggaggcaaaaaaaaaacgggaattaccaaccagcttagcagctacaaacaaagggaaaaaggggggtttttgggcggcccttaaggaaaaacaaagggggcagcatcatgtacatgtacaaaaaaggggggccttttttggggaaaggaaaccagggaattcattatacatacatacatacatatttgtaagagggggggggtccttccgggcttttaaaaaaaaactggcagggccaagcaaaaacaaatataaacttccgggttttccaaccgaacaaaatagggccatcctttttttccaggggggacttgccccaaaagcagggaaggagcttcctgatcaccgggttcacgtacgagctaaacgggttggggctgaacccggccatgggaaacctcaaccgccatttgcccaggagcttgggacgctccacccggcccttcccc

SEQ ID NO: 118362 - DNA, 585 bp, Zea mays
  Clone ID: MRT4577_39434C.1
atttccagatatcgcgaccccttctatcttttcgttctcgtttccttccgatggatgaggttcttccttgttcagcgacttcagcttctgctatgaacaatgaggaggtcgctgattcaactctgttcctagaggacctttacaaggctagatgagggtcgcactggtctgactattacaatctggctatgatgacggatgatgatgagactggtgacaactattgtgctggtcctgactatgatgactgtgagtgtgtgcgcatccatgttgccgacagactatatgagatgattacatgacaatttttgcctcaatgatatccacttaaacttgataatcattggattgcttaaggagtctagatgctatgaaactgcttaacatgagtcagagatattttgcctcttggggaacacaagtgatccactgacaaatggcattacttttctgctactagctgtgattgagaaaagatacctcctttgatgcatagaaatcaatgggacattcccatgattgtggcctgaaggtagggctctaatgtacctgaactggttttatggagcattttctcgacgtcgt

SEQ ID NO: 118363 - DNA, 532 bp, Zea mays
  Clone ID: MRT4577_39435C.1
gacaaagatatgtctgcaagggactttgtagataaggtgcgtgagacgtggacagacgagcacatagcatccaagcactcagcactagatgcagtcagcctccaggaagtaagaacatgcattgaaattgggctaaaatgtgtggatattgatcagaacaagagaccttctatagttgaaattgttgacaagctcaatggaaggcatgctcactgaatgatgaactcctgcatactatacatgcaagtgaaaattatgttgcggacccatggagatttgctctagatggaatcatggacaaaataattgtatgtgttaccgattatgtacttttgaataatgtgttcctcgtgttgtgtcactttttcaggagttccttgatttgtcattgtgtttttctttcttttgacacaaatctgcatgcataacctgttgaaaaattgtgtgcatactagttatttgttttttctcatgttatgtgaatactatttttttttaccaaacaagatgggaggtcccatctgaattttat

SEQ ID NO: 118364 - DNA, 195 bp, Zea mays
  unsure (1)..(195): unsure at all n locations
  Clone ID: MRT4577_39436C.1
aaaaaaccgggcggacccacccgttcggattatcatgcatttctttcacnccttctttatcacaaacgccgacaaggagngccgccggtttctttacatgggcaaccccaccacctccaacgtcgtctcgcccaactacaccaatggcgacaacactcccgccaatatcgtcggcacctacatcctcgactacac

SEQ ID NO: 118365 - DNA, 453 bp, Zea mays
  Clone ID: MRT4577_39437C.1
cggacgcgtgggcttttgctagcttgaagattctttgaattggaggatgcaaaatgaaatcgatagtatattggagaaacctattatcccagtagatttgtatagatcaattcgtgatacacagcttattgggttatcaggatactccaaagagggcattcctgtatttgcagttggtgttgggctgagtacatatgacaaagcttcggtaactgtctcagactattcttaatcgttttagtagctttcattgttactggccttgcatattttgagaatatgatgaattaagaatcatgattgtaatatgtgtatacagccatcctcatgggccatgggccttgatatacttaacatctgtcagaatgcatccatgtcaatcaaattaaatataagtaaatactattgcacttgcaaagttgtaagttcaaacataattggagtcatgtatga

SEQ ID NO: 118366 - DNA, 235 bp, Zea mays
  Clone ID: MRT4577_39438C.1
ctttccagcctagcgaaggcggccgtccgtcggcccggttgaatgccccgcgcggcgagaccccggcccgggccctatgagagtagggggagcgccacacgatatagaacgacgggatacaaaccgcgggtgtgttgcaaatgcaagggccctcggcgaagccccctgtgggaaagaaagccccgggccaaacttttgtcgaggagcgggagcctatggtggaggaccacactac

SEQ ID NO: 118367 - DNA, 508 bp, Zea mays
  Clone ID: MRT4577_39439C.1
cacgggcttccgcctagctgactgagctgagaggccaggctcacataccagaagaaacgatttggagaagactattgagtgagaggaaccccatgaaaaccggagacggagctagcactctaaccaggatatatgctggaaactactatgaaaggtcccctactggactcctagatttaggtacatggagctcgtagcaaccacgttgacctgcactgtgtaaggaatcggacacgttcactggctgctcactgatatgcggttgcatgtacaacatgcgcgctcgcatcaatacttgctgtaccacgcgtggtaccatcggcatcatgattttctgagacaaaaaaaaaaaaaaaagggcgggggctgtcgatgaacaggattcacgctcacgtgcacgcgaatgcaaagctctactattgggataccgaaacctaaatccatggccgtggccgtacatctacaacactgggaaagccatgacgctgcccaaatcaatcttattgga

SEQ ID NO: 118368 - DNA, 411 bp, Zea mays
  Clone ID: MRT4577_3943C.1
tcgctacgcgtccgcccacgcgtccgcccacgcgggctaccattcacgcgcctgctccagtgtcgctatctccagcccccactccctttccccgtcccgagctcgagcgcggacgcacgcacaggcacagtcgcacactgacacgaacgcggcgaatcccagcgtcggcgaaatctgcggccttttctctcctctgcaggccgtgggcagtggcgccgccgcgcgatggggtcggtgtccctgaacgtggcgtcatcccggcgcggcgggcggcgcctggcgtggctgtgctcgtccgcgctgctcaacctgctcgtgctgctttccctcctctggcccaacctcctggcgctccgcgcctttctctccccccgcgcgcttcgtcccgccgtcgcgcgcgccaaccttttc

SEQ ID NO: 118369 - DNA, 905 bp, Zea mays
  unsure (1)..(905): unsure at all n locations
  Clone ID: MRT4577_39440C.1
cagagcaatctgtacacgaatgaagatggatcaaacggatctttaagcaaatctttacagtgatgaaatgaatggctatcactagagaagtgtgctataaaaaagaactgattttatatagagagaaccactgttgtgtaagcaaagtttaggtgcaaatatagtactgaacaccatcagttattttctaggcttacaggaacgctgacaaggcttgtattagaagcaacaggctctaagaaggtactacctcaaacaacttctgtatcagatagacaagttacaccgtgtgtaccttaaaaatctagtactggacaccatcatcagttattttcttttctttcgaatacaccacagtaccgtcagttaaccacaccaaccaaagcaataggcgccagtagcccagtaggtctcttagaagtcttacagtccattgaaacaagagggggaagaaaaatgaaattctcctcaatcactacgaaataaaaccatactatacagaccatatagtaaaacagatggtggtctgagttcaggaccaggctttgaaagggcatgtcaggtcaggtgacacccatgctcattgaaacgtgggtccagtaaggtacatggcagctgaacccaagcctacacattatctcttctgtcatagagttacagattcggcattatattgcacactctcatcactcctcatggtcgtcgcccttgtgnaggttatgcaggatgtagagagaggccgacgacaagaagatgcagatcgagtagctgagtaggtccagccccgtggcgattgtcaccatcttgctcctctcgaacatcttcaccagcgtcaaaaacaaagtcatcaaacattgcggacgcgtgggcggacgcgtgggcggacgcgtgggcgaacgcgtgga

SEQ ID NO: 118370 - DNA, 781 bp, Zea mays
  unsure (1)..(781): unsure at all n locations
  Clone ID: MRT4577_39441C.1
ggacaccatcatcagttatttcttttctttcgaatacaccacagtaccgtcagttanccacaccanccaaggcaataggcgccagtagcccagtagatctcttagaattgagaacaagaagtcttccagtccattgaaacaagagggggaagaaaaaaaatgaaattctcctcaatcactccgaaataaaaccatactatacagaccatatactaaaacagaacctagtttctttggtggtctgagttcaggaccagcctttgaaaagggcacgtcaggtcaggtgacacccatgctcactgaaacgtgggtccaggaaggtacatggcagctgaacccaagcctaaccattatctcttctgtcatagagttacagattcggcattatattgcacactctcctcactcctcatggtcgtcgcccttgtggaggttatgcaggatgtagagagaggccgacgacaagaagatgcagatcgagtagctgaggaggtccagccccgtggcgattgtcaccatcttgctcctctcgaacatcttcaccagcaggatcatcacgatgacgtgccccactattgtcttcagctcgtcgagggaggtgatcttcatccacttgggggcgttccttcaaagcgaacatcccgaacagcgacgatccgctcagggcacggtcggattcagaaccaacacccgcggaagcgttgctgacgaagagaccgtagagacccatcccanaatatcaacatgaccgttccagcaagatacccggccggcctcgagg

SEQ ID NO: 118371 - DNA, 614 bp, Zea mays
  Clone ID: MRT4577_39442C.1
tcgagttttttttttttttttttttttttttttttttttttttttttttttttttttttttttccaccgagggcaaagtttaagaagaaattaaggcctggtcttaaggccaaaaaataaacaaatttaacaacagcccctaaaaccccacccttgggggggcccaacttttcccttttaggcaacctaccaaagaaccggaagggccaacaccagggggcggggggctaacctaaatatttagaaaaaacccccggccccgggttgccccctttagggaaaaaccggacccgggaccggaccggggaacccttggccgaaaaagggcccagggccaggttgcttcggaaaaaaccctaaccccatcttgggggaaaaaggaccctaaacaccatacaaaaacggcctttggaaggggtgggagggacccctcttgggggtggcggggaaaaaccttttgccaaaaaaccctgaaccacggggggcaagggccaacccttggccccaagccccttggaccgggggttgggttgtttaaacacccctcctttggccggcctttgttttcttaacgtgaaaaacccttttttgaagggggccccagggaacggccc

SEQ ID NO: 118372 - DNA, 1724 bp, Zea mays
  Clone ID: MRT4577_39443C.1
acgaccccggacgtgcagcgggcgctccacgccaacgttcacccgcctcgaccaccccatggtccgcctgcagcgatgtcttgagacgctggactgacagcgccgcgaccgtcctgccgattctcgcggagccgttgtcctcaagaacgacagggtgtgggtgtacagtggagacaccgacgggagagtgccggtgacttccagcaggtactccgtcaaccagctccagctccccgtggctgcaaaatggagggcatggttcagcagcactcagggggccggggaggtgggtggctacgtggtgcagtacaagggcaaggagaagggcagcctcagcctggtcaccgtgaggggagccggccacgaggtgcccagctaccagccaaagcgagcgctcgtgcttgtccagggcttcctcgcgggcaaggcgctccccgactgcgaaacctgcgagtcgggttaagcgtagctagcgtttggaagcagcacgcagcacacaagagaagagaggcggtgcaacagcatgtaccccccatccatttgatccactacgacagacatagtcagagatagaaacatacgcacgcacccaccgtaccttgcagaaaatcatgcaaaaatgcagtcatacacagagcaatctgtacacgaatgaagatggaatcacacggatctttaagcaaatctttacagtgatgaaatgaatgagctatcactagagaagtgtgctaaaaaaagaactgccatagcgagaacccgtgcttgtcgagggcttcctggcgggcacggcgctagccgactgctaaacatgcgggtccgcttaagcgtctttagcgtttggaaggaggcggtagcacgcaactcacaaaagaaaagagcggtgaacaaccgcaagtaccaccatgcatacatttcatctacaacaacagacaaaatctgcgatgaagacttcctcacgcaccaaccgtatcttgccagcaaacatcccaaaatgaaggcatacgcagaagccatctgtacacgaatgaagcaggagacatcctggaatttagaacaagaagtattccagtccattgaaacaagcagaggggagagaaaaatgaaattctcctcaatcactccgaaataaaaccatagtatacagaccatatactaaaacgaacctagtttctttggtggtctgagttcaggaccagcctttgaaagggcatgtcaggtcaggtgacacccatgctcactgaaatgtgggtccaggaaggtacatggcagctgaacccaagcctaaccattatctcttctgtcatagagttacagattcggcattatattattgcactctcctcactcctcatggtcgtcgcccttgtggaggttatgcaggatgtagagagaggccgacgacaagaagatgcagatcgagtagctgaggaggtccagccccgtggcgattgtcaccatcttgctcctctcgaacatcttcaccagcaggatcatcacgatgacgtgccccactattgtcttcagctcgtcgagggaggtgatcttcatccacttggggcgttccttcaaagcgaacatcccgaacagcaacgatccgctcagtgcacggtcggattcagaacgaacacccacggaagcgttgctgacgaagagaccgtagagacccatcccaaatatcaacatgaccgttccagcaagatacacatcgatggcctcgacgactt

SEQ ID NO: 118373 - DNA, 769 bp, Zea mays
  Clone ID: MRT4577_39444C.1
acgaagggggcgtcgtgctcatgcccatgggcggtggcggctcgctggggctttccggcgtcaggggatcaaggctttgcctgggtcgacgagtgtcggcgcagaggggattggaggatgggttcgacgcggggacattgagcttatgacacggatcccctttatgccctatagcgaagcacatgtgattgcttctgcggagggcttgggtttcggtacaatcttcttggtctcaactgaggttggcctcttcgcggtcgacctcaaatcagggcaggagcgcaaactaagcgagcctgggaactacaacgacttcgctgtcttccccttcatgagcttctatactccagactgtacaagcggcaaggtaccgtcacccaggaggacacactaatcactgtaatactgaggcgaagaatggtattgcctggctcatctacagatccatcaagttgagtttgcaggtgctgtcatctttctgttgcaggaatgacgtctcgcaagaaacacaagccatgaagccaacatattggtcgcttatgctcctatgctctctagctgattcttagatgcataatgtatacgcagccttttttttgttctcgtaatatgtgtgttgtttggttcacatatttgtaatgtaataggtaacagataacgttaaattatgtttgtttaaatccaaccgtaatcagataatatactaggaattgataccggcctatacaaacttgttaccgttggtaatcgagtgcgaactattaccgtt

SEQ ID NO: 118374 - DNA, 385 bp, Zea mays
  Clone ID: MRT4577_39445C.1
atggatcgattcaagtgccaatccaaagcggggggctggttcatcgaccattatccaagccacaacaagggggaaacggtaaaccaaacggagggaaacaacaatgaaagccgctggacctaacagaagcattagctgcccccttccccaaagacccatcacagggatcgcacgggaaccccgaggacgcgagggaccaccccagctaatgcgaagaaccctacgggggccctaccaagccgggcaccgaacgggaacggagtgttattcccgtacaaccaagctgcgaaaagggccagaagtgtggaagctcgtgaccaaccctatggacggtatgacgagggaggccaggaacttttcccatccccccggacagttcccggag

SEQ ID NO: 118375 - DNA, 769 bp, Zea mays
  unsure (1)..(769): unsure at all n locations
  Clone ID: MRT4577_39446C.1
cggccgctcgaggcggcaggccgggatgtttccaccctccagctcctcgtgctctcccctgcaggcccccctccccatccttgtcctgtctcccacctcccttgttcttccgttcttcccagccccgagccatttgcagttagttcctgatcccgcggcggcggcggtggtggcggcttccatctgctgtcttccgccttgtccctgagttgcgtttcttgatgtgttggtggtgacggtaaggtggaggaggagcttcttcctggccgggtccccgccgcctgaagatccccttttgaggggcggcaggtgaggggagatgcgctggactgatccccattactcgcgcatccatttcttgtagccgaaagatctggtattccagaggtagaagcaccatgggactcctaggtatgatgggtgactcatttggctgctcagctaccggtgagcggctcgtctctgccgcgagggatggagacatccaggaggctagggccctattggagcttaacccccggcttgcacgatactcgacattcggtatccgaaacacacccctccattactcggcggcaaagggccaccacgagattgtttccctgctaatagaatctggcgttgatatcaaccttaggaactgcagaggacagactgctctgatgcaagcttgtctatatggtcattggaaagntgtacagatcctagttctttttaaagctaatattcaccaaaaagattgttttagtggtgcaacagcaattcattt

SEQ ID NO: 118376 - DNA, 281 bp, Zea mays
  Clone ID: MRT4577_39447C.1
aacgcttagctaatagcgcgcgatctttttgccccctccccctcttgagacttgagcgtggtagaagaaaggcgtgtgaacggtgggaagacgacgctggtgcaggacaaggagaagcagcagcttctgctggagaagcacaccgagaagcacttcacagcggacgaggtggtccgggacatcatcatcggcgtctcaaacgggctcaccgtgcccttcgcggtcgccgggtggttggacggggccaacgcctcatccacgatagtgatcacctttttttt

SEQ ID NO: 118377 - DNA, 360 bp, Zea mays
  Clone ID: MRT4577_39448C.1
aagagacaggggagatgaaaaagaggcggtggtggctcgagtgtgaatatgccggtggggagggccggaactccgaacttgcctcgccgagatgactagcctacacgagctgcactatctgcaacagggtcgccactacagcttcgcccacttgcaggaggaccgcgaacctgcaaaagtcattgggtgcgcatccatccacccaagtactacgctgaccctcgctcgaatcccattagaggtaggagggccgaaaaaatcgggcgggaggccaccatgaccagggcacaaagggtgagcatggggatgatcgacgacatgagcaccaacatggaggtcggcctagttctccagaactat

SEQ ID NO: 118378 - DNA, 489 bp, Zea mays
  Clone ID: MRT4577_39449C.1
ccggccgggatatatccacacacctgcatcgcaacaagcaggatttacctgcccatccatcatatcgacaactggctcgagagcttccgacactcatgagctccacggaagtgtggttggcgctgtttggcggtgccaagacgtccagccctgatgcgttccagctgagcgaggaagacgccaataaggcgatcctcctggacaagccggacgccgacatctcggagctgcccatcagatacgaggtgaccgaggattatctccctaaccgtgtccacatcttcgatcgacatcgtggaccatacaccccacatcccctgataatatataacttagcctctatttcctttccttgccccataacttgaaattcatatatatacgattaaataacgagttcatggccaataatgcatgtgtgaattctctactaattatagtaatgcctatgtagacgtatcctatatcaaaagagatcaatttgcgctc

SEQ ID NO: 118379 - DNA, 331 bp, Zea mays
  Clone ID: MRT4577_3944C.1
tttcgtgcatcttaccgctcatcgcccccgtcgggggcttctttatacttctcggggggtcccacaactactccaaccaaactatacacaaggagctcaactaatggaacaaatgctggaatatgctcacggacagacttgatgagaagaattcaggattcctccacatactgacgtccggtttctgcacaagagaccgacgcattccaccacaaggctgtgccaaatataccgagtacactgacggaaacatccgaattgcgctcaaatccaatatattttagcacccagaagattattgcttatttttttttcacaagcattatccccc

SEQ ID NO: 118380 - DNA, 462 bp, Zea mays
  unsure (1)..(462): unsure at all n locations
  Clone ID: MRT4577_39450C.1
ccgggccgggnagggccatcagatccaagaagagggaagagcaccaaggaccttcggcgcgcgttcaggatccacatcttcccgagcgagttcttggttgacctcttcctcttcggaccacctccaaggctcttggtgtagcttgcacactctcaccaatgcaagacttgatgcctgatccattacatatcacaattccatcccaccaggtacttcaatggtgcggggaacacccagctgctgcaagcctataggctacaacaagcaattgcggcgagcgtcttacaacaaccaatttgccagttgcaacaacaatgcttgtgacatctaacaatacggaccatggggacggaacaacaacaacaattactaccaggagggggggcgctagacatggcgaacccttgtcgcctacttgcaatagcaagtgcttgaattaaacccacttgctctggcaaacgt

SEQ ID NO: 118381 - DNA, 308 bp, Zea mays
  Clone ID: MRT4577_39451C.1
aaaagcgaccgacttcaattacaaatgcaaattctagaccagttcatcagggggtgggggggggaaacccccaaacttttcccggggggggcgggacaaaaaaaaagggttttaaaaaccaaaaccgggttgggcaggcaaacaattttatgccagcagatcagtttttcttcttcttgaaaccgtaattattgccgccctttgggggaacctctttgtaatctttttccagggggggcaaggtctttcgggccttggaaaaatcccccttcttcatgccctttgcgacgtaccaagggacaaacccc

SEQ ID NO: 118382 - DNA, 1068 bp, Zea mays
  Clone ID: MRT4577_39452C.1
atgcaaaccacaacggcaacgaccccgctggcggacaggctgcgccgctacacgccggcgctggccagcctggcacgcgccctgtacgacgcccgcggcgcgctgcatggcaccgtgcgggccgtgcccgagggaccgccgcgcaccggcaagaccgcgcagttgaccgtcgcttgcgaccagggcgagctgcacgtccacgtcgacgccgacgccgccttcgaggcgatcgccctcgaaccggaggcagcgtgccgcgccgccgtggccagcctgtacctggccggcccgctggcggcgctggcgcgccatggcgccacgcggccggcggtacgggatgtgcgcctcgccgcgccgtccgcctcgcgcgccggcgtgctgcacctcgaatacgaccacgacggcgcccccaccggggccgccaccggggccacgacgggcgccaccgtggccggcgtgtccgccgcgctggccgccgcgctggcggagcgcatcggcccgcgcggccgcggcgtcctgaccccggcgctggcggcgctggccctgccgacccgcctgcgcctgcgcacccgccacgccacgcccgcgctgctgcgcacgctgcgtccgggcgacgtgctgctcgggtggccagcggccccgggcttcgcgccgcacgcgacgctcggccaggcgaccctgctgtggggcgccgccaacggtcacgccgtccatgcgcacgcgcgcatcgattcccgcaacgtcatcctggagaggagtccctacgccatgaaccacgatcccgacctgtccctgcgcgccgcgccggatgccgcctcctccccgctcgacgtcagcgacgtcgaactgccggtccacatcgaagtggtgacggtgaacctgccgatcgggcagatcgccgccctgcagccgggctatatcctcgcgttgccggtcgcgctggccgacgccgacatccggctcgtggcgcacggccagaccctggccttcggggagctcgtcgccatcggcgaccagctcggcctgcacatccgccgtatcgcgaacgccgatgaacgccgcgcctga

SEQ ID NO: 118383 - DNA, 347 bp, Zea mays
  Clone ID: MRT4577_39453C.1
ggacccaaaaaagaaccaggacgggttggaattttattttttatccagttccaaccccaaagtttgaaggaatttaaacgggcaacacaggaaacctaaaactgaacgttcacttaggatgggggggggtgttcaaacaatgcaaaacaaccgagccccttaggctaaaggcaagagcttaaccagggctaagggtttgggtttcaggggaacgacaatccccgaatcctttgtttggatgtgtttcaggaaaggaaacaacaggcccccccaacagtcctaatttaagtggtcattatgggcattatcggcgtccttctttttgagggggggggttccaccctttt

SEQ ID NO: 118384 - DNA, 578 bp, Zea mays
  Clone ID: MRT4577_39454C.1
gatatatcggatctctttgctgctactactacgaggagtaccttctttcctcccactctcatctgatcttcctgggcggcacctgttccggacgagaacgaatgagacagggatcaccgtttatctgccggtatccgacagaggagatagccaacactccagtggcggacctctcccctgagttcgatgtctgcaaataccgtccaatcgtctgcgtccagcgcatggaactttggtcgaaagtgaatgacagaacagctgagcggatgtagttcactggacctatgagaagaagaggggatgaaactctcaagagtgaaaggtatggtagaaataaatattggctgaacaaactgttgtgactgctattatatggatgatgacaaggactaccttattaaactctgatagatgactcaatgagcatggagaaggagcatcatgttgaattgttgtggtggtgaacttgctctataatgatctctactcctgggaagggagcgaactaacgcaaatgctaaacagataccagcaaagacatgcttctcgaacatccttcaggactgagacatgccagc

SEQ ID NO: 118385 - DNA, 169 bp, Zea mays
  Clone ID: MRT4577_39455C.1
gaaaggtgaaacacaccaatggccagctgtcctagggattgctcttattgctatggttgaagaattaggagctgaaatggctgtacgttcacttgagcgtcttctgcagtatggcgagcaaaatataagacgggcagtccccttttgctcttggtatatctctgcaata

SEQ ID NO: 118386 - DNA, 836 bp, Zea mays
  Clone ID: MRT4577_39456C.1
tccctctccccccctccccctccgcctccgcctatcgaactcgtcgagtgccgcgaccgacgcacgcgcgcgcggcggcgagatgaaggtctccgtgaagacgctcaagggctccaaattcgagatcgaagtgaaccccgcggacaaggtttctgatgtaaagaagctcattgagagttcacaagggcagaatgtgtacccagctgatcaacaaatgctcatttaccaagggtcagttcttaaggatgagactacgttggaggaaaacaaagttgttgaaaacaactttcttgtgataatgcttagacagaataaaggctcatcaagtgcagctccagctaaatccaaggaaccctcaaatcaggcaccccctactcagacagtgcctgctactcctgcctctcaagcaccagccacaccagcacctcaagcagtggctgcgccagcacctattgtacctgtcagtgctcctggtccagctgccaccgcctccccagctcctgctgttgctgtctccactgaagcagaaacttatggtcaggctgcttcaaaccttgtcgcgggaggcaccctagaggcaacaattcagtcaattcttgaaatgggtggtggaacatgggacagagacactgtgctgcgtgccctacgtgctgcattcaacaacccggagcgggctgttgagtatttatatttctggtattcctgagccgatggagattcctgcaccaccaccaagtgcccagccagctgatcctgcccaggcttcacaagcagctcaacctgcagttgcctcttctggtcctaatgctagccccttggacctcttccctcaagcc

SEQ ID NO: 118387 - DNA, 388 bp, Zea mays
  Clone ID: MRT4577_39457C.1
acaaacgtttatactttatatactcgtaaataaactagcagcctcaatggagaagaagagggtggccgtcgtcggagccggcgtgagcgggctgacggcgtgcaagcacctgctggagcgcggctgccggccggccgtcttcgaggcggacaagctcctgggcggcgtgtgggcgcgcgccccagactgcacgtcgctgcagtcggaacggcccatgtaccagttctccgacttcccttggccggagtccgtgaaggaggtgttcccggaccgccgccaggtcgccgactaccttgacgcctatgcccgtcactttggcgtgctcgactgcgtcaggtttggccgccgggtggtcgggatggagtatgtgggcgtcggtgaggaggag

SEQ ID NO: 118388 - DNA, 702 bp, Zea mays
  unsure (1)..(702): unsure at all n locations
  Clone ID: MRT4577_39458C.1
gtacctcnnncgaggccggccggggtctcnnctcgaggtgcggggtacacanttcggccaggatatctcagaagccttcaaccataacaacggcttgaccttgatcgcacgagctcatcagctggttatggagggttacaactggtctcaagaccgtaatgtggttaccattttctcagcacccaactactgctaccgatgcggtaaccaagccgctattatggaaattgacgagcacttgaagtacaccttcctgcaatttgacccttgccctagagccggcgagcctatggtctcaagacggactcccgattacttcctctaatctcgtcacgtatacccacgtctcaccaagctcgagccagctaatgtcgaactgtcatatttggggcaactgcgccagcctcaaagacgttgcagctcggccttgtacgattctacacgacgaaccttccaaacaaactaaaactttgtggcgcatgaattgtacggatatagcatctttgctcatagcgagttcccaaacgttgcggcaaaggcacgatagcatttgggcggctatactttgctggggaagggtttggtagaccacgttgcggcgctccgcctcaggactgcttagatacgcatatttgagttccgcgctgtaagagaaaagaacacgcatgcatgaccaaaaaaaaaaaaaaaaaacccgcggcc

SEQ ID NO: 118389 - DNA, 298 bp, Zea mays
  Clone ID: MRT4577_39459C.1
ggaacaaactaaaacgacttcccatttggaactggtggaatacaaaaaaaaagacaatgttttgcaaaggccttgggggagaacagtacaattaggacttgctgaattacaaatgtgaactttaaaaaagggtaaaaggccccctcaaaaaaatttacccacggaaaaacaattttgcccacaaacgacattgaccgggcattggtgggctcccctttgaactcaagccaagggcttatcgggggggcaacttttggttttgggtaccggcctttcttggtcttggacttggaggaaa

SEQ ID NO: 118390 - DNA, 147 bp, Zea mays
  Clone ID: MRT4577_3945C.1
atcatacatgagctgtgagacgggccggcaccagagcctgcagtgccgcagccctgaagaacactgcctggatgtggtgacccactggatccaggaaggtgaagaagggactccaaaggattaccgccacctccgtggctgtggcta

SEQ ID NO: 118391 - DNA, 151 bp, Zea mays
  Clone ID: MRT4577_39460C.1
gaaaacacataagcctcggcagccttgagcttgcagagataggcaacgagtgcatactctacaagtgcagacatgggcacaagtttagcagaaacccaagacgtaacaggtcacccacaaaaaactggcggaagaacaccgaacgatgcac

SEQ ID NO: 118392 - DNA, 196 bp, Zea mays
  Clone ID: MRT4577_39461C.1
atataagtggagtatttattattattttttggtttttcataaaaccatacaagatatttttacagttactcgtgctcgaccaaaccatacttgctcgggggcccccagggaaaaataacgcgggtgggcacaatcgcgtcgtgggcaaaacaatactattcccttccgggaatatacttgaacaaaaagggaaaaa

SEQ ID NO: 118393 - DNA, 178 bp, Zea mays
  unsure (1)..(178): unsure at all n locations
  Clone ID: MRT4577_39462C.1
aaaaannaggtttttttttaaaaatgttacagtatatccaatttggcaactgcggggcagaaaactgtatcgatgacaatttccaggggcacatagaaccaaagaaggacagttatggacataaaaggtacacatgtcaacatgcccacgggaatgtccaggtttcaaggatatttca

SEQ ID NO: 118394 - DNA, 2201 bp, Zea mays
  Clone ID: MRT4577_39463C.1
cttcctcatccgtcccatcgaaccgcaaaccctaacctttcgattgccgaatggtacagctcgctcctttatgtctcacgttcgtgttaaactgcagctgtcctgaccaatctcgagcggtttttgcagatggcgaggggccgccgcggcccgggtggacgggggaggttcggcggcggcccgctgggcgacgagcggccagtccgtcacggcgtccgcgtcgaggagaacccgtacttcccattaccgcgtcgggcgtcgggctggggagtggcaccgccgtcgcggcacctgtgggtgggtggcctggcgcccagcgtcacggcgtccgacctgtcggagctgttcctccggtgcggcgacgtcgagggtgttgcccgcgaacccggccggaacttcgcgttcgtgagcttcctgcgggagggggacgctgtggccgcggtgcgggagctccagggggctcgcctggctggggcgcctgttaggatcgagttttccaagggggtcagtgttgaacatcctctgttcattatatgtttatttaatttgactccaagcaattatcggtgcggtgttcttctcttatcttgtgtacaaaacctaagcctttcaagaaaggctgagtatcaacaattaaatttagggttcacagcgaaaaaaaaaaaaaaaaccaccttcagatttctcagagcaagtactgagagtgcctggaaatgtcagcatatctggagtcattctgaggtttcagcagtcaaatccagattacagctcaccaaatcgcaaaccattggatagagctcacccatcttctgcaagtaattttaacactgatgtaagaaattgtgaagatctgcatgcactgagaaggctcaatccttcagatatcagcacattccctcagggtccagattatgtctgctcatcaggtggaagctataccccagcaaatgcagattttattccgccctataagccagagagtgctcctccatatgtcgtccctcaatcaccgcaagaaaggccgccagcggagctccctatgggtattgcacaaggccaacaccagcaactcccaaacaggctgccctcaggatggtccaataacctggataatccaaatccaaatctaggttctggtaacttcagtttggcacagggtgcaatctctaacaggacacaggatccgtacacatttgctcctggagtagtatcaactgggacagcttcagggtatgcaccaggtgaagcatccaacagcatgtcctgggcttccatgcaatacaactcacagcaggtagctagatctgatcaacctactattccagtatcactgccacctgatcaacttgcacagctagctgcccttcttgcacgacaaaaccaacctagaaaagttggtttgcctgtggacagctcaaacaatctgtctggattcatacagagtcccaatcctcatggacatgctacaatgatgccaggcaactctggctccatccctatccagaactcactgccacctgttccatctatgcaacaattacatgccaatgtgccagtgtcaccaataggctcgctacctgcaaatccattcaatgtgccgaccagtgctcctgtactttgtaacagcacttcgcctatgctgcccagtcatgctttggtcaacccagctcattcttccatgccaatgagaccgttcattcctccacttcctgaaggtcctccaccctttcagcagcaaacatcaagtgctgtcacagtgcagcctttaggtccttctagccagcagtctagccaacaactactggctcaggaccttgatggagatcctcaaaagcgccttcaagcaacactgcaactggcagcaaccctgcttaagcagatacaaaatcaatcaaatcctggtggccagaaataaatataaggtattggtaaatgtctagctgcaaggatcatcatatggtgccatcctgaggagctttaaacttactgttgtggttttataccatcacctcctgtgatttgaatgtttatgatgagttctaagacgctttggctttcttatgtacatggttttttgctatgcatccagatatacattggctagaaaacgttgaaaggtcttttaagttggaatggagggagttagctgttgcctgcatttgtttgtttgcctggcttgttccaagaggtatgatggtatg

SEQ ID NO: 118395 - DNA, 536 bp, Zea mays
  Clone ID: MRT4577_39464C.1
attcggctcgaggtagattcttgaacttcgttccattatctaaaaaatcacatgcttttggttgacattgctgaaacaagcagggtgtttgatttgtagtgttgagatattggagtgaaccaaacctatagggtttcattttcctggattagctgcattttcccaattcttgaagtaatggcggcacaatgcatataaatgaactagggatgacatatcggcacaaattgtcctcataacttaacagatcgatcacaaagtttcttcaaaaaatctttgaattctacacacaaagacattagacccctttgtttcgttggaattgaattccattctattaatcataatttagacataaaataattaagttaatatatttgtatatgtagtatatttgtatattatgctaaatcatatgagagagattatatactacacttatgctatacagaagcaagtagaacagtgtcttataagttgaacattagaaaaatagcatgtaaatatatcgaatcaattttcttctctcaccctat

SEQ ID NO: 118396 - DNA, 749 bp, Zea mays
  Clone ID: MRT4577_39465C.1
aaaagttggtttgcctgtggacagctcaaacaatctgtctggattcatacagagtcccaatcctcatggacatgctacaatgatgccaggcaactctggctccatccctatccagaactcactgccacctgttccatctatgcaacaattacatgccaatgtgccagtgtcaccaataggctcgctacctgcaaatccattcaatgtgccgaccagtgctcctgtactttgtaacagcacttcgcctatgctgcccagtcatgctttggtcaacccagctcattcttccatgccaatgagaccgttcattcctccacttcctgaaggtcctccaccctttcagcagcaaacatcaagtgctgtcacagtgcagcctttagatccttctagccagcaatctagccaacaactactggctcaggaccttgatggagatcctcaaaaacgccttcaagcaacactgcaactggcagcaaccctgcttaagcagatacaaaatcaatcaaatcctggtggccagaaataaatataaggtattggtaaatgtctagctgcaaggatcatcatatggtgccatcctgaggagctttaaacttactgttgtggttttataccatcacctcctgtgatttgaatgtttatgatgagtggtttccttgcaaactacaatctccattccgaattctaagacgttttggctttcttatgtacatggttttttgctatgcatccagatatacattggctag

SEQ ID NO: 118397 - DNA, 551 bp, Zea mays
  Clone ID: MRT4577_39466C.1
cttcctcatccgtcccatcgaaccgcaaaccctaacctttcgattgccgccgcccgccgctcgctgctgcccgccgctcgccgcggccaatgatggcgaggggccgccgcggcccgggtggacgggggaggttcggcggcggcccgctgggcgacgagcggccagtccgtcacggcgtccgcgtcgaggagaacccgtacttcccattaccgcgtcgggcgtcgggctggggagtggcaccgccgtcgcggcacctgtgggtgggtggcctggcgcccagcgtcacggcgtccgacctgtcggagctgttcctccggtgcggcgacgtcgagggtgttgcccgcgaacccggccggaacttcgcgttcgtgagcttcctgcgggagggggacgctgtggccgcggtgcgggagctccagggggctcgcctggctggggcgcctgttaggatcgagttttccaagggggtcagtgttgaacatcctctgttcattatatgtttatttaatttgactccaagcaattatcggtgcggtgttcttctccaaaaa

SEQ ID NO: 118398 - DNA, 485 bp, Zea mays
  Clone ID: MRT4577_39467C.1
ccaaaaaaacattcggccaattaaggagggggggaagcagcttttccagggggccaacccaggggccccagaccggaaaaaattgggggcccaacccaagggggggaaattagccaaattaaccctgaaaacatacgggaaaaccaaaactccgaccccattacgcgttttgggggggtaaaaaacccaccaaacccgaggccccaaactcccacattttcaagacccaaaaactggaaaaataaacaagcttaaaaaaaagggcccaaagtttttcaccaatgcaaattccacggcccatgggcctatgaacaaaggggggggcccctgggcaaaaccccctaaacctggttggcccccccctggggaatcggaaaaatttgcctcaagagggaaaaaaggggttatttctgcatttggggggaaaacatcggccaggtcataaaaaaagaaaacttggggggcttttggtaaaaaaaacaaaa

SEQ ID NO: 118399 - DNA, 1621 bp, Zea mays
  unsure (1)..(1621): unsure at all n locations
  Clone ID: MRT4577_39468C.1
aattcggcacgaggccgtcccatcgaaccgcaaaccctaacctttcgattgccgccgcccgccgctcgctgctgcccgccgctcgccgcggccaatgatggcgaggggccgccgcggcccgggtggacgggggaggttcggcggcggcccgctgggcgacgagcggccagtccgtcacggcgtccgcgtcgaggagaacccgtacttcccattaccgcgtcgggcgtcgggctggggagtggcaccgccgtcgcggcacctgtgggtgggtggcctggcgcccagcgtcacggcgtccgacctgtcggagctgttcctccggtgcggcgacgtcgagggtgttgcccgcgaacccggccggaacttcgcgttcgtgagcttcctgcgggagggggacgctgtggccgcggtgcgggagctccagggggctcgcctggctggggcgcctgttaggatcgagttttccaagggggataaggcttcaggtagctcaatggatgacagatatatgcaacgtgctgatgagcggcattctattgaacgtgggagaaaacggcaaccgagtcctgaaaaccaatagataagcataaaagaaataggtcgacagagctatgacgtcgcatgcacgcgtacgtaagctcggaattcggctcgaggagactcttctgtgggaagccttttctccttttgggaaggttctcagggtaacaacattcccaggccgaacatatgcatttgtccagtacactagtattgcagcagcctgcagagcaaaagaagcacttcagggaaaacttttcaataatccacgagtaagcatatgcttttctcgaaatgaaggtgctgtgccagaacttgggaaacaatcatttgttgcccaatatcatccccaacctagtgcccgacctgtcgtcggagaccaagattatgaagactttcctagggctaggccttttgatagtcctccaagaaattttcgcatgtcaccaccacattttgttcctaatagtttgccaagagatgctgatgatgtgggcttcagcaagggtaattattttgagcaggaaactggaatagagcttggccgtgtgtctaatattgagccttttagaacgcgggagctgggtcaagaaagaaggcttcctgaggagcatgagccccatagacaaagccctactgctaggagtgatgcaccatggaagccatggaacaacattccttttgacagacctcggagacccttaccattcgaagattcttgggacgttgaagacaagtcatatcttatttcaaagaagctgaagggtgctcaagtgcatgatactgaacttcctgaatatcttttctccggatttgatcgaggaaaagtttaccctgagtaccaaaggaggccccatcatgatctttcagaagatggtttacagtctagaacctcttcgtctacggatttgcatggtagacatcatgtgcatcctttaaagaatataactccacttacaaataaacaggaaccatggcgtgctcaagagagttttgataggcgtttagggaaaatggatagatctactcctgactataatgaacctgctncttaggatgaatggaaatggaatgggtacat

SEQ ID NO: 118400 - DNA, 721 bp, Zea mays
  Clone ID: MRT4577_39469C.1
ggggaccctcgggccggccctacctaactacacacgctctagcggcatccagcaggagctggctgcggatcccgcagacagcgccaagaccgtgcgcaagccggtcttcaccaccttcaaccagctgcgccaccagatgcacggccacactcttgccgttcgcgtcgtctccgcccgcaccatcctcgacaaatcttccatgcacattggtcgcacccgcaccgccaagtgcctcgtcggatacaacaccggcaccgtcctcatcacacccgcaacaattaggcaaatttgtcatagatacactcacggtgtgctggtgtgtatgtgtggaggaagagcctgacggaggctgagggagaggaatcagtagagcaaatcagcaagatgagacagatgtgtagctgctggtatttctccactatcgcgacctcactgctcaagcatggcctatatagagtgacgagaacaccatggaacggagttgtgctgttgtggtgcggagtaggagcgtctaagcgaggagagaatcacaggttaacaggtccacttcaaagcctggccatcatcaatagtcgaacgggtgtaaatggtaaggatattatctgttcgtattcgaaatcgatccgtttaagagggctgaaatccgatccgtattcgagtccggttattcagtactcgatccatattcgtatactctaagttggatatttaagatgtcgat

SEQ ID NO: 118401 - DNA, 305 bp, Zea mays
  Clone ID: MRT4577_3946C.1
ttcactggtaatgtctccatccgaggacggatcctgtctggtgttgtgacgaagatgaagatgcagaggaccattgtcatccgccgggactatctccattatatccgaaagtacaaccgctttgagaagcgtcacaagaacatgtctgtgcacctgtccccctgtttcagggacgtccagattggcgacattgtcactgttggagagtgcaggcctctgagcaagactgttcgattcaatgtgctcaaggtcaccaaggctgctggcaccaagaagcagttccagaagttctgaagggggactgt

SEQ ID NO: 118402 - DNA, 572 bp, Zea mays
  Clone ID: MRT4577_39470C.1
caagtacacacagcctgcccctcctcgccggctcccggctccaggggtcgcccaacacccccgcgtcgcgcctgttccgcctcgccacgactcgccgccgaggccggcccgcggccgcgttggcgggcggcggccgccagcgtaccctcctgcccgtccaccgagacgtcaagcggatgaatactcgggcggatgagtgggaggagtcagactacgcaaccgagggcgacgacatcgaactctaccagcagaatgaaggcggggagacagagtgggatcaggggcagcaacctggggcgcggattcacaacgctcaccaactgccccggtcgggtcgcacaatcgggacaccgaggaggaacagagaggcagggggtggagggcaacggcgccagcggccgggggaagagaagggggccagggacaacatattcgagcccattcaatccttcaacgcaaaagggaaaaagtgaaccgcaagtacacacaacctgctcggccaaggcgaccgccctcgcaagcagccggcggtgtcgcatcgtagaaaggctgtcgtgtttgatgacagcgac

SEQ ID NO: 118403 - DNA, 419 bp, Zea mays
  unsure (1)..(419): unsure at all n locations
  Clone ID: MRT4577_39471C.1
tacgcccgcaggtacccgtgtccggtaattctccggtgtcgatcccacgtcgtctcggtcccgcctctgacacctctccgncgtcccccgcttcgcagtaccccgtgaggtccgtccatcctttcgtcctctcccgtcgcggtcggctggtgcgccgtcacaggcccgaggttcgtagaaatctgtcttccccaatctacctccatccttctctcttccaagtccacgtggctgtacccgttgatgggtacatctatcgtgcgccgcaccccttggtcgcccgtccgcaggccctttggtccgtgatagatagccttgtctgtcccgtcgcccggcatgggcccgtccgatgcttcgggatagggccccgggtggagtggggtgcgtgccctcgacttgaacatagaatcgtccatcga

SEQ ID NO: 118404 - DNA, 1017 bp, Zea mays
  Clone ID: MRT4577_39472C.1
gttctcggccgtgctgcctgtcaaggcccggccggcggcgaggagcacggcggtggcccgcgtccctgccacaaggaggagcgtccgtaccgccgctgccgccgtcgtcgtcgcggagcctgcggaggtcgactacagctcgagcttctcggtgttcccgatggaggcctgcgacctgctcggcggcgacgcgtgcatcgggaagatgttcccggaggccaagctcgccgcggcggcgccggaggcgagcaggagggtggacgcggtggagagggactacctgtcctacgacgggccaaaaacggtgttcccgggcgaggcgtgcgacgacctcggcggcgagttctgcgaggcgccgtacatggacggcgtctccagggacgcctgaagcctcaagacctgacctgatccatccatgtctgtctgtccagacttcacaaacaaaattggcctcactgtcgagtagatggatgatctcatgatccgttgagacaccaaagacataccatatactgttgattttctccaaattttcccactgggtttttctggagtattacacagtgtattatcacaaaccacctttttttgcttacaggtttcaagggagaatatacataatggacaactgcttaagggggagtgttacgaaaagtaagcagttgttgactgcttttctaaccggcatttctccaagggacgtgcccctgcacgatccccttgtacggacgtgtcttttggccactcctttagtgtccctttcctttgtataaatatcaaaagcaataaaggatatggtacctctttttcattctctcgcacagcagtttctattcatcacaatgtgtaaagcatatacgcaggccctctgcccactggtgccccagaatctgattcccagagagcacatcgatggagcccacacgggaatgaatcactcgagtgaagaagtggccataaaagaatcgtgctctcaagtagtctcaactctcaagccacagctcgcacgctaatccc

SEQ ID NO: 118405 - DNA, 367 bp, Zea mays
  Clone ID: MRT4577_39473C.1
gtggactctagaggagcgcgccagagcgtccactacgggcgttggaacaacatgagttggaattgttctttcagccccagattaattggcgtaaaaaaactattgaggccatggaggcgtttatccgttggcaacatccccaaaagggcctactgcccccgggacagtttttgccgtggagcgaccaaacggaatttatggtgcccctcactcggtggattttagaaactgcctgtcaacaaaatgtcctgtggcaacagcaattgcaaactccttttttagtttccgttaatatttctgaaaagcagttttatcatcctttacttaaaaatatggtcatggaggcgatccccgggtaccgagctcg

SEQ ID NO: 118406 - DNA, 299 bp, Zea mays
  Clone ID: MRT4577_39474C.1
aaacgggaaatcggatttactagctttgtcccagggaatgggacaaaaacccccccctggggaaacgggaatttttacccaaggcaaaagggggggtggcttttttggaaaccccactggggaaaggggggggcattcactataagggggggggcccaaaaaacccagggggcccgaaaaaggcctaaaaaaaaacacaggcttttgttttttgggggaaaaaaccctccggtttttacttttttgaggcacgggctccagggggtttttttccgccaaacctttgttttccaaagccg

SEQ ID NO: 118407 - DNA, 402 bp, Zea mays
  Clone ID: MRT4577_39475C.1
gggccacaaaaaagctttttggggagattcaggccaaaagggtttttcaaattaaccctcccccaccataacagggggcatttgggaaactccggggccggggttaaaaaggcaacggggtcaatactaaaatataagggggggggaaattaatttttttccccgccctcgttctcaaaaatggtgaagtaggggggctcaaaaacgtttcgggccttggggggagaaaccacccgtagccaatcccgcacggggggctttttaaaggacttttggggaaaagactttagggcccttttggaaaaggggcccccaaaggggacggggaccttggtcttttcccgaaaaatggggacggagtcccccagggtgccaaccttggccgcggccccaccggttcgg

SEQ ID NO: 118408 - DNA, 1818 bp, Zea mays
  Clone ID: MRT4577_39476C.1
cacttcttctactcaggtgcttttgaatggctcgcctggtaatcatatttttcatcggagaggtcttcgccagggagatcctctttctcccatgttatttgtgatggttatggatgtgcttagcagcttgttccgggttgctgaaaatagaggcttgttgcagggccttgggggagctgatgttcgcagtcgagtctccatctatgcggatgatgtggtccttttcataaagccaattgaagcagatctgaattgtgctaagataatactaaactgttttggttcggcttctggtctggtaaccaatatgctcaagagcagtgctattccaattagatgtgatggtcagcaggtgcttgctggttgcagtgtgctgcattgcagtcccgctgcgtttccttgcaggtatctggggctgcccatttctgataaaaaattgaggaaatgtgaccttaagttatggattgagaagattgcagatcgactgcctaactggaaggctcggttgctcaacctggctgggcggactgcgttggtgaagtttgttctatcggccattccgacttatcttcttattgcaatcaatgtccctcggtgggttattaaatcaattgataaaattcggcgaggatttctttggagaggaagaaaggaggttaatggtggtagctgtcttgttccatgggaagttgtcacgaggcctctgaggcttggtgggcttgggatccctaaccttaagctcaaaagctgggcattgcaggcaaaatggttatggttggaaaagacggatcagagcagaccttggcgtgggttgtccctcccagtgcaacgtcaggttagacagttctttgatttgtcggtttttaccattttagggaatggggctactactctcttctggtcggatagatggattcatgagaatactatccaggacattgcccctgaggtggtgggtatggttggccgcaaggcgtattcttccagaacggtggcacaggctctggataattggcattgggtcagtgatattcgtggtgctctttccttgagtgggttgcagcaatatctgttgttatgggatactttgggggacgttaggctctctcatgatgctgacagacatgtttggatgcactcatcttctggtatgttctcctcaaagttttgctataaggcttttttcatgggttcaatttcgtttgagccatggaaacgtttgtggaaatcctgggctcccccaaaatgcaagttcttcctctggctggcgataaggaataagtgttggactgctgatagactaaggaggagagggctgcaacatccggctgtttgtgttctttgtgaccaagagcaggaaacagtgcaacatcttttgtgtacttgcagttttgccaggcaattttggcatgctattcttgttcccttgtgtcttggggatctcattcctgctgttgatgaaatctcatttgctgattggtggaggaaggcgcttaagaaggtgcccaaattcagaaagaaaggcttcaacagtctcattattttggggtcttggtgcatatggctgactagaaacaaagctgtttttgatggtgtaaacccttccatgtgttttgttaaaagcttatttctgaatgagttaagttgttgggagagggctggggctaagcagctagcaagttttggtcttcctgctattatgagtagggtctagagtgtggtcaagtgttctgtttgccctacgggcattgtactttggtcctcttggaccttttcctttcttaatataatgacgtgcagtcctcctgcgcgttcgag

SEQ ID NO: 118409 - DNA, 553 bp, Zea mays
  Clone ID: MRT4577_39477C.1
aagcagcgagctatcctggtggatgagatatggcatgctgctggagattctgggtcagatattgattggtatgtgaaacgtacagtgcttggtggtatctactcaacctcagaggtgtatatgttgacagacaattctccagagttccgtgatacttggacgtttgtgaaccgcagaataaaggatgctcttgatcttcagaaaaccttccaagaggccgcatacctcgctgaagccgtgggagcaggcatgggcggccccgtgcagggtgttctcaacagggtcttccagaaccgtagtggatgaactttttttttctcaaacacgtagtggatggactagttccgtcttttgcaatctgcacaggataatgcccattttcccgttgaccaactggggtatgtttataataaagcaaatggtgatgtggttgagatgcatcccgttagggtagaaagtgacgatttgagctgcagatttttcaaatgaatgctttcgttgcggagtccagtccccgggcatgggtgcaaacccgtggggttttttttacccc

SEQ ID NO: 118410 - DNA, 293 bp, Zea mays
  Clone ID: MRT4577_39478C.1
cccacgcgtccggcgcgctcgacactttctctagctagttgctctactagatgtcgggtatagagctgcctgcaatctgccgctgacaagggactctctgaagcgactatgatgtcgtgcgctcctgtctttctgtcggcggtcgtggcctggcttgatcaggctggtacgcgcattgcggcaatcgctaccaggatatagagatgtcctggggcgactgtcgcggcaaggtagtttacggcgggcttgggctggaccttacgctggttctcactaccgtctccgtgttccag

SEQ ID NO: 118411 - DNA, 303 bp, Zea mays
  unsure (1)..(303): unsure at all n locations
  Clone ID: MRT4577_39479C.1
cgcctgcantaccggtcctaaatttccattgggaggggcgcgtccttcacggtgcacacttgtgtagcccgcctccgagaattctcctgcctctgcatctggtcggggcggaaatgatttggatggtggctatattgtgtaagctctatttatggtgggctcgctgagacggggattttgcttctcagttatctagctatgggatgtactggtggcttggccctgggtattatatgggacactggaaccaggaatagtaatcttgaactgggcggtaaatgggcaaaaaaaaaaaacaattaa

SEQ ID NO: 118412 - DNA, 384 bp, Zea mays
  Clone ID: MRT4577_3947C.1
aaggacgcccaaacccccccaaaaatgggccccaaattaaaatggccaaaattagggggggaaaaacccaggaccccccctttaaagtcccagggaaaaaaaggtttcgggtggtggaaataaaaaactttttttggttggaaaaaaaaaaaaaaaaaaaaaaaagccttgggccccccccggggccgggggggggcccccccccaggggggggccccccccccatcaaaatcattggggggggcaaattttttccaggacccccccaaaaataaggggccaaaaaaaaacctttcgggggggggcaacctttaaatgggaaaaaaccccctgttaaaccccaaaggggttttaccctaaaaaggttaaaactttttttttagg

SEQ ID NO: 118413 - DNA, 1415 bp, Zea mays
  Clone ID: MRT4577_39480C.1
agaaattcacaccgtccgtccgtccgtccgtcccgttcctcttctcgcaggttggacccgtcagtcacacctccgaagtccgaacctccctgccccaacacaatggcctcctccctcgccgcgcgccgcctcctctcccgcgcagccgccgtgcgccgtttccccgtccccttcgcctccgccccagcccccgcgatggctccccgcagtttctccgccgacgcgggaccgcctccgccgctcccgccaccgccgctgcagcccgtcgtcgagccgcccacgtcggagggcgcgggtgcctcgtcctcctccaccaccgctggtgccggaggggcccacaggtcgtcgccgggagccgcggcgggggcgcggcgccagggtggtgcgggctacgaggaggagcaggagaaggtcctccgcgcgtcgctgctccacgtgccgcgcatggggtggagcgagtcggccatggtcgcgggggcgagggacgttggcgtgtcccctgccatcgtgggcgcatttccaaggaaggaggccgcccttgtggagtttttcatggatgactgcctccaacaactgatggatcgaattgatgctggagaaggagagcagttgaagaacttgatactgagtgagagactctcaaaacttgttcggatgaggctggaaatgcaggcaccttatatatctaagtggcctcaagcactgagtatccagtctcaaccagcaaacgtctcaacaagcttgaagcagcgagctatcctggtggatgagatatggcatgctgctggagattctgggtcagatattgattggtatgtgaaacgtacagtgcttggtggtatctactcaacatcagaggtgtatatgttgacagacaattctccagagttccgtgatacttggacgtttgtgaaccgcagaataaaggatgctcttgatcttcagaaaaccttccaagaggccgcatacctcgctgaagccgtgggagcaggcatgggcggcaccgtgcagggtgttctcaacagggtcttccagaaccgtagtggatgaactttctttttctcaaacacgtaatggatggactaattccgtcttttgcaagctgcacaggataatgcacattttcccgttgaccaactggcgtatgtttataataaagcaaatggtgatgtggttgagatgcatcacgttagggtaggaagtgacgatgtgtatgctggtggtgttgttgagcttcagatttttcaaatgaatgctttcgtcgcggagcaattcacaattgcgattcgaatccactcctccaaatcgacttccatttttgcgtgtcttggtacttaatttagcatataatatggaagatatttactgttcgtgtatggctgtattctgtagccgcgcatggggtggagcgagtc

SEQ ID NO: 118414 - DNA, 984 bp, Zea mays
  Clone ID: MRT4577_39481C.1
cgtcctcccagcgtccgcccagcgtccgtaagattgaggccggcggcctccgaaataaaaaagatcctgcaagaaaaaaaaaagaaagatctagggcgagagaggaagagggagggagggaggaaaaagaataacctagcaagcaagcttgtgagatcgatcgtggtcaagattatggatccggtcacggcatccatacacggtcattatctccctccgccattcaacacccgcgacttccaccaccatctccagcagcagcagcagcaccaccaccaccagcagcacctgcagctcaagaccgaggacgaccacggcggcggcgcgccagggctgttcggcgaccgcggcacgcagggcgaccacgagaacaatgacgagaacagtggaaacagcaacgggagcggcggcggcgagctggcgctggttcccccgtctggtggcggcgggcccgagggcggggatgccacccctcgccgcccgagaggccggccggcggggtccaagaacaagccgaagccgcccatcatcatcacccgggacagcgccaacacgctgcggacgcacgtgatggaggtggccggtggctgcgacatctcggagagcgtgacggccttcgcgcggcgcaggcagcgcggggtgtgcgtgctgagcggcgcgggcaccgtgaccaacgtcaccctgcggcagccggcctcgcagggcgcggtggtggcgctgcacggccggttcgagatcctctccctctccggctccttcctcccgccgcccgcgccgcccgaggccacgggcctcaccgtctacctcgccggcggccagggccaggtggtcgggggcagcgtcgtcggcgcgctcacggcggctgggcccgtcgtggtaatggccgcctccttcgccaacgcggtgtacgagaggctgccgctggaggacgacgacttgctcgctgcccatcaagcgccgcaggcgcaggccgacggtgtcctc

SEQ ID NO: 118415 - DNA, 418 bp, Zea mays
  Clone ID: MRT4577_39482C.1
aggcacaaaaacagggcccacgggttaactattccgggaacgacaggggtcttacacactgggatcaccggaaaaaaaaaagcaggggaggctgggcacattacagcaaaaagaggggcccctatacggggggaagactataagcccccaagcttttttggaagggccacgacgaccccacgttttggataaggggggtcacgaggggcaggacagcatgcccaccccagggctggatgcccaagcggggggcaaccgggcaaatttttccattcccggggggtcggaatacggattatgcattaccctaagcacccggggaaccccctcgaaaacgccttgctcaactacctcgaaagcaaactggcaaaaataggtgcggaaaataaactttggattaacagaatcatcgggggtt

SEQ ID NO: 118416 - DNA, 385 bp, Zea mays
  Clone ID: MRT4577_39483C.1
atgcgtattggtctgattggaacacgtggatcagtattcgcgttgggaacgatatgtcaccagacgggatctgcgaatgtgggtgggaagtgtagcatgatcatctaaaatattcaggttcaattggtcgcttctttgaaatcacattggctatacggagatgcataccccagtatgggctcaagtataacttacatgtctgacatcgcacagccttctcggaatatcaaagtcgtcgcctgatcctattcacgccaataaacagtggtcaagaactctgttgattgaaatccattcatttatacctactactgcctatagtctggcgattgatcaagtattcgatattcgttattttcatccataccgtgactaccgttgtaag

SEQ ID NO: 118417 - DNA, 420 bp, Zea mays
  unsure (1)..(420): unsure at all n locations
  Clone ID: MRT4577_39484C.1
gcccatgnngccatggccacgccaagcctccgccgccacgccgcccacctgctnnggccgccgcctggnngcgccggcggcgaagccgcggcagnctgagctcgcagctcgcgctgccgtcgtcgtcctcccgcgggccggccccgctccgcgcgtccaccgaggaggcggtggaggcgcccaagggggtgggggccccgcagctggaccccagcacgccgtccccgatcttcggcggcngcccgggcgggctgctccgcnnggcgcnggtggnggagttcttcgtcctcncgtggtcgtcccccatggtgccggtgttcgtgatgcccaccggcggcgccgccttcntgcgggtgggccccttcctcttgttgctggcgcgcntggtgctgtgcctggcgctcggctcctggttgcgct

SEQ ID NO: 118418 - DNA, 289 bp, Zea mays
  Clone ID: MRT4577_39485C.1
gaccacgcctccgccagcagcaacatgtaaagtaacattcttcagcaacattaaatcaacaatggcctaccgagatattttgcatgcttatactcctcactctttccacacgccctgctaacactaccatttatgataacttctcacaaccacctataccttcacttcttccacaataccttccatcaaccacctatcaacactctgaaaacccacccacttaaccatacaatctcaaacacgcaaacggatcaaacaacttacctttatcaccccttatctctaaaca

SEQ ID NO: 118419 - DNA, 1259 bp, Zea mays
  Clone ID: MRT4577_39486C.1
gtccgtattcaggaaaggttttacgctttcattaagggtgcacctgagactatccaagagagattagtcgatttacctgctgcatatgtggagacatataagaaatacacacggcaaggttctcgggtcttggctcttgcatacaaattgcttcctgagatgcctgttagtgaagctagaagtttggaaagggatcaagtagagagcgacctaacatttgctggctttgcggtcttcaactgccctataaggggtgactctggtgctgttttacaagaactcagacaatcttcccatgacttggtcatgatcaccggagaccaagcgttgactgcctgtcatgttgctagccaagtacatatatcttccaaacctgttttgatcttgacacggataaagactggcggttttgagtgggtttcgccagatgaaactgatagagctccatacagtgctgtggaggttgcagtgttatcagaatctcatgacctttgtattaatggggactgttttgaaatgctacaaagtactgaggctgttctccaggttatcccttatgtgaaggttttttcacgtgttgctccagaacaaaaagaacttgtactaactacattcaaaagtgttgggagggggacacttgatgtgtggagatggaaccaatgatgttggtgcactgaagcaggcacatgtcggcgttgctcttttgaatgctgaaccagttcagaaagtggattcaaaatctaaagctgaaaataaatctgggaaattgaaaaacaagaagcctgctaatgaagcatcatcacaagtgactccggtagctaatagttctggtaaagcatccagcagcctttccttgactgctgctgagaggcagcgagaaaagctgcagaaattgttggatgaaatgaatgatgaaagtgatggtcgctcagcaccaattgttaagcttggtgatgcttctatggcttcacctttcacagcaaagcatgcatctgttgcccctactcttgacatcatccgtcaggggagaagcaccctagtcactacacttcaaatgttcaagattcttgggctcaattgccttgcaacggcttatgttctcagtgtcatgtacctggatggtgtcaaactgggcgatgttcaggctacaattagtggtgtctttactgcagccttcttcctcttcatctcccatgcccggccactccaaacgctgtctgcagagcggcctcatcctaacatattctgtgcatacgttc

SEQ ID NO: 118420 - DNA, 396 bp, Zea mays
  Clone ID: MRT4577_39487C.1
cacccctctactaccaagagggagatagagaatcataggcagcgacacgatcccgagcgcaagcacgtaaacacgtttcgcatactatatggtaaaaaaaacaccactgcctgatcgataggggcccaagctctactatcctcacgatagactgctggcccgacccagctcagacgtcgcggtgtaggatgttggcaaggaaggcacccttcttcgacagggccagatccaaccctacatcctagcaaggcgtcgtcaggcatcctgtcgttcgtgtacaaacagatcctgtactacctaaatgggacactgtccgtggactatggctatatcccgttgatactttgggaccaggagggcaccggagaacttgattgaacccaagtgggtggccta

SEQ ID NO: 118421 - DNA, 356 bp, Zea mays
  Clone ID: MRT4577_39488C.1
tttaaatggttgcggagccacacttgcggaaagattaaggagcataagctcctatagcttcccttacttccccatacctttaaccagcggtgtcttaaatgagcgaaaagccaatagcgcaaccctacaagattttttttcccgggggtttaccaactcaccattatcaccctcggtaacaaaccaccccgagggcgtaatacagagagcacatttggtacataagccggcacaaaacatcatggcacacaactacaccacttgtgctcaccaaccttcctaaatactctcagcaacataagtttcttccatcccaccaactggatgaatcgaactctggtgcctatctgcaacaa

SEQ ID NO: 118422 - DNA, 407 bp, Zea mays
  Clone ID: MRT4577_39489C.1
ctttttaattttttttttcttttgttttttttgggggtttttcccgcgtttttccccaaccccggggtgaaaacaacaaatttggtggtcaggagtacaaaaagggggcttgttttcgacaaagcaaaatccttaacccaaacagacaggtttgttttaaaaaacaaaacattatcctgggtgccctttttaaaggacccaaaggggggaaataaaatcctccagaacggatagttaaaagggttccctttccaggcggggggtaacccccctatcctcctggttttttttaagggggccttcccatttttgaaggcatgtagggcggggggtcaatttgctcagggagttcctttatgtctacctaaaaccttttttgcaccggggtaaaaacctcagattccgga

SEQ ID NO: 118423 - DNA, 1822 bp, Zea mays
  unsure (1)..(1822): unsure at all n locations
  Clone ID: MRT4577_3948C.1
ggcggtttgaccttctgaccggaggagagagagagagagagagagaggagaatcatagctccgtaaaaatcaatgaccatagcagcagaagcggcgaaacttccaccccaccttcacctccttgcttatatatactcgccccgccgccccggggccggctcccacctcgctccagtctagacggcggtttgactttccgaccggggaatcggcgctgcgtttgatttgaggaggcgacacgagacgggacgggagggatctcttcgctggagcgttgcccgattcgtcgcggttctcggacaagggagggagggcacacctcgggctccgatcgaagagctttgttaacattagagattaaaaggtagcgccgtagcaaaatgaaggcaccatcactactggttcagtgtttccctggcttgcttcccagcaaggccactagttgcgtgccaattgtatctgagaaggatctgcagctaccatcaccagctgttgaaataatcccctcaaagagtgttcatccatacaaatatgctggagagaaggttgatgtgcaaggtcttaatattttcaagggtaaagtcagtgtagcagatatgatagttatctcaccttctgaagtagcatcatcaaaatatgatggaactctgaaatactgggagagttccattacccttgtcgacattcttaaaaatgagatccgtgatgggcagttgagcttcaggggcaagcgggttctagagcttggatgtggatatggcctctctgggatttttgcctgcttgaagggtgcatccacagttcactttcaggacataaatgcagaaacgatacggtgcagaacaatacccaatgttcttgcaaatcttgagcaggctcaggaccgacagaacagaccatcagagagccctgttacaccatctaggcagctcttggctcctaatgtacatttctatgctggagagtgggatgaactcccaacaattctctcagttgtgcagccacctgcagcaccaacaaacctcagcttctctgaggatgattttatggatggctgcagtagccatgatggaagcagtgtagttggtcatgactactgccccaggagatctaggaagctttctggtagccgtgcatgggagagagctagtgagaccgaccaggcagatagtggctatgatgtgatcttgatttctgatgtcccctacgcagctaactctctgaagaagctctatgcgcttatttcaaagtgcctacgtcctccttatggagtcctgtacgtggcttccaagaagaacttggttggttccaatggtggcgccaggcagcttcgagctctcatggaagaggaaggtgtccttggtggccacttcttgactgaggtgtgtgacagggagatatggaagttctttttcaagtgagcaaatataggaagtgggaagagaaggaaatgagttctgacgttgaaacccagtttttatggtttctatctgcagcgatgtacataccgcgaggcatagttccattaattctttggtagtaggttgaaacttcaagaaatatctgcagttgagcttgcacaagtgttggaatcctttaccgctttgtagatctgctatgtgctaatgtcgctctattaagtacagaaagcaaattgtggtaacgttttatatatcgaatatatggtgatggcacttaagccggtgcatggtatgagataattcaacacttttacacgcctatatgcagccttttagatgtacgctgtgttggnnnnnnnnnnnnnnnnnnnnnnnnnnnnnnnnnnnnnnnnnnnnnnnaa

SEQ ID NO: 118424 - DNA, 813 bp, Zea mays
  unsure (1)..(813): unsure at all n locations
  Clone ID: MRT4577_39490C.1
ctcccaaagccgcccccttcccaagaaatcaccacacgcgcagcaggcacaaccaacccacacccgccgccgcctcctcctcctccgatcccccaaggagccgtcgcgtcgcagcagatccgtccatggcggcgctggggtccaagctggcgcagctgcaggccaaggcctgcgaggcgacgcggttcgtgaccaggaacgggtgcgcctaccacaagaccctcatcgagaagaacaagcagttcgtcgtgcagccccccaccgtcgagaagtgccaggagctctccaagcagctcttctacacccgcatcgccagcctccccgtccgctacgaggcattctggaaggaggcggacaagtgaagcagctgtggagaaacaggaaagatctgaacgtggagcacgcgggcatcatcgctctgttcggcctcgagctctacgggtggttctgcatcggcgagatcgccggccggggtttcaccttcacgggctacagcgtctgagcgccttccttccatgagtacctccacgcgatcggcgtcgattaagagctgaagactctgttagccaatcagtttctcgtgatgcgcggtgcgaagttttggttttctgaaatactattcttgatgctggtgaaaaaagtacaccccggctcggtgaattcgactcgtcgatgaggtctaataatttgtcgcacgcttagttgagtgattgaagcctggacagatgagatatctgntgactgtgatgntttgccttgcttgcttgctgaaatcagggcaaattacgctcttccagacngaatgatgaaatg

SEQ ID NO: 118425 - DNA, 2282 bp, Zea mays
  unsure (1)..(2282): unsure at all n locations
  Clone ID: MRT4577_39491C.1
agtcactccagcgctgaaggcctgcagcgcctgcgcagcgcctctctgctactgtgctggctgacgccggtggggtgtgagcgaactgcgagctgctgccacccctgctgccgcggtcgaccgccggccccggaccgagatggacgctcggtgggcggtgctgctcgcgccgctggggccaagggcgccaactggctgggcgggctgagccgcgcgtcgttccccaaggggttcgtgttcgggacggcgacgtcggcgtaccaggtcgagggcgccgcgtccaccaacggccggggcccctccatctgggattcattcgcgcacgtcccaggaaatattgcagggaatcaaaatggagacgttgcagtggatcaataccatcgctacaaggaagacgtcgatctcatgaaaagtttgaactttgatgcctaccggttctcaatctcatggtccaggatcttcccggatggcgaagggaaagtcaatccagaaggtgtagcgtattacaataatttgataaactatctgcttcagaaaggcatgactccttacatcaacctttaccactatgatcttcctcttgcgcttgagaagaaatatggagggtggttaagcgcgaagatggcggacttgtttacagactatgctgacttctgttttaagacctacggcgatcgcgtaaagcactggtttacattcaatgagccaaggatagtagcgctacttggctatgacacagggtcaaatcctcctcaaaggtgcaccagatgtgctgctggtgggaattcagcaacggaaccttatattgttgctcataattttctcttggcacatgctactgcagttgcaagataccgtacaaaatatcaggctgctcagaagggtaaggtcggaatagtcctggacttcaactggtacgaggctcttacaaactcacctgatgaccaagcagcagcccaaagagccagggacttccacattggctggtttgttgatccattgataaacggacactatccacagataatgcaagatctcgtgaaggagaggctgcccaggttcactgctgagcaggctaaactggtgaagggctcggcagactacatcggtatcaacgagtacacatccagctacatgaaggggcagaagctggtccagctggcgcccagtagctactctgccgattggcaggttcaatatggcatggcacgcaatggcaaaccgattggaccacaggcgaattctaagtggctctacatcgccccgacggggatgtacgggtgcgtgaactacctcaaggagaagtatgggaatccaacgatctacataacggagaacggaatggaccagcctggaaacttgacccgagaccagtacctgcgcgacgccacgagggtgcggttctacaggagctacatcggccagctgaagaaggccatagaccagggagcgaacgtggctggctacttcgcctggtctctcctcgacaacttcgagtggctggcagggtactcgtccaagttcggcatcgtctacgtggacttcaacacgctcgaacgccacccgaaggcgtcggcctactggttcagggacatgcttcagaagcattgagatctccagagccgagcctgagcacggaaggtaccattttgttcagcttcgcctagtgtttgggatggcccaatggttcaaatccggctcagtgcctggctaccaaaatgggaacaaaggacagctaccccgatcaaatgtgatgttgttnnnnnnnnnnnnnnnnntctctggagtttgagctgtggttattttatcgtgttggttgatcgtgtttgaaatgcttaattcaggactgtgacatctcgagttgttttctatatgatagctgctgtatcattgagtttgctgtttacaaatggattgatgatgatggagaatgctgaactggtgtttattatctccctttctgatttaggagttttatttgcagggcatgaagatcttcggagaactcgagtgctgttcggagcgctcatctgatatattaaaatgtattcctcattagcttgagattcgctccttggagcaaacttttaaatgtaacgctggagttgtaaggcgatttcatacagtgaggtagaaaccaaccatgtatttgtcgtttcaggcttatgattccatgaagagttgttggagcacatttctgggatgtcggttgaagatacaaggaagtacacactcaagtaaagtccatatacaagactataaacaactcatattttaggctc

SEQ ID NO: 118426 - DNA, 2570 bp, Zea mays
  Clone ID: MRT4577_39492C.1
cctggccggggaaaaaaaaggacacgccggctagtactgcgccagcccactccagcgctgaaggcctgcagcgccagcgcagcgcctctctgctactgtgctggctgacgccggtggggtgtgagcgaactgcgagctgctgccacccctgctgccgcggtcgaccgccggccccggaccgagatggacgctcggtgggcggtgctgctcgcgctgctggtcgccagcggcggcgtccgtgtctgcgccgccgctggggccaagggcgccaactggctgggcgggctgagccgcgcgtcgttccccaaggggttcgtgttcgggacggcgacgtcggcgtaccaggtcgagggcgccgcgtccaccaacggccggggcccctccatctgggattcattcgcgcacgtcccaggaaatattgcagggaatcaaaatggagacgttgcagtggatcaataccatcgctacaaggaagacgtcgatctcatgaaaagtttgaactttgatgcctaccggttctcaatctcatggtccaggatcttcccggatggccaagggaaagtcaatccagaaggtgtagcgtattacaataatttgataaactatctgcttcagcaaggcatgactccttacatcaacctttaccactatgatcttcctcttgcgcttgagaagaaatatggagggtggttaagcgcgaagatggcggacttgtttacagactatgctgacttctgttttaagacctacggcgatcgcgtaaagcactggtttacattcaatgagccaaggatagtagcgctacttggctatgacacagggtcaaatcctcctcaaaggtgcaccagatgcgctgctggtgggaattcagcaaccgaaccttacatagttgctcataattttctcttggcacatgctactgcagttgcaagataccgtacgaaatatcaggtatttccatcttgagaacctcagaagttcctctgaaaaataacatcactctagcactcctaggagtggtaaactgatgttattttattcaatgaagtgtgtggtccaagattttatttttaaatgaaatgtgggcagggtctatatatgcttggaagttggaacaatggtcagcatactttcacattaataactctactgttcatgaaatgcattagcttgttctcctaaacgattggacatgtgcctgtcgaatttcattagtttcttggactgaaaactgctgatggaagagtgacatgatgttttaaaaacataggctgctcagaagggtaaggtcggaatagtcctggacttcaactggtacgaggctcttacaaactcacctgatgaccaagcagcagcccaaagagccagggacttccacattggctggtttgttgatccattgataaacggacactatccacagataatgcaagatctcgtgaaggagaggctgcccaggttcactcctgagcaggctaaactggtgaagggctcggcagactacatcggtatcaacgagtacacatccagctacatgaaggggcagaagctggtccagctggcgcccagtagctactctgccgattggcaggttcaatatgtttgtgagtttaatttcttgtgctttaaactcgatatttcgaataaatatgtatttgccttggatatatatttttttcaccaaacctaaacatccgtcccataaattctgtagttgcacgcaatggcaaaccgattggaccacaggtacgctgctcctccatctactctctctctcatcgttgtttgcactgcatagtgcatggtatgctaggtagcatcagctacgaattctaaagtactgcaacaagagaatacttgctaaccaaacgcatggacacgtaggcgaattctaagtggctctacatcgccccgacggggatgtacgggtgcgtgaactacctcaaggagaagtatgggaatccaacgatctacataacggagaacggaatggaccagcctggaaacttgacccgagaccagtacctgcgcgacgccacgagggtgcggttctacaggagctacatcggccagctgaagaaggccatagaccagggagcgaacgtggctggctacttcgcctggtctctcctcgacaacttcgagtggctggcagggtactcgtccaagttcggcatcgtctacgtggacttcaacacgctcgaacgccacccgaaggcgtcggcctactggttcagggacatgcttcagaagcattgagatctccagagccgagcctgagcacggaaggtaccattttgttcagcttcgcctagtgtttgggatggcccaatggttcaaatccggctcagtgcctggctaccaaaatgggaacaaaggacagctaccccgatcaattgtgatgttgtgtgtttgtgggtatgttctctctggagtttgagctgtggttattttatcgtgttggttgatcgtgtttgaaatgcttaattcaggactgtgacatctcgagttgttttaactaaatcttataagaactaccctgatagaaaaaaaaaaaaaaaaaagcggcc

SEQ ID NO: 118427 - DNA, 395 bp, Zea mays
  Clone ID: MRT4577_39493C.1
tttatatttttcttttttatttatacccttttggagggaaaatagggccaacccagtttaaaggagtctataccatcaatatagaacacaggcccataatggttgagggcgaaacaaggtttagctttctaaccacgggcattcggaaactgttgccaaaactttggcacgggtattccacgccaattttggacaacacaagcctaagcttgggaaaggggaaacaaacaatgtaaaaacagaaaacacttggataggcttacagtcaaaatctaatctaataatttataaccagggtaaatacaagcctaagctttgccgtacgttgccttacaacaagtagaactgggagaacagaagctccccgaacttggaatagaccccgcagagggggt

SEQ ID NO: 118428 - DNA, 534 bp, Zea mays
  Clone ID: MRT4577_39494C.1
agaggctttcattcagaattgaatcgcctggtgagggacagcctgcaatttggatcaattgctccgtcctgtgccccgaaggaccctcacgacattggttcgttcagcgaacctcaggcaccaacatgtcaggacctggaagaaagcatgttcctgaacgaacatgaggacgcggttggaggtctgaacgaccatccgtactcgttcagcgagcctcaacctcaaacatcagcattcataactccaagcaagaacaaggcatcgatccagtccaagaaggggaaggcctctcccagcatcagtgaggagtgggagaagctcatcatcatcgacgacctcgacgacgactttgccagccccgcacattctagaaccgctgttcacaaacctccccgccccaagccaccgtccccagggaagccgctggacgagaagacttcaaggatcctggagaggctggagccccccagggcgaagaaacagagagcgaacattggtagcaagggcagcacgggcgcagcaccgggaccttgg

SEQ ID NO: 118429 - DNA, 559 bp, Zea mays
  Clone ID: MRT4577_39496C.1
aaaaaccggccggggaattttttgtttttgccccgtcaaaaaaggcccagaaaaccttttgaaaaaaattgcccttaaaaaaaaaaaccggccctccgtttccaatgggggccagaacctcttttgggttcctttttgggggggccccccccaacagttttggggcttccacaaaaaaaaacccccccccttttgtcctttggggggcccaaccgggttgttaaaaaaaaccaaagccgttgtttttcctttgttcccccgcccccccaagggggggaacccttccccgtttttttttttttccaacccgggccgggattccaacccgttccagtttccctggggggtccctgacaatttggggaagggggacaaccccggccccctcgcccttggggcccttgtccttggggcaaaccctggcaacggaaacaaggtcggggacctcgggggctttaaaaacccccccggggggggggtcccccatccggggcacgggggggggggacccgggttcctgcccccagcaaacaacttccccgtgggccccggggaactg

SEQ ID NO: 118430 - DNA, 335 bp, Zea mays
  Clone ID: MRT4577_39497C.1
attcatccattcaaccccataacaatttggtcctttctactggcacttgggaaaattaactaaaaaacaccccccgcccgggggggaattgggtacataaccccaaggggatacacaaacatgccgccggagagcaaaacacgtggcaaaacccctttttttttaactccggccctttttttttttccctttgggcccgaaaaaactaggcgttggaggcacgttaaccccaggtttttctcccatgcttacccagccacaggcgtccacaccttggatgctcacaatttgtcctttacgggctcggggggggctgccttttcggatgccggggg

SEQ ID NO: 118431 - DNA, 248 bp, Zea mays
  Clone ID: MRT4577_39498C.1
aacaatagcctcattatccatcattgtattgacacaacctatctctaaaccgcacagtaaaaaccaccccatgccgtcaaacaatcaaccccacggacaaaaactctttaacataaaacatcctgcaaaaaactcatccaaacacatatgttccagattacacaactacacaaccatttaatgggatactatgcttaatcaacccaggagaaactccaggactagccgttgttttaactgccgggcaa

SEQ ID NO: 118432 - DNA, 752 bp, Zea mays
  unsure (1)..(752): unsure at all n locations
  Clone ID: MRT4577_39499C.1
atacccgtttcagttttatggcttagggggtttaggaattccttactctaaaagtcattacagattgttttattctattatccttcctatactcgcgacaacggctccctacttgccccttttgggaagggaaactatcactagcatccggggttaatcaaccaaggacgtccaaccccacccttgtagcaggcactgaaatctcggttggacgatccatcttctaccaacaaaatgatcttatcatgtatcataataaaggcaacaagaatactttaccctgaaacatgaacatgagtcataacccgcattaaggccaaaaccatgtaaagcactagcaaggctaggtatagtgtaagcaaaactagggaacctattaggaccatcagcttaacctgacagtgtcctagtgaccaacagaacatgattaggttaaagaatgggatcaaagacacaacttaccttgaacgagctcctgcttagaaaaaacgacctgcggtcctttgggttcctcgatcacttgttcgtctactagcaaccatacaaactacagtgcataggaaaaacttaacgtcacaccaaacaatagaacaatttcataatattattctacgagtcacaatgaatccgtacgttcaagaatcactgaaatcgaagttatggttgataggtatggttttctgaagttntaggagactaaacagtttaccagtatagtctatgctaattacacagatcgnatgataactaat

SEQ ID NO: 118433 - DNA, 113 bp, Zea mays
  Clone ID: MRT4577_3949C.1
tgagtagaccatacggatgagatcgataaaagagcagacttactccgggcgcggagcgagaacgccgacatggccaagctgactaagcacgccgacagaaggaggagccccgt

SEQ ID NO: 118434 - DNA, 538 bp, Zea mays
  Clone ID: MRT4577_394C.1
gccggccgggttccggaatttattatggccaatactcatttactcgacgactgtctcttttgtaagattattagaggcgagattccttcttgcaaaattgctgaaactgacaaaagttacgcttttctcgacattaaccctttaagtgaaggtcatgctctcgtaattcccaaataccacgcccaattctttcaccaagtccctgatgatgtgcttgcagatatgctgccattagcaaagaaagttgctattgctattggcttggaagatagtcaatacaatcttttacagaacaatggaccaatggctcatcaagttgttcctcacgttcatttccacattattcccaagccaaatcctgaggaaggcctcaagattggttggcctcaaaagcaagttacacccgaggatctcaaaaagactttggggcgcatcaaggaaaaattataatcaaataaacaaacgtcatctttcccacttttttacaggtgggaagtatgcattgtcatatgaaaaaaaaaaaaaaaaaaggccccta

SEQ ID NO: 118435 - DNA, 259 bp, Zea mays
  Clone ID: MRT4577_39500C.1
ccgtcccggcgtcaaccaaacgacccgcccgcccgccgtagatcacgaggagaaagggatcggctccgccgccgacgccgagagaggatgagctaccagcaggtccctccgcaggagtcctacccgccgccagggtattcgccggtgtacccgccgccggccggcgggcagcagggcccgtactacccgccgcagcagcagcagccgccgccgcctccggggtaccagggatacttcagccagggccagccacagcagc

SEQ ID NO: 118436 - DNA, 455 bp, Zea mays
  unsure (1)..(455): unsure at all n locations
  Clone ID: MRT4577_39501C.1
cgacatcgaccaattagatcgaggcgtcgacggtcgtcgccatgggncataacatcgagtacgctccgaaatcgctctcatataacgcattattaatatcctgaaacacagatgtatgccaaacaaccgggaccgggacccgcatgcattgccgcttgtgggtattgaaggctgaactacacatgctggacattttatggtcatagatggaagacgaaaagaaaggctatggaccctcaatttcacacagaatttcaggccggaatatgagatgtaaagcttggcttgcctattgagacgcgctctgaaaccttaagagccgaccttcactgccggcgcttcaaacacggaacagaatccatgccactgtgcattaaataaagcttacctttcaatgacactgcgccctgctagtcaaagaccgagaacgacaccttgttcctgaccacgacagg

SEQ ID NO: 118437 - DNA, 357 bp, Zea mays
  Clone ID: MRT4577_39502C.1
accgaggttcggttctaaagaacctagtccccgttgaggtggtcacaaagaccgggtctctttcaaccctttccctctctcaaatggtcacttagaccgagtgaggcttcttccttaatctcacgggtcacttagaccccgcaaggaccaccacacaattggtgtctcttgcttcgcttacaaagcacttgagagtaagaagtgagaaagaaaagaaagccaaccaagcaacaagagcaacaaagaaacacaagaacgatcctttcataagtcctaaagcactagaattgagttggggactttgattggatcgatggctttgatttgtgtcttggagtgttgcactttgctcttgta

SEQ ID NO: 118438 - DNA, 1270 bp, Zea mays
  Clone ID: MRT4577_39503C.1
gagcaaagaaatccaagtgtgccctggtctggcgcaccggactgtccggtgtgccaccggacagtgtccggtgcactaggaccgtacaactccaaactcttcaccttcgggtttctcaggcgtcgctccgctataattcaccggactgtccggtgtgatagcggagcaacggctcttcggcacaacggtcgactgcacagtgcccctgacagcgctacagttcgcggtagaagtcagagcagaggtcagaggcgcaccgaacaatgaacagtgcttgtccggtgcggcaccggactgtttggtgccaccagaagtcagcgctccaacggtcgactgcgtcagaaccctaacagttgggtgacgtggctggcgcaccagactgtctggtgtgcccatcgatagcagccaccccaacggttgttttggtgtttgagggctataaatacccccccaaatacctccactccaaccatccaagcattcaacgctctccattcaatacaagagcaaagtgcaacactccaagacataaatcaaagccactgatccgatcaaagtccccaattcaattctagtgcattaggacttgtgagaggatcacttgtgtttcttgttgctcttgtttgcttcgcttggctttcttttctttctcacttcttactctcaagtgctttgtaagcgaggcaagagacaccaattgtgtggtgatccttgcggggtctaagtgacccgtgagattaaggaagaagcctcactcggtataggtgaccgtttgagagagggaaagggttgaaagagacccagtctttgtgaccacctcaacagggactaggttctttagatcgaacctcggtaaaaacaaatcaccatgtcatccgctttattttcttggttgatttgttttccctctctctctcccgaactcggattttactctaatgctaaccccggcttatagtgtgtttaaagttgtaaatttcagtttccgcctatccaccccctctagacgactttcaattggtatcaaaacccggtacttcattagagtctaaccactcgaagtgatgtcgggaggatccgccaagagggagatggaaacggccacaagccacgcgaaggctccatcaagggagtccggcaccaaaggaagggaggaatcacctcccagcgttaagtcgcatcagagtggtgacaagaagaaaaagatgtagaaagtggtctactacgagaccgactcttcgtcgccctccacctccggatcagacaccgc

SEQ ID NO: 118439 - DNA, 300 bp, Zea mays
  Clone ID: MRT4577_39504C.1
gtgatcctccgtgagtcgcgtcgcgtcgcattctacgatccaaagttgtgtctgtttgaatgcatggtgaagaactactggagcgtgatcgcagagtaaagcaaagctgttcagaatgctaggagcaagatcagaggcctcatcgatgaaaagagctgcgacacgctcgatgcttggcctcacgtggaactccgctgagacgttcgacgtgtggttgctgaccgacgatccattcggcacgatgaacaatcattcggaattggctcacggctataaggcagggatggacatcgtggtgcg

SEQ ID NO: 118440 - DNA, 487 bp, Zea mays
  Clone ID: MRT4577_39505C.1
ttgaatcaggatggggcgtggttatactcagaagcttgggtttgcacgccggttctggacaccatcttccgagctcccacttgttcgacccctgttcgatggatggagagaggataggtggaacaatctcaattggtatggaagaactggtgcttatagtcaacgctctccagtatggagataccatggatcgccaagagccaataggcgatccatttaccaaagaagaggccggagcaagttacgcagcccggtgacgcgtcatgaccgtggagggtatcgacgccccaggccagtgggcaaccagagtcctgcagacccgatactcgatgctatcgataggcctctatcacgtcacggctgaggcggtgctgaccaccgtggccacagtcaccctgtcaacaacaggtacaggtcgaagagcctgtatcccttgagatccatgtctcctgatgctgtcccaatcatgagggagagctcgagatac

SEQ ID NO: 118441 - DNA, 224 bp, Zea mays
  unsure (1)..(224): unsure at all n locations
  Clone ID: MRT4577_39506C.1
ggccgccgggggctgaattctttcttngcgtggncgcggcgggggggggtggcggccgtctcggctcgccggctttgcggtgctttgctgcgcttttggctcggtgcccgctttgccccccggccgtcggttggggttgtgcggggctcgcgtggttgctnctctctgtgctctgcggcgcgcgtcttcgccccctgggggggggggcctccctcttttttgct

SEQ ID NO: 118442 - DNA, 446 bp, Zea mays
  Clone ID: MRT4577_39507C.1
aaaacaggcccccccgggtttttttcttttaaaacaccaactggagcctgtttttgactttatgttcaagggggggggggaaaaaattgccacagggccagggaacccccaagggggaaaccttgtttaaaaaacatgggggacagggggcaaccccggggggcccaaatttaaaaacaaaaaaaaatccttggttaaaacctcacgaggacccaatccccgaaaagaccccggggtttaaaaaaaaaaattttccaagaaaaccccttttagggggccaccaaaaactgggggggggcactgaatttcgggggccccttggggcccttttgggcaggatcgaaaaaatccttttttgaaaccgttttcctgggggcacaaagggaataaatccgggtttttgggcaaaccccccttatatccgttccaataaagggggggcaaac

SEQ ID NO: 118443 - DNA, 487 bp, Zea mays
  Clone ID: MRT4577_39508C.1
aattatcccaccatctcttcgtactcctttttggtagcagttagggttccgtacctccgataccgatccgccgagtgcacaccacctttccccactccgatcgaatcgatggccgtcgtaggcgagaagaagatgataaccctcacaagctccgatggcgaggagttagaggtggaagaggcagtggtcgatcggagtgcagaccatgctgcacatgatggaggctgactgcgcacgcaacggaatacctcttgctaacggagactacctatcctattccatgttattggggactgaaacaggggccgtcgtgcttgtggtgtcgtatacgaccgcttctagggtcgttccacccacaactatgtctgctcccaacatcgtgctgaagactccaggagaaggcccctcaaactctggtgcaagcataagaagaaggcgtctaacacagcatgctctcacctatgaccatgatggctggctagaagga

SEQ ID NO: 118444 - DNA, 402 bp, Zea mays
  unsure (1)..(402): unsure at all n locations
  Clone ID: MRT4577_39509C.1
agtatgtctcctgggacgggngtgcactacacggaggccgccaacaggctcatcgcttgcagcgtgctcgagggatctcactctcacgccgccgacgcgcccacgctgtcgaattcatcggccacaacggaggattggcttcacaggatcggctgcgtctagcagctagcattttgtgtctagagtctagactggacgaccagagtcgagagacatttcagtcgggccacggccatattttagttctttatttaaggaaacagtatattttcattcaattgtctgatgatgtagtaaaactagtaacacgtataggggtggtcacaaatcaggatccaaatatttttttcacagttcgtttaaacctttaattaattttagtccggaaaaaaaaaaaaaaaa

SEQ ID NO: 118445 - DNA, 826 bp, Zea mays
  Clone ID: MRT4577_3950C.1
ttcggccgggtcccacctcgctccagtctagacggcggtttgacttttcgaccggggaataggcgctgcgtttgatttgaggaggcgacacgagacgggacgggagggatctcttcgctggaggctggagcgttgcccgattcgtcgcggttctcggacaagggaggagggagggcgcacctcgggctccgatcgaagagctttgttaacattagagattgaaaggtagcatcgtagcaaaatgaaggcaccatcactactggttcagtgtttccctggcttgcttcccagcaaggccactagttgcgtgccaattgtatctgagaaggatctgcagctaccatcaccagctgttgaaataatcccctcaaaggtacactctttactcccattttggctatcatttgtatattggactgcgaagggagatattttatttttgcagaaattttgttaaaattttgctttatcattttctcttacgactgttttcatgcttttaatttttttcagagtgttcatccatacaaatatgctggagagaaggttgatgtgcaaggtcttaatattttcaagggtaaagtcagtgtagcagatatgatagttatctcaccttctgaagtagcatcatcaaaatatgatggaactccgaaatactgggagagttccattacccttgtcgacattcttaaaaatgagatccgtgatggccagttgagcttcaggggcaagcgggttctagagcttggatgtggatatggcctctctgggatttttgcctgcttgaagggtgcatccacagttcactttcaggacataaatgcag

SEQ ID NO: 118446 - DNA, 374 bp, Zea mays
  Clone ID: MRT4577_39510C.1
ttagagtggagctagctgctcttttttttggttgggcagttagacagagtactggggctaaatatttcattacataagttaatgatcgaaagctaagagcaaataggctagtggagtgcatacttgtagcgatgcacacattgaatgtgctaataactctgtatatgcatgatcaagccgagctttagttggttttctttctttggcctgttatgttcatgataatccatctgaacaagttttcgatgcgcattaccatttgatattctccatactgtttcggttatttgtttacttggaattacatgggagctaaacttatatcttaatttacgggacaaatgtaatgggtacatcccactctagatatacct

SEQ ID NO: 118447 - DNA, 365 bp, Zea mays
  Clone ID: MRT4577_39511C.1
attttgagcattcagaaacacaccaggcgaacggcactaccaccgacctaacaccaatggctaccaaaatattacccttccttgcgctttttgcctttttgtgagcccacaaaagccttcattattcacatggctactgctcctaggcatattcacagtcctccacagtactcatggcttgacacctactggcagccactgacacaggctgcggaggttacacaccatgccaatgacacatctgccattacatcagcatacacgacacacacagtctacacctggcactacctgggaactgcgctatgagacagtgtgctcaccactgttgggacgagtgaacacacacacgtcaaatttgcacc

SEQ ID NO: 118448 - DNA, 384 bp, Zea mays
  Clone ID: MRT4577_39512C.1
ccgtgtaccatcctcccccgcgcggtgcaccttcgtcgacgccccgccatcaggaccaccaaattctctcggtcgacgccgcgccatcaacgccaccaaatcctcgcagtgatcccgtagcgcgatcccaggaaagtctgcgccgacgccccgccatcatcgccccctgcgccgtgctcatgtcccctccctcctcgccatgctccccggcccaccattcccttccattggcgcccgaggggatcacggatcaccccgattctccgtcgatctgggcacgggaccgcccacgccatcctcgccacgctccccgccatcccctttcattggcgcccgatggcctccgagatggtcgccctcggctgacccatcaaataccgctct

SEQ ID NO: 118449 - DNA, 449 bp, Zea mays
  Clone ID: MRT4577_39513C.1
gctgggagatcttgaggggcaattgaaagatgagaagtatgtcttggtatccaaaccgtacatgattcttaatgataaactacaacatttgaatgctgagatagagcgttatagagggttggttgaagttttacagaatgacaaggaccagctcatgcaaagggagaaagaaatttctgcaaaagcagaatcgctcgacagtgttaaacaaaccattatcacatatgagaaaaaaattgaagaactggaaactcaaattcagatactcttttctgaaaagaatgatcttgaaaccaaggttgaggagactttgcaagattcagcactctccaatgaactgggtatgatggagaatcagttgagtcgatcaaaggatgcagcttttgaagcacttgcattgcgtgagcaagctgaatcattaagatcattggtagctaaaaagattgagg

SEQ ID NO: 118450 - DNA, 3247 bp, Zea mays
  Clone ID: MRT4577_39514C.1
caactttactacccgtctcgcgcgagacggaacacattccgcttgtcctctctcgccgctgctccgacgagctcgccggcgccgactcccctcccgtcggaccagcccgccgaaagcggccggacgaacgagaggcttccctcccctcgcacttgcctgcctcgtcgccttcctgagcctctttctgcgcccggccacgggctcgcggccccacgcccgagcacgtgcagcaggcgccgaacccgcctcctgtgccaccccatcggagctcgccggccacgtggagggattccttttcctggcagcattcctcgtcgccgacggcttcgtcgtgctccaggggttggattggcgtggagcggagagcagtgcaaacctgggattgaattctggtgtagatggattccacagctcttcaatatgaaaaccaaaaattggtgcaacaactggaggtacagaagtccgaaatgcatgcattggagcgcaagttcaaggagcttagtgatgatcaatgttcttatgacaagactctgatttctttgaataaactgtggaatcagctgattgatgatttggttctgcttggagtacgggctggtggggatttggataatttgcaagcacttgaccatgaagagttatcagaagaatctttggagtcgtgtccttccgaggagatatttctcttaaggctcttgaagacaaacaacatcagagataatagtgacactagcttgttgaaatttgttgaagaagctcttgcttttcggtcttcagcaactgttactttgatgaagtccctgcaagagactatttcttcgcagcaagctagaagtgagtctttgtctttagctttgaatggacaaaagtcaaatgaagatgttattgttgcccttcgaaatcataatgattgcttgaaagaggtggcagagaatgcgagtcaagccatctctattatcaacgagaagcacaaaaggtatcttgatgagattgaggcttttaaaagcaaccattcaagggagctacaggaaatcaagcgtatttcaggtgagctagaggaaagcattgcagagcttgaggaaagtcaaaggaagttggttgtgctccagttgcagaggcatggttctgtaatggatgcatctggggcaaatgctgtgaatggtggtatttctactcataaatcttcagataaaagtatgagctggcaagacctcaaagatgctgttgacgcagctaagaccctcgcaggaaaccgtctattagaactccatcagactcaagaggataatctgatactatccaaggagctgggagatcttgaggggcaattgaaagatgagaagtatgtcttggtatccaaaccgtacatgattcttaatgataaactacaacatttgaatgctgagatagagcgttatagagggttggttgaagttttacagaatgacaaggaccagctcatgcaaagggagaaagaaatttctgcaaaagcagaatcgctcgacagtgttaaacaaaccgagacgcctatatatcaaatatcgagacagttggtcaagcatatgaagacatgctaacgcaaaatcagcatcttcttcaacagcttactgatagagatgacttttaacataaagctagtatcagatagtgtgatgatggatcaagcttgtagtccccttctctctgagggtatgatggagaatcagttgagtcgatcaaaggatgcagcttctgaagcacttgcattgcgtgagcaagctgaatcattaagatcattggtagctaaaaagattgaggaacacaagaagatttcggataaatacaactcacaagtaattgagatcaagtccctcaaggcattggttgaggagttggagcaggaaaagcaggagctggagtttattgcagatatgtacgtgaaagaaagttctgagtctaggacaattgctgatattgaagaatcagaaacccgagctcgcaatcaggctgaatatttgaggagcaatctagaggagcatagtcttgagcttcgggttaaagcagcaaatgaagctgaagctgcatgccagcaaaggctttcctttgctgaagtggaactagaagagttaaggaccaaagtagatgcatctgaaagagatgttgtggaacttaaggaggcaataagaattaaagaggctgaaggagacgcctatatttctgatatcgagacagttggtcaagcatatgaagacatgcaaacgcaaaatcagcatcttcttcaacagcttactgatagagatgactttaacataaagctagtatcagatagtgtgaagatgaaacaagcttgtagttcccttctctctgacaagcttatgctagagaagcaactccagcaagttaacacttcactggagtcatctaaactgaaaattgcccgtggcgaagagcagatgaagacttgtgtagcgcaagctataaaaacttcagctgaaaacagacatcttactattagcctggaaaggattgcgctggagttatccaacacagataaggaactcaagtggcttcggtcctccgttggatcctctgagaaagaatacgagcaaactcagcaaaagatatctgagctgagagcgttactggagcacgagaggagtgagaggcggcggcttgaagaacaatatgaagaggtgaaaaatgaagttatggagctgacctctgagactgaagagactactgtccggaaacttgaggatgaaataaaagaatgcaagggtattctcaagtgtggtgtatgctttgaccggcctaaagaggttgtgatcaccaaatgtttccacctattctgctcgctatgcatccagagaaacctcgagattcgccaccgaaaatgtcctggctgtggaaccccattcggacaaaacgacgttagggaggtgaagatatgaacctcaccaaagtgacagtgacaaaaccgacttgcgtgtgaacagcagcaacaaactcccttgtgaatatcgtctgttatgttggcgaacatctagatctaacttgctttattactgggattaaaattaggataagaactggaagaagtgaagttcctaatttatttgctatcgtgtgtgctatgtatgattacccttggcagcgagtggtgtatctgctgggtgtcaatatgctcgaattctagctcctccctgctagcgggtgcatgccagttttattaaggctattccatgtacatggtgtcaccctctttaat

SEQ ID NO: 118451 - DNA, 2189 bp, Zea mays
  unsure (1)..(2189): unsure at all n locations
  Clone ID: MRT4577_39515C.1
agctgttgacgcagctaagaccctcgcagtcggcacgtctattagaactccatcagactcaagaggataatctgatactatccaaggagctgggagatcttgaggggcaattgaaagatgagaagtatgtcttggtatccaaaccgtacatgattcttaatgataaactacaacatttgaatgctgagatagagcgttatagagggttggttgaagttttacagaatgacaaggaccagctcatgcaaagggagaaagaaatttctgcaaaagcagaatcgctcgacagtgttaaacaaaccattatcacatatgagaaaaaaattgaagaactggaaactcaaattcagatactcttttctgaaaagaatgatctcgaaaccaaggttgaggagactttgcaagattcaggtaagaaagacttcaagaatgagattcatgttatggctgcagcactctccaatgaactgggtatgatggagaatcagttgagtcgatcaaaggatgcagcttctgaagcacttgcattgcgtgagcaagctgaatcattaagatcattggtagctaaaaagattgaggaacacaagaagattttggataaatacaactcacaagtaattgagatcaagtccctcaaggcattggttgaggagttggagcaggaaaagcaggagctggagtttattgcagatatgtacgtgaaagaaagttctgagtctaggacaattgctgatattgaagaatcagaaacccgagctcgcaatcaggctgaatatttgaggagcaatctagaggagcatagtcttgagcttcgggttaaagcagcaaatgaagctgaagctgcatgccagcaaaggctttcctttgctgaagtggaactagaagagttaaggaccaaagtagatgcatctgaaagagatgttgtggaacttaaggaggcaataagaattaaagaggctgaaggagacgcctatatttctgatatcgagacagttggtcaagcatatgaagacatgcaaacgcaaaatcagcatcttcttcaacagcttactgatagagatgactttaacataaagctagtatcagatagtgtgaagatgaaacaagcttgtagttcccttctctctgacaagcttatgctagagaagcaactccagcaagttaacacttcactggagtcatctaaactgaaaattgcccgtggcgaagagcagatgaagacttgtgtagcgcaagctataaaaacttcagctgaaaacagacatcttactattagcctggaaaggattgcgctggaggtatccaacacagataaggaactcaagtggcttcggtcctccgttggatcctctgagaaagaatacgagcaaactcagcaaaagatatctgagctgagagcgttactggagcacgagaggagtgagaggcggcggcttgaagaacaatatgaagaggtgaaaaatgaagttatggagctgacctctgagactgaagagactactgtccggaaacttgaggatgaaataaaagaatgcaagggtattctcaagtgtggtgtatgctttgaccggcctaaagaggttgtgatcaccaaatgtttccacctattctgctcgctatgcatccagagaaacctcgagattcgccaccgaaaatgtcctggctgtggaaccccattcggacaaaacgacgttagggaggtgaagatatgaacctcaccaaagtgacagtgacaaccgacttgcgtgtgaacagcagcaacaaactcccttgtgaatatcgtctgttatgttggcgaacatctagatctaacttgctttattactgggattaaaattaggataagaactggaagaagtgaagttcctaatttatttgctatcgtgtgtgctatgtatgattaccctttgggtagagtacccttggcagcgagtggtgtatctgctgggtgtcaatatgctcgaattctagctcctccctgctagcgggtgcatgccagttttattaaggctattccatgtnaaaaaaaaaaaaaaaaaaaaaaaaaaaaaaaaaaaaaaaaaaaaaaaaaaaaaaaaaaaaaaaaaaaaaaaaaaaacccaaaaaaaaaaaaaaaaaaaaggggggggccgttttaagggtccaaagtttacttccccgggcttgcaaggtaatagtttttttttggg

SEQ ID NO: 118452 - DNA, 377 bp, Zea mays
  Clone ID: MRT4577_39516C.1
tcctagtaatgtggaatacgtgggaatgatataaaccatataaatacacattggcaatatatccagaacatctctaattaactatgcgaaacaaacctctgtaatgcttgaaccacaggcattgaacgcttactttatcctttatatattttgtgatatggaatcattagagatcgcttcaaagaaatgcccaatttccttaataccgatgcgccctataattgagatatgaaatatacatatattattatacactagaacaatcttctttgtaaactatgtctcactatctataaagaccatataataataaattggtctaccctttgcttaatgattgttagagactatgagttcatattaacaatgcttactac

SEQ ID NO: 118453 - DNA, 257 bp, Zea mays
  unsure (1)..(257): unsure at all n locations
  Clone ID: MRT4577_39517C.1
acctcgaggccggncgggacagtattcctcgaactgttgtccatcttccgcctcatctccactgaccagtccccacgacatccttcctcagtctctcgacgggatgcttcgagtttcgtgctactgtgatcatggtctcgcccgaaagaatggcatggtctatgcagggttaccggtgacgcctacatggtgtccactatgctattcttcacacatgagtgctctttagacatgagtgctacctgctgcgttttctc

SEQ ID NO: 118454 - DNA, 223 bp, Zea mays
  Clone ID: MRT4577_39518C.1
gcggtactactggggtaccgacacagccaccctgagcgagatgtcgacgatttctgtgggcccttcaaaggggactagcgcccactatgcaggctgtgggctaatgctctatgtgtttaagagcattcagatggtgactaatcttgagggagaggaatctgtgagaactctgaggggtgcctaactggcatcaagtgaaacagcaacgatcactgggaatctg

SEQ ID NO: 118455 - DNA, 574 bp, Zea mays
  Clone ID: MRT4577_39519C.1
tcgggttgctcttggagtctactccctctcctctgtctccctctctgccttttgtggtgaagctgggggggcctcaagcggtggaatctgaacgcttgcttcccccatcgccacacggtcggggtcggggaatctaggctttgacctagattctggtggaatctgaaaacccatcggcggcaaggcaaggcaaggcaatgcaagacaggcgagagccagcgcaaagcgcccgccccgtgtgtcagccggtcacatgcatcaagcagggggctgggcactgctagtctgctagtgcagtagtactactgtactagtactagtactggtgccccccgaactttgtcatgtctgtcgtttcttggagaagcctgaccccgtccccggcctgtccagtctagcagcgcagcgctggcctggcctgcagctagctgagcacagtgcgagccactatgcgcgcgcgtgcatgttggttgccggcggtccgtgtatcatcctgctgcctgcaggcttggttgttggttccaaatgtaggtacagcatccatgatattattggtagtttgggcatgttttga

SEQ ID NO: 118456 - DNA, 1719 bp, Zea mays
  Clone ID: MRT4577_3951C.1
acacgggacttcatcttaagagaatttagaacaaaaaaagagagcatgtcagacctgcttcctgaagatgtacttgtcaacatcattggtcgtcttgcaccacggtaccttgccatatcccggtgcgtttgcaagacatggtgcaccaccattgatgcccataatctgctgcgtatggatctactcccacactcagtgtctggactctttattaacttcaatgagttaagcatgtcggaattcttatcccgcccctcaaaaggaccagcaatatctggtaaatttgactatttgcctagcgcgggccaagtcatagaccactgcaacgggctcatcttgttacacgaatgtgtagttaacccggccacacgacagtgggcgctgctgcccccacgcccaagcccaaatatgcctgagcacttttgtcacgggatgtaccttgtctttgaccccacattgtcatcacattatgaggtattcctgatccctcaggtctcatacaattccaacttagaccctgcaatagaggaattggaatggccaccttcgccttgcatcgtacaagtgttgtcatcaaggacaaagttgtgggaggagaggttgtttgttcgagaaggagaggctgcaggtaatgtcgctgacattcggttggattttcaagctgttcaggagaatgctgtctattggcggggagtactttatgtaaattaccaatccaaatttattatgaggatatcattgtcaaatgataaataccaagtaatcaagccacctgtagattttgaatggtttgaatttgaaaatgaatccaggctatccaaaaacctttatttgggaaaatcagagaaaggggtgtactgtgctttgcgttatccgtcaaccgtttccttttcgatttacattctcgatgaatctgacggcaaaacggagtggataatgaagcctcactattatctcgggagtcaaggaattgacgggcctggaccctggactctacaagatatcaactataactgggacacccagtatgaagacagtatggaggaaaagttcgagtgggactcagacagcgataatgttgtcgagaacagaagcaacggtggatatccttgccttcctcgtatagaacttcttgggtttcacccctacaaggatgttgtcttcttgagcgacacgctgagacgaggattggcctatcacctagacagctcaaagatccaagaccttggtaacctccatccaacatattatggaactgaacaggggattcagccatttctactgacggctttcccatacacaccctggaggggatggtttccagaagacacataatggtacagagtaccgaacgtaagacataaagaaggcattagctgatccggaatccgaagttctgaccgggcatggcgaaggtccctcctgcacggtttcctgatgctgctgttcaacatggcgatgatgccgctctggatcgacagacttcagcttgagagtagtttagccagctgcttagcgccgtggacgtggggatggacacgtcgcgttgcgcgcttagtggctggttttgtgcgttgtttggctaagtttttttttttgttagaataaaagggagaagagaaaacactccagttgcgcagcaccaaaaccggttcaccactctcttgtcatttgttttgtttgttctcatcggggcgtgccaaaattttgctttttggc

SEQ ID NO: 118457 - DNA, 449 bp, Zea mays
  unsure (1)..(449): unsure at all n locations
  Clone ID: MRT4577_39520C.1
gggggggaaccttcctaanaccaanaanacctacttcaanaacaaggagtgcgagaggcacacctctccacaagggtgtactcanntacaangaaggggtgagggatagcgctttgcttcccangggaaatcgccgttagtggccggagcgntcangatatggggggcagaccaagcctgtgttccacaagaaggccaagaccaccaanaaaatcntattnaancttcantgccanagctgcaagcactactcacagcacgcaattaanaggtgcaagcattttnagagttggggagacaagaagggaagggaacatctctcttctaagtttctcatcncccatctcnatnttngatcnaacctntgngtctactactgttctaaaaacttctcaaatttcaatgttactactanttctnaaagcaggtgatgctgtgtatcaaattcc

SEQ ID NO: 118458 - DNA, 877 bp, Zea mays
  unsure (1)..(877): unsure at all n locations
  Clone ID: MRT4577_39521C.1
ttgggtacctcgaggccggccgggattgcctaggaagctgacgattccgggtctctcatcttcgagctggcaacactgagaagggcaaccggagatttcgccgaagagaacaagctcggacatggaggcttcggcgcggtatacaagggtttcttgcctgatggccggcgaatcgccgtgaagaggctggacaaggcttcggggcaaggcctgaaagagctgaggaacgagctgctgctggtcgccaagctccggcacaacaacctggcaaagcttctgggcgtttgcgtgaagggacaggagaagctgcttgtctacgagtacatgccgaatcggagcctggacacctacctcttcgcagctgatgagaagcgtgcatcgctagactgggaggcaaggtaccgcatcctctacgggacagcgcggggcctgctgtacctccacgaggactcgcaggtcaggatcgtgcaccgcgacctcaaggccagcaacatcctgctcgacgccgacatgagccccaagatctccgacttcgggctggcgaggctcttcagcgccgacaacaccaccaccgtcacgagccaagttgtcggaacgctaggatacatggcgccggagtacgcggttctggggcacctgtcggtgaagcttgacgtttacagcttcggagtcctgatcctggaggtcgtaactggacggaggaacaccgacatgttcgagtcggcagccggagagtccatcatcctgctgagctacgtgtgggaccactgggtcagaggcaccgcgctggaggccgtcgacccgtccctggcctgccagtgccagcacccggagcgnaagcgnaggtggtcagtgcatccatctgggcctgctctgc

SEQ ID NO: 118459 - DNA, 733 bp, Zea mays
  unsure (1)..(733): unsure at all n locations
  Clone ID: MRT4577_39522C.1
agtgaagttccagcctgttatcaatgtggatgtagacacagatgccgatcgcaagtctatgcgcaataatgtcgccgatgctgtacagatggctaagacagctcttgatgagaggactgctacagatgagcctgactacatgtctccatatgaacctgattctgtaatcgagccagaaaatattccgttggacgacctcgatgacatttcagacgatgacgaagaatctgatgctgatgaaccagacaacgagtatccagaactgtctttggaaatcgctgatgttacagatacagatgaattgcacgaaagttcatatctaaactctctgaaggttgcagagctgagggagcttgcaaagtcccgaggaatcaaaggctactgaaagatgaagaaaaacgagctgattgaagtcttgagcagcagcatggcatgatgataagtgggtgatgttgtcgacctgtcagcatggtctgtgctgatctttttctggttcatcttgtacattaagctgaattccatgctgagtggagtaaggccctgtttagttcctttagtcactagactaaattttagtgactaaagtttagtcgctaaagtaccccatttggttcctgtgactaaaccggactaaaaagcattaatttctgtgaataatgactattttacctctattanaaaaaaaaaaaaaaaaaaaaaaaaaaaagaaaaaaaaaaaaaaaaaaggccccta

SEQ ID NO: 118460 - DNA, 441 bp, Zea mays
  unsure (1)..(441): unsure at all n locations
  Clone ID: MRT4577_39523C.1
atccctcaaccggnatgngnntggggccaactgttttaggaagtaggtactgcgttgagagcgctgctatacttcatatctctttgtcatgctttccctttggagttctggtagtagttcatcagaagagttcattgtaactttctgaagttcctaatccacaaaagctaggtgtagagttaatctaaagtgggtaaaagttcttctctcagaggggggggtttgaggccttaaaagagacttatcgtattctttttccttaacgtgttataaatttgtttatgaattagcatcccagaatattttctgtgacaacgagcaatgagttgcagacttactgggcatttagggtgcatcctcttccctatggagggcacttatgctgcaatattatttttttgtgaggatccgatttgatccaaaacactgctgatctatggg

SEQ ID NO: 118461 - DNA, 261 bp, Zea mays
  Clone ID: MRT4577_39524C.1
atggctccagcaacaaaactgcacgcgaggccgacgatggatgcgggaaataactgggacgcacgcgcgcagaggggattggaggatctcggcctcgcgcaaatatgcgggaggagacaatgccgatgggtgacatcgaaaaaaatagggaaagatgatggacttgttggaggcagatggatgggtagaggagagggagtggattcgttgctaggttgtttatgcagtgcaagtgctctagctgttgttgctgaatcatag

SEQ ID NO: 118462 - DNA, 249 bp, Zea mays
  Clone ID: MRT4577_39525C.1
atggaatcccacatcaccacagagcttgaagctacattaggcattaatttatccttggttcctggcattggaagagccacaattctcgaccgcaatactatcagtgatgatgtggatatacccgggattaatatcatatccacatttgacttattggcatttgatctattctgcggggacgcctgcaaatatgatctatcagccttagtcaaagcatatgttctgattgcagattcacgtggtctttga

SEQ ID NO: 118463 - DNA, 263 bp, Zea mays
  Clone ID: MRT4577_39526C.1
atttcatttgatctaaacgagctcgctttagatgagctagatgaagggggccagctgccggatgatgctaatgagctcggcctcaacgatgtgctcgttggaaaatggcaacgacatggactcgaacttacctatatatgcgtttggcgcggggtgagagtaccaccatcgaaatgagatgacaaatgatatgaggagacttgtgtatcaaagggcgatggctcgaagcaataacgcgagacttcacaagaaagttacccgag

SEQ ID NO: 118464 - DNA, 1652 bp, Zea mays
  Clone ID: MRT4577_39527C.1
ctcgaggccggccgggaagacattctcaccgagccgaccgttgccttccctctcaactcccagccccagcgtcaactgactacactcgcggctgagcgctcccccggttccccttctctgctcgccatcttttgctctccgcttggctcgtcaatcacctcctacgctccacacgccgccggcgactacaactgcttctgccgtggttacagagaagaagggtttggggagaagacaacctaaatcaattggatctgggagtatcagatctaaaaagtcaggttttcatcaaggtagaaaaagaaacttttctgtacggtatggctttcccaactgcagcagctgttttgcttaatgagaacatgcagattcataaaggaaacagggttgatgcaccaagtgccaaaccactgaaatcatcagccaaacctgagagaaaggctcttcaggatgtgtctaacatgcctaaaggcactgctttaaagaacagatccacagtcaaagaggggtccgggctcttcaggatgtgtctaacattcctaaaggcactgctttaaagaacagatccacagtcaaagaggggtccgccttgaaagaaaggcctgcactccacaatgtgtctaacaacctcaaagagaggtccatcctgaaagagaggcctcctcttcaggatgtgtctaacacccgcaatgagaggtccatcctgaaagagaaatctgccctgtgtagccatgaagctattaagaacccaatgaatatttttgctgacacatgaggtatatggtcatgtgatgtttatggctatggttcccaagttttctgaagaatcgaaagagctggagctggaaccagagattcttccagacatcactaggtgtatgtctacctcaggcaagagggatgatgcaccaagcgccaaacggctgaagcctaagcttcaagaaccgaaggctcttcaggttcaggatttgtctaacactgtcaaagggagcccttctctgtgcagccatgaagctgtgaagaacccagtgaaaatattcactgttgaagagaccaaaaagtgtcatgaatcggctaatgatgtgtcggagggcactcacttcacaggaaatgatcgtcagaagctggataaggatgtgcaaggcaagtgacaaaacacagctggttgaagattctcctactgatgatgagcttgacgactacccatttttggacaacagtcctgttaagtttgagctgaaagatgagtcagtgattccagatattggagcaatctgaagtgatagtgtttgtgcgattgttctgtagcaatctatgtagtacgatgtttagtacatgttgtttgttctgtagcaaactatgtagtttgagctgaaagatgagtcagtgcctcatcgggtacttttgagtaccgtagcggttgtcaagtttcatgctctcctgaaacatccttcgcaactcgcaagtgaaactctggtttatgccctgaatcagctgctgaataagctaatgattgcatgagtatccgttgatgcatagtagtgaaaggaatggctaagagggagtgaattagtttttttttaattttgctctaatctatgttttcagttttcagctaatgattgcatgagtatccgttgtgcgtacttcta

SEQ ID NO: 118465 - DNA, 1634 bp, Zea mays
  unsure (1)..(1634): unsure at all n locations
  Clone ID: MRT4577_39528C.1
aggatgaagacaaacattcaccgagccgaccgttgccttccccacaactcccagccccagcgtcaactgactacactcgctgactcgctcccccggttccccttctctgctcgccatcttttgctctccgcttggctcgtcaatcacctcctacgctccacacgccgccggcgactacaactgcttctgccgtggttacagagaagaagggtttggggagaagacaacctaaatcaattggatctgggagtatcagatctaaaaagggttgatgcaccaagtgccaaaccactgaaatcatcagccaaacctgagagaaaggctcttcaggatgtgtctaacattcctaaaggcactgctttaaagaacagatccacagtcaaagaggggtccgccttgaaagaaaggcctgcactccacaatgtgtctaacaacctcaaagagaggtccatcctgaaagagaggcctcctcttcaggatgtgtctaacacccgcaatgagaggtccatcctgaaagagaaatctgccctgtgtagccatgaagctattaagaacccagtgaatatttttgctgatgacggagagaccaaagggtgccatgaatgggctaaggatgggatggagggcactcacttcactggaaatgattctcagaagttggataaagatgtgcaacacaaacgtatcaagaagaaagtggcgaaagttacgtcagcattgtatggctggtcacatgaggtatatggtcatgtgatgtttatggctatggttcccaagttttctgaagaaatcgaaagagctggagctggaaccagagattcttccagacatcactaggtgtatgtctacctccaggcgaaaaggggatgaatgcaccaagcgccaaacggcgtgaagcctaagcttcaagaaccgaaggctcttcaggttcaggatttgtctaacactgtcaaagggagcccttctctgtgcagccatgaagctgtgaagaacccagtgaaaatattcactgttgaagagaccaaaaagtgtcatgaatcggctaatgatgtgtcggagggcactcacttcacaggaaatgatcgtcagaagctggataaggatgtgcaaggcaagcgtgacaaaacacagctggttgaagattctcctactgatgatgagcttgacgactacccatnttttggacaacagtcctgttaagtttgagctgaaagatgagtcagtgattccagatattggagcaatctgaagtgatagtgtttgtgcgattgttctgtagcaatctatgtagtacgatgtttagtacatgttgtttgttctgtagcaaactatgtagtttgagctgaaagatgagtcagtgcctcatcgggtacttttgagtaccgtagcggttgtcaagtttcatgctctcctgaaacatccttcgcaactcgcaagtgaaactctggtttatgccctgaatcagctgctgaataagctaatgattgcatgagtatccgttgatgcatagtagtgaaaggaatggctaagacctaagagggagtgaattagtttttttttttaattttgctctaatctatgttttcagttttctcttaatcaaaatcaatgcagataactaattgttcacatgt

SEQ ID NO: 118466 - DNA, 459 bp, Zea mays
  Clone ID: MRT4577_39529C.1
atcacctcctacgctccacacgccgccggcgactacaactgcttctgccgtgggttttcatcaaggtagaaaaagaaacttttctgtccggtcatggctttcccaactgcagcagctgttttgcttaatgagaacatgcagattcataaaggaaacagggttgatgcaccaagtgccaaaccactgaaatcatcagccaaacctgagagaaaggctcttcaggatgtgtctaacattcctaaaggcactgctttaaagaacagatccacagtcaaagaggggtccgccttgaaagaaaggcctgcactccacaatgtgtctaacaacctcaaagagaggtccatcctgaaagagaggcctcctcttcaggatgtgtctaacacccgcaatgagaggtccatcctgaaagagaaatctgccctgtgtagccatgaagctattaagaacccagtgaatatt

SEQ ID NO: 118467 - DNA, 345 bp, Zea mays
  Clone ID: MRT4577_3952C.1
tatatttttttttttaaaacaacacacctcggggggctgtttaagggaaacaaggaaaaacccctcccaggaaaaatttccaaacattgacactcggtgcacaagatatttgttcccttgcacagggcgcaagaagctaaactaaaggaaaggggtgcgctatgaaacaatacatgagccccacctgtttaaaatctgaaccaccacaacactcatagaggggtgggcaaagcttttccggaccaatatcgagtgcttatctacgcccggaccccctgtgtagttttaagcgccccaaaaaccattgggggcaccagtgtcatacccaaacctgaaagcccaggc

SEQ ID NO: 118468 - DNA, 378 bp, Zea mays
  Clone ID: MRT4577_39530C.1
atcaaaattaaaaaaacccaagtcttcacagatggatagataggggggtaacacggggaaccagttacaaaaacagggcccggggtcaaaaacccccaaggggtcgaaggaattccctttaagggggaaaggggccaaagcccatttgacaaaaagctggtgggcaaccctattaaaaaacttttaaaaggggggagccccccccgggggcgggttcacccgggggagggagacattcaacgccccaaccttggatttgccttaaaaaaccttccagggatcccacttggccctgtccttttgggaaaaaatgcccggacgaacgggtttcacatctccaaccggggcttggttggaaagccccaataggaccaactt

SEQ ID NO: 118469 - DNA, 934 bp, Zea mays
  Clone ID: MRT4577_39531C.1
gccggccggttctcgatgaagacaacattcaccgagccgaccgttgccaattccgcacgaggcccaactcccagccccagcgtcaactgactacactcgctgactcgctcccccggttccccttctctgctcgccatcttttgctctccgcttggctcgtcaatcacctcctacgctccacacgccgccggcgactacaactgcttctgccgtggttacagagaagaagggtttggggagaagacaacctaaatcaattggatctgggagtatcagatctaaaaagtcaggttttcatcaaggtagaaaaagaaacttttctgtccggtcatggctttcccaactgcagcagctgttttgcttaatgagaacatgcagattcataaaggaaacagggttgatgcaccaagtgccaaaccactgaaatcatcagccaaacctgagagaaaggctcttcaggatgtgtctaacattcctaaaggcactgctttaaagaacagatccacagtcaaagaggggtccgccttgaaagaaaggcctgcactccacaatgtgtctaacaacctcaaagagaggtccatcctgaaagagaggcctcctcttcaggatgtgtctaacacccgcaatgagaggtccatcctgaaagagaaatctgccctgtgtagccatgaagctattaagaacccagtgaatatttttgctgatgacgaagagaccaaagggtgccatgaatgggctaaggatgggatggagggcactcactttactggaaatgattctcagaagttggataaagatgtgcaacacaaacgtatcaagaagaaagtggcgaaagttacgtcagcattgtatggctggtcacatgaggtatatggtcatgtgatgtttatggctatggttcccaagtttctgaagatcgaaagagctggagctg

SEQ ID NO: 118470 - DNA, 631 bp, Zea mays
  Clone ID: MRT4577_39532C.1
gggtacctcgaggccggccgggccggggttactgccgctcgcgcatcctattgccctcgcgccaccgtcgccgccgctgcagtgagccaccgccctgccgtcgcctgaggtagacaccaagccaccgccatgggagcgtatgcacagctcgagaggaagggtatctcttcgtcggcgctgccgtgcaagaggactcctccgatctggctcaagacaggtaccaccgaggtgtaggagatgatgtaccgaggctgcgaagaagggccagatgccgccgcatgattggagttctgctccgcgaccggcacggcatccctcttggcaagagcgcgactgatggcacgatcctccgaatcctctatgcccatgggatggcgacggagatcccgtaggatctctacttccgtcatgaataatgcggaggcaatctaccgaatgcatttggagaggaacgggaaggacctggactcctaattctgactcattcttggtgagagcaggatccaccgacttgcccggtacgacgagggtactaagaagctcccatcccactctggaagtacgagtcaactacagcgagcactctggtgtactaagagatatcctccgatggcttgcgctttagcaccta

SEQ ID NO: 118471 - DNA, 558 bp, Zea mays
  Clone ID: MRT4577_39533C.1
ctgcaggtcgactctagaaacttatatacccggatgatctggttctcaagcttgctacatatacatgtccacttcttttttttctccacagtagcaaccttattggaacactacccacttaaaaagaatgtgggtgggactctcaataaacaatataataaaaatatgattaaaaagtcgtttgcttttggaaatgtcgaaaatgaaggttataatagaaaggcatactattgaaaggtttttacatgcttaataaaattgaggtataagctttatcatattttaattaacattatttgaatattatatattccatataaaatatttaactttagtaaaattacactatgtgaaacatctttatgctacacgtttagtggactcgaaaacatattactaatcatgtaaatactaattataaactgagatacaagactaattagtttttatttagaaagataattaaacaaatactagacattttaaatcttgttaagagaaagacatgcgtgggtactgtcggggaccgtaattaggggtacccccaatggttcttga

SEQ ID NO: 118472 - DNA, 106 bp, Zea mays
  Clone ID: MRT4577_39534C.1
acggtccccgactgctctctactctctattgttgacgactgggctaccttctacacagctgcgctacgctatgtattcaggtcgcgtgctctatacttgtacctaa

SEQ ID NO: 118473 - DNA, 550 bp, Zea mays
  Clone ID: MRT4577_39535C.1
taatacgtactcactatagggatagtgcgggcagccgcccacgtgcttgtgttatttgtgggaaccctcatacatcatgacaaaaacttgtattattgaacgtgataactcatgaggaaatctaaaagagggcgccaccaatgagggcatgttggtagaacactgctgcgtctgtgaaagcaagtaagatgaatggcagctatcgctgcatatgtaagagggtgccagcgttaggcgcagcgtgttgttagaacgacaacaactgggggttagtgaagaaagcaggaagactcacaccaggtaggtggctgaatggtagctgaatgggctgctgtgaataagcaagatagatcaatgctgctatgcggttaaatggaagaaattgataaacggaggcagctgatagctggctgaatggtaggttatgacaaggcgaataagaagcagagctcattgcgagctagtgccaatgaatggaacaaactgtacttgctgaatatgggcagtatagtttgctagcacaaggtgtgagaattgaagaggcctgatg

SEQ ID NO: 118474 - DNA, 454 bp, Zea mays
  Clone ID: MRT4577_39536C.1
tacaagcttttttttttttttttttttttttttttttatttttttttttttttttttttttttttttttttttttttttttttttttttttttttttttttttttttggttttttttttttttttggtggtggttatttttgggggggggggggggacgttttttggggtttggtttgttttattttttttttgggggaaaatttttttttttttcattttcaaaaaaagtaaggaggcgaaaataaaaagggaagcgctgggtggtaaattaagggggaaaactgcttttttttaagtggggtaaattggcggttttacagttggaaaaactttgcctccttcggaaagaaaaaatcgccaaaaccctaaggaaaagggctcgcccattggggggctttttgggtttagccttttttggactctttggcggttgtactcttgttgaggggagg

SEQ ID NO: 118475 - DNA, 521 bp, Zea mays
  unsure (1)..(521): unsure at all n locations
  Clone ID: MRT4577_39537C.1
agcgtccgggctgggttgaacggcggcggccgctgctgagccacattaccttgctgttgctgagactgcacccagccacagtgcgccgccgccgccgcagcttgtagctggacttgatttatgaaggtgccggaagagttcttggttgcgggttgcttannnannnnnnnntntnnnnnngggggggggggaaaaaaaaaaaaagaaaaagggaaaaaaaaaaacacaaaaaaaaaaaaaaagggggggggggttataaaagaaccaaaaaaaaccacccaaggcgaaaaaaaaaaaaaaatattaaaaaaaaaacaaaaatggggggggccccttcaagagagaacaaaatcacggggccgggaaaaagccttgtattatcttttttttgggcgccaaaaaaaaaaacccggggcccggtttttaaaaagggggaaggggggaaaccccggggatccccacaaaaattcgcccggaaaaaaaggccccttttgccgggggcggtaacaggaaaaggggcc

SEQ ID NO: 118476 - DNA, 509 bp, Zea mays
  unsure (1)..(509): unsure at all n locations
  Clone ID: MRT4577_39538C.1
aagcgggcgggggcgagagaagcacaaggaggggcgaccgccggggaagaccgcgagnggcagncccgccaggcacccaacaccggacggcccgagccacccgccgccgcccgcgacaccgcgcccccagagccgacgcgaaggcagcagccccagccggggccccggcaaacaccgcaaccacccccgaagggaagacgccaccgngcgggcncaaggcaacgaggaccagccagcgccgacccgcggggagaggcnacancggcaaccgcngcggcagnagcccgccggccgncgacacancgcgcaagacaaaaggcccgcgcaaggcnaananggccaaacgccaagcaggagangngncncccgagagcgccaggagaagagccgnacaccngcggaagnggccacgagccaaagaganaagccccggaagaggcgacacgaccgagcccagnccaacaggcagaacaanagccagggcagagagagcacaagaccgcgcaaca

SEQ ID NO: 118477 - DNA, 161 bp, Zea mays
  Clone ID: MRT4577_39539C.1
cgaacgcgctgatactggcaggcaccaactacatggctatccaaggcgaacctggagctgtcattcatggcaagaagggatccgctggcatcactgtgaataaaacacgtcagggactcttatttggcatctacgacgagcctatgactccacagcagtgc

SEQ ID NO: 118478 - DNA, 505 bp, Zea mays
  unsure (1)..(505): unsure at all n locations
  Clone ID: MRT4577_3953C.1
ggtcccaaggctggggggagcgctgggaaacaatcctcttggaggggaaccaaatcggggctgtgacccagagtgtcgaagctgtcangatgtccaancgcgcccgggggggagtgatggcaagccacaggagtggcgagacagaggacaccttcattgggggggggggggggggctntctaccggccaaatcaagacgggagccccttgccgggctgagcgcctgggcaaatacaaccagcgtgctcngagcgaggaaaactcnggagtcccgggctaccccgggcaaatgcagggcccagggagccccgtaanaggggggggggaggatnttttcttntgtagctatactanctcgctgctgccttttgtgacaatgtgtntgcgggggcgataaatgtgtggtggtgtgtgctcnagagctactcaggtgattntgtggggggagcaccaaaagcagaaaagagcccttttttttcaatctctctanattctgacgaggggg

SEQ ID NO: 118479 - DNA, 2375 bp, Zea mays
  Clone ID: MRT4577_39540C.1
ttcaaatttgctgaatgttccagaacaatgatttgtccagaagtgatattcgaaaggagtatgttaccgagaaaacaaaatgaaagaaagtttctgttattcctgcttacgttttgaagtcgtccaagacaccagttctaccttgtcttcccaaaaacgatagaccaaatgatgttgaggatgacgatttactcatttcagtgaataatgttaacatagcgccaaatgagcatgccgaggaggttcctacaacacttgctgatattatttatgaatcagatttgcaagatgttccaagagaaagcacctctgatgatttagctccaaaagtggtatgttgccaacaaaagcttttggaaaacacaggagatgattccggtaaaactttagaggtggttcaagattcaggcgatatattgtctgtgactccacatggtcttcagatggcacacaatctatacccccctgacaataaattgcataaaccagatttgaagaaggaagcttttgctgatcaatcttccgctcttgggaattgtttaaaagattttgttattccagagcagtcttacatctggcagggtgggtttgaggtttcaggacatggaaactcccctgaaatgttcgatgggtttcaagcttacttgtctacttgcgcctcatccaaagtacgtgaagtaggtgaacaattacctgacaaaattcagctggcagaagtcccacggcattcctcatggccactgcaatttaatgaagtaaatccaactgaagataatattgctctttttttctttgctaaagatgttgaaagttatgaaagggcatatggtaaactcttggataacatgcttcttggtgatttgtctcttaaagcaaatattggtggcactgaacttctcattttcccatccgataaattgccagagaggattcaacgttggaatggtttacctttcttttggggcattttttatgcccggaaagcaagtagtccactagagcttcctacaaataattgtccattagaacaaatcaatgaacctgttatccagcatgatattggttcgcctaaggcacatcagcctttgggtatagatttgaatgagtgccctaatgattatatatctgatctgtctctttcacttggatcagagagtgagaagtctggtgcatctttagatcgtaatattgtattagagtccaaacgtgaggatagaagtctgaatgcaagtgaaatacatcatgaagaaactgcaggcacaagacaaattataccggggcatccttctgttgcttcctgtggaactaatcttcccacaatctcaacaggaggtcatgacatgattcaggattatctggctgctgctaaaggtagcacaggaacaccaggtggaaacaaaatggagaaaacagatcagaatgaaactctgttccgtttttcgcagcaactaggtgcaactagatcaatctcacatgagatagaacttaataaacatggtcttttgccctcgcactgtcatttgagtggatcaaagatatgtgatgatcaaaccaaatcaactccaaattcagatatgggtcctttggattttgacatcaccaacaaaaggcagaagacttatgggaaacactcttgcatttttggagatgcaatgacacctatgaaatgcttgtccaagatacatcccttaccggctggacaggataatccatgcgatgttttacagcattgtcatcggggcccttcagatcctgcctctcttaaaaaacctttacctgatcatttcatccacgttctttcatctgacgacgaagattccccagaacctagtactagcttaaataaggcatcatcgaaggcagatgagggctcctccattttatgctcactttccctatccatggtggcaacgaagcgtaatctttctggttcagatattgtagatgatgaaccactgtctctctctcttgggctccctagtgttgtcggtgggagagcagatcaggagatgaagcaattcctgccggagaagccaggcataaacacttaatgcccctttagatttgcgagtgtacagttttgtgcagctgtatggagtttagacagggtagaagtatggtatagctgttaaattatgaatatttttcatttttttctctctcactgttatatgcatctgctgccgttgttagtgataatggtgtgatgatgttactatctgccatatctatgagatatatggtgttagtttcttgagatattatgggtatgacataaaaggatagatcaaaatgtgaatgtttgtgaattcattttgtcatggtttaacttgcattttctatcccagtggcaaaaaaaaggtgtatcctatcct

SEQ ID NO: 118480 - DNA, 350 bp, Zea mays
  unsure (1)..(350): unsure at all n locations
  Clone ID: MRT4577_39541C.1
accaagtcctacaccgaccaggaagccggagggccactgctccacggcaccgaaccgatacttcaatactactccgacgaaacaaacagcaacagcaacagcaacgacagctccactgccaacaagagagcattatggagcgtcctgggcgtgctagagcttccgctgagtctaccgcggcgactgacagatcccgcacgcgagcaaagagcggtggagcaagacagccgtggtgaccgagaacacactcgcccacatctacctgtccttgctcgggagccaccgcgccacagngggaccggtaggtaccgtactcctaggtcgacttgttggtttcgcgctccgcctaa

SEQ ID NO: 118481 - DNA, 328 bp, Zea mays
  Clone ID: MRT4577_39542C.1
ctcagttggtatcggagcaggtctcttcctttgggtctaactgcctgaagagatgtacctcaaaatcaaggtgaaggtgtctgacgagaaggagaggatccccctcgatgaccagcccatggtagacaagatcgtcgagtcgagatcaggcaagaaggaggggaagaagaaaaagcacatcaagaagaacatctactacgagagcgacacttcttcctctttgcaaaaggactcctcctccaagaaaaatacaattaaaaaaaactacactaaaatgtattttaattattctgacatttcttacaatttcaatgcccattttctttct

SEQ ID NO: 118482 - DNA, 213 bp, Zea mays
  unsure (1)..(213): unsure at all n locations
  Clone ID: MRT4577_39543C.1
tccacgcgttcgcatccaatagcagtagcagagacaaagcacacacacacacaatcgtgccaatggccgacacggccgacgccccgctcctgacaagccacgggcaggccaagcagctggccaaagcgccgtccatcgacgacaccatcgagacgtacatcggcgcgaccggttccatgcagctgctcagggccgtnctgctggcattcgcgt

SEQ ID NO: 118483 - DNA, 326 bp, Zea mays
  Clone ID: MRT4577_39544C.1
ctttcagtatgacgactgatcttggaaatgtttgtgataagatctgcagacttgaatgctgagttgccacataatatcgggactacatattatatagtcattcaacgcaaggctatttgattatctaatatcgacggatgacacttaaacaaaggagaagcataccaattaggactatagataagaggcatcattgacccgcaaacggatcaagcaaaccaataaggtgaaccagatagagctaaacgtgtcccgcgaacatttgccacagactttacatgcttaatacggagttgtcagacgaactgactgcaaaaatgcattta

SEQ ID NO: 118484 - DNA, 1285 bp, Zea mays
  Clone ID: MRT4577_39545C.1
cattgggtacctcgaggccggccgggctcgcgtgaagcggcggcgactccacctggcttgcgtcctcccgttttccagccagcaagccagactcctcccctctccgaagactccgatcgtccggattcatccagatccgggcgttctgagtcctgccgaggctctagatcgcgtcgcgcacgatgccacgcgacctgtcgcggtcgcggtctccgccgcgccgacgttggcggtcgccgtctcccgcgcggtaccgcggccggagggggcgcagggaccgaagccccagtcccatccgtagcaggtccccctatcgctcctcgtatagaaggaggaacccttcgttttccccaagaaggcacaagagccgttctccgtctcctaggaggcgcaagagtccgtctccatcacaaaagcgttacagaagaaagagaagtccgagtgtcactagctctccagtcgctgcatctcagagttcccaccttgggttggcagagaataagaatgttattgatacacaaaggctagaagaagaaaagaaaaggcgccaaaaggaagttgaactgagactattagagaaggagacggcaaaaagagttgaacaagctattaggaggaaggttgaggagagtctaaattgtgatgaaatcaaacatgaaatacatcgtcgaattgaggaaggacgaaagaggatacatgaggaggtagcaatccagattgagaaggaaaaggatgcagctttaaatgaagccaagctgaaagtggaacaagaaaaaaagaagcgggaggagctagagaaaaaacttgaagaagaacgaaagaaagctgagaggcgttgatgaaagaagcgttggaacagcagcagaaagagctagagcggtaccaggagttggcagaggcttcagaaagaaagagaggaggccatgaaacggaaaaaaatggaggaagagcagcagaggcaaaaccagatgaagctgctgggcaagaacaagtcgcggcctaagctgtcgtttgcttttgggatgaagtagcgttcgattcaccgaacgaaattagtgctttagtatactgtaaccgtgtagtgtagtacctctgtatgaaactgcccatttctaactctggcagacaaattgcgatgtcataaatgctcctgatctgcttcgtaaaaaaaaaaaaaaaaaaaaaaaaaaaaaaaaaaaaaaaaaaaaaaaaaaaaaaaaaaaaaaaaaaaaatgtaaatccctaaaaaaaaccaataaaactttccaaatttaaaagggggggc

SEQ ID NO: 118485 - DNA, 1941 bp, Zea mays
  unsure (1)..(1941): unsure at all n locations
  Clone ID: MRT4577_39546C.1
cgaccggcaatttacgaagcagatcaggagcatttatgacatcgcaatttgtctgccagagttagaaatgggcagtttcatacagaggtactacactacacggttacagtatactaaagcactaatttcgttcggtgaatcgaacgctacttcatcccaaaagcaaacgacagcttaggccgcgacttgttcttgcccagcagctacatctggtttagcctctgctgctcttcctccannnnnnnccgcttcnnnnnnnnnnnnnnnnnnnnnngaagcctttccaactnnnnnnnnnnnnnnnnnnnnnnnnnnnnnnnnnccaacgcttctttcatcaacgcctcttcagctttctttcgttcttcttcaagnnnnnnctctagctcctcccgcttctttttttcttgttccactttcagcttggcttcatttaaagctgcatccttttccttctcaatctggattgctacctcctcatgtatcctctttcgtccttcctcaattcgacgatgtatttcatcgcttgatttcatcacaatttagactctcctcaaccttcctcctaatagcttgttcaactctttttgccgtctccttctctaatagtctcagttcaacttccttttggcgcctctagttcgttccagatccaaaaacgaattatcaaaactgatcaagagtagataaatgatcaccaattgcatcatcaaatataacaagtggaactatagcagtagctcccttcggtaaagcctgtagagaagaatgtcaagtaatttgtggcaggtttagagctaatcatgaggcattaagatattccaactaaaccatatttcttggatgctacttactacatgcccaaccaaaatcataattcaagcctcaatacaattatagaataaactacctactgctaattagtggaactgcataaccaggaatgatttttggataatttatcctgacaggttatctcataccacatggcatgactaaaaaaaggatcagaaacaagcttcttttttctcaagtatgcaggaaaactgcgatcagaaacgaactaaaataactacattacatatttagagcacaaaaaagtgaatttcaatgacaacatggtacataattgataattgaaattcagccttttcggtttccttaccttctaaagataacattacagcgcagaggtcaaactaactcagaaatcctccatctatcatactactgcctagttcatatgatagtgatattacagagaagtccaacacacaacaaatcaagcgaaaaacatgagtgctaactcaataatgaacaattactaaaaaacttttagtcctgaaacacaactgaggacaacatctgtgtcaaaatagatagcctacatggaaaaaacaaacaaacagttgcaatcacaatatataattccaatcaacatatatgacataatcctggttgtatgctcagacaatcctgactgtatgctcactgttaaggaagctgatctatcgcaattggtagagcatgtggttctgtggctagcccaggccacctaggttctagtcctcgtcaaggaaaatttgcatggctattttcttcttgataataaaatgccacctggttcctcctatgttggtctagtttttttaatcctggcaatagcttatctctttgctcaaaaaatagtcaataaaaatcatgcataattttttctgtaactttgtgtttatgtggaaaaaaactcttctgatggcacatctcaaggagcattgggcagacttactgctggaggctcccacacgagtagcgtctgtgaagggataagccgaggcgagccttcccacataaatgtggagaagttgcttcgaacccatgacctgatgactcagtaagacagctctgacaactacaccaaacatctcaagaagcattcatgat

SEQ ID NO: 118486 - DNA, 337 bp, Zea mays
  unsure (1)..(337): unsure at all n locations
  Clone ID: MRT4577_39547C.1
ttatactcatcatcatcacacacaacttatttaatcaaactctntggaaaatcgatcataactacattcgtgtgggccatatcccatacacacaaaaaaaatatctcttcatcgattttcattctctatacattcgatacatatagcacaactttttttcaaccaaatccctcattcatatgctatgaatcacattacatacctctcctaattccttacctggaaacaccttctttttctaactctaactacacactgacttaattaaaagacaactacttcactccctaattctttcttgcttaacatcccaacaccttaaacaatatattaaaac

SEQ ID NO: 118487 - DNA, 680 bp, Zea mays
  Clone ID: MRT4577_39548C.1
gggtacaaggccgcccccctcgagttgttttaattcctttttttttttttttttttttttttttttttttttttttttttgggagggggagggggttttttggggcgttttccatggggttataacacacagggggatacaggggcttaagaaaccccggccggccgggatttattttaccccccccacagaggcaactaaatcccgaaaaaaaagggggaaacaacatgatcgagggggggggggggacacaaacccgtacaaacaggcatatataatcgactttcgatccatgatcatcaggggaaaacctcaatgagggacgggatgcctcgggggggcgggatcttgtagtcacggaacccacccgccagaaaaatcctcctccattggggctcctcccgttccgccccgttaacaaagctaagtggggggagatccaacaaatacgtttccctgcacgttttggggtcgtcgtcgtcgtctgcccaaaatccaagcaccgggtttattattataaccttcccccctgtttccttgccaccgatcgtttctttggagggctccattatttggaggcactggccctcatcccaggggggcaggatccatttgagcatgagtgcgtcacccgacgggatgtgctcaaacatgtcccccccggggaaggacaggccggg

SEQ ID NO: 118488 - DNA, 638 bp, Zea mays
  Clone ID: MRT4577_39549C.1
ccggccgggccgggcttctaaagcctacccgactgcgtcgccactacgcctcagatacagactaacgtatctcacctcacgccgaagggaccgagacctaatcgatcaccttcagcgttgcatctggtgcttctccaattgctgatagctaccgagacgccgacgctcccactaccaggacgcgcctacatgccaccgtgccggggctgcacactacatgcacttatcttagatgaccacgtgcgacctctcccctgtcttcccccctggggccacctacacatgctactaagggagccgtagagaggaccccgtgtcgctcatcactaaactgcgtgatagtcagaactaatgctcctgctggtgagaagccagagacactcaagacacatctccgtaacgtgatcattgtcgctgagatagattggaaccattagagtaaagtctactacggcaagacatgctaccatgtgtgacaccaagcctgagatgatcggccactaccttgctgagatctccatctcctatacacccgtacagggatggcagggccggtatgggtgacacccactcctcgctgtttactgcgctgaaatgagctgctacccggattctgtacactacaaagagcccgaatg

SEQ ID NO: 118489 - DNA, 564 bp, Zea mays
  unsure (1)..(564): unsure at all n locations
  Clone ID: MRT4577_3954C.1
agtacacctgtntctagcacacgcatcgatgactagggatgggggtgctgctcttaactagataagactggggagatactagctaagtgctcaaggagggcgagctcgctcgctacctatgccgtaagggaaagtgctgcaggccaatgggtatcgactctctggtcaggaggaagtccaaggcatgcaccttgatgagcgacattggctatgggtatgacatggagcacatgcactgcctcttcatcaagagtcaagaagtaatgtggtccacactgtttctctacctggagccggtcatgacgcacatgaaggacctactaggactggaattgctcacagacgtgtcactaataagctgcaggaagatcgctggagcgctctgctcaattcgacattgacggcatgaacaagcttgctaggctcagcatccaggagacgacgagaatgggtccttgtcttaacgacgaactgtatgacgccattactttctgtaggaaactactttgcttgtgtcccggtagtactgaaaaccagagtcactcctacctttttgcaatcagt

SEQ ID NO: 118490 - DNA, 322 bp, Zea mays
  unsure (1)..(322): unsure at all n locations
  Clone ID: MRT4577_39550C.1
gaacaacaataaaaatggcatttttttatagtcagccatttcccacccaaactgtacatagggatagtttttaacacttttaaatttttaaaaagggataatgtgttcctttttgctaaaaaaaaaactggactgaaagcaacaccggtcgccgtagctactaaaactgtggtaagcaaaaggttcttcccccgcacatatcanctgcngtcgacctcatttggtgggacccaagttggaagctgcaacctttttgacgtcaaccttcccgatgggaaggcgagccatctaaaaggcgcggtgctttttaatgctccttttt

SEQ ID NO: 118491 - DNA, 397 bp, Zea mays
  unsure (1)..(397): unsure at all n locations
  Clone ID: MRT4577_39551C.1
cgacatccatnattgagttaaattacccaagtaggcctcatatgtttgatctaccccgattcctgatgccttgtcacattatcancgtggcaaatgttttgtggtaaaaccataggagcaaacggagattatttatatctggcgtataaaaccgtacccagtgtgttgcatctaacattcatctcnccttgacacttcgacagtgtaatggccaaccagttatcgcttgagtctggaagcattccccgttaggtcctgtttgatttgaggcttgaaanaattttagccggattggtcctatnatttagataagattctggtcgaatcctggagaaacgaatgtatcggaatgggaccaagaactatttcagctcaaataaacatatcattccacatc

SEQ ID NO: 118492 - DNA, 1810 bp, Zea mays
  unsure (1)..(1810): unsure at all n locations
  Clone ID: MRT4577_39552C.1
attggtacctcgagccggttgggaacctcgaggccggccgggactccgatacgcggggatgcataggcgtcggcaggaggagctcatgtcgaacaccaatagcgttagccgttagccaccaccagtaggcagtagccacagcagtcatggggtcggtgccgccggcagagggggacaggcgccagccccagcagcagccgcacgtgatgatgatcccgtacccggcgcagggccatgtcacgccgatgctgcagctggccaagctactccacacacgcggattccacgtcaccttcgtcaacaacgagttcaaccaccgtcgccacctgcgcgcgcgggggccgggcgcgctccacggcgccccggggttccgcttcaccgccattgacgacggccttccgccctccgacgccgacgccacccaggacgtccccaagctctgctactccaccatgaccacctgcctaccccggttcagggacctaattgtcaggaccaatgccgaggccgaggccgagggacgccccgccgtgacgtgcgtcgtcgccgacagcatcatgagcttcggcctccgcgccgcgcgggagctcggtctccgctgcgccacgttctggaccgccagcgcctgcggcttcattggctactactactaccgccacctcgtcgcacggggtatcgtcccgcttaagaatgaagcgcagctcaccgacgggtacctggacaccgtcgtcgactggatcccttgcgcgcccaaggacctgcagctccgggacttcccgagctttgtgcgcaccacggacccggacgacatcatgctcaacttcttcatccacgaggtagaggcgatgtcgcaggcgtcggcggtggtcatcaacacctttcgatgatctcgacgcgacgctgcttcacgccatggcgaatcctgtcccggcccatctacaacgtgggcccgctcctgctgacggtgcgaaacaacgtccccgcggacagccccgtcgcgggcatcggggtcaacttatggaaggaaaagagggccgttcggttggttgaagggcggggcgcttcgttcgtgtaatcaattggggggtatcacggtgatgtccaacgagcagctggtcgagttcgcgtgggggctggccaacaccggctacaccttcctctggaacgtgcgcccggacctcgtcaagggcggcgactccgccggcgcggggctgccaccggagtttctggccgcgacggagggccggagcatgctgtcgacgtggtgcccgcaggcagaggtgctggagcacgaggccgtggggttgttcttgacgcactccgggtgggactccacgattgagagcatctgtggcggcgtgcccatggtgtgctggcccttcttcgctgagcagcagaccaactgccggtacaagcgcatcgagtggggcatcgggatggagatcggtaatgacgtccggcggggcgaggtgaaggcgctcatacgggaggccatggagggggagaaagggcgggacatgcgccgccgcgtcacggagcttaaggggagcgccgtggccgcggcgaagctcaacggacgctctatgcgcaacgtggacaggttcatcgacgaggtgctcctagcttgagcattaagggttttttttacaatggtggccttagttttgcctctgtactcaagtctactcttatttttgaaaaaaaaaaaaaaagcggccccatccagccgtccactgccttgnttagatcaaggctcgcacgccgtgtcccccactgttatgttatgaaaacaaaaacggtaattttctgt

SEQ ID NO: 118493 - DNA, 144 bp, Zea mays
  Clone ID: MRT4577_39553C.1
ttggtccatcacagttccagcaaacttaaaggcatataggaagccctcacaataacatgacaagctgttccaaacgtttaatctgcgcacttgcaactagccgcgacagcaaccttgacaacattgtttcccgaaagggaaagg

SEQ ID NO: 118494 - DNA, 745 bp, Zea mays
  unsure (1)..(745): unsure at all n locations
  Clone ID: MRT4577_39554C.1
gggggggggttggggggggggggggggggccatacaaaaacatgggcccccctctcacccgggggggaaaaatggggccgatacaaatgatcgccgtttttgtggaatcaaaaaaaacccttaacaatttaagggatattgtcaaagtcgcgtacgaacaccaaacacttgaaggataatacctatttgactttgccttctacacttacgacgtagtggtcgccccattattaccttaacacctcatgaggggagagaacgaccccctcctcttaccttattccctctcttacccttactcccttctcaatgggagggggaggattacacggtgcacaattatttatacacaaatgagcacccaccttattaccaagtctctttgggctccccttgagataatattagagtacaaaacggacaagtatccttgtggctataacatgttgaaacgcttataatattaaatcgccgggagtcaccccaaaatccaaccatatttttggggagcaaggtgggagatggccaccccaaaaatggggaggcccccccgaggggtgtcctctttgggaaatagacctcacttccaaaattatttatttggtttgtccngggtgttggttctttacttcggccccctaagtgcttcaataataatgganatcttaataaggaatgtaagttggggtccccggttggcaaaggcttggtttgaaaacaaaattcccgggggaaaattgggggg

SEQ ID NO: 118495 - DNA, 366 bp, Zea mays
  Clone ID: MRT4577_39555C.1
agcagaatatctcagtgcgcatttctgcaccaaaacacccgcgtttcacaggaattttgattggtcactgcgaaccaaaaccctagatataggtctcaaacactaaaatgggtcaaagcacctgaaaataattccactgccagaaacgtcgttctagtgcgagtgcaccaggatacaaggtccactcaacgggtgggcttggaaacacgcccaatctcgtccttctttttgatggcgccagctcctggaagagcccttggcaccggtgatcaaatcatctgcaagggactcaacaatgggtttgatggtcctgaaaacgctctccctggcaccacttgtgaggaaggatatgggccggttcaccct

SEQ ID NO: 118496 - DNA, 1867 bp, Zea mays
  unsure (1)..(1867): unsure at all n locations
  Clone ID: MRT4577_39556C.1
cgccagccggncagaaaaatccatctgcggctgcttactgttctcaagcagttggcattggcaatccgccagacgcaagcgtccccctccgctcctctcaaccggcacggcgccagctccgcggcgaaatcggtggacggcatgccgcggcgcgaggcggcgaggcttctccgccgcctgggcccgatcgctgtccagtcgccgaagcgaggtatctaaggttctttcatattgcaacaccaaacgattggctgtggttccacaaggtggcaacacaggtcttgtaggtggaagtgtgcctgttttcgatgaggtgattgttggccttacaggcatgaataaaattatttcctttgataacgtaaatggaattcttacttgtgaagctggttgtgtgttggagaatttaagtaccttcgtggaaaatgaagggtttattatgccacttgacttgggagcgaaaggtagttgccacatcggtggaaacatttcaactaatgctggcggcctgcgttttatacgctatggttcacttcatggaaatgttcttggtcttgaagttgtcctggctgatgggactatccttgatatgcttactactttaaggaaagacaatactgggtatgatctgaagcacttatttcagttaagtgaaggctcgctagcagtagtgaccaaaatatcagtacttacgcctgcactgctaccttcaaacaatgttgcatttctttcctgcaatgattacacaagctgccagaaattactactggcagctaggaggagcttgggtgagatcttgtctgcatttgaattcatggatcatcactgtattgatctggctatgcaacatttggaaggagttcaaaatcctttacctgcatcaccgtacaaattttacgttctagttgaaacaacaggaagtgatgaatcatctgacaagacaaaactggaagcttttttgttgcgttcaatggaagatggtttagtagctgatggagttatcgcacaggatatcagccaagcatcaaacttttggaggatccgtgagggtatatcagaagcatccgtcaaagttggagctgtgtacaaatatgacttgtccataactgtagagaagctctatgatattgttgaagaaatgcgctgccgtcttggtgataatgcagaggtattgggctatggccaccttggagatgggaatctgcatttgaacattgtatcaagcaaatatgacgacaatattctcgcacaaattgaaccattcgtctatgagtggacatcagcacaaagaggaagcatcagcgcagagcatggtttggggctaatgaaagctgagaagattcactacagtaaatcacctgaagcagtacaactaatggcctccatcaagaagttgctggaccccaagtcgatccttaatccctacaaggttctgccgcagtctgtactgtagctaaaaggttaggaccctgtaagtaaaggagtttgttagggctgcttgatgcttgaatggactgtgagcggaggcaaccgaataattgaggcgaacatgcttatcggcgtgcccaatgtaatgattcagttggtggcgtcgtcaaaccacatcggatgtcatctggagaaagagtcattttactgtcgttcaaacttttaggattagcattgaaattttcaggattcacagtacataatttgaatgctaacaattcaggataccatctgctagcatataagatgtccagtccagaggataaactgctcattagggcgacatctgctagctccaattggcaagcactgaaacttgatgttgctctgtaggtatggttggtgtgggaacaaatgaacggagaatttcagggagaaa

SEQ ID NO: 118497 - DNA, 1217 bp, Zea mays
  unsure (1)..(1217): unsure at all n locations
  Clone ID: MRT4577_39557C.1
cctcactgctgcgtctcagtactcagtagtcagaagacgcagccggcaagttcatctgcggctgcttactgttcccaagcagttggcattggcaatccgccagacgcaagcgtccccctccgctcctctcaaccggcacggcgccaggtccgcggcgaaatcggtggacggcatgccgcggcgcgaggcggcgaggcttctccgccgcctgggcccgatcgctgtccagtcgccgaagcgaggcttttcaggcatgcctcataatcaatatgaatccacaaaccacgctgtgaattcttatagaagattccactggattcccagtgtacagcaccctctgtgtggacctacaagtagtgggggaatatatgaaggtcaacgcagtgctaacaaggcttgtgaagttcagaagcgcacatttggttctgctgcaacacagtttcagaggaatccagcctattcagtgctgaactctgatgacattgcttacttcaagagcatcttgggagaaaatggtgtagttcaggatgaagacagagttgcagttgcaaatgtagattggatgggtaaatacagaggtgcaagtcagctagtacttttaccaaaaactactactgaggtatctaagattctttcatattgcaacaccaaacgattggctgtggttccacaaggtggcaacacaggtcttgtaggtggaagtgtgcctgttttcgatgaggtgattgttggccttgcaggcatgaataaaattatttcctttgataacgtaaatggaattcttacttgtgaagctggttgtgtgttggagaatttaagtaccttcgtggaaaatgaagggtttattatgccacttgacttgggagcgaaaggtagttgccacatcggtggaaacatttcaactaatgctggcggcctgcgttttatacgctatggttcacttcatggaaatgttcttggtcttgaagttgtcctggctgatgggactatccttgatatgcttactactttaaggaaagacaatactgggtatgatctgaagcacttatttataggaagtgaaggctcgctaggagtagtcaccaaaatatcagtacttacacctgcaaagctatcttcaaccaatgttgcatttctttcctgcaatgattacacaagctgccagaaaatactactgncagctaggaggagcttgngtgagatcttgtctgcatttg

SEQ ID NO: 118498 - DNA, 539 bp, Zea mays
  Clone ID: MRT4577_39558C.1
cacgcgtccgctgctacactcgcacgcagcccaactgacaacagtcaatagcccaagtgccctgtcgtcgtgtccacgccctcagcgaaaccctagcactcggtcgcgcacaggcacaacgcagcgcactcgcgccgtcggcattcagccgtcgcggactcgccgcccacccaggtcccaggctgggagagtggcagacacccactccgccactcgtcctcagccaccgaccaccgtccgtggttccccgttcgccaccggccaccgccagtccaccacccccccggcgcgccgcgcccctcctcctcccacacagcacacatgcgcacggcttcagctgcagttcatgaacacgactgaaggattgcaatggttctgttttttctgaatagcaccatgccaggactgccatccgagaaggagtcgatacccaacctcatcttgcgaggctttggcaccatcgaccgtgtgaaggcgaagctggagcaggcctgccctgaagtggtgtcatgtgccgatatcttggctctggtagcaag

SEQ ID NO: 118499 - DNA, 439 bp, Zea mays
  Clone ID: MRT4577_39559C.1
aaaaaaaaaaaaaaaaaaaaaaaaaaaaaaaaaaaaaaaaaaaaaaaaaaaaaaaaaaaaaaaaaaaaaaggaaaaaaaaaaaaaaaaaaaaaaaaaaaaaaaaaaaaaaaaaaaaaaaaaaaaaaaaaaaaaaaaaaaaaaaaaaaaaaaaaaaaagggggcgtaattttaataaattcaaggtttgtatggccttattcacaggaaaaaccttatataaaccaaactaaaaataaaaacaacgggccgccttttaaaaaagtggtaaaggaaaaaagggggctgtaacaaactttattcccatgggtggaaaaccctttttggcaatggggacaaaaattaaaagggcccattaagcggggctttaaaaaagggttacacccattgatggcgcataggtttcccccccttttagggccatttaatccgggtgttttt

SEQ ID NO: 118500 - DNA, 350 bp, Zea mays
  Clone ID: MRT4577_3955C.1
agagacaatttttagtttaatctgccaaaggattcacagctccacagatttggagtcgcccaatcggcctacagatcaacctagtacagtacctgcctaatttccgactggtttgtctgtttcgcctccttttttgtttgacctgggactgggttttttttttttttggggaaactcactatgggtcggggaaaatatatgcctacactgtcttcaaaaaacataatgcagtaatgcttttcgaaccccaagcacacttgacacaaagctggggcacatttaaagaggcccccccaattagcaggttgggtctttcgcaagggtgatgcccacaattaaaccggcgaccc

SEQ ID NO: 118501 - DNA, 1016 bp, Zea mays
  Clone ID: MRT4577_39560C.1
aagctttttgttgcgttcaatggaagatggtttagtagctgatggagttatcgcacaggatatcagccaagcatcaaacttttggaggatccgtgagggtatatcagaagcatccgtcaaagttggagctgtgtacaaatatgacttgtccataactgtagagaagctctatgatattgttgaagaaatgcgctgccgtcttggtgataatgcagaggtattgggctatggccaccttggagatgggaatctgcatttgaacattgtatcaagcaaatatgacgacaatattctcgcacaaattgaaccattcgtctatgagtggacatcagcacaaagaggaagcatcagcgcagagcatggtttggggctaatgaaagctgagaagattcactacagtaaatcacctgaagcagtacaactaatggcctccatcaagaagttgctggaccccaagtcgatccttaatccctacaaggttctgccgcagtctgtactgtagctaaaaggttaggaccctgtaagtaaaggagtttgttagggctgcttgatgcttgaatggactgtgagcggaggcaaccgaataattgaggcgaacatgcttatcggcgttcccaatgtaatgattcagttggtggcgtcgtcaaaccacatcggatgtcatctggagaaagagtcattttactttgtcattcaaactttcaggattagcattgaaattttcaggattcacagtacataatttgaatgctaacaattcaggataccatctgctagcatataagatgtccagtctagaggataaactgcagcatatgaaccttgctcattaggccgacatctgctagcgccaattggcaagcactgaaacttgatgttgcgctgtaggtacggttggtgtgggaacaaatgaacggataaattcaggggggaaatcggtactttagggctagtttgccccatttttataagaaaatttcattttctcaagaaaaaataaattagttttccttgag

SEQ ID NO: 118502 - DNA, 714 bp, Zea mays
  Clone ID: MRT4577_39561C.1
gggctctagttttatgtaaaaaaaaggggaaaaaaatgcctcccgaaacgaaaacacttccacagaggagagaggcccaggtcgaacaagattttttttcgattcccctctccagcatcgcaatcgcatccatggcttcctcgtctatccgcatccaccatccccggctcgccggcgacgagatccaccggaccctggaggcctcctactcccccagcgcgtcctactgctccgacgacgccttcgtccccgtcttccgcccggatccgtccgccccctccgtatccgcgtccgcgtcggccgaccgcgtccgcagccttttccgctccgtcgacgtagccctcttccgagatacgctcttcgcgcccggtcgcggcggcgacggcgacagcgacgacctcgggttcacggacgcggacgcggaggcggcggagtacgacggcgatctcacctccatcttctgggactgcctccagatcgaggacgccgacgatccgctcgctgcctcccccgccgaggagttcgagtgggaggaggtcgcgtctccatcgggcgccgccggggaagccccggagcccgagtgggaggtgctcgccgacgtgccgcccgccgccgccgaggaggggttcgtgtacacctcccaccacagaggcagagatgaggaggaggaggaggcggcggcgtacgaggtgctcgtagcatgcggtgaggggc

SEQ ID NO: 118503 - DNA, 318 bp, Zea mays
  Clone ID: MRT4577_39562C.1
ttttagtgttcaatatcagcttttggtaggggggttttttagatggcgcaggcagtgcatgcgtccagaggtatagggtagaacgaatgccaaccgtagacaaaatcgcataaactgatattaaaagcactgaaggcccaagtcaatggaggtcatataggttacaaacgctacatcaacaattaattgcacgacaaacaggatataggctatgaacggatatggacaaagcgtctacaatgacgaggaggaactaaatgaggatatcgcaaaaggttaaccttagatggtgagtgatacattactgactggtgaggc

SEQ ID NO: 118504 - DNA, 172 bp, Zea mays
  Clone ID: MRT4577_39563C.1
atggtgaccgaccagaaatgaaccatatgccatacaagcctggagatgatggggcatttcattcctgaggacagaaatacggattgggcactgcgacgccgggcataaagtacatcaagcattgtactgatagtgacgcctggagctgcccacgcctccgaggacgcctggg

SEQ ID NO: 118505 - DNA, 268 bp, Zea mays
  Clone ID: MRT4577_39564C.1
ggctctgtcgcccatctacgcccttgcctcctcctcatgcgaacccactcgcctccagcctatgcccgacgagcaagctgtcctcgccgcctcctacgctggagacgaccgaggagcctccgccctcgcctcctccttcgtcgccgccgccgccggaggacttctggcagaaggttctagccgctggagaaggtggagctggtgcggggccacggcgatggggagagcaacatacgaaggaccgttggagactgcatgctggggagcg

SEQ ID NO: 118506 - DNA, 636 bp, Zea mays
  Clone ID: MRT4577_39565C.1
gactctttcaaccccaagcgcatctgttccctgctctccttggcaaccaacagcagcggcaaccagcagcccggcgcggtggccggcgaccagggcgtggcagccggcggtgcgcccagccagccgcccgtgcccgccgcaccgtgatgcgtacgtcggatcgccgctagtgccgcgtccagcttccgtcgcgagctcggccctacgtcgcccaggccctcgtcggagcacctcgccatcctggccgtcgtcgcgagcgtgagattgcgatctgttcctgagcttcgaggaatcgacggtcaagcttcggcgaccaagtgatctagctcttcgagttccataaagttgaagaccctgagcatctgtttggtgaaggttgtccgcattgcaaccactgctcaggagaagatgaagccgtggaaggagacttccaggagttccaagactacgacgagttttagacgtgggttagcggcaacccccagtcggctgcctgtgaaggccgcatttatctacgttttgttttcgcactttgatttattgtaaagactatgtggatgtctcagacatatgatgtaatcgactatttcccttttaatactatttgagcactgtgcgatgatgtccatgttatgt

SEQ ID NO: 118507 - DNA, 354 bp, Zea mays
  Clone ID: MRT4577_39566C.1
ggcacaacggatttttttttattccattgaaattaacactagagacttttggcttccagggaagatacaaaccaggggtaccctggaacacccggttaaattactttttttaagcttttcaggtaaggggttaacaactaattaaacaggtgggattacatggggcaaatgatcataagccgattttggttgacaatgggtatttaccgccttgcccaaaaaagttccccttttggaaaaaaggctttacattactgggaagcaaaaaaaaacaaccaggggggttttacattaacattccaggggggggggttttttttttttttaaaaaaaaacaaaggggggaaacaagaa

SEQ ID NO: 118508 - DNA, 745 bp, Zea mays
  Clone ID: MRT4577_39567C.1
cggttggcccggcgacccaggggcgtgccaccccggcgggtgcgccccagccaatccggcccgtgccccccgcacctgtgatgcgtacgtcggaatcgccgctagtgccgcgtccagcttccgtcgcgagctcggccatacgtcgcccaggccctggtaggagcacctcgccatcctggccgtcgtcgagagcgtgagattgcgatctgttcctgagcttcgaggaatcgccggtcaagcttcggcgaccaagtgatctagctcttcgagttccataaagttgaagaccctgagcatctgtttggtaaaggttgtccgcattgcaaccactgctcaggaaaaaatgaagctgtggaaggagacttccaggagttccaagactacgacgagttctaggagtgggttagcggcaacccccagtcggctgcctgtgaaggccgcgtttatctacgtttcttttccgcactttgatttattcataaggcagatggcatcatgccgatttttacaagcagaaaggataatcttcagcaaaaagacacaaaaggaagaccttcgaatggattgtcctcaaaaatccactcgaaggtcgggggctacacccattgggtgcaccttcggtgcaccccatgaatcatcattccaaatcaagatagtgccgacttctaaggcatgggacaaggttaaagacaaagctggccttcgaccaaaacacaggagtaaagacggaaataattcctggtga

SEQ ID NO: 118509 - DNA, 2086 bp, Zea mays
  Clone ID: MRT4577_39568C.1
ggggaccctcgaggttgccgggctagctcacccgcatcccggctcggcactgccttctccttgcacttcacttctgtatctagaccacctcatcacaattcgtcgtcagcgtcgcgccgtcgtctagaaaggcgtgatgagaagctagaggcagcaactgcatatattgcaagaaaattgggtttcaaaccataccgataattttcttgcaagttgtgcagttgttgtctcaagcttgctgcctccctttgccaaaactacgaggaaaagcacatgttatattatcagtgaacacatcaggataaatcttaactgatatgtgttgtatgtttaggtattgcagtgggtacaccgttgtggtacgatgttgcaagcagactccatgaagtcataacaagggcgctgattgccttccagtcagtgctggttcttctgccgtcatgatttgaagagtgttcagtatttattttacggcaagctgtgatgttagtagaggttacacactattccaacttaatttcgctgttatgtgcatctcagtgcacaattagcactttagcagcctggtttggaaggtatatttgagtggagtttatggcgtgtggcgtcgagctgcgggggaaataacgcgcgtagtaactcgggctattcaaccattctcccccctacgatcctagctctgctccaatataaaacccgagctcggcgctgccttggccatctagtactataccgccgagggctattatagaagttaatagccaccgccgtcgtgagcaattggggatcagagtgagccatcagcggggcgaagagaaaggttgcggccaccgttagtgatctccttccatgcctctatactgcgctcaaaatcgtgcccaagttcttcatcgcgctaaattgaagactcctaaagcttgaccggccgataatcccttgtcggccttcacatccacaacgcctcccatcgccgtggctacaggccatcacctcaccaactctgagaacgatccggttgaagagcccgaggaacccgcaggagaagcccctgagcagcagtcgtttggtggagatggctcgacttagacacactgcacgaaagtcagtcatccccttcttaccctcccgccttgctgagcgtccgcttcgctgtcccgtggccggacagtccagccacttggagagactacaccaccgcctgcgtgaggagcaggaacgtcgacgacaggagcagcagagctcttccttctcgctccaccaggagatagagtctgtgaggagctgctcccctgtgcttcctctggagccgccccctgcaccaccactgggcgccccagcttctggagtagctgctggaggagacccagacgacggagatggcgacgacagctcgagccacgacaccgacttctctgctaaccctgagccggaaggatgggttgctcgacccatcactcgcgacgctgctcgcgggtgtcacttccatgatgcgctcgacaccctgctacgtcgggcatttgaccgacatacttggtccgtcgagtatcgctgtgtggtctaccagcacagtcgcggggtctacccggaccgctgggaggcaacttgcttggtgcgctgcccggagaacagtctccagggtgcggaggcctgctcagagcactattctatctctgaacgggactcagctgaggcagccatgcaagatgctgcacggcgtgcgctttcgcactactgctcggtttttggtggggcagctgatggtcttgacctgaagtattacccccgccgtccatctggcagcacaggaggcgtgattgtctcacctgtcggtgagggcaatcctaggttgagcagcacagtcaacctagcagccgtgctaaacacggagctggaccatgcattagatgagctgagtagggcccgtgctgagatcgccctgctgcgggctgagcgcgcggaacgtcgtcacctggatggtggttcccctgctcccgtcgggactcagcacccgtaccgctcacctcagcgtggacaccagtcttatggcaatcccgactgcaagaccaagataactctagaaccatag

SEQ ID NO: 118510 - DNA, 235 bp, Zea mays
  Clone ID: MRT4577_39569C.1
aaatcaaacaaaaacccaacataaaacggggaagagcgggagtaacaagacggcaaactacataggaagagtaccactaaaaaggccccaggcagatccaggcccattttaagggcccattcattctcttaattggggggaatatctctactcctccactgcagagcggcaggacggatggctagtctaagcctgctagagcactttcaacaaaacaggaaaaacccaggatgca

SEQ ID NO: 118511 - DNA, 267 bp, Zea mays
  Clone ID: MRT4577_3956C.1
aacagtccgagacgatgtgtcagtggcgtgcgccgtcaccgacaccgaccagctacgcaacgccaggcgctccagtagttcagcattcggagctcgtccgcccgacggtccaccatgatcatccccaagaagaaccgcaatgagatctgcaagtacctcttcaaggagggcgtgctgtatgccaataaggattacagcctgtccgaagcacccacagattgatgtgcccgacctgcagatgatcaagctcatgcagagcttcaagtc

SEQ ID NO: 118512 - DNA, 488 bp, Zea mays
  Clone ID: MRT4577_39570C.1
tggtaccctcgaggccggccgggccgggtttttccccagatccagatcgcaggcgtgaaggacagcgattaccagatcgcgatttgtttccgcgcttcgaggaatcgacagtcaagcttcggcgaccaagagatcgaactcttcgagttctacagggctgaagaccctgagcatctgattggtgaaggttgtcagcattgcaaccactgctcaggagaagatgaagtcgtggaaggagacttccaggagttccaagattacgacgagttctaggcgtgggttagcggcaacccccagtcggctgcctgtgaaggccgcgtgtatctacgtttcgttttcgcactttgattattgtaaatactatgtggatgtctcagacatatgatgtaatagactattattcccctgttatgttattatttgagcaaaaaaaaaaaaaaaaaaggcccctagggccacccatcttgtgccgtctttccactgccccc

SEQ ID NO: 118513 - DNA, 260 bp, Zea mays
  Clone ID: MRT4577_39571C.1
gttatttattccagactttagggatccatcacagggggattacataatagatacggccgcactaaacattgaatattcaaagttccatgctgcaagtgatgctaggcactaacttgcgagaaggcaccctcatgtctctagatgattgaattcctaataagaggatggccaaaccatcgatgaatctaaaatgcgcaggcaaaatgggatcacacagtgactccaaaataaaaatgcgaatgcgacatggttggtaaaat

SEQ ID NO: 118514 - DNA, 2332 bp, Zea mays
  Clone ID: MRT4577_39572C.1
ccaaaacaggaattggcactcccgttgcctcgtccctcgcgtccagctccgccagaaccacccacaaccgcgcctcgcccgttctcgcccagctccggccgcccgcgctgcgcatcaacatgcagggagccgtgccacgctgctcctcgtcgtgccgcgctgcatcctcgtggctgccttggctgggcgagcatgcccctgcagccccatccccgcgctcctcctcagtgcgcagcgcggcacccccggccgtgtcctggcctcccttgccgagttgtgttgccgctgtagccttttcatcttctccctgcaagcctgagcgcgccactgcgctggccgacgattcgcccaacatcggcccctccccaggcgcagtctcctgcaccggtgagcaccctagcgaccacgtctcgtctcgctcctccctgctccctgcaacgcagaccgcgtggagcactggagcccccagcccccacgcgtgcgtgtattcttgcccagccagccatctctccaagcaccgtgaacagaggagagagagaaaaacaaccgctcatgtgaggtgttgaggaagatggaaccaagtgtctcattggtctgcaagaccttctgtggccatgtactctatagtcctctgcgtgggcccgacgcaacagcaatcttgccggtctcattcatcacccttgctctacacaccaaaccccccccatccccaggttgtcagcattgcaaccactgctcaggagaagatgaagccgtggaaggagacttccaggagttccaagactacgacgagttctaggcgtgggttagcggcaacccccagtcggttgcctgtgaaggccgcggttatctatgtttcgttttcgcactttgatttattgtaaggactatatagacgtctcacacgtatgatgtaatcgactattatttccctttttaatactattttgagcactgtgtgatgatgtccatgttatgtaactgttgtgtacgtgaattactgatcctggcacgtacatggttcgcattcggttggccttctaaaaccgggtgtgacataagtggtatcaaagccatgatgactgtaggaccgctaacctagaatagaatggtcgttctaaggactatagacctctgtccctgtcttgactttgatatcccttcaaaagttggtcatatcgatcaaacctatgttctactatatattataccttgctgaaaattatgttttattctaatccttcatttatttatggttcattatttgctggtcatattaattctgttctcactcttttgcttgcggtgtcttttgtagatggctcgtcttagacacactgcacaaaagtccgtcatccccttcttaccctcccgtcttgctgagcgcccgcttcgccgtcccgtggccggtcagtccagtcgcttggaggggctgcaccaccgcctgcatgaggagcaggaacgtcgacgacaggagcagcagggctcttccttctcgctccagtaggagatagagtctgtgaggagctgctcccctgtgcttcccctggaggcgccccctgcaccaccactgggcgccccagcctctggagtagttgctggaggagacacagacgacggaggtggcgacgacagctcgagccacgacaccgacttctctgctgaccatgagccggaaggatgggttgctcgacccatcactcgcgatgctgctcgcgggtgtcacttccacgatgcgctcgacaccttgctacgtcgggcacttaaccggcgtacttggtccatcgagtatcgttgtgtggtctaccagcacagtcacggggtctacccggaccgctgggaggcgacctgcttggtgcgccgcccggagaacagtctccagggtgcggaggcctgctcagagcactattctatctctgagcgggacttagttgaggcagccatgcaagatgctgcatggcgtgcgctttcgcactactgctcgattctcggtggggtagctgacggtcttgacctgaagtattacccccgccgtccatctggcagcacaggaggcgtgattgtttcacctgtcggtgaggacaatcctaggttgagcagcacagtcaacctagctgtcgtgctaaacacggagctggaccatgcactagacgagctgagtagggctcgtgctgaggtcgccctgctgcgggctgagcgcgcggaacgtcgtcacctggatgatggttcccccgctcccgtcgggactcagcacccgtaccgctcacctcggcgtggacaccagccttatggcaaccccgactgcaagaccaagataaatctagaaccatag

SEQ ID NO: 118515 - DNA, 670 bp, Zea mays
  Clone ID: MRT4577_39573C.1
catatgtagaaaagcaccaaccgcccacccatgtcgaccatttgaacaacccctgcatctccctcgccccgctcccctctctctagcgcctccctgccctcgggcacgaccaaccctttccggcggcgcagctccgcccttggctctcctgcgcgcagctcggcgtggcgtggcccggctccggcgagcggtcgaagaaaccccgacgccaagcaccttccccaccggagcttcgctgacctgctgtccatgtttttcctcgccgttcttcatcgtgatggtctggtgagactgtgatccgtttccgagcttcgagggatcgatgatcaagcttggcgaccaagtgatcgaactcttcgagttctacgaggatgaagaccctgagcatctgtttggtgaaggttgtctgcattgcaaccactgctcaggagaagatgaagccatggaaggagacttccaggagttctaatattacgacgagttttaggcgtgggttagcggtaacccccagtcggctgcctgtgaaggccgcgtgtatctacgtttcttttccgcactttgattattgtaaagactatgtggatgtctcagacatatgatgtaatcgactattattacccttttatgttattatttgagcactgaaaaaaaaaaaaaaaaaaggccccta

SEQ ID NO: 118516 - DNA, 1451 bp, Zea mays
  Clone ID: MRT4577_39574C.1
gggggatgccgccatcgtcgctagggacagaaacaccgaggagagcagagatggagccgcgggccaaacggaggaagggccatcatttagattgagcgtatggccagggatattcgctgaaacctcaggaatacgctcatggtccctatggacgaggagccccaccgggctcactgggatttctcgccggtgttggcagacaacgccgacccgccgtgcgccgtggccaagcttcactgctgcctccatcttggagaacgatccggtcgaagagcccgaggaattcgcaggagaagcccctgagcagcagtcgtttggtggaggttgtcagcattgcaacctgcaatcctgagaagatgaagctgtggaaggagacttcgcccaacatcaggatctccccaggctctgtctgtggcaccggtgagcaccctagcgaccacgtctcgtctcgctcctccctgctccctgcaacgcagaccgcgtggagcactggagcccccagcccccacgcgtgcgtgtattcttgcccagccagccatctctccaagcaccgtgaacagaggagagagagaaaaacaaccgctcatgtgaggtgttgaggaagatggaaccaagtgtctcattggtctgcaagaccttctgtggccatgtactctatagtcctctgcgtggccccgacgcaacagcaatcttgccgttctcatgcctcgccgttgactagtctggtcgtccgctgtcgttgcgaggttgtcagcattgcaaccactgctcaggagaagatgaagccgtggaaggagacttccaggagttccaagattacgacgagttctaggcgtggatggctcgtcttagacacaccgcacggaagtctgtcatccccttcttaccttctcgtctcgcggagcgtccgcttcgccgtcccgtggccgcacagtcgtggggtctactcggaccactgggaggcgacctacttggtgtgcagtccggagaacagtctccggggtgcggaggtctgctcagagcactattccatctctgagcgggactcagctgaggcggccatgcaagatgctgcacggcatgcactttcgcactactgctcagttctcggtggggtagctgatggtatcaacctgaagtactacccccgccgtccatctggcagcacaggaggcgtgattgtctcacctgttggtgaggacaatcctaggttgagcagcacagtcaacctagccgccatgctaaacacggagctagaccacacattagacgagctgagtagggctcgtgctaagatcaccctactgcgggctgagcgcgcggagcgtcgtcacctggatgatggctcccccgctcctttcgggactcagcacccgtaccgctcacctcggcgtggacaccagtcttatggcaaccccgactgcaggaccaagataaatttagagccatag

SEQ ID NO: 118517 - DNA, 252 bp, Zea mays
  Clone ID: MRT4577_39575C.1
agcagtggtaacaacgcagagtactttttttttttttttttttttttttttttttgggcaggaacacattgcaccaggggtagtccaaaactaataaccttgtttgccttacattcgatgttccataaaaaaaattaagttttaatagcatcacggtttcaacgaaggtaataatacttcttgaccaggcaaactttgccataataaattacttgttcacccaacaactgcgttgttcccactgtttaaggg

SEQ ID NO: 118518 - DNA, 249 bp, Zea mays
  Clone ID: MRT4577_39576C.1
gccgccttaagacaaagatttacttgtttcagttggaaacaggatcagagtctaggaaaacgggcacaggggcccaaatcaagcgggggggagggccaatggaccaacaacagccaaagggcccaacaagggggacaaaatcggacccggggggggacccgggaacccccgaccggcaccggggggcaaaccaaataaccctataggggggggggttaaaccggggagtaaccacgggcacaggggggg

SEQ ID NO: 118519 - DNA, 801 bp, Zea mays
  Clone ID: MRT4577_39577C.1
attcggctcgagctggacggagcggtgcgttacacctccacgccgcccctctcccccgctcgctcacatcgccgcccaccacgcccatggccgccgcagccgcctccgcgccctaggcatcgagcgaggccagatgctctccctgggcgccctccgcaagctctgcgcagcctttgacgccgtcgcgctcaccgtcatcgctgcggggctctcgcgcccgccctcgggccgccaccctttctcctccgcgcacgcgcactcctcgcaccccgccgacttccccaccatcgccgcctgccgcgccgcgatatccgcctccaagggtgaccgccgccgccgacccggcgtcggccagcactcctcctccccttccccctctctcgcagccgctgcagccaaggaggagcgggagcagccggtgctggtaaggatcaagcacgagcgggacccggagcggctgtaccagctgttcagggccaatgcgcacaaccgcctcctggtggagaaccgcttcgcgttcgaggacgcggtggcgcgcctggcgggtgctcgtcggaatgacctcgtcgaggagatcctcgagcagcacaaggcgctgccccaggggaggcgggaggggttcgtggtcaggatcatcggcctgtacgggaaggccgggatgccaggccacgcgctacggactttccagaagatgggggatgtacgggtgcccgcgcaccgcaaagtcgctcaatgccaccatgaaggtcctgctgcgggcacggatgtttgatgaggctctgtcgctgtttgaggagggcc

SEQ ID NO: 118520 - DNA, 1119 bp, Zea mays
  Clone ID: MRT4577_39578C.1
atgaagctgtggaaggagacttccgggagttccaagactacgacgagttctaggtgtgggttagcggcaacccccagtcggctgcctgtgaaggccgcgatggctcgacttagacacactgcacgaaagtccgtcatccccttcttaccctcccgccttgctgagcgtccgcttcgccgtcccgtggccggacagtccagccacttggagagactgcaccaccgcctgcatgaggagcaggaacgtcgacgacaggagcaggagcagcagggctcttccttctcgctccagcaggagatagagtccgtgaggagctgctcccccgtgcttcccctggaggcgccccctgcaccaccactgggcgccccagcctctggagtagctgctggaggagacccagatgacggaggtggcgacgacagctcgagccacgacatcgacttctctgctagccatgagccggaaggatgggttgctcgacccatcactcgcgacgctgctcgcgggtgtcacttccacgacgcgcttgacaccctgctacgtcgggcacttaaccggcgtacttggtccatcgagtatcgctgtgtggtctaccagcatagtcgcggggtctacccggaccgctgggaggcaacctgcttggtgcgccgtccggagaacagtctccagggtgcggaggcctgctcagagcactattctatctctgagcgggactcagctgaggcagccatgcaagatgctgcacggcgtgcgctttcgcactactgctcggttttcggtggggtagctgacggtcttgacctgaaatattacccccgccgtccatctggcagcacaggaggcgtgattgtctcacctgtcggtgagggcaatcctaggttgagcagcacagtcaacctagccgccgtgctaaacacggagctggaccatgcattagacgagctgagtagggctcgtgctgagatcgccctgctgtgggctgagcgcgcggaacgtcgtcacctggatgatggttcccccgctcccgtcgggactcagcacccgtaccgctcacctcggcgtggacaccagtcttatggcaatcccgactgcaagaccaagatagacttggaaccttag

SEQ ID NO: 118521 - DNA, 1372 bp, Zea mays
  Clone ID: MRT4577_39579C.1
atggagagtcatgatctccgggcagaatgggaatcacggcttgtgggtggttatgagattgatggttttggttatgactatggtgctggtaagtggtattctttccgtttggaaaggatggctcgacttagacacactgcacgaaagtcagtcatccccttcttaccctcccgccttgctgagcgtccgcttcgccgtcccgtggccggacagtccagccacttggagagactacaccaccgcctgcgtgaggagcaggagcgtcgacgacaggagcagcagagctcttccctctcgctccaccaggagatagagtctgtgaggagctgctcccctgtgcttcctctggagccgccccctgcaccaccactgggcgccccagcttctggagtagctgctggaggagacccagacgacggagatggcgacgacagctcgagccacgacaccgacttctctgctaaccctgagccggaaggatgggttgctcgacccatcactcgcgacgctgctcgcgggtgtcacttccacgatgcgctcgacaccctgctacgtcgggcatttgaccggcatacttggtccgtcgagtatcgctgtgtggtctaccagcatagtcgcggggtctacccggaccgctgggaggcaacttgcttggtgcgctgcccggagaacagtctccagggtgcagaggcctgttcagagcactattctatctctgagcgggactcagctgaggcagccatgcaagatgctgcacggcgtgcgctttcgcactactgctcggttttcggtggggcagctgacggtcttgacctgaagtattacccccgccgttcatctggcagcacaggaggcgtgattgtctcacctgtcggtgagggcaatcctaggttgagcagcacagtcaacctagccgccgtgctaaacacggagctggaccatgcattagacgagctgagtagggctcgtgctgagatcgccctgctgcgggctgagcgcgcggaacgtcgttatctggatggtggttcccccgctcccgttgggactcagcacccgtaccgctcacctcagcgtggacaccagtcttatggcaatcccgcctgcaagaccaagataaacctagaaccatagatcgttagagttggatcttgtaattaatacgaaaaatatacgtagaagcttcagtcttagcgttagtctcagtcttagtttgtcttagttagacagggtagtttgctatatcctgtgcatttatgtttgtcatgatgaactatgattggtttggatctttgtaatgattgtcaccagagtgtgggtatcccctgcattttggtttacatactatgttaataaagttagttatatagttggg

SEQ ID NO: 118522 - DNA, 593 bp, Zea mays
  Clone ID: MRT4577_3957C.1
agaaatgctaattctgtgcatttctctaggattagagttcatttcaaagagatgtacaaactgttttgattcgatccaggtcccagggagccaaattaatgctgagatgcatatacaattgtgactggttacttttaatctactacttcgagttttccctccaactagtcatggaaaaaaaagaatttctgaattctgaccaattctcatcagctaagatgcctaaaactctctcaagctacacgcagcgatgcattgttcaccggcgggcatctcggccttcgacaacgtctggtggtccttccccaccttgttattgccaatgcatctgcgtccaagtcagcagggacaggagatggtgatgcctgcagtggtgggctgacctcgctttcctctacctccatggcgacagccacgcttcttgcccgacgcctccctctcggttgctgcctgttacggccacgtttcgtcggggtgactagcttggaccttccgagcgcacgaagatcctctgatacctcgtgctttggcaatgacgcaaggcctggcaagatgtccctctgaaaatgtttcctctgtcggcgtcctcgccc

SEQ ID NO: 118523 - DNA, 437 bp, Zea mays
  Clone ID: MRT4577_39580C.1
aaaagaaatcgggcggggggggcccaaaacccggagaaaggggccccccctggttttatccttaaaacccccaacccccccccttggcaagggccaaaaacaaaatcccttgaatggcccaacccccatccccaaaacaaagggggcgaacccctcgcttagttcacccccccctaccgactttaacagcgggggaaccggggcaatcccccaaatgtttgatccctggcaaagctaaccccggggatccggggcccccccagggttggctggccccatctgctcggctcgaggctcctctggggctccctcgctggctgggctttccccccccgattgctgctgccctgggggctgaggcccaagagcctggttttctgccccaggcggagtctgcggcttaagacccggcttcggtttccccaagaacggcttgc

SEQ ID NO: 118524 - DNA, 570 bp, Zea mays
  unsure (1)..(570): unsure at all n locations
  Clone ID: MRT4577_39581C.1
cccagcccgcgcaggggggggagacagggaccctaaaaaccctagagcgaggagggcgagccaggccagcggnaggcgangacggcaccggcggacaaggggaaaaaaggccaagaccgaggcccacggcggcgagggagacgagccaaccgacggcgcccangnctcctccatgggggggcgggaggagaaacaggacgagcacgagaaaggcaaaggaggaagcaagtgacaaaggcactgggaggtggaaccaagaaatccaggaagagtcgcaagaccctgacaatcctcaagaggggtgacaataaacaagaccaacccgggacttttgggctcaccagcggtttattgaagccaaccctctacctaagtgaagctttcctgacctgaaggagngatcaagagagaaaattccaaagtactttgggcnctccaattggatgaccgaatgaattcctggaggattaaaggcaaggaaaattccacattagcccttaaaccttctcctgaagaaaccccgcacctttggaagaacacaaaagctttacaaaagaccctaactccttt

SEQ ID NO: 118525 - DNA, 317 bp, Zea mays
  unsure (1)..(317): unsure at all n locations
  Clone ID: MRT4577_39582C.1
tttgttttttttttttttttgaagggcgaaaacttgttgtttttccactttaatgggaagggcgaaaactaggtggttttccactcgaatgaacctcaatacaagctaggtgaactagatgcgggggcacccaacccaggcctcgggtaaaaattgggggcccaaagaaggccaggaagcccggacaatgggtaacctgggttttggccaacaggggctgtgtttgtttttttaacaaaccctacacatacccctgggctttttcgggcaaatcttcatatacaaagggacttntatcgctactttgacgggcggtt

SEQ ID NO: 118526 - DNA, 676 bp, Zea mays
  unsure (1)..(676): unsure at all n locations
  Clone ID: MRT4577_39583C.1
agtttttaatttttttttttttttttttttttttttttttttttttttttttttttttttttttttttttttaaggcaggaccgggaaaattttttaaacggaaataaaaatggtttggcaaattgcccaaaaaagggtaaaaacggttaattagggtaaatttaaatagtataaggaaaggctgcccccacccaaggaaaattggccgggcggttgggttttaaaaaaggaccgattgggccccccaataaaaaattggcagaaatttaaaaaacccggacccagggccgggttttgggaaggggaagccagttttttacaggggcacccccaaaaaaaaaaattccacccccagcccctttgtttgttgcgggggaatgaggccttttttcggggggaggggggggttttgggataaaaaaaaaaaacggctgggaaagggttgcttaaggggtaaggtttgaacagggggggcctttgtttgttgccccttttttttaaggaaacccctggggttttccttggattggggggccccctgaattaacaagtgggcccagtttttgaaaagaattggcctttgcccccaatttttttggagttcccaaccttgggggggggaacccggaanaaaattgccccgccgccgtttcttcctttgggggggggaggggg

SEQ ID NO: 118527 - DNA, 471 bp, Zea mays
  Clone ID: MRT4577_39584C.1
ttttttttttttttttttagagataatgtccaatataatcagagtatttattacatagcggaagtcttacaaaataaaagataaatatagatcgaactaaagtctatccttggccccagaaagtcaactgggtgaccccacttagatcgaatcgaactccttgttgtgtggctcctcttgaaccaccagttcttctcctggcacttgagaatccaggtactaggatgattcttcagatccttgtgacctcactgcgtgattagcgcgacatagcaccctacccaccgtgcgcggtggagcccaaagctcggcgagaaattccagtcgccctggtgctcgattcttctgaccacgtgcgcgagtatcttccccacgctctatgctttcccctggcctatcccacggggtcgaatcgacgatcaaacggattctcgcccacagccgcactctccccccttttcctcggtcacg

SEQ ID NO: 118528 - DNA, 230 bp, Zea mays
  Clone ID: MRT4577_39585C.1
gaattgcgccctttctaatacgactgcactgtggggataacaacggaacttcttggcagctatcctgttgtcctccatcattaccataattgattggtgataagaaaaacctcttgaggtgaagaggtggctgagagatttcttggaaaagtaccagtccccttcgctccataatgagatgggactaagtcgatttttattctatagatttttaggttagtacctcagat

SEQ ID NO: 118529 - DNA, 1596 bp, Zea mays
  Clone ID: MRT4577_39586C.1
ggtaccctcgtcttcggccgggacactacctagcacccaccaaaaccgaatgtggtggtgtctagcagtgtgtgcaaacttctagaatatccagtctgcttgaatgccatgtatcctattcatcagctgcacattcatactgatccatttggcatgtttatatctaaaaccctgttcaaatgtagtcgattggatgaaaattatggctttactggtttcagcgttcctttcaatatcatgtactgttatcaccattttattctgatccgtttcaatttctatggacgtttagtacataatgtttataaaccttaacttttttactcttttttcttttttgattagctacgatacagtgcagaataatatgttctgctttttttattcaactattcaaatcttattttttattcaactattcaaatcatattttttgattagctgattgcaggagagattaaaatcaaagggattgagctacaggagagttgcagtctgtcgttcttttccatggtagtaggcattttcattgggttcatacatttattctctgtcgatgtttacaagaaaatagtatctaaaaacaagatgtctctgttccatgagggtgtgattgagactgaaacgatgggtaccagagtgaaggagtcgaagacagttttagtagagaaagagctcgaactgatcgacgagcctcagattcaagagagccctccagttcgtgcattgttgcatgatgaggtggattttgctgaatcgtcacttgctattagagaatctgacattcccgtgaagaaggtgctgataatcgtgacaatcacttttgtttggccacaacagccatattacttgaagcccatgttttgaaagctgtattggcacttcttctatggttagtggtggaatagcccgaacagtcctatgaaacagcaaaaaatctgttacagtccacttaggtggaagaggtagtttgtagatgattttgttttaatatatgaactgtaatagtaaggttacaataaattttcacataggtgatcaaacttctgtttgtgtaaagccaacagatggtctgacctgacatgtgtttttccaggagtcactacttatagaaaaagcttgttcctagaggtggtttctcccggcaatgcagaatcttgaagcacgtctaaagtggcttgatgatagttctaaatttcaactccctgtcattaccaggtgcaagataggctgctggtcgattccatcctgaacaagttgcgccaaagattacatgaatattgcgtgccgagatctgtcttcagtaatgcgatgccatcctgaacaagttgcagcgacaattaggataggattttcccacgctttttagtcttgtgtattccttttatgctcttcatcttttttttctcattatatccaccaattagatagtcatgtagactttcttttaggcgcttttgttttttatactttgtgttaccttgcttttgtttttcatattttgtgttaccttacagatgtaaaaacgctcccctcccgtacattgcactatttatgaggaaaggtaaaatagcgtcatttagctttttcagtccc

SEQ ID NO: 118530 - DNA, 272 bp, Zea mays
  unsure (1)..(272): unsure at all n locations
  Clone ID: MRT4577_39587C.1
ggatttaatagccacaatgtgatttttgccacaactgtgtgattttaatattctctaatatcaagggcggatttagaattgcaggaaatacctggagaaatcacagtggaatgaatttttgctttaagagaaatgagagttggctgtctctgtaattgataatacagcttcatcctagtcccatctgcatttcagaaaataaccctcatcgtgagcannacacaggacacttgtgggacagttaactcaagcagctatggggagggaggaga

SEQ ID NO: 118531 - DNA, 537 bp, Zea mays
  Clone ID: MRT4577_39588C.1
gcgacgactcctctcccaacccgctatggggactcgcagctccgccccaagtgcaggtgcaagcatggaaggcgcggcggggtcggcgaggcccatcctgctcgtggctgccatctgaggctccctccgcagggacggcttcaaccgcggtctcctccgcacctcctatgacgtgtgcgaggactccatcccgaggctccgcatcgacgagctcgacctctacgaccggcccatcagcaacaccgaccttgagaccgcctgcgtcagcggcaccgtatccccgcccgccggcgacgccttccgcgccaagggctctcaggccgactggtttctcttgggggcgccctagtacaactactccatcggcaccccgctgaagaacgcacttgactagtcctctagagaaaagaactgtgccgctgacaaagctgctgtgatcgtgattgaacgccgtggctttgaaggagggatgttccagcaccatctccgtcctgtcggggtcctccaggcactgacattcatcaacaagccagaact

SEQ ID NO: 118532 - DNA, 274 bp, Zea mays
  Clone ID: MRT4577_39589C.1
ggtatggagttcatataataaccagaaatacaggcacttgaagaatctcaagcacctcaaaggacattaaggtatagtatcatctgtggggaacaattctatgaagtacaatcaaaatcgactaaaaacaagcggaacgagtataaaaatataccgaagaatcatgtaaacagtactaataaaggaggtgagtgattacatgcactatatggattatggtctgctagatttatttgccagatcaacacttcatcccagatatataaataaacaa

SEQ ID NO: 118533 - DNA, 343 bp, Zea mays
  Clone ID: MRT4577_3958C.1
caacccgtccgaagaaacaaacaacgcaaaaggcgttgtcaattacctaccacctaacgccaccgggtactaagatattatcgcgccttgcgctctttgccctagcggagcgcacaacaaaagcgttcattattgcacactgcttacttgctcctagtgccaatatttcacagcacctttcaccagttacttcaatggactccgaacacctagctgtgcaagccaacatgcaacaacaagcgcttgcggcgagcgtcttacaacaaccaattgtccaattgcaacaacaatccttgtcacatttaacaatacaagccatcacaacgtaacagcaacaacagtt

SEQ ID NO: 118534 - DNA, 425 bp, Zea mays
  Clone ID: MRT4577_39590C.1
cccactcgtgcggccactcgtacgtccagccctggaggagcgatttcgcacaccggttcggtaatttttttagccccgcagcactgtctcactggccaaggccacaatggactctgccatggataaaaaatagcggaggcttctctatcaattgctggcagtgatagatagctctgcggcagtggctgataacagctttggctatgtagtcgcaactggtagcagagctcgactgtgcgcattgctgggagaagattgaacaacgacgaggcgagtgaaaccaaggagaggccactgatgctattgataagcccacgtggtggcacgaacagctgcggcgtcggtgcctgaacatgcgtggtcgagtagacaattgcctgggtgaagaactttcagctgatcgccgtgagtaccccgccaccggc

SEQ ID NO: 118535 - DNA, 459 bp, Zea mays
  Clone ID: MRT4577_39591C.1
gaagcagatggctggcgatcccacgttgtataccggtgtgttcctggcggcctcgcttgtgccgccgacgactactctctctacaacgccttcagcacctacggggacgccctctagaccaagatcatcctgacatcgggagacgctaggacccgatggatgcggattccatgccttctccacgagaagacgatatgcgcagcggcactccaggtcatgaaaggcaaggatctccaaggccgaaacattatcgctaacgaggaccagtcccgaggggaacgtggaggactacgcggagaatacggaggcgggcgacttgatgtacgcggctacggaggtcgcggagtacgttacctggttgtgcgctcacgataccgaggcggcgggggatacggtggtgcaaaccgactggacgagtacggtaaccaccacgggaaatggaggaactgaccggagggg

SEQ ID NO: 118536 - DNA, 708 bp, Zea mays
  Clone ID: MRT4577_39592C.1
gggaccctcgaggccggccgggaacgaactcctattccattccacctccccgtccaactgaaacccccatcgccacgccaccacacacctgacacctccgccgcgccgtctaccattccggcgtccagcacctccctagtcggctagtccctcccccgccgccgctaccgtcacgcctcctcccttgcccccaccacgcaagtcccaaccatctcctccgtcctatatatctgccacctcgccccaggcagtcaggcacacacctgacaccacaaactacctgccgacaagatggcctccgcctccccgtccgcgtccgagcctgctgcggcgcccgaggttgatgctccagctgccgccctgccggccgagggccccacggagatcgccttcttcgacgtcgagacctcggtgccgcagcgcgcgggccagggctacgcgctgctcgagttcggcgccatcctcgtctgcccgcgcaggctcgtcgaggtcgcctcctacgccacgcttgtccgccccgccgacccggcctctgccgtctcggcggcctccgtgcgctgcaacggcatcacacgggacgccgtgtccgcggcgccgcccttccgcgacgtcgccgatgccgtctacgacctcctcaacgggcgggtctgggcagggcacaacattgtgaggtttgattctgcaagaataaagggagcgttcactgag

SEQ ID NO: 118537 - DNA, 350 bp, Zea mays
  unsure (1)..(350): unsure at all n locations
  Clone ID: MRT4577_39593C.1
ggcgcggccccggaacttcactccttgccccgccaccaccacccccctccaaaagagccgcccaggctcgatcctccctcggggaccccgacgcgcttcaagaaacagaccataggaacccgggcacaggcgcggcaggctagcggcncgagcaccgaagcaccggaggcatccctggaggctgcgggagacgccggggccatgcaccaccaccggatcctgtcccacaagcgccaccccggctacattcttaaggccggtatgcgctacttccaccagcttcgtgacgaggtctactgcgctgcggccaacatcgccggcctctggggcaaggaccccgaggacaaggc

SEQ ID NO: 118538 - DNA, 454 bp, Zea mays
  Clone ID: MRT4577_39594C.1
ccggggatctcaccccaaaagccaggctcttctgcttccccgagtgggccgagccgccgacgccagcgatgcttcggcagagtgcggattgcgcctacgcacgtgcgttgcatgtctgcacagaccactatgcggaaggcgtgaagggttcgctaaccacggatagctctagagacaacgtacgtcttgcttcagagatctggcagatacgacacgtgtcgcagatcgtcgttgacgaccagaataagccgcaccacaccctcgacgtggtcttcaccaagttcgagcgtctcatcggagatgcagccaacatccatgtcgctcatgaaccccatcaacaccgtctttgatgccaagcgtctcattgtcaggaggttcactgatgcctctgtacaaagagatattaagctgcggcccttcaaggacattccagggcccggagagaagccaatga

SEQ ID NO: 118539 - DNA, 499 bp, Zea mays
  unsure (1)..(499): unsure at all n locations
  Clone ID: MRT4577_39595C.1
ccccccactagggggggnnccnccntncgnacgagagagcgannctggnggcaanggcgaagagcgagggnccggcgancgggatcgaccncggcaccacctactcgngcgtcggcgngnggcagggggggcgggtggagattatcgccaacgaccagaggaaccgcaccacgccgtcctatgtcggcttcaccgacaccgagcggttcatcggcgacgcttccaagaaccaggtcgccatgaaccccaccaacaccgtcttcgatgccaagcggttgatcggcaggaggttctctgatccgtcagtgcagagtgacatgaagctatggccgttcaaggtcatcccagggcctggtgacaagcccatgatttgtgtgaactacaagggcgaggagaagcagtttgtgctgaggagatttccttcatggttcttatcaagatgaaggagattgcttaagccttccttggttccaccatcaagaacgcagttttgacattt

SEQ ID NO: 118540 - DNA, 469 bp, Zea mays
  Clone ID: MRT4577_39596C.1
cgcctgcgtgaaccgggcccctattacacggccgacccacgcgttcgtagcacatagaaggacactacgtaccaacggtgggccccaaaatatatagactacctatgctactgggacctttatgcatgagatgattcagagagcgcataccaccaatgatggggcgaggtcctatcgctgccgtgtttgccaaagaccgctgaccaaatgggactaatggatgcaaaagaccaaatggtgcaaccctacaggacacaacacgtgaatgacacggtgacatctgaccttgattaaacaaggtagctagcaactcacaccagctctattacataatggtacctagtgtgtgcgttgcatgtgacatcaaaacatcagggcacagctgccacaacaactagtgctaagaaaaccttgctggctactatcaggaacatgagtgaatggcattcgaccaactagctgcattgaa

SEQ ID NO: 118541 - DNA, 422 bp, Zea mays
  Clone ID: MRT4577_39597C.1
gggccggcccacgcgtccaaagcgaatcagagcaatcggaattctctgcgatttctctagatctcgactaccccccactagttttggttcctcctttcgttcgagagagcgattctggtggcaatggcgaacagcgagggtccggcgatcgggatcgacctcggcaccacctactcgtgcgtcggcgtgtggcagcacgaccgggtggagatcatcgccaacgaccaggggaaccgcaccacgccgtcctatgtcggcttcaccgacaccgagcggctcatcggcgacgctgccaagaaccaggtcgccatgaaccccaccaacaccgtcttcgatgccaatcggttgatcggcatgaggttctctgacccgtcagtgcagagtgacatgaagctatggccgttcaaggtcatcccagggcc

SEQ ID NO: 118542 - DNA, 367 bp, Zea mays
  Clone ID: MRT4577_39598C.1
cacgttgactttttcaactgtctgcccctgatgtccgttggctccctacagaggccgggcgggccgcatcaccagggtcgcgccatgacacctgcctccttcgtctccgaccccgcgcccgttccctagccccctaagcctctctacctccggggccctgtcatcgcatgcgccgtcacgctggcctcgtttcttctcctcgccgccgactacgccaccaggcgagcacggtcctctccggccgctctactctcccacccagctgtttccaccaagttcttctccttcgacctgatgcgctagtaccctcactaccctgccggcttcacccaaggtatcttgtacgcgggaaatgacacccttttcg

SEQ ID NO: 118543 - DNA, 286 bp, Zea mays
  Clone ID: MRT4577_39599C.1
gaaggagggcactgcgcagaactctgtgccatatgactggatcaatgcgaagcatattgccgactgccatgatactatcttactgaacaaatacggagccttcgggccgttgctgactgcggctggagccatcccccagtctgcctccaagacagccatgcatgctagacatgtgtcttaccattcccgtgctgaaaaataacgatgctttgcaagcgctgcacttgcagatgctatgtctacgcgactggctactacatgggtaaaacttattatacatcagtcg

SEQ ID NO: 118544 - DNA, 367 bp, Zea mays
  Clone ID: MRT4577_3959C.1
gtttcgtgaagaaacactggtatcaagctcccggggctgctctagttacaagcgacacctaatcttattgtcctacaaaacattacaccataacgatcacgagcagtcagatcacactgatgaagttctccaccaaggcgctctggttgtttatgtccactaactcccgcgggaataacatacacatgaccatgccctttaccgctgctctccttaactacctcaagtactataagcgcatgtaattggtcatccataaactgctcctccatcgacagatgcgctttatcactctatacttctagacataccttctattccgtagccactccgaacttccactcaaagatgtcagctcagtcctata

SEQ ID NO: 118545 - DNA, 243 bp, Zea mays
  Clone ID: MRT4577_395C.1
atgggtttgttaatgggttcaaatggaaacccaacggtgggtatgggaaacccgttgggtacccgaaacccgcatgggtatgggtttgggcaaaattttatacccgtcatgggtatgggttttttagcgggcgtattttttcttcgcgggtatgggtttgggcaagtaatacccagcgggtttttacccgttgccatctctaaccagagctctactgtcgccgagaacttaataaatgcataa

SEQ ID NO: 118546 - DNA, 130 bp, Zea mays
  Clone ID: MRT4577_39600C.1
cttaacaggacccaatctgagaatgaaggataaactgttgagtctaataaaccaacggtggcgaagtatctccttacccatgtgacttacctcatcgagcacaacacggttcaccttgttgtcatcggtc

SEQ ID NO: 118547 - DNA, 429 bp, Zea mays
  unsure (1)..(429): unsure at all n locations
  Clone ID: MRT4577_39601C.1
tcgncgccgcgttcggccaaggctacacgacgcatataaagaagcgcgaacacagttagatcgacggagtaagcaaccgtgatgtactgaaggagcctcatcagctcatgttcgagaaggctaaactacatccttgatgtgatctacagcttcgtcaacacatacatgtgccgtcaattggacagccattgcgcagaataccgagaatgttacacacatacatgaaagctcgtagcacgcattttgaggagatggacattcacaggcactgccatttattacttgatgagatttattaacccgggacaacaaccattcactccactccaattcctacaaaggaaggtccagaactagcatcccagatgatcgaaggattcctccatgccactaatagtgacatgcctagtattaccattcaaggttgca

SEQ ID NO: 118548 - DNA, 347 bp, Zea mays
  Clone ID: MRT4577_39602C.1
gcaccgtccaagccggctttcgcctttgcctacggggagaccacgagttctgacgagcggggtatcctgtcagtgtctcgtgctgctgctgccttctctctgaacgggatgtccgcgtccgagttccagccaagatagaatggaagaattaattacaatcacggaagacacggtacaaatatagatacggttcgtggctcgtggccatttgtaatggaagtttacgtcaccaatttttttttccaaattatcaccactatttttccccatcgggataaagttgggaagttgtgctgttgttcacggttcactagggtatgtttgggacagtgaatggcttatgaaag

SEQ ID NO: 118549 - DNA, 793 bp, Zea mays
  Clone ID: MRT4577_39603C.1
atatcaaaccaattcagatcgactagctcgctgctggctgtagaggacgatcgacgacgatccagaggagcagcataaccgaggagagcggagcatgtgcggcatactagcggtgctggggtgcggcgacgagtcgcaggggaagagggtccacgtgctagagctctcgcgcaggctcaagcaccggggcccggactggagcggcctgcaccaggtcgccgacaactacctctgccaccagcgcctcgccatcatcgacccggcctccggcgaccagccgctctacaacgaggacaagtccatcgccgttgccgtcaacggggaggtctacaaccatgaggagcttcgggcacggctctccggacacaggttccggaccggcagtgactgcgaggtcatcgcccatctgtatgaggaatacggagaaagcttcattgacatgttggatggtgttttctccttcgtgttacttgacgcacgagataacagcttcattgctgctcgtgatgccattggtgtcacgcctctctacattggctggggaattgatggttcagtgtggatatcttcggagatgaaaggactaaacgatgattgtgagcacttcgagatcttcccgcctggtaatctttactccagcaaagagaagtccttcaagagatggtataaccctccttggttctctgaggtcatcccctcggttccctatgacccactgcgtctcagatcggcttttgaaaaggctgttatcaagaggctcatgacagatgttccatttggcgtctccctctcg

SEQ ID NO: 118550 - DNA, 426 bp, Zea mays
  Clone ID: MRT4577_39604C.1
gcaagaactacggcggcgcgcgcacgcaaacttaagctccgaattcagctcgagtcctcctccccgcggagaagctgctcgaggagatctgcgacgtcgggggcgcgggctcgcgcgtggaccgcagcgcctccgacgagggcctgctcgacgctgacccgatggaatccatcgatcacgaaatggacggcgccgaccgcgtcgcctccgacgctggcccaatctccggcgccgagcagcagtggaagaagactaggctcatctctatgatggaagaggtttgcaagcggtaccggctgtactaccagcaggttcacacggtgatcaactcgttcgagacggtcgccgggttcagcaacgctgccccgttcgcggcgatggcgctgagagccatggcgaagcacttcaagtgcttgaagggcatga

SEQ ID NO: 118551 - DNA, 577 bp, Zea mays
  Clone ID: MRT4577_39605C.1
aaggctccttcttaagatcgggcctaaggtggttcgtccagcgaagacgacagctcttgccacagcggttgagcctggcattctgctgcaccttattccagttccccgcgccgtgtacctcgacgtagtctttgacacgcttatcctcttcgggcgaccagggacccttcttcatctggggcgtcccgctggggttttcatagtcgtcgatgctatcggtctccttgtcttcatcatcaacgtgttcatcgtcggccgagacgtactcatcgtctaggggagagttctctccatccggcgcagggttctcgtccaccctcaccaccgtcattttgattttgaactttgaaggcagctgggtcgtcctccgaaagttggggctcctggggctcctttaatcttctgcaggccggctgctggcgccgccacgccggggatggaggaggggccgaggaggacgatgccgccgtatcccccgtcaccggtagcgcgccgccgtcacctgttccgctagggttcctccctcgccacctggttgcatgattcgtgtcgtgtgttcctgggcgttgctctgtta

SEQ ID NO: 118552 - DNA, 930 bp, Zea mays
  unsure (1)..(930): unsure at all n locations
  Clone ID: MRT4577_39606C.1
ntatanttttttttttttttttttttattccctgctaaatttaaataataagggctttgttcccaccactaactttaaaccgtccctcccattctttttagcacaaaggttattgtttcttacaagatccgtcttttgttttcaatttatacaacctttgccttgtccaccatttcgctttacacttaccttctgccctatatctatacctataaatttcttttttatggaattcccacatcccctttttatttttttctccttttccccctatttttatttttatccctttctaattttctcttcttttattctttcctataaattccttccctttttttctactattatctttgtttccctatttaataatggctcttcttttcactttattttcaattatcttcttttcctatctatatcctaccccctttttattctataccttttgttttcatttttttattcttttttagtgtgtttttttttatatccctcttcttcctcttacttttttatttctctctctttattttaacttatcttcttctttccctcacatttttctctctcttatgattcttcctttctcttcttctgttataattccctcttctattctctaattttaatatttcattctatctattttcttatcctatatcattatttttttttttatttttatctttatctttttttttatttttatttttttcatttttttttttttattcttttttattcttcctttttctatatcatctcatttcttcacttttttattccttcttaattcttcttttttttagttttttctatttatttatttatcttttctatttttatcttttatcttctttctttttctttttatttcttttctcttcattcttctctttatatttcttttaatgttctttttatttt

SEQ ID NO: 118553 - DNA, 805 bp, Zea mays
  Clone ID: MRT4577_39607C.1
cgtcctccagcccacctccgtggcgcccctctccctgctccagctccttccaccaccgagctgtcgcactggtgaagcagcaacgctcggcttcccctagcctccaacccttccgtcgtctttctcctctctctaatctccagcacatgcccagctcctctccacgccacgcgactgcagaccgaggagcagtccgcgccaggtgaaggcaaggagtccatctcccgcgacatgctccaggccagcggcgtgggtctggccgtggtggtcagcacggtggctatccggccatgtggagacgagcggtggtgagcagggcatccttccattgatttcctccctcggctccctccttgcttcactctctccctcagatttgtctgcgcgcagtcgtgggttcctctgctcgtccgtctccctaaccccgtcgatttcttcctgggcgcgttggtggctggcggatcccctggccgtgtgcccctgtgccggtcgctcctccctgccccagcccggcgtttctcccgccggtcaagctccctgcgctcgcccatggcgcgcgctcctccaagccggcgtccactgctcgccatggctgccgatcctgacccagccgtgtgctcgcccagctcggcctctgctctgtccctgctgcgcgcgcgagctcgtcggtcttcccagctcgcctgtgctccttcctctactctagctctagcgtgtttccttcagcaccttcccatggtcgccgcgccctctactccttccagccggtcgagtctctctgcagccgtgcgctcggccctcagct

SEQ ID NO: 118554 - DNA, 639 bp, Zea mays
  Clone ID: MRT4577_39608C.1
cgagacgagacgagacggggggaaaaaactgcgcaggcacaggcagggagagacgtaaagccgccgcttcgtgcgcgtcgacgtcacctcgccgccggggcccgtctcgccggggggtcccttacagctcccttccgtcgccgggctgggcgggcgccggacggatggggaagcgaccacctgaggggactggctgggatggccgggcagaagctcctggcgcatgcggcacgcctggacgagaccgaccgggcgctctacaggggcttacggggcgccgtcaactcgctctattatctatacacgctcctgatggcctctgcagaagcccacttatcacgcgcggcgacctgccgccatgaaacttactggatggagggacacctatgcagtatggagcacgtactctgattgcaggtggtttccagtccataccatatccaattttccctggaggtgcaattatcggatgctctgcctgatctctaaatgttcccaaaataaaaggaacccatacagctatgaaatcaggtatgcttgcggcggaagcaactctcaagtccctcgttgaaggatcttcgatggaactgtactggggagacctcaagaagtcatgtatatgggaagaccttctaaagc

SEQ ID NO: 118555 - DNA, 572 bp, Zea mays
  unsure (1)..(572): unsure at all n locations
  Clone ID: MRT4577_39609C.1
ggcgccggcagnacaaactcccgtcgnggcatcaaaccgttaccagctacggccatgaggtcggccaatctgcttacgaactgcaccttgtccgcgctgctgctggtagcgtcgcggtctttgaagccgcgtccgcgccgccgccattagaggccgtggtcgtgacgatggccagcgtacctcatccgctccggcgattaccattccctggtcgtgagaacagaagggggaatagaaggagtgggcatgtagaggatttactgaacgtagcctatctttgcttaacttcccaaggcaggatggagaaccccaagttcatcgaacaggatcgcagcgaaagttcgacaaagaggacaacatcattgagggctgcaaaagcgaagtgaggactgaattagagtgtgctgatcttatggaagctgaatttaaaaatgtgaagaacatcaaaggtggatataccgcatgactgggaagtggccttgccgggaaaaaatcttaagcacaagatgaacaattgtgtgccctatcatggggcttcttacttgctttgccgacaaccttcttataataaa

SEQ ID NO: 118556 - DNA, 413 bp, Zea mays
  Clone ID: MRT4577_3960C.1
atcctgggttgttattacttttacatgggttatactaattttactcataataagaatttagaattcacggcatgcaagagcttgacaagacgctccgaatacatggccaccatggaacgggggcagtctaggccaaccagggggcatgatatgaagaaagaaaactacgcaaaagggcgggcatacacgagagcaagaagaaaacgaccaccggcatttttctgatacaacggaccaagcgggcaaagcatgaaaaaaccatgccatcttattattaaaaactgtggaacacttgaagaactcgatggcccacgcggaggcgttgatgtaggcggacttggacccaaagaagccggggcccttggctagctcgcggaactcgggctcgcaccgataattgccgtcggggttgt

SEQ ID NO: 118557 - DNA, 247 bp, Zea mays
  Clone ID: MRT4577_39610C.1
attcggctcgaggaacagtggagaccctatgttgtgggacaccgcttagataatgggtctggaggggaggaaagcagtgagtttgggagacatcattactgtagatggtcccagaggtgtgggtggaaaacaacaacttgatgctggatatatacttcgctggtatggacatgctcaacatgttgattggtgagtgcggggacaatagactgtaagggcttatttaagattaacataaatgtatccc

SEQ ID NO: 118558 - DNA, 441 bp, Zea mays
  unsure (1)..(441): unsure at all n locations
  Clone ID: MRT4577_39611C.1
tttaaaatttttttttttttttttttttttttttttttttttttttttttttttttttttttttttttttttttttagggaaaataccgggatctaaccttaaaaccacctgcttcatcaccaaattccctttcacggtggtgaaggccccccccccctttaccataaaacataaatgcccgagggccccccaaaccacaacaattaacaattgatccatcccccccccttttttaaaggcatttccacccccaatgcccaaagtttcccccccaaattttcaaatctattaacccccccccccggaaaaatcattttacaacccccctcaaaagctcccccgttcttggagcatttccccctattcatttcttttccgcaaaaaaaaaaaaaaaaacctggccccccnggccccctcggcaccaagggcccctatacccc

SEQ ID NO: 118559 - DNA, 456 bp, Zea mays
  Clone ID: MRT4577_39612C.1
aaaaaaaaaacggggagaaacccggtggttttaaaaaaaaggggggcaaaaaaatggccccaaaacaaacttttacataaaaggggcaaacgggtaagggtaagacactttttaaagaattttgcttcgactaaaaaaattccatccaaaacattccatgccctgggggacacagttcccagatttttttttttaataaaaaatagagtccccaaacttgaaactgcccccgttgttttgccataatgggcctttttaactcctgggcctcaaacaacttgaccggattatccgggtcgatgtccttaaaaagcgggaaggcggcgggcaacccctccaggctgggggtggggtcctttgagcgaaaaaccacctttttaaaaaaaacccgggttcccggggggggtaggggaaaccccgcccttaagaaacaatttttccaagcggggaaacctt

SEQ ID NO: 118560 - DNA, 414 bp, Zea mays
  Clone ID: MRT4577_39613C.1
accaaaacattcaatggccccaacggcggcggaggaaatggaaaggatggtggaggcggattggaaggaggggatgaggaaaaggaaccggtacgggctggtggagtaccgggcgctgccggcttacctgcgggacaacgagtacatccaccgccactaccgctgcgagtggccgctcccgcaagttctgctctccgccttctccatccacaacgagaccctcaacgtctggactattacagaggaggcaaatatagatactccagtaaaggaaatgaggatgctgaagagaaaaagctagcttgggaggaacgggagatcgattcttgcctgactctgattgcaatgcgtcgaattggcaaaatatttacgcgtttatttcctgcttgtgcttaattcctgcgtgtgtttctg

SEQ ID NO: 118561 - DNA, 371 bp, Zea mays
  Clone ID: MRT4577_39614C.1
tgttacgcgcggcccgcggcccgaaaccgcaggggcataaaaaaacaaaacgggcgagaaaaccaggaagagcagcaccccgaagcacaccaccacgaaccgcgcccccaaacggacagccccaacgagaagaacgcacaccaaccacgcccgacggacaccacgggaaccaagaggaaaagagcaacacacaggaacaccacccacaggacggcccgaacaagacggaggaccccccgcccaagaaaaaaggccggcccagcgacaacgccagcacgaccagaacacacaccaaccacagccaggccaccaccaaggccgccaagggaacccaaggagcggagcaaaaccagagaacccgaaaaacaagg

SEQ ID NO: 118562 - DNA, 364 bp, Zea mays
  Clone ID: MRT4577_39615C.1
gtaattagagcatgttgtagtgcaagctcttagttacttgaataacggacctttacacaaataatacccgaaactatttcactgtaggtcatatacaatcttgtttagggtccggagtttatttagttgtatttttttgtacgcccatctggtctatgagctgaataatctgtctaatgatgtctctcttttggtctcatgtctggtggatggcgtcacgaattgcagatggaggtatgttgtattaagcattgtctgatggtgaaatattctattgtttttcatgttttaatacattggcctgtaaatgttctataacatggacttttgttgttataaacttagaattggcctggggtaattt

SEQ ID NO: 118563 - DNA, 585 bp, Zea mays
  Clone ID: MRT4577_39616C.1
gatcaggaggtagcttttctccctttctttattgaaatataaaataaaatgcttgaatttagcttacaaattattgttggagctgtcataaatatatcgttatctcatgaggctgagcatgaagaaacaaagagacagactgtgcgcaccagataaagacagctctccgaatttcggccgcacaagctcgttctttcagacattattgtacaaaacaaactagtccggagcgacgcttctctgtacttttgtaaccagtagccccagcgctgcatgattgcggggcggtggggccggggcgtctgcgtgcaggtcattgccgctccggcgctccgctgcttaactacagctggcgttcgcactgttgaagctctgcaacgcaggcacctgcgagcaggcctccgtttgcttgtgggcctggacggtccacgtacatgagctggatgaagtcgtcaagcacgaagtccggcatccaaggcggggggcgatgcatggagcgtcttacgaggaagcgcagcccctcggcggtgtccggcagcagcgcatcctcgacggtgcggtcctcgcgcgccgccatggcccgca

SEQ ID NO: 118564 - DNA, 137 bp, Zea mays
  Clone ID: MRT4577_39617C.1
tcttctcctacaaacttgacgctcctcttctcttttgctttagagatgctgggaagttctcgggcagctagctgagtgctactgaacaggtgtggcgtatgaattcctacaggacgtcgtcataacatcagggggag

SEQ ID NO: 118565 - DNA, 413 bp, Zea mays
  Clone ID: MRT4577_39618C.1
accacaggcacagcacacaaaacaagtctcgtggtatagagaaacggagctaaggaagctagccagctcgaccatgggtggtgttcggcagcagctcatggccgccgtcctcgtggcggtggcgctgatggccacggcggcggaggggtacatcactcagaagacgtggggcgccatccgccgggcgaaccgcgccgggctgttcgtcggcctcgtcgtgcccaacacatacgagatggtccccgtgctcgagtcgcccagcttcgtggccagcaagagcatccctaacatggacatccaagggcgaaggtttcgcttcggaaccatcgaaggccaaagcgtcgtcatggtcatgactggactgagcatgctcaacgctggtctgaccacccagatgctgctgagcctgttcc

SEQ ID NO: 118566 - DNA, 1648 bp, Zea mays
  Clone ID: MRT4577_39619C.1
ggtccctcgaacccggcgcgggcagagtcggagcgcattgtcttgttgtactttcccttccggcagtggcctcgattcgcatctccttttcccgtccatgcgcgcgccggcgggcggtgccagtgccaccgcgctcgcggcggccatgaacattaagcagccgctgcacggcgcatcgacgctgttcgcgctgctctccctctcgctgctcctcctccgcctgctcctccggctccgcctggccgccttccgcgacgcggcgctgtcgctccacctgctggcgcgcctccgcctccgccccgtcctcctctgcctcccggcagcctgccacgacggcggcgccggcgccggcgccaccacgctgcgcgtctggtgccccgccgccccatcctccaagccgccgctgctcctcctccacggcttcggcggggacgccaagtggacgtgggcgcgcaacctcccgcgcctgtcccgccacttccacgtgtacgcgccggacctcgtgttcttcggcgcgcagtcccggtccgcgtcgccgctgcgctccgtggcgttccaggcccgctgcgccgccgaggccatgcgcctcctcggcgtgccccgctacgacgtcgcggggatcagctacggcggcttcgtcgcctaccggatggccgccgccgaggccagggacgccgtgggcaggctcgtcatcatgaccaccggcgtcgcggccacgcccggggagatgcgggcgatggcggcgcgcgaggaccgcaccgtcgaggatgcgctgctgccggacaccgccgaggggctgcgcttcctcgtaagacgctccatgcatcgccccccgccttggatgccggacttcgtgcttgacgacttcatccagctcatgtacgtggaccagaaaagggagagggcagagttgctgcacgaactgctcaagagcggagctggcttcgaccccctcccggttcttacccaagaaacactgatcatctggggcgacaaagaccaggtgttccccgtcgacctcggccacaggctgcacaggcttctgggcgagaggtccaggctagagatcgtcagggacgcagggcacgcgctgcagctggagggcgccgaccacgtcaaccgctccatcaagtcgttcctcctggacgagcgggtcggcccgggagccggcgcgggccgcaagtaggacgaggccttctcccgtccaggcccacaaccaaacggaggcctgctcgcaggtgcctgcgtacttgcgttgcagagctgcaacagtgcgaacgccagctgtagttaagcagcggagcggcaatgacctgcacgcacgcagacgcccccaccgccccgcaatcatgcagcgctggggctactggttacaaaagtacagagaagcgtcgctccggactagtttgttttgtacaataatgtctgaaagaacgagcttgtgcggccgaaattcggagagctgtctttatctggtgcgcacagtctgtctctttgtttcttcatgctcagcctcatgagataacgatatatttatgacagctccaacaataatttgtaagctaaattcaagcattttattttatatttcaataaagaaagggagaaaagctacctcctgatcaaaaaaaaatgttagataccaaaa

SEQ ID NO: 118567 - DNA, 690 bp, Zea mays
  Clone ID: MRT4577_3961C.1
aaaacgcgtcgcattcgctctcaaggatcctctgatgccaccgccaccgtgtgaccgaccgtgccgccggcgatccatatccggcgacccgtgccaggcccaatcgcaccatgtcacccccggagccgacgcggcaggagagcgtgaacatggccaaccttgcagagcaggcgcagcgaaacgaggagatggtcgagttcatggagcgcatgaagcgctacaccgcaggagccgcaagaagaagggcaagaatagcgtggagacctacaagatctacatcttcgaggtgtctgaagcaggtgcacccggacattggcacctcctccaaggccatgtccatcatgaactccttcattaacgatatcttcgagaagctcgctgctgaggccgtcaagctcgcgcgctataacaagaagtctaccatcacctcccgtgagatccagacctccgtgcgcctcgtccttcccggggagctcggcaagcacgccgtctccgaggggaccaagggcgtcaccaagttcacctcggcctatgctgctcggccgccgcttgcaggattctctcctgagttcacgtctcttgctgtagatatgtgctgctgcctgctgggcttctatggatgctatctatctggctgtagcaactgtagtatctgataggacccgtatgaagcttattcacccagctata

SEQ ID NO: 118568 - DNA, 219 bp, Zea mays
  unsure (1)..(219): unsure at all n locations
  Clone ID: MRT4577_39620C.1
tcgtgagcagtggtaacaacgcagagtactttttttttttttttttttttttttttttttagctaagtttatagagaaaattcaatatttataaagtcaaatagattcattataaaaaaatatagggtataatgaatcaaatgagaatttatttaataccataagtatcgattaccggtggtgtgggtatcccgcgtttttttcgttgntaccactgct

SEQ ID NO: 118569 - DNA, 226 bp, Zea mays
  unsure (1)..(226): unsure at all n locations
  Clone ID: MRT4577_39621C.1
tcgagccggccgggtattcgttcctcacttgnttgcttagagatcagaatgcaatgaagctattttggaagtgtagaccttcgatggtatgccattggaccatgtatcaattatatatgcaacgtttgtgtcatctgttccactaataccagcagtgtgctattgttgtttgctctggtctgctacttgcaactgttagccgattaacacaagaacttaacacact

SEQ ID NO: 118570 - DNA, 287 bp, Zea mays
  Clone ID: MRT4577_39622C.1
ttcatacgtacagatctaaccaagaagcacgcggggcttattataaaagaccggggggatccctcccacaatgaaactggtgtatactgaagaaagaagcaagaaacccaccggagggctatgctagctaatgacctcaataacaatgccaacaagcttgcacgctgaactgcccagccacaacgagtcggcccagacatcatcaaagcagtcttcgcgccacagattcaccgacaccaccagaacaaccatccaataatgagtctgaacgccaacaaaccaacgga

SEQ ID NO: 118571 - DNA, 522 bp, Zea mays
  Clone ID: MRT4577_39623C.1
ttttttttttttttttttttttttttttttttttttttttttttttattttttttttttttttttttttttttttttttttaaaaagaccgggtcctaacatacaacgaaaatcccgccccatgttttaagacggggttccaaattcaccggggcaacatcggggcatagttatacattccaaattttttctacaggccccaaacatgaaacgtacaaacttttgggggggtggccgggaggcttaacttcccttaacccaaattatggcaaccccggggacccttgggctacggatcgctgaaaaggatttcgggaaaaacggaaagggcgtcctgaaggaacaacaacctgttttcgtccggaactggagcgttgagcataattaaaaaacaccccaggggtaggtccagcgtctcgctgggggggcccaccaaaagcgcgcatagttcctttaccattttgaagtagcatgcccttgactaaacaggaaatttgcttccccaaataacaacgactggtt

SEQ ID NO: 118572 - DNA, 288 bp, Zea mays
  unsure (1)..(288): unsure at all n locations
  Clone ID: MRT4577_39624C.1
aaaaaaaaaaaaaaaaaaaaaattataataaaaaaaaaaaaaaaagnntngggggggtttttttctaattaaaggtacccaatatttcgtactatttaggggccccccgttttataggtcccaggtttccctcccctgccttccgaccttttatctttttattagttcccccgaattccatttaactgccccccttttaacaccccttgacctggaaaaccctttgcctccccaaattaacccccttttccccccttcccctttttccccctttcattttttgccaaa

SEQ ID NO: 118573 - DNA, 325 bp, Zea mays
  Clone ID: MRT4577_39625C.1
cccacgcgtccgtgcatagttcagatgatcaaccctcgtggttctgattatattgagtgattagtcttgcgctcctatctgacgaccttatcaatgccactctgatattatatgcttttaatgttgcgtttactgatttcgatacactatgtttattgacgtcctatggtacattctcagccagatactgtcgccgcttcaaaatcctggccgagaggttcacggcgccggctcgcatccgtccttgccctggctgcaccttgcttattgtagttgaaatggtgcacgtgatgtatgcattgtaatcatatttccttagactgtc

SEQ ID NO: 118574 - DNA, 349 bp, Zea mays
  Clone ID: MRT4577_39626C.1
gattaataagagagggggggccataaagcggttattgaccattgactttttgaactgaaaggtgagcgcccagcgaccaatactgcggaccattgagtcaatgccccttaaggtgagacatggcctaatctgatggatggaaaaaactaaaaagcaacattggggcgattagttattaaaagggctttctgtcaagagtctgactttaacgcggggctttcgggaaacgaagaaaatagaaccatggaaagcctttgggcggtgaccatactattgaggattttttctgaagaggaaaaaaacctgttgagccgacagattttggtttgtgaatcttcccatgggaaaa

SEQ ID NO: 118575 - DNA, 1385 bp, Zea mays
  Clone ID: MRT4577_39627C.1
gggctgtgcgggcatacctggtctctccgaattgtccagttttttggtgtctgtccgccgggttcttgagctggcttggggatctgtagctttgagagcttcatcggggaattcctgcggcttgggggggttcttgcggttgtgttgagtggcctttcttgtggaagtgcagagtgattctgcagaagtattcattctactggcgtgctgagcaggtgcaggagctctaataagtctagtgcgcacttcagtcatcagccaagtgattgaaaaggtgcaggcaagtcagctgaaatattggttccgagggctctgtagttgcttatccacgctcgcctatgcctttgcgctgatcttgacaactcaaagcttggatatggctacttattactcgagccctggcagtgaaagagattcacaaacaatgtactcagcagagtcacgcgttcgttttccttcacccgtatccaaaagattctgaaaagctaatgttatcgagacaaactgggttgacaagaagtcagatttcaaactggttcatcaatgcccgtgtccggctgtggaagccaatgatcgaagacatgtacaaagaagagattggtgaggcggagctagactccaactcttcctccgacaacgggcagcgaaacaaggacaaagcaccatctcccgaagaaaatgaggacctgcagaccccaacaagccaggcttgccaaaccagccagctcggcgagtccaaagccatcgttggtggagtgatgggctttagtggagtgctagccggcggcttccacaccgaggccaaccccgacgacagcttcatgagcctgatgctaaaggcccagagacctggtgaaaccgaaggcaccggtctcctccacgatgccgtcgctcaccactcggacgacggcgcccggttcatggcctaccacctggcagagttcgggaggtacgggaacagcagcaacgtctcactgacgctgggcttgcagcacgccgagaacagcctcgcagtcccaccaaacactcagccaggcttccccggcgtcagagaccaagacatgtacaacgccacagctcctcctctcaacgtcgcctccacgtcttcagagtatgattcggcgagccaaattgatcaacaacagcaacggcagcggttcgagccgtcacctctgatgcatgatttcgtggcctgaatttcagctcgcccactggaaaacgtgggggaaaactactgccaatttgtagtgtgtgccaggacgaataacttgcctggactgaattttcaggcgtgggactgtagctgtagttaacgattggggatttggggggtacagtacaggaggtatatagcgtaaatgtgatgtaaatttagtgggggtgat

SEQ ID NO: 118576 - DNA, 174 bp, Zea mays
  Clone ID: MRT4577_39628C.1
gcacgaggaattcttagggcctctctctgtgcggcgtgagaggcggtgggtcgtggttgcggtcggcgcgcgaggagggtcgacggcctcgcgccattgggtacgaaaccggccgagactgtgagcggtgggcggccgctgcctggagacagctcaaggcaggttgatccaggt

SEQ ID NO: 118577 - DNA, 496 bp, Zea mays
  unsure (1)..(496): unsure at all n locations
  Clone ID: MRT4577_39629C.1
cccactcgtccgtgcagtcttgccatgctccccacgaggagcacaccatcagagtgattctgcagaaggattcattctactggcgagcagagctggtgaaggagctataataagcctagcgctcactttcctatgcttttgcattaatcttgacaactgagtactcaaagctgggatatggctacttattattcgagccctgacagcgaaagagattcacaaacaatgtactcaacagagtcaggcaatgcatcatatcccgtgccatcagccctagggaactttctttatctgaacagtgcatcttctggaccttatacagaatttaatggaattgtccagtctcagcagaatttcatggaacttactggtcatccttcagcaatttcacatgattcatcatccaacgaagctactaacattggcacttgactgacagaacagcgctctttnggtcctttgaaagatatgagaaatgagatgctgatgcatttga

SEQ ID NO: 118578 - DNA, 226 bp, Zea mays
  unsure (1)..(226): unsure at all n locations
  Clone ID: MRT4577_3962C.1
taccatattcttgctggtgggggttggataaactaagtccattaggtaagtttttttgtgtgtgaccatattagcctgtttgtctacagttccatgttgtcttggggcttgtttggatcagccacggcctaacaattatcctttggtatccaaacatgttgttggttgaaaggagaaaactaccantgtgttatgaatcatatgcgggggggggacagatggtatt

SEQ ID NO: 118579 - DNA, 630 bp, Zea mays
  unsure (1)..(630): unsure at all n locations
  Clone ID: MRT4577_39630C.1
ccggccggggaaccctccttctaccatgcctccaccaccacctcgtcgtttccggccccgagcccaccctcgtgacgcgcactcggccatggcaagcacctcgtccgcacccgccggcgccacagatgccgtgctgaagccatccgagccggcgcctgagggtgtgcagcaggtgcagggcatcgacttcaaccagcatgcggcgcgccccatcaccgtcgacgagctcgtgagcggctatgccaccatgggcttccaggcgacgtcggtgggagcggctgtgcgaattatcaatgacatgcgcgcctggagagaccctgagacgggcgaccgcacaaccatctttctgggatacacgtccaatctcatctcgtcgggcctgcgcgaaacactgcgctacctcgtccagcacaaacatgtctcggccattgtcactaccgccggtggtgtcgaggaggactttatcaagtgtctcgcccccacctacctaggctccttctccacgcccggcgctggcctgcgcaaaaagggcatgaaccgcattggcaaccttgttgtccccaacagnaactactgcgccttcgaggagtgggtcgtgcccattctcgaaaagcagctccaggagcagga

SEQ ID NO: 118580 - DNA, 1452 bp, Zea mays
  Clone ID: MRT4577_39631C.1
caaaacttatgactatgttggacgaggtggataggaagtacaaacactattatcatcagatgcaacttgtaatgtcatcgtttaatatggttgctggtgctggagctgccaagccttatactgcagttgccctccagacaatctcacggcatttccgatgtctaaaggatgctatcaatgatcaaattagtgttatccggaagaaacttggagaggatgacaatacatccggcaaagagggcaaactaacccgccttcgttatattgatcagcaaataaggcaacagcgagctttccaacagtatggtatgctacagcaaaacgcttggaggccacagagaggactacctgaaaattcagtctcgattctccgggcttggctttttgaacacttccctctcccgtatccaaaagattctgaaaagctaatgttatcgagacaaactgggttgacaagaagtcagatttcaaactggttcatcaatgcccgtgtccggctgtggaagccaatgatcgaagacatgtacaaagaagagattggtgaggcggagctagactccaactcttcctccgacaacgggcagcgaaacaaggacaaagcaccatctcccgaagaaaatgaggacctgcagaccccaacaagccaggcttgccaaaccagccagctcggccagtctaaagccatcgttggtggagtgatgggctttagtggagtgctagccggcggcttccacaccgaggccaaccccgacgacagcttcatgagcctgatgctaaaggcccagagacctggtgaaaccgaaggcaccggtctcctccacgatgccgtcgctcaccactcggacgacggcgcccggttcatggcctaccacctggcagagttcgggaggtacgggaacagcagcaacgtctcactgacgctgggcttgcagcacgccgagaacagcctcgcagtcccaccaaacactcagccaggcttccccggcgtcagagaccaagacatgtacaacgccacagctcctcctctcaacgtcgcctccacgtcttcagagtatgattcggcgagccaaattgatcaacaacagcaacggcagcggttcgagccgtcacctctgatgcatgatttcgtggcctgaatttcagctcgcccactggaaaacgtgggggaaaattactgccaatttgtagtgtgtgccaggacgaataacttgcctggactgaattttcaggcgtgggacagtagctgtagttaacgattggggattggggggtacagtacaggaggtatatagcgtaaatgtgatgtaaatttagtgggggtgatagcggtaaagaaatcctgtaaagatggaatgcatttatacgtgtatttaagggccatgctgtaaaaatagatttacctgtaatgagtacttatgatccaggtaatatatatactgtgcacgctgttga

SEQ ID NO: 118581 - DNA, 933 bp, Zea mays
  Clone ID: MRT4577_39632C.1
aataaacaaccagcaccagcactccagcggcaacaataatcaaatcaaagatcaggaggggggagaaacggcttttcttagcaggccctccggttgtttttattatattgggtgctgttgtttgttgcaggtggtgggtggtgcagggattctttatttctggaggcaggaaggaggaagaagaaagaagaaacatcagaaccgagccgactatcagagatagagagaggagctctctcctcttcttttgcttttggtattgttatcttgggatctgattttgtccccatactgggagggagtgagggaaggagggaggaggctgggcttgtttctcctctcttctctcctctcagctcctcctcgcaaggctggccgtcggctcgggtctgttgacagcaatccctgcactgcagtcttgccatgctccccacgaggagcgcaccatcagagtgattctgcagaaggattcattctactggcgagccgagctggtgaaggagctataataagcctagcgctcacttcagtcatcagccaagtgattgaaaaaaggcaagtcgtctgaattattggttccgagggctctgtagttgcttctccacactttcctatgcttttgcattaatcttgacaactgagtactcaaagctgggatatggctacttattattcgagccctgacagtgaaagagattcacaaacaatgtactcaacagggtcaggcaatgcatcatatcccgtgccatcagccctagggaactttctttatctgaacagtgcatcttctggaccttatacagaatttaatggaattgtccagtctcagcagaatttcatggaacttactggtcatccttcagcaatttcacatgattcatcatcccacgaagctactaacattggcacttcactgacagaccagcgctcttt

SEQ ID NO: 118582 - DNA, 1672 bp, Zea mays
  unsure (1)..(1672): unsure at all n locations
  Clone ID: MRT4577_39633C.1
caaggccatgccaccgtcgagcccaggaggcggaagtcaacgtaaccaagcgaacccatccatggcctccgctgctgccgtcgtctccctcaacgtcggcggcgagatcttccagatcaccaccgccacactttcccgcgccggcgcctcctccccgcttgcctccctcggtccctcctccccgtctgctccgcacttcctcgacggcgacccgcgcctctttgcccaactcctatccttcctccgccatggccgcctccttgctccgtcctatccctcagccacgctcctcgctgaggcgcgccacttcgcgctcgatggcgccctcctcgcttctctctccccggcctccgcctttgccccgctctcgctgcgcccttccgcgctcctcccgctcaccggccgcgtcgcgccctccgccgtagcgctgtgcccctcgccgcctcacccggtctccctcgtcgccgcacacggtggggtcgtcacctgcttcgacgccgcgctcgcctcccgcaccagcgtcctcacgccgctgcccgccgttgactcgctcgccgcggtgtcccccgtcctcgccctcgccggcgcccgcgacttccacggggtccacctctgccggttctccgacgacgcctccgccggctgtactgatccgaatgtgctttcgtggccgggatcgccctccgccaccgtgctgtccatggccactacgaccgcgtcagaagcaccgtcgccaccctggctcttctccagcttcgagtcagcgcggcggaactcgagtgccgtggtggtgttcgacctcaattccttgtctcctgtggtggaaatcgggcggaaggaggtgttcggcgcggacatcgaggctgcgatcccagcgagcaagctcgcgtggcttggtgggcacagcctccttctcgccgctggctctcactctggcccggccggggtagtgggggacatacgtctctgggatgtccgggcgagcgccacggtgccagtgtgggaggtcagggagaaggaggattgctttgctgatgttgcggcgtctgacgcactgtcagcggtgttcaaggtgggtgcagcatccagtgaggtgttcatggctgacctgaggaggcttggtaacggtggtggcgttggattggagccatgggtgtgcattggcgatggacagaaggcggctgcagccgcatcatctggaaggaaagagaggaatggttgtagaattgagtgctactgcagttgggtgtttgtggcacggggcgcggacgtcgaggtgtggagtcaggtgggattggcaccagaagccggtggaaagaaggtgatgaggaggaattgggttggcagtgaactatccacaaagcccaagattgtgagctgggcatttggtggcagcaggatggcattggccagagctgatcagctgtctgtggagatatgggatagtgctacagcagcaattggcgcaaacccctgagtagagggaggatatcgcaaaagcaagccgacgcttgtcaatgttcaattgctgcttgttcctctatgcaatgtaaatttactttagcgtgttgtttgtgttgtatcccagatagttagaatcttgaatgcaatgcctggaaggtatggaatgattttactggggttgaatnaaataaaattaagatatatgtat

SEQ ID NO: 118583 - DNA, 387 bp, Zea mays
  Clone ID: MRT4577_39634C.1
acaggttcagtttttatatggactctccaaagctcgcttggcgggaagaccagtcacaacacggacctatcgactgtagaacagccatcaaatgcttcagtgtttatatccttttacggggcctaaaacgcctaccccttagagtgctgttaaagaaaccactggtcccagtgattgttatttactggaccagggcacgtactgatttcgcactagtgtattggcaccaaaaaggaaaagagggccaatgaggaacaccattaactgcggttactggttggggtgaccctggcatcacgtgcaaagctccttactactaggtagaggcggctgaggatcctgccaccacgtccggtgccgataatggcccttttctgggcctacctt

SEQ ID NO: 118584 - DNA, 209 bp, Zea mays
  Clone ID: MRT4577_39635C.1
ttttctctctcagcgcgtcgcccgccaccacaggctgacattttcactaatcgatgacgttcaactttcaatcatgtctgacttcgatgtctaacctttcgttgcctccatctctcccaataagatgacgttccttaagtacagctacctctacttttacctacatactcttcttaacattcccacggacgacctcattcagctctttc

SEQ ID NO: 118585 - DNA, 1968 bp, Zea mays
  Clone ID: MRT4577_39636C.1
ctttcaggtggataggaagtacaaacactattatcatcagatgcaacttgtaatgtcatcgtttaatatggttgctggtgctggagctgccaagccttatactgcagttgccctccagacaatctcacggcatttccgatgtctaaaggatgctatcaatgatcaaattagtgttatccggaagaaacttggagaggatgacaatacatccggcaaagagggcaaactaacccgccttcgttatattgatcagcaaataaggcaacagcgagctttccaacagtatggtatgctacagcaaaacgcttggaggccacagagaggactacctgaaaattcagtctcgattctccgggcttggctttttgaacacttccttcacccgtaagtttttccgcttaacttagagatatgttcactcacccccttttctatttgttctcatgccacgctgacactcttaggtatccaaaagattctgaaaagctaatgttatcgagacaaactgggttgacaagaagtcaggtattttttatttgcttaagatatgttttctcttatcaaatttgcaaatcattggaatgccttagtattattaaaagtgatgggtacgttaaaaggaataattttagtagttttttttgtagaaagaactaatataggttgtttcagctgtatattattgtgctgcaaacatattgtaagtgctgtagggttgctgcttgtctgcatgtatatatgtacgaatctcatcctgtctttacatcttaagtcttttcccatcgacaaaaactttaaaacaaactctgcagttgctcttttccagaacaaggtacaccaattctgttggtatttggatttggaggattacctgtgatctgatgacttgctgtcatattagtagtttgtattccgtatcaaataatggaaaccatatttactgaaactcacatgcgtccttctattctagatttcaaactggttcatcaatgcccgtgtccggctgtggaagccaatgatcgaagacatgtacaaagaagagattggtgaggcggagctagactccaactcttcctccgacaacgggcagcgaaacaaggacaaagcaccatctcccgaagaaaatgaggacctgcagaccccaacaagccaggcttgccaaaccagccagctcggcgagtctaaagccatcgttggtggagtgatgggctttagtggagtgctagccggcggcttccacaccgaggccaaccccgacgacagcttcatgagcctgatgctgaaggcccagagacctggtgaaaccgaaggcaccggtctcctccacgatgccgtcgctcaccactcggacgacggcgcccggttcatggcctaccacctggcagagttcgggaggtacgggaacagcagcaacgtctcactgacgctgggcttgcagcacgccgagaacagcctcgcagtcccaccaaacactcagccaggcttccccggcgtcagagaccaagacatgtacaacgccacagctcctcctctcaacgtcgcctccacgtcttcagagtatgattcggcgagccaaattgatcaacaacagcaacggcagcggttcgagccgtcacctctgatgcatgatttcgtggcctgaatttcagctcgcccactggaaaacgtgggggaaaactactgccaatttgtagtgtgtgccaggacgaataacttgcctggactgaattttcaggcgtgggactgtagctgtagttaacgattggggatttggggggtacagtacaggaggtatatagcgtaaatgtgatgtaaatttagtgggggtgatagcggtaaagaaatcctgtaaagatggaatgcatttatacgtgtatttaagggccatgctgtaaaaatagatttacctgtaatgagtacttatgatccaggtaatatatatactgtgcacgctgttgaaacccaaca

SEQ ID NO: 118586 - DNA, 2943 bp, Zea mays
  Clone ID: MRT4577_39637C.1
cgactacttttccgttgggtgctggtgtttgttgcagctagtgggtggtggtgcaggaattttttattccgggggcaggaagacggaggacgaggaggaggaacaagcgagagatagagagagcgctctcctatcttcttttgcttttggtattgttatcttgggatctgattttgtccccatacataccgagcgggagggaagggggcttgggttttctttctcctctcttctcttcttctcccctctcaccctcttctcctcccaaggctgactggccgtcggctcgggtctggggacagcaatccctgccgtcttgccatgctccccacgaggagcacaccgtcagagtgattctgcagaagtattcattctactggcgtgctgagcaggtgcaggagctctaataagcctagtgcgcacttcagtcatcagccaagtgattgaaaagggcaagtcagctgaaatattggttccgagggctctgtagttgcttatccacgctcgcctatgcctttgcgctgatcttgacaactcaaagcttggatatggctacttattactcgagccctggcagtgaaagagattcacaaacaatgtactcagcagagtcaggcaatgtatcatatcccgtgccatcagccctagggaactttctttatacgaacaatgcatcttctggaccttatacagaatttagtggaattgtccagcctcagcagaatttcatggaacttactggccatccttcagcaatgtcacatgattcgtcatccaatgaagctaccaacatgggcagttcactcactgaacagcgctcttttggtcctttgaaagatatgagaaatgagatgttgatgcatttgatggatggagcacacagcagtggcagtgatctcatccacaatgatgctcatagcactgtacagctcgaatttggcatgttaaacaaccacaactcaacaagtgttccattagcaccaggccaagggctgtctctgagcctcaatacacatatcttggcgccttcctatccacactggtctgcaaagcaagacttactaacaccaaattcttaccagggtgatgacaacagaatgaagaatatgcagtctgaggcctcacaggcaatccgtaactctaagtatctgaaggcagcacaggagttgcttgatgagattgtcagtgtttggaagagtgttaaacagaaaacagataaaggcccttctgaagcaggaaagtcttatagatggaagactgatggggggactaaaagtgagggagtatcttttgatccgcaagagtctggtgccaatacagcagctgagctttcaactgctgagaaacaagagctccagaataagatggcaaaacttatgactatgttggacgaggtggataggaagtacaaacactattatcatcggatgcaacttgtaatgtcatcgtttgatatggttgctggtgctggagctgccaagccttatactgcagttgccctccagacaatctcacggcatttccgatgtctaaaggatgctatcaatgatcaaattagtgttatccggaagaaacttggagaggatgacaatacatccggcaaagagggcaaactaacccgccttcgttatattgatcagcaaataaggcaacagcgagctttccaacagtatggtatgctacagcaaaacgcttggaggccacagagaggactacctgaaaattcagtctcgattctccgggcttggctttttgaacacttccttcacccgtatccaaaagattctgaaaagctaatgttatcgagacaaactgggttgacaagaagtcagatttcaaactggttcatcaatgcccgtgtccggctgtggaagccaatgatcgaagacatgtacaaagaagagattggtgaggcggagctagactccaactcttcctctgacaatgtgcagcggaacaaggacaaggcaccatcttccgaagaaaatgaggaccataagacctcaacaagccaggtttgccaaaccagccagcttggcgaatccaaagccaacattggtggagtgatgagctttagtggagcgccagccggcggcttccacaacgatgccaaccccgatgacagcttcatgagcctgatgctgaaggcccagagaccgggcgaaaccgatggcagcggtctcctccatgatgccgtcgctcatcactccgatgagagcgcgcggttcatggcgtaccacctgacagagtttgggaggtatgggaacaacaacgtctcactgactctggggttgcagcacgccgagaacacccagccgggcttccccggcgtcagagaccaagacatctacaactccacagctcctctcaacgtcacctccacatcttcagagtatgattcggcgagccaaatagatcaacaacaacggcagcggtttgaggtgtcacctctgatgcatgatttcgtggcctgaatttcagctgacgcactggaaaacgtggggaagtgacttgtcatttgtagtgccaggacgaacaatatgcctggactgaattttcaggcgtggaaatgtagctgtagttgtaattggggggtacagaatggacgaggtatatagcataaatgttatgtaaatttagtgggggcaggggtgatagtggtaaagaaatcctgtaaagatggaatacattttatacgtgtaaaatacgagtatttaagggccacgctgtaaaaatagatttacatgtaactgtaacgagtgtttgtaatgagtgtaaagaactgccacatgccatattttcgatgggtgagaagatatagaaatattattttctttgttaaaaaaaaaaaaaaaaaaaaaaaaaaaaaaaaaaaaaaaaaaaaaaaaaaaaatataaaatgtgcacgttgttttgttgaaaatttgaattaattttggtgcg

SEQ ID NO: 118587 - DNA, 163 bp, Zea mays
  Clone ID: MRT4577_39638C.1
tagttttcttgagtgcattcgattgctccattgattcagagcaattgttgggctaaaaataaatacttgttacaccaaccatgtataggactggggagactttaatagacgggcgggtgattggagaagttctcgactacttataacccatgagtttagatga

SEQ ID NO: 118588 - DNA, 262 bp, Zea mays
  Clone ID: MRT4577_39639C.1
acgaccacacttgctgccacgcactttatttattgctttatctcactcaaaaacgttagccgggcattttttttttaacaagttcatccacgagccaaaaaatcatatcctatacattcactctagcttgtctcaggaagaaacgctaactctcttcaagggtttctaggatgggcataaaataattcttgttgcaaccgatttggctggaaggtgaatttgacatttaaccaagttaacatttgtccttcaactacttaca

SEQ ID NO: 118589 - DNA, 357 bp, Zea mays
  unsure (1)..(357): unsure at all n locations
  Clone ID: MRT4577_3963C.1
gggcaagaccaaganaggaagccacggcagcggaaggagcggaaggggcagacccagggacccgccacagagccaggaggggaaacaagaacgaccaaaagacgaacgcagcaccacccaccacaggacccacagggagaagnacgacaccgcagacggggggggaaaaacaccgaagcacaccaagacgaagaaccccggacggagacaagcggcaccgacgagcccgcaggaacccacaggaaaaccaagggggagaggccggcgccaagaaaggcccgaagaacacagacgccccaacagacaaggacaagggcgcggaacaaaaaacggggggagccaagaagggagggaacc

SEQ ID NO: 118590 - DNA, 1208 bp, Zea mays
  Clone ID: MRT4577_39640C.1
actgtagccgccgccgccaggggctaatccggccgccgccaggggagcgctaccgccgtcgccgtctcccgggggtcggccgcacccgcgtcgggggctcgcagcgccctcgccgggggccagctgcgcccgtgccggggccagccgcccctgccttgccgagtcgtcgccagtggaggggggcccgcgccggggccagccgagccgagccaccggcaccaaggggctcgcccgcccctgccggggtcggttgcgcctgcagcggggccgccgagcgtcccgtggggccgcatcgcacccgcccctacgccggatcgccagcagcgccagcgccaggaggccgagcagggcccgcgccgggaaccaatcgcgtccgagcgggcggccatgctgcgtccgagcgcgtctgcgtggagatccggccccccttgctgtcctcgccggggatgaccgcgctctggccgccgtggccgagcgctgtacgccgggggccagatgcgtcgtgccgccgcggcctgcgccggccgcgcccgcgccgctcatacgccgagcgcctgcgccatggtcacgggcgctggagcacgcctacccgtgtgcggcctggtctcacccgcccgcgtcggggctcacagcacccacgccgaggcggcgtttggccgtgtgggcctcacctcgtcgtggccgattaggtggagcgatgaagatcgcatataggtaaaagcatcgtgaaatacttacaatcttgatcctctttctttttctcttttttcagttggttccgacgttgctttggggacggacggcgccatcgttcccttccagccttgcgcagcgtcgtgtgtcatgccgttggagaatacaaaacgaaatatgctgaagcggtcctcgtcggcattcatggccatcgatgctttgttctcgctcttttattttggatgaggaagaactcatgagtgcaggcaacaccgatcatgtcgtcggggacttcttcctttttccaacctcaacttctctcaatgcttcttatgagcaaagtgctgataacgtgttgtaaatcagtggtaacgggacacgaaaatgtagagagaaagtgacagttgtattgatctcatgaaatgtgtacatatatatacatagtgaagagacaccacgaaaggtcgcatcccttggaattagatcgtaaaaaaaaaaaaaaaaaacccgcggcc

SEQ ID NO: 118591 - DNA, 676 bp, Zea mays
  Clone ID: MRT4577_39641C.1
cggacgcgtgggcggacgcgtgggcgcgagcaaaaggcggcaggaatggcagccaaaacaggcggcggaggaggaggaggagacgtccggtgccgtcccaacggaggaggaggagtcgtatccgaaaagagatgaggccgacggcaaaccgtctgcagaggcagagacgacgacgagcaaggccgtgtgcaacacggacggccccgtgtccgagacgtgcgacctggacggcgacgtccgcacgaacggcagcgccctatcggtgacgttcgtcccggcgagcccgtcggagcggcgggagtggaaggtccggccgtactcgcgccggaccatggtgggcgtcgacagggtcaccgtgacgcggctggggtccccggatgacccggcggcgccgtgcgcggtggcgcacagcgtgccgggcgtgctgttcgcgctcggcgggctcacgggcaactactggcacgacttcagcgacgtgctgatgccgctgtacgccgcgtcgcggcggtacggcggggaggtcctgttcctggtcagcaacatgcagccgtggtggctgggcaagtacgaggccgtggtgcggcggctgttcaggtacgacgccgtggacctggaccgggacgcgcgggtgcgctgcttccgacgtcttaccgtgggcctgcgcctgcacaaggag

SEQ ID NO: 118592 - DNA, 192 bp, Zea mays
  Clone ID: MRT4577_39642C.1
gcaagtgcaacagacgaaacgtccaatgattcgcacgcatactgtcgtatctggccaacgtggcggacgcggggctgctgctggcataagaggggacgacctcggaggtcgacatcacctgcgggcacgtgagatccgccatcgcctcctgactctactactcccaaggcaccgcgtcccccccctgcccgc

SEQ ID NO: 118593 - DNA, 414 bp, Zea mays
  Clone ID: MRT4577_39643C.1
atgaggcggcggccgttcctggaccagcaacggacgtcgttcaagcgctggtggcagcagcggtcgtggtgggcgcgcctcttgctctccctcctcctcgccctcgcatgcgtcctcctcctcgctgtcctcctcggctcccccgaccccgacacctcgccgtccacctccgcccgcgtccttcggatggtggccgagtaccgccaacccttggtgaagaccgagggcgccagcctcagcatcgcgaaggtggccgcagtggccaccggcggtggcgaggcccgggtcgagctggacgagtccgctcgtagccaggtcaaggcaagcagcggctgggtcatgaacagcaccgacagcatgatgcggggcgggggccgcgggcgggatccgcgtccgctcgcttcggctccttga

SEQ ID NO: 118594 - DNA, 210 bp, Zea mays
  Clone ID: MRT4577_39644C.1
tcgaattcattcatcttccatggatgtcatgcccaggccaagggtagctccctggttggggttgcagctacgcgcgtgcccgaggtggccgatccggaagcactgtccaccgatactgcgagccaagccggagggttgcttgctcgtcctcggcggccgacgcctacgtggacgacctattgaacaccgttaatcttactgtggacaagt

SEQ ID NO: 118595 - DNA, 582 bp, Zea mays
  Clone ID: MRT4577_39645C.1
ggtgttttttttttttttttttttttttttgtgggtttttttttttttttttttttttttttttttttttttacataattgggcagaaccctgtaaatcattcataaaggttttagttggctaaaggctcaaccgaacattgcagcacagggggggggggcaccacaggccggattttttggcccacacacccccccttcaaatgcaaatacaaatttgtctccagggggttgggcattgggtggggcttatcaagaagaatgacacctccggggggttgggcattgggtggcacttatttccataacaaccatatttggctaaaataactttcccgtgcaccgaaaacaaaacaaaaaattttaggccgggttttttccacccgaatgaagggagaacataaaaagggtaccatccgtgcttggtgcacaaggaactgacagcattcttcccagcagttttttcaaattcaccgagtccaagttcgtccggatggacccctccagtgacgaacgcggatgccatccctgacgcattcgctcctttgatgtcggggggcagcgaatcacccaccatgataca

SEQ ID NO: 118596 - DNA, 303 bp, Zea mays
  Clone ID: MRT4577_39646C.1
caaattcagagggtgactcctctgctaattatgatgacaacaaatctgtgttacatgcagtgaattatgttggcaaagagtttgcagatgatggtgtagattcttcattccagaatttctgttttagtgatcatgaggcgaactggggtttgaatgagtgttgcagactgatggatatttatagtccagatgacgatttctcttatttgcttgatagtccacctgatcttctgcctagttatactggattttgtgatgaatttgtatcaatagatgcgttgatgaatatgagtagcagatgtg

SEQ ID NO: 118597 - DNA, 396 bp, Zea mays
  Clone ID: MRT4577_39647C.1
tttattcatcgaagaccacaggaccggcgagggcaggagatatctacgccggggccaggtctcgagcaaacaccatcattggggatggaagaagttcatattactgtgaggacttaaaggactgcgaaaagggtaatctcatcaaggtcaagtgctacatcgaggctgaagctatactaacacggctcttagaagacggggtactctatgttatctgatacgggagagctcatgattagagtttattctggctggaaccaactatataaacgatttcatatgcattagcatgcaatcgagactctagcttgctctatagatatctacacgtatacgctcttaaagctttgttctgtcgcagttgaatgtggactaataagtgaatatatgcaaact

SEQ ID NO: 118598 - DNA, 137 bp, Zea mays
  Clone ID: MRT4577_39648C.1
gccacatttgcttcttttgcacggtcatcatggctttcctcgacgcgtgctggcctcagggcggcaggtacaagccaccccacgtgcatctgttagggcagctgcacggccagcctaggggaccacatcaagcactg

SEQ ID NO: 118599 - DNA, 409 bp, Zea mays
  Clone ID: MRT4577_39649C.1
ggggtaaattaaaaaaaaacccggcggggggaaaaggatccattgatccaaaacccatgcgggggggggcaaggggctgggggggcccggggggaacacaaaactaaaaactggcacaaaggggccttgcaattaaaaacacagaggggggacaccaaacggggcgaacgaagataaaccctttgggctaggggaaaaaaaaagggggcgaaaaggaaaaattgggcgggggggccccaccggtaaattcctccaattccccgcggagttgccctaaccccccccacgggtgccacccccgtaaccgccaccaccaccaccggaaccaccggcggcaccggaagcggcggcgccacccccgtaaccgccgccgccaatacggggcccgccacccccgtagacgccgcct

SEQ ID NO: 118600 - DNA, 1168 bp, Zea mays
  Clone ID: MRT4577_3964C.1
cttcccctgtgtccattcagttccttcattcaatgcaaccccagctcgaatctcctccgtgacgtgcagctctcccacgtcctgcttctccgatgccactccaggtccaccccctcctcctgctcctcttggtcagctcgcttccctcctgcgccatctcctccggttcctcctcttgcgccggccgcgacgacgcggccatcgtcgccgccgcgttccggcacgtgcgcaacttccgggccccgaggacgaaagcatgccagccggtcagagcgctccgcctcccgtcgcggaacctcaccggcgcggtgtcgtgggcggcgctggcaaacctgtccgcgctcgccgcggttgacctctcgggcaacgcgctccagggcgccatcccgggcgggttctggcgcgcgccatcgctccgcgcggttgacgtctcccgcaaccagctcggtggcgcgctccgggtggagcccaacccgcagctccagtcgctcaacgtatccggcaaccgcttcaccggcgtcgacggggtggaagggctctcggggctcgtcgcgcttgacgtgtcaacgaacaggatccgggcggtgccgcggggtctgcggcgtctgacacggttgaagcggctcgacctgtcctcgaacgggatgcgggggtggttccccggcgacttgccgccgctcggtggggtgcgttcgttgaacgtctcgtacaacaagttctccggcgtggtggacacgggcgccgtcacgaagttcggccactcggcgttcgttcacgccggcaatgcgtcgctggtgttctcgggccactcgacagagccacggcggccacggccatcacctcctcatggaaaaagcaaaaagaacggtggttcggccgggacgtcgacggagagcaaggcgacgaggagtagcaagaagaggaagcatctgagcatcgtggcggtggcggtgatctgcggggtggtgtccctggccatgcagataaacctgctcccccccctggcgtgcggcgtgctgaagtccaggcagaagggaggaaaagacgacgacgagaagaagccacaatggggcgagaagggcgaggaggagaaggaggaggacgtggtggtcgcggcggccaggggtgcattggcagccccccccccgtccgagcggccgttctagag

SEQ ID NO: 118601 - DNA, 491 bp, Zea mays
  Clone ID: MRT4577_39650C.1
ctaacaataatttgccgcaactaaccttaggcaaggtgtttaattagttggtgtaacactttgccacgactcaaggaatcttgccacacttttttactctatgatgacatgtggagcctgaggaatcttgcttatgttttagttggcaaccgaacacttgccaacatagttaaacactgccacagttgtacttggattggttttcatgcttttgctaaataggggatgacatagccatggcgcatgatcatatattcatatacacacgatgaaatgcaaagctggagtgtggaaatactaacttcatttgtttccctgaaaagatcattcagttgtatccagtttgattctatgcagagtaatgctgatgctctgtatgtgtagacattaatatcatttacaccaatactttgcgctgatttggcctaggctaatggatccatggaacatacctatcaggctctactcagttagtctggaaagtcagtcca

SEQ ID NO: 118602 - DNA, 396 bp, Zea mays
  Clone ID: MRT4577_39651C.1
accacaagcacaaagaaaaaggttcgtcccccctttatacaaacgccacccggggccattagccatttttaaacaccctaaccaacagatttttttcccggacaacacaaaggacggactcctacacggcctgacttggtctaagtcgggggggcggggaccagacttacaggataggccaccttttggctgccccgggaggatcacggtgatcccgttacagccacagaggggacgattcaggacttggcaaggttctccacggggccttcgccctaaaagaaggcctaaataaaaaaagggaacatggaaaacatgggcagccgtgccgtttttatctccttcaccatcagaatggccgctccatctgggtgtctgcccaggcccaggggggca

SEQ ID NO: 118603 - DNA, 457 bp, Zea mays
  unsure (1)..(457): unsure at all n locations
  Clone ID: MRT4577_39652C.1
ggaannncccgggnccgacccaacgcgtnnccgggtcttcagaaccattanngctttatctatctccagtagcgcattatagaacccccgatcgatcaccatgagtgggtgttggctcgttggccctcgctttctcctggtgctctcgctgcgagccgccatcctccatcgcatacaatgcggctggctggcggtctgtccatccatccgccgctcggttcaatctatccgtccgtccgtgttcattctgccatcctctcgtgttcatcctgtccatcctctcgtgtgcattctctccaacccgccggtccaacctgtccgccgtccggtccaacctgccatccgccggtccaatgtgccgccgccggttcaatctgccgccgccaccatgccactaccctactcaaccgccccggcctcagcctcatccccagccacacccatgcccgtgccaaca

SEQ ID NO: 118604 - DNA, 608 bp, Zea mays
  unsure (1)..(608): unsure at all n locations
  Clone ID: MRT4577_39653C.1
actagttctagagcgcacccgcaaccagcgcgccgccccgctccgctcccctcgccgctgcacggacgcagcgacgagttctcgcagcagcaatggcggtaggcaagaataagcgtatctccaagggcaagaagggaggcaagaagaagaccgtggatccgttcagcaaaaaggattggtatgatatcaaggctccgtcggtcttcagtgtgcgcgacatcggcaagaccctggtctccaggacacagggcaccaagattgcatctgagggtttaaagcacagagtatttgaggtctccttggctgatcttcagagtgatgaagaccaggcgtacaggaagatcagacttcgtgcagaggatatacaagggagaaatgttctcacaaacttctggggtatgagcttcactaccgacaagctccgttcactggtgaagaaatggcagacgcttattgaggcacatgttgatgtcaagaccaccgataactacatgctacgtctgttctgcattgggttcaccaagaagcggcccaatcaagtgaagcgcacttgctatgctcaagcaagccaaatcagacagattcgtcngaagatgactgaaatcatg

SEQ ID NO: 118605 - DNA, 414 bp, Zea mays
  Clone ID: MRT4577_39654C.1
ctgcattgcatgcttgatcactcgcctcgctcgttgcatcttagataatttaattttgataatggattcaagatatatcaccctatgcatctttcttgtacttgtcttacatggagatacaactttggcagaaacctgcaagcagtttcctaaatggagtccactctgctttagtgcaatttgcaaggcaagttgttttatagagggaaagttctccgatggttactatgtaaaggggcatagatgttgttcaactggatatgaatacgtgtgtaattgtcttttgtgtaaaaattagttatctagtgacatgtgggactatctccttttgttcctatctgtcatctaggagtgctgtctaaataattattcggtaaaatagttaactagtatgtttactatttagagttatgt

SEQ ID NO: 118606 - DNA, 333 bp, Zea mays
  unsure (1)..(333): unsure at all n locations
  Clone ID: MRT4577_39655C.1
gttctagatcgcgagcggccgctgggggaggtagacggggcacgcatacagaaacgcgtggtgcgggggccggataccctgctgtcgtgcccgacttagcctctctatgaagcgatttttggtgcgtgcagcggggggctcggcgattttttttttttttttgaagacgcgnancacgatttttgggtgggcgctgtccctggctgcagnggctttttttttttgcgggggggttgggcttttgctcacggcggtgacttttttattttttttttctgtattcgcaggagttgttttgtttcttgggtttggtgtgctccgggtgctagttct

SEQ ID NO: 118607 - DNA, 272 bp, Zea mays
  unsure (1)..(272): unsure at all n locations
  Clone ID: MRT4577_39656C.1
tctttaacaaagacctgcacgggccaacgaagaggccgcttcagaacctgggagccgaaaccaaccacatgtgtttggacccctatgcctaagccatgttcgaagccattcaataagcacattctataaattattgagnggaataagggtgtttgtgctagagtggagagaggnnnatggagagatacattaacctggccctggtgcttgtgggcacctaaatcctggcttgatgttggcgccgcacaatggtttatgcagatgggttgaat

SEQ ID NO: 118608 - DNA, 1145 bp, Zea mays
  Clone ID: MRT4577_39657C.1
cctcgaggtacctcgccggccggcgcaacttttaagcgagcatggagaattatcacatgctgtttgggacgacggcgacgcatgcgcagccctcttcagctgccggaaccccaagctcctacaacttcattgccaccagcaccagcagcgctagcggcttgcggcgcgaccacgaccgaggccagcacagcgggcacgtgcacgccgccggcggatcctcgtcgccgtcctccttcttcgtcgcggagcggctgtcccacaacgacgactccagcaaggacggtggtggcggtccaggtccagccgcagctggcagtggagagaaggaggccgaggcggacgacaggccggcggcggccaggaggaagggggagaagaaggagcgccgcccgcggttcgccttccagacgcgcagccaggtcgacatcctcgacgacggctaccgctggaggaagtacggccagaaggccgtcaagaacaacaacttcccacgaagctactacagatgcacacaccaagggtgcaacgtgaagaagcaggtgcagcggctgtcaagggacgagggcgtggtggtgaccacatacgagggcacccatacacaccccatcgagaagtctaatgacaacttcgagcacattctcacccagatgcagatctactccggcatgggatcaaccttcagcaggagtagccacgacatgtttcactgaatgaaccttccaaaaccacttcaattaagcgtccgatcgagcaccatgcaaaccaagctagaaaattgatccatagattttattaatttgtacattgagtcttagatgtttaagagataaataaagcgtattgtgtaaaaaaaaaaaaaaaaaagctcgttagttcgtacatttcgtctgtgtgttctttgagtcctagatgcgtgagtggtcagctagcggcatttgatagctctctcccggtggttcttctcccccactgggtcttcttctcgcctttgtcctcttgttgttgttggccatgggtagtggccggccttggctccgccccgatttttacaccgccacgtttttagatggcgcttctttggagatggcgtttccacccctcatgtgataccacccctcattatattggcgggataaaaaaaaaaa

SEQ ID NO: 118609 - DNA, 866 bp, Zea mays
  Clone ID: MRT4577_39658C.1
aatactacaaccctctatataaccctggttgtaacttggaaaactctttcagcctcccctccctcacaagctctccagattccgctcccgcccgcgcaactagccagcctccaactccatggagaattatcacatgctcttcggacggccgtccacgcagccgtcctctgccgccacctccaactcctacaacttcatgctgccccctgccggcagcaccagcggcgccggcggcctgcgcgaccacgatagaggcggcggccagcacagcgggcatgccggcggcgtaccgtcgtcctcttccttcttcgcggagccatccaacacctcctccaaggacagtggcgcagcagctagcagccctcctccagccgcaggtatcggccgcggggaagaacccgcggcggggacgccaccagcagcagccgaggtggacggcaggctgcaggcgggcaagaggaagggggagaagaaggagcgccggcctcggttcgccttccagacgcgcagccaggtggacatcctcgacgacggctaccggtggcggaagtacggccagaaggccgtcaagaacaacaagttcccaagaagctactacagatgcactcaccaagggtgcaacgtgaagaagcaggtgcagcggctgtcaagggacgaggggcgtggtggtgaccacatacgagggcacccacacacaccccattgagaagtctaatgacaacttcgagcacatactcacccagatgcagatctactccggcatgggatcaaccttcagcagtagtagccacaacatgtttcactgaaaccgtcccaaatcacttcaagcatcggcggaccatgcaaactaataaattaagcaggaa

SEQ ID NO: 118610 - DNA, 296 bp, Zea mays
  Clone ID: MRT4577_39659C.1
aaaactaaagatgacaaaaagtctaccaataaaaaaaacaaaaaaacaaaacaaacaacacttactccaagaaactatacatcatctacaatataacaggcattaccataaaaccacaaacactttacatcctaaatcttccgctacatctcctatttcaccatatcgaactgaaatcccaaaccgacctacaatgtcatacctatcctcattgtctcgctcatatcaagcacattgagttcctaccgacttgtgtctacatgaacacacaagattatgctccattcactgttaat

SEQ ID NO: 118611 - DNA, 197 bp, Zea mays
  Clone ID: MRT4577_3965C.1
cacgcatccgcctctacctcacattttgctacgctctatcgattatcgagtgcttgctgaacaccgtgtcccgtcaatttatccgggcagcgcataaatcattttctactgctatttcttccggatatacatccaccctcgcttcgagcgtttctccttcatttaaacccttccctctgtcttctactcccacaccg

SEQ ID NO: 118612 - DNA, 1485 bp, Zea mays
  Clone ID: MRT4577_39660C.1
aataatactttttgactggaaaacatagattgttggcacttgaaatccagagtacacaccttcgtcagatcaggatcttacttttgacagtaacttgaaattcagagtacactttcgtttccactagctcccagaaatatccagcgcattagcggcggtcagcactaagcaagcaagcatgcatgcatgtacagttagatgttggtggcaccgaaagggaaaggtgaacgaagtggaccggactggtagcgcagaagccgaccaattccttgctttccttgcggaaagcggccacgccaacctccgatcgaacacgacagcagctcatcatcacggctaattaaccaagcagccgactaatcttgatcaagaacggattcttcctctgtatatactagtgattctccaaccctaagcatggcgaatcgaatgacccgcctccctccgctagctccggcggcacaccgagatggaaaaccaaagatgcatgtctccttgtactgtatatacgcatcgtacggcggggaggtggtcggatcgtaacggaggtcgcctattgccggccgaaggagttgcggttcttcttgatgaagtcgtcgaaccgccggttcatctcctcggcgccgaccgacgggtcccgggccctcggcggcggccgttgctgatggtgcgcggcgggagcgggagctggagctggagctggaggggtggaagccggagccgccgggcgcgtcttctgcatgatggcgttccacgtggcgtccaggtcgtcgtcgtcgtcgtcgccgccgtccacggcctgcgacggcggcagcgagggttcccgctccaggacgaccgcgcgctcctgcggcgccggcgccaggctacgccacagcacgtccggggaaggcgaggaggcgtcctcgtcggactcggtggtgacgcaggagccgccgccgccggagtccggggagggggaggagaactcagccggcaggggctggccgtactgctcctccttggctctgacggccggcgtggcggcggcggcggtggacgggagctccgcggccggcggccaggggtcgtccttgtgctgggcggcggcggcctgctgctgggagtgcctgtggtcggacagcttccagatgacgaggatgatgaggtgcacggtgacgaagaggtagggcgggacgagccagaggcgcgcggcggcccaggcgcgcgggagcacggcggcggccacggccacgaggcgcgggacggcgaggcgcgccagggacgcgaacgcggccagcgccgcggacgccagtgccaccttcgccgcgagcgccgtcgtgggcggcatgcccccgccgcggtggcgtgaggcgtgggcgtatgacatggagagcgtagcgtgggtgcggtgcggcagggggagggagcgcgggacggtgtcggcgtcgcgacgtgggtaataaagtggagggaggagacggtggcatcccggccggcttcgag

SEQ ID NO: 118613 - DNA, 319 bp, Zea mays
  Clone ID: MRT4577_39661C.1
ttggtgcgtgggggtacaacgaggttagacgggggggcttttaaaaaggggtgggggtctgaaagctattgcaggaggactggatcttctagataaatgggtactcaatgtggagggggcacataccctaactgtaattaatgcactgacgaccatatttgacgagctccagctaaaagataataaggatcgacagaagcactctaacctgaccatgcttaatacactcagtgtagatgactgctcaaacatggaacacgtcacaaggccagaaacgctacagcaccttatactactctcaactacggccagcgggaca

SEQ ID NO: 118614 - DNA, 412 bp, Zea mays
  Clone ID: MRT4577_39662C.1
attcgctctatctactccagagcgcacaataacccgatcgacaccatgagggtgatgcgggtggccctcgctctactggctctcgctgcgagcgccaccttcactcatacaaccggttgctgtagctgccagccaccgccatcggttcatctaccgccgccggcgcatctgccaccttcggttcacctgccacctaacgtacatcttccaccgtctgtccacctgccagcgccggtccacctgccactaccggtacatgtgccgcctcctcatcatctaccgctatcaccattccactaccttactcaaccgctccggcctcagcctcatccccagccacacccatgctcgtgccaacagcctcattcaagcccgtgccagctgctagtaacctgccgacatatgcagtacc

SEQ ID NO: 118615 - DNA, 577 bp, Zea mays
  unsure (1)..(577): unsure at all n locations
  Clone ID: MRT4577_39663C.1
ccnggccggggttgtaatctataatattcgaattcaaactgttttaaatttgtttcccattgttaaaaaaaaaaaaaaaaaaaaaaaaaaaaaaaaaaaaaaaaaaaaaaaaaaaaaaaaaaaaaaaaaaaaaaaaaaaaaaaaaaaaaaaaaaaaaaaaaaaaaaaaaaaaaaaaaaaaaaaaaaaaaaaaaaaagggcccccccccccaccaaattccggggaaccggggggggtttccctttcttcccaaaaataaaagggggaaaaggctttaacccttaaattgggggggaaaaaaaagggtcccccccgggttgggtttggcagggcccctgtttccccgcccaatcccggcccctggaaaaattgggggcccccagggggggggaaaaacctgggttttaaaaccggggaaaaaacttctcccaaatcgggggggccccgaacccaattccccttgggggttttgcggaaaaaaaaacccccaaaaagggggggggcaaaaggggggaaagttttgctttgggggcccgggggatccgttttttttaaaccctgggggccctaagggggg

SEQ ID NO: 118616 - DNA, 156 bp, Zea mays
  Clone ID: MRT4577_39664C.1
tacccgccatcacttctgttaactacattcgcagcggcagcgcggagggaggaccagcggcagcgctcgcacctggtggtggtgcgcttcgggttcggcgaagggcgacatggaagagcacgcctcaagggggatacgccggcagccgaatggcgc

SEQ ID NO: 118617 - DNA, 466 bp, Zea mays
  Clone ID: MRT4577_39665C.1
cccacgcctacgcccacacatccttgcacgctttagctttcttatgtcttactcatggggctgaaggaaagcactatgaattctataacctagaatgacgctactgtaaaaacccttttagatcaataaggtcttgcaacctatgtcactggggagacctgatacatgattgacatgcaaaaggtatggatatcgctcaccttactgaacaagcacacagtacatgatcatgctctaggactatttactctagtgacgattcaaattctcagaacaatgctggtgcgactggaccatccaggtcaagtgacgtatcgtgatctacacaagcctactccactcaaggataatggatatatgatcgagatgctactgatgctcaaacttgggattaacggcgaggtaaatctggtaccacagctgccagtcaagatgcagcacgatctcctgcatatataagccgact

SEQ ID NO: 118618 - DNA, 350 bp, Zea mays
  Clone ID: MRT4577_39666C.1
cgacgagaggctatctggctgctccatggcggggcggcggtgggaggcccgtgcccgacagtgacggtggcctcctccgtccgtcagccctccctagcaccgaggacacgtcccctcacgctcaacctggatcgttgtaccgcaaccactttgtgtttgagcgcctctaggtggccatgcgcggcggatttgagcatcgcgggctcgcggctagaatataaccacctgttctgcttgctcatcgatgtgtctaattcaaaagggaaagtcctacaatggttgggcatttctttcctgaaagaataccacggagaaaacgccatactgaacagacaagatcaccgaagcac

SEQ ID NO: 118619 - DNA, 462 bp, Zea mays
  unsure (1)..(462): unsure at all n locations
  Clone ID: MRT4577_39667C.1
agcagtggtaacaacgcagagtacgcgggaagcagtggtaacaacgcagagtacgcgggaagcagtggtaacaacgcagagtacgcgggaagcagtggtaacaacgcagagtacgcgggaaacagtggtaacaacgcagagtacgcgggaagcagtggtaacaacgcagagtacgcgggaagcagtggtaacaacgcagagtacgcgggaagcagtggtaacaacgcagagtacgcgggaagagtggttcaacgcagagtacgcggggagatgagatgtagcgccccccccctatgtccgtttcctttttttatcttttagctatgtaattttgctaccatgtgtccatctaccatactgatagtacctcttattatggctgctatgcaaggcatatccatggttttgtttgaaaaaaaaaaaaaaaaaaaaaaaaaaccgctntccgngttgttccactgc

SEQ ID NO: 118620 - DNA, 593 bp, Zea mays
  Clone ID: MRT4577_39668C.1
cctaggctggtctgctggccgttctcgaggctggagcgcgaatagcggctgctggaaagtaacttgttctgccgcctttacatccacagcttgcaatccaacgtacccttacttgcgttatggaatcgtgatcagattcatcccagacgcttcagtcagcttcagcctccggcattatgggaatggctcctatactcgcgaaaggatgctaccatgtgaacgaattcttccaatctgtctctttctgctgatagacgaatttccagatgctctccttatcatattcagcaagcttgatcaggttaatcaggttatgggctttaactttttatacccatacactgctaccagatcattgttgaacttgcggaggataagcactggacactcccgcttgcaataatatgagtacatcccattactggcgagccagctacgagttaggatttttgatgacaagctggggtcactatgcatgcaatggtcggaagataaggtcttctaagtcataatgctgccggcaacaacttgaagcgcctatgggaagagtcctgtacagagtggtcaatgcagcatataattcctgctgtgct

SEQ ID NO: 118621 - DNA, 161 bp, Zea mays
  unsure (1)..(161): unsure at all n locations
  Clone ID: MRT4577_39669C.1
ccacgcgncgcaaaanncaaacaatgatgctgcagttttagtccaaagaaaaacaacgggagcggcaaatttacaatgtgttgggccaccccaaacggcaagaggacaagaaaaacaagacaagcagagaagaaaatgagcgggaaaacaatcagctagaa

SEQ ID NO: 118622 - DNA, 162 bp, Zea mays
  Clone ID: MRT4577_3966C.1
tgccggtcgtgacaaattgcgatcgacacagatcctcacaccacatcagagacgctgcatgtactctagcgatctacctgccgctgtgctatctacactacctactaccatggtgaagaaacccggcaatctgctgaacctccacctcttcttcatcttctt

SEQ ID NO: 118623 - DNA, 227 bp, Zea mays
  Clone ID: MRT4577_39670C.1
cttttgaaacttagacttcagatcaaaaaggactgaacccacactatcataatccatacattcatttccatgtagtttgactagcagtgcatatatgaatgaatatggtaattaatcttacctataagaaccagatactttaattatattaagatagtgaatacagatgtataatatttttattaataccttgaatatattcagtggattgaatgtgacttcataac

SEQ ID NO: 118624 - DNA, 250 bp, Zea mays
  Clone ID: MRT4577_39671C.1
gggcctcgttcgcaccaaaaccgtgatgaaggctgcgcgcgtcatcatagcatagtactacacgcgcctgggcaacgacttccacacgaactagcgcgtgtgcgaggagatcggcattatccccagcaaaaagctccgcaacaagatagcaggttacgtcacgcatctgatgaagcgaattcagagaggcccagtaagaggcatctccatcaagctgcaggaggaggatagagaaaggagagacacatat

SEQ ID NO: 118625 - DNA, 284 bp, Zea mays
  Clone ID: MRT4577_39672C.1
ggaaacaaggcacacatggttattttattcatccggtcatcccggcagaggttttaacatttaagcatttccccacaaaaacaaaatgggataggtttgcaatacaatacgcactttgtaccaaacattataaactcccaacataatatttatggatgctttggcaaagggcccatggagattttttggattccgggaactgggagatacgttaacaaacaagggacgcatttgaaaataccaaattctggctacttaaaattttcatgaaaataacggggggg

SEQ ID NO: 118626 - DNA, 419 bp, Zea mays
  Clone ID: MRT4577_39673C.1
atttctgggcagcgcccctcatcacacaaaagactttattattgaactatcccttatatgaaacttaaaggaggcaccaccaatgatgggttgcaggtagcaacgctgctgccttggtcaaagcacgttgattgaatggctgacattgttgcccttgggagacggtgccagcgacaaggcacagcgggccggcagcaccgccacctctggggttgcatacaagagggactacggttaacaccagctagctgtctgattggaccaagttgctgctgctgacaataatcatgatagtgcaaagctgccacttggttgaatggaagaaattgctgggggtacgcaagcaagtatctggattaaaggcacttggtggttttgacacttccagctaatttccagggcaatcagttgctacaatg

SEQ ID NO: 118627 - DNA, 246 bp, Zea mays
  Clone ID: MRT4577_39674C.1
cctccactacagcggccccccaccctttttttaattgcagcgccaaaaagcaccaaatggggggtatgtttaacttagaataaagcctgacggggggaacagcagtacatcgaaccaaacttcaagagcaaaaaacttggcaccgcacaaaccgaggatgaacacagcactaacaactgacttagtgggtctttggcatcaaaaacagatatgggcaacatcaaacacgacacgaacgaagataaa

SEQ ID NO: 118628 - DNA, 551 bp, Zea mays
  Clone ID: MRT4577_39675C.1
ggccgcttttttttttttttttttcttttttttttttttttttttttttttttttttttttttttttttttttttttttttttttttttttttttttttttggggaccaaaacccagggggggggaaaaaaaactatttgggattctttttccaaccccaaaaaaacaaagatttttgaaaaaacagagggggggcggcccaaaccaaaaaaccaaaaaaccctgttttcgggaagcaagtggccggccccacaaaagggcgggcggggggcatttatttgcaggcttaaccagctgggtcatcgggcaaccatttatcctgggtggccccggacgggaatcttggtattcctttggaaacccgactttttgggggctaattgaagggcttcccataggtcgggaattttggggccggggacctttttaaaaacctttccccccttggggatcttgaacctgggcacaacctttatgcccaactccttcgaaaaaggcttggagccccggttgcaacccaccttggggaacacgaacgccaagtttttttg

SEQ ID NO: 118629 - DNA, 128 bp, Zea mays
  Clone ID: MRT4577_39676C.1
ctactcacctgtccttgattcactatccgcttaccgatccgatcgacctgctccctccccaccaccgaccctatggctcgaccacgctcactgccgatcacgcatgcctcgactcaaggatggccttc

SEQ ID NO: 118630 - DNA, 2381 bp, Zea mays
  unsure (1)..(2381): unsure at all n locations
  Clone ID: MRT4577_39677C.1
attgggtacctcgaggccggccgggaggccgcagctgcccggcgtgtcgtcagccttctcccgtgcaggtgtgcaagtgcaaccgcgactccgcgaggccggggagcgcgaccttttcccgtgggcgcctaggaaaaacagccgtttcctgcgcccgtccctcaccttcacgtcggcgaccgaccggcagaccgacaaactcgaggcaggccccaatggcgttggctcgcctccgcctcctcgaccgctacggtctcctgtcgccggcgctctctgcgacggcgctgcggtccttgggagacctgcgcgcgctctgcacgctctccaccacgctgcggtccggcgccggcgaggacgagatcgagcgcatccgccgcgagttcgatgacgccaagcgcaactacctcagcattcccgccgccatcaaggacatgcccaagatgaatccgcaaggcatttacgtcaacaagaacgtcaagctggacgacctccaggtctacggcttcgactacgactacacgctgtcgcactactccgagcacctgcaatgccttatctacgatcttgccaaaaggcacttggtcaatgagttgaagtatccggagagttgcttgcagtacgagtatgaccgcaccttccccatcaggggtttgtactatgacagacttaaagggtgcctactcaagcttgatttcttcggctctattgaaccagatggttgcttctttgggcggcaaaggctgagtttgagtgagataaaagagctctatggcacacggcatattggcagagatcaagctcgtcatcttgttgggctgatggatgtcttctgttttagtgaggcatgtctgattgccgatattgttcaacactttatagatgcaaaactggagtttgatccatcttacatatatgaggatgttaatcaatcgattcagcacgttcacagaagtggtttaattcacaggcaaattctttctgagcctgagaaatttctgataaaaaaaagccaggtgttccgtttcttgaagatgctgaaagagaaagggaaaaagctatttcttcttactaattcgcctttctactttgtagatggagggatgcgttatttgctagaggaccaacattttgatggaaattcctggagggaactgtttgatgttgtgattgcgcaggcaaataaaccaactttctataactcagatcacccattcagggtgtatgacactcaaaaggacaccttaacttttactgcagttgacaagtttctgccagatcaagtatactatcatggctgtttgaaatcatttctacagatcacaaaatggaaaggctcagaggtgatatattttggtgaccatcttttgagtgacttgagaggaccttcaaaagctggttggcgaacagctgctgtaattcgagaacttgaggatgaaatagaaatccaaaacggtgacagctaccgattccaacaggcaaaattgagtataatacatgatctacttgggaaagtccatgcagctgttgttagcaccgagaaaggccaagtctataaagcattgctcaatgagttgaatgcagaaagacgtcaatgccgatctgggatgcgagatttgttcaatacctcttttggtgcaacatttcttacagacacgggaagggaatcatcattttcctatcacattcatcaatatgccgatatttacacgagcaagcttgagaacttcttatcatatgcccctgaatcttggcttcatccacctcatgacataaagatcatgccacacaatgcgaaggtcccagcgagccttttcagtacctcctagttcatcctttctctatttcggtggagaaccaagccgtagtacccccacctatggtttctgtgcgtgaccacgtgacaggattgtggactgctgctgcattcgcttgcgttatactataactgaagcaccatatgatgcatcaatccagcagaccagcaagttagcattctctagaattgccatggaattgtcagtcatgtgagtagttaaccgactcatttgcctgtatgacgaagcctctgttttccgtttaaaataaaaaaaggaagcatctgagaggccgcatacttgtgttcccatgaaaccctaccaacctgtaatggccgccaataaaacagtcacacgcaacccatctcgtttccccattttattcgcattctgctacactctttgctgcactcatgttacactgaactcgcctggtggcatctgacaagttttttgggatgagcagaagataatttgggttcgggcaacggataaattataaaatgcttatttgtccttgtctaaaanaaaaaataaattaaataaaaataaattaaaatataaaaa

SEQ ID NO: 118631 - DNA, 1153 bp, Zea mays
  Clone ID: MRT4577_39678C.1
gatccgagaggcaccaactcactctttctacgcccttccctctcctccttcctctccaagaaaaagtaagcgtggagagcaaaaatctccgccgccgcgcacctacgcccacggaacacgccgtcatatgagtggagagagaaccccgcgcctcctcctccgtgagctccgtacaaggaggctagagcggcggcagcatcggaggggtcggtgaggagggcgatggtgctcccgctggtgaagctcggctcgctcgcgttccggacgctgagcaagcccatcgcggcccgcctcaagtacaacgccggcatccaccccaagttccgcggtctcatcatcggcatcgcgcaggcaaaccatcgtttcacgacaaatatgcagaggcgactttacggacgtgcgactgacattcacattcggcccctgaatgaggagaaagctattcaagctgccgcagatcttctcggtgaactatttgttttctcggtcgctggtgctgcgattatctatgaggtgcaaagaagtgctaggtcagaagccagaaaagaggaggcccgtcgtctggaaattgaggagataaagaaaagggaggagcaactagcgctggaagtacaggtaatgaaacacaagattagcgagatggagcggcagtactcgaagtggacccttcccgggcttcgcggcttcggcactgcccaggcggcggcacagcctgctggtactcagcacccaacagctgcgtgattgctctacttctgcaactgtcgacagctcgcgatctggatggccgactgcagactgcctctgtttagcttgcattttactccgttacataattgattcgacttcagtagctggcgaaaggctgagggttacgttgtggtacaactgaatcgaagttgttatcgccttataggttgatcggatcggcgacatgacattcagaccatgtttgtcgtagcttaacttatttcacagcttcttcatagatttaagcaggagatagatttaaatagaagtaccaaacagtagcttctgcaacagtctccccttttagtcgtagcttaacttatttcacagatttgtcgtagcttaacttattttacagcttcttcgttgctttttagaataaattaagggccgtctatttggt

SEQ ID NO: 118632 - DNA, 317 bp, Zea mays
  Clone ID: MRT4577_39679C.1
tattcggcacgagggacgcaccgaccccttcgctggtccctgcctggttgccttcttccccctcccgtccgatcggtttcaccattcaccgtccgcgcgctccaaccgccgcagttcgtactggcgcggtggacagggagctagctaagctaggcggggttgattgcagttggggaggggggagtgtgtgtgggtgatgtacggcgcgccggtgcccaaggacctcaacctaccagcagccctgccgcagccgaccagggccggagcgaggacgccaccgcagcagcagcagatgagctccccggggctgctgcgct

SEQ ID NO: 118633 - DNA, 413 bp, Zea mays
  unsure (1)..(413): unsure at all n locations
  Clone ID: MRT4577_3967C.1
gagcatgccatgtcatgctggtgcctgcaaatgctgtatctgatgaggaattccatggcccatgttgctggtgtctcaactgctgcaagttttggtggtcggttcttatttgagcccatcctggtcggtattggagcttgtacagaacaacaccgaagtgcatgatattcttgactgaataaaattaattgacgacacttgttttacgtaagggaaagatgaggataatttggagacataggtctaaccacccggaaatagtaagcgggattctctggtatgtnncttttttatatagtgtggcatgagtcgtgtcaacctcagctcagctgaaagggctcaagttcgtgccacaacacaactggaagagctgcngccgtggccaaaggaggaaatgccaaacaacagcaaca

SEQ ID NO: 118634 - DNA, 278 bp, Zea mays
  unsure (1)..(278): unsure at all n locations
  Clone ID: MRT4577_39680C.1
tcacaccaccaanctcgacccccggcccggacagtgcnnaccttagcttgtcggcgaanaacaananatactanngctagctgttctgtgctgcgagcgccatcttctaaaaaaaaaccccaacaacccatgtcctcgaaccctgccaaggccaggatatagagcctccgccggcccggcccactgcacggccgccggatatggctttcaaaccgcacagcctcctcttaccaggagggcacaagcaactaaccagcgcgggatggcctggaacaacc

SEQ ID NO: 118635 - DNA, 1003 bp, Zea mays
  unsure (1)..(1003): unsure at all n locations
  Clone ID: MRT4577_39681C.1
gttcttnaatatgnaaggcaatgggnaataaatgacctgttatcctttgattttatggaccccccagcacctcaagcattgatttctgccatggaacagttgtacagccttggtgctcttgatgaagagggccttctaaccaaactcgggagaaaaatggcagaatttccattggatccaccactttccaagatgctactagccagtgttgaccttggatgcagtgatgagatactgactatcatagctatgattcaaacagggaatatattctacaggccacgagaaaaacaagctcaagctgatcaaaagagggctaaattttttcagccagagggagaccaccttactctacttgctgtatatgaggcctggaaggctaagaacttttcagggccctggtgttttgagaactttgttcaatcaagatcattgaggagagcccaggatgtgaggaaacaacttctcactatcatggacagatacaaacttgatgttgtctccgctgggaaaaacttcacaaagataaggaaagctatcactgcaggcttctttttccacgccgccaggaaggatccccaggaaggatacaggaccttggtcgaaaaccagccagtgtacatccaccctagcagcgcattgttccagcgccagccagactgggtcatctatcacgagctggtgatgacgacaaaggagtacatgagggaggtgactgtgatcgatccaaaatggcttgttgagctggcgccaaggttttacaagggtgctgaccccaccaagatgagcaaaaggaaaaggcaggagaggatcgagcctctatatgatagataccacgagcccaactcttggcgtcttagcaagcgccgagcttgattgtaactcactgtaactgtgcactgcatgctcttcatggccagttgatactccataatgtaaatgtttgtgagttgtcacatgtaaaaaaaaaaaaaaaaaaaatcaaaaaaaaatttaagcacac

SEQ ID NO: 118636 - DNA, 320 bp, Zea mays
  Clone ID: MRT4577_39682C.1
attcaaaaaacactttaatatttttttttgggggcccccccattaatccattattattatttttacaaaacgaaacccaacatttaaatttcaaaattttaaaactggttgcttcaatttaaaaaaattgaccacccatccacaaggtttacaagcccaaattgaaaacaacaagaaaacccccaccgccacgggctggggtgggttgcaaactttttaaacaaaaagaacggccccggggcaatgtttttatatttgggccagaaggattttttttttgggaccgaaaacaaggttcaccgttacccctttttttaaaa

SEQ ID NO: 118637 - DNA, 179 bp, Zea mays
  Clone ID: MRT4577_39683C.1
ccgccgcagcccgcagtcgcttgcgcgcagagcacttcgcaccgccgccacatcccatcgccgccagcggctgctcgatgcgatagctcccacgaagcaatcgtagaagagcagatagtgcatctccaacaagctgcagctggtgatgaagagcggcaagtacaccctgagctacaaga

SEQ ID NO: 118638 - DNA, 630 bp, Zea mays
  Clone ID: MRT4577_39684C.1
ttttagagagcggagaaccgatacaggcatttgatacagtcagtaagtacgaggatcgcgatattcccacagtaaccctcctacattttgccctggctggcgttgtacacaaccttactgaccttgtactccaccacaacgcccggcttgccttcacccgttacgaaatggcccgcggcaacataggttccattctgaagttccttgtatttctcatttcccgtctcgaaagagaagttgacaaatgaatcgccatagtcagttgtcttagcatcgggagcaccagacagcactttgccgactccctgcgtgagcttcacagtacctttgtaatacatcgccagaactgtgccgtcgtggttcttgacttgactcctcacgtccaagcgcatgtttccgccgtcggcatcattgtgaatgtagtcgtagccaacaccatgtagttctccatccaacttcggctcaaagccttcttcactcttcaccgtaccggaaaccattggaacgatgaccagctgcgcgccatgctggcctccaacttgcatcggcgcatcgatgtcgacgcggactgtgaaagcgggaatggagagaatgggaaacctgacatgttgatttagtcgaacgcgtggg

SEQ ID NO: 118639 - DNA, 791 bp, Zea mays
  Clone ID: MRT4577_39685C.1
gttccctggctcgctactcgctagggttcaatccttgcgccgccgccacctactcgagccctcgcgctagccccctacgccacctagccgttcgccgtgcgtcgagtcctcccagccgcctcccgctcgtcgcgacctgcaggcctcggtcatccggcggtgttcttccggcctttcgtactgtcgctcatgaatcccgttctgtcgtgaatttgcatgcagtagcttgaactagaatgcctgcgaattagtctgccttctgtttttattcatcggagccaggttacgatatggtggtagtagctgtgatgagcactgctttcttctgacacctcgtgtatgagcagggactttgttccctccgttgagcagattcagcaactctctgagctcctccctcgcattttttctgagctaacctggccatttgctccgtcatttagcattttattacgagtttgtgagatcgtaggtctttactttttctcagatgacgccgactgtgctgtgacgagctactccttatttctgacaccttgtgagccttgagcagattagcaactctctggatcgtcaatttcgtttgctattcttgatatgccctttgttcaattagtggatttgcattcgtcaatctgactagtgacttacatgaatcctttttcgtttggcatcagaggatgaaagcttgaaacaatcttaggacaccttctgacacagcgcgttacatcacgttggtgatgagaaggcaattcttttctgatgatgctgtgcttcaatatgttacaaat

SEQ ID NO: 118640 - DNA, 490 bp, Zea mays
  unsure (1)..(490): unsure at all n locations
  Clone ID: MRT4577_39686C.1
gccggacaaataaacgcatcaaaccatcctgctgctgctgcatctctatggccttcgtccttcctgtgcatgtcgtctagtctagcagcttgctggagctactagcattggacgacgacgtctcgaggtctcatgcgcagagacgtctatatatatgcaaaaaaaaaaggcgatgctgcgtgctccgtaccgggctctttgtcagtgggtccgtggggcgaaggcgaagctgaccacgcctagaccgtagctgcgtggctgtggaccggtgcggcaacggagggagaggcggggtccggccaaaggccaacacctgcggcccagccccgtaccgtaccgtacctccccaacaggccgggccagggggcagggccgcaggggccctggggctgtactgctgnccgaactccgaagngangaagcgcgcancccgacgccggccgcatggagnacgnncganccgaccgcaggcacctgcttaaggaacaca

SEQ ID NO: 118641 - DNA, 1553 bp, Zea mays
  Clone ID: MRT4577_39687C.1
cattgggtacctcgaggccggccgggcgacacgactctcggcaacggatatctcggctctcgcatcgatgaagaacgtagcaaaatagcgatacctaggtgtgaattgcagaatcccgcgaaccatcgagtttttgaacgcaagttgcgcccgaagccttctggcggagggcacgtctgcctgggcgtcacgcgccacttgctcttcacctcttctctcttccactcatctcctctcctcatcgcctcctctcctcttgcggcacaataatatatatactgccacccatacggatccaattctctccgcctctactgtagccacggcccttggttcccctccattattcgacctcacctcaccttgccaccagccatggctgccgtgaccgccgcggccatctctctgtcctcctcctccgcctcctcccctgcggctgctgccaaggccaaggcggcgtccccgtcgtcgtcgccatgcaggcacctccagttcctgtcggcaccgagcccgcggcggcggtggcgggccggcgcccgcgcggtacgggcgcaggtgtccaccaccgagaccgcggcggcggggccggcgaagacgtccaagaagcaggacgaggggctggtcaccaacaagtacaagcccaaggagccgtacgtcgggaggtgcctgtccaacaccaggatcaccggcgacgacgcgccgggggagacgtggcacatggtcttcagcaccgaaggcgagatcccgtatagagaggggcagtccatcggcatcatcgctgatggcgaagacaagaacggcaagccgcacaaactcaggctatactccatcgccagcagcgccctcggagatttcggcgactccaggacggtgtcgctttgcgtgaagaggctcccaaagaccccagatcaacaatcatcatgctcgcaacgggtaccggcatcgctccgttccgctccttattgtggaagatgttcttcgaggagcacgaggactacaagtacaccgggctcgcgtggctgttcctgggcgtcccgaccagcgacaccctgctgtacaaggaggagctggagaagatgaaggagatggcgccggacaacttccggctggacttcgcggtgagccgagagcagacgaacgcggccggggagaagatgtacatccagacgcgcatggcggagtacaaggaggagctgtgggagctgctcaagaaggacaacacctacgtctacatgtgcgggctcaagggcatggagaagggcatcgacgacatcatgctcgacctcgcagccaaggacgggatcaactggttggactacaagaagcagctcaagaagagcgagcaatggaacgtcgaagtctactgatgatgatccttcattgtattgttcagctcaagcaatctggtggtgatgagtttgcattgcattgtacgtagtattgcggagatcaatcgaatcgtttggctcgtcgtcattctatcgatgtacatacattatatatgatgaaagacatatataatcgtttctttcaggaaaaaaaaaaaacaagcg

SEQ ID NO: 118642 - DNA, 2128 bp, Zea mays
  unsure (1)..(2128): unsure at all n locations
  Clone ID: MRT4577_39688C.1
gggaccctcgaggccggccgggagggtggaacggtttccctccacaaccacttgctcctcatctacttttctcctccgccttccactcatccttgctcctgcctgccgtcgtgcatcatcatctccggccagggccagggcattcgtctccgcctccggtccggcctcctccactccgcgcccccccagacgcgtcgctgcgtagctgctggccgccatggccaccgtcatggccgcggccgtctagtccttcccgtcctcctcggccgtcgtcgccaaggcgtcgccggcgtccccctgtgccgccccgcacttccgcccgagggccgtgcgggccgctatccgggcgcaggcgtccgccgtcgaggcgcccgccacggccaaggccaagaaggagtccaagaagcaggaggagggcgtcgtcaccaacctatacaagcccaaggagccgtacgtcggcaggtgcctcctcaacaccaagatcaccggcgacgacgcgccgggggagacgtggcacatggtcttcagcaccgaaggcccttctttgcctgcgcgaggtctcagaatccggggggaaaagaaaagaaaagaaaagatgatgactgtctctacctcttgctacatgtgccgctccctcgtccgggctcctccgctcaagtccaggagtgcagtgcgctgtccaagcgccggtccggccgggcctctactgtagccccggcccttggttcccctccattattcgacctcacctcaccttgccaccagccatggctgccgtgaccgccgcggccatctctctgtcctcctcctccgcctcctcccctgcggctgctgccaaggccaaggcggcgtccccgtcgtcgtcgccatgcaggcacctccagttcctgtcggcaccgagcccgcggcggcggtggcgggccggcgcccgcgcggtacgggcgcaggtgtccaccaccgagaccgcggcggcggggccggcgaagacgtccaagaagcaggacgaggggctggtcaccaacaagtacaagcccaaggagccgtacgtcgggaggtgcctgtccaacaccaggatcaccggcgacgacgcgccgggggagacgtggcacatggtcttcagcaccgaaggcgagatcccgtatagagaggggcagtccatcggcatcatcgctgatggcgaagacaagaacggcaagccgcacaaactcaggctatactccatcgccagcagcgccctcggagatttcggcgactccaagacggtgtcgctttgcgtgaagaggctagtctacaccaacgatcagggggagattgtcaaaggagtctgctcaaacttcctgtgtgacttgaaaccaggcgccgaggtgaagatcacagggccagtgggcaaggagatgctcatgcccaaagaccccaatgcaacagtcatcatgctcgcaacggggaccggtattgctccgttccgctccttcttgtggaagatgttcctggaggagcacgaggactacaagttcaccggccttgcgtggctgttcttgggagtcccgacgagcgacagcctgctgtacaaggaggagctggagaagatgaaggagatggcgccggacaacttccggctggacttcgcggtgagccgggagcagacgaacgaggcgggggagaagatgtacatccagacgcgcatggcggagtacagggaggagctgtgggagctactgaagaaggacaacacctacgtctacatgtgcgggctcaagggcatggagaagggcatcgacgacatcatgctcgaccttgcagccaaggatgggatcgactggatgcagtacaagaagcagctcaagaagggcgagcaatggaacgtcgaggtctactgatccatccatccgttgacgactgcggagatcaatcaaatcgttggctcgcgctcgtcgccgcgcccgagtcagacccagctctctctatcgtctatcgatgtacataccttacgatgatgaaagacattctctatctatctatgtacatacatacatacataacttgatttcacacggattgcatcgtgcatggatttaactaaaaaaaaaaaaaaaaaagcggcctgtaanaaaaaaaaaaaaaagcggcc

SEQ ID NO: 118643 - DNA, 1496 bp, Zea mays
  Clone ID: MRT4577_39689C.1
cccagcgtccgccccgcgtccgctctcctcatcgcctcctctcctcttgcgacacaataatatatatactgccacccatctcgagccaggccgggccgcctctactgtagccacggcccttggttcccctccattattcgacctcaccttgccaccagccatggctgccgtgaccgccgcggccatctctctgtcctcctcctccgcctcctcccctgcggctgctgccaaggccaaggcggcgtccccgtcgtcgtcgccatgcaggcacctccagttcctgtcggcggcgagcccgcggcggcggtggcgggccggcgcccgcgcggtgcgggcgcaggtgtccaccaccgagaccgcggcggcggggccggcgaagacgtccaagaagcaggacgaggggctggtcaccaacaagtacaagcccaaggagccgtacgtcgggaggtgcctgtccaacaccaggatcaccggcgacgacgcgccgggggagacgtggcacatggtcttcagcaccgaaggcgagatcccgtatagagaggggcagtccatcggcatcatcgctgatggcgaagacaagaacggcaagccgcacaagctcaggctatactccatcgccagcagcgccctcggagatttcggcgactccaagacggtgtcgctttgcgtgaagaggctagtctacaccaacgatcagggggagattgtcaaaggagtctgctcaaacttcctgtgtgacttgaaaccaggcgccgatgtgaagatcacaggaccagtgggcaaggagatgctcatgcccaaagaccccaatgcaacagtcatcatgctcgcaacggggaccggtattgctccgttccgctccttcttgtggaagatgttcctggaggagcacgaggactacaagttcaccggccttgcgtggctgttcttgggagtcccgacgagcgacagcctgctgtacaaggaggagctggagaagatgaaggagatggcgccgggcaacttccggctggacttcgcggtgagccgggagcagacgaacgcggcgggggagaagatgtacatccagacgcgcatggcggagtacagggaggagctgtgggagctgctgaagaaggacaacacctacgtctacatgtgcgggctcaagggcatggagaagggcatcgacgacatcatgctcgaccttgcagccaaggacgggatcgactggatgcagtacaagaagcagctcaagaagggcgagcaatggaacgtcgaggtctactgatccatccatccgttgacgactgcggagatcaatcaaatcgttggctcgcgctcgtcgccgcgcccgagtcagacccagctctctctatcgtctatcgatgtacataccttacgatgatgaaagacattctctatctatctatgtacatacatacatacataacttgatttcacacggattgcatcgtgcatggatttaactatggatgagccgccgaatttttttt

SEQ ID NO: 118644 - DNA, 229 bp, Zea mays
  Clone ID: MRT4577_3968C.1
cctcccctttctttgggggttttttaaaggtgtttccgcgtggacccccccaggccccaagaaagaaacacagggaaagacaatagcgggggggcaaatgacaggccaaaccaaacccggaggtttatgcagacccccaagggcctcccagggaaagcgctaattagcccaccagggacagaaagaaacccccagcgcctgaagagcatgggggacgccagactggccc

SEQ ID NO: 118645 - DNA, 256 bp, Zea mays
  Clone ID: MRT4577_39690C.1
cgcgagcgactcattcgatgggaactacaggggtcttggttattgtttggcgtgctttggtatcacaactgggtgggaaccagcagaagcggcttggaggatgtctaccgccttggaagtccctttgagcttattgagctactcacatagcttgtgcatgaagttgtgacatctgcaggctgaagctatatacagttaaaaaggcatcggtacgcatctgtatctgtaatcattatgtttatccactctatgtcta

SEQ ID NO: 118646 - DNA, 1551 bp, Zea mays
  Clone ID: MRT4577_39691C.1
tcgaggccggccgggagcagcagcagccacttgctcttcacctcttctctcttcactcctctcctctcctcatcgcctcctctcctcttgcggcacaataatatatatactgccacccatacggatccacgtcgggccgcctctactgtagccacggcccttggttcccctccattattcgacctcacctcaccttgccaccagccatggctgccgtgaccgccgcggccatctctctgtcctcctcctccgcctcctcccctgcggctgctgccaaggccaaggcggcgtccccgtcgtcgtcgccatgcaggcacctccagttcctgtcggcagcgagcccgcggcggcggtggcgggccggcgcccgcgcggtacgggcgcaggtgtccaccaccgagaccgcggcggcggggccggcgaagacgtccaagaagcaggacgaggggctggtcaccaacaagtacaagcccaaggagccgtacgtcgggaggtgcctgtccaacaccaggatcaccggcgacgacgcgccgggggagacgtggcacatggtcttcagcaccgaaggcgagatcccgtatagagaggggcagtccatcggcatcatcgctgatggcgaagacaagaacggcaagccgcacaagctcaggctatactccatcgccagcagcgccctcggagatttcggcgactccaagacggtatcgctttgcgtgaagaggctagtctacaccaacgatcagggggagattgtcaaaggagtctgctcaaacttcctgtgtgacttgaaacctggcgccgatgtgaagatcacagggccagtgggcaaggagatgctcatgcccaaagaccccaatgcaacagtcatcatgctcgcaacggggaccggtattgctccgttccgctccttcttgtggaagatgttcctggaggagcacgaggactacaagttcagcggccttgcgtggctgttcttgggagtcccgacgagcgacagcctgctgtacaaggaggagctggagaagatgaaggagatggcgccggacaacttccggctggacttcgcggtgagccgggagcagacgaacgcggcgggggagaagatgtacatccagacgcgcatggcggagtacagggaggagctgtgggagctgctgaagaaggacaacacctacgtctacatgtgcgggctcaagggcatggagaagggcatcgacgacatcatgctcaaccttgcagccaaggacgggatcgactggatgcagtacaagaagcagctcaagaagggcgagcaatggaacgtcgaggtctactgatccatccttccgttgacgactgcggagatcaatcaaatcgttggctcgtcgccgcgcccgagtctgtcagactcaggtctctatctaccgatgtacatataccttacgatgatgaaagacattctctatctatcaatgtacatacatacatacataacttaatttcacacggattgcatcgtacatggatttatttatggatgagccgccgaatttcttcttgaaaacctctttg

SEQ ID NO: 118647 - DNA, 349 bp, Zea mays
  Clone ID: MRT4577_39692C.1
ctgtcatcgggccatttgggccacatgctggtgtttttaccgaacaaaaacaaattcccaaggcatcaaaaggaccaaaaggcaccttcccccagttccacatgacgcccggcgagcatacagagccgaccaacatctaaaaaaatccgctcccccagggctgcaacaggaacaacgagcccaaagcggacgatccgttcacaaaacccgaccaaaaccatggggcagccaatctataatgtatgcaaccccaagcaaaattatgcccggacagccattggcagaggctgaccaaaggccgccctgcccaacatcaattggaaagccgccagcggaccaacagacactg

SEQ ID NO: 118648 - DNA, 382 bp, Zea mays
  Clone ID: MRT4577_39693C.1
gggggaacatttactgattatgtgggaataacaagaacaaaactcaattaaagctcaacagaactactgctactgcaacaaatgatgatggacacgacaagataaaaagtcacactatctaaactgtacaaaccaagttatcctaatttccttgaacaacaaataataaacaacaacatacaaacttagaatctaagcttgataactgaaccctatcccttcaaacttaacaaattatactaacccggtaatgacgctattctgacactggatatcatctgtattatttacggcggatacttatgaagaagcctcactgttcttttcgaaagtgtaaaaggctttaccttagcgacagcacttaacatgctaagttgtttat

SEQ ID NO: 118649 - DNA, 592 bp, Zea mays
  unsure (1)..(592): unsure at all n locations
  Clone ID: MRT4577_39694C.1
agtgatcaagtctggttcnnnnnnnnnnnnnnnnnnnnncaggatgtacttgaccaactctgctgttagagtatttggaaaggatgtnnnnnaacctggaacagctgaggaggggcccattgtggaaggtgatcctgaacttattgatgattctgagttttatcaacaacttctcaaggagttccttgagtcatgtgatagaggggcatcagagtcggccttttactctctnaaaaagcagcaggttaaaaagagaaagcttgtcgatcgtcgtgcttcgaagagcaggaagatacggtaccatgtccccgagaagatccctaatttcatggccccggagcccatggttcttcctccaatggctccgaagttgtttgagaatttatttgggaatagcagctagaatccataaactgcagttggtttacatttctttctgttgccttttctacttctataaactgtagtaggtataatgtccctagacttagactgaattgtaagttttgatgagcgtagacaagcagagcctagttccccaatcaaattatgcttcgatttgggcctgatgagtgccatttaccggtggacc

SEQ ID NO: 118650 - DNA, 629 bp, Zea mays
  Clone ID: MRT4577_39695C.1
agttatttcatgagtctctcgaatcaggcactgaaagtgagagttagagaattacaaactgcataaccaagtttttcttcaagcacgatgctaaatgtctatgggtcttaacatatggcatgttctatgaattgtgggctattagaggaaactcaaaccacatccatgagagtttgcagaagttgttagctatgatgtgtgcacttgtgttttatgtaatatgttgctccatcctgtcgtccggcgccacctcctatctcgtctccttcgtccccacgagcgagtaagctagtcttgctagtatcaacccgacgacatgttggtctaccaagatctgttctactgggttgaaggaaattgtgaacttaaaaacggcattcttggaggtcaatgacaagtgggtcgtccaagtacatgttgatgtgaatattggcacacaacatacatattgttgactttgttgacaccttacgccttcagtagcaaccccatttgatgagaaatcatttgtgtcttacattaaaaaatacatcaaaaaacatattcgtttattcttatcaaactcaataccattcaattctttgttggtgatagcatgaatgacgatatgactgtggagttctcctatt

SEQ ID NO: 118651 - DNA, 157 bp, Zea mays
  Clone ID: MRT4577_39696C.1
gaggagagggatgatatattgttacaattcgattgcttggacagcgcatttcggcaaggatctgtaacggagcgccccccgcgagggccttcggcgggggtgccgctaatattagaagaacctcggggccgtggcccaagggctgagctcgtgggtt

SEQ ID NO: 118652 - DNA, 506 bp, Zea mays
  unsure (1)..(506): unsure at all n locations
  Clone ID: MRT4577_39697C.1
cggacgcgtgggcggacgcgtgggcggacgcgtgggcggacgcgtggggaagatcacgagaaggatgtcctattagttggtgatgacccatgggaggacttcgtgaactgcgtgcggtgcatcaggattctttcgccgcaggaagagaggcaaatgaggctggccagcgactacggagacagctttgttggcaaccaagcgtgcagcagctcggacggaggtcgcccgtggagggtcaccggcgactagaaatagcaggcgatgtctgagcacaaatgtttggtataatccgtccaacgatagcaagaaaatgatacgcgatttctgagcacaaacttttgcactcagatgatcgtgcaaacaattagcattttaagaaaaatgttgcagttcaatgtaactgcaggaatgtctctgatgtagcctcttcgatgtggcagccttaacaatcgatgtgctacagttactctgccttttaaaaaaannaaaaaaaaaaaaaannnnng

SEQ ID NO: 118653 - DNA, 4859 bp, Zea mays
  Clone ID: MRT4577_39698C.1
ccacgttcagcgtccagctgctccagtttttttttttttttttttttttaggtagtatagtaaatacataggcagagcaactgtagcacatcgattgttaaggctgccaaaacatagcaagacagaagcgccacatcgaagaggctacatcagagacattcctgcagttacattgaactgcaacattttttttaaatgctaattgctaactgtttgcacgatcatctgagtgcaaaagtttgtgctcagaaatcgcgtatcattttcttgctatcgttggacggattataccaaacatttgtgctcagacatcgcctgctatttctagtcgccggtgaccctccacgggcgacctccgtccgagctgctgcacgcttggttgccaacgaagctgtctccgtagtcgctggccagcctcatttgcctctcttcctgcggcgaaagaatcctgatgcaccgcacgcagttcacgaagtcctcccatgggtcatcaccaactaataggacatccttctcgtgatcttcataaaccagtttccagccaactctgttctggtcgctgagctgcccctcaattccaaacatacgggcaacgtcatgcttcagttcatcgtacccagaatatctgttgatgtcgatagatcttccaacagcgccgcgcttgtgcaccttggtgtatgttcgcatacgttgttgattttttacgtaaactgaatccatttgtccactcagatctgtatctgtggcaaattatgaacggttgtaattgtccctaacagcctccggggggttcagcatccagctgcgcctacatcaaaaggatatacaaggccaaggtagtatagtaaatacataggcagagtaactgtagcacatcgattgttaaggctgccacatcgaagaggctacatcagagacattcctgcagttacattgaactgcaacatttttcttaaaatgctaactgtttgcacgatcatctgagtgcaaaagtttgtgctcagaaatcgcgtatcattttcttgctatcgtgggacggattatatcaaacatttgtgctcaggcatagcctgctatttctagtcgccggtgaccctccacggacgacccccgtccgagctgctacacgcttggttgccaagaaagctgtctccgtagtcgctggccagcctcatttgcctctcttcctgcggcgaaagaatcctgatgcaccgcacgcagttcacgaagtcctcccatgggtcatcaccaactaataggacatccttctcgtgatcttcgtaaaccagtttccagccaactctgttttggtcgctgagctgcccctcaattccaaacatacgggcaacgtcatgcttcagttcatcgtaaccagaatatctgttgatgtcgatagatcttccaacagcgccacgcttgtgcaccttggtgtatgttcgcatacgttgttgaacaggacctggagcccgggaatttctgtttaagaattggatatcattgatcgatgaatctatggaattgaacgcgatatcagcaacgccaaatggatgtgagatcattgaagatgataactcttgctgagaatcctttgatgaaatgtagttagagatgccgtttcctggcatctgttccatgtacttgtcagcttcgaaggcagttccaagcaaatcgtcttcgttaagaggctccatatggccatcgatatttgccccaaatagaaagttatttcctgcatctgtaacctcaaactcactatctggaactgcttctctcaacggttgatgttgattgaaggatgaaggtggaaaactttgttgcagcgatccatcagcctgtgaaaggcaaactgaagtcgctgaagatgatgtatccaaataatccagctgattgttgttcatgtagtcttgtccagtagctggcctttcttcagccagcttgggaatcaccattgggtgttgtgtactgtcacaaggcttcataccctgttcaagtgtagaacccaatacaacagatgactgaggagcctttgctgcagtaggtaaacattggttcttggagctacttggagttgatcgcaaaataacaggattgttgtttgtggatggcgatgttgaagaagagggaacttcatccatcttcattgactgcaccccaccaggcacatgcaaagagcgagcacccacggaggtgacaatttctggttttacaatagaaacagcattcccaggaaaatcttgaaatgttttgagaggttgagtcttttgctgcgtcgggtactgattagtgctactgctatgcaaaccaaccacttgggtagctacctgtgagcactgctgagcagttgactgagaatttactgcttgttgctgcaaatcaaatatcattttctgctgttccatgaccagaggctgctgtggctgtagagccttcaatagttgtattttcatctgatcagataactgtgttaccatgttggcatcattaggtacctgaaaaggctgtatctttatttgctgttgttcctgcactgactgctgaacttgctgttgctgcagaagctggatttgttgaaggccaccttgtatggtggtgtgattttgaaccagaggttgctgttgttgtagttgagcttggacaatgacttgaggttgctgaggctgagcctggagaactacttgaggttgctggagttgagtatggacaagttgaggctgtgccacactaaccattggttggctgacttgcagtggttgtgtaaccagattctgtttctgttcagaactgcaattttgaactgccttttgtggtactataacacttcccaattggtttggtgtagctattacatttgctaactgttcggtctgttggttttggggaggtagcagcgaagtgttgaactggatgttattttgttgcaggaactggggctggaagctaatttgcctagatagatcagccgcagccagagtttgtacaggttttccagctaacgaatttagcaattccggttgcataaccgtgttggcaagagaggggttgtgttgcatattcatccactgaaccaaacttaatccaggaactaaaccgttttgagtactcagatctctcttgccaacctcctcaccaaaccatggcatggtccgcttaaaaagattgtccatttctgagctatcatcatctgttaccccaggttgcctcggacgttttgcagtgaacaatggcgagggataaatgaagaatggagcgataacaggttcaacctcccaaagggaaaccctggtgcgtctctcacttggtgctgcttcatcccatgcaacctgaatattgcgccattgggagtttttccaccttaaaggatccatatcacttataccagttattgttcccatgtaccttcttgttgcagattcttcagtttcaaacatcattctaaaccgcatgccaagtgatagttggttgctatagacggccttctggtacttggcaaaaggaataacaaattctgaaggactagcccttgggttatagaatactgtgaattggctgttattggctgctgcatgggctgcagcagcaagaattccaatatgcatactgtcgctagacaaaacagatgatgagaggttaacgggctgcctatttgcccgccttatccccaagaggagttgctgtcttccgtccctaataaacaggactgaatcaccagcaaggagtctctttccactgacaaataggctccagccagtagtcagcaaatgccttttaggctggcctcgatatatatgacggaatgtccaaattgcatcgtgcaaatccctggcctgcagttcctgagcaggaggctgcactgagaagtcaagatgggggaaaattcgctctgcagcacgccgtggcacagagaaacctccatgagtgcttgtatcacttgcagtcagtgttttacaaaagaactctgtctgtggtctggtttgtttcagtgcaagctctgttgccagcaacgtctccttgtcacaatgcgtcacattgctaacgggctggagagtcattcgagcgtaaacctcatctgtgtcaggatcagcaagcatagtgacactacggagtatgcatataagcttagatgagagatttggatagctcggaattttggcatctgcatcctttcgcatagatgctgctacctgctcgctgtgtccctgcgggaagtagacaacgaggctccccgccggcggcagcgccacgagcggtcccgcgcacgcgtaccacagctcctcgttgaccttggtgcccccggccccctcgcctccggcgccgcccgagctcgtccccggcgcctccatactccgcgtccccgccgccggcgaccaccagtcactcaatctgaagagctaactatctccgtcgccgccgccgccaccgccgcctctggccaggaggcatcgccgggcgggcggcgaggagggcgggtctgagaagcaggtcgcgagcagagcaggcaagcagcgaagcgcccgaagaggagaaagaaagcgaagacccggcactcggcagcggcgggcggcagagaaaggagcaactagcaagcctcgtgccgaattgagctgtacccgatcacggtggccgccgtgatgtacaggcacagcagcgtggcgatgaactcggcgatcacggcgcggtacagcgaccaggaccccagctcagccgcgtcgatcagcggcgccgggggagggtccgtgtagtccttggcagcgaactcgccgccgccagcgccgctctcgatcacgtcgtccttgcccatcgtcttctagatgccgccgagaactatacttgcaagggggatgatggaatggtatgagtgc

SEQ ID NO: 118654 - DNA, 628 bp, Zea mays
  unsure (1)..(628): unsure at all n locations
  Clone ID: MRT4577_39699C.1
cnnnnnnnnnttccggccgctcgagccggccgggcacgggaagtaccccctcgctacctcgccgctgcccttctcgccgccgccgcacctctccgccgactaaatcacccattgagaggagctgcactgccaagccctaccatgagcgcaagagcggagatgtctccccgccgccgccgccgccgcgcctctccgccgcctgcctctctgccggacgacgacgacatgctccgggagattctcctccgcctccccccgcggccttcctccctcccgcgggcctccctcgtctccaagcgttggcgcagcctcgtcgccgatccccaattccaacgccgcttccgcaatcaccacggcaagcctcctctccttggcttcttcgtcgaagaccgtcgctcctgtccgttttttccaaagctgggccgaccggatcgcatcccccgcgctcgcttctccatgcctcccaacaaggacgaccgtatccccggagctcgcttctccatgtctctcaacggggacaaccgcatcgtcgactgccgccacggacttgtacttttcctcggccgcggaccgccgcaccactacttgagtgggacccccgttgcccgcgcaccagcgcccccctgtt

SEQ ID NO: 118655 - DNA, 164 bp, Zea mays
  Clone ID: MRT4577_3969C.1
ggggaggaacatattttttatttcagcacagcacccaacaagcttgagatagacttgggtaacagccggtcacgacccacacttattacaagtgatgcagcttgcttggggttaatgcgagattgcctgaaggattctagcctaatagaccttaaaaaggatta

SEQ ID NO: 118656 - DNA, 1084 bp, Zea mays
  Clone ID: MRT4577_396C.1
ctcgaggccggccgggagccagccagcgagtaactgaccactgggcccgatggacgacttcgatccagtcccctccgacgatgacggcgatggcggcgtcgccgcctcctcctcctctcccggccgctccatctgccacgccggctgtggccgcccgtcccgcgtctgcctgtgcccgtacctccctgcctcccctctcccgacctccacgaccgtcgtcatcctccaccacccgcacgccctccggcggaacccgctctcgacgctgcccctcctcgcgcgctgcctctccaacctccgcctcgtcccgggccgccgcctcctctcctcttccaccgctcccgccccgggccccgtcctcctgctctacccgtcgcccgccgcctccgacctcgtctcctggtgccggtccacgccgcggcccgcgcgtgccgcccccaccctcctcctcctcgacggcacctggaggcaggccagggagatgcacgcggccagcctggccgtgctcgcgtcgctgggcgcggtccccgtcgccctcccagtcgacagccgcgccgacggggacagcatgttcgagtccgacctcgtggtgaggaaggagccgcgcaaggggtgcgtcagcaccatggaggccgtggcgagggcgctgcggctgctggagccggagcgggagggcgccgtggtcgaggagaccatgctcggtgtgctccgcgccatggtcgccttccagaccgagcatctgcggcaccggacggtgaagcctagagcgaagatgaggaagaagaaggaactcaggagggagcaggagatgcagagggatgctgtggactgatgcggcttgctcgtggtgctgtgtggaatttcttgccttggaatctatcacaaaatccaccagactccagcagtgaaggtctgattttacctaggcatatcgatggtctcttcacttagtatgcattgttgcttagcataaccggatcatgttggttctagctcaaactgcctatgtctttccgatgttgtaaactgggttcatgttgattctagctcaaaaggattctgtgacgcaattatttctcctccg

SEQ ID NO: 118657 - DNA, 795 bp, Zea mays
  Clone ID: MRT4577_39700C.1
gagttattgagcgtcgcctaagaggaatgacacatatcaccatgaatcaatttggattcatgtttggaaggtcaaccatggaagcaattttcttaataaggcaggtcatggagcgatataaggagcagaagaaggacttgcacatggtttttatcgacttggaaaagacctatgataaaatacctaggaatctcatgtggtggcattggataagcataaagtcctaacaaagtatgttacgctcatcaaggacatgtatgacaaggttgtgactagcgtccgaacaactgatggtgatacatatgttttcccgattaacataggactacatcaaggtttaactttgagcccttatctagtggcattagtgctgaatgaggacacgagcgatataccagaagattaaacgtcaaggggctagttagatctggaagttacctaatgattttaaagacgtgctcaagaggcatgtcctcgttctgtgccccaacggacgtggaggcggggtcgtccccacgaccccggacagcgaacgagaactcactgccggtgtaggtgaggctcttgcgtagcttctgcctccgttgctgctggtggtacgacgccacgtgctccagcactttctcccagatcgatcgcccctaaggcgatgccatggacgcccccatcgtggccacgaaggacgaggggagtcggggtgcaagggtgtggacggcgccggatgttcgggggtggggagtggagggggaggccaagatggaggcaagtgggcagaagagagatgtgggagaaaat

SEQ ID NO: 118658 - DNA, 376 bp, Zea mays
  Clone ID: MRT4577_39701C.1
tggtcaaccgcggcagctacttctggtcgctcggcgcgcgggcgttctacttctcctgccccgtcttcctctggctattcggccccatcccgatgttcgtggcgtgcgtcgcactggtctgcgcgctctacttcctcgacgtgtgcaaggactgggaggaggaggaaggcgacggccatggccaccgctgtacgagtgatgacgagaggagggcaacaacacaagggaaggatgcagagcagcaagtgtagagatggatgtgctaggcatttttaggctagaaacagatcgtgttctcgagatcggacctgtgcccagattgcaaatgcccactctactctggaagaaacagttttgagaacatcacctacagcta

SEQ ID NO: 118659 - DNA, 389 bp, Zea mays
  unsure (1)..(389): unsure at all n locations
  Clone ID: MRT4577_39702C.1
caccacaaacagccgngcncccccngcgaagggcangcangacanccnnggcanaaaagagggcnngaggacgacnggncangccancacngccacccagaagacgggggagggggccgcagccaaggaccggagaggnggcagggcngccagcnnaaacaacanncccagcagcaccggngcngccaaggcngncggnnnggnnncnncccgaanngaagggcaagcncaccggcagggccccccgggnncccaccgnggangngncagngggggaccccacgggcngaancgggaagggggcccccgacgaggaaagcnngagagcgncgggggccgccgcggagggcccacncggggggagcacgggccacggggaggaggggcgg

SEQ ID NO: 118660 - DNA, 351 bp, Zea mays
  Clone ID: MRT4577_39703C.1
atggagatcatccatcagcaagtacaacgaaagaaggagaagatggcgtggctggctgatcttcaaaggaagatcgacgaagccactgaggaagtgtgtcatcttgttcaagatgaacaggatcgaagaccccaacacagggagttcgtcaagaaggcttgctcaatgaagatggatgcagaactgcaggctaccccatggcccccatcatacaagccacctcagctccccatgtatgatgggcactcagatccaaagcagtttctgatgagctacgaagcaactatatcttcgtatggggcaatactacagtcatggcgaagtccttcgtcatggcagtccggaatgtag

SEQ ID NO: 118661 - DNA, 393 bp, Zea mays
  unsure (1)..(393): unsure at all n locations
  Clone ID: MRT4577_39704C.1
tttctcccactccgtgtccgtactcacccaccccaaaccctcgcgccgcctccgagacagccgccgcaaccatggccaccgccgccgccgcgtctaccgtgctcactggcgccactaccgctgcgcccaaggcgaggcgccgggcgcacctcctggccctccgccgcgccctcgccgcgcccatcaggtgctcagcggcgttacacggcatgggggggggtnccccggccaccccgcttcggccgtggggtcccaccgatccccgtaagggcgccgacatattcgttgagtccctagagcgctgcggtgtccgagatgtcttcgacaaccagggcggtgcgtccatggagattcaacaggcaatcacccggttcaccgtcattgccaaccacc

SEQ ID NO: 118662 - DNA, 494 bp, Zea mays
  Clone ID: MRT4577_39705C.1
ggaacaaacgacgggcataagccaaaaccccaattcccatattttttgggttctttaaaaaacagtcttatggtttttccccacccactaaggacatttttttttaacggaaggggggtaaaaaaaacaggaacaaaaactaaacgaaacccatagcccacttttttttgtctacaaaagctgactttgaaaaaacgagggcccgagctagggcagcacccttattctcgcattcacgtggttcgtaatgggggctacggggggaaacaaggccggccccaccctgaaaaggagcgacccactcccgacccctattggggtttttggaggagaccatcgggtgggggctcggccctgttgaaaaaacgaggggggggaaagaaagggcaattggctgggcaccataaaacgaatttcctccaaaaccaccactatagggccctcgcccgggaacttccaacttataaatcaaccccagggccttcaccttgggg

SEQ ID NO: 118663 - DNA, 408 bp, Zea mays
  Clone ID: MRT4577_39706C.1
gtctaattgctgctgttatagctgtttggagcacagctttgcaacaatacgtgagtggtagcatctttaaatgcagatttcttatacgtcacctaaccagtaagattgcttgctacctcctgtttgcaattacctgcaagttcgtcggtgcgctttgagccttttcaaaggacaatatggcacttcagtgacagtgatacttgtttattatggaaagttgttgataattagcagttgtcaaattattcattgggatcaccgcagctttaggatataactccttttttttctggagattatgaatagccactcaccatggccacttgatatctttcatacttgaattgtcagacttcataaatgtgctcatgaatcatgatgccactaatatattgttctttacacaaa

SEQ ID NO: 118664 - DNA, 295 bp, Zea mays
  Clone ID: MRT4577_39707C.1
acgaccaagtggtctacatctgccaacacaaatttatttttatcccacgtactagctttgtggggctgtggattgtgttaaacgccagtggccacaaccttcttataggttaaagaaactcttctatgcttattattgaggattgtcattgaactaacatatatttcaaacttataaactatttataacatttcaaagattatttctttgaatcaattttgtaacacactatcgataaatataatgtaaatttgctgtaacctataactatgtgtaataaagaaattcctctgct

SEQ ID NO: 118665 - DNA, 391 bp, Zea mays
  Clone ID: MRT4577_39708C.1
cggacgcgtggtactaaaccaatgcgatctctacccattgctgtgaatgtcaaaggcaaggactaaaatcaatcacgggtaaacaatacaatagatactataactatatataaagaaacactaatcctgagggtctaattatttacagcacctgattttatttacgagattttcactgaccctatttactatatagctacacctaagttcaatgtaacggccttggtttaatcagctcggaatgaagaaactcttgagcttgcctatattactactttgtgaaatgactccctttgtgtaggttgacttataacctaaaggcccaagtcaaataccactacctataacgttatcatacttattgccaatggcgacagcccttcacccgccc

SEQ ID NO: 118666 - DNA, 359 bp, Zea mays
  unsure (1)..(359): unsure at all n locations
  Clone ID: MRT4577_39709C.1
ggacctttgggctgatttatgtgcttgtagtacntaaaaatatattaagtgaagtgtatcagtaatgattcaatattaacggtcgttaaggcaccagtttcttccgtgtcctccgtttccccagcgagtgtaataaacgtgcctaccaccttatagagtctatccgtcttcagcgttagcaccttatagccttctttattagccatcctaacgggtcctgaatacttagttgcgtaagttcataggtcataatcagtgtccgtggtgagtgttccataataattaaccgtttaaccgtaataataacttccggtatactcaatttcataaattaccgtaatgtaataataataataata

SEQ ID NO: 118667 - DNA, 633 bp, Zea mays
  unsure (1)..(633): unsure at all n locations
  Clone ID: MRT4577_3970C.1
ggtgggctccgcgcacgatgccgcacccgggctcgactccggcgtccaggtggtggtgaggatacggccgtcgtgctgggtcgatgaagaggaggcaggcgaggatgggaggggaccggaggcctgcgtgcgcaagacggcggccaactcggttgcgatccaggggcaggacttcacgtttgatgctgtcgctgactcggtctccacgcaggaggatatcttcacccttgttgggctgccacttgttgaaaattgcttatcaggtttcaacagctccatatttgcctatggacagactggcagtgggaaaacctacactatgtgggggcctctatctgcattgtcagaagattcattgagcagcgagaggggcttaacacctcgtgtatttgagcagttgttctcccgcattaacgaagaacaagttaaacatgctgacaaagagcttacttacaattgtatctgctcgtttctcgagatctacaatgaacagataactgatttgctagatccctcgcagaagaatcttcaggttagagaggatgtcagaactgcctgtgtttatgttgaatcattgacaaaggagttggttttcaccttggaagatgtaactcagttgntggttaagggcct

SEQ ID NO: 118668 - DNA, 737 bp, Zea mays
  Clone ID: MRT4577_39710C.1
ggggggaacaccaacgacgttggcggcacagggagaggttggcggcgacacaagtgagggagagtgggaggcacggcggccggcggggtgaaggggaggggagaggcggtgacatgtgaggaatgagggagaacggaggaatgatgatataaataacatgtgaggaatgagtccaattccttaatgaagcacgcaaggcagaacagaatatggcccaacagccaaccgactctgtctgagcacactctccgctttcggcctttcgtctgcaccactgggactccattttgagaggatgagatcgtacgtaggccgaaacgcagcccaatgtatgcgctctttgcgatccatccgccctttcccccgttcccgaattttccaatgctggcgcgtcgaacgaacgaacccgtccctgctggtcggtgcgaacgaactctgccggcatgttcccgtgctgtcgttggcacgtccatcttggcagtggcaggctgctggcgtaggagtacgacgcagaccacaggctccttctcaactctccgttccgtcgtcgcccgtgatggcaaggctcgaaagtgggaggtttgctgtgcctgtccctgtgcgtgcccatgaatgtgaccagcgagtagaacgtgtggcttcgatttcagctagccgagagcagtgagtggcagcaagtttctttcctttgcgatgcgaggaggagccccgcaattaaaatcagcatgccgagcacg

SEQ ID NO: 118669 - DNA, 293 bp, Zea mays
  Clone ID: MRT4577_39711C.1
gtccttagcctaaattcctggaacaatgattgggagggttcttactttattcaagtccactgtcggaactgccctatcgtagcctgtacataccaatgcttccctcgagtatgtctaatcgaccggctgcttgaagaagcctcacctctttctccctgtcaccgtgttgctgctctagatccgcatgtaccagaagagcacggatctgctcatacgcaagctgcccttccagctcctggtccgcgagatctttcatgactttaagaccgacctcctttttcagtcctccgtct

SEQ ID NO: 118670 - DNA, 658 bp, Zea mays
  Clone ID: MRT4577_39712C.1
cattgggtacctcgagggccggccgggcccgggatctccaaacaagcaagcttagctgggtcaccagttgttaacatatacatcagcaagctccacgaaagcaagaagaagaagaaacatgacgaccactgctgcggtcgtcaagctcctgacagccgtactcctcttcttcgccgtctctcttcggggtaccaagggcgagccatgcggcacgtccagcatccacgtgcagaccgtcaacacgggcgcgacggcggccgccggcgacacgctgttcgaggtccaagtgaaaaacctgtgcccatgcagcgtcaagaacgtgcgcatggacggtggcggcttcgcgacgacggtggaggtcgacccggtcctgttccgcccagtcgacggcggtgtctacctggtgaacgccggcgagtccatcgcgagcatgggcatcgtgagcttccgttacgcttgggaccacttcttccagttgactcctaggagcttggaggtcgacggccagtgatagtagctactaaaagctagtagcaagctggttgccttgttgaagtaatactgtagtgtgggctgtatatcgcttttgatatacagtgctagtaataacgcagaaatcttccacgaaaaaaaaaaaaaaaaaaaggcccctagggcc

SEQ ID NO: 118671 - DNA, 737 bp, Zea mays
  Clone ID: MRT4577_39713C.1
cggacgcgtgggccggccgggaggccaaacaagcaagctagctggtcaccagttgttaacatatacatcagcaagctccacgaaagcaagaagaagaagaaacatgacgaccactgctgcggtcgtcaagctcctgacagccgtactcctcttcttcgccgtctctcttcggggtaccaagggcgagccatgcggcacgtccagcatccacgtgcagaccgtcaacacgggcgcgacggcggctgccggcgacacgctgttcgaggtccaggtgaaaaacctgtgcttatgcagcgtcaggaacgtgcgcgtggacggtggcggcttcgcgacgacggtggaggtcgacccggccctgttccgcccagtggacggcggtgtctacctagtgaacgccggcgagtccatcgcgagcatgggcatcgtgagcttccgttacgcttgggaccacttcttccagttgactcctaggagcttggaggtcgacggccagggctagtagctactcactccgtttctttttatttatcgctggataatgtaaaatttcaatatccagcgataaataaaaaaacggagggagtactagctaccaaactactagagtcgtagcaagctggttgccttgttgaagtatactgtagtgtggggctgtgggctgtatatcgcttttgatatacagtgctagtaataacgcataaatcttccacgattgttaaaaaaaaaaaaaagcggcc

SEQ ID NO: 118672 - DNA, 414 bp, Zea mays
  unsure (1)..(414): unsure at all n locations
  Clone ID: MRT4577_39714C.1
atcccgatcaccgccgcccaacctcacctcccctccgtcccccgagccacctcacaaaccctggtcggtgcctctcactccggctgccagatggacagcgccgacgcggcgacggcgctgggcgcgtggatccggggctacttcacgccggccacgttcttcctcgtcgtcaacctcgtcatcggcatcagtgcgtgaacgcgcgcgcggacgacttcatcaacaagttcagacagcagctacagctgcagcgactgaactcgctgctcaactacaaggagatgctcaaccgcggcggtgacaagcagtagccggagcgtgcaaggcgganggagaagggtagctagctgtaggatccaatccaaaaccatactgaaaaaaaaaatcgatctttggtccatcaaccactagacc

SEQ ID NO: 118673 - DNA, 150 bp, Zea mays
  Clone ID: MRT4577_39715C.1
aggggattaggggtgggtgcgaacacttagattctgatatgctaggaggggaggtaagatatgatggactgaaatactaggaattgaacattcaatcaagaagtattctccttgtaagattagtaagctgcatattaatggagcaaatgt

SEQ ID NO: 118674 - DNA, 267 bp, Zea mays
  Clone ID: MRT4577_39716C.1
ggaagggccggcccgacccacgcgttcgttgtaaacaaaaacggacgaaggaacgaatttaaaaatatgtaaaaagggaacatgttaagggtcatttcaactgcttaaactgtcgtgcttaaggttgggcttgaccaccttgccgatgaagagtgcgttaagcttctgggtccatgccggaaggcgattccttcatcgaagggcggggggaaaattattatcggtgatattattattgaccactctgggcttattgttgaaacttac

SEQ ID NO: 118675 - DNA, 306 bp, Zea mays
  Clone ID: MRT4577_39717C.1
gaggcactcactcacccacccgcgtccgttcgccggaaagctccagaaaagaaaaccactcgcgagaccgcccgcccggccgggcgcaggcaggcaggcaagcaaaagtggcctcgcaaaggaacggcgccccggaactcggctcgggtcccccgctttagttccccgtcccgtccgtcgcttggtcgcttccttttcttgcttcctcctccacggcctaacctcccttccgggggccgccttccggacggggacgggacgcgggttttggcgaaccgcctggggggcctttctcaggggggggcc

SEQ ID NO: 118676 - DNA, 1136 bp, Zea mays
  Clone ID: MRT4577_39718C.1
tcccgaacaccgccgcccaacctcacctcccctccgtcccccgagccacctcacaaaccctgttcggtgcctctcactccggctgccagatggacagcgccgacgcggcgacggcgctgggcgcgtggatccggggctacttcacgccggccacgttcttcctcgtcgtcaacctcgtcatcggcaccatcgcgctcacctcccgtgccacccagcagcgccgccgcagggagaactactaccacgacgacggccacagccacggccacggccaccaggaaacgctgcacccgcagatggagcagccggggtacggccactactaccacccgccccgctgcagcgcacgtcgtccgtgctggacaggctccgctcgctgggcctctacggcttcctcgctcccgacgaacccgccgccgccgcgtcagttccagcgagcgacggcttcgccaccccggcggacgagaagaggcacgcgcacacgcactacgacatcggccggtccgagccggcacgggagcagcaggacaagaaggagaagactcaggggggcaactcaacaagggccaagtcgagctcgggggctaggaagacgcccgctctgaggcaggcggaagccggcgccgagtgtgtggacgcgagggcggaggcattcatcgacagcttcaggcagcagcagcaggtgcaccactaccaggaggaggaatacgtcccgcctccggcgcccgcgccgccgctgtcgcgcacgtcgtccgtcctggaccgcctccgctccttcggcctgtaccgcttccgctccggcgacctcggccccgaccttccctccgccgccgccgccacggagacggacgagaaggagaagcagcaggcggcgcactacgggcggagccggtcggagccggcgcgggagcagggcaagaagcaggacgcgaggatgaacaagtcgagctcgagcggcgtcgtggcggaggcggaggcggaggcgcatcagtgcgtgaacgcgcgcgcggacgacttcatcaacaagttcaggcagcagctactgttgaataattagacaaattccaaattaaattccgaatataaatcatgaccaaatcagaagaactgaaataaaagccaaatcagatgatgct

SEQ ID NO: 118677 - DNA, 2227 bp, Zea mays
  Clone ID: MRT4577_39719C.1
cattgggtacctcgaggccggccgggtccgggtctatactgtctactctgcacgaggccgcgtggcagttgcggagagggcagatgtcatgaagaaaggcatgggcgtcagctgcctctctctgcctgcaatcccggcgggtcggctcgcgcgggcacgaggggcggcacttggattcccacgttttccacccaccaagtcagcagcagagcatccgctcctccgcggcgcgccgcgtgctccccgcagccccagccaccatttaacgccgggtcaccagacgccaatccaatccccctgcaccagacgccaatcccgatcaccgccgcccaacctcacctcccctccgtcccccgagccacctctgtaaccctgttcggtgcctctcactccggctgccagatggacagcgccgacgcggcgacggcgctgggcgcgtggatccggggctacttcacgccggccacgttcttcctcgtcgtcaacctcgtcatcggcaccatcgcgctcacctcccgtgccacccagcagcgccgccgcagggagaactactaccacgacgacggccacagccacggccacggccaccaggaaacgctgcacccgcagatggagcagccggggtacggccactactaccacccggaccacacgcacacgctgtacgcggcgccgcctccgcccgcgccgctcgcgcgcacgtcctctgtcctcgaccgcctcaggtcgctcggcctgtaccgcttccgctccggggacttcccgcccgagtacggcgccacgccgccgaaccacgcgcaggatgtatccgctccggtggaggaggaagagacgatcgcgtcggcgcactacgccaggagccggtccgagccggcgcctgctgcgcgggagggtgagaggaggccggcgccgcccagggtaaagaagtcgggctcggaggtgaggaagtcgcaggtgtcgcgggcggcgcccaggatcgtccaggcggtcaccgaggacgacgactccgtcgaggaagccgaaccccctgcatccgacgccaatcccggccggcgccgcccagggtaaagaagtcaggctcggaggtgaggaagtcgcaggtgtcgcgggcggcgcccaggatcgtccaggcggtcaccgaggacgacgtctccgtcgaggaagccggcggcggcggtttcaggcggaggccgtcgccaccccagcaagagtaccactaccggcaagaatacgtcactccgccgccgccggcacccgccccgctgcagcgcacgtcgtccgtgctggacaggctccgctcgctgggcctctacggcttcctcgctcccgacgaacccgccgccgccgcgtcagttccagcgagcgacggcttcgccaccccggcggacgagaagaggcacgcgcacacgcactacgacatcggccggtccgagccggcacgggagcagcaggacaagaaggagaagacgcaggggggcaactcaacaagggccaagtcgagctcgggggctaggaagacgcccgctcagaggcaggcggaggccggcgccgagtgcgtggacgcgagggcggaggcattcatcgacagcttcaggcagcagcagcaggtgcaccactaccaggaggaggaatacgtcccgcctccggcgcccgcgccgccgctgtcgcgcacgtcgtccgtcctggaccgcctccgctccttcggcctgtaccgcttccgctccggcgacctcggccccgaccttccctccgccaccgccgccacggagacggacaaggagaagcagcaggcggcgcactacgggcggagccggtcggagccggcgcgggagcagggcaagaagcaggacacgaggatgaacaagtcgagctcgagcggcgtcgtggcggaggcggacgcgcatcagtgcgtgaacgcgcgcgcggacgacttcatcaacaagttcaggcagcagctacagctgcagcgactgaactcgctgctcaactacaaggagatgctcaaccgcggcggtgacaagcagtagccggagcgtgcaaggcggagggagaagggtagctagctgtaggatccaatccaaaaccatactgaaaaaaaaaatcgatctttggtccatcaaccactagacctcgagtgtggattatgcagtgttgttcttattagcatcgttatgtaagaatcgctattttttcagcttgttaatttcaattggtttgtgttgctggc

SEQ ID NO: 118678 - DNA, 293 bp, Zea mays
  Clone ID: MRT4577_3971C.1
gttattgacgactgccccgatgatctgattgtctggtaccgccacacatttaaaggcgcatggccattctctaccggggctcacggttggtctatatctgattgcactgctggaggactaaaggcttgattattgctatgaaagacttatcctgaaattgttcgtggaccgatagaacctaataaatcttatgatgctggcagttgactgatgtcttatatgaatgatcacgtggggatagcgacttaagaacttacaagatcctatgcctggcttaagctgatcaatcctgc

SEQ ID NO: 118679 - DNA, 1425 bp, Zea mays
  Clone ID: MRT4577_39720C.1
gcaccagacgccaatcccgatcaccgcctcccaacctcacctcccctcccctcccctcacctcctgttcggtgcctctcactccggctgccagatggacagcgccgacgcggcgacggcgctgggcgcgtggatccggggctacttcacgccggccacgttcttcctcgtcgtcaacctcgtcatcggcaccatcgcgctcacctcccgcgccacccagcagcgccgccgcagggagaactactaccacgacgacggccacagccacggccacggccaccaggaaacgctgcacccgcagatggagcagccggggtacggccactactaccacccggaccacacgctgtacgcggcgccgcctccgcccgcgccgctcgcgcgcacgtcctctgtcctcgaccgcctcaggtcgctcggcctgtaccgcttccgctccggcgacttcccgcccgagtacggcgccacgccgccgaaccacgcgcaggatgtgtccgctccggtggaggaggaagagacgatcgcgtcggcgcactacgccaggagccggtccgagccggcgcctgctgcgcgggagggtgagaggaggccggcgccgcccagggtaaagaagcgggctcgaaggtgaggaagtcgcaggtgtcgcgggcggcgcccaggatcgtccaggcggtcaccgaggacgacgactcgttcgacgaaagccgggggggggggcggttttcagggcggaggcacgtcgccaccccagcagcaagagtaccactaccaggaggaggaatacgttcccgcctccggcgcccgcgccgccgctgtcgcgcacgtcgtccgtcctggaccgcctccgctccttcggcctgtaccgcttccgctccggcgacctcggccccgaccttccctccgccaccgccgccacggagacggacaaggagaagcagcaggcggcgcactacgggcggagccggtcggagccggcgcgggagcagggcaagaagcaggacgcgaggatgaacaagtcgagctcgagcggcgtcgtggcggaggcggaggcggaggcggaggcggaggtgcatcagtgcgtgaacgcgcgcgcggacgacttcatcaacaatttcaggcagcagctgcagctgcagcgactaaactcgctgctcaactacaaggagatgttcaaccgcggcggtgacaagcagtagccggagcgtgcaaaggcggagggagaaggatagctagctgtaggatccaatccaaaaccatactgaaaaaaaaaaatcaatctttggtccatcaaccactagacctcgagtgtggattatgcagtgttgttcttattagcaccgttatgtaagaatcgctagtttttcagcttgttaatttcaattggtttgtttgtgttgctggcaaaaaaaaaaaaaaaaaagcggcc

SEQ ID NO: 118680 - DNA, 554 bp, Zea mays
  unsure (1)..(554): unsure at all n locations
  Clone ID: MRT4577_39721C.1
aaaaaaaaaaaaaaaaaaaaaaaaaaaaaaaaaaaaaaaaaaaaaaaaaaaaatagggggggggtcctccgcctccaccccccttagggctatttttgaaattttccatcccgctggcggctgcttctgcatgcttttaggggccctattcccccttttagtgagtcttattacactttgctggccctctttttacaccctaattactggaaaacccctggctttccccattttaatccccttgcacaacatccccttttcgccggatggcatattacaaaaaaggccccccctctttgcccttaccaacatttgaccatctttaatggcaaatggccccccctttttacggctctttaaccgcgggggttgtggtgtttccccccatggtcccccttatactttccagccccctaccgcccgtttttttngttttcttcccttcctttgtccccaagttcgccgtttttccccaaaaagttttaaattggttgctcctttttgggcccctattaacggctttgccccccctcaccccaaaaaagttttttttg

SEQ ID NO: 118681 - DNA, 309 bp, Zea mays
  Clone ID: MRT4577_39722C.1
ggcccgaacaaaacagttttgttttaaaaaatccgggggggttccatattttgatgccacaaaacaacttttggcccagaaacaagggggcttaccaagataatcgggtcatttcttattacaattttccacattaactcacacttgacattacacactgtgcccaacgcatgggcatgaacccacagttggttaggttgctcgcacccactccagggaatcccggggggggggcgaggaccacatcattgggggcactaacgggggtggtgaccctgcagtggcgcccgattttcccctgggtgcccg

SEQ ID NO: 118682 - DNA, 175 bp, Zea mays
  Clone ID: MRT4577_39723C.1
ctctgtttttttcataaaaaattaatcaaatggggagaagggggtatattaaataccgcatccacccagagcaaacgtggcagcacccaaacaaagagaatcaagcaggggacgctaaacatatcaacgtacacaaggccccaaactcccccaagcaacagggggggggactaaa

SEQ ID NO: 118683 - DNA, 525 bp, Zea mays
  Clone ID: MRT4577_39724C.1
aagcaacaggtattaatgatgatgatttatgctgcccacctgggaagcaacgttgtttcaactcggctgctatccttcattgtactataataagaacagctgctttatattcgggacgacaacagctttgatgatctgtcatcaccaattctacaactcgggctgcacaacacaaccccacaccgaccatcagcagtcatacatacatcaccaccacttgcaagaaccaccagcagccacccaccccccaaaacaacagcagcaactgctgctgctaccatcttcttcaacatgctactgctcctccatgaagaagctgcttaataaatgaagaaggaggcgaacaacatgacgactactgctaccatgacgaccaccagcgtctaccaccactccaccacgacggtgctcaatattttcttcgccatcattccagaacatctgctgccgttgtagtcgcccgccgctcctgcttcctcgtccccctcttgtcgccgccatgatccacaaactactttacgacca

SEQ ID NO: 118684 - DNA, 337 bp, Zea mays
  Clone ID: MRT4577_39725C.1
attgttattctttcatctttgttctctgttttttttccttttttatccgagaaaacgcaaggcagtcaagcgccccacaacaaaaaagggggggggaggaatattctcaacccacacacacccaagaaaaaagcgggaagaacagctttaggtcctaaaaggctgcgcccactaaggccaacaagaaggacggccacaaagaaagctcctgtctaatggtgctcccgagagaccacaacaacctggaagaagagcccctagaaggccgggaccagggactaactcgcccacctcgggggggcgctgggggactggctcctggcccccttaagaaaac

SEQ ID NO: 118685 - DNA, 244 bp, Zea mays
  Clone ID: MRT4577_39726C.1
ggggaaaaaacacggcccatttttaattaaacatgtcaaggcaggcaaaattgcaacactagggctagctgaaataaaaacatgagttttcccactttggatcggttagtaaaacaataaattaaggggggctttacattcatttttggacttgaaagaacagcttacaacttttacattttcaggtacatgaccacgttttgaacttttgatacccacattttcctttgttcaaatattaaaa

SEQ ID NO: 118686 - DNA, 840 bp, Zea mays
  Clone ID: MRT4577_39727C.1
agtgcaccgcggcaagagaggagacgcggcggcggccatggcgattcccctcgtgctcgtcctgctcccgctcggcctcctcttcctcctctccggcctcgtcgtcaacactgtccaggccgtattgttcttgacgataaggccattctcgaagcgattgtaccggcagatcaacgtattcctggccgagttgttgtggcttcagctgatctggcttgtggactggtgggcaggtattaaggtacaggtgtatgcggatccagcaacttggaaactaatgggcaaagagcacgcccttctaatatccaatcatcgaagtgacattgattggctggttggatggattttagcacagcgttcaggatgccttggaagcgcaatagctataatgaagaaatcctcaaagttccttccagttattggttggtccatgtggtttgcagaatacctctttttggagagaagctgggcaaaggatgaaaaaacactcaaatcgggtcttcaaaggttgaaagacttccccagatcattttggcttgccctttttgttgagggtacaagatttactccagcaaaacttttagcagctcaagaatatgcaatctcacagggtttgacagcgcctaggaatgtgctgattccacgaacaaagggatttgtatcagctgtaagtattatgcgtgactttgtcccagctatctatgatacaacagtgattattccagaagattcgcctaaaccaacaatgctgcgtattcttcagggacaatcatcagttgtacatgtccgcataaacgccattcaatgagtgaatgcctaactcggatgaggatgtttcaa

SEQ ID NO: 118687 - DNA, 1862 bp, Zea mays
  unsure (1)..(1862): unsure at all n locations
  Clone ID: MRT4577_39728C.1
cgttttgtgtgcgctcatatataattcaaaagtctcaacaactcattattccttgcgtgtatggtttcctctctctgcgcacgagctcgtgcctctcctctcctccccggccccttcactccaccaacgaaccccacgcaggcagcagcacgcgcaagccgcaaggcaaggcacaaacactaggggccgggcatggcgacgcgggcggacgtggagaagggcgggccggcgaggaaggagcccggcaaggtgccgtcgccgctgtacccgcagcacgagggggagcgggagtgggtgccctggctcgtccccgtcatcttcgtcgccagcatcaccgtcttcgtcgtcaccatgtacgccaacaactgcccagcgcggcgcgacgccaagtgcgtcgcccgcttcctcggccgcttctccttccagccgctgcgacagaacccgctcttcgggccctcctccgccacgctcaccaagatgggggccctggtgtgggagaaggtggtgcaccgccaccagggctggcgcctcctctccagcatgtggctccacgccggcgtcatccacctggtcgccaacatgctctgcctcctcttcatcggcatgcgcctcgaacagcagttcggatacgtgaggatcggcgcgatctacgtgctctccggcgtgggcggcgccgtgctgtcgtcgctggtcgtccggaaccgcgtcaccgtgggggcctccggggcgctcttgggcctgctgggcgccatgctctcggagctgctcaccaactggaccatctacaccaacaaggcggcggccgtggccacgctcctgtccgtggccgccgtcaacctggtgctcggcgtcctgccccacgtcgacaacctggcgcacctcggcggcttcctcgcgggcttcctactcggcttcgtcgtgctcatgcgcccccacttgggctggatggagcgctacggactccccgccggcgcgccctgcaccgccaggaagtacctcgcgtaccagtggaccctcctcgccgtcgccatcatcatcctcctagtcggattcgcggccggcatggcgatgctcttccgcggcgccaacgccaacgacagctgccactggtgtcactacctcagctgcgtgcccaccgccagatggaactgcaccaactgatgatccatgcatagcagcagcagcacgagttggagttgccacccattttcatcttccgatccgtatagtctcgttactgtagatagcttctttgtcattcattcagatctcaacacacacgtcggtctcctgttcatttgattcattcttttacataatgatgcaatgcaattattgagatttcgaatctcgtcatgcgtgtctagtcagcatgcgccgcctttttcgaacccgtgcaaatgcgccaacgcacgcacaagagcaaaaaaaaaaaaaaaaaaaaaaaaaaaaaaaaaaaaaaaaaaaaaaaaaaaaaaaaaaaaaaaaaaaaaaaaaaaaaaaaaaaagcaggaacaggnacnnatcctgatnntgatttaaatttatttnnatttattatatannntatgcccnnttcgtagctttggccannggccatttccttttcgtccccagcatgtacatttataacaggnnagtaacnngtgactggatnntctcctcttcctctttctcatggctagcnnncagcgtgttgaccattgnnacaaccacgctnngtgcacgatactttctatgccgtnntttgtgtgcgcctcttttatataattcaaaagnntctcaacaactcannntattccttgcgtgnntatgggtttccttctcttcttgcagaaaatcgcggccgggcattggcgatc

SEQ ID NO: 118688 - DNA, 1094 bp, Zea mays
  unsure (1)..(1094): unsure at all n locations
  Clone ID: MRT4577_39729C.1
ccggccgggacgcccgccgtcctctcctctcctcccggccccttcaactccaccaaccccacgcaggcagcagcagcacagcacccgcaagccgcaagacaaggcacaagcacaaccactgggggggcatggcgacgcgggcggacgtggagaagggcgggccggcgaggaaggagcccggcaaggtgccgtcgccgctgtacccgcagcacgagggggagcgggagtgggtgccctggctcgtccccgtcatcttcgtcgccagcatcaccgtcttcgtcgtcaccatgtacgccaacaactgcccagcgcggcgcgacgccaagtgcgtcgcccgcttcctcggccgcttctccttccagccgctgcgacagaacccgctcttcgggccctcctccgccacgctcaccaagatgggaattcggcactgggagaaggtggtgcaccgccaccagggctggcgcctcctctccagcatgtggctccacgccggcgtcatccacctggtcgccaacatgctctgcctcctcttcatcggcatgcgcctcgaacagcagttcggatacggtcggtagcggctacctacctactctactctactctaccctgcccctggctgccaataataaccacaatatataaccgcgttcatcagtgaggatcggcgcgatctacgtgctctccggcgtgggcggcgccgtgctgtcgtcgctggtcgtccggaaccgcgtcaccgtgggggcctccggggcgctcttgggcctgctgggcgccatgctctcggagctgctcaccaactggaccatctacaccaacaaggcggcggccgtggccacgctcctgtccgtggccgccgtcaacctggtgctcggcgtcctgccccacgtcgacaacctggcgcacctcggcggcttcctcgcgggcttcctactcggcttcgtcgtgctcatgcgcccccacttgggctggatggagcgctacggactccccgccggcgcgccctgcaccgccaggaagtacctcgcgtaccagtggaccctcctcgccgtcgccatcatcatcctnctagtcgggtaagcaggacaggacatcct

SEQ ID NO: 118689 - DNA, 668 bp, Zea mays
  Clone ID: MRT4577_3972C.1
cggccgccaaaacctagctcctgaaaactctcctcggccctcgcccacctctcgctagtcgctcccgctttgcagtctctgtggccggacgccgcggcgagatggcctcgacctgcttccgcgccgccgcccgcgtggcctccgccgccagtcgctcggcggcggcctaccgctccgctccctccgcggcacgcgccgtggcaactgccgcccaccgcatatcgtgcttctccagggtgccggtggagctcgggtgctgcgcgggattgtcactgctgccgctgcacagtgcggtggcgtcagccaggctgacgtcgcggctgagcacggcgtcgagctgccgtgctctctctcagcgcgctgctgcaggcacatgactttgatagttcttgaaagatattactgggagcttgctgttttgcctcatacaatcatgaagaatgagtactttaacactgaaattgtactggaagactagagttatgttatttacctagaatggctagctacctctgttgaggaataccttgatgcaataatgtggcatcctttttcaacgttttccacattaattgattgtttacttgactcaatatgtctgtttacagtgcttaaattattatttatgcaagtctgctctctctaaaaaaaaaaaaaaaaaagcggcc

SEQ ID NO: 118690 - DNA, 265 bp, Zea mays
  unsure (1)..(265): unsure at all n locations
  Clone ID: MRT4577_39730C.1
tttttnttttgggggtgtgcggacgctaaaagatcaagtattaccataacacaaaccaagaatagcttgaaggtaacatattcttacacatgttttctatctcaaaaagcataaacctgactgcatgacgatatgagcaaccacagcgtcgatggctttttttaaaagtggggggtgccacaccccgaatctgcgccggcccaaaatttcgatctgtaatttcctcacttccacgggggacttgactctcctattaggccgaacc

SEQ ID NO: 118691 - DNA, 164 bp, Zea mays
  Clone ID: MRT4577_39731C.1
atgaaagggtggtagctgaagagcacacagaccctgttctgatacggacacgttcttggtgatatctgcacacagatatttcgatgaacctcagtcccgaaatgcggcgacataagatgatattggttgggagactatgagtccatttgaggagaatagctctt

SEQ ID NO: 118692 - DNA, 399 bp, Zea mays
  Clone ID: MRT4577_39732C.1
ttttgcacacatggggagatgtcccggcgttattacttaatcaccataagacgaagatatatataatacaacacccggttctgctgtccgggtgcctgacacacgactaacacatattcgtacataagcatccatggatggatggatgccttgaaacacgtttcactggaacaaaaggtcaagaggtagcgtatatatatacgtgcgtgcgtacgtactatgacgacgcatgctgtgtgagaacgtataggcttgattcacgtacagaacggcctgaagcagcatgaggagtatatatgatgtcacagcgtgcaccatcatagttactggagccagccggagttaggcacgctacgtattgggctgtctcccccgtgagcacagcgtgggtgacagcat

SEQ ID NO: 118693 - DNA, 347 bp, Zea mays
  Clone ID: MRT4577_39733C.1
gcttgcttcaaacttcagaggctagaggcaataggtctgtctccctgttctggggaaagccatggaacaagagcaaaccccaaagctgcccctttatccgcacaccaagcccagtcctggagggcacctgctgttttatcccacctcgatcctagactgcacaaacgacccgaaccaccctgactccacaagcaccctctgtaactgcatcagctgctccgagcaggacttctttaaccgcagcaccaccctgacggacaaccacctccgcatcgtcggcgccaaggactactacatcgagagcctagactacgagatcatcgagaacgacctgtttaagcacgact

SEQ ID NO: 118694 - DNA, 258 bp, Zea mays
  Clone ID: MRT4577_39734C.1
ataggattcagcacgccgcccgttgggaagggtagcttctgaggcggcccgtcgcggagcgtctgacgggcgagctgagccaatggcacgggcccttgtttcgcgaacgccttaacgtaggtcgtggcggttggctagcaaaggcgccggttgctagcttggattctgacttagaagacgctagtcataatgcggcacacgacatgctcaacgcgactggctgcttaaccaagcgcgacgaccaattgggagaatcaa

SEQ ID NO: 118695 - DNA, 226 bp, Zea mays
  unsure (1)..(226): unsure at all n locations
  Clone ID: MRT4577_39735C.1
ttgggttttttttttttatttttttttttttttttttttttttaaaaatctttaaaaccaaaactttattatgatgcctatattattggccataccacacatgaaaatggggggcggcttactgcgttattacctatatagatagagaggggtggatagaggggatttccccaatattatgaatcantantagggcggaatggcaccggaaaccccacaggggttg

SEQ ID NO: 118696 - DNA, 3249 bp, Zea mays
  Clone ID: MRT4577_39736C.1
tcgaggcccggccggggccacctcgaggaaaaaaaagacgatacatttcgcctccccggatctatctcgccgcgccggcgcgctggtgacccgccgaagctaggaggcaatcgaggcggacgaagcgctgcaccaaattcgacgggggatcgagcacaggaggcgtagcggaaaatgttcaagttcctcaaggaggtggtcgcgggatccggatcggggctcaaggacttcccctacaccatcggtgagccctacgcatcggcttggggctcatggaaacaccaccgcggtacctccaaggatgatgggtcgcctgtgtcaattttttctctgtcagggagcaaccctcaggacagacacatggttgctggtcgcaatggtgttaagagattacgaacagtgcggcatccaaatatcttatcctttttacacagtactgaagcagaagctgcggatggacctgccatgaaatacacaatttatattgtaacagagcctgttatgccactttctgaaaagctcaaggaactgaatcttggtggtacacagagagatgagtactttgcatgggggcttcatcagatatccaaagctgtgagctttctcaataatgactgcaaacttgttcatgggaatgtatgcttagccagtgttgttgttacacaaaccctggattggaagcttcatgccttcgatgttctgtcagaatttgatgctaacaatgaagcctctggtagccccatgctgcaatttgagtggttagttgggatgcagtacaagccaatggagctgtcaaagtcagattgggcttcaattagaaaatcacccccatgggccattgattcttggggactagggtgtttaatatatgaactattttctggtgcaaagctggctagaacagcacgccttcgaaatactgcttcaatcccaaagtctctacttccagattaccagaggctcttgaattccacaccttctcgtagactaaatccttcaaaacttattgacaacagcgagtttttccagaataagttagtagagactatccagttcatggaaattcttaatttgaaagacacctttgagaaagacagttttttccggaagcttcccaatatagctgaacagcttccccgtgagatagtcctgaaaaagctgctccctgtattggcttcttctcttgaatttggttcagctgccgctccagccttaactgttttgttaaagatgggttcctggcttcctgctgaccaatttagtatcaaggtcttgccaactattgtcaagctttttgcctccaatgaccgagctatccgagcatgtcttttgcaccacataaatcagtttggggaatcaatgtcagctcaaattgttgatgaacaagtttttcctcatgtagcaactggattctctgatactgatggtactattcgtgaactgacattgaagtcgatgctcgtattagcaccaaaattatctcagcgtacaatctcaggatctctcttaaaatatctctctaagctacaggtggacgaagaacctggtatcaggacaaacacgacaattcttcttggcaatattgcaggctacatgaacgatgggacaaggaagagagtgctgatcaatgcattcacagttcgtgcattacgtgataccttccctccggccagagcagctggaatcatggcactgagtgtcactagttcatactatgaaatgacagagattgcaactcgcatcctgcctaacattgttgtgctcacatttgacccaaatagtgatgtccgaaccaaggcttttcaggctaccgatcagttcttgcaaatagcaaaacaacaccatgaaaagcttaatacgggagacaacagtgtggctgaaagtactggtgttaagttaaagcctggaaatgcaggtttacttgggtgggccatgagttctgttacacaaaagggtaaaccttctgaccatgccccaatatctactgcaaatgccaataattctcaagcatcaacaacctcgactgccactccagacactcaggcttccacactagcgtatgcaccatccacatccacctcgcttgatcaagctgcatcagcatcagcaaggtcgtcagtagatgggtggggtgagcttgaggatggtaatatccatgaggagaatagtagcgataaagatggatgggatgatgtagacccatttgaggacaagccatccccatctcttctatccaacatacaggctgctcagaaacgtccagtggtgcaaccaaagcaaccggttgcaaactcatctaaaccaaacccactgaaagcgccaaagtcagaagacgatcctttgtggggtcctatagctgctgcaccacctaaaagtgcagtaaaatctgcagacatcaagccatcaacatcacataatgatgaggatgacctctggggttcaatagcggcacctccaaaatcatctgggaagcctttgaagccagctgtagcgaatagtgacgacttatggggtgccatcgcagcacctccaccagcaaccaaagccagacccttagcctcgtcaggtaggggccgaggaacaaagccagcgcaaccaaaacttggtgctcaaagaataggaagaacatcttcaactggaatgtgacgtcttatgatatcaagtgttgtacaagaatgcaaagttttcctttttttcccctgccttgcgttgagtctgtccaggatgacattctttgtaaactagtaaaaagatttatgtatatgagcacagttttgaccaatgtattagtattattttaccattgtgtattaaaatagatccagaagatttttgtacatcacagctgcagtcatcttgtgtccatattattaatatattgctatgtcttattttgacacatatattgtagacagaagaaggaagggaaattaaagacatattgtagagtgtagacagaagaagcaagggaaattaaagataggaggcactagtctatcttgggttttggctcatcaccaaactcaagcccaacaggtctctgatcaccaatctgctgtataccctgtgctactgcatacctactactaggtcattgtgcaatgcctgaaagaaacacaacactaggatattaaattgattgtcttgacctctagggttaatggtgctgtatatttatacgggcagaaactgattattacaaggggaatcctactcggttacaacaaaaaaaaaaaaaaaaaaaaaaaa

SEQ ID NO: 118697 - DNA, 256 bp, Zea mays
  Clone ID: MRT4577_39737C.1
atcattgatcgggagctaaattatgttttacgggcgaccccccacctcaatatatcggggagcttcaaaccacacggacatacttaccgggaggccccacacatactaggaggaggctttttgtataatcaggactgttttccaactacgcaaaatctctgatggatgcattgacacagacaagtggtaacagcatgacctcaacgctcgctgtataatcacatgcgacctgcttgccggttcaagtgaagacttc

SEQ ID NO: 118698 - DNA, 582 bp, Zea mays
  Clone ID: MRT4577_39738C.1
aagcgtagaaccaaacagccctggaacaacaccaccaggtgccgaacatggagtattaacaatcagggatgaagcgcagtgtattagatcaactccaatctctactattataatgtatcggtttcgtgcaggaatagaattatacatgaaactgtttccaccgtcaccaaccaccaccccacaaacagcgccaccatccaatgtcctgctcgtccaaaaccaccgaccctaagacagagctgccatacaacccccttcacggcgcatacggcgagcaacaaacccccgcaaacaccgccccatgccccaacacagactccgagctcctcagcatgcgcctccgagctcttcagcgtcgcgccacccatggggctcgcctctcagaccccgacctgaacctacacgttgtcgcactctaggcccagcacagactcggtggtcggcgccagcaccgcaggtgtcgtccgcgatgccagctcaagaagaagtccaaggaggcaggccacgacggtggaccctcagctgctatggataagtacctgcagatgtaccatagattggaagaccgcgcctaagctgccc

SEQ ID NO: 118699 - DNA, 137 bp, Zea mays
  Clone ID: MRT4577_39739C.1
gtgcagtgatagcattccccctttgcacgcttcgctgctcgttcttccgatgatagccgtttccatcgaggccgggtcgaagagcctacctaagatggcgtgctgttacacgacctctaggataccaaactcttccc

SEQ ID NO: 118700 - DNA, 299 bp, Zea mays
  unsure (1)..(299): unsure at all n locations
  Clone ID: MRT4577_3973C.1
caaagtcccggtcgacccacacatccnnaantattttctntctcctacagcattaacatttccaaatanacccatgtccggtcaaaaactatttggtgtcgattacccacannacnantncactnaanctctnaatctnnatnatccctatattaaancatactcacgccnaattacttctctaaaataacttnnaaaacttaantanccaattnatnattcttaattttctatcantctttatccaaacaattcatatctaattaatcattattcttatataaaaccttttcacattt

SEQ ID NO: 118701 - DNA, 1535 bp, Zea mays
  Clone ID: MRT4577_39740C.1
cagaggagacaaagaatatcgtgtgtaatgaaattgtgagtgcatatgaactggatggccatccggattatgattattgctatggagatattgtcgttcgcttgccgcctgtctcacctgtaattgaatcaaccaataacaaggatcaaatggaactagataggacggtcgatgcctcggaaggatttgctgcctcaaatgatgcaccctctaatactagtgcaagtgaacaacttttgcagaaggaatcctgctcgcagtttacaagcctctcatgggctggaaatatagttggctttcaagacggtgagattgaagtcatttggggtgatgggtcgatttcaaaggttgggcctcatgaaatatatgttgttggccgtgaagatgatgatgcctcactagatgacggaacagcctctgatggtgctagctgggagactgttgatgacaatgaaatggatgtacttgatgattctgcaaagggcacgggtggaagaaagtgggtaaaaaaagtacagcaggaatggagcatacttgagaagaacctaccagactatatttatgtcagagtctttgaggatcgcatggatctcttgagagccgtgattgttggagcaagtggaacaccctaccaagatggcctgttcttctttgatttctaccttccacctgagtatccgcaagttcctccgtcagcatactaccattctggtggtttgcgtgtaaatccaaacctgtatgtggatggaaaggtttgcttaagtctcttaaatacttggaccggcagagggaacgaagtgtgggacccatcatcatcaagtattctacaagtactggtttcacttcagggattggttctcaatgaaaaaccctattttaatgaggctgggtacgagaagcaagttggtactgttgaaggggagaagaatgcagtgccgtataatgagaatacgtacctgctgagcgtgaaatccatgctgtatatattgagacggcctcctttgcattttgaggattttgtgaagagccatttccgcaagcgtggccactacatccttaaagcctgtgaggcatatttgcaaggaaatgttgttggcactctcactgacgacgcatgcaccaccaacagaagcacggagcactcgagctctgtcggcttcaagcttgcactagcaaagattttaccaaggttgattacagccctgaaggagcatggagctgattgcgaccaatacgagcaccttggcaaaacagaccccgttagagagagctgatcattgagtgacttgtacttggatcttttgccttttatatctgttcttttttcgggtttcagaaaagatggtgacttaataccaccaggctgttttcgtataaatgtacattcaaagtttgttgtttccgtcaaacatttggaaaatatggccccaaatgatttattcgatacatggagccgagctaccctgtacagttgcgccgtgtttggttcgatgtaatgtaacgttatcagatttcttggagtattcgataatgtt

SEQ ID NO: 118702 - DNA, 408 bp, Zea mays
  Clone ID: MRT4577_39741C.1
tcgtcccgaccctctacagtgagtcatattagacgtcgagcatgcggcgttctcaccttcgcacatggtacccgggatcgacgtctcgaacgatcgcatgctccagggtcgtctgttctcctaccccgacacccaccgccacgcgtctcggcgccaactacctgcagctgcccatcaaccagccctaccgtgctcgcgtggcccatcaccaacgggacggtccatcgacgttctcacaaaactttaatgggtcccccaactatgagccccaatccgtggatccctcgggtccggtccagcagcttcaggatgtgacggccaagtactcgcccgtgagtctgaatgggaccacgggtcggtacccgcatcgcagatccgaggatgactttgtgcagcctggaaatttgt

SEQ ID NO: 118703 - DNA, 256 bp, Zea mays
  Clone ID: MRT4577_39742C.1
atcagagctaacactttgagctgaccatggtcattcgcactggatctgttaccatacacagccagctattagaacgtcgggcttggtgttgtgaagttaataccatggcagagccttaaggtgtgggttaaaccaagatactgacggtgacaggaagctaagggaatgtttagaattagacaccctgaacctgactcacaaccgatggccattggcattgagaaagatgatgctgcttgtagagccaccttgcatt

SEQ ID NO: 118704 - DNA, 3906 bp, Zea mays
  Clone ID: MRT4577_39743C.1
cggacgcgtgggcgtgacgcgtgggcggacgcgtgggtttttttcctctcctgcgcctcgccaccgcttcctcttgtcgcccgcctctctcatcgaccctaggcgcgccgcctcgccgccgccgatcccgcagccgtcgatcctggccgctccgatagccggtcagtccgtccccatcatcccctcgctatcgatcgcctccgacttgcgtggttttccggcgcttgcacggccgcgacgcgactactcttggagtcatagttcgtggattgtcaatcgaaagagggctacttgattgtttggaatctacttttatagttgattccaagcatggaaagtctaccaaatggttcagtaaacaatgcggagcataaccaggaaaacaagaagtccatggatgctagtgtgcctgaagaagtacaagatgtttttatttacagagaagatgttgtgagcttgaagtccaaggaggatgtccgtggattagttttagaggtagctggggaatatgattctgaaggtagcatcactgatgatgatattgatactgaggaacatgaagataaaactgttcgtggagcagaaaatggtgctgctgatggtgataatgctagtaatggagctgaagttgaaagccagagttctttgccggataacaaagttcgagtgttatggcttgatgatagtgaaaaaacagaagacattgatgaggtagttgttgttgatagaagtttccttcatggtgatttagttgcctctgcctcagatccaactggtcagatggggcttgttttggatgtcaatcttgtggttgatttgcaaggtgtgaatggcgatatgataaagggtgtttcttccaaggatttgagacgaatcagggaattcaatgtgggtgattatgttgtctctgggctatggcttggtcgagttgatgaagtgctcgatagtgttaatgtgctttttgacgatggctctgtctgtaaagtcaatagagcagatcctatgtgcttaaagccagtatttggcccaatgcatccagatacagattgtcctttttatccaggacagcgtgtgaaggcagtgtcatcatctgttttcaaaacatcaaggtggcttaatggattgtggagagcaagtcgtcttgaaggtactgtcacaaaagtggaaagtgtttctgttatagtctattggattgcatctgcacactttgcttcagatcagcaacctgttcctccagagaagcagaacccaaaggaccttactcttctgtcttgtttctcttatgcaaactggcaattaactgactggtgtcttcctcaccgatacactttatgtactaatgataccgtgattaattctgataagcatacaggtcagatctgtacatgcccagaaagctcagttccactgtctgatattccagaatctcaagctgatgttcagactgaacaagatcaaatgactgatacagatgcaggtcataggcaaatagatgttgattctactgcagatggattgagtatgtcggacggagataattcatgcatagccaaagaatcagaaactagtgtatcaagcattctaaaggagccacaggacaatgcaacatctaggaaaaagcttaggaaagtgtccctaaaaaaacataaaagaacgaaaaaaagagacgacagctttgagcgagctctactcattgcaaatacttgtaccaaagttgatgtaatctggcaggacgggacaaaggaatgtggggtagccgcaacagcgttgatccctatccacaatccaaatgaacatgagttcttccctgagcagtatgttgtggataaagtcacaaatgatgttggtgttgatgattcttctgaaccaaggcgtgtgggtcttgttagaggtgttaatgctaaggaccgaacagcaactgtgtcatggtttaagcctcctctacatccagaggagccaaaggagatcgcatgtaacgaaattgtgagtgtatatgaactggatgtccatccagattatgattattgctatggagatattgttgtccgcttgccgcctgttaaaccggtaattgagtcaaccaatagcaaggaacaaatggaactagataagacgttcgatgcctcggaaggatttgctgcttcatattctgcaccccctgatactagtgcagacgaacagcttttacagaaggaatcctgcttgcagtttacaagcctctcttgggctggaaatatagttggctttcaagacggtgagattgaagtcatttggggtgatgggtcgatttcaaaggttgggcctcatgaaatatatgttgttggccgtgaagatgatgatgcctcactagatgacggaacagcctctgatggtgctagctgggagactgttgatgacaatgaaatggatgtacttgatgattctgcaaaggatgattcacaaagcatacctgagaatagcattgaaagggaagatggttcattcagctcccagaatggaagttctgttgcaactggtcccctttcagttgcttttgggtttgtgacccgactagcgagtgatctcttcgctcgaggtagaaggcatttagatagatcgtcaaactcggatgctatggatgaagttgagtctcaccagtctaatgaagtttcagaaactagtgatgacattgataagattaatgagaataatgtggaatcgccagaggatgctgcagtaatagaaaacgattcttctgtcgagaagtctgtagatgtggtcatggctgataatcttgtagatttggaatgtttcaaacactttgatattctgcaatgtcctccagaccaccattaccttgaaaacatagcccagggcacgggtggaagaaagtgggtaaaaaaagtacagcaggaatggagcatacttgagaagaacctaccagactatatttatgtcagagtctttgaggatcgcatggatctcttgagagccgtgattgttggagcaagtggaacaccctaccaagatggcctgttcttctttgatttctaccttccacctgagtatccgcaagttcctccgtcagcatactaccattctggtggtttgcgtgtaaatccaaacctgtatgtggatggaaaggtttgcttaagtctcttaaatacttggaccggcagagggaacgaagtgtgggacccatcatcatcaagtattctacaagtactggtttcacttcagggattggttctcaatgaaaaaccctattttaatgaggctgggtacgagaagcaagttggtactgttgaaggggagaagaatgcagtgccgtataatgagaatacgtacctgctgagcgtgaaatccatgctgtatatattgagacggcctcctttgcattttgaggattttgtgaagagccatttccgcaagcgtggccactacatccttaaagcctgtgaggcatatttgcaaggaaatgttgttggcactctcactgacgacgcatgcaccaccaacagaagcacggagcactcgagctctgtcggcttcaagcttgcactagcaaagattttaccaaggttgattacagccctgaaggagcatggagctgattgcgaccaatacgagcaccttggcaaaacagaccccgttagagagagctgatcattgagtgacttgtacttggatcttttgccttttatatctgttcttttttcgggtttcagaaaagatggtgacttaataccaccaggctgttttcgtataaatgtacattcaaagtttgttgtttccgtcaaacatttggaaaatatggccccaaatgatttattcgatacatggaaccgagctaccctgtacagttgcgccgtgtttggttcgatgtaatgtaacgttatcagatttcttggagtattcgataatgtt

SEQ ID NO: 118705 - DNA, 323 bp, Zea mays
  Clone ID: MRT4577_39744C.1
gtggggggacccaaaccgccctaaagggaaacctcaaatttggggcccggggaagccccccgggggggggggggaacccaaaggcccgccgggaaaaaaaaaatactgggggacaaaaaatttggggggcccgttcaaataaaagggtctgaaaggggccacccggaacataaaaggggaaaaaaataagggcggggggggatttggaaaggtttatttgggggaacccccggatttgggggggccccttggggggagaaaatgtaacggggggggggggtttaaacaacacaggcagaacccaaggttgtataaaaagtttt

SEQ ID NO: 118706 - DNA, 736 bp, Zea mays
  Clone ID: MRT4577_39745C.1
tgtaaatgtctgggcttatcacagtggaaggaagatggtctaccttaaccctttcactggggataccagtgagcagcatctgctcgataagagaaatgggatgtgggtaaagttcttcaatttcacccttctgaagagcatggatgaggatctggcagaagaagctgatgatggcatgcatcctggaaacgagcagtggctgtggccattgactggtcaggtgttctggcctggtattgctgatcgggaaagggaggagaaatacattaaaaagctggataaaaagctcaagaacaaggtgaagttacttgaaaggcagaagtctggttacaagcagaagcccctgggacaatgaccatgactgaagagctaacaattcaagatttttttccttgccacgtccggtgcatgcacgtggaagaagagttggagcacaaaaggcaccgctgttgtgaatacgcattctttctacacctcattgatctccctctccaaagatgtttggtgagtctggaggatattgtcaggatggaaaagcaccattttttttcctgttcgtataaacagattagataggatttgtttggttcgctgtctaatttaccacactttgtctaacttttttgtctaagtttagtttttcgatttaaacgactaaccttatgtaaagtgtgacacagttagccacgaactaaacagacctgtaatgcgccatatagttgaactgattcttttc

SEQ ID NO: 118707 - DNA, 137 bp, Zea mays
  unsure (1)..(137): unsure at all n locations
  Clone ID: MRT4577_39746C.1
ctaacagattattgataagacataggtgacagacgcacaacatctacagttataataaatacgtcaaaatgatgatagattgactanagattagacttttgacaatagtgacagacatagaggcccaaagtacctat

SEQ ID NO: 118708 - DNA, 586 bp, Zea mays
  Clone ID: MRT4577_39747C.1
gacgctttcgacatgggcggcggcctcatagcgccggacagggccatggaccccggcctggtgtacgacatccagccggaggagtacacaagattggacgaccgcgccgaccgcctcaacctcccgtccatcgccgtgtccgacctcaagaactccgtcacggtctcgcgcaccgtcccccgcgtccgggccggcgaaggcggcgacgtaccgggcggtggtggaggcgccggcgggggtgacgatgagcgtggagcctccggtgatcgccttccagaaaggtggccctaggaacgcgacgtttaaggtgaggttcatggcgaagcagagagtgcagggtggctacgcgtttgggagcctgacgtggctggacgacggcaagcactcggtgaggatccccgtagccgttcggaccgtcgtccgggacttcgtcgctgatgtatcttgatgatcgagttcgttctgggcaggatgtgtgttccacgttgttgatttgctgtgtttgtctcgcggcgccgattcgatcgggttcttgtaataagaaagatggcgtggaaacacttgcatacaaataatgccctcttgc

SEQ ID NO: 118709 - DNA, 484 bp, Zea mays
  unsure (1)..(484): unsure at all n locations
  Clone ID: MRT4577_39748C.1
tctttccacgcgaacgcccacgcgaccggggaggctttacttacgagggcccaagcaagacgagcaaacagccaaccaaggcgggaggcaagaccaccggcaaagccgcgcgcagcaggaagcgcgccgaggcaaccggccccaagcgcaccagggacgggagcgcccacaccagaagcgaggccngcaacaaggacgagcccgacggccccaacgacaggcacagcagcagcctcgacgagaagaacaggaggacgctcgaggcgcagggcgacgagaagaccggcgaggtcgccagggcgggaccgaagaaggcccccgccaagggaggggggaacaaggacgccaagcgcaagcgctcgaccaccggctgtttccttttaatggaccacttcaggaaggagttcagggtcacccattctgacaacaagaatgtcgttaccgttcaaaagaaggaggggagaggtggaagccatgacagaca

SEQ ID NO: 118710 - DNA, 281 bp, Zea mays
  Clone ID: MRT4577_39749C.1
tgctcatgcactgattgtacgtcgctagctctctgcgctggacacggccgtggagctggagctcacaggataccggggtccccgccttcacggaaggtacgaagtggacatctttacccagcatctcatcactgtccgtgcccgctgcaagtacagtcacaaggacatagtatctgatggtttgcgaaactcgctggggcaggagaaataccgcaaggacctgactgtgcccccaggctgatgcacagacttcctgctgtgcgccactgctctagtgctgt

SEQ ID NO: 118711 - DNA, 328 bp, Zea mays
  Clone ID: MRT4577_3974C.1
atcttcaaacaatatatgggttcttcataaattgtgcattcgctcttagcgagcccaattcatctttcatgaggggcacccgaacttctttacaaaatgatggacgcctggggggcacctcacacactgaaagacccaccttgtcgcatgtgaacatatgaaacgattcactttaaaacaaccggacacaaaatggcctcactggctaccaatacctgatactgaggtcccacccaatccttcccttaaagacagttgctaacccgcgaaccacacaccaggagagcacaggcatcctttgtggtatccgccccgcgcaagggactgt

SEQ ID NO: 118712 - DNA, 2923 bp, Zea mays
  Clone ID: MRT4577_39750C.1
ttgggtacctcgaggccggccgggaggtcccgcctcacaccacctcacctcatcactacctcacccacccagccccccaagaactacccatcagccatggcgccgccgtcggtgtccgcctcccacctcctaatcaccgcctcgctcccaaagcccaagccttcctccctccgcccgccgcggctccctgtcgccaagcccctccccgcatcggcggcgctcctggcgctcgcggcctcgcccgcgctcgccgccgacgcgccggcgcctgcccccgccccaatccccgcgccggcgccggagctccaggccgaggcgcccaccccgaccgtcaaccccttctccagctccctcctcacggcccccaagccctccgccgcggcctccgacctccccgagggcgctcagtggcgctacagcgagttcctctccgccgtcaagcgcggcaaggtcgagcgcgtgcgcttttccaaggacggcggtctgctccagctcaccgccgtcgacggccggccgcgccaccgtcgtcgtccccaacgaccccgacctcatagacatcctcgccaccaacggcgtcgacatctccgtctccgagggcgagtcggcgggcccgggcggcttcgtcgccttcgtcggcaacctcctcttcccttttatcgcgttcgctggcctcttcttcctcttccgccgcgcgcagggcggggcccggcgccgggcctggtggcctcggcgggcccatggacttcggccgctccaagagcaagttccaggaggtgcctgagacgggtgtcaccttcctcgacgttgccggcgcggaccaggccaagctcgagctgcaggaggtcgtggatttcctcaagaaccccgacaagtacaccgcgctcggagccaagatccccaagggttgtctcctcgtcggcccgcctgggaccgggaagaccctccttgcgcgtgccgtcgctggggaggccggggtgcccttcttctcctgcgctgcctctgagttcgtcgagctcttcgtcggtgtcggtgcctccagggtgcgcgacctcttcgagaaggccaaggccaaggcgccctgcattgtcttcattgatgagattgatgccgttggaaggcagcgcggtgccggacttggtgggggtaatgacgagagagagcagaccattaaccagctcttgacggagatggatggcttcgctggcaacagcggtgtcattgtgcttgccgccaccaacaggcccgatgtgctggactccgcgctcctacgaccagggagatttgataggcaggtcaccgttgacaggccagatgttgccggacgcgtcaagattcttgaggtccactcccgaggaaaggctttggcgaaagatgttgattttgataaaattgctagaaggacccctggtttcactggtgctgacctccaaaacctcatgaatgaggctgccatccttgctgctcgccgtgatcttaaggaaattagcaaggatgagatctctgatgctcttgagagaatcattgctggccctgagaagaaaaatgctgttgtttccgaggagaagaagaggctcgtcgcttaccatgaggctggccatgcccttgtcggcgccctcatgccagagtatgatccagtagccaagatttccatcatccctcgtggccaggctggtggactcacattctttgctccaagcgaagaaaggctagaatctggattgtacagcaggagctatcttgagaaccaaatggctgtagcccttggtggcagggttgctgaggaggtgatctttggccaagacaacgtgacaacaggagcttccaacgacttcatgcaagtgtcacgtgtcgcaaggcagatggtcgaaagatttggattcagtaagaagatcggccaagttgcgatcgggggaccgggtggaaaccctttcttggggcaacagatgtcaagccagaaggactactctatggcaacagcggatgttgtggacgccgaggtgagggaactcgtggagaaggcctactctagagcaaggcagataatcaccacgcacatcgacatcctccacaagctcgcccagctcctgatcgagaaggagaccgtggacggggaggagttcatgagcttgttcattgacggccaggccgagctgtttgtcgcttgagatgtcacaaggcttgcggtgcgtatgcttttcggtgttttgtgtcagagcgagcaatcacaaagcaatggagagcccagcttgtaggaaccacatcgatgtatagtagttgatacgcatgtactgactaatttgagcaagtaaaatgttactgctcacaattatagcacacggttcatctgtgaaaacaaatatgatcatctcgtgctaatgggctttattaggctatctccaacagatctactatgccttccggtaaattaatcttaggctcaatattaggagtaacaagagaaatatcagtacattgaattgcttcttgaattcctccatggccaaagccaaggttgggcaaaaaaaaaaaaaaaaaagcaacgtctcgaaacttctatcacacgtcatccggcatagataacaagctgaagcagcattatcaaacttgctctcatggtatgcatttaagtgctagatgattgaacccttcgacttaatcctcatcctcaacaaccttagttcccaaacctttgagaccctccggagggatctcagctactgtgaccagagagtactgccctccttggcgtcttcctcgtcgttgtcgacgcggcctattttattcgcatccagaagtggtacaacatctacaaggaccacattaccctcaaggactacgaggtccacgacggcatgggcctcgagctctactacaactgagccgccggccctctcttcctcttgtcaggtacttgcagtagcag

SEQ ID NO: 118713 - DNA, 790 bp, Zea mays
  Clone ID: MRT4577_39751C.1
gcacgagagccgccgttccgttcccttgtcctctataaaattgggtacctcgaggccggccgggatcgtccatccgtatttccgtcacaactcacaacccgagccccccaaacccgaagcagcaggagctcccctgaccttgctccgcctccgatcaaggaaaaggaagatgagctactacggccagcagccccccgtcggcgtcccgccgcagcaaggctacccggggaaggacggctacccgccagcggggtacccgccggccggctaccccccgccggcgcagggctacccgccgcagggctacccgcagcagggctacccgccgcagtacgcgcagccgcctccacagcagcagcagagcagcgggccttccttcatggaaggatgcttggctgccctctgctgctgctgcctcctggacgcctgcttctgacggaaccatccgtgccgggtccaacacggctgcaagtgaagcaaccagcttacggaagagctggaactgggccgtgctattctagctttgtcctgcgttatcgccctcttttcttttcttttctttttttttctctctctctctctctctgttataagactactggtactctgtcgatgtcgattggattagactagggctggtgtgtattctgtggatgctccgtgtttctggtgggattcaagttcaaacctgggattattgtatttcttctaaaaaaaaaaaaaaaaaaaaaaaaaaaaaaaaagtaaaaaaaaaaaaaaaaaagctgcctgctgttttgttaccactgct

SEQ ID NO: 118714 - DNA, 741 bp, Zea mays
  Clone ID: MRT4577_39752C.1
gccggccgggctgtcgaaggaaacctgcgcaccgccatcaccgccgccgcagcctctgttcccacagacgcctctctcctactcccaaccccaatcaaacgcaccgctgaatcgcctgcagtagctggagcgcaccttggtgcgatcctaccacacctctgagctcacgaggaatctttaatggcgtcggagtggcatcgccagccatagcagcctggctggctgaggtgcaggctgccaggctgccgaggcgatcacttgccaaccctctgctctccttttctaggcgcactgtcttgctttgatgcatacggcaccacagatgaatgcccggtctcggaggccggcggcggcgcgcggtgcgaaagcgcccccgaagagcgacagcagagtgacggagacggatccgaggaagaccgtgacgccggtgaagggatcgggcaacgccggtaccaggggcaccatgaacaggatccagtcgaggagagagcgaaagctcgcgctacagcaagatgtcgttgaacttcgatttgtcggattcagttgctccctgtagctcgttctgacgcttgcttgacggcgctgaattccaggtggataagctgaagaagaagctgcggcacgaggagaacgtccaccgtgcgctggagcgggcgttcacgcggccgctcggcgccctacctcgcctgccgccgtacctgccgtctcagacgctagcccttcccgcggaggtggcggtgc

SEQ ID NO: 118715 - DNA, 155 bp, Zea mays
  Clone ID: MRT4577_39753C.1
ttcccgttttccccccccccccttttttttttcacgtgccccgaaacatcagacggggatgtttgacaaaccacgggcgcaaggtccaacctaactgagctcgaacccatcatttactgacaccgaaaaccatgaatcgagcaaccataccgtgg

SEQ ID NO: 118716 - DNA, 705 bp, Zea mays
  Clone ID: MRT4577_39754C.1
gccggccgggttggggtccatccgtatttccgtcacaactcacaacccgagccccccaaacccgaagcagcaggagctcccctgaccttgctccgcctccgatcaaggaaaaggaagatgagctactacggccagcagccccccgtcggcgtcccgccgcagcaaggctacccggggaaggacggctacccgccagcggggtacccgccggccggctaccccccgccggcgcagggctacccgcagcagggttacccacagcagggctacccgccgcagtacgcgcagccgcctccacagcagcagcagagcagcgggccttccttcatggaaggatgcttggctgccctctgctgctgctgcctcctggacgcctgcttctgacggaaccatccgtgccgggtccaacacggctgcaagtgaagcaaccagcttacggaagagctggaactgggccgtgctattctagctttgtcctgcctgcgttatcgccctcttttctttttttttctctctctctctctgttatgagactactggtactctgtcgatgtcgattggattagactagggctggtgtgtattctgtggatgctccgtgtttctggtgggattcaagttcaaccctggggattattgtatttcttctacctgtcgcatggatgcgtttctttgctgctaaaaaaaaaaaaaaaaaggccccta

SEQ ID NO: 118717 - DNA, 405 bp, Zea mays
  Clone ID: MRT4577_39755C.1
gacgcgacgccgacccgatcaggcggaggggccggtgcgggcgaacccgactcgcgcggagggcatgcatgccgcacggctccgctcctcgcgccgcgtgcgcggcggtggcgatgactcagagcgatggaccacaccaccgcactgaggaacgccccaaggcgtacctgtagaaccgcccgccgacgtcgtggggggagacgcgttgtggtttatacgggagcggccctgttacatgacctacttgctcaccgtcagcatactccgccccgacctcaacgccaagccttgactgacgaactatacctcggcgcacgaaaaagagatgaaacgcctcaagcagcaggagctagcaaacgactccgaaggcgctgactcctgagccaacgccgagtgatgcggtgg

SEQ ID NO: 118718 - DNA, 837 bp, Zea mays
  unsure (1)..(837): unsure at all n locations
  Clone ID: MRT4577_39756C.1
gaggccggcnncgggctcgcgaaaaaaaaaaaaaaaaaaaaaaaaagggtccaaacgtattcccgtcacaactcacaacccgagccccccaaacccgaagcagcaggagctcccctgaccttgctccgcctccgatcaaggaaaaggaagatgagctactacggccagcagccccccgtcggcgtcccgccgcagcaaggctacccggggaaggacggctacccgccagcggggtacccgccggccggctaccccccgccggcgcagggctacccgccgcagggctacccgcagcagggttacccgcagcagggctacccgccgcagtacgcgcagccgcctccacagcagcagcagagcagcgggccttccttcatggaaggatgcttggctgccctctgctgctgctgcctcctggacgcctgcttctgacggaaccatccgtgccgggttcaacacggctgcaagtgaagcaaccagcttacggaagagctggaactgggccgtgctattctagctttgtcctgcgttatcgccctcttttcttttctttttttttttttttctctctctctctctctctgttataagactactggtactctgtcgatgtcgattggattagactagggctggtgtgtattctgtggatgctccgtgtttctggtgggattcaagttcaaacctgggattattgtatttcttctacctgttactctgttgccgagcacatttcgcttgcgtacatgattcgtagcgctccgtaggatgttcgactgtagcgcaatttattcggatcgacttatttgacctggcattttggacgaagtcttgttt

SEQ ID NO: 118719 - DNA, 294 bp, Zea mays
  Clone ID: MRT4577_39757C.1
caagctagctggccgagcagcagatattgaaaacatatacacataaaagacgtacgtacaggcagtcttgaggagaggccaaagcaacaaaaaaaaatggcagctctcgccgtggtcttcgccatcaccgccatcagcggcgcggcggcggcggccgacgatgttgcgtcttctacggccgctagaaatttcacggtagcgtctcctcccgcctctccgacgacgacgaccagtggtccggtgacgtacgtgttcggcgactcgatgtcggacgtgggcaacaacaactacttc

SEQ ID NO: 118720 - DNA, 245 bp, Zea mays
  Clone ID: MRT4577_39758C.1
tgttgctgtcgggtggattgaaatttacagaactacaaatgcttccagagcttgtgatagctacttgtatccatcataaaaaaatgaaggctttagacctgtcattggataccctaacccgttccacaaattcacactcatgtgatttgggttgggtatgggtaactgggtaagtaacttgctacccctaggatcaagggtaagtatgggccccgccatttctacacgtaatcgcgacagcaacg

SEQ ID NO: 118721 - DNA, 595 bp, Zea mays
  Clone ID: MRT4577_39759C.1
ctcccctgaccttgctccgcctccgatcaaggaaaaggaagatgagctactacggccagcagccccccgtcggcgtcccgccgcagcaaggctacccggggaaggacggctacccgccgcagggctacccgcagcagggttacccacagcagggctacccgccgcagtacgcgcagccgcctccacagcagcagcagagcagcgggccttccttcatggaaggatgcttggctgccctctgctgctgctgcctcctggacgcctgcttctgacggaaccatccgtgccgggtccaacacggctgcaagtgaagcaaccagcttacggaagagctggaactgggccgtgctattctagctttgtcctgcgttatcgccctcttttcttttttttttctctctctctctctctgttatgagactactggtactctgtcgatgtcgattggattagactagggctggtgtgtattctgtggatgctccgtgtttctggtgggattcaagttcaaccctgggattattgtatttcttctacctgtcgcaaaaaaaaaaaaaaaaaaaaaaaaaagtactctgcgttgttaccactgctt

SEQ ID NO: 118722 - DNA, 1112 bp, Zea mays
  unsure (1)..(1112): unsure at all n locations
  Clone ID: MRT4577_3975C.1
atttctccatccccgtcccctcccgacccgctctgccgttcgctgtttccatcccgccgacccgctgcgccaccgccacgctccccaatctccatcccaacgcgacgccgcctctaatctccctcgcttccgctccactccgcacccccggtcgcctgccctaacctcgtgctgctcgtgatcccgccccgtgcccagatctggtggcgccttcgccgcttgagcgcccccgctcagcggtgaagtgcaggcgtacgttcggcctgcgggccggccgatggtttcggccgcggcgcaggcgggcgtggtcgcgtcgtgcgtcgtgcgtgctcttcgtccccatggggctggccggccggcacctcagccgcaacaaggtgctcttcttctccggcgcgctcttcatctcgcttgctgtcgggatccacctatccccgtacctcccttccctttccctgccccaccttgcctcctttttactcctcccccaccctgtctctgcgtccgcctcctctgggtcttcctgcgtccagttcctgcaccgcgtctcgtggtctaacgccgccggagccgctgacaatggctcgggaggcggaaaagcgcgggcgtggtcgtggccgccctcgctggcgtccgcctgcgggttcgctcgactgtcgcgcgacgacgcgtcactgctgctcaatggctcgtgggtgatggtggccggggactcgcaggcgcggctgctcgtgctcgcgcttctccgcctcctgctcgacccggccgcggcggcggccgccaccgaggtggagctcttccgccgccacagcgactaccgcgctgccgtccccgcgcgggacatttccgtggacttcgtctgggcgcccttcgagagcaacctcacgcgtctgctccgcgaggatctgcgcctcgcgccgcggctccccgacgtgctcgtcctcggatccgggttgtggcacatgctccacggcacggacgccgcgagctacggcgatgcactggcggtccggcgcgcgcgccgccaagtccctccgntcgccgctttccggagccgccaccacatatggtgctggctggggttgccgcccctcgggaacccatggtccaaa

SEQ ID NO: 118723 - DNA, 335 bp, Zea mays
  unsure (1)..(335): unsure at all n locations
  Clone ID: MRT4577_39760C.1
ataggatatgattcactttatttcatctcgttattttatatggttgcaaaaaagaggacagaaatattatttatacgtagacatatatgctctgtgctcaatttcatgcgaaattaatggggggaacgggggtcttgtccggattgaagagcccaaacttcttctccggggggtccccgtccttctggtcctcgttgaacatggcgaacacgtacacctccttggatcccggctttctcggcgtgcccttgccggcatggttgntccggttctggtttttggtccgcgcgttgtccgcggtggctcccttcccgtcggcggtcggcctcccgttc

SEQ ID NO: 118724 - DNA, 390 bp, Zea mays
  Clone ID: MRT4577_39761C.1
cccaggcgtgcgcagctgctgcaggcccctacatgtgagccggccgcggtctgagggcaatgagagacagcagatgctggtgcaccaaggtggcgtgcgcatgcccaaagccaagcgttacccggactgttagcgctgaagcgggcgctcagagccggattccggagccatggataatgccgaatcgtgcattatacaaaaggactaggactaccctgggtatgccgctgtccatgacgtgtactgcttacaataacataggtcctctgatgctggatgcaaggagcacttcggatgtggtctcctagtaccaagtcgtgcaatggcaagtctgtcgggtcttaccctgattcaagtggaggaccagcaactgctaatccttaacaatgc

SEQ ID NO: 118725 - DNA, 413 bp, Zea mays
  Clone ID: MRT4577_39762C.1
tcgaattccgttgcaaaccacgaaccagcgtgaggctgcggcggcggctacatcggcggctacctggctacgacacgaagatcagcgtggagaacatcagcttttcaccgattagatggtaagatgatggctagatgtggccatagttgctagagagctgagaatgtctagaccagttggacaacagtgttgatctatagatatgaaatgttagaacctacgaatatactgcttgttaaactgtaaccagatctccttgctttggtactgttgcttatgttctcgtgatccaacttatcttatcgccagcataggtcaagcctagtggttcttaaaaaaactcagttctttcaatcctgtattttctttcaactttattaaaataataatataaaattataaaattaattaat

SEQ ID NO: 118726 - DNA, 520 bp, Zea mays
  Clone ID: MRT4577_39763C.1
ggggtacaagcaattttaaaattttgtccgaaatttactacaaggcgcaagggattttacggattttttttcaaaatatagggtaaaaaaaaggggggaggggtggaaattttttttctcaaacaggagcttcggattcggataaatcacacaaatttttcccaaaaaaggggcgagggaaaactggaaggatggcttaactttttatggaacatgctggcaatgattggcaatatgaacctccttttcagcagcgctaaactgctcctttgatgcccctcgttcttatcggaagcttttccggcaaaagtctgacatacagggggcgacacatcacttcccaatttttatgcccccgcaaaaagctgggcggcctctgcggattttttctgttctttgtggagccaacttttgagctcacctttcacggccttttagaatgcctcggccatttctgccctttttagggccttttctgtggccaactccatgtcccccatctccttgcgagcaggtttta

SEQ ID NO: 118727 - DNA, 814 bp, Zea mays
  Clone ID: MRT4577_39764C.1
aattatgtaactgagatagctcggaatcttggcaacgaaaccttacaagtcaaaatacatcttcagatcttgtgtgtcattcagtcatggagcccacacccttgtcagcgtgcatctcgctgctctgtatcgcgctgctgtgcctcctatggcacaagtcaacgaagccccccgccggtgcgcctgcaccgccacctccgccgggcccaacgccgttcccggtcatcggcaacatcccggacctggtccgcagcggcgagctacaccgcgcgctcgctcgcctgtcggcgtcctacggccccgtcatgtcgatgaggctcggcatggcgagcctcgttgtgctgtcgtccccggctacggcgcacgaggcgctccacaagaaggagggtgccgtctcctcccggtgggtccccgacagcgccagcgtcatgggccacagcgacatctccatggtgtggctcccgagctccagtccgctgtggaagcacctgcgcaccgtggcgagcaccctgctattcacgtcccggcggctccgcgccagtcgcgccatccaggagcgcaaggcccgggagctggttgaccacttacacgcgtgctccgggcgcccggtgcgcgtcgcgctccctgtgttcagcgccgtgctcaacatgctgtctagcgttctgttctcggaggacgtcgtcgagctggggtcggtgtccgggcaagagttcatggagctcatcgcagactctagcgcggagacggccaagccgaacatctctgacttcttcccattcctcagctcgctagatctcagccgccgccggcgcgc

SEQ ID NO: 118728 - DNA, 398 bp, Zea mays
  unsure (1)..(398): unsure at all n locations
  Clone ID: MRT4577_39765C.1
gcgtccgaccctaagcctgtgcccatgctcgagggcgccgcctctggctaccgtgcctcttggttcggccccggcatctcctcccacgacgcctcctccggtctcctctctcgttccccaggcatttccattcaattattcagccataggatcccctcgtcgccgccgacgccgagctctgtgggttgcgtcgtatcggccctatcctaggtaaaacattcagactctgaccctgtcacaaaactgcttgtccgccgccggcggcggctaccactcaccagcaagccatctcttggagggggtccgcttcctccttgactacccatngacctctncgccctgggggggttgggaccggngccaacattttttaaaaaaggggcgtggatgccgagctt

SEQ ID NO: 118729 - DNA, 694 bp, Zea mays
  Clone ID: MRT4577_39769C.1
attgggtacctcgaggccggccaggcgagctattccatcctcgatggcgatgctagggacgtcaccggcttgagcatgagcatcgtccgcgcgccaccatgctgcttcactatgccactcagagctcaggggcacggatgccaagccggtggcgcgcgccatgctgcgacaactggtgcgagccgacgatacctacaatgagaaggtgatcacgccccaagaagacgcggagctgcaggtgcccggacaacgactaatactggacttacccgaccaggaaggaatctaccggccctaacactgccgcgcgcaggcctgctcctactgcaacgccaaggaccactccatctcccacgaccagtcccacaagaactacatcaacgacaatcaggacagagacggatggaagctcgcctgacttacggaccccacctcctactgcgtgaacgagaataacaacgacgatgacctcctaaaaatccatgtagatatacaccaccaaggcccgacaacttacgccaccacatgcaggatatgccacccaggacacgagacgcgtcagctcaataatctcacctatatatatatatataagcatgcacggatggaaaaacgtcacactcactgcaacaaaatgaccatattgaaagtcacctggaagcgcaaccaacccctctccctccgccgctaccgc

SEQ ID NO: 118730 - DNA, 196 bp, Zea mays
  Clone ID: MRT4577_3976C.1
agttgcttttgcttgtctatgtatctgtatctggctgtgcgccactggatatgcgtcctagaacaccggctccaggcttcaatcaggaaagcaagcgatggggggagccgctccgtccggtcccccgtccaagtctgatgtctttccacgcgcagcacgtttgatgaataaataaatcaacaggagcactggaagc

SEQ ID NO: 118731 - DNA, 458 bp, Zea mays
  Clone ID: MRT4577_39770C.1
acagaatcaactagttttgtttttcctctttcaaaaatgcatttctcttcgtcttcaacatcgtggccttggacaatcttaatcacattgggatgtcttatgcttcatgcatctttgtccgctgctcaactcacccctaccttctacgataggtcatgtcctaatgtcactaacatcgtacgagaaaccattgtaaatgagttaaggtcggaccctcgtatcgctgcgagcatccttcgtcttcacttccacgactgctttgttaatggttgtgacgcatccatcttgttagacaacacgacatcatttcgaacagagaaagatgcgtttggaaacgcaaattcggctcggggatttccagtgattgatagaatgaaagctgcggtggagagggcatgcccaagaaccgtttcatgcgcagatatgctcaccattgcagctcaacaatctgtcacttt

SEQ ID NO: 118732 - DNA, 396 bp, Zea mays
  Clone ID: MRT4577_39771C.1
acatatcttcccgagcgagttcttggatgacctcttcctcttcggaccacctccaaggctcttggtgaagcttgccactctcaccaatcaagtatttcatgtactgaactcgacattcagataccaactgccttcgaccccttcgctgcagccaatgctggggactatgctgcggaagcagggtcaaaggactacgtacacgagcgcatgcagcagcgtcatggtctcaagagcctgactaccgtacagggattgaagaaagagtacagctactgtcagatccttaaagatctaagaaaagagttctgctgcaatggtacactggtccaagacccataagttggacaggtcattcatctccacggtgatcagaggaagaacgcttagaaattccaa

SEQ ID NO: 118733 - DNA, 228 bp, Zea mays
  unsure (1)..(228): unsure at all n locations
  Clone ID: MRT4577_39772C.1
gtgatatcttagattcttatacaatgnctattaccattttatctgagacgtcagacttattgtgatgcgtagggcgccgggcgtgagctctatggtaagatgacagatcaattttagacattattagtgatgataaactatgcttcgttgtgttttcaattgatccgattgtatgtatggcttcggatgtaaatttgtaggtgtttattgtctaacgttttgcgattt

SEQ ID NO: 118734 - DNA, 464 bp, Zea mays
  Clone ID: MRT4577_39773C.1
cattgggtacctcgaggccggccgggacgccgatgtgccaaagcctagggccgatgtcgagtattttatattatcccaagagtgacagtgctgaggcgccctaccccggctacggctcagggcttggacagaaacaaaactgacgtggcactggcataaacgaaggcggaggatgccctgatcaaggtgaacggcgtccctattgagctgatccaaccagagatgctccgacttgaggacttccagcctatcctgctgcggggacggtttcgtctcaaggacatccacatgcggatgcgaggccgctgcggaggaaacacttcacagatctaccacatccgacaggtcgaagccaaagggctcgtctgctactaccagaatgacgtcgacgagggcgtctagaaggacatgcaaggtacatctttatgcgctactgatcgcaccctcctcaaaggtgacccccg

SEQ ID NO: 118735 - DNA, 1708 bp, Zea mays
  Clone ID: MRT4577_39774C.1
attgtgaagcactggaggagcagaagacagtgctggactccttgtcaggcaccatgcaaagtgtttgccagaccctacgtgtggtcacagaaagagagatggaagacgaagcggcgctggaaatgaacgagctgaactcttttactcctcctgggaaggacaaagatgagttgtcctttggaggcaattcagcagatcgtagagaggcctcttggacaagtctggcaggaacttcacagcaagaacccgacttagctgcattgcggatgcatggaacattctcacctggggggcagggtctatctctatctggtgttcaggcaactgctgaaggcagtaagacaaaaaggcgcacaaaggccgagaagaccgttagtttgcaggttcttcggcagtacttcgctggtagcctcaaagatgcagcgagaagccttggagtgtgtcccacgaccctcaaaagaatatgcaggcaacatggtataacccgctggccatcacgaaagatcaagaaggtagaccactctctaagaaagcttcaacagatcattgattcggttcatggtgcagagacagctttccagctaaacaccctgtacaaggatctcacagacacctcaatatcatctgacaacaatttgtcaggaagtgtcacggttcctccaactaaccagagcaatctcaccgacttcaacaagcaccaaccccacaagtcaagtagcaatatgccatcaacttcacactcacactcctcatgcagccacggttctcagtcaagcccctcgtgtagcgttggtgcaacagaacatgcacaacagggtataattgatctgatgaagtcagaaaatcctgtgaaagacagctctattcagactatgcaaacagaaaacacttcattatatgagcatttctcagttcatgaggctccaattgatcttctacaggatgtaactgaaaaggctaatggtgcacatcattcttctcgaagcctgtcatcccccaaccccaagcagaacacagatgcaaatatgagagtaaaggcaacatttggctcagaaaaggtgagattccgactaaacccagagtgcaattttcaaggactgaagcatgagctagcgaaacgtttgagtatagtagacacaaaccccttggttttaaagtacttggatgatgattcagaatgggtcttgatgacatgtgatgcagatctgcaggagtgccttcatgtatacaaactagcagatatccaaacaatcaaaatttcagttcatttagctgttagtccagctacaagggtcacagctggtcacactggtttgtcatgacaacagtatgagcctcaccactttgtgaggtttaatcaaattcaaccaggatcacatggttttgtgcaggggaaaccaaagattccaggagtccagggttggtagctgtgcaatactgcaatgtactatgtaccaccacgtcccagttctactgttagatcaattagtcttgtttctgatgctcaggttaggaactaatgatcaaacaagaatacttgacaatgagagagtcaagaaatcaggataaacagaagtaagcatgcattgcttgtaaatacttattgatgaacctgaatctctgaatgacaatgcaattgattgaattaatagggtgacgtatctacaaatcagatttgctccaactccaagtatgttttgtttttttg

SEQ ID NO: 118736 - DNA, 2183 bp, Zea mays
  Clone ID: MRT4577_39775C.1
cggtagagtaccaaacggtttataaacggaagcttcttaaaaggaaagcaatccataacgtctacagtagcaggcgttctttcaaagaggaccacactgtagtatagcatacaatgtttttttggcaaaggacaaacaaattgaacaaactaaatatcctatcatcctattttttagatctaacccttgctgcagaaagttgcaatttcagaagcagaatttaatgtccattgaacagacagagcatgttggtcactcgggcgatgaaggaatgctgggatcttaagggacattgtagctgatcaattatcagaaagaagtcatcaaggattgttgcacatcagtattccaagaaccaaaacatacttggagttggagcaaatctgatttgtaggtatacttcaccctatcaccctattaattcaatcaattgcattgcctttcagagatttaggttcatcagtgagtgtttacaagcaatgcatgcttacttcggtttatcctaattcctagaattgactttcccattgtcaagtacttttgtttgatcatcagttcctaacctgagcaacagatcgaagactaatcgatctaacagcagaactgggacttggtggcacatagtacattgcataggctaccaactcgggactcctggaattggtttcccctgtataaaaccataaaaccaagtgatccaggttgaattctgattaaacctcacaaagtggtgaggttcatactgttgtcatgacaaaccagtgtgaccagttgtcacccttgtagctggactaacagctaaatgaactgaaattttgattgtttggattcctgctagtttgtatacatgaaggcactcctgtagatctgcatcgcatgtcatcaagacccattctgaatcatcatccaagtacttcaaaaccaaggggtttgtgtctactatactcaaacgttttgctagctcatgcttcagttcttgaaaattgcactctgggttcagtctgaatctcactttttctgagccaaatgttgcctttactctcatatttgcatctgtgttctgcttgggattgggggacaacgggcttcgagaagaatgatgtccaccattagccttttcagtaacatcctgtagaagatcaattggagtctcattaactgagaaatgctcaaataatgaagtgttttctgtttgcagagtctgaatagagctgtctttcacaggattttctgacttcatctgatcaattataccctgttgtgcatgttctgttgcaccaacgctacacgaggggcttgactgagaaccgtggctgcatgaggagtgtgagtgtgaagttgatggcatattgctacttgacttgtggggttggtgcttgttgaagtcggtgagattgctctggttagttggaggaaccgtgacacttcctgacaaattgttgtcagatgatattgaggtgtctgtgagatccttgtacagggtgtttagctggaaagctgtctctgctccatgaaccgaatcaatgatctgttgaagctttcttagagagtggtctaccttcttgatctttcgcgatggccagcgggttataccatgctgcctgcaaattcttttgagggtcgtagggcacactccaaggctccttgctgcatctttcaggctaccagcgaagtactgccgaagaatctgcaaactaacggtcttctcggcctttgtacgcctttttgccttgctaccttcagcagttgcctgaacaccagatagagatagaccctgccccccaggtgagaatgttccatgcatccgcaatgcagctaagtcgggttcttgctgtgaagttcctgccagacttgtccaagaggcctctcctctacgatctgctgaattgcctccaaaggacaactcatctttgtccttcccaggaggagtaaaagagttcagctcgttcatttccagcgccgtttcgtcttccatctctctttctgtgaccacacgtagggtctggcaaacactttgcatggtgcctgacaaggagtccagcactgtcttctgctcctccagtgcttcgcaatctgttggcagaaagaattccagcacaaagtctgctgtcccagtgcgtgtgcaccgcaggcggatcgccactgcaccttttaacttgaagatcttagcatggtgagacaag

SEQ ID NO: 118737 - DNA, 439 bp, Zea mays
  Clone ID: MRT4577_39776C.1
gtcatactgaaactattgctgggagagggcggggctctccttctagtgaaagcaagaatgctagtcctgtgcctgatagagcaaagtgcaatagagctgacttgcctgtgcagcacgaaggtacaacgatctttgtgattaaatcgtacagcgaggatgacatccacacgagcgtgggtgcactgtgtggtcaagccagccaacggaaacacgatgcttgatggctgcttaccaagaggctgagtcaatgggatctgtatgccctatattgttgttcttctcggagaatacaagtgggcagttcgttggtgttggttaaatgaccggcgccgcagattctgagaaaaccatagagcattggcaccaggacaagaggaccgtgtcctgctatgtcaagtggcacatcgtcaaggccgggcccaacaatattttcacgcac

SEQ ID NO: 118738 - DNA, 137 bp, Zea mays
  Clone ID: MRT4577_39777C.1
gactccagcataggacaacttgaacttttcaacagtgtagtatgggtgtacaaaatcagcaattttgttgtttggaagtgaagtgatgaaagcaatagcatgaaaacaaggcaatccagttacttgccatcttctac

SEQ ID NO: 118739 - DNA, 392 bp, Zea mays
  Clone ID: MRT4577_39778C.1
ttatattgggaatgcgccttaggacctattttctattactttatcgggatatattcctgactgcgtatttgcaatacaggcgtggggatcagttggatctttgattgagtaatatttcttttttgattgacctcctctctgggctggaggaggtcaaattggagttgcaactctactttgttgttttttaaattagaccacctccagaccagaatggagggcatcccgctctgaatgttactaacctacgagatcaactgttcccgacccctgttttgccaatccgcactcacaacgcttcccgctaaagtaataggaattaggcctccgacgattccaactcgaaaagcttcaatcattccgatttgcttcaggcggtaggacgcgaggtg

SEQ ID NO: 118740 - DNA, 319 bp, Zea mays
  Clone ID: MRT4577_39779C.1
acagatccttggcgtcaggaaccggatgacagttattaaggctggttgcgcgtccgctattgcaacgacataaagtgccccgagccaacctttattaaaataatgagcggcgactggatagacagaatcgttttacgtgaataatgatctaacaataccggaagatatccaagccataaatgtacgtcctatcaagtacagcttctaccttcggaagcccaaggttgaaatcaatgacgctaaccttgtatgtcagatgctctacggcgctatctgttcctttattggaaccagagacttaaggcaagagcctattgtc

SEQ ID NO: 118741 - DNA, 314 bp, Zea mays
  unsure (1)..(314): unsure at all n locations
  Clone ID: MRT4577_3977C.1
acgcgggcgagcgaaccgggagcagcccagcttgagaatcgggcggcctctccgcccgaattgtattttggagaggcgtactcagcgactgaccgggcccaagttctctggaaagggacgccttggatggtgagcacccctgccgatcttgtccctgaaacaccactgggtgctgtgattaagtcatggcttgcatttgctgcccaaaaggttgtcgtggttaatgcccttgcgctggctttggccggtctaatggatgaggcttactttgcagnccctgctgctgctccggcctcttggctatcatctcctct

SEQ ID NO: 118742 - DNA, 269 bp, Zea mays
  Clone ID: MRT4577_39780C.1
ggggacggggacggggactgggactggcagtgtcactgctaccatcgcgccgcctgcacgcgccgccgccagcgacgcgcggcgcgcggcatgcatgatgacgcctggtgacgtcagcttctcctcgggctcggacggggaggacacggatgagaccggcggcggcagcgggaagcggaagcgcgacggcgtggaggactaagaaaccgcaaactgtaatgccgttgacaccacaggcgccccaacaaccgcagtacagccacgccagg

SEQ ID NO: 118743 - DNA, 981 bp, Zea mays
  Clone ID: MRT4577_39781C.1
aataagtaaaaagatcggtccattaggttctaaaagaaaatgacaccaaggttcggatagatgaccagagacaattctactaagtttaaagtgcacaatttcaaacagcagaatttttgtcgtctctggaacacaaacagcagcagtctgttctactgtcagtctgcaaccaatcagcgctacatttgtctcatcctgccttgatcccagctagacacactatgtatgtacttgttataggtgaaagttgatccttgaaggccaccatcttgcaaatttggtcagtcctaatctcagacatcccatctacttggccgcttcctcttagaaggcaatgtttccacaggatttggtatatccttttttgggaaaatcacaggccttgctacatcagaaagcatttctctatcctctggttcactgtcactcccggactcttcactaatccatccatagcagggtggccttgcacgaggaggtcctttggctggagccagtggcagtacacattccaagggaggtgaactgtttggagaagcttgcagttcaagggctgactgagatccatttggtgcctcgtcatgcactagtgcgacttccataccattttgtggtggtgatgcctcttctgcagccgctgcttcttgtttctgatcatcctgcgcctgttcttccaggagtttgtcaagcacaacacggtacgacgcctcctccaggaacaaccacccatctttcccgtacagctgcaagaggttgttgataatcttgcggatttggggcttggcgaagccgtactgggagaggtggtcaatggcggcgtcgatccgccgttctcctctcttgggcctcggccgccccatcgcttcggccgctgtggtccctcctgatggtggagggagtgattcttgaatgctccgcgctctgattgaacgacagtcggatgagtctcgcctctcggaacagaccccggccggcctcgag

SEQ ID NO: 118744 - DNA, 561 bp, Zea mays
  Clone ID: MRT4577_39782C.1
cgaacgcgtgcgcgagagaacatggtggttaataaagaccttgtatctgacaacgagctcctgtctaattcattcacctacgaagatctcgagaactgcgctctgagagaggaaaacggaaaggggcactgccagggccctgtaaaggtcatcgttgacgccatggcatacggccagggaaggtggggactcatgccttaactagtcaactctgtaattggtccatattgctgtcacattgcgtctacgagatgcacttccttttgcactagattgatcagtgtcttacatcaaaacacacatgcaagattcctcatatgctgtgctatgaaccatagaaaccatgtaagttcaaaaagggggtggcatgtacgcccacgctgacgcttaccacgaccgaatgacactatattttgtgataataagcgcatgaagaattatgccctggtgttctagcaggtatcacaaggttgaggcgactaacaaggtgtagctctatctctatcctgggcttaaggagaacctgggcctggagctcggccagaatacctaccaattcca

SEQ ID NO: 118745 - DNA, 644 bp, Zea mays
  Clone ID: MRT4577_39783C.1
cattgggtacctcgaggccggccggggactcccgtctgccggcgcttcagtgccgacgctcgtctctcgtcttcgctgctcacctccaacatggacccgaggaacgggaacggcgccggcgccagcgtgctagccggacaagtccggaggcggcgaacgagaacaaggacagacagggatcacgggtgcatcgagaaggagaccgtcgacaacgctgtgctcttcgatcaggacacctacgataggctcgctcaccaaggagcccaaggacaagtgagatcaccctcgtccatcctatctgagtgcctcaggggccatggatccttgtcacggaaggacatcaaggatctgatggcaaaggagctgataaggttgggctctgttcatgctacgccaccagatagacaccggggcaaccaacacatgagggacgatgtgcggcttgcagacgtaatctactctagacgactagatgttgctattatatgaagactattttactcgtggctcgatcgatcttactggcgtgttgaatgtcctatattgcttgagactattgtactattttagtatcatgtgctgtttataacattcaagaccatgctgccgtccaaatgatagtcttgatgcggaatatcccgagg

SEQ ID NO: 118746 - DNA, 179 bp, Zea mays
  Clone ID: MRT4577_39784C.1
ctcccgagttgaaaaaatttatggacaagaagttatcattgaaattaaatggtggcagacatgtccaaggaatattgcggggatttgatccctttatgaaccttgtgatagatgaatgtgtggagatggcgactagtggacaacagaacaatattggaatggtggtaatacgaggaaat

SEQ ID NO: 118747 - DNA, 729 bp, Zea mays
  Clone ID: MRT4577_39785C.1
aattcggcacgaggttttggtttccctctcgcttttccttcgctcctaggcgcggctccggcgggcggaagaggagggagaggcaggcggcggcccccggcagttcctccgtccgcggagcccagagggaggagggggaggcctggtctggggctgtccgctgaatctgcttctccgaagatcgggtggaccacgggactcggcgggcgcgcccgatctgctccgccgtcgaggtgaagtcggctgatatgacgtacctcatttggataacaatttgattggcaccataagttacagaaatatgcaggaggagctaggacaaaggatgcatgtacctcatggtatcaatctgtgtttctcaacttcttccgagctctttcaggtggaatcttccattgagctgggtcctgcagaagtgaaccctgtaccatctgaaaagttatctgctaactcacaagctgttagagatgatgctggagcagttgaaggtattgacatgaatggaaaacctgtccaaaaacctaagaggaaaaaacataggccaaaggtcattaaagaaggacaatcagcaaagttgcagaagcctaaaactccaaagcctcccaaagaaaatgggaatcagcctactggaaagagaaagtatgtcaggaagaaaggactaagcacaccagccaaacaaattccatcagaaagtgctgatacacacactagagctaaaccaggaatagc

SEQ ID NO: 118748 - DNA, 312 bp, Zea mays
  Clone ID: MRT4577_39786C.1
atagaaaagactcaagttcttatttaatacccgggaaaacaaaatatctagcaatggtcctaggcatgatttgacaccaaagaaataaaataaaataaaatttttgaaacctataaaaagattgttaagcgcctctaatatatacagtttgatttttttaaaaaggagagaattatactcggaaagaaaattgaaaaaattccaaaacttctacgaggtatattaacatgctccaacacgttttgaacttagaaacactatacaacgtcatgaatgcaatattcaaagtttctctagagtttcactttacta

SEQ ID NO: 118749 - DNA, 1543 bp, Zea mays
  Clone ID: MRT4577_39787C.1
tggggtacctcgaggcggtacgctcgaggctggccgggattcctacgcgcgtgttctgtctgtctctctcggccccctctcgctctccgacgactggtgggccgctgccggcgccgccgccttaacccaggtgttgaggctttcgttggtctcctcgccgtcgacgagcacccaccaggatgaattctaaacgtaggaggagtcatagcccagttgaatacaaggaaggccgtgacaaagattatgggacttctggaaagaaggataagtcaagagatctagatgacacatgtgatgctagaagaggtcatgaaaccgataggcactctgataagcattcctttggaacatcacgtgaatccaagaagcatgatgactatcggaggtaccatgataagtatggtgatgattatggtaggagccatccaagagcctctcggtcagaccgggaatcaaaggctgatacttattatgatcgctcaaagcatgataacacatctggtagatcacgtggtgatcagcgagatgttggcagtaggtacggagaaaaatctgttaatcgagatcagaggagtataaatgaaggaaagcaggagtcccctcgtggctatcaaaagaatgatggcggagaatacaataaacatatggatgcaagaaagcaagagtacaaaggttatggagatgatagagatcattacagggttgttcgtaagaacaaggaaaccatcaaagaggaggaggactcgaagaggagaaatggaaaggaaattgagaaagaagctttggtggaaactagggataagaaaagaagtttattcagctctactgggccaaatgtggataatccaggcgatgtcaaactatcctcagccacaaatgaagccttggataacgctgcagaaaccgtagacggtgtgaatgcagctaaagttgcagctatgaaagctgctgaattagtgaataggaacattgcagcatttggtgctggaactgggcgcctatcaactgatcagaagaaaaagcttctttggggtaacaaaacgagtaatccctctgaggagacaagtaaacgttgggacttattttctgaccgtgagcgccaagagaaatttaacaaactcatgggtgtgaagagcagtgccccagttcaggaaaacacggtcgagaacaaggtcgggagctcggcggaagaagccaagaaactggaggagctcgacaccaacctggagaaacattacatagcaggcctccgcaggagagatggcaggacagtcggccttggcctctagaaactctgcttgcagttgcagatgctgcggcattgaaaaatgcagagagcttgctctgtacaatctacagtgccttgtttattcttgcacttacaaaatttcctgtacggcttacgttgactgtttccgggttatcttgaagctctagaacatgtgtccctgattgacactcctgtactgcgtttgcataaccccgtcattcttgagtagtaattcaccggttattgtttgcaaaaaaaaaaaaaaaaaaaaaa

SEQ ID NO: 118750 - DNA, 858 bp, Zea mays
  Clone ID: MRT4577_39788C.1
gggaccctcgaggccggccgggaaaggcatgagcccatgactgtgtctgtgtgaattgcctttggatcgtcctagcagccttgtcgtcgttagaggatttggaacccgttccattcgccgcctttctttttcttcgcccgtccaccctacgagcgcgcacgctctcctggctatagcaaccgccgtcgccgccccacgctacgtgctcgagtctagcctcgtcggttccttcgtcagttcttcgtcggatcctttgctggcgaccaacacccaccagcttgctgtttcccccttctttttgcttgcttcatcgaagtcctttccaggatgaattctaagcgtaggaggagtcatagcccagttgaatacaaagaaggtcgtgaaaaagattatgaggcttctggaaggaaggataaatcaagagatctagatgatacatttgatgctaaaagaggtcatgaatcgggcaggcactctgataggcattcctatggaacatcacgtgaatccaggaggcatgatgactataggaggtaccatgataagtccggtgatgattatggtaggagctatccaagagcctcttggtcagaccgggaatcaagggctgatacttattatgatcgctcaaagcatgatagcacatctggtagatcacgtggtgaccagcaagatgttggcagtaggtacggagaaaaatctgtcaatcgagatcagaggagtataaatgaagaaaagcaggagccccctcgtggctatcaaaagagtgatgttggagaatacaataaatgtactgatgcaagaaagcagagtacagaggttatggagatgatagagatcattacagggttgttcata

SEQ ID NO: 118751 - DNA, 1090 bp, Zea mays
  unsure (1)..(1090): unsure at all n locations
  Clone ID: MRT4577_39789C.1
cggacgcgtgggtttggaattaggaaagtgagcatacaacagggacaagagccagaaaatctgctcaacaatgagctatgggggtaccaagttggcttattcggggaaaggaataacatctacacacaagattcaaaaattactgaatggacaagtatcgacaatttgacatatagcccacttacttgactacattttccacaccagtgggaagtgacgcagtgacactgaaccttagtggtatgggtaagggtgaagtatgggtcaatggagagagtatcggacgatattgggtctctttcaaggctcctagtggcaatccttcgcaatcactgtatcacataccacgagaatttctaaaccctcaagacaataccctagccctttttgaggaaatgggaggtaacccacagctaataacagtgaacacaatgtcggtatcaagagtgtgtggcaatgtgaatgagctctcagctccatcacttgaatataaggataaggaaccagcagtagatctctggtgtacagaaggcaaacagatatcaacaattgagtttgcaagctatggaagtcctacgggtgactgcaaaaaatttggtttcggaagatgccatgcaggagcatcagaatctgttgtaaaacaggcttgcttgggtaaaagtggatgctcagttcccgtaacacctatcaaatttggaggcgatccatgtcctggaatccaaaaatctcttctagttgtggcgaactgcaggtgacactagacagtcacacaagtatacatcatagaaaagaagttggacgagtataaaaaataaaaagatgagttacaaaatcaacgagcaatagagtggagggaaagtataagtcaaaacatatagtaattgttattaggtaggcaattgatcacttgaggcttagttggtagaccccatgtaccgattgttttgacctggcatagatatatatgtgttatctgtatatcggtttcacatgaatggcaactcattgttttgtggtttatggtgatttagaaatatgtgatatcattcatttgtagtgcctccnnnnaaaaaaaaaaaaaaaaaannag

SEQ ID NO: 118752 - DNA, 441 bp, Zea mays
  unsure (1)..(441): unsure at all n locations
  Clone ID: MRT4577_3978C.1
aaaaaaaaagtggaaaaccccgggggagccccatgtggacaagggctttagcgacggggctgttgttcgcggcaggcgccgctctgatagagcgcttgctcacctgctccccgcccgcctcagttggggctggacttactttttttttccatccatccctacctgttggggttgtgggggtcncctgcttctctgctcactgggtgcattgcggggtggtggattttgctctcttcatgctgggttatcagcctgtcctatgggaggctttgattagacatcaccttcttttgttgtctctttcttcggtgctggcgagtgctctgcttggcggctgctggttcgaggactgtctcctcgtctgtttgggacatgcttggtcttcctgcagggttgggctctgggccctcttggggcggtggccctggcttcgttttcgtc

SEQ ID NO: 118753 - DNA, 1123 bp, Zea mays
  Clone ID: MRT4577_39790C.1
cggccagagccgccgtattgctcctgcgttgttccccccccgccagccatccggcggctgcgagatccgcagcttcccgtcgctacttcggccacgcggcaggagcggcggcgtggaccggcgccgcatcccccaactcgctgctgctctcgcgctcgcctccccacgccgccgcgctcgcgccttcgccggggagctccatgcggaggcggctcctgctcggcgtcggcaccccggccgtggcggcgctggcggccgcggcgccgccagcggtgctgcaggacggggcggtcactgtgctcatcaccgccggcgcctactctcttgtgcgcgtcttcgacgagctcaccgagcggcggctcatcgaaaagagcttgagcaggaaggttgtgcacgtgctatccggcgtcctgttcatgtcatcttggcccctgttcagcaattcgacagaagcacggtatttcgccgcggttgtcccgttcctgaactccatgaggcttctgatatatggactccgtctctacactgatgaagctctggtaaaatcagtgacacgtgaaggaaaaccagaggaattgctgagaggtccactctattatgtcctggtgctgctgttcagcgttttagtcttctggcgtgagtcccccatcgggatcgtctccttgtcgatgatgagcggtggcgatggttttgctgacattgttgggaggaggtatggctcagcgaagctgccattcaatcggaagaagagctgggccgggagcatctcgatgttcatttctggtttcctgctgtccgcgatgatgatgctctacttctcaagcctgggttacattgatgttatctgggaagaggcacttggtaagctggcgcttgttgcactagcagcgacagtagtggagtgcgttcctgtgaccgaagttgtagatgacaacatatctgttcctttggccaccatgctggtagcttttctcttgtttagctccaaccgcacaatagttaattaaaatactactagtgcattatttaagacatgtgatgagttcttcaacccacgcgtccgcccacgcgtgcttcctatgtgatctctagtacttgatggcgacggcctaacatctcccac

SEQ ID NO: 118754 - DNA, 955 bp, Zea mays
  Clone ID: MRT4577_39791C.1
tcgacagaagcacggtatttcgccgcggttgtcccgttcctgaactccatgaggcttctgatatatggactccgtctctacactgatgaagctctggtaaaatcagtgacacgtgaaggaaaaccagagtaaatccgatgaactgaagatccgtatgatcgtttagcttgctgctctgacgataacgactttgcttctttacagggaattgctgagaggtccactctattatgtcctggtgctgctgttcagcgttttagtcttctggcgtgagtcccccatcgggatcgtctccttgtcgatgatgagcggtggcgatggttttgctgacattgttgggaggaggtatggctcagcgaagctgccattcaatcggaagaagagctgggccgggagcatctcgatgttcatttctggtttcctgctgtccgcgatgatgatgctctacttctcaagcctgggttacattgatgttatctgggaagaggcacttggtaagctggcgcttgttgcactagcagcgacagtagtggagtgcgttcctgtgaccgaagttgtagatgacaacatatctgttcctttggccaccatgctggtagcttttctcttgtttagctccaaccgcacaatagttaattaaaatactactagtgcattatttaagacatgtgatgagttcttcagtgatgagttgtgcttacttttgcttcctatgtgatctctagtacttgatggcgacggcctaacatctcccagtttttggtgtctccttgccttggctgttttggtggaaaagtattgctagcttgtctaaagtgaatctctcactctcagatgctcagtgatgtgcttggctttacctgacggcctaacacgcccttagagcaactccaaaagagtgtgtaaactaaccccaaaacatgtattagtcaagaatagtggtttttcttacttc

SEQ ID NO: 118755 - DNA, 649 bp, Zea mays
  Clone ID: MRT4577_39792C.1
tcgcgatctagaactagtcagcacaccttgtctctgactgaagctctctgtgggttccaatttgttcttacacatctggacaacaggcagcttctcatgaaaggcctctggtaaattggcatcccctcgtcgtttatcgccttgaattggtcaggtttaacaacttcaccagggtctgatttgatgagaagctgcctgttgtccagatgtgtaagaagcaagctcacgctgcccaggaggcgtacgaggaggacgacgagatgccgggcggagcccagagagtgcagtgcgcgcaacagtaagcagactatcatcaaggcaattgggaggggtggtgcccttaaagcatgggagtgatctctggttttgctgtcgccgagctgggaaataggaagctgaatcgacctcacaagcggggaatgtatccttttttgctgcaacataaaaaatgctacccaggcatagctgggtaccttttaacttctgtttgtgggatttgctagagtgatggtttcgatatatagggggacttgaatgtctggaatgctacggtataacgcacatttgggtgcaatgtctgttgcattgctgtctgaatgacatcgttggtacatttattttagaaaaaaaaaaaaaaaaaaggccccta

SEQ ID NO: 118756 - DNA, 581 bp, Zea mays
  Clone ID: MRT4577_39793C.1
gttgctgcgtgctgagcgctagaagaggacttgcttatcgccccgcgcgctttttttttccagtgctccatctcctcatgattaggcgcggactctcccaacgaagacggcagacgacagccgaacacgtatggcatggtctcgtcggtctgtcgcgggtagctatttaacctctcgtcgccgcctcgtgcagccaaggaatactcagatactgacgtacgctccggcggtttcgatcgagcgagcgaggcgggcggaaggagaagggatgtagagggtgcaggcggacggccgaggtcggctgatggcgaagatcgtgctcgctctgtttctcctcgtcgtcgcgcccgctcgagaggatcgctgcacaaggagtgtgagagtgaggatctgctagggtccggcgctagagggtgtataagtttcagcagatgatagctgtggaagatactgcgcggtgggatgcagagatgttcgtaaggatggttctacaggtagctgactacccgagctctggtccgatcgatcgacagactcccagaggaccggatccatgacgacgactccgattcgaagagaca

SEQ ID NO: 118757 - DNA, 712 bp, Zea mays
  Clone ID: MRT4577_39794C.1
ggccgcttttttttttttttttttcttttttttttttttttttttttcagacagcaatgcaacagacattgcacccaaatgtgcgttataccgtagcattccagacattcaagtccccctatatatcgaaaccatcactctagcaaatcccacaaacagaagttaaaaggtacccagctatgcctgggtagcattttttatgttgcagcaaaaaaggatacattccccgcttgcgaggtcgattcagcttcctatttcccagctcggcgacagcaaaaccagagatcactcccatgctttaagggcaccacccctcccaattgccttgatgatagtctgcttactgttgcgcgcactgcactctctgggctccgcccggcatctcgtcgtcctcctcgtacgcctcctgggcagcgtgagcttgcttcctgcgcatctcttcctcgatgttgttcacatcatgcatagtcgtctcctcgcattcatctatctccatgtctgtcagcttggatgaaggccttggtggaagtactgtctcgagagccttgcactgctctggtgccagcgagtcggggaactccaccgtgaaatggatgtacagcttccccttcatgaaaggcctctggtaaattggcatcccctcatcgttaatcgccttgaattggtcaggtttaacaacttcaccagggtctgatttgatgagaagctgcct

SEQ ID NO: 118758 - DNA, 947 bp, Zea mays
  Clone ID: MRT4577_39795C.1
gtgggggttgtgggtttttttttttttttttttttttttttttaaaaaaaaatgtaccaacgatgtcattcagacagcaatgcaacagacattgcacccaaatgtgcgttataccgtagcattccacagacattcaagtccccctatatatcgaaaccatcactctagcaaatcccacaaacagaagttaaaaggtacccagctatgcctgggtagcattttttatgttgcagcaaaaaaggatacattccctgcttgcgaggtcgattcagcttcctatttcccagctcggcgacagcaaaaccagagatcactcccacgctttaagggcaccacccctcccaattgccttgatgacagtctgcttactgttgcgcgcactgcactctctgggctccgcccggcatctcgtcgtcctcctcgtacgcctcctgggcagcgtgagcttgcttcctgcgcatctcttcctcgatgttgttcacatcatgcatagtcgtctcctcgcattcatctatctccatgtctgtcagcttggatgaaggccttggtggaagtactgtctcgagagccttgcactgctctggtgccagcgagtcagggaactccaccgtgaaatggatgtacagcttccccttcatgaaaggcctctggtaaattggcatcccctcatcattaatcgccttgaattggtcaggtttaacaacttcaccagggtctgatttgatgagaagctgcctgttgtccagatgtgtaagaacaaattggaacccacatagtgcttcggtcagagataaggtgtgctcatagaagagatcttcaccctttcttttgaatttggagtgatccttctgctggaggacgaatacaatgtctccagtgacagtatcaggcgcttcatcagcttccccagcgaaggtgtcttctggttgtgttgcatccccttctca

SEQ ID NO: 118759 - DNA, 297 bp, Zea mays
  Clone ID: MRT4577_39796C.1
acgatcgctagcgcacgcacataagcacgttgtcggaagctcaagttacaagaagcaccggggactggtcgatggcgggccaggctcttctatcctgtcggcagctgctgtggcggccgctgcagacggcctgctgtaggtcggccgccaggaatgcgcccttcgcggtcagtgccagctacagacatccagacaagcaaagtgccacacagacagctggggttctgagtccaagcagtccctctcctacctagaaaggacgctgcccagggactatagcatttacccgatgggcct

SEQ ID NO: 118760 - DNA, 205 bp, Zea mays
  Clone ID: MRT4577_39797C.1
aagagaaatctgacacagggatgcggtggcggctgcagccggcgccggcgccggcgctgctcctcgtcctggccaccatcgccgccgtcgtggtggtgcgagcggagccccaggtgccgtgctacttcgtgttcggggactgcctggtggacaacggcaacaacaacgacatcgggtggctggcacggaccaactacgcgcccta

SEQ ID NO: 118761 - DNA, 375 bp, Zea mays
  Clone ID: MRT4577_39798C.1
aacagtttcatcgattgcgcggtcgatctccatcagagacagagacgatataatcagaataaagtatagcagcgcgtgtgcgcaacagggtaagattaggcgtgtgatttgatttcaaagctgtgcttgtaacgtaatgtaatacggtgtggcatatgcaccgggatatggtatgtgtattgggaagacgctatgccacgcgtaaggctagcagttgttgcattgcatttgcatgcttggatcggatatgcatgtgttcttctgcctgcgacatcggtagcgcgtgaggctgtgactctgtgagctgcgatttccgcagttgaatcggtagtgtaagcggaaatgtcggaatttaaatctggctggatttcgttc

SEQ ID NO: 118762 - DNA, 330 bp, Zea mays
  Clone ID: MRT4577_39799C.1
caggcgcacccccactcgcgtttcctgccatgctacctgagcgtacggcacgtgcagagtgctccgcgctcctctacctcgattccgcctcgtctccccgaccgagccagcggcctgggccctgaacatgcaccccgacctccccgcaatccacaacgctccggtcactcgcacgacctgagccagcagcatcctgcacacccacctatcgcaacgcgcagtggtgccccccctccctggggatctcataccacgacactatagcaaatttcctgttattgagagatatgagaatgtgcacctggtgtaaggcagcaccagagttaatgg

SEQ ID NO: 118763 - DNA, 210 bp, Zea mays
  Clone ID: MRT4577_3979C.1
caggaaccggcgcggagtcccaggctgcgacccacgcgttcgcggacgcgtagacggacacgcgggttctttttttttagttcaagcacattcggtgcctttccaagaaaaaactatctacgttaatgcgggatgtatccttatacacacctggtgtgacaatgagggcgctattgtcactcgaacaccttttagccggaccaggttatc

SEQ ID NO: 118764 - DNA, 294 bp, Zea mays
  Clone ID: MRT4577_397C.1
agattaaacaggcattcaaaaaaagagttatgcatgtagcaaagaaacatggtaacaacttttgggctgacttagaaagctaactggaaaatgggccaaaagcaacaatttgtgttgccggggccctatcttattcctaaggggccataggcccccgcaataaaccaggtgaaagccccactaaaataaacaggcaaggcggggaatacctttgctataaccaaacctagaagccaaagaactggccgctgtctgacacgctaaaaccgtgaagaccccacttggaccacacct

SEQ ID NO: 118765 - DNA, 134 bp, Zea mays
  Clone ID: MRT4577_39800C.1
cttagtctattttgtaagatttcaatagacataaatgtccaccggatcactggcaaaaaaagaggctgggcgatgcctgtaactctcctggattgcgacgggaagctctcctgagtgagaatcaaacaatggaa

SEQ ID NO: 118766 - DNA, 301 bp, Zea mays
  Clone ID: MRT4577_39801C.1
ccacgcgtacgctatgcgattcgctcgctcgatcctatcttctcttcacatgaagcgcaacgcccatggccatggccatgcatggctccgccgccacgcgccatctgttggtcgctgcctgggcgccggtggatattcgacggtagcatggcactcatgtcgcactaccgttttcgtaatcacgtgcggttgacgtgcaacttgcctaaaccgatgaggtggtttaagtctcggtgggttcataggatgcttacctgttgctatacaatctgtctctattcttcctacgacattgacgagg

SEQ ID NO: 118767 - DNA, 235 bp, Zea mays
  Clone ID: MRT4577_39802C.1
cgttaagctccctggagcctcctagccacgtgcctagccatcaagttcccctgcacgcggacttttccctccctggtcgctcctccactgctcgtgccgctccttttccccgcgcgcgcaacctcccctgctggccgtccctggtgctccctgctcgcgccgtgtccctgtttttctttccctctctgctcatcctccacttagctcatggcgcatgtccctgctcggatctctg

SEQ ID NO: 118768 - DNA, 822 bp, Zea mays
  unsure (1)..(822): unsure at all n locations
  Clone ID: MRT4577_39803C.1
ctctttcccttcgacaatcgcggcgtcggcggctgcggcggaacctcccggcgatcaccggactcaccccggcaggcaaagcaatgaggaggtacaatccccaataccggagtcccccaaggaggggatatggtggcagaggtagaagtcccccgaggaggggatatggaggacggagggagcagggttcaggaagcctcttggtccgcaacatcccattgagctgcaggccggaggatctgcgggttccttttgaaaggtttggtcctgttcgggatgtgtacctaccaaaggattattacaccagggagccccgagggtttgcatttgtggagtttgttgacccttatgacgcctctgatgcacaatatcacttgaaccacacagtattttgtggccgagagataactgttgttgttgcttccgagtcacggaaaaggccagatgatatgcgtaatagggctagaatcagggggtattctggtgaacctgaaaggcgtcattctcgttatgggaggtctcgttcccgttcacgctcctactctcctcgctatcggggccgtcctcggtcaaggtcaaggtcatactctcctgctccaagacggcgagatgactactctgcttccccaccaagatcacatcacacacagtctcctaggcgtctgccaaaggggcatgaagaagacgagcggagatcctattctcctgctggtanaggtggtggtgagcgtgatgctgatactaatggaaagaggtcaccaccatctgacactgaaggatcacctccacgcacccgtaggtcacccaggcaatcctcaggat

SEQ ID NO: 118769 - DNA, 688 bp, Zea mays
  Clone ID: MRT4577_39804C.1
ggttgatggcacggtaccaatttgagcatttccagtgcttgatattaaaccatacctgccatattctgacagtgttaaaggtgcagctgttcccagttggttagaggttgacggtgcgttagcggtggagtcagtccatttttccgaacacttcatttctgcgctctccacctgctggatgcatgtacagcagatgtcgctgtatgcttcagcagacgagttccaggatctgatcaagcaggccctttcctgggacatcaggtcgatatcacagcggaaccgtccccatcaagtgagcgtggaagctgatgccaacggcccccgtggcgaagacactgatgatgaccaccaccacagggacacaggtcgctgcggtgtggtttaccacctacatcttgaaggcatcgatgtgtcgtataggatcgatcagggctccaacatcttcgtcgaggacgccgcccttcttccagacgccgtccagaaacggcatggttatttggcgtggacggacaaacttcttggcagcagcgttttgtagcgtggccatggcgctgcgttttgttatcgtttgcacgagtgcagtatggtgtaggatgtcagtagtgaactagtgatgccaatgaatttgaatgtggtggcgtctagtatctgaattggatttggaacgtataccccctgttttgtgtcg

SEQ ID NO: 118770 - DNA, 537 bp, Zea mays
  Clone ID: MRT4577_39805C.1
aataacgttgcaatgacaaccagttcttgggcacaacaagagcataatgactattacagccactctctgcaacatcttcttgcagttaataattgagttgagttgattattaaccgtctaatcttctcacatgactgccgcacgcgttggcgttctcctcgctgaacatgtagtacgatttttttcgccttctgtgccggcgccgtcgagtagaagtacccgccgccgctccctggtgtgtacggcgcgccggccatcgggtggtagcacgcgctgctccggagcgcagagctcgggtgtgccgtgctgtagctcatgacgtacgccggcgggtggaccccggcggcgtagtaccctgggtagctcatccccgccgctgccggtacgtacggtcccgcgtcgatgacggtgaaagggccggagttgccggcggccggcttcgtgggtgcgtccggcgggggctggacctcgacgattgccccggcgccgtctctgttggcattgccgtggccacctttcttgcctttcttcttgccg

SEQ ID NO: 118771 - DNA, 1733 bp, Zea mays
  unsure (1)..(1733): unsure at all n locations
  Clone ID: MRT4577_39806C.1
cattgggtaggcccgagtccggccgggtgattcctctccggccgtcccgacgttatccaactcctgaacacctctctctcgccacctcacctgaacacctgctcgccccacccattccctccgcatggctggcctccgccctcgcgccgccgtagcttcgaattgcctccgaccggcaattcggcgaggcgcccgtcacgcatcgggggcagcgtttggatactacacctgctggcagctacagggaaatattttgaattggagatctatatccgcaactaaaaagctctggagtacagtagctagtgcaaagcctgatgattctaaatttgaaagtgtggatgcaccacttgagccccaaacatgtgaaggcagcttcttgtgtggtctgttgaagaacctgccacacatttttctagctgcagcagcgaagcagttgcaagaactgtcttaccaaagagaagagagcttaaaacgctgggagcatagtattggttctaaagaggattgccttcacaggaggattgctgaactcaaggaacacgagtgtcagagagctattgaggacatcatgtacatgttgattgtttataagttttttaagattgaagtaccaatggttcccaatctatcgaaactcatcagcaacagaaggttacagttatggccaccaagggagacagatcttgaatccattcatggacctgaggtgctagagctaattagggaacacttgaccagcattatcagatgggtgcacagaaatggtcccaagatcaatcgttcaacacttcgcattaaaagactgcaatttgttcggatatattctgcttcaataatgtacggatacttcctgaaatctgtcagcatcaggcatcgattggagctgacccttactcgctcagaaggagtgcctccgattcaatttctgaatgctcaactcacaaataaacaagagcaggaaggggccattggaggctctagtgaagcttcgtcttctttgagaccaagttctgtggtcaacccacacgacttgaggggctacataatgggattcgatccaaagaccttgcagctttgcgcgaagctgcgctcatctgaagcttctaatctcatcgagaggcacagctgggctctttttgggggcgacatggaactctcccaggagaatgatgaagcggttatacttgatccttcatccctgaaaagactactgcttgaagccattgcattcggttccttcctctgggacgtcgaggattatgtggacgagatcttcaagttatcggatagctgaagaaactgctacagaaagctcctacagcctttgtggttgtggatagatgaagccagctgaaaagaggagctgcagttcttttctctagatttgtatatatggctggctgttatgtacatgcatatacatcttcatctcaagtttgctttttggagggaagcttggacgtgccctacaaattactagtacacaagtttttttttgtaagttatgtcatcttacactagtacacaatagcatcagcctatcaacgcagaggacgtgtgacataattttatggtcccaaaataactgggcattttgctaatctagaacgacattattttggaatgaaatgagttgtatcagcaaaaaaaaaaaaaaaagcggccagtttgaaagcataaatctgataggcctattgggctttcggttgcgcnnaaaaaaaaaaaaaaga

SEQ ID NO: 118772 - DNA, 277 bp, Zea mays
  Clone ID: MRT4577_39807C.1
aagaaactattgttattcatattttgattaattttactagcaacaaatttttattttagtagcattgcatttaccttaaatatgtaaaaatgaagttgtaacaggatcaaatatggaaatggcaatggtaactctgcctagaacatagttgaatgtccttggttgtcggtaagatgcaaagatctatacaaattttatcataggtcaaaattatttctaaatatacaaacagtttcaactatttcttcctccctaaaactagaaccaaaccaaaccc

SEQ ID NO: 118773 - DNA, 437 bp, Zea mays
  unsure (1)..(437): unsure at all n locations
  Clone ID: MRT4577_39808C.1
tgagaattttattattacagtataaatnataaaaaatntagaatattttttttttaatggngggnnnantgaaataggggtttttgtttttgtggaannatntnnnntaaatnntannaattgttgttggtgaaagaaggaaanaatgtttgnnanattttgtgggtagaatggtagnaattgttgttgttgnaagaaggnattaatgtttnnnanaatttgtgggtaaaatggnaanaaatgttgttgttttaagaaagnaanaatgtttgnaatagtttgnagatggaatggnagaagntgttgttgnagtaagaagggataaggggttttngaaagttggttaaatggtagtagttgttgtgnttggaagtagatagaagggttaaaannagttagttgattgaatggaagaaaatgttgtttgttggaggtaa

SEQ ID NO: 118774 - DNA, 591 bp, Zea mays
  Clone ID: MRT4577_39809C.1
ccggcgccccctcctcgagttttttttttttttttttttttttttttttttttttttttttttttttttttttttttttttttttttttttttcgggcccgggaaaaccccctttttttcgaaaaaacaaaaaaaggggttcctactttaacaattttgggccggaccctgagtctactactttgccaaaaaaggccttaatttatcccaagccccggggggggccccaacggggggggggactttggcctacaaccccgccaacaaaagaaaaaaaaacccccccccccaaaagaatcagtttatgggaaaatctttatacgggacacaaactgggggggaaagggcttttttttttcaggatggggcggtatataaacccagggccgggtttttatttcactccccccctaacttttgaccctcccaagggcggggttaattggctatgaaatcgggggattcccgagtcaggaaagtactggttgctgttactcgaaagaaggggggggttttctttaaaaaacaaggacccccggcccgttttgttattctccaggaaacccccgttcctgaaacggttaagggccc

SEQ ID NO: 118775 - DNA, 604 bp, Zea mays
  Clone ID: MRT4577_3980C.1
cctcgagtttttttttttttttttttttttttttttttttttttttttttttttttttttttttttttttttttttttttttggcaggggggggaaaaaaacttttataacagttaacaacccgatagccccttgttttcctttgaaacccctctacaagggccctttttgatagccccttgcttcccattaaaagggctttaaaaggcccccttttggggggcctttgtttttttggttaggggaaccccaccctagggggggggggggaccagctccccaaaaacagggggcatagcgacacccgggaaaaccccaaggctcataaacaaaacggggttgggggactttttggggcccccacccccttgggggaaaaacgggagcatggagcgggcccccccccccccagaaaaaaccccgttgggggccctacccctgcccaggtttgaagttgccccccccctccctttaacaggggcggcccctttcccccccattttgtttaaacccactttgaccccgggggggaaaaaaccccgtgtttttttccccctttcgcccttgaacagccccgagggccgagcgagcctcgggccaaatt

SEQ ID NO: 118776 - DNA, 375 bp, Zea mays
  Clone ID: MRT4577_39810C.1
aggggatccatgtattctgttcactagtcttcaccaatccttccaacctaggacagatcttacgaaattcggattctcactacgatggttttcactcgggatcctacaatcattatcgccatcttgacaaatatgtctctttttgaatcttgaccaagcaatgagagctatggtcagtcgaccgtggaggatccagaaggctgaggttgtctatcctgctggatgctgcgagtgcgagctgtgtccccacctccagcgcaaatgtgaaatgatgatgctttgtgcagaggctctccctccctcactctcttgtcctggcatccaacattccaactttccatatggaattgtgaaagaagggggcctttttttttc

SEQ ID NO: 118777 - DNA, 191 bp, Zea mays
  Clone ID: MRT4577_39811C.1
gcgtccgcacacgagtccgcggacgcgtgggcggacgcgtgggccgactcgtgaactgaggcgtggtccgtgctgtggtgcctgctttgattataaatagccgtgatgatgcatactcttgttgagcaatgaattcgaccgaccatatttgaacttcctatgtacgtgtcacgtatctcaagtttggtgtc

SEQ ID NO: 118778 - DNA, 364 bp, Zea mays
  Clone ID: MRT4577_39812C.1
gtgggtcgatacaagactctagactgagtcgtaatatggaggtaccacgactgacgactacatggcggtcagcagcatcaattcgtcttcgacctcgagttcagagcagcgggtaacaattggagccctgctcgtggtcgtgtccgtcatggtggtgggcgcggccgtggtgtccgacatgatcatctaacacttcatgttctgccagaccacggctgacatagagatggggatgccagtcgccccgtcgcacgtgttctgcaacttcctggtcagggcggatctcaagtgcctgtgcggctacaacatctcgacgtggatgggcctctacaacatcgaccccaagctcgctatggagcttccg

SEQ ID NO: 118779 - DNA, 318 bp, Zea mays
  Clone ID: MRT4577_39813C.1
atgagcattacatgccgcgtcgtagctcgtattcggctcgagccagggcactggtatcgaggtagttaaggcccccacttctgccgctcgccaggatgaagcctcacgtggagcctaggcagatccctctagcctccttacctctgcatttccttcactctggtacccaaggggcccccactgtgggtgctatgggctggtaagcccggctgtgactgtgctgcctgagagttattcttgaactctggagatgaaacatggtatccagtgtcctagaaatggtgatgggcaggccctgagtgtcatccccactccctc

SEQ ID NO: 118780 - DNA, 2604 bp, Zea mays
  Clone ID: MRT4577_39814C.1
gccggccgggtcgggggacaggcggacacaccatcggcggtgctgcgagcgcgcgctgcgactgctcccgctccacaatttcaacctccagatctggccactcccactctcacacgcccagtcttctcaatcctcacatcctattggccacggcaactgccatcgccatggccgggaggcgtccggcaccggcggccctcctcctcctcgccgtagccttcgctcccatctcctccgccgttcgcccagtctccgatgcgcacagatccgctgccgaggagctcttcgccccctccgccgacggatccttcggcgatttggagagtacgtatgaggcagtgaaaacattccagatactcgggctggagaaatataatagtttatctgggaaggcgtgcaagtttgccgcggagaacctggcttccaccgattccaccgcgaaagatctgttccacgcagtccggatcagtggcgcgctgggatgtggcgttgatgccggcgtgtatgatggtgttgtggcgagactcaaggcagtgattaaggataccaattccctgttggaattctactattctgtgggaggtttgcttagcatcaaggaacaaggccataatgttgttctgcctgatgcagaaagtacatttcatgccattaaggcacttagccaaagtgacgggagatggcgttatgacactaacagcgctgaatctagcacatttgctgctggtatcgcactagaagcattggcgggcgttgtttcactggcagatgcagaggttgatccatccatgatgggagtggttaaaaatgacatcgttaagctgtttgacaccatcaagagttacgatgatgggaccttctactttgatgaaaagcatgttgatgctactgaatacaagggccctataatcacatctgcttcagtggtgcggtggtgtcacctcttttgcagctgttgcttctggaaaattgaatatccctggcgagaaaatacttggcctggcaaaattcttccttggtattgggctcccaggtagcgcaaaggattgctttaatcagattgagtctttgtcattcttggagaacaatagggtcttcgttccgttgatactctcactttcttccaaagtattttcattgacttcgaaagatcagcttaaggttgaagttacctcagtttttggatctgctgcacctttactcaaagtgaatcttgtgcaagtgttgggatctgactctaaagtcatcaccaatgggaacagggagcttcaatatgaccttgacaaaaatgtccattacttggacattgctccattggaaatagatgttgggaaatactcggtagtttttgagatttcacttcaggaacaagagcgtgagactgtttatgctactggagggaggaacactgaaagtgtatttgtcacaggactgatcaaagttgataaggcagaaataggaatctctgacaatgatgctggggccgtggagtctgtccaaaagttagatcttctgaaagatacaaaagtgtctctttctgcaaaccatctgcagaaactgcgtttatcttttcaattaaccacaccgcttgggctcacatttaaacctcaccaggtgttcttgaaattgaagcatgagagtaaggttgaacacttattcgtggtacctggctctgcaaggcagttcaaaattgttcttgacttcctaggtttggtggagaaattttactacctttctggaagatatgaccttgagcttgccgttggtgatgctgcaatggaaaattcatttctacgacctcttggccatttggagttggacttacccctgccaccccccaaaaagccccacgtcctcctgcacaagctgttgacccattctcaaaatttgggccgaaggcagagatattacatatattccgtgccccagagaagaggccacccaaggaactctcgctcgcattcacgggtctcacgcttctgccttttatcggattcttgattgggctcgtgcgtcttggagtgaacgtgaagaacttcccgtccttgccgggaccggccgcatttgcctcagttttccatgctggaataggagcagtcttgctgctctacgttctcttctggctcaagttggaccttttcacaactctgaagtaccttggcttcctcggcatcttcctcgtgtttgtgggccataggaccctgtcctacctttcctcggcgtcagcaaaacagaagacggcatgagtggacagtgcaagcagagctttcccgatcatcaattcgttttttgaggtggccattccaggccactgggtgtctttgcttggtactctgaccgcaccctagtttttctttagctaacatgcattttgagggaggactcggtttatttcagttggctttgacgaatactgatactaggacaagtaacaggacctcacatcacagtttctgaatagaatggatgtttaatcatagcatttatatgatcattagatatacatcatccttaatcgaactgaaacgttatatgtacccagaaatgatgcaaagttaaataattttgagcgtgtttggatgcacgccacagccggtaggcaca

SEQ ID NO: 118781 - DNA, 280 bp, Zea mays
  unsure (1)..(280): unsure at all n locations
  Clone ID: MRT4577_39815C.1
gcatccgcaggctctcgagctctagtccatcccctcgatctcgtagcgcacagcagcagtcaggcggccatggacgccagcgcagcgatagccggcgggaaagcgaagaacggcgcggccgggcgcaaggccggcgggccgaggaagaagtcggtgacgaggtccgtcaaggccgggctgcagttcaacgtcggccgcatcgtgcggtacctgaagaacggccggtacgcgcagcgntcggcacaggcgcacccgtctacatggccgccgtcctcgagta

SEQ ID NO: 118782 - DNA, 1481 bp, Zea mays
  Clone ID: MRT4577_39816C.1
aataccacccctgaaaaccctcacgaacgaaagacctagcgctctctcccttcgtctctcgcacccggcggcggcggtcgaacgagggcacacggcggctgcagagcgaataggcgctttccaagcttagacagaggtgtaaacccttcgccagaggcctcctttcccgcgctgcttgaacaagatgagcaagatggcgatcagggttcccaagagcatgcgcgccaagcgcgagctcctcaagcacgcgcccaagctcgttgagaatggcaagaagatgcttattctccatggcacaaagactagcgcagttttgaactctgtgctggcagatcttttccacctgaagcgtgatcatgctgtcaagtacaccaagaagaacgacagcatcaggccatttgagagcgggggtgaaacttccctggagttcttctcccttaaatctgactgcagcctcttagtgtatggttctcattcaaagaagaggcccaacaatcttgttttgggaaggacttacgatcaccacatatatgaccttgttgaagtaggagttgagaactacaaatccatagaatcatatgcatatgataaaaagctggcacctaaacttggaacaaagcctttctttgctttcattggggagcactttgagagtgctgaagaactgaagcatttgaaagaagtgctgcttgatcatttcagaggagaggtcgtagagaatctgaaccttgctggtgtggatcggatctatgtgtgcactgcaatctctcccactaccgtctacatgatgcactgtgctctccgtctaaaaaggtcaggtacatctattcctaggatggaactggtcgaagttggaccttcgatggatctggttgtaaggaggcacagacttccagctgaaagtttaaagaaagaagctatgaagaccgctgaacatgctaagaagatgaaaaacgtcactaaggatccagtgcagggcaagctgggcaaggtctacatgccagaccagcaggttggaaagttgaccttatcaaacgacataaagggactaaagagggagcgccgtgaagccaagaaaaaccaggactcaaagaagcaaaaggtcaaccccgagtaaagatcactgaagtttacctttgcattggatacaggtcaggttaagaaaccctggtttgtatctgttcccatctgctgtgttatccaattagaagttgctcgttgtcagattgtgttaaatagtttagggccatcttgttaggctaaagacatgtgtacgactttcacaacaatattgcgtaccaattcatgttaaggctgtctccagcaacaaactctaaaaaaaaaaaaaaaaaaaaatttagcgatccaaacgttcgctgcatcctccagcaacgaacggtaaaccagtcgctaagtatcggacgatgttcgtacacgctattttcagcgattccaaaaaaaaaaaaaaaaaaagggcggcc

SEQ ID NO: 118783 - DNA, 1243 bp, Zea mays
  unsure (1)..(1243): unsure at all n locations
  Clone ID: MRT4577_39817C.1
ctcgaggccggccgggccgggtgagtaatgcaagagtgagatgaaataatagtttatctcgggaaggcgtgcaagtttgccgcggagaacctggcttccatcgattccaccgcgaaagatctgttccacgcagtccggatcagtggcgcgctgggatgtggcgttgatgccggcgtgtatgatggtgttgtggcgagactcaaggcagtgattaaggataccaattccctgttggaattctactattctgtgggaggtttgcttagcatcaaggaacaaggccataatgttgttctgcctgatgcagaaagtacatttcatgccattaaggcacttagccaaagtgacgggagatggcgttatgacactaacagcgctgaatctagcacatttgctgctgaagcattggcgggcgttgtttcactggcagatgcagaggttgatccatccatgatggtagtggttagaaatgacatcgttaagctgtttgacaccatcaagagttacgatgatgggaccttctactttgatgaaaagcatgttgatgctaccgaatacaagggtcctataatgacttctgcttcgngtggtacgtggtgtcacctctttttgcagctgttgcttctggaaaattggatatccctggtgacaagatacttggcttggcaaattcttccttggtattgggctcccaggtagctcaaaggattgctttaatcagattgactctttgtcagtcctggaggacaatagggtcttcgttccgttgatactatcactttcttccaaagtattttcattgacttcgaaagatcagctcaaggttgaagttacatcagtttttggatctgctgcaccttcactcaaagtgaatcttgtgcaagtgttgggatctgactctaaagtcatcaccagtgagaacaaggcatatagctaaatcagtggcttcctctggcaacttccttgtcattgtttttgtgtgttgcagctccaattctctagcatcattctcctttttgtctcaggaacttcaatacgaccttgacaacaatgtccattacttggacattgctccattgaaaattgatgttgggaaatactcgatagtttttgagatttcacttcangaaccagagcaggagactgtttatgctactggagggagaaacactganagtgtattgtcacangactgatcanagttgacaaggcagaaataggaatctctngacatgatgctggg

SEQ ID NO: 118784 - DNA, 925 bp, Zea mays
  Clone ID: MRT4577_39818C.1
gggccggccgggtggttaggtgcatcggaactggccgagacggcagtatgatctggcgaaatatttatagtcgtccccttctaaccccgcgggagatctggccactcccacatgccccagtctcctaaaccctacacatctatctcggccacggtaattgccatcgccatggccgggaggcgcccggcaccggcggccatcctccttctcctcgccgcggcattcgcccccatctcctccgccgttcgcccagtctccgacgcgcacagatccgctgccgtggagcttttcgccccctccgctgacggatccttcggcgatttggagagtacgtatgaggcggtgaggactttccagatactcgggctggagaactataagagtctgtctgggaaggcgtgcaagtttgccgcggagaacctggcttcccccggttccaccacgaaagatctgttccatgcagtccggatcagtggcgcgcttggatgcgctgttgatgccggcgtgtacgatggtgttgtggcgaggctcaaggcagtgattcaggatactaattccctgttggaattatactattctgtgggaggtttgcttggcatcaaggaacaaggccataatgttgttctgtctgatgcagaaggtacattccatgccattaaggcacttagccaaagtgacgggagatggcgttatgacactgacagtgctgagtctagcacatttgctgctggtattgcactagaagcattagcaggtattgtttcactggcagatgcagcggttgacccatccatgatgggagtggttaaaaatgatgtcgtgaagctgtttgacaccatcaagagctacaatgatgggaccttctactttgatgaaaagcatgttgatgctactgaatacaagggccctataatcacatctgctt

SEQ ID NO: 118785 - DNA, 1002 bp, Zea mays
  Clone ID: MRT4577_39819C.1
tgccagatgcccacgaaaaagccgcacgtcctcctgcacaagctgttgacccattctcaaaatttgggccaaaggcagagatatcacatatattccgcgcaccagagaagaggccacccaaggagctctcgctagcgttcacgggtctcacgcttctgccgtttattggattcttgatagggctcgttcgtcttggagtgaacttgaagaacttcccgtccttgccaggaccggccgcatttgcctcacttttccatgctgggataggagcagtcctgatgctctacgttctcttctggatcaagttggaccttttcacaactctcaagtacctcggcttcctcggcatcttccttgtgtttgtgggccatagggctctatcctacctttcctcggtgtcgacaaaacagaagacggcatgagtggacagagttttttccgaccatccatttcttgagggggggccattgcaggcccttgggtgtcttatgagggagggctcggtttatttcagttggctttgcagaatactgataactagaaaaagtagtaggacctcaccttcgtgtattatgatgatgcacatacaattttctgagtagaatggatgttgaatcaaaaaaaaaaaaaaaaaaaaaaaaaaaaaaaaaaaaaaaaaaaaaaaaaaaaaaaaaaaaaaaaaaaattaagagaaaacacccaaaagggcggaaggggagaatgtccacacaaagggggggcgaaaaggacgaagggggggggcggacccggccgggccccgcttatggggccaaccaacccccctggggggcgttgttataggctcggaaatccaaaaacccacgggcagcaaacagaaaaaataatgaaaaggggggaaaaaggagcacggccgctaacagaaaaaaatcccagcccgatcgtcttttttaaaattgcggggccctgcgggggaatgggccccccctggggcggggtattaaggcaagggggggggggggg

SEQ ID NO: 118786 - DNA, 818 bp, Zea mays
  Clone ID: MRT4577_3981C.1
tgggtaccccttcgaggccggccggggtactgctggagagagagagagagagagagagagagagagagagagagagagagagagagagagagacgcctccgccgctggaatcaggcgatgggagacgcggacgcctacgcgaagcgggtgctactcaccgcagctggcgacaccgtctcgcgggggatcgcctctaccctcaccaagcacggctgcagattggtcttgttgggcgacgagggcgcgctggccgcgacggaggaggaggcgcggcgctgcggggtagggggcggatgcgtcgaattggtcgggctggacttcaaggcgtgcggtgaggctgctgccgacgcggcggtggatcgggcctggcgctgcttcgccggactggatgccttcgtcaactgctactcctacgagggcgatcgcaaagcggttccaggatacaaaatctggtggatctattgtgttcttgactcagattattggtgctgagagaggattgtatccaggcgctgcagcatatggcacaagcttgggagccatccaccagttggtccgtctgtgtgcgatggagcttgggaaacacaagataagggttaacgccgcctgccgcggcctgcatctgcaagacaagttccccgtgtccgtgggcaaggagaaggcggagaaggcaacggcggaggtgatgccctgcggagatggctggatccggagaaggacctggcgtcgacggtgctgtacctggtcggcgacgagtcccggtacatgacgggcacaacaatattcgtggacggtgctcagtccatcgtgcggccctc

SEQ ID NO: 118787 - DNA, 297 bp, Zea mays
  Clone ID: MRT4577_39820C.1
acatcctcaagaggccaccttgcatagcttcctcacagaacttttctctgttcctgaaaggcaatttcggtgcaggtctcatagaataagcacatcttacagctctgggcaggctattctagtcacaggtcctcatggtccgggctccagggagcacctggaagcagattgtatcccccgagtatcacttttcaggagcagggatgaagtggcagctgcctgctgcagttatctgtcacattcactaccctgaaacaggacacactcttcaagaatcaccaataaccagagttcgct

SEQ ID NO: 118788 - DNA, 345 bp, Zea mays
  Clone ID: MRT4577_39821C.1
atggcatacacacgctagcgtattggacatatggtctcatttatgcctgtactgggatgttgtctcttgacattccgatcacatcacgatctccgtatttttcgtctgaatcccagagaccaataatcgatcatcttagctggttactagctgcttctataatgtaacaagcgctaccttattcatgagccatacccactgattactggttgtatctatgacataaatgtagctacacatccgcaacatgtacattacacacaatatgaacttatctgacgtaagatactccttccatttgctatgaaacacatgttgcccctgcaggattcttgctgtacacac

SEQ ID NO: 118789 - DNA, 499 bp, Zea mays
  Clone ID: MRT4577_39822C.1
ggaacccccaccttgaatagttcattttcatcacattaggctgtaaatactccctccgtcctaaaatattagtcactttagctcttgatctttatgcctatgttcattaattggatgatgatgaatctagacacatatataaaataaatatattaattattgtatgaatcaactaaaatgttaaaatgaattttatttctgagacggagggagtactaaacaggagaaagactagcatattccaaccctgtagcaagctgctcgaaatccactactaaacagctattccatcatggctggtaaaggaggaatgcctctagaacccacatgtggcagcaaagatgggctcaatttcattcctataatttaagtcgtaccacaccccatcactgtagcaagctgctcaaaatccgctgcaagttccaaatggtgtcattaagcatagtacaaaaaacaaaacaaagaactacatgccacatgaagctatctccagacagtg

SEQ ID NO: 118790 - DNA, 276 bp, Zea mays
  Clone ID: MRT4577_39823C.1
ggtcaggggagacctccaggcgcagggaaggacggccagggtgacacggaagcatgcgacggctgctgatccctctggccctgtggctgagtgcggtgggcgtgggcgtcgccgagctcatggaagcccagcgccggggcctgcatgtggctctgaggaatttcacgagcacccgcccgtgcagtgggccttccaggagaccagtgtggagagcgccgtggacacgcccttcccagctggaatatttgtgaggctggaatttaagctgcagcagac

SEQ ID NO: 118791 - DNA, 353 bp, Zea mays
  Clone ID: MRT4577_39824C.1
gcaagggttctggtttttttttattttttactttacattttagttaaaacagttagatccaccttagcgacccgacccaccttaacgaccagagaaaaagcctaaacagggggggctgagaacataaaccaccagccggggggggacggaattagcccaaacaaaattttgcgcccggggagcccgggggcaacagaaacaactggcggggtggggtaaagcctggggggcaaaaacaaaagccccaaaatgcaggcccggaagcattgcaccgaaaggcatttgggcccgcggggccgcaacagacgcaaatgaaaaggccggggggggggctctaccacgggggcaaaaac

SEQ ID NO: 118792 - DNA, 1025 bp, Zea mays
  Clone ID: MRT4577_39825C.1
ctcatctaggcgtcggtcagagctctctcgagctcgccagcggtggttggtcgtcgtcgtcgtcgtcgtcgatggggaggccgccgtgctgcgacaaggcgaacgtgaagaaggggccgtggacgccggaggaggacgccaagctgctggcctacacctccacccatggcaccggcaactggaccaacgtgccccagagagcagggctcaagaggtgcggcaagagctgcaggctgaggtacaccaactacctgcgtcccaacctgaagcacgagaacttcacccaggaggaggaagacctcatcgtcaccctccacgccatgctcggaagcaggtggtctctgatcgcgaaccagctgccgggaaggacggacaacgacgtgaagaactactggaacacgaagctgagcaagaagctgcggcagcgcgggatcgaccccctcacccaccgccccatcgccgacctcatgcacagcatcggcgcgctggccatccgcccgccgcagccggcgacctcccctaacggctccgccgcctaccttcctgcgccagcgctcccgctcgtccacgacgtcgcgtaccacgccgccggaatgctgccgccgacgccggcgccgcagcggcaggtcgtcatcgcgcgcgtggaagcggacgcgcccgcgtcgccgacggagcacgggcacgagctcaagtggagcgacttcctcgccgacgacgccgccgccgccgcggcggccgcggccgaggcgcagcagcagctggccgttgttgggcagtaccaccacgaggccaacgccgggagcagcagcgctgcggccggcggtaacgacggttgtggcattggcgtcgggggcgacgacggcgcggcggcgttcatcgacgccatcctggactgcgacaaggagacgggggtggaccagctcatcgccgagctgctggccgacccggcctactacgcgggctcctcctcctcctcgtcgcccgggatgggctgggccagcatgggcctgctgaacgctgattaa

SEQ ID NO: 118793 - DNA, 321 bp, Zea mays
  Clone ID: MRT4577_39826C.1
atatctctctacgacttcgtcgctttcatccgcgccgagacatccttcccccggcatcactcgccttagtatatcgctctctcaatcttcacaccatgcaccgacgagaagcaccaaacctacatcccctatctcttcatgcgctggactcgtcgatgtatgtccatgtgataggacatctcactgtacgactacctcgctgagaacgccatcaagcacatgatgtacctgcagcactacgaggtacactactccaaaaagaaggtcaccaaggagcagagtgcgatcctcgagcgcctctgaaatctgtcatgatgactc

SEQ ID NO: 118794 - DNA, 340 bp, Zea mays
  Clone ID: MRT4577_39827C.1
cgggcgtcgtccatgctgggggatttttatgggcctctcccgcatttttcccggcctgcccgaggtctccgggctcaggagctccgcgtcgttgcccatgcgcctgaatgccaccttcgacgacttcatgggcgccgtcttcttcatgacccacgcggtcggcacgagcggcgggtcgcggcgggcgccgacggaggcgatgctgaaggtggccatcaacgggttcggtcgcatcgggcgcaacttcctgcggtgctggcacgggcgcggtgacgccttgcccctcgacgtcatcgtcatcaacgacaccggcggtgtcaagcatgcgtcccacctgctc

SEQ ID NO: 118795 - DNA, 613 bp, Zea mays
  Clone ID: MRT4577_39828C.1
ttttagagtaccaaatttgtaatcaaaacaaaactaaaacgcattacagtttgaaatacggaaattacattatatgtaaacatagcaatgtcatatatattatatacatatacgcaccatatataccatagtcttatgcgaagggaacaaaatataccataagttcctctctaaaaatagatggttactatagatgtgtccaacatccaagcaaataccaagttagcgaaccatactagatgctgccgcaagttcttgctccaaactgtagcacccagacatcattggaattgttaaatgttcctcattataaattggattgatacgttcatgtgggtgctgagcttctgcgcataacaaaggttccatttctccacccttttcaatcaaaagatgtgttttattccgtagcctctttgttcttagacattgcaatctcatatctacttctttcatgcttggtctatgtcctcctttggatcttaagcacacttctataagtgaggagatatcattaatctcttcttggtctgcctcttccacaacttgagaatctattatttccatgagagtcccttcctgtagtccttcaatgaagtaatgagataagttt

SEQ ID NO: 118796 - DNA, 681 bp, Zea mays
  Clone ID: MRT4577_39829C.1
ggaaaaacaacctttcatattcccaaaaactggttttaagaactcttctgcatgcccattgagcactcccaaatgggaaaatggaaggtcattttgaaatgaagcacatcgacaaggctggatcatcaacattcaatgttgcaattgcgccattctccctgtcaattcttggtgacgataatgatgttctgctatgaactacactgagggcttgtttgggagcaaagggattgaagggaattaagggggctacaaaagggattttagctctcgatccccttctgcaaacaagccctgagatttaaactagacacacaaacacaaatatttattgtaagtgatgtaattgagcgcaaggttcaggtggaactactctggttgacttatggctggagccaagtgccctggtgcaaggtcaggtagagttctctgggatgttgaatctggaccatgcgagtatcaattgtgaggcacaacaggacatcctaccaattgtacttctaaatgtacagcatggaacttagagcttgctacatgtattatacagtacctttttatttttcccaaaaaaaaaaaaaaaaaaaaaaaaaaaaaaaaaaaaaaaaaaaaaaaaaaaaaaaaaaaaaaaaaaaaaaaggaaaaaggaaagaaaaaaaaaaaagggaaaggaaagggggaggg

SEQ ID NO: 118797 - DNA, 232 bp, Zea mays
  Clone ID: MRT4577_3982C.1
agggcattcaaagtgctaggaatagtggtgctagcatacactattcatggcagatgtgtgcaccaacccgctcacagtgaaggacactatgtgatgcaaaccggaccgcttagtctgaccccgcacggtaacatcatgtgcgacgatgtgaccacagggcatgtgggcagacaacctgtgctctacgctcaaggagaggctgactggcacttgtacgcttagcgccaagacc

SEQ ID NO: 118798 - DNA, 1807 bp, Zea mays
  Clone ID: MRT4577_39830C.1
aggggactgagatgtccgaccgtgttataaatgccggagagtcttgagaggaacgaaagcccatataaattttaaaatatataaaaaatacagataaaagggatatggttgaagatagtgccctcaagcctcaacctccaaattctccctcgttgtcttaccgtgtcgttgttgccgggttttcttggcgagcgacggagccacagaaatggagtgcaatacgggcgcctaattttagcggcggggaggggagcgaagcctgggcagccactcgccggcctccaagaaaccgtcgccattttttcatccgagtgccgccgattttgatttcattattgtctgtcttcgtggggaaccaattcggttttgtttcggaagaagggagaggaggatgcagtgggcgggtctgagatcgcaggcgccggttcccacggcggcgtggacggggccgaggccaagaaccgcgaggtgcccgcagggtagattccccacagcgcgccgggcgctggtggcgtcggcagcggcctcggacgctaattcgagctcgaattcgccggggaaggacgaggagggggaggaggtggtgcgaagggagaaggaggagaaggcggtcgcgtcgcttctgatgagaagccagaagtacgccatgctaaagcagcagctcgccgtggccgcccaatttgaggattacaaggaagcagcgaggttgagggactcgctgaggtccttcgaggagaaggagcctgtgttgtgcctccgccggttgatgaagaaggccattgaggaggagaggtttgaggatgctgctaaatacagagatgaattaaagattttggctccacactccctcctcaaatgttctagtgatgcaactactttggggataagagttcaagtcaggagcgtctatattgaaagccggagccagccattgaaagggcaattcttttttgcttatagaattagaattacgaatagttctcagcgccctgttcagcttctcaaaaggcactggattgttacagatggaaatggaaggacagaaaacatttggggagttggagtagtgggagaacaacctgtcatattcccgaagactggttttgagtactcttctgcatgcccattgagcactccaaatgggagaatggaaggtgactttgagatgaagcacatcgacaaggctggatcatcaacattcaatgttgcaattgcgccattctctctgtcaattcttggtgacgataatgatgttctgctatgaactacactgaggacttgcttgggagcaaatggattgaagggaattaagggggctacaatcccttactattcaattttgaatagtaagggattttagctcacaatccccttctgcaaacaagccctgagatttaaactagacacacaaacacaaatatttattgtaagtgatgtaattgagcgcaaggttcaggtggaactactatggttgacttatggctggagccaagtgccctggtgcaaggtcaggtagagttctctgggatgttgaatctggaccatgcgagtatcaattgtgaggcacaataggacatcctaccaattgtacttctaaatgtacagcatggaacttagagcttgctacatgtattatacagtacctttttatttttcccatcacggtatcaccttagttatcgcggcctttgattatattgtatatcagctcagcaaaatatggtgttttttgttggaactgcaatgtaagatgtttgatatgaccgttggtgcttcaaatggacccagtgccggtgcattgcattgc

SEQ ID NO: 118799 - DNA, 1164 bp, Zea mays
  Clone ID: MRT4577_39831C.1
ttttcttgtaagccagcatcagtactgcccttgtttctcactcacccaaactatggggtaatcagtgctaacccctgaaagctgaagtaaagtcatcaatcattgtttacactatcagcggcttgggggcaacccgcatttcaagcggtggggaatgttaccagtccggcgagtgaagctactgatactgcaaacgcgggaaaaaaaaaggtgcgttcagtggtatgtgtcttccgaacaagggtgttcatgggccaaagtgtgccaaatgagttccagctttaggcgagtgggccaaatgagtgtgggatgcgtatgagtatgtaataaccaggccaggaagaatttgggtaaaggaatacatctatcgccatcttcctgtcattctctcccacacgctactctcttctctgatcttctctccctcgaatcccagtagcatccagtagctaacatctgatatcagactagcgcaatccgggatcgtcatccgcgttcgattgctgtggtcggaatggaatccgcgatgcatcatattctggaagctttgggtcagatggaggagcgattgacggcaacgctggaaggcagatgcggcgcactcgagcaacgcaacacaacggccatggcgcatctgaggcgcggctgcgtcgggctgggcgatggcgcgtgcgcgtcagtggccacggccatggacaacttctccttcgactcgttcaagggccccaccactaccaccacctccgccgccgccgcgctacagtacgacaacgacgagctggtcctcgatgcagggcctattttcggtgaggaacctatcttcgatggagagtcgtctccgtccacgaggttcgactcgccctcgccgttcaacccgtactacttcacgctgccgcagacgccagctgagctggtggacgagccaagccacaacgaggcaagtcctctgtctctcgtccacgacgactgggtcgacctcttcctccagaccggctcctgccccgagtgctcgcgatactgcctcctcctggaccacatgggcctcggctacttcccctactctgagctcgccgccgtgcccacccacccgcccacgccgccccccccccccgccccccccccacgcgcccccccccccttgcacccctcccccacccccccgct

SEQ ID NO: 118800 - DNA, 384 bp, Zea mays
  Clone ID: MRT4577_39832C.1
cggacgcgtgggcaccacggcaccagcggttcagcggccaccctagtcagtcagtcggagcgaagccgcgcctcgcgccctggcctcgcgaccaccactgcttccagttctggtgcagtgtggaagagcgcccagtgggagagattcagagagaggcggcgatggcgcggcatttcgtgctgaacaccggcgccaaggtcccctatgttgggctcggcacatggcagtctgaccccggcgtcgtcggcaacgccgtctacgccgtcgtcaaggcgggttaccgacacatcgattgtgccagagtttacggggaaaaaaaaaatttttggaaggaaagggaagggtaaatttttttggggggggatattttttttttgggggggg

SEQ ID NO: 118801 - DNA, 359 bp, Zea mays
  unsure (1)..(359): unsure at all n locations
  Clone ID: MRT4577_39833C.1
ttgagatgaaaatatttaatgtgaagcacataaatataatagtatacatcacattacaaaactacgatgaggctattttgcggcatgaccatatttgagatgaaaacatttgttgtgaagcacataaatataatagtatacatcacattataaaactaagatgaggctatcatgatgtctatcatcattgcagtttagttgtagagcaaacggacacgataatacacaataagaagcatttggatctggcttccaagtagcctccattacacgtaaactagagtttactgatacatgtcgnagaaacatatataaatctggacggcctttagctatgtacacaaaaatgggcgacattc

SEQ ID NO: 118802 - DNA, 630 bp, Zea mays
  Clone ID: MRT4577_39834C.1
agggacttttttttttttttttttttttttttttttgcgcgaggaagcggaaaagacaaaaccctctcttggagaaagccagtccggttggtaattccactataacttgataactttatggaataaatacctccctgtggagcccctgttgatggattctggcaagcaaaaagaagacctaaacccgactctaaaagcttcagttgcctccctctctccgccaatggctaggttagctatctctctctctcgctacgcccctgacccttataagaaatgacacatgccatcccgatttgaaacatataagagtcgtggcattctccgcattaccttgccctatcttcacgcactcaaggatgaatctgtgagagtatactttatacccaaaatctggaatctaatctttaatgacgtgaatatgtgctagtataccttttatctggaatctattctttcatgacgtgaatatgtttggtgttagtggactgacagagtgagcagtaaaggtagaaaaaaaaagatccatctgcgagtggttcggctttttccttaagcaaggacggagccgtcgagtgaggattggctgagcgtgctttcgctgctcgtggtggagtacctgcccgggcg

SEQ ID NO: 118803 - DNA, 260 bp, Zea mays
  Clone ID: MRT4577_39835C.1
cgttcgtgtcaccctcccatcaccgcagtgctctctctctgttcccactctcccacacttcctcgagtgacgcctgtttctctcgcgtagtatcggtgatccagacaccgagtgtcatacgcgtcactgaccgtgcacatggcggcggggtctatccgggttaccatggaggtgggcgccgacggcgtcggctcataaccatctggaacccgtgcttcaacgcgctccagcccagcatcatcgccgggatcaaggacaag

SEQ ID NO: 118804 - DNA, 1828 bp, Zea mays
  Clone ID: MRT4577_39836C.1
tggacgcgtgggcggacgcgtgggcgcagctgtgggattttcagggcagagggttggtgatgggctgatggctatgctagttctgtggctggcatggcttctagtctctctgatcgcagtatacttcctcgacctctatgtccacgctcgccggggccttccgcccggaccccgcccactgccgttaatcggcagcctccaccttcttggcgaccagccacaccgctcactcgctcgcctcgccaaattccacggcccgctcatgtcgctccgtctgggcgcggtcaccacggttgtgatctcctcaccggatgttgcgcgcgagttcctgcagaagcaggacgctgtcttcgccaatcggtttgtgccccatgccatcggcgaccatgtgaagaactccgtgccctggttgccgcactccggacgctggcgcgccctcagaaagatcatggcaactgagctgttcgcgccgcaccgcctcgaggcgctccagcatctacgccgccagaaggtggaggaactcgtgggccacgtccggctactggcactgcagggacgggcggtggacgtcggcagcgtggcgttcaccacgtccctgaatcttctctcgcgcacaattttctcctgcgacctgacgaacctcgacgaccacaccggatcggcgaaagaattccaagaggtggtgacagagatcatggaggttgccgcgagtcccaacctgtcggatttgttcccagcgctggcttgcgccgatctgcaaggattgcgacggagactggcaaagctctttgcacggctgcaccaggtgttcgacgtggaggtcgaccggaggttgtgcgagcgtgatgctggcgatcgccggaagaatgacttcctcgacctgttgcttgacaccgacggagggacggcagcgttggaccgcgactcgctcctgtcattattcacggatttgtttgctgcaggaagtgatacgagctccagcacagtggaatgggcactgacggagttgcttagaaacccagtcccaatggctaaaacgtgcgatgagctcctggcagccactggcgcggcaagaaacattgaagaatctgaaatcgagcagctgccctacctccaagccgtggtaaaagaaacttttcggctgcatcctcccgtcccactgctgttgccgcgacgagctggggccgccacgcgagcaatgggtcacacgattcccaaaggcgcacgcgtgctggtaaatgtgtgggcgatggggcgggacggagacgtttggccagatccagagaagtttatgccagaacgattcctgggaaggcctacggattttagaggtggagacttggaactcataccgtttggtgcaggacgcaggatctgtcctgggatgccactggccagcaggatggtgcatctggtccttgcatcgttgttgaatcagttcagatggaggcttcccgccgaggtcgaaagagatgggactgacgaaatggctgagagttttggtgtcactctaaagaaggcgtcgcctctttgtgctatagccacacctgtttgaatgagaagcccagatcgacagggtcaaaaaaaaagtattgagtgttcttctgttgaataatgtttcttgcaagtcattgaagtcattacgagtcttacggtgattggcaaaaatttagaggccgtccaacgggaagaaatctaccgatgataaaacaggtattattttattaatgttaaatctttaaaatgtcacaatattgatggaagaaatctaccgggacttgtattaatgttaaatatatatttgttttattttaatgagggtaacttt

SEQ ID NO: 118805 - DNA, 1277 bp, Zea mays
  Clone ID: MRT4577_39837C.1
cattgggtacctcgaggccggccgtcatcctcccagttgcgccctcttccctccctcctctcgctcgcctcgcccgtgtctctgcctgtgccgtgtgcgtgactcgcggcgcgtgtcgtcgtagtgccgcaggggctcgggaacaacacgggcgactacgcgcggctcgccgcggcgctgcgggacgaccacagcctccccgcggccgtcgtggcgcgggtcacccgccccgactggctccgcaacgccgcgggcctcgccgacgccagttactggcggggcaccctccgcccgcgccccgtgctcgactggtacctgaagagggtggacgacgcggtgtccgaggcgagggagctatgcgcgccaggtgggaagatatcactgatagggcattcagctgggggctggctcgcgcgcgtgtacatggcagagtttgatgcttccgacataagtctactcctcacccttggcactcctcacctacctcctccaaagggtgtacctggggtaattgatcagactagaggactactgaactacgtcgaggagaattgtgctccagcagtttatacaccagaattaagatacgtgtgcattgctggaaggtacattcaaggtgctcctcttctggggaactccgcagctgcttctgacgagatcctcgcagttgacactccttcagaaggaggcgatgctgttattgtcagtagcagtgacaattctacatctactgcatcagctgtctcgtggcgagcccggttcgttgggcaaggttacaagcaggtttgtgggcgagcagatgtgtggggcgacggcgttgttcctgagatggcagcgcatctggagggagcgctgaacgtaagctttgacggtgtgtaccactctccggtaggttccgatgatgaacaaaggccctggtatggctctccggcgatcctcaagcagtgggtgcatcatcttctcagctgagatagtgacatacaagaggagctagctgccggaacagacagaaactgggatgtgtcctgcagctgacatgacaccattggccaccaaagggcaaaggggaattttttctctgaaattgaggtgcatgatatagcatggcagatccctggttgtgtgttgtcagtttctgtagataatttaatcatttaacctgaggtctttttgtccaatcttttctctgctatctcaatcagtttacccatatctatattcaaactccagtttacaaaaaaaaaaataacttaaaaaaaaaaaaaaaattataaaaa

SEQ ID NO: 118806 - DNA, 285 bp, Zea mays
  Clone ID: MRT4577_39838C.1
ggcttggtccccaggtggaaggatctgttctgcaaaggggacagcaaggtacctttaggctaaaggactcggcgtcgagtattctagttgaagatctaaagagatagccaccttgctgccactatgcctaactttcctggcaactggaagatcatccgatcggaaaactttgaagaaatgctaaaagctctgggggtgaacatgatgatgaggaagattgctgtggctgaagcctccaagccagcaatggagatccaacaggagaatgatgacactttctacatc

SEQ ID NO: 118807 - DNA, 190 bp, Zea mays
  Clone ID: MRT4577_39839C.1
ggaaggcgtagttggatgtcgttagaggctctgcaatcccaaatacgcagagaggggtggacgcatcttgatgacatcattgtctaaaggacgaagcgggccaatcttattgctgctcttcgagagagcttataccagcgaaggctagctgggctaatgtcgaatccagacaaatgtgtgttctgagtga

SEQ ID NO: 118808 - DNA, 296 bp, Zea mays
  Clone ID: MRT4577_3983C.1
acccatctataccatcctatttgtttcaactagcgatcgcggcaagcgtcttagggcaacgaattggtcaattgctacaacaatccttctcgcatcctaacaatacaaaccatctcaacgcaaccaaaccaacagttcctatcagcacttaaccacctagttattgtaaaccctgtgacccatttgccacatcaggttcttgtatcacaatccacttcctctagcacacgtagttgcattaccgctacaacaacaactgccacagtttctgccatgcttaatcaaataacatggtg

SEQ ID NO: 118809 - DNA, 467 bp, Zea mays
  Clone ID: MRT4577_39840C.1
taaaacggcgcgggggggggggtttttttttttttggacaaaaaactattgattattataatttaaaaacctgggccacattaaaagcaacacgaggagagaaaacagagaggcagcaaagcaagcccaagggcattgaggggctggtctgctaacgtaatacgtgctacggggtggcaaggaccagggacacgacgacgactacgggagggacactagacgaagtgatcactagtggggggggtgcatgatctacttcttgtattatggcccagtctgatgcatgggcacacacgtagctaggacatgtgtggtacgacgactactggatgggtggtgatgggcacctacgctgggatgcaacgggcgaggtacctggactatgggtgcatcgggcacttaatcttggtacacggggacgtgggggatgatggggcactccgacggagaacgcggacttggagggg

SEQ ID NO: 118810 - DNA, 243 bp, Zea mays
  Clone ID: MRT4577_39841C.1
ccgggaccccgggcccatttggaaacacccacgggatttgggattcaagaaaaagaacgaggacccttaagtcgaaacttgcatgaagcccttttaacttaccacagaaggaaaaagctggaaaagccgcttccgatgggccggccttggtgctttcatatttcgcaagggagccggggcgcttgatgaaataatttgggggagccgggccatggatttctggggaacttaaactttacccag

SEQ ID NO: 118811 - DNA, 510 bp, Zea mays
  Clone ID: MRT4577_39842C.1
ttttctccaggatcccttctttcaatttactcatgatgctggaactatgttcgagcttgatcattctgcagttccagaaaaaaatgcaccaaaaaaatacatctaggtgtatttctcatttgtctgagctttcaggtttacctgatgacacagatggcttccctgaaaccgctgttgcacaattctcaaatccctcatcaacaagcaaaatggaagcaggttccccgatgcaagccatgatgagctacaataccaagtggtttcccaaggattttctagagggccaaatatgggctgtatttgattctctggaccggatgcctaggtcttatgtcaggataattcatgtggtttcatctacttcagtttttgtattgaagttggaacctcaccctatgcttaatgaagagatacagtgcgttgaagatggtctaccggttgcttctggagcatttcgcgctggcactgaaactacttacaaggcacacctgcgaattctcacaccctgca

SEQ ID NO: 118812 - DNA, 198 bp, Zea mays
  Clone ID: MRT4577_39843C.1
cgtgaaaaatctgcgtggaaacatgctttttgttgcatacaagagagttacaaacacctaatggtccatatggtttgacaaacaggttaagcatagttgggcaagcttgactttttattaccctggacccgaacaatccctctatagaaatactggggagatacctctgcagtatcccgtcgtagggcaaggatacca

SEQ ID NO: 118813 - DNA, 712 bp, Zea mays
  unsure (1)..(712): unsure at all n locations
  Clone ID: MRT4577_39844C.1
ggaaaaccattgctaatgatgctggcgggaagctgtacaccatcttggaaatatgccgcatgtctgatgggatttacaaagagcatccggatggcgtgcggcctggtggcgagaatgttttccctgcccttccaccatcccctccccgccccctatccccccctcgccgcccgacacacacctctctccggacaacgccccgacgcttctcccccacgccgatgcacacccccccccccccgcccccccccccccccgccccccccccccccccccaccccccccccctccccccccccgcccccgccccccccccccgcccccccccccccccccgccccccccccccccccccgncccccaccccaactcccccccccccgacgacccagcacccccccaccaaccaccaacccgcccccccccccccccacccacccccccccaccacccgaaaaaccaaagacgcccaccaccacccccacccccccccccccaaacccaacccccccaccacccccccgccaagcccccacccacccccccccgccgcccctcccacccccccggtatccccccccactccgacgcccccccccccccctaccccccacgccctctccacctccccccacccccccccccccccacccccccccccacgcccctcacccgccttaccaccaacaatcgaacccccccacacaccccc

SEQ ID NO: 118814 - DNA, 420 bp, Zea mays
  Clone ID: MRT4577_39845C.1
gtaagctcggaattcggctcgagcagacctgcacccagcagttctcgtcggggggcggtatctgaaccttatccggggcggggcttagcgcgcgtactgtggctgtggctcatgcggtggaggatgagagcggtggagcggacctccctgagccttgccattgcttaccagtgactcgcgctcgcaccagcagccctgactgtggtccaatctaggacagacattgctgcggtccccgacagggtatactatcatgtagggaacgaccggacgcgctgcacatggcattggacaggggctccatggagagactggtcctaagaatgaacacaactgcccagctcgttgaacaggtgcgaaaggccttggtccgagtgaccactctcttcactgcgatggacgtacattccacagaatgat

SEQ ID NO: 118815 - DNA, 975 bp, Zea mays
  unsure (1)..(975): unsure at all n locations
  Clone ID: MRT4577_39846C.1
ggccgcgggtttttttttttttttttttcgggtatacattaaaggagtggccgcgttatttttttttttttttttgtcatttaactctcagggagcccgacttttttattgaatctgtagccacctaagaaaatccatagccgcgttcccagacccgatgaacgcaaaatgcaattctgaaagaagccggaacacgccaaagccaacccttccaaccgtgatacaccattgcaccttttatcggttgctcttggccacacgctccaactcatccttcttcttgatagcgtaagagttgctggaacccttggcagcgttgataagctcctcagcaaggcactcggcaatggacttgacattgcggaaagaggcctcgcgggcaccagtggtgaggagagagatagcctggttgactcggcggagaggagagacatcaacggcttgtcgtcggacggtaccggcggaaccaattcgggtagagtcttcgcggggaccgcagttgacgatggcgtcgacagcgacctggatggggttctggtcggtcataaggtggatgatctcgaaggcgtgggcgacaattcggacagccatgagcttctttccgttgttgcggccgtggtgcatcagagagttggtcaatcgctcaatgatagggcagttggccttgcggaatcgcttggtggcatatcggccagcggtgtgggtgacgtagacggggtttcgcagggaaatatagtcagtcagggagatgtcgcggacctcaacatcgtagtcccacttgttgaagagcttgacgttgccaacctccttgacaacatccttgggaagcacctcgtagagggcggagttctcgacctcgatctcgccgttgtcagacatttttgctgtacagtcgggttccgggactggcgttagtagtgcgggccgggatcttgcctgtttttgatttggccctgggttccggcccggccnngg

SEQ ID NO: 118816 - DNA, 587 bp, Zea mays
  Clone ID: MRT4577_39847C.1
cgttgctgtcggttctgtattctgtaaagcttatgaagtaattttttttttatcttgaaaataataatactaaaggatgtgaggttacctttcttctatctcaaccgatgcaacaatttgctgaacatgtatttcctgcgaggtgaccaggcagcgtgaagatgtttatcgggtcataaaagcatttgcagtgaaaggcgagagaataggtcctgaagcaacaagatttcttcagtttttggtgcagaattctttcgctacatataaatttgatcgtaatgttctgattctgaccgacaactgaatgtttatacatgtgatgatttattgtcaatgctttaaccctgaatatcatttttccataactgttgtatacttgtattcttatctatttcaatatgaacatacctaatggctaatgtaggtataatctggctcctgagtggtctcgtaaggttctcatactgcatgttcttttacggagatgtgtctttgcatcctcagtaccatcggctcattcatcttgaacttgaatttctgaattatttggtagcataaaatattaatatgatctttgtaaattcatt

SEQ ID NO: 118817 - DNA, 336 bp, Zea mays
  Clone ID: MRT4577_39848C.1
gctgcgccattctcagccgccgccaatcccttcccgtgctccgcaacctctgagttagaagaagagatgtccggcaagggcgatgggccggctatcaggcatcgagctcggcacgacgtactcttgcgtcggcgtgtggcagcaccaccgtttctagatcattgccaactaccagcataaccgaatctcgctttcgtactaccctgagaattactactagcgtgcattcggatattcatgcggaagacctatagatgttacttgaagcctacttcatgcagatgcatggcatttgattcacaattgggtcagtttggctctatatggatgacacat

SEQ ID NO: 118818 - DNA, 614 bp, Zea mays
  Clone ID: MRT4577_39849C.1
aattcggcacgagggcggcgcgcctggaggagacggaccaggcgctctacggggccttccggggcgccgcaaactcgctctcgcagctctacactctcgccatgggtgcgcagaaagcctcctttaacgccggcgaacgccacgccatggaaaaactttatgaatggatcctgaggcagcacgaaaatggtttgaggctaacagttgctgatgtagcttcccgtatccaggtaagtttgcaatcgttcccttatatgtttctatccaaatttaatatggaaactcgggtaaaaatctgggatatattgccacttcattgtttagttctaaattacatgctaagtggtactgacttgttgccttaatgaacaatgatttatgacaaatgagataagatgaacctgccgttcttgcagacttaacttagatcctgttcctatcatctgattatcttgtttgccatgccattttacatctccagctgtagtatgttcgcatacagtttcaccattgtccgtccttttgcacatattcaggcaacgaatgattacacacttatgtatcctctgtgtgtgtagcttgagattcagtatggaggtgacattgcatcagcc

SEQ ID NO: 118819 - DNA, 1101 bp, Zea mays
  Clone ID: MRT4577_3984C.1
ggagggccagcccacaggacgcaggcccagctcagtgaggcggcctaactcgatgccggtatgcaggtgcatgatccttgcccgcagctccactccaaaccacgtgctgcactgtactgtactgtactgctggaaagagagagacgcctccgccgctggaatctggtgatgggagacgcctacgcgaagcgggtgctactcaccgcagctggcgacaccgtctcgcgggggatcgcatctaccctcaccaagcacggctgcagattggtcttgttgggcgacgagggcgcgctggccgcgacggaggaggaggcgcggcgctgcggggtagggggcggatgcgtcgaattggtcgggctggacttcaaggcgtgcggtgaggctgctgccgacgcggcggtggatcgggcctggcgctgcttcgccggactggatgccttcgtcaactgctactcctacgagggggaggtgcaagattgcctcagtataagtgaagacgagtacatgaagaccatcaaagtaaatgtgataacaccttggtttctaatgaaggcgatcgcaaagcggttccaggatacaaaatctggtggatctattgtgttcttgactcagattattggtgctgagagaggattgtatccaggcgctgcagcatatggcacaagcttgggagccatccaccagttggtccgtctgtgtgcgatggagcttgggaaacacaagataagggttaacgccgcctgccgcggcctgcatctgcaagacaagttccccgtgtccgtgggcaaggagaaggcggagaaggcaacggcggaggtgatgcccctgcggagatggctggatccggagaaggacctggcgtcgacggtgctgtaccttgtcggcgacgagtcccggtacatgacgggcacaacaatattcgtggacggtgctcagtccatcgtgcggccgcgcttgcgatccttcatgtagcctagcctagggttaaatgcatcggctgtccctgaacttcaaaaatgtgtttctagtccttaaattgatatttatatataaaaaatagtgtatggtaggtctatttctgggccatatcggtccctgttt

SEQ ID NO: 118820 - DNA, 299 bp, Zea mays
  Clone ID: MRT4577_39850C.1
caccttcttataacgcacacaagtgtaacaacccggggggccaatataactaccctcgggggctacatcatctgtctgcatgcgcccctaccgcgaccattctcctacagtgcttacaagctcatatagatttccttctttccaccgcacctgccaccaaagctgactcaagtatgcgctaacccaattctacaaccctacaagatccaacatgcaattgcatcagagcatctaacctttatcacccttgctcctacaacaatcatcagtcctattacatgacttaccttcagtgcata

SEQ ID NO: 118821 - DNA, 388 bp, Zea mays
  Clone ID: MRT4577_39851C.1
accccgggggggactggtccggattttccttggcgttctacacgcccgcattaacaccctgcggacgttgagcctccgggggggggctttgaacgagtatcggcggttatgtcggatgctctaggcgatccactgcacctcgttcatcttccttcctggtgtctacactgagtcaagctcgctatatctgggaacgccaaggctgaggctggtctgtacgcctaccgccttgatctgtccttactcttcgagctgaggtacgtgcaggccggtccaggagcttcttccggcagacccaccagcgtccaacggagcttcatgcctgcgcccagggtcattgtgcgcgctacatcccacgctcataaccagtgccctggccacttagatg

SEQ ID NO: 118822 - DNA, 884 bp, Zea mays
  Clone ID: MRT4577_39852C.1
gaaagattgtctggtttccttgagaaagattttcaactttttaccgatgatgaggtcatggatacaatgaagcatgtcatcaatctttccaatgtggttgataggctctgcaaacaaatgtatcagtgcattgagaatgatttgttatatcctctacgcacacctcacaatatcgctccatacaaatctaagggccttgacagggcctcagagctcaatattagctgggatcctgctgaacaaagttcacagtcaacaaaacatagtcaggaggatgaacacaggaaccaaccagcatcgattagtctggggaaacgaactcatgagttgcatggctcgagttctggtaataggggggataatagggggcaccgatctaacaagcgagaccgggtagatgccaatggcggtggtgatgcactttttgatctcaatgtgccagccgaattggtggacaagatctgaagcttcattatctgatgggtgatggcacatccctttgaactgtacagctgacttaagcttcctcaccaacataaaggcaaaaaatactgttcttcttagcccccttgccaccatagagtatacctccatgtcaaaaaaaatttaccctggtgttaggatcccaagatatagagtagcttttaagttctatatgtcgcatttcatgacgtgatttgaagccaatgttcataattctgataaaactagttctactcctcaagcaagatgaggatattttggaatgtaacttgaccatgcctgtgttgcggattccagatataatgtatgcagcatggtgaagggaattgtttgttgacaaaaaaaaaaaaaaaaaaaaaaaaagtactctgcgttgttacaaaaactaagaagctggattt

SEQ ID NO: 118823 - DNA, 348 bp, Zea mays
  Clone ID: MRT4577_39853C.1
catcaagcaacatagaatgtggaatccagtagcaccaatagatgcacaatggccaccaacatattttccctccatatgctccttgctctctctgcatgtgatgctaacccgacaattttccatcaatgctcacaagctcctaaagattcccttcttcccccataccttccatccatgatagctgtagtatgtgataacccaactctttaaccctataagctccaacaagcaatcgcagcaagcaacatacatttatcacccttgggtcaacaatcgccagccctatattttgagcaagcataggtacacaccatcagggcaccacacctgcaccaactcgagctacct

SEQ ID NO: 118824 - DNA, 1219 bp, Zea mays
  Clone ID: MRT4577_39854C.1
ctcactttccttctccctcccgtgactcagtcggtcatggcggctcagatccaaactccttcgacgtgggcgggcgcgagatcccccagcggcgcggccctagcagcggccacccctggtgggcacggcttgtgcgcggccgtcccagcctgtgcgcgggcgcggcgtggccctcgacggcgcgctggcaagcgccttgccggtgcgcgggcgggcagccacggcggcgtgcgggcgaggacctccagcggcgcggcgtccccggctccgtccgatctcgtccggcgagcgtgggccctgcccaggcggctccccgtgaccctggtgcatggcaacggacaacggttgcagagtgccaaaagggctcccctccagacccaaatggcgcgtctagggcgcgcgcgtgtgcttgctgtccggtaccctggacgagtgccacagacaccagcaaagatccagctgcagaggcaagcagcagccgtcgctgtcgcctgtccggggccctggcccgttcgtcgtcaaccttccattcatgtcttcatccagagaagagagaacgaacctggtgctgccacggctctccgtgaatatgcaaatgtcatggttgaacaaccccaatgatcagctatgagaagaaatgacacgtatctttcacacgcacataggagccatacgaagaacgtactaatgaaaagatcgatgaattatattgatatgatatgacgtgagtgttttgaaatgtttggtaggttctgtttatatggatttttgtatgtaagactgcattgttcttttgtatgaggcttcatatgacgaggcgatgtctagtcagcacggaccagactatgactggaggacctcacctattgatcctcaggctatgtatgcaagtggtggaaaagctcatagaaggtacacaatgtttgctaacgtcatcgactcgagctaggtgagggttcggcgtggaggttcgtcgaggtctgctgctcgtagctcccatcgctccatgttatggtgatcggcgacagtgagcttccatgttattgtgttctgatacttgagacttttattatgactatgtatgagatattgtctcctattagtactggatgagatgtgtcttattatgactatggatgagacttttgtgatgtaattgatgagactatggatttaattattgttatgtgattgtgtgtgagatgtctttatgtgaaaa

SEQ ID NO: 118825 - DNA, 778 bp, Zea mays
  Clone ID: MRT4577_39855C.1
cccacgcgtccgtgtatgtaagattgcattattcttctgtatgatgctgcatatggtgaggcgatgtctagtcagcacggaccagactatgactggaggacctcacctattgatcctcagcctgtgtatgcaagtggtggaaaagctcatggaaggtacacaatgtttgctaacgtcatcgactcgagccaggtgagggttcaacgtggaggttcgtcgaggtttgctgctcgtagctcccgtcgctccactcaagatctagcagaagtggagcaactgcgagaagaacttacgcgacatcaggattacttgaaccaacaagctacacaacatgaatattatgctacacagattcaacaacagcaaacactcatacaacaactagcacaggcccaagggatacacgtctcggtgccccccaccacctctcgttcattatccttagtcttcacctccacctccacctacatctccatctaccgaacatcagacccctccagctaccttgccgacgcatgaacaagaggacgggttagactttgtcgataccctcttgaatagtggaggtatcgatggtgatcggcgaccgtgagcttccatgttattgtgttctgatacttgagacttttattatgactatgtatgagatattgtcttttattagtactggatgatgatatttgtgagacttttgtgatgatgagactatggatgagacttttgtgatgtaataattgatgagactatggatttaaatattgttatgtgattgtgtgtg

SEQ ID NO: 118826 - DNA, 1416 bp, Zea mays
  unsure (1)..(1416): unsure at all n locations
  Clone ID: MRT4577_39856C.1
ccggccgggcagcctgtcagcatcggcataactgcagggagtagggacttccagttctacagagggggggtgtttgacggggcctgcagcgtcgagctccaccatgagctgacggccgtcgggtacggctcgtcgtatggccagaactacatcaccatgaagaactcgtggggcaagaactggggggagcaaggctacgtcaggataaagatgggcaccgggaagccagagggtgtctgcggaatctataccatggcctcctatcccttgaaaaatgcaacacgctgggtgaagggcgatgtccggagagtaagaacgaggcgacacagtatggactcgatatgaccgagcaacaatatcttgagcattcgattccatggatagctgccaatgatgctgcttggcgtgcgttttgtcgttactgggcttcggctgaattcaaggcaaagtctgtgcgacacagttctaatcatggaaccgagtcatatcacaagtatgggaggtgatggatcactttcgtttggcaaaacgaatggaagctagcactggtgcaggncctagtgatgttcaaatataccttagggggcacagaggaccagatcctgcaaatccagatgtgttgtgcagccaaaaggcaacagatcgtgtggctacatatggcgaggcgatgtctagtcagcacggaccagactatgactggaggacctcacctattgatcctcaggctgtgtatgcaagtggtggaaaagctcatggacggtgagggttcagcatggaggttcatcgaggtctgctgctcgtagctcccatcgctccactcaagatccagcagaagtggagcaactgcgagaagaacttaggcgacatcaggattacttgaagcaacaagtgcgcaacatgaatattatgctacacagagtcagcaacaacaaacactcatacaacaactagcacaagcccaagggatacacgtctcggtgccccccacctcccgctcattatccttggtcttcacctccacctatacctacatctccatctacagaacatcagacccctccagctaccttgccgacgcatgaacgagaagacgggttagactttgtagaagccctcttcgctagtggaggtatcgaccatcactcgacactgtaacccgatggtgatcggcgatcgtgagcttccatgttattgtgttatgatacttgagacttttattatgactatgtatgagatattgtctcttattagtattggatgatgagatgtgtattattatgactatggatgagacttttgtgatgtaattgatgagactatggatttaaatattgttatgtgattgtgtgtgagatgttttatgtaaaaatatgttgtgctatatagttgttgatatatttgttatgttgtggaatg

SEQ ID NO: 118827 - DNA, 430 bp, Zea mays
  Clone ID: MRT4577_39857C.1
gcccgcgaagtgccacccggcaggcgaaggctcctcgtgccaagccatgctcgcctaccaagggcggcaagagaagtatgcgccaacgacccacggtgtgaagaaaccccacaggttcaggcccgggacggttgtactgcgccagatccacacgtacacatgagacacggggctgctgatgccgaagtttaccttccagcgcttgatctgtgagatcactcaagacttgaagacggatctgaggttccagagacacgccttactggccctccataaagccggccaggcctacctggtctgactgttacaggacaccatactctgagccatacactcaaagcgcgtaaccatcatgccctaacacatgcagttcgcctatcccatacgctgctagcgctcgtaatcatatctgtcgccatgacccactggc

SEQ ID NO: 118828 - DNA, 1695 bp, Zea mays
  Clone ID: MRT4577_39858C.1
aattcggcacgaggatcgcccccgccgcacccgcccacgccgcgcccgctcccggcctcggccccgtccgccgtggaggcccccgccgcgcccgcccccggcactagccccgtccgccatggaagcccccgccgtacccacccctggccccgtccgccatggacgcccgtgcccgcccccggcctcgtccgccatggacgcccccgcactggccgcatccgccatggaagccctcgccgcgcccgcccctggccccgaccccgtccgccgtggagtggatttggaatttgaccccgctgtcgtgctcgcacgtacatgatgcctctaaaccagagccatctgctgcaggtatggtgtacatttctgcccccgccagtgaactctacgattttctgtatcgaaatttgttcgagtctctggagcgtgaatcatgtgttcttttccggcttaccatggtgcctgtgttgttcaggaggagtgctgaatttcttttgattgcagggggaaatgaacgaaccgatcaacaaccctcatttgattagtacttcattcaatctattattactgttactgagttcaggactcaagtagcagtcgatgccacattgttagattgcgatctgcaaaaacgctactgattcataaataaaatcgacccagcatgtacacacgcacagcttcaggctggtccaagcaaaaactgcattcatgtttttgcttgtacactgcaccgtactcatattggttttagcagtaagagcgtgcttatgggtgcaaaatgtcatagtgaaagatgttttattgcattgcatttagttaataacatgtcattcaaagttttgtggtaaaatttcttctgacctggatatggcgcggaaaatttgaacggtcctatgggagaattataccagaaaagagaagggtatgcgttactagtagcttcccccaaactgctggcgctatgatcaaaatgtgctttcccaatttagccactgcatgttgcctcataatttctagtttttcgatatctgacaatgccctgaccgccgcggaatgtcacgccaccggacaccgacatctactccattccgagggttcttgccccgatgccgtagaagtacgcgaggtgcacgaagaaaaactttggccgttaccacgtgagcgagccaccagttgagcatttgcgcgattcactgtacaagacagagagggatgtcatgaaggtgattagtccagctatgtttggtagtgaagggcgatgtccagagagtaagaatgaggcgacacagtatggactcgatatgactgagcaataatatcttgagcattcgattccatggatagctgccaatgatgttgtacatttatattagacccctccagctaccttgtcgatgcatgaacaagaagacatgttagactttgttgaaaccctcttcactagtggaggtatcgaccatcactcgtcattgtaacccgatggtgatcgacgaccatgagcttccatgttattgcgttctgatacttgagacttttattatgactatgtataagatattttctcttattagtactggatgatgagatgtgtcttattatgactatggatgagacttttgtgatgtaattgatgagactatggatgagacttttgtgatgtaattgatgagactatggatttaaatattgttatgt

SEQ ID NO: 118829 - DNA, 268 bp, Zea mays
  Clone ID: MRT4577_39859C.1
tcttgatctcccatcttcatcttcttcgtagcgtcggcgctccatcttctgttccctcccttagtcgcgctcagcacgcgggtgacggcggcagcagcgacgctcatgatcgggctctcagcgacggattcgtcatcgactcgagccaggtgagggttcagcgtggaggttcatcgaggtctgctgctcgtagctctcgtcgctccactcaagatccagcagaagtggagcaactgcgagaagaacttaggcgacatcaagattactt

SEQ ID NO: 118830 - DNA, 315 bp, Zea mays
  unsure (1)..(315): unsure at all n locations
  Clone ID: MRT4577_3985C.1
gtcgaaaatgtggagcagttcgctgtttagaagcaaattcttgcgagggatcacagcgacacttgtcggacaatgagaccattccaccttcagaatctnatgatgttttagatgaaggatctctgggtattcaagttgagcacaaggatgctagtgttaacaagtactgggtgctacaccatacttatacttgaagaattgcaagttataaatagtcatatcgattgtaagggagcatggtatggctggactgataaccacttcgcatttctgtggtgtgttggactccctgtagtagtttttttggtacaagga

SEQ ID NO: 118831 - DNA, 272 bp, Zea mays
  Clone ID: MRT4577_39860C.1
attccctcgtcgaccgactcctacgcccactcatccgcacactctttcgctatctttccctatctgaaatactctacttcacgttgaccactattaagggggccggcactagctctctacaactacgcctataacatctcactcttcaatctcatgactcaattactaataccctaatactactacactaacatcaacctctatccatgaactatctccacgtacaactcctactcagaacacacaatattcaatgtccgcacattcactaa

SEQ ID NO: 118832 - DNA, 903 bp, Zea mays
  Clone ID: MRT4577_39861C.1
catttatctgcaaataaatggagcatgtcattactgtgcttgttgattccctgttttctattaagtctaagttctgtttatatgaatatttgtacgtaagattgcattgttcttttgtatgaggctgcatatggcgaggcgatgtctagtcagcacggaccagacttattgatcatcaggctgtgtatgcaagtggtggaaaagctcatggcaggtacacaatgtttgctaacggtatcgactcgagccaggtgagggttcaacgtggaggttcatcgaggtctgctactcgtagctcccatcgctccactcaagatccagcagaagtggagcaactgcgagaagaacttaggcgacatcaggattacttgaagcaacaagctgcgcaacatgaatattatgctacacagattcagcaacagcaaacactcatacaacaactagcacatgcccaagggatacacgtcccggtgcccccctcccaccaccacctcccgttcattatccttgctcttcacctccacctatacctacatctccatctaccgaacatcagacccctccagctaccttgccgacgcatgaacaagaggacgggttagactttgtcgaaacccgcttcaatagtggaggtatcgaccatcactcttcactgtaacccgatggtgatcggcgaccgtgagcttccatgttattgcattctgatacttgagacttttattatgactatgtatgagatattgtctcttattagtactggatgatgagatgtgtcttattatgactatggatgagacttttgtgatgtaattgatgagactatggatgagacttttgtgatgtaattgatgagactatggatttaaatattgttatgtgattgtgtgtgagatgttttatgtg

SEQ ID NO: 118833 - DNA, 531 bp, Zea mays
  Clone ID: MRT4577_39862C.1
actttccttctccctcccgtgactcagtcggtcatggcggctcagatccaaactccttcgacgtgggcgggcgcgagatcccccagcggcacgaccctagcagcggccacccctggtgggcacggcttgtgcgcggccgtcccagcctgtgcgcgggcgcggcgtggccctcgacggcacactggcaagcgccctgccggtgcgcgggcgggcagccacggcggcgtgcgggcgaggacctccagcggcgcggcgtccccggctccgtccgatctcatccggtgggcgtgggccctgcccaggcggctccccgtgaccctggtgcatggcaacggacaacggctgcagagtgccaaaagggctcccctccagacccaaatggcgcgtctaaggcgcgcgcgtgtgcttgctgtccggtagcctggatgagtgccacagacaccagcaaagatccagctgcagaggcaagcagcatccgtcgctgtcgcctgtccgaggccccgacccgttcgtcgtcaaccttccattcat

SEQ ID NO: 118834 - DNA, 1269 bp, Zea mays
  Clone ID: MRT4577_39863C.1
ctcctttcctttctccctcctgtgactcagtcggtcatggcggctcagatccagactcctccggtgtgggcgggcgctagttcccccggcggcgcggccctagcagcggccaccccggtgggcacggcttgtgcgcggccgtcctgacctgtgcgcgggcgcagcgtggccctcgacggcgcgcttgcaagcgccctaccggtgcgtgggcgggcagccacgatggcgcgcgggcgaagaccctcggcggcgcggcgggcccggctctgatccggtctcgtctggcgggcgcggccctgccccggcggctcccgtgaccctagtgcatggcaacggacaatgggcaaatgtcatggttgaacaaccccaatgatcagctatgagaagaaatgacacgtatctttgacacacacataggagccagacaaagaacatactaatgaaaagatcgatgaatgatattgatatggcatgagtgttttgaaatgtttggtaggttctgtttatatggatttttgtatgtaagattgcattgttcttttgtatgaggctgcatatggcgaggcgatgtctagttagcacggaccagactatgactggaggacctcacctattgatcctcaggctgtgtatgcaagtggtggaaaagcacatggaaggtacacaatgtttgcttacgtcatcgactcgagccaggtgagggttcggcgtggaggttcgtcgaggtctgctgctcgtagctcccgtcgctccactcaagatccagcagaagtggagcaaccacgagaagaacttaggcgacatcaggattacttgaagcaacaagctacgcaacatgaatattatgctacacagattcaacaatagcaaacactcatacaacaactagcacaggcccaagggatacacgtcccggtgcccccaccaccaccacctctcgttcattatccttggtcttcacctccaccaacacctacatctccacctaccgaacatcagacccctccagctaccttgccaacgcatgaacgagaagacgggttagactttgttgaaaccctcttcactagtggaggtatcgaccatcactcgtcactgtaacctgatggtgatcggcgaccgtgagctttcatgttattgtgttttgatacttgagacatttattatgactatgtatgtgatattgtctcttattagtactggatgagatgtgtcttattatgactatggatgagacttttatgatgtaattgatgagactatggattt

SEQ ID NO: 118835 - DNA, 410 bp, Zea mays
  Clone ID: MRT4577_39864C.1
aagagtaaaaatttatgttagaggttaaaatttaaaaggggagaggaagggggagaaaaaggaaaacccaaaaagggggcctaccaaaaatctaaagcaaaggggggagcgaaatcccaaggggggatcccagagagcaccggaaagaaaaaagctggacaaggagacgcaacaaagatagaaaaggccatctgggggggaaagagggagaaaaagggggggaaggggaggccccagaaggggggcgaggacgatgaaacggaaacggggggggaaccggggggtagaggggggaaccccgaaccgggaccagcaggcggaccagctacccctgaagaaacccgaaaaaaaccggggggaaaccaggggcaaaccaggttcctgtgagaaaacgttatccggggacaatt

SEQ ID NO: 118836 - DNA, 755 bp, Zea mays
  Clone ID: MRT4577_39865C.1
aattcggcacgattctcctccttcctccctccgtccctccctcgctctcccatcctcctctgttctcacaatttttgcttctgaatttcctgccggtgtgtgccggcatcttctttctactgaggcgtagaccaaggaggagagtaattggcgagcggttggagaacgaatacgagacggctccggcggccggaggcccatttttgatgcgtggtgccgtcgaggtccacacgattcgcagagacgtcgcctcgccgagccccctgaggctcagagaccctccggcattggacatgatgaggtaccaaaggctgagcccggactgcctcccgctcggcaacggcggtggcggaggcggaggcgccgtgccccgcaagcaggcgtccagatcctcctacatcagagaggacgacgccccggccgtggccacggatggttcccgcctcgcatcgtacctggcggcctcctcgcacgagcccaagccgctgcgggcccgcgcgccgcagccggcgcccctctcctcggtggctggccggagcccagcgcgcgaccacgcgcaccaccaccacacctccgactcctccgacaccgcctccccgagctccaccggcggcggcggcggcgccgtcgtcggcgacgtgctgctgcagtgggggcacaagaagcggtcgagctgccggcgcgactcggccaccgccgcggcgccgtccgcgcagcgccgacagtctgccgtcggtggcggggtcaagatccag

SEQ ID NO: 118837 - DNA, 1422 bp, Zea mays
  Clone ID: MRT4577_39866C.1
gcaataatgggctggttactgctttcatgtcgaatctgattacttctgattgatgcatatcctttttggctgttggctagcgaatgctttcagaaaccacctcttctgtttagctattttgggcagtaagtcaagcagtgctttgtattttgtaaataggcattctttatgttaataaatctgtatagaaacaaaattggtcattcaataatcaatagtattatcagaattacatttctgtactacaacaattattttatcaaacaagttaaaaaactatcttgggaattttatccaacctatttttttctaagtcatgtttaggaaggtaggtttgtaatttttactattacaagcagttatactaattgctattaaatactactcaatttacatttagcattctgtattcagtgctgagttgcttcatttgtttatggttagctgttactccttcggttacaaatacttgaacgacgtttttgggttgtctgaactcattcattctattctttgataacaacttacattttatgtgttgagttcgagggtttgaaaactacacaagcacattaaaatagtaaggtagtgtcataatagttcatttttattacataactatatattataattaaaaatttgggtcactgatatcaatgtgtaaaacatcacttatttgcagctaaatggagtatatcattactatacctttgtctttttatatttatataaaaacacaatcgaatggagtccattcgtttcattgaacttgtctttgatgctatgaatgtttagtcacatgtagcagtttatgccctggtgtattaagagggtgcactaactgtgcttgttgattccctgttttctattaagtctaagttctgtttatatggatttttgtatgtatgattgcattgttctttgtatgaggctgcatatggcgaggcgatgtctagtcagcacggaccatactatgactagaggacctcacctattgatccccaggctgtgtatgcaagtggtggaaaagctcatggaaggtacacaatgtttgctaacgtcatcgacttgagccaggtgagggttcagcgtggaggtttgtcgaggtctgctgctcgtagctcccgtcgctccactcaagatccagcaaaagtggagcaactgcgcgaagaacttaggcgaaatcctcttcgctagtggaggtatcgaccatcactcgtcactgtaacccgatggtgatcgacgaccatgagcttccatgttattgtgttctgatacttgagaattttattatgagtatgatgatgagatgtgtcttattatgattatggatgagacttttgtgatgtaattgatgagactatggatttaaatattgttatgtgattgtgtgtgagatgttttatgtgaaaatatgttgtg

SEQ ID NO: 118838 - DNA, 348 bp, Zea mays
  Clone ID: MRT4577_39867C.1
acggccgggtgcgacgtgcaagactagtcagccgcctccctaaaatttttttttttttatcactcaactcacgttgcctgttgtgctagttataacaatacagccaacaacggaagaacacaacttagattcacgttcgttgttcccccactaacttcccccacagcatgcaaccatcttatactacatcaacaaaaccaggcacataacgtaacacacccctcccacaagacacgaaccgcccctattacacaacaaaaaaacagcgatcactccgccaccgcccctgttctcgggcttgtccggctcactgtgccttataagcttcccactcgttatccttcctct

SEQ ID NO: 118839 - DNA, 181 bp, Zea mays
  Clone ID: MRT4577_39868C.1
aaaaaaaaaaatactatataaaaaaatacaaggttacatactcgtctcatgcgtcttaaggaatctgggtttccggggccttaattctattttctctccctctttttacaacccctttacttttcaaaaccctggcctttcccaacttaattgggtttcatttcattcccctttcaccatt

SEQ ID NO: 118840 - DNA, 159 bp, Zea mays
  Clone ID: MRT4577_39869C.1
ttccgctctgcgcacactgagctccggttcttttttgcggcccgccaggctgtcatctttgttcagaagggcacccaacgggggggggttgtggtatccatgtcttgctcctaacaaactgctccaaagattatcgatggcccctgaaggcccccatta

SEQ ID NO: 118841 - DNA, 597 bp, Zea mays
  unsure (1)..(597): unsure at all n locations
  Clone ID: MRT4577_3986C.1
aggcgcgccaccggccgagcgcgggggagcgggagagaccacctnggcatggcgacacaggccgctntcctcgcggggnnctcgcagctcgccgcgcagccgggccgcgaccgcgccgnggcggnggcggnggcgccggcgccgggcccggcccgggnggccgnngcgggggggggggggggcaannngggcgngaaggcggggacgnccaggaccgcggcggnggcgcgccncggggngcggngccgggccagccngancgagcccgacggcgggcggcnggnggacccggnggcgcccgaggagggcgggcggcgcgcggcgcngcggcgggaggcggcggagcngccgcaccggcngcgcnngggccgcgncgacaaggaangggnccacgnccccagcgaagggngggcgagcccgcngcaagggnncaagcgcgagcangagnnccnccaagcaccccannncaaggccanccgcggccaggaaggcaggaaggncaacaagnccgnccncancgngcgcccccncggggacgcacaggcgaaggccancccagccgacggcgccacgcgcggcgcgcccggnggcgagcgc

SEQ ID NO: 118842 - DNA, 537 bp, Zea mays
  Clone ID: MRT4577_39870C.1
gacaaagaatattattggctgatttattacgaaagaaaaatattgtgaatgtctgagaacaagaagctacgatttctggacgcgcgaaagcattccgatttgtgctagaacgataaggcttaaggtttgattacaagatggtgaaacactgcgtgacaaaagaagaagatgatcgacaccaagaagctgtagaagctaaagatcagacatcacacgtagccgccgttggcgcggatgacctggccgttgacccactcggcggcgtcggtgcagaggaacccgaccaccggcgcgatgtcgccgggctccccgagcctctccatggggcaaatctccacggcgcgccgcaccatgtcctcgctcttgcccttgaagaacatgtccgaggccgtggcccccggcgcgacgcagttggcggtgacgcgggtgcctctgagctccttggccatcgtgcgcaccagcgccttcaccgccggcttggacgccgtgtacgccgcgtaccccggcgggaggctccccaccacggacgacgtcacg

SEQ ID NO: 118843 - DNA, 423 bp, Zea mays
  Clone ID: MRT4577_39871C.1
gtctcttctccgttttcactctcttgctagctcctctttgtccttcagatcagatctctgagaagagtagagtgcctgccagtgccatgtcgctgccagtcacacagcccattgcatgagcagaagggcaaggaagcttgggagggtgtaagctgaggatcggtgacgtgcaaatgcggccacggggaacctctctgcaacaaagctccgcatctgctctcggcgacggcgatgcggcgctaccgaagaagaagaggaaccggccaggcaatccgaaggcagccagggccctctgctccatggcaaggcgcccttgcatggcgtgatgacgcatctccccgagcagcagtatcagccaaacagcggcaacgccaacgttaacctcctggacattgggttcttctctggcacagtggtggcacg

SEQ ID NO: 118844 - DNA, 2251 bp, Zea mays
  Clone ID: MRT4577_39872C.1
gccggccgggctacctagccacgcatcactcttgtcctattgaacatacgctaactaatttctctatcaatccatcctttgcaaccttggtgctaaaacaacgtttgtcatgcatacctactatctctttctcacacaagtctcttctccgttttcactctcttgctagctcctctttgtccttcagatcagatctctcagaagagtagagtgcctgccagtgccatgtcgctgccagtcacacagcccattgcatgagcagaagggcaaggaagcttgggagggtgtaagctgaggatcggtgacgtgcaaatgcggccacggggaacctctctgcaacaaagctccgcatctgctctcggcgacggcgatgcggcgctaccgaagaagaagaggaaccggccaggcaatccgaaacctgatgcggaggtgatcgcgctgtcgcctcgaacgctgctggcgacgaaccggttcgtgtgcgaggtgtgcagcaagggcttccagcgggaccagaacctgcagctgcacctgcggggccacaacatgccgtggaagctgaagcagaaggaccccaaggacgcgcgccggcgggtgtacctgtgcccggagccgacgtgcgtgcaccacagcccgtcccgggcgctgggcgacctcacggggatcaagaagcactactgccgcaagcacggcgagaagaagttcaggtgcgacaggtgcagcaagcgctacgccgtcgagtccgactggaaggcgcacggcaagacctgcggcgcccgcgagtatcgctgccactgcaacgccctcttctccaggaaagacaacttcatcacccaccgcgctacctgcgacgcagcagttcgtgggaccgcccagaagccaccgctggtcgccggcctctacgtcggctcaggcagcgatgataggctcgggctctccgacgccgccgcccagatgcatggcttcgcagatcaaggccagtcctcttcagcagcagaagcctcacagtttgaccatgtcatgccatcgtactcgggctcctccatgttccgttctcaggcgtcagacttctcgttgtctttcttcctcggcggcggcactcctcttatcgaacaagacctgtccgacaacggtggtgatctctccgaaggcagccagggccctctgctccatggcaaggcgcccttgcatggcgtgatgacgcatctccccgagcagcagtatcagccaaacagcggcaacgccaacgttaacctcctggacattgggttcttctctggcaacagtggtggcacgtctggcagccagggccctctgctccacggcaaggagcccttccatagccatgacctgacgcaacttcccgagcagcagcaccagccaggcagcagcaacgcccgcgtcaacctccctaaccttggggtcttctctggcaacagcggtggatggcccggaagcagccatcaggacgcgcgccttgtcatccaagaccaactcaacggcggcagcagcagcaacaccgagcatggtaacgggatggcgtccatcggaagccacttcggcggaggcttcgtcccttccctgcacaactcatctccgtcggccgggctctcagcgacggcgctcctgatgaaggcggctcagatgggctcgacgacgtcgagcaccacccacaaccccaacggccccagcgcgctgctccgcgcagccggcttcgcaggcactgccagcgtccgggagactagtagcagggcagcggaagaagagaagtctcacgaggcatatttccatgatctcatcatgaactcactgccattaacgggaggaggcaccggcggcctctcagggttggcgggcgtggacgacggcaatgtgagcacaagggacttccttggcgtcggcagggacgacgcgacggcaccgcagggcctccacggcatgggcgccccgaatccgacccagatgaaatggtacatgtgatggatcaggtcggaaacgcgaaaagaggaagacaacaagaagatgcaagctaagaagggagtcaataaacagaacagaagatcgtgcactagctagtgagtggcgatcagagagatcgagaaaacttaatctagttttgtttcgtggattagttcacttttctcatatgccgcccgccatgattgatatggctaatagtaacagggctgcaagcaatgcagctgctgaacttgttcattgcttttatttcggtacaattttgtggtgtttttcc

SEQ ID NO: 118845 - DNA, 482 bp, Zea mays
  Clone ID: MRT4577_39873C.1
agacaaacaacaacacgccgctgatacatcctgcaaggctcctggtttgggtcatacgaaacctcaacctatacattagattagacttggcagcacagacacagagacaccacgtacgctatacacgcacaccataagcacacccactacaaacttctattattcctaaggcacattacacacgagttagaggtcctcacaacttgactggcactggtaccaacattttcgagagccaccacctgcctacctagtgccagcttaagcgaccttgacactcgatggtcttgagctttctctctgtgctcgggacgaggcactttatcaacagatcacagcaagcacaccatccctagcgacacccgctatatattttccatatcttgagcttccggaaggactaacttgcgcatgaacttgcccatgcgtcgatccatgcgcaagtactcagcgtgctcacgactttcccgagcgcgctcgcc

SEQ ID NO: 118846 - DNA, 645 bp, Zea mays
  unsure (1)..(645): unsure at all n locations
  Clone ID: MRT4577_39874C.1
tttttcgnttgcggcgagttattcagccacgaaccgtgcagggcacacccaggctctccgagccgagaagtcggtcctaagggacagaccaaaccatccaatggtgcacagggtaaggcagataagccaaagccaaatgcagatgtcgatatcaatgttgggctgtcgacacggcctccttggttctgtaggtgtgccagtttgatcccttacccttagtatatacacaataatctttgcaggtggttatgcagtaatagtgccgatgccatagttctaaaccatatttacttataaccaagtaaccatagcggtattggttgtgatcaatgtttatttatttctacgcttctcaaaatttccgttgatataaatcatgcttgggactgttttgtttttttgggttaatactcacatggaatgccagtacatatatatacatgactagacatggtaatataatttatgaggttgcagttatctttgtagttgcgaatgtctgtgagtaagttcaattgtttagctttccttttccatttagaaaagcttgcttggaactattaaaattatttgtattatatcttttctatgaatgatgggtctggaatgttggtagagtctatctacttgtgngcctggagtcct

SEQ ID NO: 118847 - DNA, 113 bp, Zea mays
  Clone ID: MRT4577_39875C.1
gtttctggtggggctgataactcagtgaaggttcagttgataagactgttaaactttcaacgtcccaaaatttaacagtcttatcaactgaaccttcactgagttatcagccc

SEQ ID NO: 118848 - DNA, 253 bp, Zea mays
  Clone ID: MRT4577_39876C.1
tttgtggttttttaaaaaggattttcgttttctacccacgcaaaacaaagaaccaaactgccatccactacacagagaaaactactgcctagccatataccaaacaggataggcacggccccaacagacaaagttcttccaattagataagatccaacgacgcgaggaacctgcacaacaggtcaacccgcggacacatgttagtccactacaccaacagtgaaaagagagtagggggaaacctacaacaccc

SEQ ID NO: 118849 - DNA, 526 bp, Zea mays
  Clone ID: MRT4577_39877C.1
aaaaaaaaaaaaaaaaaaaaaaaaaaaaaaaaaaaaaaaaaaaaaaaaaaaaaaaaaaaaaaaaaaaaaaaaaaaaaaagaaaaaaaaaaaaaaaaaaaaaaaaaaaaaaaaaaaggtttttccaaaaaaaattttgccctccccgggcggcccttcaaaggggcaatttttccaattttccttccccctgggggccgttggaccttccttttaggggccccatttccccctttggggggtcgttttccatttccttggccggcgttttccaccgtggggccggggaaacccttggctttccccactttattcgctttgcagcccttccccttttccccggttgggttattagcgaagggcccccccccgttcccctttcccaccatttgcccaccctaattggcaaagggcccccccctttaccggccctttaaccgcggggggtgtgggggttccccccagggggccctttacacttgccggccccttagcccccgttcttttggttttttccccttccttttt

SEQ ID NO: 118850 - DNA, 183 bp, Zea mays
  unsure (1)..(183): unsure at all n locations
  Clone ID: MRT4577_39878C.1
aggaaccgggtgcggacccacgccgtcnncgcaaattgtattctttcatttagatnnctgtctgagtgttgtataacttannaatgganngcagtagtattctatcagtgagttggtacccctgggttactgagtatttaattttgttttcataatcttatcctnntacagacgattgcactt

SEQ ID NO: 118851 - DNA, 167 bp, Zea mays
  Clone ID: MRT4577_39879C.1
ttcgtcgcttccattcgccgccgcgtccgcctcgccagcgagcattcaccgcagcacatctctctctctatctcaacgatgtgaggtgcgagagggttaatagagcttgacagagcctggagggggctgccgttgtatgtttctccactccacccaccatcagttac

SEQ ID NO: 118852 - DNA, 161 bp, Zea mays
  Clone ID: MRT4577_3987C.1
gtaattcccggcccgacccactcttcctatcagctcttacttacctttgctatgaatcttacatactcaataacatatttataagacaagatttttaccatggctttcctgcataacaatattaacaataatacactcattctctttcttcatattctctt

SEQ ID NO: 118853 - DNA, 249 bp, Zea mays
  Clone ID: MRT4577_39880C.1
cgtcgagcttccaggtcctaaaatgatccgaacaaatgtgtggtgaatgtatgttcccgtgcgatggcacgtgacagagccagttgcggggttgtctgctaaggtaccatgtatgcgggtggcctgcataggtatctgtatctcccgataatctccgcctgtggcacgattaactggaagcccagaacgcatgtctttatctgcgtgctgctgggaaccctgatcccatggtgcggtggacgctccatc

SEQ ID NO: 118854 - DNA, 614 bp, Zea mays
  Clone ID: MRT4577_39881C.1
gctgctcaacctgcagatcccgaccatcaacgtcgtcgggtcgctcgtgagatccgggatccgagtgctgggtttcagcggcgaccaggactcggtgatccctctcacggggagccggatcctggtacagagcttggcgcgtggcatggggctcaagaccaccacccctacagagtctggttcgaagggcagcaggttggaggatggacacaggtgtacggaggcggcgcgctgtccttcgccaccgtcagaggcgcctcccacgaggcgcccttctcgcagcccggccggtcgctcgtgctcttccgagcgttcctgcagggccagcctctgcccgaaaccttctcgtgatgagcaatggctggctggctggctgggtgcggctcttgatctgaaggcaagtcactggtttcctggacgcagcagctcttctgcgcgtgcgagggggtgggttttgcactctagtaaactgtaagaaggtgtgtgttcgctgtttcttcagcatccaaggctcggcaattgtctagagaagtggaaagaattcgtctctcgtctgcgtgtgttcgtttttgtctgtaaatgttctgctagtgctgcaagaacattgcatattc

SEQ ID NO: 118855 - DNA, 342 bp, Zea mays
  Clone ID: MRT4577_39882C.1
atgcatatccaacaatacattgaatcataaacgtgtatacaagtgcgcacaaaactgatggattatggatattcgtcattcacggcatcacacaattcgtaactcatacgggcctctttaccaactgccttaacgattagatccgaacaaagttaccttgaaactgtgcgcctgacttggtgatacaagagcatcctcccgcttggaagaccctctctttcttacataatggatgacaggatgtcattgaacttaatgttgaagaacgctggaccttcgtttgtctggacagcactaacaacacagcattggggaacatcgagcggtcataaggcattacag

SEQ ID NO: 118856 - DNA, 1049 bp, Zea mays
  Clone ID: MRT4577_39883C.1
gagttattgctctgacactatcattactaattgtaactcgagcgtggccgggccggcacggaacctatagctgacctagcgagctgatcggctctactcccttctcttgttcctttcttctctccgggctcacctaccggatcatcctccatggccaccctcgccttgccgccgaccaccaaggctgccggccaggacgccacccaggaaagcctagcagagaatcctgccaaggacgccgcagatccgggcagcatggagtccgagtgggttcttctcggaaaatcggacatcgtcccggccgatgtggccgccgccgccgccgcggggcaccaccacctcaacttctcgccgctgccgatgatccctatctgggtgcagatggttctcgggggcgtggtttacacggctgtgccgttctacaagagggtgctgaaggtcgaaggtgaaacgttggccaatgtagaaactgcagtggaggtcgtggagcatgtcgccgaggtgacggagaagttggctgcagatgcggccagttccctgccagagaacggatccctgcacaaggttgccgtggaggtggagtgcgttgctgaagcggtggataaggatgcacatgaggttgaagcagtcatcgataaggttgaggaggtgagcgagaagatcgatgctacagtggaaccggtcatcgaagagcttgagaaggacctgataccgaaccccagatcctctagtggatcagatgcccagaaatgacagttcatgtaaattgggagggaaagctggcgtgtgcgtgtccctggctgtctgtaaatttgtaaatctctcttcgttgtttcctaatgccctatgcgtgtaaactgtaaatacaactaagatacctcatgaactgcaacgacgccacggaatagtaagacgtggtacatgattgtgtcaaaaaaaaaaaaaaaaaaaaaaaaaaaaaaagggaggacgaataaaaaagatccaaacttaacataaacatgcatgcaaaagaaataaactcttctataatggggggcggccctttt

SEQ ID NO: 118857 - DNA, 389 bp, Zea mays
  Clone ID: MRT4577_39884C.1
gcaaccgtgtttgccaccatctgctcttcaagccgctaaagcgaactccaccagagctaagaaatttttttacacggtctgagtaccgattatcacaatcacagatatctagagtggatttcaagggagtttagaaagaatttgggagagaatttagagagatgtcggttcacgatagatattgcgagaatgttgagttcagagttctctcaacaggcacattatcacatttatctcaccaagcactagctgttcttggctcgcatatttgcttccttacggtgacgacatcgtcatcatcaagcactgcgaaattagcaggaaacaaaatagaaattaaaacgaacaatatttgcttgtgtggtaaaaacaccaaccgagatcaaaac

SEQ ID NO: 118858 - DNA, 382 bp, Zea mays
  unsure (1)..(382): unsure at all n locations
  Clone ID: MRT4577_39885C.1
aaaaaaaagcacataagcttttaaaaaaacgatttatccacccccccccccttattaagggcctgattggatcttgatacaaaaacgcctatgaccaacgcggttcctacgaccatggcaaatatgagggacctcaaaacctaaaatcaaggctggcccggcacacactgaacaaaaacaaggttgggaaaacagatgaaacagcagccgcaacaatgtgctgatgcttcggttgaggaatgctgcgacggataagttgtgggcgagcttttgggcttcctttttttggagaggctcgggaacggcgaacccgctggagcccacgggggcaacggcagccacctcctccttgacccgngggccgggcctcgtctccgggtcc

SEQ ID NO: 118859 - DNA, 704 bp, Zea mays
  Clone ID: MRT4577_39886C.1
aacctatagctgacctagcgagctgatcggctctactcccttctctcgttcctttcttctctctgggctcacctaccggatcatcctccatggccaccctcgccttgccgccgaccaccaaagctgccggccaggacgccacccaggcaaaaaagcctagcagagtatgttttgttctgtttagcggtttcttcgcaagaaccaatctacaaagagtttcgtgtcgaaagtcgaataatgattccttggttttttttctctctcgctcctaatgcaacgggatcaggaatcctgccaaggacgccgcagatccgggcggcatggagtccgagtgggttcttctcggaaaatcggacatcgtcccggcagatgtggctgccgccgccgccgccgcggggcaccaccgcctcaacttctcgccgctgccgatgatccctatctgggtgcagatggttctcgggggcgtggtttacacggctgtgccgttctacaagagggtgctgaaggtcgaaggtgaaacgttggccaatgtagaaactgcagtggaggtcgtggagcatgtcgccgaggtgacggagaagttggctgcagatgcggtcagttccctgccagagaacggatccctgcacaaggttgccgtggaggtggagtgcgttgctgaagcggtggataaggatgcacataaggttgaagcagtcatcgat

SEQ ID NO: 118860 - DNA, 169 bp, Zea mays
  unsure (1)..(169): unsure at all n locations
  Clone ID: MRT4577_39887C.1
ggtatcgcggcgggnaaaggaggtagttttcccgccaggcgctcccaaactctcctctcccgccgcccctcctctccaacaatttcatcccggcaacaagcgcctcccgcccgcgcgacctgtgggctgtggtctccgacgacgcccgggcaccaccgggaacaggcgc

SEQ ID NO: 118861 - DNA, 176 bp, Zea mays
  Clone ID: MRT4577_39888C.1
cccaagcgtccgatctgtggaacctgaataataataatacagatggtttttatccatgtcagtggaacctgaataataataatacagacatctgtgaaatagtttgctcttgtgctgtactacaactcaaacgtaagaaatggattcgatctataaaaaataaaaaaagggcgggc

SEQ ID NO: 118862 - DNA, 354 bp, Zea mays
  Clone ID: MRT4577_39889C.1
acggacacgtgggcttttgatgtcagtaacttgaccattgacacccgtgtgtttgaggtgctggccaccaatggtgacacccatcttggacgtgatgattttgaccacaggatcatggtatacatcaccacattcatcatcaagaactacatcaatgacatcagcaaggacaaccgtgctcatggaaagctgcagaaggaagctgagcgtgccaagagagccctgaccatccagcaccagctcctagttgagatcgagtccatccttgatcggatcgacttcgcgagcccgcctgaccgtgtcaagtttgcggagctgaacactgactcgttcctcaacactatgggccctgtc

SEQ ID NO: 118863 - DNA, 106 bp, Zea mays
  Clone ID: MRT4577_3988C.1
cggatcctgtatatctaccaagactcacgagcgcgatggctctttctccgagctggctgctgatatcgtgaagaacgatatgattgagatccctctcgatgtaata

SEQ ID NO: 118864 - DNA, 508 bp, Zea mays
  Clone ID: MRT4577_39890C.1
gacgagcggagattgctggccggaaagtctaaaggcccaaacacctaatggcatgatgatcaggcatggctacatgagctcatctggtcatccagagaactagtacattgactgggacgggagacacgacgttatcagacagggtgtcctcggtgtataatgtgaatatcactgctacactgggcaccctagggcaaggatgcccccagcactcctatttcaagactctggtgaccactccacaccctgatagacaacgacaagccgagccctccgtgcttgtgaccttctgacgtgcaaggagctaactgtgtccttgaaaggcaaatgcaaccacttcctaaataggttgctatcttacgatgaggacaatgctcagacagtaaatgaccttaatctatatctacagatgctatgagttgctactcgggaacttttactttaagctaagtggtgcggatacacgatacttctttatgtttcgcgacgaaactatagatcacttggg

SEQ ID NO: 118865 - DNA, 479 bp, Zea mays
  Clone ID: MRT4577_39891C.1
acgtaagctcggaattcggctcgaggatcagccatgccttccatcgagcagttccagcattggatggcaaccaacgtgtgtgctcttgtcttcgtttatccgtgcgtgggttctttcgtctggctggggactcctgcacgccggctctcgtacgaccgccgttctcccggacttcgtcggctcccacttttggaacttctagtctattgtcgccttctagcagagattggtggaagacgacgatgtctcgctaaaggagaggagtggaggaggcgggagcagcaagaatggcgtgctccaccaatctctgcttctcagtgtcgattcctcctctcccagcctcttgttcttctgactcctcccccttccgcacaatggagcgtgtgtcctgcactctgtccaggtatgtttcttgttgccctaccttcataggcattggtgaagcggttacggcgatggggatgggcaagatcgtgcgg

SEQ ID NO: 118866 - DNA, 349 bp, Zea mays
  Clone ID: MRT4577_39892C.1
ataaggccattccaggcttgccccttagcaaactacaggcgttacatgaaaataattgtcccaacgaggttattcaaacagctattgcactaactttgcacccaaatgtgcgttataccgtagttttccaaacatttaagtccccttatttattgaaaccatcacttttgaaaatcccacaaacagaagttaaaaggtccccaattatgccggggtagctttttttatgtggcagcaaaaatggattcctctcccgttttgggaggtcgatatatttttttttttcccagcttggggacctgaaaaccaggatatcacttccatgcttaaagggcccccccccctccaa

SEQ ID NO: 118867 - DNA, 209 bp, Zea mays
  Clone ID: MRT4577_39893C.1
cggacgcggggggggatgttctattggaagtaccaactgggcatcgttaagcgtacccttatccggagacgaaaggtaatggaagatacaaatcaaaagatctggaggcatgccaagattttcaacattaggaggacgacaagccccaagtcgcatctaacctttgctgaatccgcctaactagtatctagcaaattttcttaagaacc

SEQ ID NO: 118868 - DNA, 371 bp, Zea mays
  Clone ID: MRT4577_39894C.1
cgccagaccattagcggaatctactccagattgcagaaaaacccgatcgacaccatgagggtgttgctcgttggccgttctctcctggctctcgctgcgagcgccatctccacgcatacaagcggcggttgcggctgtcagccaccggcgccggtttatttaccgtcgtcggtgcatttgccacctccggttcacctgccaccttcggtgcatttaccaccgccggtccacctgccgtcgccggtccacctgccaccggcggtccatgtgccgccggcggttcatttgccggctgcaccatgccactaccctactcaaccggcccggtcttaggcttattcccagccacacccatgcccgtgccaacaggc

SEQ ID NO: 118869 - DNA, 1888 bp, Zea mays
  Clone ID: MRT4577_39895C.1
gtgatgtcaagggagttgacgaagctaaagctgaacttgaggaaattgttcactacctacgagatcctaagcgttttacatgccttggtggaaagcttcctaaaggtgttttgctggtgggaccacctggaactggaaaaactatgctggcaagggctatagctggggaagctggtgttcctttcttctcatgcagcggtagtgaatttgaggagatgtttgtgggtgtcggggctaaaagagtgagggacctgttcaatgcagcaaaaaaatgttctccttgtataatattcattgatgagattgacgcgattggtgggagcagaaatcccaaggatcaacaatacatgaagatgaccttgaatcagttgcttgttgaactagatggctttaagcagaatggcggggtcattgtcattgctgccactaacttccctcagtcacttgacaaggcgcttgttaggcctgggcgcttcgaccgtcatattgtggttcctaatccagatgttgagggccggcggcagatcctggaggctcatatgtcaaaggttttaagagctgatgatgtggatctgatgatcattgcaaggggaactcctggtttctcaggtgcagatcttgcgaacttggtgaatgtagctgctctgaaggccgctatggatgaagcaaaagctgttacgatgcaggaccttgaatatgcgaaggacaggatcatgatgggcagtgagcgcaaatcagcagttatatctgatgaatccaggaagattactgcgtatcacgagggagggcatgcccttgttgcgatccacacagagggcgctcaccctgttcacaaggctacaattgttccgaggggagtttctcttggtatggttatacagctcccagagaaggaccagcatagcgtttcaagaaagcagatgctggcgaggctggatgtgtgcatgggaggaagagtggctgaggagcttatatttggggaaagcgaggtaaccaccggttcctcgtctgacctaaactacgcgactaggctggcaagagccatggtgaccaagtatggtatgagtaagcgtgtgggtcttgtttcctacagtgagaatagtgttagcggccaaacaagtgtgattgataaggaggtgaaggaaattctggagaaggcgtacaataacgcaaaggcaattctgacaactcacgataaggagcttcatatgctagcgaacgcccttcttgagcatgagacactgtctggagcgcagatcaagaaattactgccacaggtggacaatagtaacaataagcagaagaaggctgccaaggtgccgcagaagacaccggcagccagagccaagggagttgcacaagaggcggcagggaaagccaagggagttgcaggtacagcagcggtggcacaagaagcggcaacagcgaacaccgagggaggtgcaggtacagcagcggtgccacaagaagcggcaacgtcggtggcagcgaaagccaagggagttgccggtacagcggcggcggcacaagaagcggcaacagcaaacaccgagggagttgcaggtacagcagcggcgccacaagaagcggcaacgtcggtggcagcgaaagccaagggagttgccggtacagcggcggtggcacaagaagcggcaacagcaaacaccgagggagttgcaggtgttggctcatagtggcattggggagaagcacaagtcagcgttttgtgcagccccaactagatgagcaccaagtgtgattagggcaacaatgtgtttggtttccaaccctagatgatcgcggaattgtactggaatggaacactaagcatcgagaatactaatcctttcgtccatgtttcaccaaaacaaaaaaaaaaaaagcggcc

SEQ ID NO: 118870 - DNA, 1093 bp, Zea mays
  unsure (1)..(1093): unsure at all n locations
  Clone ID: MRT4577_39896C.1
ccggccgggcatcaccaacaccgtcattggcgtcggtgacgactgcatctccatcggccccgggacctccaaggtgaacatcaccggcgcgacctgcggtcctggccacggcatcagcatcagaagcctagggcggaacaaggacgagaaggacgtcacggacatcaacgtcaaggattgcacccttaagaagacgatgttcggcgtccgcatcaaggcgtacgaggacgccgcctccgtgctcaccgtctccaagatccactacgagaatatcaagatggaggactcagccaaccccatcttcatcgacatgaagtactgccccaacaagttgtgtactgccaacggcgcctccaaggtcaccgtcaaggatgtcaccttcaagaacatcaccggcacctcctccaccccggaggccgttagcctgctctgcactgccaaggtcccatgcaccggcgtcaccatggatgacgtcaacgtcgagtatagcggcaccaacaacaagaccatggctatatgcacgaacgccaagggcagcaccaagggttgcctcaaggagcttgcatgcttctagaccctccatcgactgacccatctctctagttataatttttctctcgtccttgcattgcccattagatgctatccattggtaacgcacaacagtaaaacgacagacatccgacagctatattatgttcgacggtgtaacaccctgaatttgagggtataaaatttcttctccaaataccaaccaaattcaggtgttaaaaaaaaaaaaaaaaaaaaaaaaaaaaaaaaaaaaaaaaaaaaaaaaaaanggggngggggctctagatgtaaaagatctaagtttacgtgcgcgcgcctgcaaagttatactttttttatagcgaaacctaatttaatggccgtggccgtacatcgacaagactgggacagccatggccctgccctaaccaatcttattggagtagaaccccattcccctttctgcagtagtaggaaaaaggacaaggcccgtcccgattgccattactaacacatgcccaatgtgaaaggggactggccctcgccctggacattaacatta

SEQ ID NO: 118871 - DNA, 290 bp, Zea mays
  Clone ID: MRT4577_39897C.1
aaaacaggggaaactggtgcccggctcataaaggttttaaggggaatttgccccttttaaacaaaaaaggcatgggggcgggcttttcacttgacaaggttctggggaacatgcgttaaacaaaactaagcccattagggaaaaacccccgcccccgggggggaaaccaaaatcctaagggggcacccccacagaagtctgttattttttaaggattagcccttttcccacacattatacattttaataatggccagattttggggcccccgaattaaaaacggccaatt

SEQ ID NO: 118872 - DNA, 608 bp, Zea mays
  Clone ID: MRT4577_39898C.1
taccggtaccgccattcccgggcgagcagaaatatgtcccaggcagcgcattaccaccgctaggcttatccaagccacccacccattgcaagagtacaggctcaatgagcacaagagcggccttctcgccatgctggcgctggcgccggcttctgcccgcagcaccttgcgtcccggtggggccggcccggtggagaacctggcctgcaacctgcgccgctcggaggaacaccagcataggcccacatcatgatgccgagatcaatctcatgttgagctctgctgaggtggtcgttgctgtcatctgtggaccactaggcccttgctggcacccagcaacgacagcgacttgccaaccagaaattcaaccctatttatgtaaacatgatgacattaaatggctgctacatcttgtcacgctggctgtgtcaaatataaactgggtgggtgagctgtattccatgttcttgcctgagcctaaccagtgcataatgtatggttaaaacctgataaaatccatactagcaccttaggataactacaaagtattctgacggcatgcagctgctgtaagaatatcaagtgcactgcaaaactgaattcggttg

SEQ ID NO: 118873 - DNA, 357 bp, Zea mays
  Clone ID: MRT4577_39899C.1
cggctcgagcgtttatcgaatcagttctacgcatcctctgctccttcttcaacaatttcattgaatcggtcttctcgcagcactcgaccaccagtccctttgtttcatcagaacggtggtaaccaaatccaaaccgccaagatgatgaacgctgcagacgtcgatttggacgactttaccgtctttgaaggaggtgcctccacggccttctcttctccggctgttggctccagctttgatttcagcagcggcgcctcgagcaccgcctcgaatcttggcaccgtctctcctcaagacctgcttgttcaggagcccttcatgtctgctccgaactcagcagccttgacggctttgacc

SEQ ID NO: 118874 - DNA, 148 bp, Zea mays
  Clone ID: MRT4577_3989C.1
tcttatgcgtctgcgtcctagaaggacgcaaactatgctttgctctgctacaatcacagaccaaattgatgaacttgaaccgctatcactaaacaagcctgtacgccatgaagctgatccatctgtgaaacgggctgcaacattgact

SEQ ID NO: 118875 - DNA, 252 bp, Zea mays
  Clone ID: MRT4577_39900C.1
cgcgcctctccctcctccacgccgccgccgccgcgctggtggtcctgctgcagctgcatggaggcgccgtggtggttgcgtctgagccgccctacacctgcagcgccggcgcgcgcccaacatcccgttctgcgacgcgaggctgcccatcgaccggcgcgtcgacgacctcgtctcgcggacgacggtggcggagaacatctcgcagctcggggaccagtccccggccataccgcggctcggcgttccggc

SEQ ID NO: 118876 - DNA, 640 bp, Zea mays
  unsure (1)..(640): unsure at all n locations
  Clone ID: MRT4577_39901C.1
aattcggcacgaggcagcaacccattccatagccacgcgagtgacgcgacgcgacgcacggcctgcctgaggcagcgcatctgcttggcggccgggagcagccgccgcttcgccttcgtgagggtttaagcgacgaagagaaaggggaggaagcgagcccccagggaggtgcagagggagagggtgggagatggctgcaatggttggagcgcgtagggcgctcttggccgctcggttctctcctcgcggcaccatcgcggcgtcggccgcgccagctcccctctaccggcccatggattcgccactcaggcttccagctgaaagagtttgtctacagtcttgggttccacatcgaggggctggtacctttgcatctgaaaggactgatgaagattatcagcgtgagtggggacaaaacaaagcaggtagctacactgactcccgttggaacggctctaatctccaacttcagagagatgtcacttcagctggttccacaacaggtactcacaaaaataagggtgtggatggtgttggtggcagttctgagcacattacagaagtggtggatcatatggctttcanaacantcatcagccatatactgggtacagagcgantaatgagagataccatgcat

SEQ ID NO: 118877 - DNA, 422 bp, Zea mays
  Clone ID: MRT4577_39902C.1
gccggccgggccgggaaaaaaaaaaaaaaaaaaaaataaaaaaaaaccaccaaatgaaaacaaaaaaaaattaaaataaaaataaataatcaccccccattggtgcgttcgaccccctgggggtgtcttctcacagtcatcgttaaccagcctctagctcagaaggccgcgtccacgcatacaacgggggttctgcggctgccagctaccgccggcttctcatttaaagcggccgttgcatgtgtcaaatcagggtcaccggttactttccacggaccgcggtattttgaaccacctggggacttcggaccacctgggatagtcggcccacggggggacttgttgccaccgggggacgtcagcactaccagtatcatattgaaccgccccggttcttggcccctccccaatcaaactgctgc

SEQ ID NO: 118878 - DNA, 358 bp, Zea mays
  Clone ID: MRT4577_39903C.1
cccacgcgtccggccacgcgagcgtggaagaccatcctaagcagagttttacccgcctataataaaacgaacaggcggccgtccacctggtgagccggtgagtgcatgatgtgcaggaacccatcaatgccttaccgagaaatcgaggagaaaaaaaaaacgtaggaaagcaagaacttgatcttgaaaacctctttgttctaagcaatagtacatatgaaggccgactcctctgccctaccttctatgggatctaggagaatccaacagataagcccattgataatcgtcccacactaaaaggggaaagggacacgcacagaggcccgacacaaaaaccctcccaaaaagttggggg

SEQ ID NO: 118879 - DNA, 345 bp, Zea mays
  Clone ID: MRT4577_39904C.1
ggaaaaaaggggttattcatccgggggggaaacccacccttttgcaaacagatcattgccccatgggcctccaaaaaaagaagaatccctgaagggcaaaatcatttttccaaacccccaataaaaccatgtccgggcgtataccctagccccctgatataagggggggtttggttgcgggacaaccagaatagggacgtcctttggcatcctttcgcccctccaattttgagggaaaacgggggacaacactgggaaaatcctgtcccaacccttgaccctgaacaaaacaattttatttgagggatcggcccgtcctatcccgtcctgtaattgcaaccaaac

SEQ ID NO: 118880 - DNA, 309 bp, Zea mays
  Clone ID: MRT4577_39905C.1
tttttattctggaccgttgacatggatttcatagatcatattgtcaaggttgcgcggacggcactggccgttgatgataaggtgctgaccacatatggacgttaaggcccccattaatggatctccgagttttactggatgtgggggatgcattatacacaacgggtcaatgctatcgaatatatctgtggagataaccatccactgtgtgcttacgtgtctaggatatgaggatggttacaaaaccaggatatccgtatgagatgaacgtgactgcattggaatccttggatgaacttatatgctaag

SEQ ID NO: 118881 - DNA, 920 bp, Zea mays
  Clone ID: MRT4577_39906C.1
ccccgggcctgcaggcagcaagcatcttcttggctttgccgccgcggtcttcgccatctatctgggaggcaatgttggtcacgatgttttccagcgtgtctgccggcagctttggtctcgagtacggcgagttccgcagcaggtcaagaaggacgtgggccttcatccgggacttgggcgtgccgtggaccgtaagctcgagaagaccaggaatcgccccttcgttcaggatgaggtccctatacctgctgcggtcgctctcgcacattgtcaggagcgctcccacggcgtgttctctgccctgatgggagccctcgtcaagcacctataagaaggcgatctttgccccttcctcgcctgttttggaaaaaagacaggggacaaacgcgagcccccactctttgtggggggagcttccgccaaatgtctctcaaaaaaacaagcaaaaggcggggccacctctgggtgtgcggctctgttttgaccaagggggggggggctttccatcccagaaaggccgcggccccccccatcaaactcgcttttatagaccgccccttcccgagggcaaaaaaccggggcgcttctttctccccttcctaaaatatggacacgaaaagggcgttaccgctctccaccaacttttgtggggacttctcttcccttttttttcttatggggtagcctggccctccctgtctcctgctgtcctctcttgcgcggtccccacgtgcagcctacttctggcattaaaaaaattttttcctccgcgcctatttaaaaaccacaaaaaaatccatgactcccaaacaaaccccggttgccccgccgcgcttcctcctttcctcttctttatatgccccacaaacacccacaaaaaaatacaactaaattacacctccggggggggcgccctgcct

SEQ ID NO: 118882 - DNA, 447 bp, Zea mays
  Clone ID: MRT4577_39907C.1
aaagtgaaccaagacataaatatcatagctatgttctacatatctggcacatgataagaagccccgactgggcgaagcaagatatgcatttatgttacagaaatacatacctgaatcatcgggctctcgcggaaagacgatcacgatacatacctggactagtgagctgtagaccagcataaaataggtcatccacctggcggcggaggtgaaggaatcagatctctgagtccatggtgctacactgacaccttacttaagagcaagccctcctttacgatcagaacttcaaactcatcacatgtacccaactgagctgctgcgacgactgacgagacgagcatcaagtctcagaataagctgtctgcggctacaactaaaagcgccacacatacgattacgaagccgagttcttccatccgctgcatgagggaacagctagcatgc

SEQ ID NO: 118883 - DNA, 430 bp, Zea mays
  Clone ID: MRT4577_39908C.1
attcggctcgaggggcccatggccatgtgttctttggcaggctcgctgctcctgttgctgccgctagcacggctagagaacttgctcccaggaatgcgacacccgcgatgggaatgaataacgtgagactagcagcacaagccacacagccaggtaatgatctctcgaaagctgccaagtcttcagatgcatccatggcttatggtgaagggctaaggtatgatccctcaaattcagggctccactgaaatcacgattcttgctgactatagctcgaaaagaggaaaagggctgtatgagactggaactaagcactaagaagacaaccatgctatccaaaaactctgttaacgagagctgcatcatatactagggtcagtcatgagcatgcacatggttctacgttgctgtcactaatgagacattgaca

SEQ ID NO: 118884 - DNA, 463 bp, Zea mays
  unsure (1)..(463): unsure at all n locations
  Clone ID: MRT4577_39909C.1
gaacaggactcgcnccgcgggnncgagggcagggagcgagacaaggccgcgcnggagcacgcgggcccgcgcaccgncnccngcgccgacancgncgccgncgccgcgagggacnccgncgnccngaccggcggacccggcngggaggggccacnggggaggagggacncgcggaaacgangcggagcggcncgaacaaccccancccagcncccaacgacncncnccccaccancancggcaagnncgccaaccaaggccccgacancgncgaccccgncgcacccccaggagggcacaccancggcgacncgcgccgcgngagccnccggcagcggcgggacgggcagaacaacaacgggcaggnggaccggacgcngaacccggcgnacgcagcggagccgcgggggcggggcccgcggncgggcggcgaccagaacccgnncgcgccggacccggcgag

SEQ ID NO: 118885 - DNA, 864 bp, Zea mays
  Clone ID: MRT4577_3990C.1
aagcacgacagcagtcgaagcgcgcggcgcgcctgcctagccatcccgggctcccggccacccgggccagggcccaggggaaggggaaaccgaggcaggcggcggcggcagcgcagggcgcacgcgcttctcgtttcgtgtcctgtccccactccccagccgagggggagttggagggaaggaacgggaggcagcttcaaggaggtggctggcggccgagcgtccgtgcggcatggggagggacgagctgctgcggcggagcctcgtggcgctggcggcggccgtggcgctcacgggcttggccacggcgtcgctgcgcaaggcggcggccacgtacggcttcggcatcctcgccatcgccggcgtgctgctcccggactgggagttcttcgaccgggactactcccagtggctcacccccatgcccgcctcccgacgcacggccgcggccgcggccgccgaccgggagcacgacgtctggaaattcaagccctatcctctgagggtggccatgctgacgaccatctacgggttcggtcttcacaagtggtggacgtacgtatctagctagcggggagtgggtcttcacagcatgaccgacgaacccgaaggttgaaatatcattgattaggttgtagccaagttcctcttttttttgttgttggattggaaaaagcaaaatactgtgacagcgccttgtcacatctcatcagttcttcactgtgatcatgagatgagccagctgttctaatggggagcgacccccgacccaaattgatatatgtagggtaactagcgattttccattcgcgctgctgctgctctttgatcgccgtcattgcttctgaaggactattgcttctg

SEQ ID NO: 118886 - DNA, 388 bp, Zea mays
  Clone ID: MRT4577_39910C.1
gaaaaaaccggcccttttttttttaaaccttgccccgaaaaaggggaaaaaaaataaaccaggggggccaaaatttgcggtttgcttttcaccttttgaaccaaaaaaaaactttcccccttccctcgttgatggaaattaaaccttacccccgccagggggggaaggggttcccccttaggccaaaggggggaaagggggtttaagggagccccgcccgtttttaatggtttataaccacgtcctccaaaaacgtcccccagggtttgtaggggcccccaaaaaatttggacaaaaaacccttgcccggtttaattgatttaaccctggggcgccccttttaccaacggggcccaatgatcatttgggaaaatttgcccccgggggt

SEQ ID NO: 118887 - DNA, 467 bp, Zea mays
  Clone ID: MRT4577_39911C.1
ggccccaacaacctttaatccacacacagcccaaaagatcccatcgggggagggaaaacaaaaacaaggggggccgaggggagcccgtctttttcaatttttcaacccgcggggtggctggatctgtctcctgatcgccttttttacttttccatcccccggtcacaaaactcgtgcggggcaatggcggacaaccaacagggagcgcctgcccctccaccgacgggattttttaacttgaaccaagcagggcacgggctttaccattcttgggcttcccccgcttgcgcctgcttttaaactaactggccacgtacacctcccccttgttgggggacacggagccccccctgctccgctggtgcctcccccggctgttggccttcttccccgcgtaagccgtggcccccccgtcgtggggcatttgctcgtaacggcagtcctcgctgcaaaacggggggtcgccc

SEQ ID NO: 118888 - DNA, 163 bp, Zea mays
  Clone ID: MRT4577_39912C.1
aagattgaaccaactgactttgggggacttcaaagattcaaagaatagctgtttacaatttccttttaaattatttttaaatgtttatacaataattgtaagtgttatctgttggctttatagaaagcatttggtaggacaattgtggatgtttttctcacac

SEQ ID NO: 118889 - DNA, 1259 bp, Zea mays
  Clone ID: MRT4577_39913C.1
cattgcgataaaatccgtcgcggccgcctccacccacgtcgacgctcgcttctccaaatccccccttcgccttgcgagggggcggaggggaggtggtagtggtagggtatacaggagtgctctgcccatggagaaggcggggcaacaacgccatgttatcggcggcggcggcaagaaggcgcccgcgctggggctgcagaagcagaactcgtggtcgccggacatcgagcgcgacgaggcgtgggagcgccggcgcaggggcatgcgccgcgggggcacggcgctgcgccgcgcccgcagcgtcacggacgacgacctcgacgagctccgcggctgcatcgacctgggcttcggcttcgagccggcgcccgccgccgcgtgcgcctgcgcctgcgccgggaggaaccgcctcctggagacgctgcccgcgctcgacctctactacgccgtccacggcggggcggcggaggcgccgccgtgctcgtgcggcgccgcgtcggaggcgtcctcgtccgaggagtcgccgctcggcagccccatgtccatactctctccaggcgacacgccggagacggtgaagatgcggctgaagcagtgggcgcaggtggttgcgctgtccatgctgagccgccactgagctctccgggccacggccgccgctaccttgtcgcattgggagtagagagaaaaaaccattcgagatgcacacaacagcagaaggaaggaatctccggcggtcgcctcaagcagaaaaaagacgaagagaaaaaaaaatctgttagggtttggtcatttggtgggccgccgccgccttccaccttgctcgtcctatcttggactgctagctaatcatctttcttccaccatgattgtatgattccgttggagacaaaacatcatgcctaattactttgcttgcttattaatcctcttgcttcccccctaatccatattagtttctcatcttcgtgtatgtacatggttcctttcaagaggcagattaatttccatcatctcaaatgattagcggggcacaacaaacaaaaaaaaaaaaaaaaaaaaaaaaaaaaaacggcgttaagaaggctgagcagaagcggggggaaaccaaaggttttttttttgcagcaaacaggcgggggcgggcagaaggtgacgtacagtgcgtgtggagtgtactggggcttccatgcatgagtgaatccatgccatgttatgagtgtagtcctttctttcttgtgtcttcgatgtgacgcggg

SEQ ID NO: 118890 - DNA, 352 bp, Zea mays
  Clone ID: MRT4577_39914C.1
ttcttcttttttttaaattgttggtttgttttttgaggggatttttttgactaactacatgggcactacagcctcaggatggattaggaccgtatgcacgcgaggggaacgggaacaaacaatatacttcaaaaggcactggtgacgaaaaacgcacatacatagtcgccctgaataaaggggtcgataacccacacgacttaactaaaaagaaccaagcttgactgaaggagagaaacgaaattagtgcattgattggaacccaaccaagaaggatccttgaaataagtggttgatcgcaagaaaacggaatgggaaaaaccagaactaccaacggaccgcaaaaattggg

SEQ ID NO: 118891 - DNA, 384 bp, Zea mays
  Clone ID: MRT4577_39915C.1
aaaaaaaaaaaaaaaaaaaaaaaaaaaaaaaaaaaaaaaaaaaaaaaaaaaaaaaaaaaagaaaaaaagggaaaaaaaaaataatttaaaatttataaatatataaaaaaaataaaattaaaaaaaaatggggggggcccttttaaaaaaccaaagtttacttccccttcattgcaacttattagctttttttttgggccccctaaattaatttaattggccggtgtttaaaaacgtgttatctgaaaaaaccttgggtttcccaaattaaatcgctttgaaaaaaatcccttttttccaagttgggttaataaaaaataggccccacccaatcccctttccaaacatttgcccacccttatttggaatgggaccccccccttt

SEQ ID NO: 118892 - DNA, 264 bp, Zea mays
  Clone ID: MRT4577_39916C.1
gccggccggatcgaagacggtcgcttctccaaatcccctcttcgccttgcgagggggcggaggggaggtggtagtggtagggtatacaggagtgctctgcccatggagaaggcggggcaacaacgccgccttccaccttgctcgtcctatcttggactgctagctaatcatctttcttccaccatgattgtatgattccgttggagacaaaacatcatgcctaattactttgcttgccaaaaaaaaaaaaaaaaaaggccccta

SEQ ID NO: 118893 - DNA, 652 bp, Zea mays
  Clone ID: MRT4577_39917C.1
gcggaggggaggtggtagtggtagggtatacaggagtgctctgcccatggagaaggcggggcaacaacgccatgttatcggcggcggcggcaagaaggcgcccgcgctggggctgcagaagcagaactcgtggtcgccggacatcgagcgcgacgaggcgtgggagcgccggcgcaggggcatgcgccgcgggggcacggcgctgcgccgcgcccgcagcgtcacggacgacgacctcgacgagctccgcggctgcatcgacctgggcttcggcttcgagccggcgcccgccgccgcgtgcgcctgcgcctgcgccgggaggaaccgcctcctggagacgctgcccgcgctcgacctctactacgccgtccacggcggggcggcggaggcgccgccgtgctcgtgcggcgccgcgtcggaggcgtcctcgtccgaggagtcgccgctcggcagccccatgtccatactctctccaggtagtctccggctgtccaggcaatctccgcccgtgattctagtttcgatctctgatccctttccgttcgttcgtgcaggcgacacgccggagacggtgaagatgcggctgaagcagtgggcgcaggtggttgcgctgtccatgctgagccggcactgagctctccgggccacgggc

SEQ ID NO: 118894 - DNA, 523 bp, Zea mays
  unsure (1)..(523): unsure at all n locations
  Clone ID: MRT4577_39918C.1
tcaccggtttcaaatttaaatcctccctccaaatcacccaccaataaacaacaaatcgcccactagtcactggtaactggtaactggtcactgctcaccagtccgtccacacccccgcgtctccggctcgccaacgccaacagacagagcgcctgcactgcactgcaccgcgcgctactgcagcctcgtctcgtcaggccacgcccgctcggggatggcgaccgtcccaaaccccaaggcgaccagggccaggagggagccggcgctgcgtccccgaagcaacaacgtcgcggcgccacctccgccgccgctgaggccgtcgtcgctgcagctccgcatgaaggacgaggcggcggcggcgccgcccgcgttcgtcgtcgggcccaggggcagggagctgctcccgccgccgtcctccaactacgaggcgtgggacctctccgacagcgagtccgcgccggcctnctnctgggccacgctccccaacagggcgctggtgtgccggcctctgcctcaggacgtc

SEQ ID NO: 118895 - DNA, 427 bp, Zea mays
  Clone ID: MRT4577_39919C.1
aaaccaattgtattatataaattacttgtataaacacatgtatcactgtcttgggagtggaacaaagtatcaggaaaggaatcatggggctgtcaaagctttgcacgtacatagcaatgaaagacactggcaagctttaatgctttagtaagttggtttctttggcacacatatatctgtgatgtactgggccgaccctggacggtgtgggtactaacggaccttgggaaactctgatctgggttggagacttgtgctgtcagagccaggcttgttatatgaacaatcgaccttgaacatatcagaaagagggtgaagtttggctgtttctgcttaggaactgttgatacatttgataagcgaccttttgctcttaaacaatttaccctggtgcttgagcacatgttattgatcaggactgtgatgc

SEQ ID NO: 118896 - DNA, 272 bp, Zea mays
  Clone ID: MRT4577_3991C.1
cctacgcgtccgccctcgcgtccggaatcgaagtacagggcctgctagatgctatcgcgcagagcatgaacatgccgtacgctaagtccaggtactgccgtggtgtccctgaccccaagatcaggatctacgatgtcgggatgaagaggaagggtgttgccgagttccccgacggcgtgcacctcgtctgctgggagaaggagaaagaccccagcgaggcgctcgaggctgcccgcattgcccgcaacaagtacatgaccaaatgtgcagga

SEQ ID NO: 118897 - DNA, 344 bp, Zea mays
  Clone ID: MRT4577_39920C.1
cgggttcctcccgttttttttaagatgaattttcctccccagtcggcaggttgtccaaagcagtaggggggggggggtttttttctttccccatttcaccggggctgatggggggggtttaatacagacggggaccatgtacatgggcgcctgggggcggcctactcctccctgggtttccacgggttccaccgggtgcttttgggcggggtggggggctggcccatgctttcctgggtgggggtgaggatcttcctttgggggggcaggacgggggcaagcccgttccggtgggggctgcttttcttggggtttttttccctaagctttggggaggtgggctt

SEQ ID NO: 118898 - DNA, 182 bp, Zea mays
  Clone ID: MRT4577_39921C.1
ggactttgcctcttctcctgcctcattccctgactttctctagttagatgtcagtcctaaataggttttcctcacttcaggcctcacccctcaccttgtttttttgggggctccagggaccaatctggggctggaaatgttaggaggttgccttggtgctgccccagatctgtccagcaggg

SEQ ID NO: 118899 - DNA, 340 bp, Zea mays
  Clone ID: MRT4577_39922C.1
cacgcccctccgtgttgctcgccgcacccccacgccccgccgtgttgctcgccgccaccgccccgccggcagccaaaatgccgttcaagaggttcgtggagatcgggctagtggcccttgtgaactacggcatggtgtatggccgcctcgtcgtcatcgttgacgtcttctaccagaacagttctctagttgatgccccctacttgattcgttgcctaatgaactttaagctgctttttctgactgacttgaagatttacattataacgtgtgctagtgatgactacactgatctaggctagggtagatgctgacatttattgcatgtggttgaatatat

SEQ ID NO: 118900 - DNA, 402 bp, Zea mays
  Clone ID: MRT4577_39923C.1
tatattttgttcttcaaatgttcatccaccggttgtgacactccgactgcgtgaactattcacatatctcgcttcagctagtccttctgctgtggatcttttgatctattccaatccttcagctagtccaaactgtttgacattacaccacaataaagagacatctcaagaaagttcaatgcacaatatgatgccaccatattcaaaggcttatacacctattatattgcttcttaagcttctaaataaacccttatttctgctgagtcgagtataccttgagaaggtctcgtatttgcttgaagtagttattaacaatgctgcattccacgttgattgtccaccttactctgtacagataactaacaattcagatattgaattccttgatgggacaccata

SEQ ID NO: 118901 - DNA, 280 bp, Zea mays
  unsure (1)..(280): unsure at all n locations
  Clone ID: MRT4577_39924C.1
gaccgcgcggcagacgngggaagccggagaacaacanncccgcggcggccnccgacccggangcgaaggacgccaaccaccnnggggggggggggggncncangcgcaggcgcaacaggagaagccccgggccaacgacccgcaccaccnccgccgcaccaagancnccgcgcccgcgcngcncaagaaggncgaccacgcccgcgccgggggcaccaacgaggncanggggcacaagcagggcaagagngagggcgacgccaacacacggaaggacgca

SEQ ID NO: 118902 - DNA, 307 bp, Zea mays
  Clone ID: MRT4577_39925C.1
agttagcacagggggggaaactttctggggtcaaaaagggaggggggaagggaaaagaaaaagcaagccaagggaccctgtaaggggcaaagggaaaggggaaaacaattggaaaacaaggtcctccagccccaagacagggcaaaaaaaaaagagggaaccctggaaaacaaggggcgcgccccacaagggacaattcacccctaaagcgagggcccaatggaagggaggggcaaaataaaagctgaaagccccaaaaaaaaaaaaaggccccacccctgggaaccgagggccgaaccgggaaatc

SEQ ID NO: 118903 - DNA, 1516 bp, Zea mays
  Clone ID: MRT4577_39926C.1
ccgggactatcactttcctcttgtttttcttgcctgtctccatactcatcgatcgattgctttttggcgtcagttgcttttgaggagctgagctacaatcaggcaagggatatttccgagatcatagctaggttttacgaggaatgcatcccggaggtggacctctgtcagtgccaccaggcttccgcttccatccgactgatgaggagctcctctactactacctgaggaagaaggttgcttatgagcccatagatcttgatgtcataagggagattgatctcaataaacttgagccctgggatctcaaagaaagatgcaaaataggcactgggcctcaaaacgactggtacttcttcagccacaaggacaagaagtacccaacgggaacgagaacgaaccgtgccacgacggcgggattctggaaggcgactggccgagacaaggccatcttccttggcagcgccaggaggatcggcttgaggaagaccctggtgttctacatcggcagggcgccacacggcaagaagactgactggatcatgcacgagtaccgccttgatcaagagaacgttgaaattcaggaagatggatgggtggtatgtagggttttcaagaagaagagctatgagcagagaggccatgacgtggctgagatggtggcactggacgacgaagagctccagcctttcacggttcctgtccccggctggcactagctccctgccaacaacagaccacaagaacaaccctcacctcatgcaatatgacttcccttctttcgacccttccatgcagctcccacagctgatgagcgccgaccagcccgtgccaaccctattccccagccatcctggcgtcgccacggccatgagctcatcaatcgacgttgagtgctcgcagaacctgctgacgatgctgacatccaacggcagcgacgggatgctccacgtccgcgctggtggtgctggagctggtgtcgaccgcttcgctggcacgacagattggtcgatcctagacaagctcctcgcctcgcaccagaacctcgaccagctcttccacggcaaggtcaccgcagcatctgcctccccaatggctccataccatcaacagctcatggaactcggtggctcgtcgtcgtcgtcgtccttgcagaggcttccactgcagtacctcagcggcgagacgaccgatctcctcaggttccccaagtaattattggatcgacctcaagtttagctaccttgttgagcagtgaccatatcaggattttggttgactactgggctgcttaattcggcctacttcgtatggagtttagtgcttttaaatgtatatatggtgcaactgtttggggcatgcaggcatggaatgccatcgatctaccatggttgcttgcttggccaagaggatgtttttgatgtttccattttggcttagggttgctcgttaggttcttttggagaaaaaatgtgaagagatggcccggtcaattaagaacttctatttgtttccc

SEQ ID NO: 118904 - DNA, 438 bp, Zea mays
  Clone ID: MRT4577_39927C.1
ctctctcttccccctatattcctctcccatctcttccgccgtcttcttttccttccctaggtcggtctcctcccttttcccacccgagggtcccccctccttccttcgctttctttttttccctgccgccggcgggcaacagggttccgttttcctttgctccggcggggcttgtaaatgctttccggccctttttcgggggcctcaaaatcccggtgggagctcgttctttctggtcttggattccgagtgggagggggaaagggtccgcttcaggtggtggggtgactcgggagacatgccctggcgctctaccccttacggagatggacgggtgccttgttttcggggccgggtgaacctgggcggactcttctgccggggcgccgggcaccagcggaaggccaccgctatgggccgggtccggtggggccgccc

SEQ ID NO: 118905 - DNA, 408 bp, Zea mays
  Clone ID: MRT4577_39928C.1
gtggaatatgagctgaataagcttacacgtgagcacacctactgtccatgaagcaccaaagccggataagacccctaaaacatcatggccataggtggcccaacgtatggggagtgcattactcggttcgagaggagacggggagatggtgttcacaagatgcaaatcatgtactaactgtccatccacacaatagaactgaccatttctaaagctggtgccaactcgcttttaacagaatggatgaatgacctacacaaaatagtttatctaaacacgaccagtctaatgctcagcataagcccatgagttatcaaaaacaacactgccaatgctatcgtgtagaaatatcaatgctcacaaaggctaacatgttatcgataagggtgcttccctcactggcacgca

SEQ ID NO: 118906 - DNA, 737 bp, Zea mays
  Clone ID: MRT4577_39929C.1
ccggccgggatatatttaaattcgagatgatcttgcttcttctgttatgattctatggtttccttttctgtgtagtatcgtttagttcatcacaatgctttccatatcttgaggccctccattaggagcctgtcaccatcttttagttccctgcaatcatgagttaccctatagtagacaactttttctgatgtcactgtgaagtttaaacatgtgttacaactcaagttaagtgcaaaaggagaagtctatttttctacaagagtgtaatatgctttagaagtaagtcatgtgaccacgaacaaaacaaacctaagacaatgactaagaaatattttttctacacatttaagtgtctagaaaattttgaaatggatgtcacatgctacatctagcttactgtattccttgactccttgagtttattttggtaggcttaattgctataatagcactaagtgctggttttggcctactattttcaattcttggtgtttccaacatcatcaataaactcaggcaaagaagggcaaaacttctaagacaaaagtttttcaagagaaaccatggtttgcttctacaacagttaatatcttcaaataaagatatagctgaaaggatgaagatttttagctttgaagaactagagcaagcaaccaacatgtttgaccagaatcgcatcattggtgatggaggtcatggaacagtctacaaaggtatcttatctgatcaacgtg

SEQ ID NO: 118907 - DNA, 152 bp, Zea mays
  Clone ID: MRT4577_3992C.1
gtcgctcggtggtgacagagagccggccgcgcaagctatgttttttttaggaccacacgttcggctacgcgggcagggcgggcgcctgcacttcctgggacacggccgttgagctagacctccctaccactcgacatgtacggatatctcgt

SEQ ID NO: 118908 - DNA, 784 bp, Zea mays
  unsure (1)..(784): unsure at all n locations
  Clone ID: MRT4577_39930C.1
cccaatgcaccanagaaaaacaaaaatatgaaaatggattttttttagtgaaaaatggattgtaaattttatattcaaaatcaaaatatatttttgtggagaagaataaaaacaataacttcccgtcaatggaataaatgaagtaaatgaaaaaatagtttcataaataaccccattgatgtgcacacttaaaaaaaaagatgacaattggctgaatttagaatgaatcatcaatttgatacgaaaagataatttagctatagatccacaaaaattgtaatatttagattcataataaaagcaaattaaggatgtactgaaaaatatatgaaatgattcgactgatgaatagattgcatggaggctgaaatgtgcagaacaaaaagaaaaacaaacaaaattattttgtgggcaacaaacaaatggggtgacaaaagcactaaacacgaacaaaataagaaggaaaatacgataatccatgatgcctgaatcatatttatattcaattgattttaggcaacgagacaaatgagatgatttaataaaattaagtagaggcagagttttttttcatttgtaggaatttaacttaatcagaatggtgtatacaattcttttttcattcatttcccttgtattccgttgtattaattaattaacgataattttacgattattattattataattattattattattattattttgaaatatttaaatgaaaaactatagatacattgattgcaaattaaagcaagctgagaataattcgaataacttt

SEQ ID NO: 118909 - DNA, 297 bp, Zea mays
  Clone ID: MRT4577_39931C.1
atgggcgcggtggcgccgctcggccccgcgatgggtgtgacggaacctcccaagtcattaggcccacctacagttgtccttgtccatcggacctcgaacaaccctgcaggtgcacctgatcacttgacaagttcggtatctgaattctttaccttgcccatgagcgtttcactcgtcacgcagatattacaacacatcggagaaatagaaatgatatcatgttacaagtgtaccttcggcttgagggaaggtaaagagtacaagcgtgatgcgaaagcaaatgccaagtcagtgtga

SEQ ID NO: 118910 - DNA, 498 bp, Zea mays
  Clone ID: MRT4577_39932C.1
gaggtccggccgggacttgctcgctgcgccgccacactcccactctgtctcttcccccatacctttactcgatactccgccgatgtcgacatgggagcttatcagcatctactatctcgggacaagctcttgttggatgccttcaactacgaagcagctcgacgatcggcagccctgtggtgaggacggaggaaacagggctctacatgaagggctctggtgatgtggcacatcggtgccgatccatgcacgctagggtgcaagagcgacgaagagcagtacggtgacacatgctgccgaactgggacctgactactgtcgccgagcacaattcacgcagtacaacttgccaccctcctttagacacataaatgattcgcgtcctacttgagaggaaacttgaacaatattactgctatgctgaagccaacaagcccgtctgaataaactgaggggggcgcggggaccacctagatgctgcttacctgctcgacggac

SEQ ID NO: 118911 - DNA, 421 bp, Zea mays
  Clone ID: MRT4577_39933C.1
aattcggcacgagggcgactctcctctcgctacacacaccaaatggagcccccgcctttggccgccggctgcacgacgctctgggggacggaggcctgtgaacacctgtggggcctgcagtccctcctcttctacgcccacgccgggctccagcaccgggacgccgccgtggaccaggtgctcgcgctccagctcctcgggttcctggactacacagcactagccacaaccacgggccccaaggacgcccgcttgcttgtgcctattaccaccgacctttgcaatatgctagcctgtctgctcacgctcgcaagcctgtgcttacgcacactcggctgttgagctccaagtagctgatgttgcgctgaggcattgccagaacaggaggcagcagcggaggattataccatccatcggaagt

SEQ ID NO: 118912 - DNA, 2910 bp, Zea mays
  Clone ID: MRT4577_39934C.1
cccctggttgaatataggtgttgtgactgttgtcaacttgaaaaattcctagtaatttaattattttaacataattttaagaagcatttttgtttactgcaagttgcttgggatcaataggcattgtcgttactgctgctatagattgacgatagctaccttttctctgaacatgtaggagagctgcatatcattatattaagaaggtgatgagtatagctagtttgactttatgtggcttgtaaatgtttgggattgatttaattttcatttatttgtcttgttgtttcttaaaaaaatcctttactaggcagtaggcacaagcaactaaggcactgttcaacttaaacttcgcattacctgcattatataaacatgttattgaggtaatgtgccaatgattgtttttattagctggtaatcatgattttttattctattgcttgtggcactccaaactgcatgaaaatgtttattatgttatgttcatctttggacccggccgggccgggttaactctaccgacctccgctcaccgccccctttcctcctatccctccccagagccccgacccggccggccggccggccggaaccctagccttatcgcccctccctttcccgcctcgcctccgcgcgatctcccgatcgccggattcgtgccgcggctggatggactccgacgtggagatgaacaccgccagcgatgaggaggtgatggacaacgatgactactacgactactgctacagcgacgtgggcgacgacggtgggagcaacagcgggagcgaggagctggtggccggggactacgacgagggcctcgaggccgaggggaccgacgaggtggtctctaggcgcgagcagacatttgtggttttaaacgaacaagttatatctgaacgtcaagccgaagatgtgagcaaggtatctgccgtcacactgattacaagggaggaggcgtgtgccctcctccatcactataaatggaacatcagcaagctgagtgacgaatggtttgcagatgaagaaaaagtccgccatactgttggcttacttttgaatggaaatcatgacccccgctctaggaagctagtctgtggaatatgttttgaggggtgttcttctgatatgatgagctctgctggttgtgctcatttttattgccatgaatgttgggaaggctacattagcgctgcaattggtgatggtccaggatgtttgtcattgcgatgccctgatccatcttgtagtgctatggttcttcaagggatgattaatgaattagctaaagatgaggatagaaaaaaatatgcacgatttctcttacgcgcatatgttgaaggtagcaagaagactaaatggtgtccagctcctgactgcacatgtgctgtggagttccttggtgatgaaaactatgatgtttcatgcaattgcatgttcagcttttgttggaattgcactgaggaagctcatcgaccagtgaactgtgagactgtttctaagtggatattaaaaaacagtgcagaatctgaaaacatgaactggatactggctaattctaagccctgtccaaagtgcaaacggccaatagagaaaaaccagggatgcatgcatatgacatgcacccctccttgtaaattcgaattttgctggttatgtctgggtgcatggtcagatcacggagagagaacaggtggcttttatgcttgcaatcgttatgaatcagcaaagaaagagggagtttacgacgagactgatgcaaggagggaaagagctaaaaactctcttgagagatatatgcattactatgagcgctgggcatccaatcagacatcgaggcagaaggcccaagcagatctgctaaaagcggaaaaggaccagattgcaaatttaactgacattttcgggataccagagacccagcttaagttcataatcgaagcttggtcacagattatagaatgcaggcgagtgttgaaatggacatatgcttatggctactatctggatgataagatcaagagtgaattttttgagtatctgcaaggtgaggctgagtctggtttggaacgcctgcatcagtgcgctgagaaagacttgcaaaattttttgccgtctgtgaaatctgacagcactgaaacaacgacacctacagtggctgaatttggtgaattccgcgtgaagcttgctggacttacaagcgtgactcggaattactttgagaaccttgttcaagctttggaagctgggttggaggatgtccgtgccacaggccaggctgctggtacatccagcactgccaccagctccaagaaaggaggaactaaatccaagaagaagcagcacactgcaccatcatctgaccacactgatgatgggtggccctgcgagcgctgcacatttcttaaccctcctacagtggatgcatgcagcgtctgcgaaaagagtaggtactagatgatggaatagctcaaagggagccagggaggcatcccaagaaaacctcaaagctcgtgagaagcatgcatgcatcggatgctgagaagaagagcttccagctgccgcaatgttgtacagagagttattttagggcctcggttggaaacggtgtggaggctcaagtggtcacatgtttgtgggggtcatttggttttctagttcttttctgttgttccttgtaaatatatttgttgtgatgtggtgacctgtgtttatgtgatgagtttttgtttctgacaaactgtgaaattaaactttaacaaaactgatgagaggtagctctgtttattccctcctaattgcgggcagggtctttgtctattcccagcagagaggaactaaatcagaacagcacactaagccatcggataggagaaaaacaggatgcatgcatatgacatgcacccc

SEQ ID NO: 118913 - DNA, 440 bp, Zea mays
  Clone ID: MRT4577_39935C.1
tgttttactatcggcgctaccattcgccgtaccgctggtcatctggcggctgatctggtggctgctcgcatccgtcgccgcatgctcctcctctagctccttccttagcccgcatctttacgctggggttacatgtctagctacctgcctacctagcgagagggagagagaaagggaggggagaaggttcgggcgctctggcatctggtctctgacttcgccgctgtctgccgggatctcgctcggtatgtgccttggtcggcgccatgaccgcaccggccacggcacccgccgcggcgcccgccgcgccggcaccggctgctgcaccggctgctgttaccgctgccgttgccgtggaccatgccacggaccagatgacgaagctgctcctgaattcgcagctgaaggcggagcccgcggcagagcctgctactgatgct

SEQ ID NO: 118914 - DNA, 453 bp, Zea mays
  Clone ID: MRT4577_39936C.1
aaaaaaaaaaagataatataagataaaagaaataaaaaacaagatcaagataaaatgagggtatagaagaccactagaacatgccatcactgctacccaaaaaactgatgatagggccctcatataaagactgggggggcgtttttactgctaggggtgaatcattcccagcagcactggatctgctaatgctgttggcaaagtgctttctgagcttaacggaaagtttactgcaatgtctttccgggaaccaaccggcgacgcccctgttgttgatttgactgataagctcgattagtcagcaacctatgatgagaaaaaggctgcccccaaggccccttcaacaaagtagcctcaaaggcatactgagttacggccccccctaccttgtttccataaatttccagggtgagaggaggtctagcatatttgacgctaaagctggcattgcct

SEQ ID NO: 118915 - DNA, 765 bp, Zea mays
  Clone ID: MRT4577_39937C.1
atggcgcttatcatcaagcgcttcaagaccgcattgaaaggacgcaaggagtaccccaacaagaacaaagcaaggggaaagcgctcctgtttcaaatgcggtaagactggtcatttcatagcacaatgccccgataatgatgatgaccaggaacaagaaaagcatgggaagagggagaagaagaaggtttacaagaaggcgaagggcgaggcgcaccttggcaaagaatgggattcagactgctcttcatccgactccaacgatgaaggactggcagcctcagccttcaacaagtctttgctcttcccaaacgaacgccacacttgcctcatggccaaggagaagaaggataaaccagaaacccaagggaccctcaagcgctttctaaggagggctcaaaacgaatttgagctcaaggtgaaaaagataagaagcgacaacgggtccgaattcaagaacctacaagttgaggagtatcttgaggaggaaggtgtcaagcaagagttctccgctccctacacaccacaacaaaacggtgtgatgtgcgaccacaagaacaacaagagcaagatcaaccttcttcctcaacgatggtgcatcccccaactcaagatgatggacacgttcctcaagaggaggcgcgttatcaagggtgagcacaagaagaaaaagtcatggagaaagaagcaccactggcccctccaactcaagtccgagcgacaattcaaagagatcatcccgtcgatcagattctgggtgacataa

SEQ ID NO: 118916 - DNA, 645 bp, Zea mays
  Clone ID: MRT4577_39938C.1
atgacgggggagaagaagatgttctcttcctacgtcaagaacaaagattcccaagactcaatcatattcggtgacgggaatcaaggcaaggataaatctgaaacccaagggaccctcaagcgcttcctaaggagagctcaaaatgagtttgagctcaaggtgaagaagataaggagcgacaatgggtccgagttcaagaaccttcaagtggaggagtaccttgaggagatgaagaagacgttccaacggccgcgatacgcaccatggcgattggagatgtacggcctcaagaacaattggagcaagatcaaccgtcttcctcaactatggtgcatcccccaacccaaggtgacgaacaggttgtaccaaatggatgtgaagagcgctttcctcaacgggccgatcaaggaggaggtgtacgtggagcaaccctctggcttcgaggatgaacggtacctcgaccacgtgttgaagcaactcaaggacggcaccttcatctcccaaacaaagtacacgcaagacttgctgaagcggtttgggatgaaggacgccaagcccgcaaagactccgatggggaccgacggacacaccgacctcaacaaaggagattttggtgaggcaatggggttaaagggccaagattga

SEQ ID NO: 118917 - DNA, 4491 bp, Zea mays
  Clone ID: MRT4577_39939C.1
atggatcctaagggaaaagggatggtgatcaacgacaaggagaaggagtccttcatcaatgagccaaaagacgacaagcccactgactcgggctcaagtcataagaagaaggacgggaagaagaagagacgcatcaagaagatagtctactatgacagtgacgagtcctcttcttcccaaagagacgacgacgacaagaaaaagaaaacggtcaactcaaacttttcttttgattattctcgtattccgcaaaattccaatgctcatttgctttccattcctcttggtaaacctccacactttgatggagaggactacggattttggagtcacaaaatgcgtagccacttgttctctcttcatccaagtatatgggagatagtagaaaatggaatgcaatttgatagtacggataatcccatgtttatcaatgaacaaattcacaaaaatgcacaagctaccactgttcttttagcatccttgtgcagggaagagtatcataatatctcgcatgaggggaacgacgccaccatgatcaccaagatggagttggtggaaggcgaactaggaaggttcgcaatgattaggggggaggagccaactcaaacgtacaacaggctcaagaccctggtcaacaaaatcaagagctatggaagcacgagatggacggaccacgacgtcgtccggcttatgctaaggtccttcactgtccttgatcctcatcctgtaaactctattcgtgaaaatcctaggtacaccaagatgacgcccgaggaaatactcggaaagtttgtaagcgggcgaaagatgatcaaggaggcaagatatgttgatgaggcgttgaatggcccaatgccgatccacgagcctcaaaccgttgctctcaaagcaataagcagcagggaggggctacctagcaaggtggcgcaagttgaggcggccgggctaaatgaggatgaaatggccctcatcatcaagcgcttcaagacggtgctcaaaggtcgcaaggagcatcccaacaagagcaagacgaagggaaagcgctcctgcttcaagtgtggtaagattggtcactttattgctaactatcccgataataatagtgaccaggaacaaggaaagaatgggaagagagagaacaagaaggtttacaagaaggctaagggcgaagcacaccttggaaaagaatgggactcggattgttcttcgtccgactccaacgacgaaggactcgccgccacggccttcaacaaatcgtctctcttccccaacgatcatcacacctgcctcatggcaaaggagaagaaggtaagcactcgaaacactattgcatatgcttcttcaagtgatgacgaatctagtgatgatgaagtagactacgcaagtttattcaaaggcttagatagaactaaaattgataagatcaatgaattaattgatgcgttgaatgagaaaaatagattgctagaaaggcaagaggatcttttatatgaagagcatgataaatttgtttatgcatccgggggctcaagctggattatcgacagcggatgcacaaaccacatgacgagggagaagaagatgttcacctcctacatcaagaacaaagattcccaagattcaatcatattcggtgacgggaatcaaggaaaggttaaaggactagtaaagatagctatttcatccgagcattccatatctaatgtgtttttagttgaatcgctcgggtataacttgttgtccgttagtcaattatgtaatatggggtataattgcttatttacaaatgtagatgtgtctgtctttagaaggagtgatggttcattagcttttaagggtgtactttacgacaaactctatttagttgattttgcaaaggaggaggccggtctagatgcatgcttaattgctaagactagcatgggctggctgtggcatcgccgtctagcacatgttgggatgaagaaccttcataaacttctaaagagggaacatgtgttaggtctaacaaatgtaactttcgaaaaagatagaccttgtgcagcttgtcaagcaggtaaacaggtgggaagctctcatcatagcaaaaacgtgatgaccacatcaagacctttggagctacttcacatagacctcttcggacctgtcgcatacctcagcatcggaggaagtaagtatggtcttgttattgttgatgacttttcccgcttcacttgggtattctttttgcaggataaatctgaaacccaagggaccctcaagcgcttcctaaggagagctcaaaatgaatttgagctcaaggtgaagaagataaggagcgacaacgggtccgaattcaagaaccttcaagtggaggagtaccttgaggagaaaggaatcaagcacgagttcttcgctgtctacacaccacagcaaaatgatgtggtagagagaaagaacaggacgctcatagacatggcgaggacgatgcttggagagttcaaggcgctcgagcggttttggtcggaagccgtgaacacgacttgccacgccataaaccgggtctaccttcatcgcctcctcaagaagacgtcgtacgaactcctaaccggtaacaaacccaatgtttcatattttcgtgtatttgggagtaaatgctacattctagtgaagaaaggtaggaattctaaatttgctcccaaagctgtagaaggatttttgttaggttatgactcaaatacaaaggcgtatagagtcttcaacaaatcatcgggtttggttgaagtctctagcgacgttgtatttgatgagactaatggctctccaagtgagcaagttgatattgatgatgtagatgaagaagatgttccaacggccgcaatacgcaccatggcgattggagatgtgcgaccacaggaacaaaaggagcaagatcaaccttcttcctcaacaatggtgcaccctccaactcaagatgatggacaggctcatcaagaagaggcatgtgatcaagggggagcacaagatgatcatgttatggaggaagaagcaccacaggcccctccaactcaagtccgagcgacgattcaaaggaatcatcctgtcgaccagatattgggtgatataagcaagggagacgagcacggggtggtgacaaggaacaaggtgagacttgtggcaaaaggttatgcccaagtcgtaggtttggactttgaggagacttttgctcctgtggctaggctagaatctattcgtattttgttagcctatgccgctcaccattctttcaggttgtttcaaatagatgtgaagagcgctttcctcaacgggccaatcaaggaggaggtgtatgtagagcaaccccctggctttgaggatgaacggtaccccgaccacgtgtgtaagctctctaaggcgctctatggacttaagcaagccccaagagcatggtatgaatgccttagagactttctaattgcaaatgctttcaaggttgggaaagccgatccaactttattcactaagacttgtgatggtgacttatttgtgtgccaaatttatgtcgatgacataatatttggttctactaaccaaaagtcttgtgaagagtttagcagggtgatgactcaaaaatttgagatgtcgatgatgggtgagttgaactacttccttgggttccaagtgaagcaactcaaggacggcaccttcatctcccaaacgaagtacacacaagatttgatcaagcggtttgggatgaaggacgccaagcccgcaaagactccaatgggaaccgacggacacgtcgacctcaacaaaggaggtaagtccgttgatcaaaaggcataccggtcgatgataggttgcttgctttacttatgtgctagtagaccggatattatgctaagcgtatgcatgtgtcctagatttcaatccgatccaagggagtgccaccttgtggctgttaagcgaatacttagatatttagttgctacgccttgcttcgggatctggtatccaaaggggtctacctttgacttaattggatattcagattctgattatgctggatgcaaggttgataggaagagtacatcagggacgtgccaattcttaggaaggtccctggtgtcttggagttctaagaaacaaaattccgttgccctatccaccgctgaggccgagtatgttgtcgcaggacagtgttgcgcacaactactttggatgaggcaaaccctcagggactttggctacaatctgagcaaagtcccactcctatgtgacaatgagagtgcaatccgcatggcggataatcctgttgaacacagccgcacaaagcacatagacatccggcatcactttttgagagaccaccagcaaaagggagatatcgaagtgttttatgttagcaccgagaaccagctagccgatatctttaccaagcctctagatgagtcaaccttctgcaggctgcgtagtgagctaaatgtcttagattcgcgtaacttggattga

SEQ ID NO: 118918 - DNA, 459 bp, Zea mays
  Clone ID: MRT4577_3993C.1
ggcgtgtacatgattttgcgtcaagtagcagagagaaggcggaaatagaggaacttaggaaagaggtccgagaggctaggagaataaaaatgctacaccagccaagcaaggtcatggacatggagtttgagcttcaggcactgcggactctcatctcagagaagactcagctatgcaatcagctaaagaaagagcttgccatgatcaagaggttagaagacgatagttctggcctctttgagcttgaaggttctaatacccttggatcacagctttgtattatcccgcgagttgatggtgcttcaaaccgctggcccaagcgaccaaagcacctgatgaagtgatcacgctatgttttgacggcgacaacagtacataattagggcgtggattggctgattgggtggcgtgcttgtcttagttttgtcgatttgtgcttgtgaaggtagaggttgtaca

SEQ ID NO: 118919 - DNA, 897 bp, Zea mays
  Clone ID: MRT4577_39940C.1
gataagtctgaaacccaagggaccctcaaacgcttcctcaggagagctcaaaatgagtttgagctcaaagtgaaaaagataagaagcgacaacgggtccgagttcaagaaccttcaagtggaggagttccttgaagaggaagggatcaagcacgagttctccgctccctacacaccacagcaaaatggtgtggtagagaggaagaacaggacgctcatcgacatggcgaggacgatgctaggagagttcaagacccccgagtgcttttggacggaaagccgtgaacacggcgtgccacgccatcaacagggtctaccttcatcgcctcctcaagaagacgtcatgaagaagatgttccgacggccgctatacggaccatggcgattggagaagtacggccacaggaacaagatgaacgagatcaaccttcttcctcaactatggtgcaacccccaaccaaagatgacgaacaggttgttccaaatggatgtgaagagcgctttcctcaacgggccaatcaaggaggaggtgtacgtggagcaaccccctggcttcgaggatgaacggtaccccgaccattcttgtgaagagtttagcagggtgatgacgcagaaattcgagatgtcgatgatgggcgagttgaactacttccttgggttccaagtgaagcaactcaaggacggcaccttcatctcccaaacgaagtacacgcaagatctgctaaagcggtttgggatgaaggacgccaagcccgcaaagactccgatggggaccgacggacacaccgacctcaacaaaggaggttcattctgcattttgttgcttattgtggtgctcaagttgtacaaaccctccctggacctcacaagtccgttgcaaagtgatgcacatgtttag

SEQ ID NO: 118920 - DNA, 1728 bp, Zea mays
  Clone ID: MRT4577_39941C.1
atggatcctaagggcaaggggatcgtgatcaatgacaaggagaaggagtcattcgtcaacgagcccaaggatgacaagcctaccgactcgggctcgggccacaagcgcaaagacgggaagaagaagacaaggcgtatcaaggagatcgtctactacgacagcgacgaatcttcctcttcccaacaggacaacgacgactacgagaaaaagaaaacgaatcctaggtacaccaagatgacgcctgaggagatacttggaaagttcgtgagcgggcgaatgatgatcaaggaagcaagatacgtggacgacgcattgaatggtccaatcaatgagccccaacctcttgctctcaaggcaacaaggagcaaggagacgctacctagcaaggtggcacaaattgaggcggccggacttaatgatgaagagatggctctcatcatcaagagattcaagacggcgctaaaaggtcgcaaggggcaaccaagcaagaccaagacaaaggggaagcgctcatgcttcaaatttggtaagcttggtcattttattgctaactgtcccgacaatgatagtgatcaggatcaagggaacaagagggagaagaagaaaaactataagaaggcaaaaggcgaggcgcatctaggcaaggagtgggattcggattgctcctcttccgactccgacaatgaaggactcgctgccaccgccttcaacaagtcatccctcttccccaacgagcgtcacacatgccttatggcaagggagaagaaggtttatgcatccgggggttcaagctggattatcgacaacggatgcacaaaccatatgacgggggagaagaagatgttcacctcctacgtcaaaaacaaggattcccaagattcaatcatatttggtgatgggaaccaaggcaaggataagtctgaaacccaagggaccctcaagcgcttcctaaggagagctcaaaatgagtttgagctcaaagtgaagaagataagaagcgacaacgggtccgagttcaagaaccttcaagtggaggagtttcttgaggaggaggggatcaagcacgagttctccgctccctacacacctcagcaaaatggtgtggtagagaggaagaataggacgctcatcgatatggcgaggacgatgcttggagagttcaagacccccgagtacttttggtcggaagccgtaaacacggcttgccacgccatcaacaggatgaagaagacgttccaacggccgcaatacgcaccatggcgattggagaggtgcggccacaggaacaaaatgagcgagatcaaccttcctcctcaactatggtgcatcccccaactcaagacgatgaataggttgtaccaaatggatgtgaagagcgctttcctcaacgggccgatcaaggaggaggtgtacgtggagcaaccccctggctttgaggatgaacggtaccccgaccacgtgtgtaagctctctaaggcgctctatggacttaagcaagccccaagagcatggttccaagtgaagcaactcaaggacggcaccttcatctctcaaacaaagtacacgcaagacttgctgaagcggtttgggatgaaggacaccaagcccgcaaagactccgatggggaccgacggacacaccgacctcaacaaaggagttatggtgctcaagttgtacaagcactccctggacctcacaagtccgttgcaaagtgatgcacatgtttag

SEQ ID NO: 118921 - DNA, 376 bp, Zea mays
  Clone ID: MRT4577_39942C.1
ttcccggggtgctactgacggttgcatctatatccgtgcatactggtggttttgtggagggccaaagcttgaccaagttacaatagctgcgacagctgtggggctacctggtggccgagcctcgtccggagactggcctgtataagctgcaataggccaccacctcccacgcgatcgatattaacaaacacgcaactcagtggcgcattgccctccgctcagagcctacaaaccaccccgcctacgtgagtcacgcgcttgtcctgaaagctgaaggatacctccaggaggccccggattgcttgcagccagcatatgaacttagagaattatcaccaattcaagatttttctgagcaacttctgatcatgctgca

SEQ ID NO: 118922 - DNA, 595 bp, Zea mays
  unsure (1)..(595): unsure at all n locations
  Clone ID: MRT4577_39943C.1
tcgcgatctagaacgacgagatttcgggttgcattctccagcattgatggtggaacttttagaaccatcaagtttgttgatgcttcagtggtaaagattgaaggtcgtggcttagttcttcatgagtgtaagaatggggagcatcttacacttgccaatgcgtactatattcctgacttacaaccaatactattagtattggtcaacttaatgaaaagggcttcgatgtgcggatctgggatggcaccatgacgataagagatgagaatgagaagcttctaaccagaaatccccacggtctgagaaggttgtacaagctagagcttcaaatcgcgtgaccggtgtgcctggtgacatgcgccgaggaagatgtatggcgttggcatgctcacaggcacagatcagtggggttggggctctagcccccctaccgctctcaagtctatggagccccactaaagcccttcctaaaatttaaaacgtatataatacaatctcattatgtattntatagtttntatcgttatttcgatgttttaaatataatactagcttcaatgttntaatataatattcctgcaaactgttatatgtc

SEQ ID NO: 118923 - DNA, 255 bp, Zea mays
  Clone ID: MRT4577_39944C.1
ttgctgtcggcgctgctgagtgatagaatggagaggagtggaaggaatgggctcgcacgacagcagtcttcagagtggcttgggagaggctccgatgggctcatcggcttgtcagatgccagtgcccttgggtctccgcgcaagagctttgctgatgcattgcaggaaaatattagccgtcctgctgttatagccggtcatctttcacgttctaatagccgtaatgttcttgagggcccaactccgacagcaacg

SEQ ID NO: 118924 - DNA, 3264 bp, Zea mays
  Clone ID: MRT4577_39945C.1
atgtcgcccaaagaaatacttggaaagttcgtaagcgggcggatgatgatcaaggaggcaagatacattgatgaggcgttgaatggtccaattcatgagcctcaagccatcgctctcaaggcaacaagtagcagggaggcgctacctagcaaggtggcgcaaattgaggccgttgggctaaatgaggatgaaatggccctcatcatcaagcgcttcaagacggcgctaaagggccgcaaggagcatcccaaaaagaacaagacgaagggaaagcgctcctgcttcaagtgcggtaaggttggtcactttgttgctaactgtcccgataatgatagtgaccaggaacaaggaaagaatgggaaaagagagaacaagaaggtttacaagaaggctaaaggcgaggcacaccttggaaaggagtgggattcggattgctcttcgtccgactccgacgacgaaggactcgctgccaccgccttcaacaaatatgaacacctagtttccatttctagattaaaggatgaagtggctagtcttaatgctcaacttaagactagcaaaagtgaatttgataaactaaaatttgcaagggatgcctacacgattggtagacacccctcaattaaggatggacttggctttaagagggaagccaagaacttaacaagtcataaggctcccatctctgccaagaagaaagggaaggcccctatggctaatagtgctaaaaagaaccatgctttcatgtaccatgataggagatattctaggaatgttcatagaagttatgatacttttgattctcatgccatgattgcttcaagttcttatattatgcatgatagaaatttggctagaaaaatgttgttaatgtacctaggaaaaaaggataagaaagtggttgctaggaaattaggggcaaaatgcaagggagacaaaacttgcatttgggttcctaagactattgtcactaaccttgtaggacccaacaagagttgggtttatgtatccgggggatcaagctggattatcgacagcggatgcacaaatcacatgacgggggagaagaagatgttcacctcctacgtcaagaataaagattcccaagattcattcatattcggtgacgagaatcaaggcaaggttaaaggattaggcaagattgccatctcaaatgagcactctatctccaatgtatttttagtagagtcgctaggttataatcttttgtcggttagtcaattatgtaatatgggatataattgcgtattcacaaatgtagatgtatctgtctttagaaggagtgatggttcattagcttttaagggtgtactagacgacaaactctatttagttgattttgcaaaggaggagctgtggcatcaccgtctagcacatgtggggatgaagaaccttcacaaacttctaaagggagaacatgtgttaggtctaacaaatgtgcatttcgaaaaagatagaccttgtgcagcttgtcaagcaggtaaacaagtgggaagtgctcatcacatcaagaacgtgatgactacttcaagacccctagagctgctgcatatggacctcttcggaccagtcgcctacctcagcatcgggggaaggaccctcaagcgcttcctaaggagagctcaaaatgagtttgagctcaaggtgaagaagataaggagcgacaacgggtctgagttcaagaaccttcaagtggaggaataccttgaggaggaaggaatcaagcacgagttctccgctctctacacaccacagcaaaatggtgtggaagagaggaagaacaggacgcttatagacatggcgaggacgatgcttggagaattcaagacgcccgagcagttttggtcggaagctgtgaacacggcttgccatgccataaactgggtctaccttcatcgcctcctcaagaagacgtcatacgagcttctaaccggtaacaaacccaacgtttcatattttcgagtttttgggagtaaatgctacattctggtgaagaaaggtagaaattcaaaatttgctcccaaatttgtagaagggtttttgttaggttatgactcaaatacaaaggcgtatagagtcttcaacaaatcatcgggtttggttgaagtctctagtgacgttgtatttgatgagactaatggctctccaagagagcaagttgagcttgatgatgtagatgaggaagatgttccaacggacgcgattcgtaccatggcgattggagacgtgcgaccgcaggaacacaaggaacaagagcagccttcttcctcaacgacggtgcacccccaacctaagatgatgaacagggtagaagaggccttgctagatccggactgggtgttggccatgcaggaagagctcaacaacttcaagcgtaatgaagtttggacagtggtgccgcgtcccaagcaaaatgttgtgggaaccaagtgggtattccgcaacaaacaggacgagcatggggtggtgacgaggaacaaggctcgacttgtggcaaaaggttatgcccaagtcgcaggtttggactttgaggagacttttgctcctgtagctaggctagagtcgattcgtattttgttagcctatgccgctcaccattctttcaggctgtaccaaatggatgttaagagcgctttcctcaacgggccaatcaaggaggaggtgtacgtggagcaaccccctggctttgaggatgaacggtaccccgaccatgtgtgtaagctctctaaggcgctctatggacttaagcaagccccaagagcatggtatgaatgccttagagactttttaattgctaatgctttcaaggttgggaaagccgatccaactcttttcactaagacatgtgatggtgacttatttgtgtgccaaatttatgtcgatgacataatatttggttctactaaccaaaagtcttatgaagagtttagcagggtgatgactcaaaaatttgaaatgtcgatgatgggcgagttgaactacttccttgggttccaagtgaagcaactcaaggactgtaccgacacgcgtacgaatgcgacgtggagtgcgtggagtacgccgaggccctcgccaaatccgaggccctcatcgccgacctggagagcctccaagggggcgccagatgcgaagcgccacaccggcaacttcgagccagctgagacggttaagtacgtccctctcgaccccagcaacgacgcctccaagcagatccggatcggctccaagctcgaccccaaatag

SEQ ID NO: 118925 - DNA, 299 bp, Zea mays
  Clone ID: MRT4577_39946C.1
actcagaggtaaagccggcaacaacagacacgctcccacaccagattagctcactgtcctgatggactggactgagagatactccttgcttgacattccacgacccgagtgctggttccgacccggcaatcagcaagctctggccccattgcgtgtaatacggtagtttgaacagcaaggtcactgaattcaggtgtttctttcccgaggtcgccgtgtccttgacacggcacgaccggcggcaatggcgacaaacgggcagggaatcagcgacgggcggggggagagatcagagcgaa

SEQ ID NO: 118926 - DNA, 4890 bp, Zea mays
  Clone ID: MRT4577_39947C.1
atggatcctaagggcaaggggatggtggtcaatgataaggagaaggagtccttcgtcaatgatccaaaagatgacaagcctactgactcgggctcgagccacaaaagaaaagacgggaagaagaagaaaacaaggcgcatcaaggagatcgtctactacgacgacagcgacgagtcctcttcttcccaaaaggacgacgacaactacgagaaaaagaaaacgttcaattcaaacttttcttttgattattctcgtattccgcaaagtacaaatgctcatttactctccattccacttggtaaacctcctcactttgatggagaggactacggattttggagtcacaaaatgcgtagtcacttgttctctctccatccaagcatatgggagataatagagagtggaatgcaatttgatagtattgatagtcccatatttatcaatgagcaaattcacaaaaatgcacaagctactactgttcttctagcatcattgtgcagggatgaataccataaggtgagcggcttggataacgctaagcagatctgggacaccctcaagatctcgcatgaggggaacgacgtcaccatgctcaccaagatggagttggtggagggcgaacttgggagatttgcaatgatcaggggcgaggagccaacccaaacgtacaaccggctcaagaccctcgtcaacaaaataaggagctatggaagcacacgatggacagaccacgacgtcgtccgcctaatgctaaggtccttcactgtccttgatccacatcttgtaaacaatattcgtgaaaatcctaggtacaccaagatgtcgcccgaggaaatacttggaaagttcgtaagcgggctgatgatgatcaaggaggcaagatacgtcgatgatgcgttgaatggcccaatccatgagcctcaaaccgttgctctcaaagcaacgaggagcaaggaagtgctacctagcaaggtggcacaagttgaggcggcggggctcaatgaggaagagatggccctcatcatcaagcgtttcaagacggcgttaaggagtcgcaaggagcatcctaacaagaacaagacgaaggggaagcactcatgcttcaaatgtggtaagattggtcattttatcgctaattgtcccgataatgatagtgaccaggaacaagagaagaagagggaaaagaagaaggcttacaagaaggcaaagggcgaggcacaccttggcaaggagtgggactcggattgttcgtcgtccaactccgacaacgaaggactcgccgcctcggccttcaacaagtcatccctcttccccaacgagcatcacacatgcctaatggcaaaggagaagaaggtaaacactcgaaagtctacttatgcttctagtgatgatgaatctagcgatgatgaaatagactatgctagtttgttcaagggcttagatagaactaagattgataagatcaatgagttgattgatgccttgaatgataagaatagattattagaaaagcaagaggatcttttgtatgaagaacatgataagtttgtagaagcacaaaaatctcttgctttagaagttaaaagaaatgaaatgctttcatgtgaattgtctacatgccatgaatctatctctagcctaaaaagtgttaatgatgatttgaatgctaagttagaaatagctagtaaattaacctctcgtgaagaacatgttacgatttgcaataggtgtaaagattttaatgttgatgcttgtagtgaacacctagtttgcatttctaaactaaatgatgaagtggctagtcttaatgctcaacttaagactagcaaaaatgattttgataaactaaaatttgcaagggatgcctacacggttggtagacacccctcaattaaggatgggcttggcttcaagagggaagccaagaacttgacaagtcataaggctcccatctccgccaaggagaaagggaaggctcctatgactcataatagtcaaaagaatcatgctttcatttacggtgataagagatattctagaaatgttcataggagttgtaatgattcaaatgccatgtttgcttcaagttcttcctatgtgcatggtagagatatgcctaggagaaatgtcattcatcatgtgcctaggagaaatgttcatgttcctaggaaaattaatgaaccttctactatttatcatgcttgcaatgcttcctttgctatttgtagaaaggataagaaggtgattgctaggaaattaggggcaaaatgcaagggagataaaacttgcatttgggtccctaaggatattgtcactaaccttgtagaacccaacaagagttgggtttatgcatccgggggatcaagctggattatcgacagcggatgcacaaaccacatgacgggggagaagaagatgttcacctcctacgtcaagaacaaagattcccaagactcaatcatattcggtgacgggaatcaaggcaaggttaaaggactagggaagattgccatttcatccgagcactctatctctaatgtgtttttagttgagtcgcttggatataacttattgtctgtgagtcagctttgtaatatgggatataattgcttatccacaattgtagatgtgtctgtctttagaaggagtgatggttcattagcttttaagggtgtattagatggcaaactctacttagttgattttgcaaaagaggaggccggtctagatgcatgcttaattgctaagactagcatgggctggctgtggcatcgccgcttagcacatgtggggatgaagaaccttcacaaacttctaaagggagaacacgtgataggtctaacaaacgtaaccttcgaaaaagatagaccttgtgcagcttgtcaagcaggtaaacatgtgggaagctctcatcataccaaaaatgtgatgaccacatcaagaccgttggagttgcttcatatggacctcttcggacccatcgcctatctaagcatagaaggaagtaagtatggtcttgttatagttgatgatttttcccgcttcacttgggtattctttttgcaggataaatctgaaacccaagggaccctcaagcgcttcctaaggagagctcaaaatgagtttgagctcaaggtgaaaaagataaggagcgacaacgggtccgagttcaagaaccttcaagtggaggagtaccttgaggaggaaggaatcaagcatgagttctccgctccctacacaccacagcaaaatggtgtggtagagaggaagaacaggacgctcattgacatggcaaggacgatgcttggagagttcaagacgcccgagaggttttggttggaagccgtgaacacggcttgccacgccataaaccaggtgtatcttcatcgcctcctcaagaagacttcgtatgagcttctaaccggtaacaaatccaatgtgtcttactttcgtgtatttgggagcaaatgttatattctagtgaagaaaggtagaaattctaagtttgctcccaaagctgtagaagggtttttgttaggttttgactcaaatacaaaggcgtatagggtcttcaacaagtcatcgggtttggttgaagtctctagcgacgttgtatttgatgagactaatggctctccaagagagcaagttgttgatcttgatgatatagatgaagaagatattccaacggtcgcaatacgcaccatggcgattggagaagtgcggccacaggaacaaaaggagcaagatcaaccttcttcctcaacaatggtgcatcccccaactcaagacgatgaacagcctttcagggtagaagaggccttgctagatccagactgggtgttggccatgcaggaggagctcaacaatttcaagagaaatgaagtttggacactggtgcctcatcccaagcaaaacattgtgggaaccaagtgggtgttccgcagcaaacaagacgagcacggggtggtgacaaggaacaaggcacgacttgtggcaaaaggttatgcccaagtcgcaggtttggactttgaggagacttttgctcctgtggctagactagagttgttccaaatgtatgtgaagagcgctttcctcaatggaccaatcaaggaggaggtgtacgtggagcaaccccctggcttcgaggatgaacggtaccctgaccacgtgtgtaagctctctaaggcgctctatggacttaagcaagccccaagagcatggtatgaatgccttagagactttttaattgctaatgctttcaaggttgggaaagccgatccaactttattcactaagacatgtgatggcgatttatttatgtgccaaatttatgtcgatgacataatatttggctctactaaccaaaagtcttgtgaagagtttagcagggtgatgactcagaagtttgaaatgtcgatgatgggcgagttgaactacttccttgggttccaagtgaagcaactcaaggacggcaccttcatctcccaaacgaagtacacacaggacttgctcaagaggtttgggatgaaggacgccaagcccgcaaagacaccaatgggaaccgacggacatgtcgacctcaacaaaggaggacagtgttgcgcgcaactactttggatgaggcaaaccctcagggactttggctacaatatgagcaaagtcccactcctatgtgataatgagagtgctatccgcatggcggacaatcctgttgaacacagccgcacaaagcacatagacatccggcatcactttttgagagaccaccaacaaaagattttggtaaggcaatggggttctagggccaagattgatcccgttctggtgcttgatgccaaagggggagaaaataaggccaaagcaacaaatggatcagctaccacttga

SEQ ID NO: 118927 - DNA, 1584 bp, Zea mays
  Clone ID: MRT4577_39948C.1
acctcgaggggccggccgggaaaaaaattgggtacctcgaggcagctttcgtgccttcagcccttcagtcttcaccagtcgcgcgccgccatgtcggagaccgaatcggcggcagcggcgccggtggctgcggctgaatcgaagcctcggcgactgcgggggcacaagaagggcgccgtcacctgctgcgtcgcctcctccgcccgccccggcgtcgtcgcgtcctccggcgaggatggatgtctttgctggtttgatctgcgcaccaaagatgtacttttgaccatggaggcagcaaataaaccaatttcttcaatttgctttaaaccaggaaatgaagattttgtgtatatctctgctggaaatgaaatattgtcctttgatgttcgtatgggaactcaaacaaagccattagagacatataactacaatagagatgaaatcaatcagattgctgtcagctctaaaggttttctcgctgctgcagatgatagtggggatgttaagattgtcaataccattcagaaatgcctgtataaaagattaagggaagcccacacaagtatttgcagcagcgtgcaattcattccttggagaccttggacagcaattactgggggccttgactcaaagctggctgcatgggatttctccaaaggacgaacactgttttctattgattatggatcacctgaattgcaaaacggcagttcttccggtagtgcagggcaatgtttcaaccctgcttttgttcattccgtagcagtttctgaagagggtattttgggagggctctacaaggtttgtgctgttgcaaggggggatggtgctgttgatgtggttgatcttgagtatgaactggcccctgcgaaatcgaagggacctcctcgggcagctattttgacaacgagatcaaaaggcgctgaacttggagatgggagctgcaatcaaagtcgagcgaaaagaatccatcttgactacaccatgggcggccatactgcagctgtatcttgtgtagcattttcagcatttggtgagaaggggaagttcctcatttcaggtggcaatgatgcatcagtgaagctgtgggattggtcgaaaggattttactctgaaacaaacagcaaagttgatttggttttggatattgatgtaaagaaaaaggtaaattggctttgtactgctccaactgattcagataacttgattgtgtgtgacacatccaaggtggtcaaagtatatagtttccggtagatggatcaaggtgtagcctcagtttgtcaggcagttatctgagggagtgaagcttgtctgaccgttggaaccaatctggtcctgactctggtatccagatattacaagcctgccgcagacagttcctgagttgtgaggtcattggttagcaatttgcaatgtcagttgtggcgcagaacagatctgataaagtatatattattttgttactgtcagaactttttgtacaacttccagtctgctagcttagctggacttggcatgtatatctctgttgtacggtgaaatgaatttacgtgtttggagaaaataaggcttgtttgtgcctgg

SEQ ID NO: 118928 - DNA, 1524 bp, Zea mays
  Clone ID: MRT4577_39949C.1
atggcccaagggcacatttccctttcagtcttcaacaaatcaccgggtttggttgaagtctctagcgacattgtatttgatgagactaatggctctccaagagagcaagttgatcttgatgatatagatgaagatgatgtcccaacggccgcaatgcgcacaatggcgattggttatgtgcgaccacgagaacaacaggagcaagatcaacattcttcctcaacgatggtgcatcccccaactcaagatgataacaagttcatcaagaagaggcgtgtgatcaagggggagcacaagaagaacaaactatggaggaagaagcacgaccggcccctccaactcaagttgttccaaatggatgtgaagagcgctttcctcaatgggccaataaaggaggaggtgtacgtggaacaaccccctggctttgaggatgacaggtaccccgaccatgtgtgtaagctctctaaggcgctctatggacttaagcaagccccaagagcatggtatgaatgccttagagatttcttaattgttaattctttcaaggttgggaaagccgatcccactcttttcactaagacttgtgacgatgacctttttgtgtgccaaatttatgtcgatgacataatatttggttctactaaccaaaagtcttgtgaggagtttagcagggtgatgactcaaaagtttgagatgtcaatgatgggcgagttgaactacttccttgggttccaatacactcaagatcttctcaaacggtttgggatgaaggacgccaagcccgcgaagacaccgatgggaaccgacggacatgtcgacctcaacaaaggaggtaagttcgttgatcaaaaggcataccggtcaatgatagggtcattactttatttatgtgctagtagaccagatattatgcttagcgtatgcatgtgtgctagatatcaatctgacctaagggaatgtcaccttgtggccgttaagcggattcttagatatttagtttctacgccttgcttcgggatctggtatccaaaggggtctacctttgacttaattggatactcagactccgattatgctggatgcaaggttgataggaagagtacatcagggacgtgccaattcctaggaaggtccctggtgtcttggagttcaaagaaacaaacctctgttgccctatccaccactgaggccgagtatgttgccgcaagacagtgttgcgcgcaactactttggatgaggcaaaccctccgggactttggctacaatctgagcaaagtcccactcctatgtgacaatgagagtgcaatctgcatggcggataatcctgttgaacacagccgcactaagcacatagacatccggcatcactttttgagagaccaccaacaaaagggagatatcgaggttttccatattagcaccgagaaccagctagccgatatctttaccaagccattagatgagaagaccttttgcaggttgcgtagtgagctaaatgtcttagattcgcgtaacttggattga

SEQ ID NO: 118929 - DNA, 1253 bp, Zea mays
  Clone ID: MRT4577_3994C.1
gtccaaaccccagcagcatcgcttcattgtcggcacaaaaggctatggttgcacggacgaagcaaaagtgagcagctcgtagctccgtccaggagaggagattcagggtacggtaaagaagatggatttcataatgtcaatgaaggtcatgatgtttggtccaaagcaactattggtagtaagcaatcatgcatggccggaactggaatcacgaacctagatctgatactttcccagatgagcagaatgagaaatcaaatttccattggtagaattcaaccaccaataggtgccgagccaagtgacagatggctcaagcgcctacagcctgacataccagatcctgacatccctggttccaggaggccaaaagttggaggcagccctccactcaggcaaagaaatcgttcgtttgacatggcacttccttgcaacaggactgacactggaacaactgactgtgttatggaggaccagagcttggataaagtggaaaaaacgcaagaaaagccagaaagtaccccaattccagcgaagagcgtgaatagctggataggaagatggtgccagggaggcactcctgttttccatgaaggcccaggccagggaaggcaggcaacaaagcctggccggccatctgaagaacttgaaggtcggttcccaagcattgcagcgatggcgatgatggggcgagcgatgaacaagcttcggccgtgcgagcatcagaagatggggccacttgtggtgtggaagacagattgacctcgtatatatatgtttttgggtgtaatatagtggtttctttccaaaaaaaaaggaaaaaaaaaagaaaagcaactgtgaatttttcctggtttattgtttatggtgtaataaaccatgatggctcatggtttattgttttctgaagtgaaagtagctaggtgtagtggatactggtgatgtaatggtctcatataccaacaatataataataattttactgttaaaaaaaaaataaaaaaaaaaaagaaaaaaaaaaaaaaaaagagaacataaaaaatacaaattaaaaaaaccataaagggcctttaaagctgcacgctttgtgttccctctatgggaggattaatatgccctgtttgaaagtagttattgggcttacattgttccctgtgagacatggccgtacgcataacagtttcacaacatgatgcgcccaggaagggtactaagtaaaattaggggcgcctaattaactggcctattttcca

SEQ ID NO: 118930 - DNA, 386 bp, Zea mays
  Clone ID: MRT4577_39950C.1
cggagatacattttgagaagaaaaaggcaaggaggctaagccactggcttgtgtcaagtcattgattctatatacttttttctatatacattttgagaagaaaaaggcaaggatatgaaactcggtgttttggctttcgtgaaaaaaaaagaactgagcgaatgatgaatgtctcatgattatatttagctatttcaaatggaaactatccttgttattgtactgacttttgttcataattaaaacacagagggtaatggaatatctatatgcaaatatattaaatgcgtaccttttttttttgtccgatgatccaggtgcgcagagattctgtgactcttcctattccttttgtgtgactcttcctattcctttgtttcttactt

SEQ ID NO: 118931 - DNA, 1038 bp, Zea mays
  Clone ID: MRT4577_39951C.1
atggatcctaagggaaaggggatggtgatcaacgacaaggagaaggagtccttcctcaacgagccaaaagacgacaagcccactgactcgggctcaagtcataagaagaaggatgggaagaagaagagggaagagtaccataaggtgagcggctttgataacaccaagcaaatttgggacaccctcaagatctcgcatgaggggaacgacgccaccatggtcaccaagatggagttggtggaaggtgaactaggaaggttcgcgatgatcaggggggaggagccaactcaaacgtacaataggctcaagaccctggtcaacaagataaggagctatgggagcacgagatggacggaccatgacatcgtccgactaatgctcaggtacaccaagatgatgcccgaggaaatacttggaaagtttgtaagcgggcgaatgatgatcaaggaagcaagatacgtggatgaggcattgaatggaccaatgcccatctacgagcctcaaaccgttgctctcaaagcaacaagtagcagggaagcgctaccaaacatggtggcgcaagttggggcggtcgggctaaatgaggatgaaatggccctcattatcaagcgcttcaagatcgcattgaagggacgcaaggagtactcaaacaagaacaagggagacgaaagacatgggaagagagagaacaagaaggtttacaagaaggctaagggcgaggcacaccttggcaaagagtgggactcggattgttcgtcatccgactccgacaacgaaggactcgcctcctcggccttcaacaagtcgtcgctcttccccaacgagcatcatacttgcctaatggcaaaggaaaagaaggtttatgcatccggtggctcaagctggattatcgacagcggatgcacaaaccacatgacgggggagaagaagatgttcacctcctacgtcaagaacaaagattcccaggattcaatcatattcggtgacgggaatcaaggcaaggttaaaggactaggaaagtgtcacacccggttttga

SEQ ID NO: 118932 - DNA, 1549 bp, Zea mays
  Clone ID: MRT4577_39952C.1
atggatcctaaggggaagggtatcgcgatcaacgataaagagaaggaatccttcgtcaacgagccgaaggacgacaagcctaccgactccggctcgggccatagacggaaagaagggaagaagaagaagacgaggcgcatcaaggagatcgtctactacgacgacagcgatgagtctacttcctcccaaaaggacgacgaccacaacgactacgagagaaggaaatcggtcaattcgaacttttcttttgactactctcgtattcctcaaagtgcaaatgctcatttattatctattccacttggcaaacctcctcattttgatggagaggactacggattttggagtcacaaaatgcgtagtcacttgttctctctccatcctagtatatgggagattgtagagagtggaatgcactttgatagttcggatagtcccatgttcattaatgagcaaattcataagaatgcacaagctactactgttcttctagcttcattgtgcagggatgaatatcacaaagtacaccaaaatgtcgcccgaagaagtccttggaaaattcgtaagcgggcgaatgatgatcaaggaagcaagacaacgcttaagggtcgcaagggacagccaagcaagaccaaagccaaggggaagcgctcatgcttcaaatgcggtaagattggtcattttattgctaactgtcccgataatgaaagtgaccaggaacacgggagcaagagggaaaagaagaaaaattacaagaaggccaagggcgaggcacatctaggaaaggagtgggactcggattgctcctcctccgactccgacaatgaaggaatcgccgccaccgccttcaacaagtcatccctcttccgcaacgagcgtcacacatgccttatggcaagggagaagaaggtatgtagtcgaaactctacttatgcttcttcaagtgaggacgaatctagtgatgaggatgaaatagattattcatgtttatttaagggcctagatagaaccaaggtagataaaattaatgaattaattgatgccttgaatgataagaataggcttttagaaaaacaagaagatttgttgtatgaagaacatgacaaatttgtagaagcacaaaaatctcatgctttagaagttaaaagaaatgaaatgctttcttgtgaattatcttcttgccatgagacgatttctagcttaaggagcattaatgatgatttgaatgctaagatagaaatagctagtaaatcaacaacttgtgtagaaaatgttgttatttgcaatagatgtaaagactttgatattgatgcttgtagtgaacacatagcttctattgcaaagttaaatgatgaaatggctagtcttaatgcccaacttaaggctagcaaaagtgattttgataaactaaaatttgctagggatgcctacacgattggtagacacccctcaattaaggatgggcttggcttcaagagggaagccaagaacttaacaagccataaggctcccatctccgccaaggagaaagggaaggcccctatgacaa

SEQ ID NO: 118933 - DNA, 417 bp, Zea mays
  Clone ID: MRT4577_39953C.1
atggacactaagggcaagtggattgtgatcaacgacaaggagaaggagaccctcaacatcgacgagccaaaaggtgataagcccaccgacttaggctcgaataacaagaggaaagatgggaagaagaagaggcgcatcaagaagatcatctactacgacagtgacacctcctcttcttcaccaaaggacaacgacgacaattactctacaaagaaaaagattgttaatcaaaactattcttttgattattctttgcatattggaaaggaatgggattcagattgctcttcatctgactccgacgatgaaggacttgttgcctccgctttcgacaaatcatccctcttccccaacgagcatcacacatgccttgtggcaaaagagaagaagattatagcaatcttttcaagggtttag

SEQ ID NO: 118934 - DNA, 654 bp, Zea mays
  Clone ID: MRT4577_39954C.1
aatccacgagggcggaggtcgcgcggtggagctggcctcggtgtgttgaatgaacgcaaaccttacggacacacagacgagacgaccacaaatcactccggccggtcgtatccacactgctagtgctacttgctgccgcttctttccttggtctctcgttgttctctgcggcgactagactacagtgggtctccccacaatctgcggcggcgacggcgtcgaagagctcgatctgttcaacgttcgctcagcagaggcgaagagttgctgttcggtgttcttcaggatgctcttcttcgattgagccaagccagaattggatctatattctccagtagttcatcttgggttgctgcaaattggatttgaaggagctgctattcaagaatttcgacccaaggacaatgctatagcggtgtgcagatcagagagcaaagacaaataaaatatcgaggtatggaggccgctgctggggcgttgagccctgtcctccgtaagctcggtgagctgctcgccggagaatacaacctggagaagcgagtaaagaaaggtgtacaatcacttcgtacagaactggagatgatacacgccgtacttcgtgaggttggcaaggtgccactggatcagctccaggagccggtccggatttgggct

SEQ ID NO: 118935 - DNA, 1845 bp, Zea mays
  Clone ID: MRT4577_39955C.1
gaaccaaacactccttgtcggtcggcgctagctcctccagcctcgttggacggctctgcccacgccacgccggggaaattatagagacctgccactcgttccctttcccaggcgcaggcgcctctccttgccaggcgtgacacagacgaactggtgccgcctctgctggggcttggtcctcccagccgagcgcgcctcatccggatcttgcgacgacggtgcccaagctcccggcctccctttcgcatccctgctgcgagccgtcggtctccggaaagagttagagccgtcggtctccgtaaagaattggagccgccaggcgccttgagaagggttttgtcccgggatgtcgtcgtcggggaagatggaggggccgtctgccccggtggtgcgtcgggatccctacgaggtgctcagcgttcccagagattcctccgaccaggagatcaagtccgcctaccggaagctcgcactcaagtaccaccctgacaagaatgctagcaacccagaagcatcggaactcttcaaagaagttgcatattcttatagcatcttgtcagatcctgagaaaagaaggcagtatgatactgctggttttgaggagttagaaaatgaaggaatggatatggaaattgatttgtccaatcttggaactgtgaacacaatgtttgcagcactttttagcaagcttggtgttcctatcaagaccacaatatctcctactgtgctggaagaggccatgaatggcacagttacagtgagaccactccctgttggaacatcagctacgggaaaggttgataagcaatgcgctcatttttttggcgtaacaataagtgaagagcaagctcattctggaatggttgtcagagtgacttcacctgctcaaagtaaatttaagcttctttacttcgagcaagaagttaatggaggttatggacttgctttgcaggaagatagtcaaaagactggcaaggtaacatcagcaggcatgtatttcttgcatttccaggtgtatcgtatggactcaacagcgaatgcgttggcaatggccaaagatcctgaagctgccttctttaaaaggttggaaggtctccaaccctgcgaagtttcagctctcaaatctggaacccatatatttgctgtatatggtgacaattttttcaagccagctagctatatgattgaagcgatgtgcgcaaagagttatgaagacacaacagagaggctgaaagagatagaatctaaaattctagctaagcgaaatgatctgcgtcaatttgaaactgagtacagaaaagctttggcacgatttcaagaagtcaccaacagatatacacaagagagagaagcggttgatgatatgctgagagagagggacaatatccattgctcgttcacaactgaacgaactttggcaaaccctgttggtgtcggtagtagcagtaggtataccatcgagcagagcattcctgagagccctgagaatggtagcgtagatggcagagacaaatctggcaaaaagaagtggtttaatctaaaccttaataggtccgacaagaaagcctgatgaatcttttgtcagggaacgtcatgtgttttcactttgttgtacattttggaatccctattgtattcatgccgtatgagttctttggttcccagttctctgggagttttgtagcatatagcagttttgggtacaacattctattctcatgtatgtattatcctaagtgactgcattgaccccatgcatcccaggcgaagttgaatcgcccgaccaagttattttatcgttataatttcttctatcaaaggaaaaaaaaaaaaaaaaaagcggcc

SEQ ID NO: 118936 - DNA, 318 bp, Zea mays
  Clone ID: MRT4577_39956C.1
cggctcgaggcttcaccagctagctgaaactactagccccaacagcccccgcctctactcctacgttccggcacgtgtcccgccgagctgaagctcatcaacgtcacggggatcttcatcctcctctacgggctcactgtggcgtccgccgtcgcgctgcgcaaggccttcttgtaggcggctgtttgctcggtcggcgctccgcaactcgctggcgcgcgttccgccgttgacgtgacacggttggtgtttccctcgtacacgcgggagatggtttgtgggtggttcgctcgtgtaatgttgtgcatattgcgtgag

SEQ ID NO: 118937 - DNA, 611 bp, Zea mays
  unsure (1)..(611): unsure at all n locations
  Clone ID: MRT4577_39957C.1
tccggccggnnttatttcgccatgcccccgccccgccccgccccgcacatacagcccgtcctcccaccggtcgtctccgccgcggaaatctcgcccgcccgcgagatcttctcgtcctggcgccctcccacgctcatcctcccctcgctcgcatatggcgccgtgcaacccggcacgctcggccgcctcacggcgctgcagctgctcagcctgcgctccaacaacctgtcgggcccgctccccgccgacctcccgcgcctgcccgcgctcgcgggcctccacctccaccgcaacgccttctccggcgcgctcccgcccgggctcgcgggctcgccgcgctccaggcgctcgacctctcctccaacggcttcggcggcggcatccccgacgcgctcgccaatctcacccgccttgccgcgctcgacctctccaacaactcgctctccggccgcgtcccggacctcgggctcctcgcgcttcagttcctcaacctctccaacaaccgcctcgacgggcccgtgccgccgtccctcctccgtttcgccgacgccgcattcgcgggcaacgacctgacgcgcccggccgcagcaggtcctcccaccgccgccgtt

SEQ ID NO: 118938 - DNA, 585 bp, Zea mays
  Clone ID: MRT4577_39958C.1
gccggccgggtttcgaacatcatctcctcagtagtccacacgagcacttcgaggtcacctgtctgctgcacacagacacaccaagcgtcggcaccattggcttactaccatgatgtggactactgctcggaggaggtgaggtcggtggtcccggccggcttcggccgccactgtgtagtggtgcaggaggacgtctactaggataagttcgaggagtgtctagactctcgcacgcgccggctccaaccaccaccactaccatggtcaccactgcggcctcggtttctgggtgcgcgagatcagcgttgaggatgacatcagcacctgcaccggagaggtccacgagcgcatggagagcttcctcgccagggctaactgagcattccggtcggccggcatccacgcccgatcgtgactgcctgcgagccttatgtatgtctgtgattgtgcagagtcatcgtacttgactagcgtacgtacgttcacgcactcagctcctgtaccaattacgacaataatatcgtgacctgaataaaacttcttcgtaatactaatacacaaaaagaaacaaaaagatggccccta

SEQ ID NO: 118939 - DNA, 179 bp, Zea mays
  Clone ID: MRT4577_39959C.1
ggaagcaaaatttcatttccttataattataaattcctaacgcacgatttttatagtccttgggaagccaccattccaaaactgcccaactaaaagtaaaaaaacatatttattcccacccaaactacatttggtcaaccagtaaataccactgccttattacttataacattgttgtg

SEQ ID NO: 118940 - DNA, 1563 bp, Zea mays
  Clone ID: MRT4577_3995C.1
ggctggtcgaaataaatacgacgctgaggaagctatctcactggtggaggcactagctgtccagttgacacaacgagaaggggagttaatttatgagaaggctgaagtaaaaaaattggctaacttccttaagcaggctactgaagatgcacgcaaagtggctgaagaggaaagggcccttgcactggctgaaattgaaaaggctagatctgcgatcgaaaaagttgagaaagcatggcatgtacatgattttgcgtcaagtagcagagagaaggcggaaatagaggaacttaggaaagaggtccgagaggctaggagaataaaaatgctacaccagccaagcaaggtcatggacatggagtttgagcttcaggcactgcggactctcatctcagagaagactcagctatgcaatcagctaaagaaagagcttgccatgatcaagaggttagaagacgatagttctggcctctttgagcttgaaggttctaatacccttggatcacagctttgtattatcccgcgagttgatggtgcttcaaacatcacgaactgtccaattcagtggtatcgtgtaatttctggaggcactagagaactcatatcaggagcaacaaaatttatgtatgccccagaaccgtttgatgttggccgattgttgcaagcagagatagttttgaatgcagacaaaattatagttcagacagatggccctgtagataacgctgcaggacttgaacgttatgtggactcactaatgaaaaggacggatattgagttcaatgtagtagtaacccaaatgaatgggaaggattactcgtcgaattctgttcatgtatttcacattggaaagctgagaataaaacttcgaaaaggatggtccacaaaagcaagagagtcgtattccactacgatgaagttatgcgggagccgtggtggtggtaatgctgcagctagggcagttttctggcaccctaggaaaggctcgtcctacactctagccttcgaaacagacagggacaggaatgctgcgattatgattgctcgcaagttcgcttcgaattgcaatatcgctctcgctggcccaggcgaccaaggcacctgatgaagtgatcacgctatgttttgacggcgacaacagtacataattagggcgtggattggctgattgggtggcgtgcttgtcttagttttgtcgatttgtgcttgtgagggtagaggttgtacacggcgtgaggcattgtttttgtttgcctgccaggcagcactggcgacattcttgaaatatggtgtacgaattgaccactgttcttgtgcgttactgcatgggtaatatttgaaccaaaaagattggtcatgtataagtttttctcaggaagacgacctgttgagagccataagtaatgtacaggcagctagtctcgtggagtcatctattgatgatatttagcgggtctgtgatagaaactaaaaataagaacaagttattacagttttgcttgatttttgaacaatttaaagcaacaaaagttgagtatttcagccctaaaaaaacaaaaaatt

SEQ ID NO: 118941 - DNA, 386 bp, Zea mays
  Clone ID: MRT4577_39960C.1
tccccgccgcggaaatttcgcccgcccgcgagatctcctcgtcccggcgccctcccacgctcatcctcccctcgctcgcatatgacgtcgtgcaacccggcacgctcggccgcctcacggcgctgcagctgctcagcctgcgctccaacaacctgttgggcccgctccccggcgacctcctgcgcctgcccgcgctcgcgggcctccacctccaccgtaacgccttctccggcgagctccccgccgggctcgcggcgctcgccgcgctccacgtgctcgacctcttctcccaccgctttcggcggcggcattccgcaccacgtccgtcaaaccttatccgtctttgccgcgcctccaagatccttaacctttctcccgccacccgc

SEQ ID NO: 118942 - DNA, 212 bp, Zea mays
  Clone ID: MRT4577_39961C.1
ctaataccaaacatgtggttggcacactagcaagcgattgccgattatattaactgggatcagcgggctagcgctacattggaaaaaattggccaattccaattgctggatcacgttgcctgagggtaagaatgatacttacatgtgccaactggcttatgaccctgccagcaccttccattgctatacaccaagcactaagtggataacat

SEQ ID NO: 118943 - DNA, 861 bp, Zea mays
  Clone ID: MRT4577_39962C.1
aggtccaccctcgtcccgcacctgtcccgcatcgagcgacccacccaacgccggcgccggcggtcgccctcggcaaccaccactcgagactcttctccgctgcccgagtccatcctccccccttgtaccccaggtctcaccaccaccaccaccaccaccaccagtcttcctcgtctccgacttgcctaacctaattccccaatcatgcctttaccgctgcccagatccatggtcctctcccctatctccttccatctccccgcccctatggatccatacgtcgccggcggcaccacccgacactccggccgtcccgattgggtcttactccacaattcggctcgtatctcgggacaccggaactcgaccaccgccggctgtcacacgatggagggccgccccatcgaggtgtccttctggctcgttgacccaccgggagtctcctacttctccgtccactgccctggcctcagtaaggacttccagggcgagccctacgttcactgcgcggaggccgctctcgtcctcttcagcgtgacctttctccccgtccctggccggagatccatccagcacttcgtctacagagccggcccgggggcgccctcgctggacctgattcccgacccggacaagatcagaagaggcgatcgatatggcctcttgccctgtggcgatgacaccgaccactacgccgtggtcttcctcgacaggaattttattgcctatgacaagcccctggcgtttcaatgctcacgtcttcttgtcggcaacaagtcgtggagcagcaaggtgcccttgtcttgcctatctgaagatgatcaagcattgctgcttaagcatggcacctgcaagccgccg

SEQ ID NO: 118944 - DNA, 975 bp, Zea mays
  Clone ID: MRT4577_39963C.1
cattgggacctcgagccggccgggacaaccgcccgcagccgacagcaccaccaacatcgccgacagctcccccacagcagccagccatccatatgtatgtaccattcatcctccactgcatgcatgctaccggcggcggcccaagcttcatcgatcgccgatcatcttctagctagcagctagcttgttattagttcatcggcgatggactacgtggtcgcccggatgcaattgcaacaagcagcagtgccgccgcctgttcactccatcgccgaccaccgtcctccgcctgtgtcgcagaggacgcggggcagcgcgacgatgcaacgacagcggcgtgaggcactcgaacaggaggtggcagagctgaagcagcagctatccaacgagcagacggtgcaccagatcctggagcgcgccctgcagcccagcagctccatggccctcgccaacatccccgccttcatccccaccaaggccaaggagctgctcgcggagctgctgctggtggaggaagagatcgccaggctggaggaccagataaaaaggatgaagaagtccgccgccacgcagcagcagcagcagacggagcactgcaagtccatgttcttcatcagccaggccatggacggcgaggcgtacctcagcacggtggtgaacaacaagaggcattccctggcgtcgtcgtcagatgggcatgcggtgttggagaagaagatcgcccagcacgagctgcccatcaccaagaagagccccacggtgatagcaaagaggagggcgagagaccagcagcagccgcccaacaagctgtcggagaggatcctcaagtgcctggtgtgcatcttcatgcggctgctccggtcgtcccgggcgtccgagtccgccgcgggcaacctcggcggcttcaggatggacatgggggctcgtcaacgtggctgcagctgcggcgaccagggaaaaaggaaaggggccagc

SEQ ID NO: 118945 - DNA, 407 bp, Zea mays
  Clone ID: MRT4577_39964C.1
acggaaacacaccaagcgaatcgcactagcaacatcctaacaacaccggctaccacgatattaaacctcctttcactccttgcccttttacctagcgcaacaaatgccttcattattccacagtgctcacttgctcctagtgccattattccacatttcctcccaccttttacttcaataggcttcaaacatccaaccgtgcatgcctacaagctacaactaacgcttgccgcaagcgtcttacaacaaccaattgcccaatttcaacaacaatccttggcacatctaaacctacaaaccatcgcaacacaacaaaaacaacagtttatgccatcactgaaccacctaaccgctatgaaccctgtcacctacttgcaacagcagctacttgcatccaacccacttgc

SEQ ID NO: 118946 - DNA, 377 bp, Zea mays
  Clone ID: MRT4577_39965C.1
aaaaaaaaaaaaaaaaaaaaaaaaaaatttaaaaaaaaaaaaaggggcggccgctcgggggctagctgggtgcaccatggtaacatcgatgttgtccttagccatagggaaatctgtgaagaaagacttggcaatgactggtgaagtaactctaacaggacgaattcttccaatcggtggggtgcaccgatattttcagtcaaagaaaatgttgatttcatgattgtgcctgctcgccttcaggttctagacttcttaaatgagtgaaggagaaaaccatcgctgcaaggagaagcggggtaaaaaacaatcattatcccatcagcaaaccgaagggattttgatgagcttgcttctaattgaaaaaaaagtcttga

SEQ ID NO: 118947 - DNA, 527 bp, Zea mays
  Clone ID: MRT4577_39966C.1
cattgggaccctcgaagccggccgggacagatctcaccaattatctagcttcttctatctctacctaggatcgtattgctgcaagaaggcacagtgtagaggaatgcatgggaatgaccatgacgtccttctgcgcgccaaaagttctcgtgacgccagcccatcgcttcggcgaggcacgggagacaatacaaggaataccaggaaaccccgacgcagccgctcttccaggcaggccaggtcacgtcctggaccttctactgcacctgcatccactagttcgtcagcaacttactcttcctctacatctccatcctcaccgactagggctgctacacagtccaccttgtagtgggacaccgacaccatccacaacatccgctggctcttcgggaccatgatcttctgccctctgctagctgcaccgtcggcttctccttcgccgacatgatcccgcgcaacgaccttcagtctcgtccatggcgaggaagttgtccctcaccacccacatcgtcttacatcatcat

SEQ ID NO: 118948 - DNA, 493 bp, Zea mays
  Clone ID: MRT4577_39967C.1
tagaatagctatcacgcctcatgcacgcgtacgtaagctcggaattcggctcgagcactacgcggccatcgccgtacgttgagatggcctccagtcctcctctctatggtgtccgccagcgcgccagcggcgtcgccgtatgaccagtccagacgcggccgaatcgtaggaggaagccaacacgaaggtgctgaagccgtacaccatcaccaagtggcgggagagctagacggagcacgagctcaacaagttgctctaggccctgcagctatttgaccgtgactggcataagattgaggctccagttgggtgcaagaccgtcatccagattaggagtcacgcacaaaaatactttttgaaggttcagaaaaatagaaccagtgaacatgtgccaccttcacgaccaaaggcaacagctgcccatacatatcctcagaaagctcacaagactgaaccacactatagtctcaagacagagagatcttccatacat

SEQ ID NO: 118949 - DNA, 1153 bp, Zea mays
  unsure (1)..(1153): unsure at all n locations
  Clone ID: MRT4577_39968C.1
cctcgaggccggccggggagtctgctaatgagggttacaaatttggtcaggaagaagagacttaaatccgcagtccatacagtgacccccacgaggtcaagaacctgtacgaggagaggaaagaacctggaagagaggagcttgaggagatggcgagcgccgagggcgagaggtgggtgggactggcgacggacttctcgcaggggagccgagaggcgctgcagtgggcggcgaccaacctgctccgcgccggcgaccacctgctgctgctgcacgtcatcaaggagcccgactacgagcagagcgaggccatcctctgggaatccaccggctccccgttgattcccctctcggagttctctgaccctattatcgcgaagaaatatggagcaaaacccgacatggaaaccttggacctcctgaacactacagctacccagaaggaaattatggtggttgtgaaagtcctgtggggagatccgcgtgagaagctctgtcaagttatccatgacaccccgctgagctgcttggttataggaagcaggggccttggcaagctcaagagggtgctcttgggaagtgtcagcgactatgttgtgaacaatgcaacctgccctgtcaccgtcgtcaagtcaacaagcaccgaaggttgatcttatcgccgagatgcctggatgtgatgttgtaataaagatggttggcctgatgaagaacatgcactagtttctagctatttgaaacatgttgaacgaggcaattctaatgtaataataatagacaaagtgccttatgaaggacatggttgacatgcctttgttgctgtatgagtgatgtttatagttttgagggtttgaagatgtggatcaaaaaaaaaaaaaaaaaaaaagttcggtcctcccgcccctcccacggnctcacctctcctcgccgacggaatcgaaagcaggggcttctgattggtcgtactcatggcaatgttggtgcctgatcttagtttctcggcatcgatctctagtgtgaagctcccaaggtacggggcatcaaagagtgagacattctttgttaagaagcccccaacattccgtgcagaagctaggccagcgngatctggcaaatatggtactaataatgggcgggcaacaaagatggtacc

SEQ ID NO: 118950 - DNA, 946 bp, Zea mays
  Clone ID: MRT4577_39969C.1
atcaatcaaatagacaagaggccacctctaccaccgccatccgcagtccatacagtgacccccacgaggtcaagaacctgtacgaggagaggaaagaacctggaagagaggagcttgaggagttgaggagatggcgagcgccgagggcgagaggtgggtgggactggcgacggacttctcgcaggggagccgagcggcgctgcagtgggcggcgaccaacctgctccgcgccggtgaccacctgctgctgctgcacgtcatcaaggagcccgactacgagcagagcgaggccatcctctgggaatccaccggctcccaaatatggagcaaaacccgacatggaaaccttggacctcctgaacactacagctacccagaaggaagtgagcacaccaagcctctgattatggtggttgtgaaagtcctgtggggagatccgcgtgagaagctctgtcaagttatccatgacaccccgttgagctgcttggttataggaagcaggggccttggcaaactcaagagggtgctcttaggaagtgtcagcgattacgtcgtgaacaacgcaacctgccctgtcaccgttgtcaagtcatcaagcaccgaaggttgatctcatcaccgaaatgcctgaatattgctgttgttataataaaagatggttggcctcatgaagaacatgcactagtttctagctacctgaaacatgttgaaccgggcaatcctattgtaataatagacaaagtgccttatgaagggcatggttatgtaataggtctgttctccagagtagatgtgccatgcttttgtgtcatcaccgaaagtgccttatgagtgatccttggcctattattcttctgctgcgctacagtgatgtctatgcttgtacttgaaagaatttccgtttgatctattttgactatgaaaatcgaaggaccgcgtatttcgt

SEQ ID NO: 118951 - DNA, 323 bp, Zea mays
  Clone ID: MRT4577_3996C.1
acgcgtccgctcgcccaccgatgtggtagtgcataaacgcgacctaccacgaggggcgagtaagttattagaccattaatgcacgtgtatgtcctagtagcgagcgcgacgagtgcaaccattatgacacagtgatcactagctactgacgccatgattgcagagcaacgtataccagttacttcaatgggcttatgacatacaatctcgcgagcctacgtgctacatatagctggtgcggacagcgtgatgaatcggacaagtgccgaattgctacaacaatcatggtcgcatatgaccctacgcaccatatgatcgcaaca

SEQ ID NO: 118952 - DNA, 1173 bp, Zea mays
  Clone ID: MRT4577_39970C.1
cattgggtacctcgaggccggccgggcgaccgactctcggcaacggatatctcggctctcgcatcgatgaagaacgtagcaaaatgcgatacctggtgtgaattgcagaatcccgcgaaccatcgagtttttgaacgcaagttgcgcccgaagccttctggcggagggcacgtctgcctgggcgtcacgcagtccatacagtgacccccacgaggtcaagaacctgtacgaggagaggaaagaacctggaagagaggagcttgaggagatggcgagcgccgagggcgagaggtgggtgggactggcgacggacttctcgcaggggagccgagaggcgctgcagtgggcggcgaccaacctgctccgcgccggcgaccacctgctgctgctgcacgtcatcaaggagcccgactacgagcagagcgaggccatcctctgggaatccaccggctccccgttgattcccctctcggagttctctgaccctattatcgcgaagaaatatggagcaaaacccgacatggaaaccttggacctcctgaacactacagctacccagaaggaagtttttgaatttcttttgacaaacagattatggtggttgtgaaagtcctgtggggagatccgcgtgagaagctctgtcaagttatccatgacaccccgttgagctgcttggttataggaagcaggggccttggcaaactcaagagggtgctcttaggaagtgtcagcgattacgtcgtgaacaacgcaacctgccctgtcaccgttgtcaagtcatcaagcaccgaaggttgatctcatcaccgaaatgcctgaatattgctgttgttataataaaagatggttggcctcatgaagaacatgcactagtttctagctacctgaaacatgttgaaccgggcaatcctattgtaataatagacaaagtgccttatgaagggcatggttatgtaataggtctgttctccagagtagatgtgccatgcttttgtgtcatcaccgaaagtgccttatgagtgatccttggcctattaaacttttgttgctgtatgagtgatgtttatagttttgagggtttgaagatgtggatcatttgcctattattctaaaaaaaaaaaaaaaaaaaaaaaaaaatttttaaaaaaaaaaaacccccccccccgggggttt

SEQ ID NO: 118953 - DNA, 126 bp, Zea mays
  unsure (1)..(126): unsure at all n locations
  Clone ID: MRT4577_39971C.1
gacatactatgccctgttggnaactctctatcccaggnagggtgtgatgcatatagaaccttcctcatgataaatcaccatgtaagtaaaagcattttttgacattccatctgagtanatagtcca

SEQ ID NO: 118954 - DNA, 323 bp, Zea mays
  Clone ID: MRT4577_39972C.1
attaaaaaaacaactttttgggggcaataccaagaaaggctgcgctaaaccacatctggattcatgactacaaaggtcatcaacagccatttttaccgagtcaacggagtgccggcctctaccttatcaaaagggaaagcttccaggggaccatatttaccgtaaacaggtgactgtttaacgccaacagaacatgtaggacacatataaagacggagatccttgtactcaagttaccatgcgatcgcagggatgcacggtggcagcggtaacatttatttgctagtaataatgctctgagaggggacgtaagctccatttgg

SEQ ID NO: 118955 - DNA, 375 bp, Zea mays
  Clone ID: MRT4577_39973C.1
cgtaagctcggaattcggctcgagcttcagcacggcaggctctttcgtgtggcacactgaatctaaaaccgaaggaaagaatcccaccactaggctgctcagaactcagatggcagagacaatgagactccgtgtaagatagaacagaaaatgacgcggatggaaggtggaactaggaagaggtaaccaagttcatcagccagctgatcgggggcggagctttagacctgccctcagtggaccgtgcttgtgcaagacctgactgaagaagtctcacggatcaacactaatttaacgcgggaacgacagggtgcccgcctacttgtacggggatattctgacggatcaaagcctgacggtgtccgggaggcgcac

SEQ ID NO: 118956 - DNA, 271 bp, Zea mays
  Clone ID: MRT4577_39974C.1
aactatgacggggtggaggggaccatatacccagggacaagacaacagggcatttgatattttgataactgggaagccaaatacccgttttagggggaccaccataaatggaggttacacaaaatagggaacatgcaaatcatttttgaactgaccagatgcggaggcaggagaattttcggggggggctacacaagtgtgcaccgggcactgcaatgcccaacaacaagattgtagcagcaaacatggaagagaaaggcgcggggggcaa

SEQ ID NO: 118957 - DNA, 167 bp, Zea mays
  Clone ID: MRT4577_39975C.1
ccggccgggaatgactgtctgatatcctatcagagctgctgatatgcatactattgcccacgacaatgctgctgtcatggtgactagtctcacttcaatatggagaaggacttcaagcgtgagaactgatctgcaatctgcaataattcaacatgcagtctttgctg

SEQ ID NO: 118958 - DNA, 458 bp, Zea mays
  Clone ID: MRT4577_39976C.1
cgggtttgaccagcgtttttgggcgcgtgggcgcctccgccgccagacacagcgtagtgtagtgtagttccggcaagggttggggagagtagtagtgatccgcaatgtcgacggaggaggctgttgtggctgaggtcccggtgaccgaggtgccagcgtgagttccggcggcccaggtggccgaggcgcccagggcgaggagggggcccaagtgataagaaggcgcctaaggtagaagaagccgttcgtggggaataatccggctgtgcatactgcctacgctgagatgattgtagatgtaatcggtggcttataggataggaaagggtttagctcgtgggccattagcaaatacctagaggggatataagcttgctaattgtgaaaaaattaacgttatcagataacagaacaattgaagatactcactgatgctagatgaatttctagattctaaa

SEQ ID NO: 118959 - DNA, 4266 bp, Zea mays
  Clone ID: MRT4577_39977C.1
atggatcctaagggaaaggggatggtggtcaacgacaaggagaaggagtccatcttcaacgagccaagagatgacaagcccactgactcaggctcgagtcataagaagaaggacgggaagaagaagaggcgcatcaagaagatcatctactacgacagcgatgcatcttcttcttcaccaaaagacgatgacgatgaagattcttcgtcaaagaaaaagacggttaatcaaaactattcttttgattattcccgcatgctgtacaattcgaatgctcatttgctatcaattccacttggtaaacctccacactttgatggagaagactactctttctggagtcataaaatgtgtagctatttattttctctccatcctagcatctgggaaattgttgaaaacggaatgcactttgataacactgacaatgccgtttttataaatgagcaaattcataagaatgcccaagctactactgtgttgctagcatctctttgcagggatgagtacaataaggtgagtggcttggacaatgccaagcaaatctgggacaccctcgagatatctcatgagggaaacgacgccaccatgatcaccaaaatggagttggtggaaggcgagctaggaagattcacgatgatcagggcagaggagccaacacaaacctacaacaggctcaaggccctggtcaacaagattcgaagctatggaagcacaagatggacggatcatgatgtcgtccgactcatgctaaggtcatttactgtaattgacccccatcttgtcaatcttattcgtgagaatcctaggtacaccaagatgacgcccgaggagattcttggaaaatttgtgagcgggcgcatgatggtgaaggaggctcgatacgtggacgatgctctaaatggtacactacccgtctacgagcttcaacctgttgctcttaaggcaaccagtagcagggaggcgcttccaagcaaggtggcacaagtagaggctgctggcctcaacgaggatgagatggcgcttatcatcaagcgcttcaagaccgcgcttaaaggacgcaaggagtaccccaacaagaacaaaacaaggggaaagcgctcctgctttcaatgcggtaagactggtcactttattgcaaattgtcccgataatgatagtgaccagggacaagaaaagagcgagaagaaggagaaaaagaagaactacaggaaggcaaagggcgaggcgcaccttggaaaggaatgggactcggactgctcctctttcgactctgacgacgaaggacttgctgcctcagccttcaacaaatcctcactcttccccaacgaacgccatacatgtcttatggccaaggagaaaaaggtatgtgttcgggacacacccaagtacacttcatctagtgatgaagaatcctccgatgatgaagtagattactctagtttatttaaagataaattgctagagaagcaagaagatattttgtatgaagagcatgacaaatttattagtgttcaaaaatctcttgctctagaaattaagagaaatgaaatgctatcctctgagttgtctgcttgccatgaatctgtttctagtttaaggagtttaaatgatgatttaaatgctaagctagaagaagttaataaatctagttcatgtgtagagcatgctgttatttgtaatagatgtaaggattttgatgttgatgcatataatgaacatattgtttctattacaaaatcaagtaatgaggtggcaagtcttaatgctcaacttaagacttgcaaggacgattttaataaattgaaatttgttagggatgcctacactattggtagacacccttcaattaaggatggacttggttttcgaaaggaaaccaagaacttaacaagccaaaaggatcacgttctcaacaaggagaaagggaaggcccctatggtttatgcatccgggggttcaagctggattatcgacagcagatgcacaaaccacatgacgggggagaagaagatgttcacctcctatgtcaagaacaaggattcccaggatacgatcatctttggagatgggaaccaaggcaaggtcaaaggcttgggcaagatagccatcaccaacgagcactccatatcgaatgtatttctagtagggtcgcttggttacaaccttctgtatggaggacatgtgttaggactaaccaatgtttgtttcgataaagataggccttgtgcagcatgtcaagcagggaaacatgtgggaagtactcatcatagcaagaatatgatgacaacatcaagaccactggagcttcttcacatggacctcttcggacccgttgcctaccttagcatcgggggaagtaagtatggtcttgtaatcattgatgatttttcccgcttcacttgggtgttctttttgcaagataaatcagaaacccaagggaccctaaagcgctttctaaggagggctcaaaacgaatttgagctaaaggtgaaaaagataaggagcgacaacgggtccgagttcaagaatctgcaagttgaggagtatcttgaggaggaaggcgtcaagcacgagttctccgctccctacacaccacaacaaaatggtgtggtagataggaaaaacacgacacttatccacatggcgagaacgatgcttggagagttcaagatgcccgagcggttttggtcggaagctgtgaacacagcttgccacgccataaaccggctctatctgcatcaccttctcaagaagacctcctacgaactccttaccggtaacaaacccaacatctcaaactttcgtgtatttgggagcaaatgttacattctggtgaagaaaggtagacattctaaatttgctcccaaggcagtagaagggtttttactagggtatgactcaaatacaaaggcgtatagagtcttcaacaaatcatcgggtttggttgaagtctctagcgacgttgtatttgatgagactaatggctctccaagagagcaagttgatcttgatgacatagatgaagatgatgttccaaaggccgcaatgcgcatgatggcgattggtgatgtgcgaccacaggaacaacaggagcaagatcagccatcgtcctccacaatggtgcatcctccaactcaagacggtaaacaggaagagctcaacaacttcaagagaaatgaagtttggagtctggtgccacgtccaaagcaaaatattgtgggaaccaagtgggtgttccacaacaagcaagacgagcatggggtggtgacaagaaacaaggctcgacttatggcaaaatgttacgcccaagtcgcaggtttggatttcgaggagacttttgctcctgtggctaggctagagtctattcaaattctattatcctatgtcgctcaccactctttcaggctatttcaaatggatgtgaagagcgctttcctcaatgggccaataaaggaggaggtatacgtggaacaaccccctggctttgaggatgacaggtaccccgactatgtgttcaagctctctaaggcgctctatggacttaagcaagccccaagagcatggtatgaatgccttagagatttcctaattgttaatgccttcaaggttgggaaagccgatcccactctttttacaaagacttgtgatggtgatctttctgtgtgccaaatttatgtcgatgacataatatttggttctactaatcaaaagtcttgtgaggagtttagcagggtgatgacacaaaagtttgagatgtcgatgatgggagagttgacctacttccttgggttccaagtaaagcaactcaaggacgacaccttcatctcccaaacgaagtacacacaagatcttctcaagcggtttgggatgaaggacgccaagcccgtgaagactccgatgggaaccgacgggcatgttgacctcaacaaaggaggtaagtccgttgatcaaaaggcataccggtctatgatagggtcattactttatttatgtgcaagtagaccagacattatgctaagtgtatgcatgtgtgctagatgtaaatccgaccccaaggaatgtcaccttgtggccgttaagcgaattcttagatatttagtttctacgccttgtttcgggatctggtatccaaaggggtctacctttgacttgattggatactcagactccgattatgccgggttcaaggttgataggaagagcacatcggggacgtgccaatttctaggaaagtccctggtgtcctggagttctaagaaataa

SEQ ID NO: 118960 - DNA, 720 bp, Zea mays
  Clone ID: MRT4577_39978C.1
atggatcctaagggaaaggggatggtggtcaacgacaatgagaaggagtccatcttcaacgagccaagggacgacaaagtcattgactccggctcgagtcaaaagaagaaggacggaaagaagaagaggcgcatcaggaaggttgtctactacgacagcgacagatcttcctcttctcaaaaggacgacgaatacgaggagaaaaagaaaacgaatcctgggtacatcaagatgacgcccgaggaaatactcggaaagttcgtaagcgggcggatgatgatcaaggaggcaagatatgttgatgatgcattgaatggaccaatgccgatctacgagcctcaaactcttgctctcaaagcaacaagtagcagggaggcgctacctagtaaggtggcacaagttgaggcggtcgggctaaatgaggaagaaatggccctcatcatcaagtgcttcaagacgacgctcaaaggttgcaaggagcatcccaacaagagcaagacgaaggggaagcgctcctgcttcaagtgtggtaaggatcaagaaaagaagagggaaaagaagaagacttacaagaaagcaaagggcgaggcacaccttggcaaagagtgggactcggattgctcttcatctgacgacgaaggacttgccgcctctgccttcaacaaatcatccctcttcgctaatgagcatcacacctgcctcatggcaaaggaaaagaag

SEQ ID NO: 118961 - DNA, 3627 bp, Zea mays
  Clone ID: MRT4577_39979C.1
atggatcctaagggaaaggggatggtggtcaacgacaaggataacgagtccctcttcaacgagccaagggacgacaagcccactgactcaggttcgagtcacaagaagagggacaggaagaagaagaggcgcatcaagaagatcatctactacgataatgatgtctcatcttcttcaccaagggatgatgacgacaatgactcttcgtcgaagaaaaagacggatggaactagtggaaggcgagctggggaggttccgatgatcaggggagaggagccaactcagacctacaacaggctcaaaaccctggtcaacaagatccgaagctatggaagcacaagatggacagatcatgatgccatccgactcatgctaaggtcatttactgtaattgacccccatcttctcaatcttattcgtgaaaaccccaggtacactaagatgacgcccgaggagatccttggaaaattcatgagcgggcgcatgatgggacaagaaaagtacaggaagagggagaagaagacaaactacaagaaggcgaagcgcgaggcacatcttggaaaggaatggaaatctgattgctcttcatccgactccgacgatgaaggactggcagcctcggcctttgacaagtcttcgctcttccccaacgaacgccacacttgcctcatggccaaagtagagaaaattaatgaattaattgatgctctaaatgaaaaagatagattgctagaaaagcaagaggacattttgtatgaggaacatgacaaatttgttagtgtacaaaaatctcttgctttagaaactaagagaaatgaaatactatcttctgagttatgtgcttgccatgaatctatctctagtttaaagaatttaaatgatgaattaaatgctaagctagaggaagttagtaaaacaagttcatgtgtagagcatgttagtatttgtaatagatgtaaggattttgatattgatgcctgtgatgaacatcttatttctattactaaattaaatgaggaggtggcaagtcttaatgctcaacttaagacttgcaaaattgattttgataaattaaaatttgctagggatgcctacactattagtagacacccctcaattaaggatggacttggttttcgaaaggaaaccaagaacttaccaagtcaaaggattcccgttctcaacaaggagaaagggaaggcccctatggcgagtagtcctcaaaggaaccatgcctttatttatgatagggaaattgctagtcgttcttattataataagagttatgttcatactgcttataataattcacatgatatgtttgcctctagctctacttttgttcatggtagaagtaggcctaggagaaatcttgttgtgcctcatgtttatgcatccaggggctctagctggataatcgacagcggatgcacaaaccacatgacgggggagaagaagatgttcacgtcctacgtcaagaacaaggattcccaggatacgatcatctttggagatgggaaccaaggcaaggtcaaaggcttgggcaagattgccatcactaacgagcactcaatatcgaatgtatttctagtagagtcgcttgggtacaaccttctgtctgtgaaaaagataaggagcgacaatgggttcgagttcaagaatctacaagtcgaagagtttcttgaggaggaaggcatcaagcacaagttctccgctccctacacaccacagcaaaatggtgtggtagagaggaagaacaggacgctgattgacatggcgagaacaatgcttggagagtacaagacgtctgagcggttttggtcagaagctgtgaacacagcctgccacgccataaaccggctctatctgcatcgcctcctcaagaagacctcctacgaactccttaccggtaacaaacccaatgtctcttactttcgtgtatttgggagcaaatgctacattctagtgaagaaaggtagacactctaaatttgctcccaaggcagtagaagggtttttactagggtatgactcaaatacaaaggcgtatagggtcttcaacaaatcatcaggattagttgaagtctctagcgacgttgtatttgatgagactaatggctctccaagagagcaagttgatcttgatgacatagatgaagatgaagttccgacggctacaatgcgcacgatggcgataggcgatgtgcaaccacaggaaccacatgaagaagatcaaccatcttcctcaacaatggtgcatcccccaactcaagacgatgtacaggtacctcaagaagaagggcaggatcaagggggagcacaagaagatctaatggtggaggaagaagcaccacgggcccctccaactcaagtccgagcgtcgatcgaaagacatcaccccgtcgatcaaattctaggtgatatcagcaagggagtaactactcgctcacgtttagctaatttttgtgagcattactcgtttgtctcttctattgagcctttcagggtagaagaggcattgcaggatccggactgggtgttggccatgcaggaagagctcaacaactttaggagaaatgaagtctggagcctgatgccacatccaaagcaaaacgttgtgggaaccaagtgggtgttccgcaacaagcaagacgagcacggagtggtgacaagaaacaaggctcgacttgtggcaaaaggttatgcccaagtcgcaggtttggatttcgaggagacttttgctcctgtggctaggctagagtcaattcgaatattattagcctatgtcgctcaccattattttaggctatttcaaatggacgtaaagagcgctttcctcaatgggccaatcaaggaggaggtatacatggaacaaccccctggctttgaggatgacaggtatcccgaccatgtgtacaagctctctaaggcactctatggacttaagcaagccccaagagcatggtatgaatgccttagaaacttccttatttctaatgctttcaagtcttgtgaggagtttagcagggtgatgacacaaaagttcgagatgtcgatgatgggcgagttgacctacttccttgggttccaagtgaagcaactcaaagacgacaccttcatctcccaaactaagtacactcaggatcttctcaagatgtttgggatgaaggacgccaagcccgcgaagacaccgatgggaactgacgggcatgttgacctcaacaaaggaggaaggtccttggtgtcctggagttccaagaaacaaacatctgttgccctatccaccgctgaggccgagtacgttgccgcaggacagtgttgcgcgcaactactttggatgaggcaaacactctgggactttggctacaatctgagcaaagtcccactcctatgtgacaatgagaatgcaatccgcttggcggataatcctgttgaacacaaccgcactaagcacatagacatccggcatcacttcctgagagactaccagctaaagggagatatcgatgtgtatcacattagcaccgagaaccagctagccgatatcttcactaagcctttagatgagaaaaggttttgcaggttgcgtagtgagctaaatgtcttagattcgcgtaacttggattga

SEQ ID NO: 118962 - DNA, 367 bp, Zea mays
  Clone ID: MRT4577_3997C.1
cggactcatggtgcgggagtatcggtgaaacacgagctgtattatgagagcatcagatgcgaagacctgctcttttggaactgactgatctttggatattcacaggatggccttactgaacattgcctatacttgctaatagaaatgaacgggcatataatacctgatgcgacatccttgctaggtatgctctcataattccggcatgcattcatcgaggcagacggcccaccgtgcttaaaggcaatgattgaacatggagttgtaccagagatagatcactacttacgtatagtgcatcatctagggcatacatggctgctagatgaagcatgcgatcttattcagacgatacccatgacttcaa

SEQ ID NO: 118963 - DNA, 4548 bp, Zea mays
  Clone ID: MRT4577_39980C.1
atggatcctaggggcaaggggatggtggtcaatgataaggaaaaggagtccttcgtcaatgatccaaaagatgacaagcctactgactcgggctcaagccacaaaagaaaagacgggaagaataagaaaacaaggcgcatcaaggagatcgtctactacgacgacagcgacgagtcctcttcttcccaaaaggacgacgacaactacgagaaaaagaaaccggtcaattcaaacttttcttttgattattctcgtattccacaaaataaaaatgctcatttactctccattccacttgttggtggagggcgaacttgggagattcgcaatgatcaggggcgaggagccaacccaaacgtacaaccggctcaagaccctcgtcaacaaaataaggagctatggaagcatgcgttgaacggcccaatccacgagcctcaaactgttgctctcaaagcaacaaggagcaaggaagtgctacctagcaaggtggcacaagttgaggcggcgggactcaatgaggaagagatggccctcatcattaagtgtttcaagacggcgctaaggggtcgcaaggagcatccaaataagaccaagacaaaggggaagcgctcatgcttcaaatgtggtaagattggtcattttatcgctaactgtcccgataatgatagtgaccaggaacaagggaacaagagggaaaagaagaaggcttacaagaagactaagggcgaggcacaccttggaaaggagtgggactcggattgttcgtcgtccgactccgacaacgaaggactcgccgccaccgccttcaacaagtcggccctcttccccaacgagcatcacacctgcctcatggcaagggaaaagaagatagaactaaggttgataaaaattaatgaattaattgacgccttgaatgataaaaataggttattagaaaagcaagaggatcttttgtatgaagaacatgataagtttgtagaggcacaaaaatcccttgctttagaaataaaaaggaatgaaatgctttcttgtgaattgtctatatgccatgactctatttctagcttaaagagcataaatgatgatttaaatgctaagttagaaatagctaataaatcaacatcttgtgtagaacatgttgcaatttgcaataggtgtaaagattttaatgttgatgcttgtagtgaacatctagtttcaatttctaatttgaatgatgaagtggctagtcttaatgcccaacttaagactagcaagagtgaatttgacaaactgaaatttgcaagggatgcctacacgattggtagacacccctcaattaaggatggtcttggcttcaagagggaagtcaagaacttaacgagccataaggcatccatctccgccaaggagaaagggaaggcccctatggctagtagtgttcaaaagaaccatgctttcatgtatcatgataggagacattctaggaatgttgatagaagttatgatgcttttgattctcatgccatgattgcttctagttcttctattatgcatgatagaaatttggctaggaaaaatgttgttcatcatatgcctagaagaaatgctcatgtacctaggaaaacaagcaatgaaccttctacaatttatcatgctttaaatgcttcctttgctatttgtagaaaggataagaaggtggttgctagaaaattaggggcaaaatgcaagggagataaaacttgcatttgggtccctaagactatttgtttatgcatccggggctcaagctggattatcgacagcggatgcacaaaccacatgacgggggaaaagaggatgttctcttcctacgtcaagaacaaggatccccaagactcaatcatattcggtgatgggaaccaaggcaaggtgaaagggttaggaaaaattgctatttcatccgagcactctatttctaatgtgttcttagttgagtcacttggatataacttgttgtctgtgagtcaactttgtaatatgggatataacggtttattcacaaatgtagatgtgtctgtctttagaagaagtgatggttcattagcttttaagggtgtactagacgacaaactttatttagttgattttgcaaaagaggaggccggtctagatgcatgcttaattgctaagactagcatgggctggttgtggcatcgccgtttagcacatgtggggatgaagaaccttcacaagcttctaaagggagaacacgtgataggtctaactaatgtaactttcgaaaaagatagaccttgtgcagcttgtcaagcagataaacaggtgggaagctctcatcatgccaaaaatgtgatgacaacatcaagacccctggagttacttcatatggacctcttcggacccgtcgcctatctgagcataggaggaagtaagtatggtcttgttatagttgatgatttttcccgcttcacttgggtattctttttgcaggataaatctgaaacccaagggaccctcaagcgcttcctaaggagagcccaaaacgagtttgagctcaaagtgaagaagataaggagcgacaatgggtccgagttcaagaaccttcaagtggaggagtatcttgaggaggaaagaatcaagcatgagttctccgctccctacacaccacaacaaaatggtgtggtagagaggaagaacaggacactactagatatggcgaggacgatgcttagtgaattcaagacgcccgaacggttttggacggaagccgtcagcacggcttgccacgccataaaccgggtctaccttcatcgcctcctcaagaagacttcatatgagcttctaaccggtaacaaacccaatgtgtcttactttcgtgtatttgggagcaaatgttacattctagtgaagaaaggtaggaattctaagtttgctcccaaagctgtagaagggtttttgttaggttatgactcaaatacaaaggtgtatagggtcttcaacaaatcatcgggtttggttgaagtctctagcgacgttgtatttgatgagactaatggctctccaagagagcaagttgttgatcttgatgatgtagatgaagaagacgttccaacggccgcaatgcgcaccatggcgattggagatcctttcagggtagaagaggccttgctagatccgaattgggtgttggccatgcaagaggagctcaacaacttcaagagaaatgaagtttggacgctggtgcctcgtcccaagcaaaacgttgtgggaaccaagtgggtgttccgcaacaaacaagacgagacacggggtggtgacaaggaacaaggcacgacttgtggcaaaaggttgttccaaatggatgtgaagagcgctttcctcaacgggccagtcaaggaggaggtgtacgtggagcaaccccctggctttgaggatgaacggtaccccgaccacgtgtgtaagctctctaaggcgctctatggacttaagcaagccccaagagcatggtatgaatgccttagagactttttaattgctaatgctttcaaggttgggaaagccgatccaactatgtttactaagacttgtgatggtgatcttttcgtgtgccaaatttatgtcgatgacataatatttggttctactaaccaaaagtcttgtgaagagtttagcagggtgatgactcaaaagtttgagatgtcgatgatgggcgagttaagctatttccttgggttccaagtgaagcaactcaaggatgggaccttcatctcccaaacgaagtacacgcaagacttgatcaagcggtttgggatgaaggacgccaagcccgcaaagactccaatgggaaccgacggacacaccgacctcaacaaaggaggtaagtccgttgatcaaaaggcataccggtctatgatagggtctttactttatttatgtgctagtagaccggatattatgctcagtgtatgcatgtgtgctagatttcaatccgatccaagggagtgtcacttagtggccgtaaagcgaattcttagatatttagtcgctacgccttgcttcgggatctggtatccaaaggggtctacctttgacttgattggatattcagactccgactatgctggatgtaaggtcgataggaagagtacatcagggacgtgccaattcttaggaaggtccctagtgtcgtggagctctaagaaacaaacttccattgccctatccaccgctgaggccgggtatgttgctgcaggacagtgttgcgcgcaactactttggatgaggcaaaccctccgggactttggctacaatctgagcaaagtcccactcctgtgtgataatgagagtgctatccgcatggcggataatcctgttgaacacagccgcacaaagcacattgacatccggcatcactttttgagagaccaccagcaaaagggagatatcgaagtgtttcatgttagcaccgagaaccagctagccgatatctttaccaagcctctagatgagtcgaccttttgcaagctgcgtagtgagctaaatgtcttagattcgcgaaacctagattga

SEQ ID NO: 118964 - DNA, 4104 bp, Zea mays
  Clone ID: MRT4577_39981C.1
atggatcctaagggcaaggggatggtggtcaatgataaggagaaggagtctttcttcaatgagccaaaaatgacaagcccactgactcgggctcgagtcacaagaagaaagacggatgaatatcataaagtgagcggcttggataacgccaagcagatttgggacaccctcaaaatctcacatgagggaaacgatgtcaccatgctcactaagatggagttggtggaaggcaaactaggaaggctcaagaccctcgtcaacaaaataaggagctatggaagcacgcgatggacggaccacgacgtcgtccgacttatgctaaggtccttcaccgtccttgatcctcatcttgttaactctatccgtgagaatcctaggtacaccaagatgacgcccgaggagatactcagaaagttcgtaagtgggcgaatgatgatcaaggaagcaagatacgttgatgatgcgttaaatggcccaatccatgagcctcaaaccattgctctcaaggcaacaagtagcagggaggcgctacctagcaaggtggcgcaaattgaggcggctgggctaaatgaggatgaaatgaccctcatcatcaagcgcttcaagacggcgctcaaaggtcgcaaggagcatcccaacaaaagcaagacgaagggaaagcgctcctgcttcaagtgtggtaagattggtcattttatcagtaattgtcccgataatgacagtgaccaggaacaagagaagaagagggaaaagaagaaggcttacaagaaggctaagggtgaggcacaccttggcaaggaatgggactcggattgttcatcgtccgactccgacaacgaaggactcgccgcctcggccttcaacaaatcgtccctcttccccaatgagcatcacacctgcctcatggcaaaggagaagaaggtaagcacacgaaatgctattacatatacctcttcaagtgatgatgaatccagcgatgatgaagtagactatgctagtttattcaaagggttagatagaactaaaattgataaaatcaatgaattaattgatgcattgaatgagaaaaatagacttttagaaaagcaagaagatcttttatatgaagagcatgataaatttactagcaaaaatgaatttgataaactaaaatttgcaagggatgcctacacgattggtagacacccctcaattaaggatgggcttggcttcaagagggaatccaagaacttaacaagtcataaggctcccatctccaccaaggagaaagggaaggcccctatggctaatagtactcaaaagaaccatgctttcatgtaccatgataggagatattctaggaatgttcattatgataaaagttacaatgatgttgtttcacctgccatgattgcttcaagttcttctattatgcatgatagaagtttggctaggaaaaatgtcactcatcatatgcctaggaggaatgttcatgtttatgcatccgggggatcaagctggattatcgacaacggatgcacaaaccacatgacgggggagaagaagatgttcacctcctacgtcaagaacaaagattcccaagactcaattatattcggtgacgggaatcaaggcaaggttaaaggactaggaaaaatagctatttctttcgagcattctatctctaatgtgtttttagttgagtcgctcgggtataatttgttgtccgttagtcaattatgtaatatgggatataattgcttattcacaaatatagatgtgactgtctttagaaggagtgatggttcattagcttttaagggtgtattagacgacaaactctatttagttgattttgcaaaagaggaggtcggtctagatgcatgcttaattgctaagactagcatgggctggctgtggcatcgccgtttagcacatgtggagatgaagaaccttcacaaacttctaaagggagaacatgtgataggtctaacaaatgtaaccttcaaaaaagatagaccttgtgcagcttgtcaagcaggtaaacaggtgggaagctctcatcataccaaaaatgtgatgaccacatcaagacctttggagttgcttcatatggacctcttcggacccgtcgcctatctaagcataggaggaagtaagtatggtcttgttatcgttgatgacttttcccgcttcacttgggtattctttttgcaggataaaacagaaacccaagggaccctcaagcgcttcctaaggagagctcaaaatgagtttgagctcaaggtgaagaagataaggagcgacaacgggtcggagttcaagaatcttcaagtagaagagtaccttgaggaggaaggaatcaagcacgagttctccgctccctacacaccacagcaaaatggtgtggtagagaggaagaataggacgctcatcgatatggcaaggacgatgcttggagagttcaagacccacgagcggttttggtcggaagccgtgaacacggcttgccacgccataaaccgggtctaccttcatcgactcctcaagaagacttcatacgaactcctaaccggtaacaaacccaatgtgtcttactttcgtgtatttggaagcaaatgttatattctagtgaagaaaggtagaaattctaagtttgctcccgaagctgtagaagggtttttgttaggttatgactcaaatacaaaagcgtatagggtcttcaacaaatcatcgggtttggttgaagtctctagcgacgttgtatttgataagactaatggctctccaagagagcaagttgttgatcttgatgatgtagatgaagaagatgttccaacagctgcaatacgcaccatggcgattggagatgtgcggctacaggaacaaaaggagcaagatcaaccttcttcctcaacaatggtgcatccccaactcaagacaatgaacaggttcatcaagaggaggcgtgtgatcaatggggagcacaagacgatcatgttgttccaaatggatgtgaagagcgctttcctcaacgggccaatcaaggaggaggtgtacgtagagcaaccccctggctttgaggatgaacggtaccccgaccacgttgggaaagctgatccgactttattcactaagacttgtgatggtgacttatttgtgtgccaaatttatgtcgatgacataatatttggttctactaaccaaaagtcttgtgaagagtttagcagggtgatgactcaaaagtttgaaatgtcgatgatgggcgagttgaactacttccttgggttccaagtgaagcaactcaaggatggcactttcatctcccaaacgaagtacacacaagacttgatcaagcggtttgggatgaaggacgccaagcccgccaagactccaatgggaactgacggacacgtcgacctcaacaaaggaggtaagtctgttgatcaaaaagcataccggtctatgataggttccttgctttacttatgtgctagtagaccggatattatgcttagtgtatgcatgtgtgctagatttcaatccgatccaagggagtgtcacttagtggctgtgaagcgaattcttagatatttagtcgctacgccttgcttcgggatctggtacccaaaggggtctacctttgacttaattggatactcggactccgattatgctggatgcaaggtcgataggaagagtacatcagggacgtgccaattcttaggaaggtccctggtgtcttggagttctaagaaacaaacttccgttgccctatccaccgctgaggccgagtatgttgccacaggacagtgttgcgcgcaactactttggatgaggcaaaccctccgggactttggctacaatctgagcaaagtcccactcctatgtgataatgagagtgctatccgcatggcggataatcctgttgaacacagccgcacaaagcacatagacatccagcatcactttttgagagaccaccagcaaaagggagatatcgaagtgttttatgttagcaccgagaaccagctagccgatatctttaccaagcctctagatgagaaaaccttttgcaggctgtgtagtgagctaaatgtcttagattcgcggaacttggattga

SEQ ID NO: 118965 - DNA, 420 bp, Zea mays
  Clone ID: MRT4577_39982C.1
gcgtagtgatgttggcatggaaaagggactggaatatggttgagattcagactagacgtgacctgggatgctgccacaggcgtccaatccgaaagaaccggcggcctatcctgagctcacattcagaacgatgcgacggcgatgatgggtgactccggccattcacccatcctcttgtccagctagcggaggcggccttttgtttgcattgcaacgcatggctgtgtgtgaatccagcttcctcaaaaaacctttctttgcaatgcaatgcaatgcaatcgagtggtggttgtttttctttctcttcttcttcttttttttaaaaaaagggggagagagagataaatatttgctcttgagaaagcaatgtcaatggctggtgagatgcaacgcatggaggagggtgaaaatgtttttttt

SEQ ID NO: 118966 - DNA, 1317 bp, Zea mays
  Clone ID: MRT4577_39983C.1
atggacagccgagcaagactaagaccaaggggaagcgatcatgcttcaaatgcggaaaagggaaacaagagggaaaagaagaagcattataagaaggcaaagggcgaggcgcatctaggcaaggagtgggactcggattgctcctcgtccgactccgacaatgaaggactcaccgccaccgccttcaacaaatcaaccctcttccccaacgagcgtcacacatgccttatggcaagggagaagaaggtttatgcatccgggggttcaagctggattatcgacagcggattcacaaaccatatgacgggggagaagaagatgttcacctcctacgtcaagaataaagattcccaagattcaattatattcggtgatgggaatcaaggcaaggaaaaatccgaaacccaagggactctcaaacgcttcctcaggagagctcaaaatgagtttgagctcaaagtgaaaaagataaggagcgacaacgggtccgagttcaagaaccttcaagtggaggagttccttgaagaggaggggatcaagcacgagttctccgctccctacacaccacagcaaaatggtgtggtagagaggaagaacaggacgctcattgacatggcgaggacgatgctaggagagttcaagacccccgagtgcttttggacggaagccgtgaacactgcttgccacgccatcaacagggtctaccttcatcgcctcctcaagaagacatcgtatgagctactaaccggtaacaaacccaatatgaagaagatgttccgacggccgctatacgaaccatggcgattggagaagtgcggccacaggaacaaggtgaacgagatcaatcatcttcctcaacaatggtgcaacccccaactcaagacgatgaacaggttgttccaaatggatgtgaagagcgctttcctcaacgggccaatcaaggaggaggtgtacgtggagcaaccccctggcttcgaggatgaacggtaccccgaccattcttgtgaagagtttagcagggtgatgacgcagaaattcgagatgtcgatgatgggcgagttgaactacttccttgggttccaagtgaagcaactcaaggacggcaccttcatctcccaaacgaagtacacgcaagatctgctaaagcggtttgggatgaaggacgccaaacccgccaagactccgatggggaccgacgggcacaccgacctcaacaaaggaggttcattctgcattttgttgcttattatggtgctcaagttgtacaaacactccctggacctcacaagtccgttgcaaagtgatgcacatgtttag

SEQ ID NO: 118967 - DNA, 2817 bp, Zea mays
  Clone ID: MRT4577_39984C.1
tcaaaaactccccctttttcccataatcaacacttgaagattcttgaattcggacccgttgtcgctccttatcttcttcactttgagctcaaactcattttgagctctcctgaggaagcgcttgagggtcccttgagtttcagacttatcctgcaaaaagaacacccaagtgaagcgggaaaagtcatcaacaataactagaccatacttacttcctcctatgctcagataggtgacgggtccgaagagatccatatgcagcagctccagaggtcttgacgtggtcatcacattcttgctgtgatgtgctcctcccacttgtttacctgcttgacaagctgcacaaggtctatctttttcgaaatgaacattggttagacctatcacgtgttctccctttagaagcttgtggaggttcttcatccccacatgtgctaagcggcgatgccacaaccagcccatgcaagtcttagccattaagcatgcatctagaccggcctcttcttttgcaaaatcaactaagtaaagtttgccgtctagtacacccttaaaagctagtgaaccatcacttcttctaaagacagacacatctacatttgtaaataaacaattatatcccatattacataattgactaacagatagtaaattatatccaagactctcaactaaaaacacattagagatagaatgctcatttgatattgcaatcttgcttaaacctttcaccttgccttggttcccatcaccgaatatgattgaatcttgggaatccttattcttgacgtaggaggtgaacatcttcttcttccccgtcatatggtttgtgcatccgctgtcgataatccagcttgaacccccggatgcataaacccaactcttgttgggtcctacaaggttagtcacaatttccttagggacccaaatgcaagttttatcacccttgcattttgcccctaatttcctagcaaatatcttcctatcctttctacaaatagcaaaggaagcattcaaagcatgataaattgtagagggaccattcataactttcctaggagcatgaacaaaattctttctaggcacatgatgaatatttttcctaggcatatctctacaatgcatataggaagaactggaagcatacatagcataagaatcataggcatgtgaatcaaaagcattacaactcctatgagactgtcttctatcattgtacataaaagcatggttctttttagtactacttgccataggggccttccctttctccttggcagagatgggagccttatggcttgttaagttcttggcttccctcttgaagctaagcccatccttaatggaggggtgtctaccaatcgtgtaggcatccctagcaaattttagtttatcaaaatcacttttgctagccttaagttgggcattaagactagccatttcatcatttaattttgcaatagaagctatgtgttcactacaagcatcaatatcaaactctttacatctattgcaaataacaacattttctacacaagttgttgatttactagctatttctaacttagcattcaaatcatcattaaagctccttaagctagaaattgtttcatggcaagaagataattcacaagaaagtatttcgtttctcttaacttctaaggcctgagatttttgtgcttctaaaaatttgtcatgttcttcatacaacaagtcctcttgtttttctaaaagcctattcttatcattcaaggcatcaatcaactcattaattttatctaccttggttctatctaggcccttcttctcccttgccataaggcatgtgtgacgctcgttggggaagagggatgacttgttgaaggcggtggcggcgagtccttcattgtcggagtcggatgaggagcaatccgaatcccactccttgccaagatgtgcctcgccctttgccttcttatagttcttcttctccctcttgttcccttgatccttgctaggtagcgcctccttgcttcttgttgccttgagggcaaggggttgaggctcgttgattggaccattcaatgcgtcgtccacgtacctcgcctccttgatcatcattcgcccgcttacgaattttccaaggacttcttcgggcgacattttggtgtacctgggattctcacgaatattatttaccaaatgaggatcaagaacggtaaaggaccttagcatcagtcggacgacgtcgtggtccgtccatcgcgtgcttccgtagctccttattttgttgataagggtcttgagcctgttgtatgtttgtgtcggctcctcgccccttatcatcgcgaatcgtccaagctcgccctccactagctccatcttgagggtgtcccagatctgcttggcgttatccaagccgctcactttgtggtattcatccctgcacaatgaagtaggatggagagagaataggtgactacgcattttgtggctccaaaatccgtagtcctccccatcaaagtgtggaggcttgccgagtggaatggagagcaaatgtgaatttgaactttgcggaatacgagagtagtcaaaagaaaagttcgaattaaccggtttccttctctcgtagtcgttgtggtcgtcgtccttttgggaagaagtagactcatcgctgtcgtcgtagtagacgatctccttgatgcgcctcgtcttcttcttcttcccttctttccgtctatggcccgagccggagtcggtaggcttgtcgtccttcggctcgttaacgaaggattccttctctttgtcgttgatcacgattcccttccccttaggatccat

SEQ ID NO: 118968 - DNA, 2865 bp, Zea mays
  Clone ID: MRT4577_39985C.1
atggtaaaggaggcacgatatgtggatgacgccttgaacggtccactacctatctacgagccgcagcccgttgctctcaaagcaacgagcagcaaggagacactaccaagcagggtagctcaagtggaggctgccggacttaatgaagatgagatggcgcttatcatcaagcgcttcaagactgcactcaaaggatgcaaggagtaccccaacaggaataaaacaaagggaaaacgctcctgcttcaaatgcggtaagactggtcactttattgcaaactgtcccgataatgatagtgaccagggacaagaaaagagcgggaagaaggagaaaaagaagaactacaggaaggcaaagggcgaggcgcaccttgtaaaggaatgggactcagactgctcctcttccgactccgatggcgaaggactcgctgcttcggccttcaacaaatcctcactcttccccaacaaacaccatacatgtcttatggccaaggagagaaaatgtaaggattttgatgttgatgcttgtgatgatcaccttatttctattaccaaattaaatgatgaggtggcaagtctcaatgctcaacttaagacttgcaaaattaactttgataaattaaaatttgctagggatgcctacactgttggtaaacacccctcaattaaggatgggcttggttttcgaaaggaagccaagaacttaacaagccaaatggctcccattcccaacaaggagaaagtgagggctcctatggacccaacaagagttgggtacctaaaacccaagcttaaattccttgcaggtttatgcatccaggggctcaagctagattatcgacagcggatgcacaaaccacatgacgagggagaagaagatgttcacctcctacatcaagaacaaggattccaggatacgattatctttggagatgggaatcaaggcaaggtcaggggtttgggaaagatagccatcaccaatgagcactccatatcaaatgtatttctagtagagtcgcttggttacaaccttctgtctgtaagtcaattgtgtcacatgggttacaattgtctttttacaaatgttgatgtatctgtctttagaaggagtgatggttcattagcttttaagggtgtattagacgacaaactctacttagttgattttttgaaagaggaggccgttctagatgcttgcttaatagctaagactggtttgggctggctgtggcatcaccgactatcacatgttgggatgaagaaccttcataaacttctaaagggagaacatgtgttaggactaaccaatatttgttttgagaaagatagaccttgtgcagcttgtcaggcagggaaacaggtgggaaggactcatcacagcaagaatgtgatgacaacatcaagaccactggagcttcttcacatggacctcttcggacccgttgcctaccttagcatcgggggaagtaagtatggtcttgtaattattgatgattttttccgcttcacttgggtgttctttttgcaggataaatcagaaacccaagggaccctaaagcgctttctaaggagggctcaaaacgaatttgagctcaaggtgaaaaagataagaagcgacaacgggtctgagttcaagaatctgcaagtggaggagtatcttgaggaagaaggcgtcaagcacgagttctccgctccctacacaccacagcaaaacggtgtggtagagaggaagaacatgatgcttattgacatggagagaacgatgcttggagaattcaagacgctcgagcggttttggtcggaagctgtgaacacagcttgccacgccataaaccggccctacctacatcgccttctcaagaagacctcgtatgaactccttaccggtaacaaacccaacgtttcttacttccatgtatttgggagcaaatgttacattctagtgaagaaaggtagacattctaaatttgctcccaaggcagtagaagggtttttactagggtatgactcaaatacaaaggcgtatagagtcttcaacaaatcatcgggtttggttgaagtctctagcgatgttgtatttgatgagactaatggctctccaagagagcaagttgatcttgatgacatagatgaagatgatgttccaacggccgcaatgcacacgatggcgataggtgatgtgcgaccacaggaacaacaagagcaagatcagccatcttcctccacaatggtgcaacctccaactcaagacggtgaacagcctggtgccacatctaaagcaaaatgttgtgggaaccaagtgggtgttccgcaacaagcaagacgagcacgagtggtgacaagaaacaaggctcgacttgtggcaaaaggttatgcccaagtcgcaggtttggatttcgaggagacttttgctcctgtggctaggatagagtctattcgaatattattagcctatgccgctcaccactctttcaggttgtttcaaatggacgtaaagagcgctttcctcaacgggccaatcaaggaggaggtatacgtggaacaaccccctggctttgaggatgacaggtaccccgaccatgtgttcaagctctctaaagcgctctatggacttaagcaagccccaagagcatggtatgaatgccttagagatttcttaattgctaatgctttcaaggttgggaaagccgatcccactctttttattaagacttgtgatggtgatctttttgtgtgccaaatttatgtcgatgacataatatttggttctactaatcaaaagtcttgtgaggagtttagcagggtgatgacacaaaagttcaagatgtcgatgatgggcaagttgacctacttccttgggttctaa

SEQ ID NO: 118969 - DNA, 1983 bp, Zea mays
  Clone ID: MRT4577_39986C.1
atggtggtcaacgacaaggaaaaggagtccttcctcaacgagcctagagacgacaagccaaccgactcaggctcaagtcacaagaaaagagacgggaagaagaagaggcgcatcaagaagatcatctactacgacagcgatgcctcgtcttcttcaccacacgacgacgacgatgactcctcatcaaaaaagaaaccggttaatcaaaactattcatttgattattctcgtattccgtacaattctaatgctcatttgctatcaattcctcttggaaaacctccccactttgatggagaagactattctttctggagtcataaaatgcgtagtcatttattttctctccatcctagtatctgggagattgttgaaaatggaatgcactttgatagtattaacaatgccatgtttattaatgaacaaattcataaaaatgcccaagccactgctgttttgctagcatctctgtgcagggatgaatacaataaggttagcggcttggacaatgcaaagcagatctgggacacccttaagatatctcatgagggaaacgacaccaccatgatcaccaaaatggagttggtggaaggcgagctagggagattcgccatggtcaggggtgaagagccaatacaaacctacaacaggctcaagaccctggtcaataagattagaagctatggaagcacaagatggacggatcacgacgtcgtccgactcatgctcaggtcctttacagttattgacccccatcttgtgaaccttatccgtgaaaatcccaggtacacaaagatgacgcccgaggagatactcggaaaatttgtaagcggacgcatgatggttaaggaggcaaggtatgtagatgacgccttaaatggccctctgtccgtctacgagccgcagcccgttgcgctcaaggcaactagcagcaaggaggcactaccaagcaaggtagctcaagtggaggctgccggcctcaacgaagatgagatggcgcttatcatcaagcgcttcaagaccacatttaaagaacgcaaggagtaccccaacaagaataaaacaaggggaaagcgctcctgcttcaaatgcggtaagaatggtcattttattgctcaatgtcccgataatgaaaatgaccagggacaagaaagacatgggatgaaggagaagaagaaaagctataggaaggcgaaaggcgaggctcatcttggaaaagaatgtgattccgactgctccttatccgactccgacgatgagggactggcggccttggccttcgacaagtcgtcgttcttccccaatgaacgccacactttcctcatggccaaggagaagaagagaaaagaaatgttatcctctgaattgtctgtttgccatgaatcggtctctagtttaaagagtttaaatgatgaactaaatgctaagctagaggaagttaataaatctagttcctgtgtagaacatgttgttatttgcaatagatgcaaggactttgatgttaattcttgtgatgaacaccttatttctattgctaaactaaatgatgaggtggcaagtcttaatgctcaacttaagacttgcaaaattgattttgataagttaaaatttgctagggatgcctacaccattggtagacacccctcaattaaggatggacttggttttcgaaagaaagccaagaacttaacaagccaaaggctcccattcccaacaaggagaaagggaaggcccctatggctagtagtactcaaaggaatcatgctttcatttataataggaaaattgctagtcattccaattataataggagttatgatcatgatgcttttgattcacatgctatgtttgcctctagttctacttttgttcacggtttatgcatccgagggttcaagctggattatcgacagcggatgcacaaaccatatgacaggggagaagaagatgttcacctcctacgtcaagaacaaggattcctag

SEQ ID NO: 118970 - DNA, 567 bp, Zea mays
  Clone ID: MRT4577_39987C.1
atggccctcatcatcaagcgcttcaagatggcgctaaggggtcgcaaggagcatcccaacaagaccaagacaaaggggaagcgctcatgcttcaagtgtggactcgccgccaccgccttcaacaagtcggccctcttccccaacgagcatcacacctgcctcatggcaagggaaaagaaggataaatctgaaacccaagggaccctcaagcgcttcctaaggagagcccaaaacgagtttgagctcaaggtgaagaagataaggagcgacaatgggttgttccaaatggatgtgaagagcgccttcctcaacgggccaatcaaggaggaggtgtacgtggagcaaccccctggctttgaggatgaatggtaccccgaccacgtgttgaagcaactcaaggatggaaccttcatctcccaaacgaagtacacgcaagacttgatcaagcggtttgggatgaaggacgccaagcccgcaaagactccaatgggaaccgacggacacaccgacctcaacaaaggagttgtacaagcactccccggacctcacaagtccatttacaagtga

SEQ ID NO: 118971 - DNA, 145 bp, Zea mays
  Clone ID: MRT4577_39988C.1
taggacacgcgggcacgggccagaggagcggtgggctgagaacaggacggagatgacaacccaagccagggcacgcgcccgaaagccccggggccacaacacgggcacagaagaggccggcaccactgcaggtacggcggcaagg

SEQ ID NO: 118972 - DNA, 204 bp, Zea mays
  Clone ID: MRT4577_39989C.1
gggttgggtttttttttttttttttttttttttaagaaaatagggttttgaaaagggccctataaattgcctattatccgggaggttcacttttgaacacaacttaatttttcataaatatttggcacattaggaggttttaaattaaccattccacacctttactggggacttttgccaaacttggggtcctggtttcaaaat

SEQ ID NO: 118973 - DNA, 417 bp, Zea mays
  Clone ID: MRT4577_3998C.1
ctattcctcctttttttatttttttttttttttttcctttgttttttttatcggagcgttggatattccaatcatgcttgcgcaagtccccgagaaaatccccagcatgtttccctccataggggggacatatggcaggatcactttcactaatcttaacagacttatttcatgtccatcctccaactggtaaaaaaaagctggaggatatgccagcgtggctgctaaaaaaaagacgcccaaggaaacccccggggatttccctcgattattatgaccatcccgaggtatattacccaaacacctcctgagtcatttgttagcgtgacggctggttttgtcgttcttacctatccagaccacgcttgaggagctgcaccatgggtaacacagctgaacccattattcaaggggtta

SEQ ID NO: 118974 - DNA, 1974 bp, Zea mays
  Clone ID: MRT4577_39990C.1
cattgggacctcgagtccggcgggaaccacccctcgccgccatctccgtctctctctctcccgcaaccaagcagttcaactcacacccgaagcggcgccgctagggtttgctccgacagccgcgaaacctagtccttactgcgccctcccacagaggccgtcattcactaatctacctgctacgcttcgcttcccgctccgatttggagctagggtttagcttatctccgagctcagcttcgggtcgcggcacgcggcatggcggggtacggggaagagaaccagaacgccatgaacgggtacgaggaggaagaggaggaagaagaagttgaagaagtcgaggaggtgtacgaagaggaggaggagggggacggggagggggaaggagacgagggggcagccgccgaggcagcagcgatggcggccgagacgagaagtgtcgatggaggccggggcctagcggaggccgttgggaatgttgatgccggaggcgaggatgagagggatgcagattctagcggcggtgacgcttcggggaaggttttcgtagggggtgtagcctgggagacaactgaagaaacattcacaaagcattttcagaagtatggagctataactgattctgtgatcatgaaggacaagcatactaggatgcctcgtggatttggatttgttacattttccgatccgtctgtgcttgacagggttctagaggatgaacatgtcatagatggaaggacggttgaagtcaaaaggactgttccaaaagagctgtcgtcgaaagatggtcctaagacaaaaaagatctttgtgggtggtatcccaccatctcttaccgaagataaattaaaggagcacttctcatcgtacgggaaggtggttgagcatcagattatgcttgatcatagcactggacgttcacggggctttggatttgtcacatttgaaagcgaggatgctgttgaaagggttatgtcagaggggagaatgcatgatcttggagggaaagcaggttgaaattaagaaagctgaaccaaagaaacctggcgctggtgattcaagctcaaacggaagacacagaccgcgtggtggtcatcgcgattcataacgccgcagtggtggttctttatactgcattcactgcctttgccttcctctaggatctgataataaagctatacaatcccaccgagaaaatggaacattccattcaccttgttgaatcagcggtatcttacttttggctatggctcacattatggctctgcctatggtggctccatatacggaggtccatatggtgcctacgggtcatatggtggtgcctatggaggtggtgcgtatggtgctccaggagggtatggtgggggaggatatggcagctacggtggtgctggaggcatgggtgggggtggcagcgctggtggtcggggctccagcagataccacccttatgggaaatgatcatccattctgtgtttctctaggatctgataataaagccatacctttcctcgtttctgctactgagaaaatggaacattccattcgtcttgttgaatcagcggcatctggacatttttttccttggaacttgcattgcacatcaacgattctatagtctatagtcgctgaaccctgaaccgcccccaccccgagctttctgtagaagctgcagctgaaattctcgtagtctggcatgagccttagaatgcccttgaaactattatctttgtggtagtaacattatggtgtaatggaacagatgtacgttgttgtaacattcactcactgatcagagacttgctatctctacatatgtggagagaagctttgcaaatgattgactgatactattgagcgcattgtgtgggtttctatttgtctccattctgatctgaacgcgtgttatctcgttgcaaaaaaaaaaaaaaaaaaaaaaaaaaaaaagtactctgcgttgttaccactgct

SEQ ID NO: 118975 - DNA, 1501 bp, Zea mays
  Clone ID: MRT4577_39991C.1
gcacgagggaagcggacgagggggctgtagcctccgagccagcagcgatggcggccgagacgagaagcgttgttggaggccggggcttagcgaaggccgttgggaatgttgataccggtggcgaggatgggagggatgcagattccagtggcggtgacgcttcggggaagattttcgtagggggtgtagcttgggagacaactgaagaaacattcacaaagcattttcagaagtatggagctataactgattctgtgatcatgaaggacaagcatactaggatgcctcgcggatttggatttgttacattttccgatccatctgtgcttgacagggttctagaggatgaacatgtcatagatggaagaacagttgaagtcaaaaggactgttccaaaagaggaaatgtcatcgaaagatggccctaagacaaaaaagatctttgtgggtggtatcccaccatctcttactgaagataaattaaaggagcacttctcatcgtacgggaaggtggttgagcatcagattatgcttgatcatagcactggacgttcacggggctttggatttgtcacatttgaaagcgaggatgctgttgaaagggttatgtcagaggggagaatgcatgatcttggagggaagcaggttgaaattaagaaagctgaaccaaagaaacctggcgctggtgattcaagctcaaacggaagacacagccgtggtggtggtcatcgtgattcataccgtggtagtggtgtttctgtgaacagcggtggcggctatggatatggtggtggttaccgatcagctgctgcagcatattatggcagcacagcatatggtgcctatggcagagggtatggatatggtgctacttctggctatggctcaggttatggctctgcatatggtggctccatgtatggaggtccatatggtgcctacgggtcatatggtggtgcctatggaggtggtgcgtatggtgctccaggagggtatggtgggggaggatatggcagctacggtggtgctggaggcatgggtgggggtggcagcgctggtggtcggggctccagcagataccacccttatgggaaatgatcatccattctgtgtttctctaggatctgataataaagccatacctttcctcgtttctgctactgagaaaatggaacattccattcgtcttgttgaatcagcggcatctggacatttttatccttggaacttgcattgcacatcaacgattctatagtctatagtcgctgaaccctgaaccgcccccaccccgagctttctgtagaagctgcagctgaaattctcgtagtctggcatgagccttagaatgcccttgaaactattatctttgtggtagtaacattatggtgtaatggaacagatgtacgttgttgtaacattcactcactgatcagagacttgctatctctacatatgtgggagagaagcttgcaaatggatgactgatactattaaaaaaaaaa

SEQ ID NO: 118976 - DNA, 1503 bp, Zea mays
  Clone ID: MRT4577_39992C.1
ccgagccagcggcgatggcggccgagacgagaagcgttgttggaggccggggcttagcgaaggccgttgggaatgttgataccggtggcgaggatgggagggatgcagattccagtggcggtgacgcctcggggaagattttcgtagggggtgtagcttgggagacaactgaagaaacattcacaaagcattttcagaagtatggagctataactgattctgtgatcatgaaggacaagcatactaggatgcctcgcggatttggatttgttacattttccgatccatctgtgcttgacagggttctagaggatgaacatgtcatagatggaagaacagttgaagtcaaaaggactgttccaaaagaggaaatgtcatcgaaagacggtcctaagacaaaaaagatctttgtgggtggtattccaccatctcttaccgaagataaattaaaggagcacttctcatcgtatgggaaggtggttgagcatcagattatgcttgaccatagcactggacgctcacgtggctttggatttgtcacatttgaaagcgaggatgctgttgaaagggttatgtcagaggggagaatgcatgatcttggagggaaacaggttgaaattaagaaagctgaaccaaaaaaacctggtgtgggtgattcaagctcaaatggaagacacagtcgtggtggtggtcatcgtgattcataccgtggtagtggtggcaatggcttttctgggaacagcagtggtggtggctatggatacagtggtggctaccgatcaactgctgcagcacattatggcagcacagcatatggtgcctatggcagagggtatggatacggtggtactgctggctatggcttaggttatggctctgcatatggtggctccatgtatggaggtccatatggtgcctacgcggcatatggtggtgcctatggaggtggtgcatatggtgctccaggagggtatggcgcgggaggatatggcagctacggtggggctggaggcatgggtggtggtggcagcgctggtggtcggggctccagcagataccacccttatggaaaatgataatccattcactgcctttgccttcctctaggatctgataataaagctatacattcccaccgagaaaatggaacattccattcaccttgttgaatcagcggcatctgaacatttttttcctggaacctatcattgcacaacaaagattctagtctgtagtcgctgaaccctgaactgcctcatcccacccccaccccctgagctttctgtagaaggtgcagctcaaattctcgtaggcatgagccttagaagacccttgaaactacaagctttgtggtaacaatatggtgtcatggaacatatgtattttgatgtaaaacattcgctcactgaccagtgacttcgccatctctgcttatgtatgtagagaagcttagcaaaggattggactgatactattgaattgtgtgggtttctatttgtctcc

SEQ ID NO: 118977 - DNA, 269 bp, Zea mays
  Clone ID: MRT4577_39993C.1
gcgaaagttccgtgcgatgaggatggatctggtaactggttttgtgagaagaaaatgtcacgagatctatatgagcttccgttctcgtgttggagtgcctgatcaacatggacgatgatctgtgtttcaccgttcttcgtaacacggtgatcaaaggttctcacggcagaggagattgctctcatggctcaatgcaacatgaaactcatgatcgccacgacgtatcatggaaagagtgtttcactgcctattctagatgcccagacagg

SEQ ID NO: 118978 - DNA, 155 bp, Zea mays
  Clone ID: MRT4577_39994C.1
acgcatccaaacaaacctaagcttttcaattctcctatctcacattctccaagcctatttcccattaactctctccatataacaacttaccactatcaactttcaaatctactatccctaattttcatctttataaatcacacatttaacattac

SEQ ID NO: 118979 - DNA, 291 bp, Zea mays
  unsure (1)..(291): unsure at all n locations
  Clone ID: MRT4577_39995C.1
tacgccgcagggctgattctcttagcgggaacacgcgagacgcgggaataacccttgagaagctagataaaatacctactctgtttgaagctaaggaatttgcagctgcaacataaacaacatgatggtaatattgcagttgcacagggaagatttaaaaaaaaaaaaaaatttaaaaaaaaaaaaaaaaaaaaaaaaaaaaaaaaaaagaaaaaaaaaaaaaaaaaaaaaaaagnttttgggttgtaaattgtttaagggggaattttgaaatatnattaattggggggg

SEQ ID NO: 118980 - DNA, 454 bp, Zea mays
  Clone ID: MRT4577_39996C.1
aaaagaaaagtttttggtacccccccccttttttttaatttttccttcccccgtcaaaaataacaagccccaatagagcccaccggggggcctaacatttaaaagagggtggggaaacccaaaatttttccttagggcaccaaaccccgaaaaattttaagggctttgttaaggacaaaaaaaattttaccccccccaggggtttggcccccaaaaaaaaaaaaggggggttggggccccccccccaaactttgtttaaacctttgcccagagttttacccttggttacccaaaaacccttcggtttttaaaactccttttccaagggggaaattggaaatttggaaaaaaaaaaaaaaaggcggggggaaaaaaaaatttaaaactccccgggcgttaaataggggccaattttttttttttaaaaaaaaccgggaattctttttatttcctt

SEQ ID NO: 118981 - DNA, 432 bp, Zea mays
  unsure (1)..(432): unsure at all n locations
  Clone ID: MRT4577_39997C.1
aagggggaatatttatcgagcatcaacacctttagaagaacccgtaacttctgtcggcacaagtgaacttgccatganagcttatttcctatttgatagtacttcaactcctcataccaaatacaactaaagggttggatacaacacgtctgaattctcatgcttccttgctacttgctgataaatgaaacactttaaaagcatcctacattcatttattcaatcccaccaacgaccctacaattaatccttacgtaacacacattctaaaaaccaaggagaactatttcacacttggaagcttccatgcacttgatccttcaacattgctaaatacgagattcaacaactctgtgaatgtcgaactcttctgacagcatgagtgaaggccaaaatccctcgtgactctttcagttgaatatgatccaaacg

SEQ ID NO: 118982 - DNA, 258 bp, Zea mays
  Clone ID: MRT4577_39998C.1
aatggggtgtgacttttgtttgttaaatgaggggcacaagcagcatggtaaaacaaaggacctttaattaaagacaaaaacgggctgcttaatggacaccaacaaacaaagctgaaggtcccaaaacgaatgcagacgacgccgtctttagaaaaaaaaaagaaggttttaaaataaatacggcaacatgagggagcacacacgtcactccataaaattatacgaggaactgctcccggaaaaccaaccggagatgtg

SEQ ID NO: 118983 - DNA, 372 bp, Zea mays
  Clone ID: MRT4577_39999C.1
atgggcaagaacaacaagcgcaagcgcgagtcgactcctccatcggaggatttcggtgactcggaatactcggaggaggagttctcctccgagtccgaggggtctccagctcccgtctctcccccggcgtcgtccgatgactcggacgactcccaggggatagccgcggaggactcggacggcggcgacgaggatgaggacgacgacgacgacgacgacaacgacgacgatgacggcagcggcagtggcaggggcggcggcgacggcagcgggggcagcaccaagggcgacagcagcaagggcagcaccaagggcggcagcagcaggggcagcaccaagggcggcggcggcaggggcagggccagtggctag

SEQ ID NO: 118984 - DNA, 422 bp, Zea mays
  unsure (1)..(422): unsure at all n locations
  Clone ID: MRT4577_3999C.1
ttttgngatgcttgtattatccatgcatgctagatttggctgggtttgaaggtattgtgttaagaatatacttgttgggatccagaccaacagatgatgataagtgcaactagttctttaaagtttaagttattgatgtaattcataattgtattttgttaccagggtttcactgagattcanatgtcaaaacttggggggggcgaggcattcactanagaaagggagagagaaattgagcaggttgttgaatcagtcaacgaacttgcacatattttttaggatctttcagttcttgtgattgatcagggaaccatcatcgatcggatagactacaacatacagaacgttgcagcttcagttgaggaaggtgtcggacaattgcaaaaggctgagaggtcccanaagaaaggggccctggg

SEQ ID NO: 118985 - DNA, 2119 bp, Zea mays
  unsure (1)..(2119): unsure at all n locations
  Clone ID: MRT4577_399C.1
tcggctactttcaacgttgcctgntttgtaaatctgtagggagtgaatgtcactgttcctcagttaaaactgtaattgatgtttgtctaggtgacattaggagggtggtgatgtttttgcagttttggtaccaagggcatcaattcacaggtcggccaaaggaatgtttgtgtggtcctttctcacttgatttggatgcagtacattctacagtgccaaaaatgttgccatgggagttcccttgtaagttatctgaaacattatgcatggaggtagacaaaactatccttttggctgaagaaaagaaaaaacagatggaaatatcagatcttgaaggcctgcagttacatgtaacagcacctttgatcaagcccacgcgtcctaacacgcgtcgggctaagaaatccaaattaaagcgtgctcacttgactgagcataatgatatttcaccttgtaagaatgaacttgatgatttccatgatcttccagatatatctcttccatctgataaacaaataaaaagaaatcggcatcgttcgctgctattatctgagtccgatgatgatccagctgatgtaggtactgaaaaacataacatatttactgttactgaagttggtttcttcccacaaccttcagaggtgcctcctatgcatgggcaagggatttctgatcagttccattttcccgttgaatcacgagagacatgtgaaattgctgattctttccaaaatccacctgaaagcaacatgtatgggtccatttcacaagtttgtgatacatttatgtcacaggacgtgtcatgtgtacccgagtcatccttaattttggacggcacatctgcatccataagtggtgatgaatttttgtcaagggcagtgtccaatggtttttctgccttttgtgagggtacatacactacctccagaatggtattagaagacactggctgtgtgaagaatctaatggctgaacgacaaaaagatgttgaagatgtagttggtgagacaagtgagacttatatggaatcatttcggagaaatgaacaggcaagctgttcagctgctgggtttcaattaatggatgaatgtagtcgtgctgaaagcatctggctgctctctggcaaaaaacctaatgactcttgcaaggtggaactagtacaggacacttggaacaggctacggagttgtcgtcttgaatttaccagtgaggctaatcacaacagagcaacttctggagctttgaagcttgtctcagaagtgtctgatttaatatcagaatcagatcttatgcttttccgttgctaccctcttactaaggatacgttggatccgtctttaactccttgtgatgagccagttgattcttcttggtacagcaatcaggttgagatgggatctgtatatgcccagcatgctcttcatattttatcgaggaattcccaaaaaatagatggtggttctgtcgatttgtcacaagagttgtttgccagtacagatgctggattcaggaatgattatggatctacggacatttctcatatgaaaaatccaactacctgtatttttaaaagaagggagcggcatgttcatctttgtgaaaccctgtctccagtggttcctccaaagttgttgcagtcattgagaggccctgcttttgttgattatttgtcttcaatcagccagatttccaaattagaaaacttgcgactctctgaaaataaagtcataaacaagcgaagaaggtcccgtcaggcaagacattacttgagttctggcgcacttcaactttcacatgaggatgttgtattattagcagaaagcggctgtttcagtagcagacgcgagagggttgaggttgtagagcaagcaccagtcagtacataagttaatgaactggtgctgatcatgagcggcagcattttgattttttttattagaaggcaatgtgactgggttggccgagccatttttatagttgcgtccgtgatcacggagcccggcggtggaggaaccggaacgtgtgcagttgattgctgtatctgttagataactagacattttaaagtttatttaaattttaaaattatttatagcaatcatgaatatggattaatctt

SEQ ID NO: 118986 - DNA, 420 bp, Zea mays
  Clone ID: MRT4577_39C.1
gcgattggtgcgaattgtcccaatcatcttttgttctttgattggcctccgcaagctggccagggacaagcggaagcaccgattcattcatacccccaaacccagactcggcgtgtcactctttacttaaggactaaggtttctgtcagggcggctgagaaatacagctgccgagtcctttgcaaaagtgacaatttttcaagcaccagcattcatcacacgcacgcacgccctttgcacctgaaactgccgggtgggtttcctggctggcgacatgaattgtactcttcactcacacccactgttgctgccactggcactggcagctgcgggtactgcgggtacgcgctgaacctgagctcctcggcgcgggacacggagggcatctggcccaagttccgcaagcagatcaggaagggc

SEQ ID NO: 118987 - DNA, 321 bp, Zea mays
  Clone ID: MRT4577_3C.1
acccacgcatccgcccactcgtccgcccacgcgtcctttttatgagtacttgacaaagtgcggaatgctgcatctgattatgaatgaggccagtggcacatgatttcgaacagcgcaaaggatcttatatgaaaaatcctatgcctttgtcaatcgaaaaaattaaagcccactttaattttaaagcttcctggaatatgaaaatataaaggctacaccattaaatcttgatcccacatgtcttttttgtacccataaattattttccattaattaattcaagaaatttgctctaccagttattgcttaacattttttata

SEQ ID NO: 118988 - DNA, 584 bp, Zea mays
  Clone ID: MRT4577_40000C.1
gcaggacaagccgtcgcgtgcgcgcgtccgttagcttggcatccctgatacggccgccctgggtgtgtttttttttttttcacggctcgtgcgctggctgactccattcttaactttaccttttttagtgcgatgcaacgagtcgtaaccaattcagctgcgccggactcggtcaggacggttgccccacggtcgcgcaaaattagtggaagcggtggtgacggtgcgccgtgcctcgcccggaatttggtggggctctatccggcggccgtcgttgtggcccagaggccgtgtccgttcttgacgcccagcggcgcgatgggcataccgtcctgcgcggcgtcgggcttggactcgagcttgcattcgcgcggcggcggcggcggcggtggcagcgcggcgtcctccacgaccgccctccggacgaggcgcagcagcgtctcctcccgctcggcgccgtcggtccgggggtgctcctccgcctgcgggcgcgcggggtccttgctggtgagggccccgtcggggtgccccctgcggggcgtcgcggagtctgggcgcgcccgccggggggccgggctggtgct

SEQ ID NO: 118989 - DNA, 305 bp, Zea mays
  Clone ID: MRT4577_40001C.1
caaaaaagctcaatatgacccacatgattcactttgtttctgaagcaccaatctttcaccttagtgatcagttaaaggtatcgagccatgtaagatgcaatatacacttttgaagttctatataaatataaaaaatagttgcacattccttattttttttcctcgaacgcccaagagaactgcacaccattaatattaagtaggaaaaaaaaaaaaaaaaaaaaaaaaaaaaaaaaaaaaaaaaaaaaaaagggggggccccccatttaatgcccctcccccccggggaatttttccgggggggg

SEQ ID NO: 118990 - DNA, 841 bp, Zea mays
  unsure (1)..(841): unsure at all n locations
  Clone ID: MRT4577_40002C.1
gcggccgggccgggattccgaccgctcgcctccctggtacgcttcttgccgccgccgcaacctcctcctccccgtcacagattgcagatcatttaacataaatggctgactcagaggacattcagcccctagtctgtgacaatggaactggaatggtcaaggctggctttgctggagatgatgctccccgtgctgttttcccaagtatagttggtcgtccacgccacactggtgtcatggttgggatgggacagaaggatgcttatgttggtgatgaggcccaatccaagaggggtatcctgactttgaagtatcccatcgagcatggaatctgttcctgctatgtatgttgctattcaagctgtcctttccctttatgctagtggccgtaccactggtattgtcctggattctggagacggtgtcagccacactgtcccaatctatgaaggctatgccctcccgcatgccattcttcgtctcgatcttgctggtagggacctcactgattccctcatgaagatcctgactgagaggggttactctttcacaaccactgctgagcgggaaattgtccgtgacatcaaggaaaagcttgcatatgtcgcgctcgactacgaacaagaactcgagaccgccaagagcagctcatcagttgagaagagctatgaactgcctgatggacaagtgatcacaataggcgcagagcgcttcagatgcccggaggttctcttccagccatccttcattggtatggaagctccaggaatccacgagacgacctacnactccatcatgaagtgtgacgttgatatcaggaaggacctgtatggcaacattg

SEQ ID NO: 118991 - DNA, 241 bp, Zea mays
  Clone ID: MRT4577_40003C.1
tgaacactgtgaaccagttccaaaacggtcacctcagggaggcaagtaaccacttccttcacctagatgatggtcgagcagcggtacctcgggtacaatagtatattatgatgatccagatgtcgtggaatttacggacatttcaacctttttatgtctgctcatcacctagctgattaaccaaataaactgtcaaatgttctacaggtaccacgacctggaccccatgtttatggccacc

SEQ ID NO: 118992 - DNA, 298 bp, Zea mays
  Clone ID: MRT4577_40004C.1
gtatgtaatggatagtagatgaatatgtcatcagtagcacatggagattaatctgagatatttgttacaggaccatgaagcatgaaatagttttaaacaacacatctagacagctcaggggctcacgcaaatacatattactaagatgacagtacataagtatttcaggtgcatggtagggagcagtcaggatacagggtaaatatgctagctgcttgtatagattacccatggttcgataataggatcatgagtaggttgctttccatgtgcaggtgttctttcgatgccctcccac

SEQ ID NO: 118993 - DNA, 528 bp, Zea mays
  unsure (1)..(528): unsure at all n locations
  Clone ID: MRT4577_40005C.1
ggtaccctgcgcggnccttggccggggccagccactctcacggttgccaccctagcacgcgctcgccgtcgccacgctctatatctcgcgcctctcgccttccactctttctatacccgcccgctcgcctccctgattgcagatcatttaacataaatggctgactcagaggacattcagcccctagtctgtgacaatggaactggaatggtcaaggctggctttgctggagatgatgctccccgtgctgttttcccaagtatagttggtcgtccacgccacactggtgtcatggttgggatgggacagaaggatgcttatgttggtgatgaggcccaatccaagaggggtatcctgactttgaagtatcccatcgagcatggaatcgtaagcaactgggatgacatggaaaagatctggcatcacaccttctataatgagcttcgtgtagcaccagaagagcacccaggtctttttacagaggctcctcttaacccctaagctaacagggaaaagatgacacaaatc

SEQ ID NO: 118994 - DNA, 1541 bp, Zea mays
  Clone ID: MRT4577_40006C.1
cattgggtacctcgaggccggccgggttggactgaagggtgctcccccaccgttgctaccccagcacgctctcgccgtcgccacgccctatatgcctatatctcgcgcctttcacctcccactctttctccatccgcacgctcgcctccctgctagtgctacgcttcgtgccgccgccgcaacctattccttcccgttccagattgcagatcatttaacataaatggctgacgcagaggacattcagcccctagtctgtgacaatggaactggaatggtcaaggctggctttgctggagatgacgctccccgtgctgttttcccaagtatagttggtcgtccacgtcacactggtgtcatggttgggatgggacagaaggatgcttatgttggtgatgaagcccaatccaagaggggtattctgactttgaagtaccccatcgaacatggaattgtaagcaactgggatgacatggaaaagatctggcatcacaccttctacaatgagcttcgtgtcgcaccagaagagcacccagttcttcttacagaggcccctcttaacccgaaggctaacagggaaaagatgacgcaaatcatgtttgaaaccttcagtgttcctgctatgtatgttgctattcaagctgtcctttccctatatgctagtggccgtaccactggtatcgtcctggattctggagatggtgtcagtcacactgtcccaatctatgaaggctacgccctcccacatgccattcttcgtctcgatcttgctggcagggacctcactgattccctcatgaagatcctcaccgagaggggctactctttcacaaccactgccgagcgggaaattgtccgtgacatcaaggaaaagcttgcatatgtcgcgctagactatgaacaagaactcgagaccgccaagagcagctcatcagttgagaagagctacgagctgcctgatgggcaagtgatcaccataggcgcagagcgcttcagatgcccggaggtgctcttccagccatccatgatcggtatggaagctccaggaatccacgagacgacctacaactccatcatgaagtgcgacgtggacatcagaaaggacctgtacggcaacattgtcctcagcggtggatccaccatgttcccaggcatcgctgaccgcatgagcaaggagatcaccgcgctcgcgccaagcagcatgaagatcaaggtcgtcgctccgccggagaggaagtacagtgtctggattggaggatcaatcctcgcatccctgagcacattccagcagatgtggatctcaagggctgagtatgaggagtctggtccagctattgtccacaggaagtgcttctagacatcacctagccttgttctcctcgtggaaatgcctttgtttcatgacatatctatgggtggtcgctctgctacagctcgcagttttttgtgtatgccacaagccgcatatatatatatccattctggtaaccgtgtggagtcagccgagcactgtatgaagtatgtggcttgggtttgatata

SEQ ID NO: 118995 - DNA, 692 bp, Zea mays
  unsure (1)..(692): unsure at all n locations
  Clone ID: MRT4577_40007C.1
ccggccgggagttccaggcacaggcagtcaggcccttcttcggcggcgggcggcgagggtttggaggagggcggtgcgcaacgcaacaccctagctctgcggcggcgtattctcttcaagtggctcgctgccttgccgaccccgcgagcgcaatgagggtgaaagtgatttcgcgccccaccgacgagttcacgcgctagcgcagtcaggacctgcaggggtgctgatcaccagtgggatggtaatctttttgcaactgttggtgctcaagttgatatatgggatcctgacaggtcggagccagtaaatagcttcgagtggggtaaacatacggttctctctgttctatttgatcctggggattgtaatattttgattaaatcagtgatcggagtctaacactctatgacgacctgcccatgtcatcaccagctagaaagctaataatgaagacaagctaaggtgcaattcagtatgctggaaccccagagagcccatgaacttcactgctgtaagattcatatatgggatcctgacaggaaaggaatgcgcaacatgcatgtagctagctagcagctcacatactaggcaggcatgcatgtgcctattattattggtgntggtcatataactagtaataccatacaatcccgatgtgtcgtttgcacaggcgtacgtaanaaaactaaaaa

SEQ ID NO: 118996 - DNA, 1902 bp, Zea mays
  Clone ID: MRT4577_40008C.1
cattgggtacctcgaggccggccgggagcccagtgggaaattattccgcgttggcagccgccctcctccccaaggaccccaactttccagtgcggcaccggcctcctttacacctcattgccagtttcccaccgccaggcgccagccactctcacggttgccaccctagcacgcgctcgccgtcgccacgctctatatctcgcgcctctcgccttccactctttctatacccgcccgctcgcctccctggtacgcttcgtgccgccgccgcaacctcctcctccccgtcacagagcagattgcagatcatttaacataaatggctgactcagaggacattcagcccctagtctgtgacaatggaactggaatggtcaaggctggctttgctggagatgatgctccccgtgctgttttcccaagtatagttggtcgtccacgccacactggtgtcatggttgggatgggacagaaggatgcttatgttggtgatgaggcccaatccaagaggggtatcctgactttgaagtatcccatcgagcatggaatcgtaagcaactgggatgacatggaaaagatctggcatcacaccttctataatgagcttcgtgtagcaccagaagagcatccagttcttcttacagaggctcctcttaaccctaaggctaacagggaaaagatgacacaaatcatgtttgaaactttcagtgttcctgctatgtatgttgctattcaagctgtcctttccctatatgctagtggccgtaccactggtattgtcctggattctggagacggtgtcagtcacactgtcccaatctatgaaggctatgccctcccgcatgccattcttcgtctcgatcttgctggtagggaccttactgattccctcatgaagatcctgactgagaggggttactctttcacaaccactgctgaacgggaaatcgtacgtgacatcaaggaaaagcttgcatatgtcgcgctcgactacgaacaagaactcgagaccgccaagagcagctcatcagttgagaagagttatgagctgcctgatggacaagtgatcaccataggcgcagagcgcttcagatgcccggaggtgctcttccagccatccttcattggtatggaagctccaggaatccacgagacgacctacaactccatcatgaagtgtgacgtcgatatcaggaaggacctgtatggcaacattgtcctcagtggtggatccaccatgttccctggcatcgccgaccgcatgagcaaggagatcactgcgctcgcgccaagcagcatgaagatcaaggtcgtcgctccaccagagaggaagtacagtgtctggatcggaggatcaatccttgcatccctgagcacatttcagcaggtaacaccaagttttccggcggctattctgtatctactatctgagtctattttgtgaagttctgacataagttcttgttttccctgtgcagatgtggatctcaagggctgagtatgaggagtctggtccagctattgtccacaggaagtgcttctagacgtcacctagccttaattctcctctggaaataccttcgtttgatgacatatctatgggtggttgctctgctatagctcgcagtttttgtgtttgccaatatatccggtaacattgtggagtcagccgtccactgtatgaagtatgtagtttggttatatatatatatatatatatatatatattgattgtattatttactcgattctatgggttcttggatacctggaatgtgcatgatattttttaatttttgtaacaatgtgtactccgtaacaaagttcgcgtttgaaacatcgtttctgctgctttaatatagatttgttcattcccaaaaaaaaaaaaaaaaaaggccccta

SEQ ID NO: 118997 - DNA, 688 bp, Zea mays
  Clone ID: MRT4577_40009C.1
tcgaggccggccgggccgggaagatcattgattcttataccaccaccgacaatctctcatcgccgtgatcatccactacatactcgccacccccgatccttttcctgcgtgttgatctcgtcggaggaccgctcgcaattccaccatcacgcatcgaattccatgacctaccccttcgagaatgagatccgcacacgacgagctggttcttcttgtagatgaccgcgctggcaaatctaggtaggttcctccctctgacaatggacagcatgttcaagtccaatgatcctctgtcggcgtagatatattctcccagaacttagtggaagatgatgagactgcatcacacgactgcgagatatactgatgtgaaccgagatgtatcatcagcttgatcgacatagcattataatggatgtagccagccgttattgcttgcctatgacatcactaatgctgactccatactcccagccgatgagagtcttgtggaccttatcgatcaaggaaatgcgaatacaatagtagtctcttgctgactagcaaggtctgctatgctagatgcaaagcatctgcgcgctgaggatgcaaagacgcatgcccattaccaagcctcgctatcttcgtgtagacatccgctaacactgcaatcagtgtgtatgacatatgctatgagactgccatcaga

SEQ ID NO: 118998 - DNA, 244 bp, Zea mays
  Clone ID: MRT4577_4000C.1
caataccaaacatcatactattttatctgaaactatctacatcatcaatggctgaatatcttcaactgtaagctaacttaaacaaacacccattctcaccattactcaatatatcattacttcttcaactacccattatgcattcacaaactccttatttattaatacattccaaacctatgtcagtctattgtaaaactcactctaattaaactatcacattctaacaaatatattcaattta

SEQ ID NO: 118999 - DNA, 296 bp, Zea mays
  Clone ID: MRT4577_40010C.1
atatcagcacaggatatgggcttggtttggatcttcttcgaacaataggaatgagggaggaattatctgagagccagagtgattacttcatatcatactgaaaactgcagagctcggcgaaaaagatcacacattctcacaggccattaggagcgttgcatgtgcactgccattcaccctacaacgaaccgaggtagtcatcctcataagcaaaacgaaatacttaaggatagtcacctgtcgctagatatcttatggcgtgcaggagaatacccaacgcagatacaccgggagga

SEQ ID NO: 119000 - DNA, 1563 bp, Zea mays
  Clone ID: MRT4577_40011C.1
gtttatgcatccgggggctcgagctggattatcgacaacggatgcacaaaccacatgacgggggagaagaagatgttcacctcctacgtcaagtacaaagattcccaagatttgatcatctttggagatgggaaccaaggcaagatagaccttgtgcagcttgtcaagcaggataaatcagaaacccaagggactctaaagcgctttctaaggagagctcaaaacgaatttgagctcaaggtgaaaaagataagaagcgacaacgggtccgagttcaagaacttacaagtggaggagtacattgaggaggaaggaatcaagcacgagttctccgctccgtacacaccacagcaaaacagtgtggtagagaggaagaacaggacacttatagacatggcgaggacgatgcttggagaattcaagatgcccgagcggttttggtcggaagctgtgaacacagcttgccacgccataaaccgggtctaccttcatcgcctcctcaagaagacctcatatgaacttctaaccgagcaagttgatcttgatgatgtagatgaagatgacgttccaacgaccgcaattcgcaccatggcgattggagatgtgcgaccacaggaacaacaagagcaagataaaccctcttcctcaacgatggtgcatcccccaactcaagatgatgaacaggttcctcaagaggaggtgtatgatcaagggggagcacaagaagaccaagttgtggaggaagaggcaccacgggcccctccaactcaagtccgagcgacgattcaaaggaatcatcctgtcgaccagattctgggtgatataagcaagggagtaactactcgctcaagactagctaacttttgtgagcattgctcgtttgtctcttctattgagcctttcagggtagaagaggccttgcaagatccggactgggtgttggccatgcaggaagagctcaacaacttcaagaagaatgaagtttggagcctggtgccatgtcccaagcaaaacgttgtgggaaccaagtgggtgttccgcaacaagcaagatgagcccggggtggtgacacgaaacaaggagacttttgctcctgtggctaggctagagtctattcgcattctattagcctatgcggctcaccactcattcaggttgtttcaaatggacgtgaagagcgctttcctcaacgggtcaatcaaggaggaggtgtacgtggagcaaccccctggctttgaggatgaacggtaccccgaccatgtgtgtaagctatctaaggcgctctatggacttaagcaagccccaagagcatggtatgaatgccttagagatttcctaattgctaatgctttcaagaaatttgagatgtcaatgatgggcgagttgaactacttccttgggttccaagtgaagcaactcaaggacgacaccttcatctcccaaatgaagtacacgcaagacctgctcaagcggtttgggatgaaggacgccaagcccgcaaagacaccaatgggaaccgacagacatgtcgacctcaacaaaggagtctctaaagtgaattga

SEQ ID NO: 119001 - DNA, 246 bp, Zea mays
  unsure (1)..(246): unsure at all n locations
  Clone ID: MRT4577_40012C.1
cgagcgcagccgataccatcgggcacccacggcgaagggcagcagcggccaaggaggacnccggacgcgaaacacganacgncaagcacccacaggagccaacgcacgcacaccaagggggcacaccaaagaggacagcagngccaggaacangacgaagaccaagaccagggcaaaccgcagcagcccngacagccgcaaagacgacgggccaagcaacaccgacaccgggcgcaaggagaacga

SEQ ID NO: 119002 - DNA, 1110 bp, Zea mays
  Clone ID: MRT4577_40013C.1
atggatcctaaggggaagggaatcgtgatcaacgacaaagagaaggaatccttcgtcaacgagccgaaggacgacaagcctaccgactccggctcgggcaatagacggaaggaagggaagaagaagaagacgaggcgcatcaaggagatcgtctactacgacgacaacgatgagtctacttcttcccaaaaggatgacgaccacaacgactacgagagagggaaaccggaggcaaggtacgtggacgacgcattgaatggtccaatcaacgagcctcaaccccttgctctcaaggcaacaagaagcaaggaggcgctacctagcaaggtggcacaatttgaggcagccggacttaatgatgaagagatggccctcatcatcaagagattcaagacggcgctaaagggtcacaaggggcagccaagcaagaccaagacaaaggggaagcgctcatgcttcaaatgtggtaagcttggtcattttattgctaactgtcccgacaatgatagtgaccaagaaaaaggaaacaagagggagaagaagaaaaattacaagaaggccaagggcgaggcacatatcggaaaggagtgggattcggattgctcctcctccgactctgacaatgaaggactcgctgccactgccttcaacaagtcatccctcttccccaacgagcatcacacatgcctcatggcgaaagagaagaaggggagaagaagatgttcacctcctacgtcaaaaatgaggatccccatgattcaattatattcggtgatgggaaccaaggcaaggataagtctgaaacccaagggaccctcaaacgcttcctcaggagagctcaaaatgaaggtgaagaagataagaagcgacaacaggtctgaattcaagaatcttcaagtggaggagtttcttgaggaggaggggatcaagcacgagttctccgctccctacacacctcagcaaaatggtgtggtagagaggaagaacaggacactcattgatatggcaaggactatgctaggagaattcaagacccccgagtgtttttggtcggaagccgtgaacacggcttgccacgccatcaacagggttgtcggggaccataattag

SEQ ID NO: 119003 - DNA, 2101 bp, Zea mays
  Clone ID: MRT4577_40014C.1
cacaccattttgctgaggtgtgtagggagcggagaactcgtgcttgatcccctcctcctcaaggaactcttccacttgaaggttcttgaattcggacccgttgtcgctccttatcttcttcaccttgagctcaaactcattttgagctctccttaggaagcgcttgagggtcccttgggttttagacttatcctgcaaaaagaacacccaagtgaagcgggaaaagtcatcaacaataactagaccatacttacttcttcctatgctcagataggcgacgggtccgaagaggtccatatgtagcagctccaggggtcttgatgttgtcatcacatttttggtgtgatgagagcctcccacttgtttccctgcttgacaagctgcacaaggtctatctttttcgaaatgaacattggttaaacctatcacatgttctccctttaaaagcttgtggaggttcttcatccccacatgtgctaagcggcaatgccacagccagcccatgcaagtcttagccattaagcatgcatctagaccggcctcttcttttgcaaaatcaactaagtaaagtttgtcgtctagtacacccttaaaagctagtgaaccatcacatcttctaaagacagacacatctacatttgtaaataaacaattatatcccatttgacataattgactgacagatagcaaattatatccaagactctccactaagaatacatttgatatagaatgctcatttgaaattgcaattttacctagcccttttaccttgccttgattcccatcaccgaatataattgaatcttgggaatccttatttttgacgtaggaggtgaacatcttcttctcccccgtcatatggtttgtgcatccgctgtcaataatccagcttgaacccccggatgcataaacctgcagggcaaatttaggcttgggtcttaggtacccaactcatgttgggtcctgcaaggtttgcacaaatgttcttagcgcatttgaagcatgagcgcttccccttggctttggtcttgcttggctgccccttgcgacctttaagcgccgtcttgaagcgcttaatgatgagggccatctcctcatcattgagcccgaccgcctcaacttgcgccaccttgcttggtagcgcttccttgctccttgttgccttgagagcaatgggttgaggctcatgaataggaccgttcaacgcgtcgtccacgtatcttgcctccttgatcatcattcgcccgcttacgaacttcccaagaacttcttcgggcgacatcttggtgtacctgggattttcacgtatattgttcaccaaatgaggatcaagaacggtaaatgaccttagcattaggcggacaacgtcgtggtccgtccatcgcgtgctcccgtagctccttattttgttgataagggtcttgagccggttgtatgtttgggttggctcctcgccccttatcatcgcgaaccgtccaagctcgccctccaccaactccattttggtgagcaaggtgacgtcgttcccttcatgagagatcttgagggtgtcccagatctgcttggcattgtccaagccgctcaccttgtgatactcgtccctgcacaaagaggctagcaacacagtagtagcttgtgcatttttatgaatctgttcattaataaacacagggctatccgagctatcaaatttcattccactttccacaatctcccaaatgcttggatggagagaaaacaggtgagtacgcattttgtggctccaaaatccgtagtcctctccatcaaagtgagggggtttgccaagtggaatggggagcaattgagcatttgagctatgcgggatgcgcgaataatcgaaagaaaagtttgagttaaccgtctttcgtctatcgtagtcgtagtcgtccttttgggaggaggaagattcgtcgctgtcgtagtagacaatttccttgatgcgccttgtcttcttcttccttccgtcttttcttttgtggcccgagcctgagtcggtgggcctgtcatcattgggctcgttgacgaaggactccttctccttgtcgttgatcaccatccccttgcctttaggatccat

SEQ ID NO: 119004 - DNA, 266 bp, Zea mays
  Clone ID: MRT4577_40015C.1
gtcgagttcaaatctcacaatcttcttgtagcacaccactgtcttcgtccaactcggcggcgatgtctgggcgcggcatgggcggcaaggggctgggcaagggcggcgcgaaacgccaccgttagggtctccgtgacaacatccagggtattacgaagccggcattcctgaggctggcgaggtggggcggcgtgaagcgtatcttcgggcttatctactaggaaacccgcggcgtgcttaagatctttcttgagaatgtcattctt

SEQ ID NO: 119005 - DNA, 4935 bp, Zea mays
  Clone ID: MRT4577_40016C.1
atggatcctaagggcaaggggattgtgatcaatgacaaggagaaggagtcattcatcaacgagcccaaggatgacaagcctaccgactcgggccacaaaagcaaagatgggaagaagaagaagacaagacacatcaaggagatcgtctactacgacgacagcgatgagtccacttcttcccaaaaggacaacgacgacaatgactacgagagaaggaaaccggttaattcgaacttttcttttgactactctcgtattccacaaagtacaaatgctcatttgctctccattcctcttggcaaacctcctcactttgatggagaggactacgaattttggagccacaaaatgcgtagtcacctgttctctctccatccgagcatatgggagattgtggaaagtggaatgaaatttgatagctcggatagtcctatgtttatcaatgaacagattcatagaaatgcacaagctactactgtgttgttagcctccttgtgcagggacgagtatcataaggaggcaagatatgtcaacgacgcgttgaacggtccaatccatgagcctcaacccattgctctcaaggcaacgaggagcaaggaggcgctacctagcaaggtggcacaagttgaggcggccgggctcaatgatgaagagatggccctcatcatcaagcgcttcaagacggcgctaaagggtcgcaaggggcagccaagcaagaccaagacaaaggggaagcactcatgcttcaaatgtggtaaggttggtcattttattgctaactgtcccgacaatgatagtgaccaggaagaagggaacaagagggagaaaaagaagaattataagaaggcaaaaggcgaggcacatcttggcaaggagtgggactcggattgttcgtcgtccgactccgacaacgaaggactcgccgccactgccttcaacaagtcatccctcttccccaacaagcatcacacttgcctcatggcaagggaaaagaagggtctagatagaaccaaggtggataaaataaatgaattgattgatgctttgaatgataagaatagattgctagaaaagcaagaggatctcttatatgatgaacatgataagtttgtagaggctcaaaaatccctcgctttagaaataaagaggaatgaaatgctttcttgtgaattgtctacatgccatgactctatttctagtttaaaaagcataaacgatgacttgaatgctaagttggaaatagctaataaatcaacatcttgtgtagaatatgttgtggtttgcactaggtgtaaagattttaatgttgatgcttgtagtgaacacctagtttcaatttctaaattgaatgatgaagtggctagtcttaatgcccaacttaagactagcaaaagcgaatttgataagttaaaatttgcaagggatgcctacacgattggtagacacccctcaattaaggatggacttggtttcaagagagaagccaagaacttaacaagccataaggctcctatccccgccaaggagaaagggaaggcccctatggctagtagtgctaaaaagaaccatgcttttatgtatcatgataggagacatgctagaaacgcaaatagaagttatgatgcttttgattcacatgtttatgattcatatgctatgtttgcttctagttcttcctatatgcatggtagaaatgtagctaggagaaatactattaatcacatgcctaggagaaatggtgttaatgttcctaggaaaattaatgaaccttctacaatatatcatgcttgcaatgcttcatttgccatttgtagaaaggataggaaggtttatgcatccgggggttcaagctggattatcgacagcggatgcacaaaccatatgacgggggagaagaagatgttcacctcctacgtcaaaaacaaggattcccaagattcaataatatttggtgatgggaatcaaggcaaggtaaaagggttaggtaaaattgctattccatccgagcactctatatctaatgtgtttttagttgagtctcttggatataacttgttatctgttagtcaattatgcaaaatgggatataattgtctattcacaaatgtagatgtgtctgcctttagaagaagtgatggttcattagcttttaagggtatattagacggcaaactttatttagttgattttgcaaaagaggaggccggtctagatgcatgcttaattgctaagactagcatgggctggctgtggcatcgccgcttagcacatgtggggatgaagaaccttcacaagcttctaaagggagaacacgtgataggtttaactaatgtgcaattcgaaaaagatagaccttgtgcagcttatcaagcaggtaaacaagtgggaggagcgcatcacaccaaaaatgtgatgaccacatcaagacctttggagatgcttcacatggacctcttcggacccgtcgcctatctaagtataggaggaagtaagtatggtcttgttatagttgatgacttttcccgcttcacttgggtattctttttgcaggataaatctgaaacccaagggaccctcaagcgcttcctaaggagagctcaaaacgagtttgagctcaaagtgaagaagataaggagcgacaatgggtccgaattcaagaaccttcaagtggaggagttccttgaggaggaggggatgaagcacgagttctccgctccctacacaccacaacaaaatggtgtggtagagaggaagaacaggacgctcatcgatatggcgaggacgatgcttggagagttcaagacccccgagtgcttttggtcggaagccgtgaacacggcttgccacgccatcaatagggtctaccttcatcgcctcctcaagaagacatcgtatgagctactaaccggtaacaaacccaatgtttcgtattttcgagtttttgggagtaaatgctacattctagtgaagaagggtaggaattccaaatttgctcccaaagccgtagaagggtttttattaggttatgactcaaatacaaaggcatatagagttttcaacaaatcatcaggtttggttgaaatctctagcgacgttgtatttgatgagactaatggctctccaagagagcaagttgttgattttgatgatgtagatgaagaagaagttccaacggccgcaatacgcaccatggcgattggagatgtgcggccacaagaacaagatgaacgagatcaaccttcttcctcaacaatggtgcatcccccaactcaagatgatgagcaggaggcgtatgatcaagggggagcacaagatgatcatgtaatggaggaagaagcgcaaccgacacctccaacccaagttcgagcgatgattcaaagggataatcccgtcgaccaaattttgggtgatattaacaagggagtaactactcgatctcgattagttaatttctgtgagcattactcttttgtctcctctattgagcctttcagggtagaggaggccttgctagatccggactgggtgttggccatgcaagaggagctcaataacttcaagaggaatgaagtttggacactggtgcctcgtcccaagcaaaatgttgtgggaaccaagtgggtgttccgcaacaaacaagacgagcacggggtggtgacgaggaacaaggctcgacttatggcaaaaggttatgcccaagtcgcaggtttggactttgaggagacttttgctcctagcgctttcctcaacgggccaatcaaggaggaggtgtacgtggagcaaccccctggcttcgaggatgaacggtaccccgaccacgtgtgtaagctctctaaggtgctctatggacttaagcaagccccaagagcatggtatgaatgccttagagactttttaattgctaatgctttcaaggttgggaaagccgatccaactctttttactaagacttgtgatggtgatctttttgtgtgccaaatttatgtcgatgacataatctttggttctactaaccaaaagtcttgtgaagagtttagcagggtaatgactcagaaattcgagatgtcgatgatgggcgagctaagctacttccttgggttccaagtgaggcaactcaaggatggaaccttcatctcccaaacgaagtacacacaagatttgatcaagaggtttgggatgaaggacgccaagcctgcaaagactccgatgggaaccgacggacacaccgacctcaacaaaggaggtaagtccgttgatcaaaaagcataccggcctatgatagggtctttactttatttatgtgctagtagaccgaatatcatgcttagtgtatgcatgtgtgctagatttcaatctgatccaagggagtgtcacttagtggctatgaagcgaattcttagatatttagtcgctacgccttgcttcgggatctggtatccaaaggggtctacctttgacttgattggatattcagactctgactatgctggatgtaaggtcgataggaagagtacatcggggacgtgccaattcttaggaaggtccctggtgtcatggagttctaagaaacaaacttctgttgccctatccaccgctgaggccgagtacgttgccgcaggacagtgttgcgcgcaactactttggatgaggcaaaccttcagggactttggctacaatttgagcaaagtcccactcctatgtgataatgagagtgctatccgcatggtggataatcctgttgaacacagccgcacaaagcacatagacatccggcatcactttttgagagaccaccagcaaaagggagatatcgaagtgtttcatgttagctccgagaaccagctagtcgatatctttaccaagcctttagatgagcagaccttttgcaagttgcgtagtgagctcaatgtcttagattcgcggaatttggattga

SEQ ID NO: 119006 - DNA, 376 bp, Zea mays
  Clone ID: MRT4577_40017C.1
gcaggaaccgccccttattaataccttggttcgacagctttcttgtcggcggccgcccgtccaaaaacagggggggattttttaaaaggatcgtcgggttcaccccgactgataatactcgtacaaggcagtgacaatctgccgcacaagaagaatttagaattcacgacatgcacgatctcgacaagacgtaccggccaccatggaacgggggctatctatgccacccagagtgctttatttgaataaagaaaattccgcaacagtacatgcattccctagagcagccaggtagcagaacaataaccagaataagacgactacggtgactttcgatactaggacccaacaaggaaaacctgtgggatccattcca

SEQ ID NO: 119007 - DNA, 215 bp, Zea mays
  Clone ID: MRT4577_40018C.1
cttttgtcttgcaacgtaatagctcttttttggggcgacctaaattaaattaacgggccgccgttttccaccgcctggcctggaaaacccctggcgttccccaacttatccgccttgcagaccatccccctttggccggctggcgtattaccaaaaaggcccgtaccgttcgcccttccaaacagttgcccatcctgaatggcaattgggacccc

SEQ ID NO: 119008 - DNA, 4518 bp, Zea mays
  Clone ID: MRT4577_40019C.1
atggatcctaagggcaaggggatgatggtcaatgataaggagaaggagtccttcgtcattgatccaaaggatgacaagcctactgactcgggcacgagtcacaaaagaaaagacgggaagaagaagaaaacgaggcgcatcaaggagatcgtctactacgacgacagcgacgaatcctcttcttcccaaaagaacgacgacaacgactacgagaaaaagaagatggttaactcaaatttttcctttgattattctcgtattccgcaaagttccaatactcatttgttttccattcccctcgtatatgggagagtagaaaatggaatgcattttgatagtacggatagtcccatgttcatcaatgaacaaatccataaaaatgcacaagctactactgtccttttagcatctttatgcagggaagaatacaataaggtgagcggcttggacaatgccaagcagatctgggacaccctcaagatatcacatgagggaaatgacgtcaccatgctcaccaagatggagttggtggagggcgaacatgggagatttgccatgatcaggggagaggagccaacccaaacgtacaaccggctcaagaccctcatcaacaaaataaggagctatggaagcacacgatggacggaccacgacgtcgtccgcctactgctaaggtcttttactgtccttgatccacatcttgtaaacaatatttgtgagaatcctaggtacaccaagatgtcgcccgaagaagtacttgggaagttggtaagcgggcggatgatgatcaaggaggcaagatacgtcgacgatgcattgaatggcccaatccacgagcctcaaaccatggctctcaaagcaacaaggagcaaggaggcgctacctagcaaggtggcgcaagttgaggcggttgggcttaatgaggaagaaatgtccctcatcatcaagcggttcaaaacggcgctaaagggtcgcaaggagcaccccaacaagaacaagacaaaggggaagtgctcctgcttcaaatgtggtaagattggtcattttatcgctaattgtcccgataataatagtgaccaggaacaagataagaagagggaaaagaagaaagcttacaagaaggctaagggcgaggcacaccttggcaaggagtgggactcggattgctcgtcgtccgactccgacaacgaaggactcgctgcatcggccttcaacaaatcatccctcttccccaacgagcgtcacacatgccttatggcgaaggagaagaaggtatgtactcgaaacaatactatttatgcttcttcaagtgatgatgagtctagtgatgatgatgaaatagactattctagtttattcaaaggcttagatagaaataaaattgataagatcaatgaattgattgatgctttgaatgataagaatagattgttagaaaagcaagaggatattttgtatgaagaacatgataaatttgtagaggcacaaaaatctcttgctttagaagttaaaaggaatgaaatgctttcttgtgaactatatacatgccatgagtctatttctaacttaaagagtattaatgatgacttgaatgctaagttagaagtagcaaatagatctaactcttgtgtagaacatgttgtgatttgcaataggtgtaaagattttaatgttgatgcgtgtagtgaacatctagtgtccattacaaaactaaatggtgaagtggctagtcttaatgcccaacttaagactagcaaggatgaatttgacaaactaaaatttgcaagggatgcctacactattggtagacactcctcaattaaagatgggcttggcttcaagagggaagccaagaacttaactagtcataaggctcctattcccgccaaggagaaagggaaggcccctatgactaatagttgtcaaaagaaccatgctttcatgtaccatgataggaaattttctaaaaatgttcattatgataggagttgtaatgcttacaattcaaatgcaatgattgcctcaagttcttctattatgcataatagaaatttgactagaaaaaatgttatgcctagaagaaatgttgttcatgttcctaggaaagtaaacaatgaaccttctacaatttatcatgcttgcaatgctgcctttgcaatttgtagaaaggatagaaagttgattgctaggaaattaggggcaaaatgcaagggagataaaacttgcatttgggtccctaaggatattgtcactaaccttgtaggacccaacaagagttgggtttatgcatccgggggatcaagctggattatcgacagcggatgcacaaaccacatgacgggggagaagaagatgttcacctcctacgtcaaaaacaaagattcccaagactcaatcatattcgatgtgtctgtctttagaaggagtgatggttcattagcttttaagggtgtattagacggtaaactctatttagttgattttgcaaaagaggaggtagaccttgtgcagcttgtcaagcaggataagtctgaaacccaagggaccctcaagcgcttcctaaggagagctcaaaatgagtttgagctcaagcaaaacggtgtggtagagaggaagaacaggacgctcattgacatggcaaggacgatgcttggagagttcaagacccccgagcggttttggtcggaagccgtgaacacggcttgccatgccatcaaccgggtctaccttcatcgcctcctcaagaagacttcgtatgagcttctaaccggtaacaaacccaatgtgtcttactttcgtgtatttgggagcaaatgttatattcttgtgaagaaaggcagaaattctaagtttgctcccaaagctgtagaagggtttttgctaggttatgactcaaatacaaaggcgtatagagtcttcaacaaatcatcgggtttggttgaagtctctagcgacgttgtatttgatgagactaatggctctccaagagagcaagttgttgatcttgatgatgtagaagaagaagaggttccaacggccataatacgcaccatggcgattggagaagtgaggccacgggaacaaaaggagcaagatcaaccttcttcctcaacaatggtgcatcctccaactcaagacgatgaacagcctttcagggtagaagaggccttgctagatccagactgggtgttggccatgcaggaagagctcaataacttcaagagaaatgaagtttggacactggtgcctcgtcctaagcaaaacgttgtgggaaccaagtgggtgttctgcaacaaacaagacgagcacggagtggtgacaaggaacaaggctcgacttgtggcaaaaggttatgcccaagtcgcaggtttggactttgaggagacttttgctcctgtggctaggctagagtccattcgtattttgctagcatatgtcactcaccattctttcaggctgttccaaatggatgtgaagagcgctttcctcaacgggccaatcaaggaggaggtgtacgtggagcaaccccctggctttgaggatgaacggtaccccgaccacgttgggaaagccgatccaactttattcactaagacttgtgacggtgacttatttgtgtgccaaatttatgtcgatgacataatatttggttctactaaccaaaagtcttgtgaagagtttagcaggggtaatgactcaaaaattcgagatgtcaatgatgggcgagttgaactacttccttgggttccaagtgaagcaactcaaggagacaccttcatctcccaaacgaagtacacacaagacttgctaaagtggtttggaatgaaggacgccaagcccgcgaagacaccaatgggaaccgacggacatgtcaacctcaacaaaaggagtagaccggatattatgcttagcgtatgcatgtgtgctagatttcaatccgacccaagggagtgtcaccttgtggccgttaagcgaatccttagatatttagtcgctacgcgttgcttcgggatctggtatccaaaggagtctacctttgacttaattggatattcagacttcgactatgctggatgtaaggtcgataggaagagtacatcggggacgtgccaattcttaggaaggtccctggtgtcgtggagttcgaagaaacaaacttctgttgccctatccaccgctgaggctgagtatgttgccgcaggacagtgttgcgcgcaactactttggatgaggcaaaccctgcgggactttggctacaatctgagcaaagtcccactcctatgtgataatgagagtgctatccgcatggcggataatcctgttgaacacagccgcacaaagcacatagacatccggcatcactttttaagagaccacaagcaaaagggggatattgaagtgttttatgtgagcaccgagaaccagctagccgatatctttaccaagcctctagatgagtcgaccttttgcaggctgcgtagtgagctaaatgtcttagattcgcggaacttggattga

SEQ ID NO: 119009 - DNA, 1603 bp, Zea mays
  Clone ID: MRT4577_4001C.1
agagtgtgatcacctcggtgaggctctacgacgccaactcaaaggtgctcaaggccctggccaacaccgggatcacggtgatggtaatgctacccaacgacgtggccgccgtccgcgggcaggttccgggacgacatcgcgcggtcggtgatgaagcccatgatcgatttcctggagcggaccgggtcgtacctcaccgtgaacgcctacccgttcttcgcgtacgccgaggagccagacaagatctccctcgactacgccctggggaactccaacgccaccggcgtgcgcgaccccgtgaccgggctcgtgtaccacagcctcctggacgcccagctcgacgccacgtacttcgcgatggagaagctggggacgtccagatccagtgcgcgggggccaaaatccgtggcgccagcagcgcacgtttcggagagcgggtggccttccggcggcaaacccaaacgcggcggcaggccgcggccacgcccacgcggcggcgggaggcgtttggagttggagcaggctggaggtgaagcggcttcggtagccaacgcgcaagcgtacaacaactacctgatcaagcgcgtgctgtccggtgacacgggcaccccgtaccaccccgacgccgacatggacgtctacatcttctccctcttcaacgagaaccagaagggcgacggggcggacgacgtcgagcagcacttcgggctgttctacccgaaccggacgaaggtgtacgagttcgacttccggggcggcgcgctggtggccagctggtgcgtggcgaacgcgtccgccggggacgcgcggctgcaggcggcgctggagtacgcgtgcggccacggcgccgactgcggcgccatccagcccggcgcgccgtgcttcgagcccgacaccaggctcgcgcacgcctcgtatgcgttcaacagctactaccagcgcaacggccgggccaaggcggcgtgcgacttcgacggcgccgcctacgtcgtgtatcacgaaccagctggcacctgtgacccgaacgtgagctggtgcgtggcgaatgcggcggccggcgacgcgcggctgctggcagcgctgaactacgcgtgtgccaacggcgcggactgcggcgccatacagcccggcggagcgtgcttcgagcccaacaccgtggtcgcccacgcctcgtacgcgttcaacagctactaccagcggaaggggcggggcagcgggacgtgcgacttcgccggagccggttccgtggtctaccacgcgccaaagattattgggaagtgcgtcctcccgtcgaaagcttggattcaagaaacaacaacagtcaagtctagaggattcaagacaagttcggtttaacctcgtactaggaacgtagaataatgtaaacattggcatctgcacatcaggataactgatgtctttgtgttgctttgcttttcggacactcatgaaccatcgttcctgtttcctgaggcggatctcctgctaggtttggttcccggcttctggctttatcggatactgtagcttttttaaaaatacatctggggtccttaacttttttaaaaaaaaaaaaaaaaaaaaaaaaaaaaaaaaacgctca

SEQ ID NO: 119010 - DNA, 1340 bp, Zea mays
  Clone ID: MRT4577_40020C.1
cctcgcggggggagggcggaatccgcacgcacggacgcgccctcccagatctcccgcctccggcaaacaaaatgcccccactctcaccgcccgcatcgctgacccccgctgctggcggtcggcgacggtggaagtgccgcctcagtcccactatcgcacgtgaccgctgctacactcgctccttccgctccgcggggctccgcccggcggccattccgctccccgatggcgccgtcgtacacctgtggctcccgcctcctgccgccgaccccgccaagcccctataccctgttctgcttctccacggcttcggcgcacaagccacctggcagtgggcgcccttcctcggcccgctcctcgctgccggtctggccccctatgtcccggacctcgtcttctttggcgcctcatcctcccccgcagcagaccgctccccggtctatcaggctgcctgtgttgccgccgctatggccgcgcttcctggcgccccgcagcggtacgccgtcgtcggggtcagttacggcggcttcgtagcataccacctcgcccacgcgtttccggcagcggtggagcggcttgtactagtcgcggccggtgtttgcctcgaggaggccgatctggccgcggggctctttgccgttgaggatatcgccgaggctgcaagtcttttgctgccccagcggccggaggatctccggaggttggtggggctcaccttctgccgccctcagcggttcatgccgtcctgtttcatcagagattacatcagggttatgtgcacggaaaatgtaaaagagaagagggagttgctgtatgcattgatcaatggcaggaagctttcagaccttcctaaaattaaccagcaaaccttgataatttggggagagcaggaccgggtctttccattggaacttggattacggctgaaaaggcatctgggtgatacttccgaactaatcattgtcaagaatgccggtcatgccataaatcgcgaaaagccagcagaactttgcagactgataaagcactacatcgttgatccctcagtcaaatgtcgagatgaccgtaagggatcttggaagaatgcgataaagaggtttgttgggtcgagcctgaggaaggtggactcttctcgaccgctgctatagcaattgacgtatatatattgacttttacgtgcagcagatttgttatctgattgtgacacgcaattaagtaattaacgatgtgtaatgtccagtagccactattattgtgtaactagcattggcagacatctgttcaaaaaatacttgtgcaatatgtataatgcaaatgattaataatttcttagttacagc

SEQ ID NO: 119011 - DNA, 621 bp, Zea mays
  Clone ID: MRT4577_40021C.1
gtagagagtcacttgcaccgggggagcggagatgaagccggttgtggggatcgtggtgtcgaacaagatgcagaagtcggtggtggttgcagtggaccgtctcttccacaacaaggtatacaaccgctacgtcaagcgcacctccaagttcatggcacacgacgatgacgactcctgcaacattggcgaccgggtgtgatgctcattggggaagagggccgacttgttgaaggtggtggcggcgagtccttcgttgtcggagttggacgacgaacaatccgagtcccactcctttccaaggtgtgcctcgcccttagctttcttgttaggctggatccttctaggcccttgagcagacacaagcactgggttgttgctgaaattctccgcagagctaaggtgtacgttccaccagctgcaacagcgtccagtgaacgtggtagcaaatctcaacaagctggtggtgctaccaaatgatccatctgaagttactcagaacaagatgcagtcacggcttgtttttctttcgctgtatgtttgtttccttgtggaatgtggttgccatgtttagcatgggagaaaaatagcaagcaccagcatctttgcttaattactgtgtct

SEQ ID NO: 119012 - DNA, 775 bp, Zea mays
  unsure (1)..(775): unsure at all n locations
  Clone ID: MRT4577_40022C.1
gggcaactgggcgatacttacgaactaatcattgccaagaatgccggtcatgccataaatcgtgaaaagccagcagaactttgcagactgataaagcactacatcgatgatccctcagtcaaatgtcgagatgaccgtacggtacacaattgaatggtatatcatgggattcttgaaaccctttaggtcttgttcaattagaggttgatcgaagaggattaaatctcttgctagtcaaaattgactagaaagatttagggcatgtttgattcgtgactaaatgtttcacgctttgcttaaggttaatcgttcgaatcgaagaactaaccttacagaaaagttaggcaaaacgtgacaacttagttagcgaaccaaacatacccttaatctctctgtctcctgtggtcccatgcaacccaacaaggccttagacccttaacaggaagagttgcagttgcctgagtcannnnnaaagaatcccatgtatcannnnnnnnnnnnnnnnnnnnnnacaaactttgcttccctttgcagggatcttggaagaatgcgataaagaggtttgttgggtcgagcctgaggaaggtggactcttctcgaccgctgctatagcaattgacgtatatatattgacttttacgtgcagcagatttgttatctgattgtgacacgcaattaagtaattaacgatgtgtaatgtccagtagccactattattgtgtaactagcattggcagacatctgttcnnnnnntacttgtgcaatatgtataatg

SEQ ID NO: 119013 - DNA, 385 bp, Zea mays
  Clone ID: MRT4577_40023C.1
agatcgcagactctacaacttttcaataaataagtggttacaagccttttgaactaagggtacaatacaacgataacttacgaaagaattgcatataccctacatagtaatctcccccctataactagcacaatctctgcacccttgcgcaatccgtccaccccctttcgtcttacacatataatgatttaatacaaaagaatgtgtacatttgactacctggtatatggtatatgcggcctatttacatcgtgctctttgccacaatgaaacaaaaatattgccttatgttcttgtcagaactctggttcggaccattcatattaaaccttttgccacccgccggtgcctcctggagaatatttttgagaaaaaagaaaatgta

SEQ ID NO: 119014 - DNA, 4341 bp, Zea mays
  Clone ID: MRT4577_40024C.1
atggatcctaagggaaaggggatggtggtcaacgacaaagagaaggagtccatcttcaacgagccaagagacgacaagcccactgactctagctcgagtcacaagaagaaggacgggaagaagaagaggcgcatcaagaagatcatttactacgatagcgacgcctcctcttcttcaccaagagacgacgacgaaaatgactcgtcgaaaaagaaatcggtgagaggcttggacaacgccaaacaaatctgggacaccctcaagatatctcatgagggaaacgacgccaccatgatcaccaaaatggagttggtggaaggcgggctagggagatttgcgatgatcaggggagaggagccaacacagacctacaacaggctcaagaccctcatcaacaagattagaagctatggaagcacaagatggacggaccacgacgtcgtccgacttatgctaaggtcattcacagtaattgacccccatcttgtaaaccttattcgtgaaaatcccagcagggaggcgctaccaagcaaggtggcacaagttgaggctgccgggctaaacgaagaagagatggctctaatcatcaagcgcttcaagaccgcactaaaaggacgcaaggagtaccccaacaagaacaaagcaaggggaaagtgctcctgcttcaaatgcggtaagactagtcatttcatagcacaatgccccgataatgataatgaccaggaacaagaaaagcatgggaagagggagaagaagaaggtttacaagaaggcgaagggcgaggagcaccttggcaaagaatgggattcagactgctcttcatccgactctgacgatgaaggattggttgcctcgaccatcgacaaatcttcgctcttccccaacgaacgccatacatgtcttatggctaaggaaaagaaggtatgtattcggaacactcccaagtatacttcttctagtgatgaagagtcatctgatgatgaagtggactatattgatttgtttaaaggcttagatcgaaacaaagtagacaaaattaatgaattaattgatgcccttaatgaaaaggatagattgctagagaagcaagaagatattttgtatgaagagcatgacaaatttattagtgttcagaaatctctcgctttagaaattaaaagaaatgaagtgctatcctctgaattgtttgcttgccatgaatctgtctctagtttaaggagtttaaaggatgaattaaatactaagctagaggaggttagtaaaataaattcatgtgtagagcatgttagtatttgtaatagatgcaaggactttgatgttgatgcatgtaacgaacatcttatttctattactaagttgaatgatgaagtggcaggtcttaatgctcaacttaagacttgcaaaaataattttgataaattaaagttttctagggatgcctacactgttggtagacacccctcaattaaggatggtcttggttttcaaaggaaaaccaagaactcaacaagccaaaaggctcccattctcaccaaggagaaagggaaggcccctatggctagtagtcctcaaagaaaccatgcttttatttatgataggaaaagtgctagtcacaataagagtcatattcatgttgcttataatgattcccatgctatgtttgcctctagctctacttttgtgcatggtagaagtaggcctaggagaagtaatattgtacctcatgtgcctaggagaatgtgcaatgaaccttctaccatttaccatgcttgcaatacttcatttgcgctcttatgtttatgcatccgggggctcaagctggattatcgacagcggatgcacaaaccacatgacgggggagaagaagatgttcacctcctacgtcaagaacaaggattcctaggattcgatcatctttggagatgggaaccaaggcaagatgtatctgtctttataaggagtgatggttcattagcttttaagggtgtattagacggcaaattctacttagttgatttttcgaaagaggagaccgatctagatgcatgcttaatagctaagactagtatgggctggctgtggcatcgtcgtctagcacatgttgggatgaagaaccttcataaacttctaaagggagaacatgtgttaggactaaccaatgtttgcttcgagaaagatagaccttgtgcagcttgtcaagcagggaaacaggtgggaagcactcatcacagcaagaatgtgatgacaacatcaagacctctggagcttcttcacatggacctcttcggacccgttgcctaccttagcatcgggggaagtaagtatggtcttgtaattgttgatgatttttcccgcttcacttgggtgttctttttgcaggataaatcagaaacccaagggaccctaaagcgctttctaaagagggctcaaaacgaatttgagctcaaggtgaaaaagataagaagcgacaacgggtccgagttcaaaaaatttcaagttgaggaatatcttgaggaggaaggcgtcaagcacgagttctccgctccctacacaccacagcaaaacggtgtagtagagaggaagaacaggacgcttattgacatggtgaggacgatgcttggagagtccaagatgcccgagcggttttggtcggaagctgtgaacgcagcctgccacgccataaaccggctatatctgcatcgcctcctcaagaagacctcctacgaactccttatcggtaacaaacccaatgtctcttactttcgtgtatttgggagcaaatgctacattttggtgaagaaagtctctagcgatgttgtatttgatgagactaatggctctccaagagagcaagttgatcttgatgacatagatgaagatgatgttctgacggccgcaatgcgcacgatggcgataggagaggtgcgaccacaggaacaacaggagcaagatcaaccatcttcctctacaatggtgcatcccccaactcgagatgatggacaggttcctcaagaagaggcgcgtgatcaaaggggagcacaagaagaacaagttatggaggaagaagcaccactggcccctccaactcaagtccgagcgatgatccaaataaatcaccccgtcgatcagattctaggtgacataagcaagggagtaacaactcgctcacgtttagctaatttttgtgaacattactcgtttgtctctactattgagcctttcagggtagaagaggccttgcaggatccggactgggtgttggccatgcaggaagagctcaacaacttcaagaggaacgaagtttggagcctggtgccacgtccaaagcaaaatgttgtgggaaccaagtgggtgttccgcaacaaacaagacgagcacggggtggtgataagaaacaaggctcgacttgtggcaaaaggttatgcccaagtcgcaggtttggatttcgaggagacttttgctcctgtggctaggctagagtcaattcgaatattattagcctatgccgctcaccactctttcaggttgtttcaaatggatgtgaagagtgctttcctcaatgggccaatcaaggaggaggtgtacgtggaacaaccccctggctttgaggatgacaggtatcccgaccatgtgttcaaactctctaaggcgctctatggacttaagcaagccccaagagcatggtatgaatgccttagagatttcttaattgctaatgctttcaaggttgggaaagccgatcccactcttttcactaagacttgtgatggtgatctttttgtgtgccaaatttatgtcgatgacataatatttggttctactaaccaaaagtcttgtgaggagtttagcagggtgatgactcaaaaatttgagatgtcgatgatgggcaagttgaactacttccttgggttccaagtgaagcaactcaaggacggcaccttcatctcccaaacgaagtacactcaagatcttctcaagcggtttgggatgaaggacgccaagcccgtgaagacacctatgggaaccgacgggcatgtcgacctcaacaaaggaggtaagtccgttgatcaaaagacataccggtctatgatagggtcattactttatttatgtgctagtagaccggatattatgcttagcgtatgcatgtgtgctagatatcaatccgaccccagggaatgtcaccttgtggccgttaagcgaattcttagatatttagtttatacgccttgcttcgggatctggtatccaaaggggtctacctttgacttgattggatactcagactctgattatgctggatgcaaggttgataggaagagtacatcagggacgtgctaa

SEQ ID NO: 119015 - DNA, 196 bp, Zea mays
  Clone ID: MRT4577_40025C.1
ggaaagaagccgaagcccctttgaccaaaagtgtgaacatccagggaaaaagcccctcgcccccgcaatttggaagacacggaactcggggtcgcggccgctcaaaatatattcttgggggggcggggggcacaaaaaaaaaaacacactggccatttcattggcaaaacgccttaaaaaagccccaagaccccat

SEQ ID NO: 119016 - DNA, 106 bp, Zea mays
  Clone ID: MRT4577_40026C.1
caggcaacgaacaggacggcacaaggcaggatacatttgtttgtcctgccctgggcgaacaagggttattattgcgcccgcaaaatgtctacagagatttcatgac

SEQ ID NO: 119017 - DNA, 423 bp, Zea mays
  Clone ID: MRT4577_40027C.1
attccttggtttagacactcatcctcctactaccttcaaatatggcttggtttatatctattctcctccattcaaccgataggtccttaatcaatgttggctgtacatttttaccaaaaataatctccctattactaaaaaatattctacttataaacaataagcttagtctataactcatttatcatataatactaaccattttcacaataatatttataatctccatcataacctttcactctacactcatattaaacatcaatttcacaatcctaaattttatacctacatttctacccatactatccattatttcccaacttattgctacatccttcatgttaaatatctccatttctacatgaataatcttcataataaaaatttcaatgatctttcatactacaacattcttttaac

SEQ ID NO: 119018 - DNA, 2286 bp, Zea mays
  Clone ID: MRT4577_40028C.1
atgacgggggagaagaagatgttcacctcctacgtcaagaacaaggattcacaggatacgattatctttggagatgggaatcaaggcaaggtcaaaggtttgggaaaaatagccatcacaagcgagcactctatttccaatgtatttttagtagagtcattaggatacaacctcctgtctgtaagtcaattgtgtcacatgggttacaattgtctttttacaaatgttgatgtatctgtctttagaaggagtgatggttcattagcttttaagggtgtattagatggcaaactctacttagttgattttccaaaagaggaggccgatctagatgcatgcttaatagctaagactagtatgggctggctgtggcattgccgtctagcacatgttgggatgaagaaccttcataaacttctaaatggagaacatgtgttaggactaaccaatgtttgttttgagaaagatagaccttctgcagcttgtcaggcagggaaacaagtgggaagcactcatcacaacaagaatgtgatgacaacatcaagaccactggagcttcttcacatggacctctttggacccgttgcctaccttagcatcaggggaagtaaggatggtctcgataagtcaaaaacccaagggaccctaaagcgctttctaaggagggctcaaaacgaatttgagctcaaggtgaaaaagataagaagcgacaacgggtccgacttcaagaatctcaaatgttacattctggtgaagaaaggtagacactctaaatttgctcccaaggcagtagaagggtttttactagggtatgactcaaatacaaaggcgtatagagtcttcaacaaatcatcgggtttggttgaagtctctagcgacgttgtatttgatgagactaatggctctccaagagagcaagttgatcttgataacatagatgaagatgatgttccaacggccgcaatgcgcacgatggcgataggtgatgtgcgaccacaggaacaacaagatcaagatcagccatcttcctcaacaatggaagagctcaacaacttcaagaggaatgaagtttggagcctggtgccacgtccaaagcaaaatgttgtgggaaccaagtgggtgttccgcaacaagcaagatgagcatggggtggtgacaagaaacaaggctcgacttgtggcaaaaggttatgcccaagtcacagcctatgccgctcaccactctttcaggttgtttcaaatggatgtgaagagcgctttcctcaacgggccaattaaggaggaggtatacgtggaacaaccccctggctttgaggatgacaggtaccctgaccatgtatttaagctctctaaggcgctctatggacttaagcaatccccaagagcatggtatgaatgccttagagatttcttaattgctaatgctttcaaggttgggaaagccgatcccactcttttcactaagacttgtgatggtgatctttttgtgtgccaaatttatgtcgatgacataatatttggttctactaatcaaaagtcttgtgaggagtttagcagggtgatgacacaaaagttcgagatgtcgatgatgggcgagttgacctacttccttgggttccaagtgaagcaactcaaggacggcaccttcctctcccaaacaaagtacactcaagatcttctcaagaggtttgggatgaaggacgccaagcccgcgaagacaccaatgggaaccgacggacatgtcgacctcaacaaaggaggtaagtccgttgatcaaaaggcataccagtctatgatagggtcattactttatttatgtgctagtagatcgagcattatgcttagtgtatgcatgtgtgcaagatttcaatccaaccccaaggaatgtcaccttgtggccattaagcgaattctcaggtatttagttgctacgccttgcttcgagatctggtatccaaaggggtctacctttgacttgattggatattcagacttcgattatgccgggtgcaaggttgataggaagagcacatcggggacgtgccaatttctaggaaggtccctggtgtcgtggagttcaaaaaaacaaacatctgttgccctatccaccgctgaggccgatctcaaaggtgcattgaaagggaaaatgaacttggatgttgcaaagacttccattgcactctggtattggtgtatttacttccaagttcatacttatgctcttattgcctttttgctcttaattgacatttttggtgaggcaatggggttaaagggccaagaatga

SEQ ID NO: 119019 - DNA, 1917 bp, Zea mays
  Clone ID: MRT4577_40029C.1
cctcgccggccgggggggcgctagcccctgcccaggataacacgtacggtgtggagctgccccaaaaagcaaagcgaaggaaaggaaaagaaaggagaggagaagagaggagggaggaaggggatgattggtagcgtcgtcgtccggccgcttgcccgccggtagctcgtgctcgctctctcaattctctcccgccggcgcgctcgaccgcccgcggctcgccctcatggtggagtcggaggacgaggcggaggcggcgtgcgcggtcgtgctgacgccgccgctgtcgctggagggcggccttgcggcggagctccgcccggccaatctcgcccagcgggtgctcagcctcttcctcaacgtccgcccgggctctgacctctcccacttccagctgccggcgacgttcaacctgcccaagtcgcagctgcagctgtacggcgagggcgtgtactgcgccggcgacgaccgactgggagacagcccacaggcgaagcggcgggggaggacacggcgaggaggttcgccaaggagaggaacgacaggggggagggggacgcccaagcacttctcactgcgcagaacaagagcggcgactgggagtgctggccgctggaggactccgtgccgccggctcctattgtcgtcccctcctcctcctcatcacatcatgaaagatctatgaatccacagtacacacatacggtacagaagtgagagaaacaatgttcatggaacaaacgatgaacagcctattttggtctgctggggcggtgcgcgcgggggcggtctgcctggactgcctggcgtgcgtggtggcgtggagcatctccgcgacgcggccccccatcttcggcttcgcgccctacaacccggtgctaggggagacgcaccacgtctccaccacctccggctgcggcggcggcctcaacgtgctcctggagcaggtctcgcaccggccgcccgtgacagcgctgcacgccacggacgcccgcggggaggtgcggctggtgtggtgccagagccccgcgccgcggttccacggcgccagcgtggaggccgcggtgcgcggcgcgcgggagctccgcctgctccggcacgccgagacgtacgttatcgggtgccccggcctgctgatccgcctcttcccgtcgcccgcctgcgagtggtccggcgacgtccgcgtcgtctgcgccgagtccgggctcgaggcccagctcagctactgccggacccgccgctccttcctcggcttcggcggcggcgacgcccgctgcgtcaggggcaggatcttccgctcggctgagcccggagacaccctgtgcgagatcgacgggttctgggaccgccaggtcacgcgcagggacctcgccaccggcgaggtctccgtgctctacgacgcgcagcgcgccatcggtgacctcgccacgcccgtggtgcaagaccgaaagggcgtgtcggcctcggggtcggccaaggtccggcgaggtgagcgacgcgatcctgaagaaggactgggagacagcccagcaggcgaagcggcgggtggaggacacggcgaggaggttcgccaaggagaggaacgacaggggggaggtgtggacgcccaagcacttctcgctgtcgcagaacaagagcggcgactgggagtgctggccgctggaggactccgtgccgccggctcctattgtcgtcccctcctcctcctcatcatcatgaaagatctatgaatccatagtacacacatacggtacagaagtgagagaaacaatgttcatggaacaaacgatgaacagcctgttttggtcgtcgtaatctatacgtaaacggatccagtctgtatctgtattctgtacatccccactgggcatgatggatggttttactaccgctgctaaaaaaacccaaacaaaaccc

SEQ ID NO: 119020 - DNA, 292 bp, Zea mays
  unsure (1)..(292): unsure at all n locations
  Clone ID: MRT4577_4002C.1
caaccactcctnnatcnacntcnccnnnnnatctaacatntgcatcgnnatgaaanttcggttnncgactaggagtatgcctcatagtanaaatnntcacangcngatncctagcaatacactacacgnctgcnnncataacagnattctcatagtcacccacatctgccgagacgtangactacggctgactantccgatacctacncgccaacggcgcctcaatanttttcatctgcgtattcctncatgtgggacgaggactatactatggatnctacactttcctaga

SEQ ID NO: 119021 - DNA, 293 bp, Zea mays
  Clone ID: MRT4577_40030C.1
cccacgcgtccggcgacgcgtccgcggacgcgtgtgcacgcacagcgcgagcatcccgtgcatcatctaggtcgtcccgtgattaggatggatcgatagtcgatcgtatatgcatgtttgtacgggtttgtgtcataatgagtcgatcgatcatgttggttacgctttgtatgtcggtatggaggtgcatctgcgtgcgggctagaatagatcactgcaggctgggcttcatcgaggccatgtatccagctgtgtgtaatgatgcaatggagaacgagccagaaagaatgctt

SEQ ID NO: 119022 - DNA, 5034 bp, Zea mays
  Clone ID: MRT4577_40031C.1
atggatcctaagggaaaggggatgatgatcaacgacaaggagaaggagtccttcctcaatgagccaaaagacgacaagcccactgactcgagctcaagtcacaagaagaaggatgggaagaagaagaggcgcatcaagaagatagtctactacgacagtgacgagtcctcttcttcccaaaaagacgacgacgacgagaaaaagaaaacggtcaactcaaacttttcttttggttattctcgtattccgcaaaattccaatgctcatttgctttccattcctcttggtaaacctccacactttgatggagaggactacggattttggagtcacaaaatgcgtagccatttgttctctcttcatccaagtatatgggagatagtagaaaatggaatgcaatttgatagtatggataatcccatgtttatcaatgaacaaattcataaaaatgcacaagctaccactattcttttagcatccttgtgcagggaagagtatcataaggttggcggcttggataatgccaagcaaatttgggacatcctcaagatctcacatgaggggaacgacgccaccatgatcaccaagatggagttggtggaaggcgaactaagaaggttcacaatgatcaggggggaggagccaactcaaacgcacaacaggctcaagaccctggtcaacaaaatcaggagctatggaagcacgagatggcggaccacgacgtcgtacaccaagatgacgcccgaggaaatactcggagagtttgtaagcgggcgaatgatgatcaaggaggcaagatatgttgatgaggcattgaatggcccaatgccgatccacgagcctcaaactgttgctctcaaagcaacaagcagcagggaggggctacctagcaaggtggcgcaagttgaggcggccgagctaaataaggatgaaatggccctcatcatcaagcgcttcaagacggcgctcaaaggtcgcaaagagcatcccaacaagagcaagacgaagggaaagcgctcctgcttcaagtgtggtaagattggtcactttattgctaactgtcccgataatgatagtgaccaggaacaaggaaagaatgggaagagagagaaaaagaaggtctcaagaaggctaagggcaaggcacaccttggaaaagaatgggactcggattgttcttcgtccgactccgacgacgaaggactcgccgccacggccttcatcaaatcgtctctcttccccaacgagcatcacacttgcctcatggcaaaggagaagaagatgtaaggattttaatgttgatgcatgtgttgagcaccttacttctattacaaaattaaatggtgaagtggctagtcttaatgcccaacttaagactagcaaaaatgactttgataaattaaatattgctacggatgcctacactgttggtagacacccctcaattaaggatgaacttggctttaagagcggatgcacaaaccacatgacgggggagaacaagatgttcacctcctacgtcaagaacaaagattcccaagattcaatcatatttggtgacgggagtcaaggcaaggttaaaggactaggaaagatagctatttcatccgagcattccatatctaatgtgtttttggttgaatcgctcagaaggagtgatggttcattagcttttaagggtgtactagacggcaaactctatttagttgacttttcgaaggaggaggccaatctagatgcatgcttaatcgctaagactagcatgggctggctgtggcatcgccgtctagcacatgtgcggatgaagaaccttcacaaacttctaaagggagaacatgtgttaggtctaacaaatgtaactttcgaaaaagatagaccttgtgcagcttgtcaagcaggtaaacaggtgggaagctctcatcatagcaaaaacgtgatgaccacatcaagacctttggagctacttcacatggacctcttcggacccgtcgcctacctcagcatcgagggaagtaagtatggtcttgttattgttgatgatttttcccgcttcacttgggtattctttttgcaggataaaacagaaacccatgggacactaaagcgcttcctaaggagagctcaaaacgaatttgagctcaaggtgaaaaagataaggagcgacaacgggtccgaattcaagaatcttcaagtggaggagtaccttgaggaggaaggagttaagcacgagttctccgctccctacacaccacaacaaaacggtgtggtagagaggaagaacaggacgcttttagacatggcaaggacgatgctcagtgaattcaagacgcccgaacggttttggacggaagctgtgaacactgcttgtcatgccataaaccgggtttatcttcatcgcctcctcaagaagacgtcgtacgaactcctaactgtgaagaaaggtaggaattccaaatttgctcccaaagctgtagaagggtttttgttaggttatgactcaaatacaaaggcgtatagagtcttcaacaaatcatcgggtttggttgaagtctctagcaacgttgtatttgatgagactaatggctctccaagagagcaaattgatcttgatgatgtagatgaagaagatgttccaacggccgcaatacgcaccatggcgattggagatgtgcgaccacaggaacaaaaggagcaagatcaaccttcttcctcaacaatggtgcaccctccaactcaagatgatgaacaggttcatcaagaagaggcgtgtgatcaagggggagcacaagatgatcatgttatggaggaagaagcaccacaggctcctccaactcaagtccgagcgacgattcaaaggaatcatcccgtcgaccagatattgggtgatataagcaagggagtaactactcgctctagattagctaatttttatgagcattactcgtttgtctcttctattgaacctttcagggtagaagaggccttgctagatccggactgggtgttggccatgcaggaagagctcaacaacttcaagcgaaatgaagtttggacccttgtgccacgtccaaagcaaaacattgtgggaaccaagtgggtgttccgcaacaaacaggacgagcacggggtggagacaaggaacaaagctagacttgtggcaaaaggttatgcccaagtcgcaggtttggactttgaggagacttttgctcctgtggctagggtagaatctattcgtattttgttagcctatgccgctcaccattctttcaagttgttccaaatggatgtgaagagcgctttcctcaacgggccaatcaaggaggacgtgtatgtagagcaaccccctggctttgaggatgaacggtaccccgaccacgtgtgtaagctctctaaggcgctctatggacttaagcaagccccaagagcatggtatgaatgccttagagactttctaattgctaatgctttcaaggttgggaaagccgatccaactttattcactaagacttgtgatggtgacttatttgtatgccaaatttatgtcgatgacataatatttggttctactaaccaaaagtcttgtgaagagtttagcagggtgatgactcaaaaatttgagatgtcgatgacgggcgagttgaactacttccttgggttccaagtgaagcaactcaaggatggcaccttcatctcccaaacgaagtacacacatgatttgatcaagcggtttgggatgaaggacgccaagctcgcaaagactccaatgggaaccgacagacatgtcgacctcaacaaaggaggtaagtccgttgatcaaaaggcataccggtctattataggttctttgctttatttatgtgctagtagaccggatattatgctaagcgtatgcatgtgtgctagatttcaatccgacccaagggagtgtcaccttgtggccgttaagcgaattcttagatatttagttgctacgccttgcttcgggatctggtatccaaaggggtcaacctttgaattaattggatattcggactctgattatgctggatgcaaggttgataggaagagtacatcagggaagtgccaattcttaggaaggtccctggtgtcttggagttataagaaacaaacttctgttgccctatccaccgctgaggccgagtatgttgccgcaggacagtgttgcgtgcaactactttgcatgaggcaaaccctccgggactttggctacaatctgagcaaagtcccacttctatgttataatgagagtgcaatccgcatggcggacaatcctgttgaacacagccgcactaagcacatagacattcggcatcactttttgagagaccaccagcaaaagggagatatcaaagtgttttatgttagcaccgagaaccagctagccgatatctttaccaagcctttagatgagaagaccttttgtaggctgcgtattaggttgggacaagaggctaccgtatgcaaaattctcctacaacaacagctatcaagccagtctgaagatgtcaccattcgaaacgctctatgggaggcattgcagaactccattgcattgggaccaacccgaagaagggaactcagtttcgaagtgggagactatgtctacttgaaagtgtcacccatcagaggaaccaaaaggtttggagtcaaaggcaagctagcccctcgctatattggcccgtaccagattcaggcaagacgtggagaagtggcttatcaactcagcttaccagagaacctgtctgcagtgcatgatgtgtttcatgtgtctcagttgaagaaatgcttgagagtgccagaagagaagttgccaacggaagaccttgaagttcaagaagatctgacttatattgagaagccaacgcagattctggagacagcaaatcgggtcactaggaggaacaccatcaggatgtgcaaagtcaaatggggccatcactcagaagaagcaacctgggaaagagaagatgatctgagagcccagtaccctgaactctttgctagccagccctga

SEQ ID NO: 119023 - DNA, 3687 bp, Zea mays
  Clone ID: MRT4577_40032C.1
atggatcctaagggaaagggaatggtggtcaacgacaaggaaaaggagtccatcttcaacgagccaagagatgacaagcccactgactcaggctcgagtcacaagaagagggacgggaagaaaaagaggcgcatcaagaagatcatatactatgacagcgatgcctcctcttcttcaccaagggaggacgatgacgatgacgactcgtccaaaagaaagacgcatctctgtgccagggatgaatataacaaggttagcggcttggacaacgccaaacaaatctgggacaccctcaagatctcgcatgagggaaatgatgctacaatgatcaccaagatagaactggtggaaggcgagctgaggagattcgccatgatcaggggagaagagccaacacaaacctacaacaggctcaagaccctggtcaacaagatccgaagctatggaagcacaagatggacggatcatgacgtcgtccgactcatgctcaggtcatttacggttattgacccccatcttgtgaatcttattcgtgaaaaccccaggtacaccaagatgacgtccgaggagatactcggaaaatttgtaagcgggcatatgatggtgaaagaagctcgatacgtagacgatgcactaaacggtccactacccgtctacgagccacaacccattgctctcaaagcaaccagcagcagggaggcgctaccaagcagggtggcacaagtggaggctactgggctcaacgaggacgaaatggcacttatcatcaagcgtttcaagaccgcgctcaaaggacgcaaagagtaccccaacaagaataaaataaggggaaagcgctcatgcttcaaatgcggtaagactggtcactttatttctcaatgtcccgataatgacaatgaccaggcacaagaaagacatgggaagaaggagaagaagaagaattataggaaggcgaagggcgaggcgcatcttggaaaagaatgggattctgactgctcttcatccgactccgacgatgaaggactggctgcctcgaccttcgacaagtcttcactcttccccaacgaacgtcatacatgtcttatggctaaggagaagaaggtacatattcgagatactcctaagtactcttcttctagtgatgaggaatcttctgatgatgaagtagattactctgaattgtttaagggtttagatagagctaaggtttatgcatccgggggctcaagctggattatcaacagcggatgcacgaaccacatgacggaggagaagaagatgttcacctcctacgtcaagaacaaggattcccaagatacgatcatctttagagatgggaaccaaggcaaggtgaaaggcttgggcaagatagccatcactaacgagcaatcaatatcaaatgtatttttagtagagtcgctcggaagaagtgatggttcattagcttttaagagtgtattagacggcaagctctgcttagttgatttttcgaaagagaatgccggtctagatgcatgcttaatagctaatacaaatatgggctggctttggcatcaccatctagcacatgttgggatgaagaaccttcataagcttctaaagggagatcgtgtgttaggactaactgatgtctgttttgagaaaaatagaccttgtgcaacatataagtcagaaacccaagggactctaaagcgcttcttaaggaaagctcaaaatgagtttgagcttaaggtgaaaaagataagaagcgacaatgggtccgagttcaagaatctacaagttgaagagtttcttgaggaggaaggcatcaagcacgagttctccgctccctacacatcacaacaaaatggtgtggtagagaggaagaacaggacgctaatcgacatggcgaggacgatgcttggagagttcaggacgcccgagcggttttggtcggaagttgtgaacacggcctgccacgctataaaccggctctatctgcatcgcctcctcaagaagacctcctacaaacttcttaccggtaacaaacctaatgtctcttactttcgtgtatttggaagcaaatgctacattctggtgaagaaaggtagacattctaaatttgctcctaaggctgtagaagggtttttactaggatatgacttaaatacaaaggcgtatagagtcttcaacaaatcatcgggattagttgaagtctctagcgacgttgtatttgatgagacgaatggctctcaaagagagcaagttgatcttgatgatatagatgaagatgaagttccgacggccgcaatgcgtatgatggcgataggtgatgtgcgaccacaggaactacaggaacaagatcagccttcttcctcgacactggtgcatcccccaactcaagatgatggacaggtacctcaagaacaggagcgtgatcaagggggagcgcaagaagaacatgttatggaggaagaagcaccacaggcccctccaactcaagtccgggcgtcaatccaaggacatcaccccgtcgaccagattttgggtgagatcagcaagggagtaaccactcgctcacgattagctactttttgtgagcattactcatttgtctcttctattgagcctttcagggtagaagaggtcttgcatgatccggactggatgttagccatgcaggaagagctcaacaacttcaaaagaaatgaagtctggagcctggtgccacgtccaaagcaaaacgttgtgggaaccaagtgggtgttccgcaacaaacaagacgagcacggagtggtgacaagaaacaaggctcgacttgtggcaaaagcctatgccggtcaccactcctttaggctgtttcaaatggacgtaaagagcgctttcctcaatgggccaatcaaggaagaggtatacgtggaacaaccccctggttttgaggatgactggtatcccgaccatgtatataagctctctaaggcgctctatggacttaagcaagccccaagaggatgctatccctctctcttacaaaagccttgtgatggtgacctttttgtttgccaaatttatgtcgatgacataatatttggttctactaaccaaaagtcttgtgaggagtttagcagggtgatgatgcaaaagttcgagatgtccatgatgggcgagttgacttactttcttggattccaagtgaagcaactcaaggatggcactttcatctcccaaacgaagtacactcaagatcttctcaagaggtttggaatgaaggacgccaagcccgcgaagacacttatgggaactgatgggcatcttgacctcaacaaaggaggtaagtccgttgatcaaaaggcataccggtcaatgataggttcattactttatctttgtgctagtagaccggacattatgcttagtgtatgcatgtgcgctagatttcaatccgaccccaaggaatgtcaccttgtggccgttaagcgaattcttaggtatttagtttctacgcattgcttcgggatctggtatccaaaggggtctacctttgacttaattggatacgcagactccgattatgccgggtgcaaggttgataagaagagcacatcagggacgtgccaatttctaggaaggtccctggtgtcccggagttccaagaaacaaacatcagttgccctatccaccattgaggccgagtacattgccgcatga

SEQ ID NO: 119024 - DNA, 415 bp, Zea mays
  Clone ID: MRT4577_40033C.1
gccgggaacaccccccggggggggggaagagcgtttaacctttcactggcaaccaccacagggggggcaaatttcgctcaaaaatgaaaagggaaagacaggccccgtccacgtacgttgataaaccaaccacgggcttaaagtttacaacccaccccggggatacggaaacggaccctagctagctagcttaaatcggaccccatgcggttgaactggttaaacccccgctggaggatgttaaaaaacacccaacccatggggggccccaccacaaaaaacaagaggaggccccggttgtcgtcggggggcccgggggggggaattgccccaaggtccttcaccacggggggggaggctttgggcggggcccccatcccggggggggggggggggccaaggcccaagccggggg

SEQ ID NO: 119025 - DNA, 793 bp, Zea mays
  Clone ID: MRT4577_40034C.1
acatcagcccgtctcgccctgcccgtctctgtctccccgctcccgtcgccgccgggtccaaaccagaggagccgcgcccgtggaaacctagggttccgccctccccgccctccgaaggtttggagaagagctgtttatccagcaacatgaggccaattttctgtgggaaccttgactatgatgcccgccagtctgaaatcgagcgtcttttcggcaaatatggaagagtggagcgagttgacatgaagacaggatttgcgttcgtctacatggaagatgaacgtgatgctgaagatgctatccatagacttgacagaactgactttggtagaaaagggaggagactgagagttgaatggacaaaggaggatcgcagtggtggtcggaaaggaaatgggaagcgatctccaagcagcgtgaaaccaaccaaaaccttgtttgtgatcaactttgatccgatcaacacaaggacaatagatttggagaagcactttgatctgtatggcaagattgcaaatatcagaatcagaaggaactttgcatttgtccagtatgaaacacaggaagatgctactaaagctctggacggtactaatggaagcactgtgatggacagggtcatctctgttgagtatgcacttcgtgacgacgatgaaaaaaggaaccggtacagtccagacaggagaggaggaggccgtgatagatctccggacagaagggacaaccgcggtaagtccgcaagtccttatggcagagggcggcgaaggggcagcccagactatggcaggggcag

SEQ ID NO: 119026 - DNA, 691 bp, Zea mays
  Clone ID: MRT4577_40035C.1
agcccccccccctcgagtttttttttttcctttttttttttcttttttttttttttttttttttttttttttttttttttttttttttttttttttttttttttttttttttttttttgggggaggaggagaaaaaataaaaaaaccaccgggggggggaaaagggaattttgacccccggcctccccctttttccaacagggttttatttttttggtttttttggtggccggctcgaaatagggggcccccccgggttaaattgccaccctgaccccaaaaaattggaaaaaaaccccggaccaaaaaagggcccccggggggcaaaaccccccaggaccttgatcccaaaacaccggcaagggccgggggaccggaaaccccccccctccaaaggccgccaaaaaaaaaaattttgttccgttcccccgaactgggggggggaaaactagtaaaaaccccccccttctagggggagaaaaccaaaataaaatcctggaaacaagggggaccgacccgagtagccccccaaccagccagttcaaatggggggcggggcacggatcccaatgggttatttttcctggacaaaggaccggaaaaaggggtgggggccccatttggccggaatacactttgttggaaaaaagcgttttgccgaactctttgggaatccgaatgaaaaagggcg

SEQ ID NO: 119027 - DNA, 483 bp, Zea mays
  Clone ID: MRT4577_40036C.1
gttactcctccggccactgctaactccgtcgcgcaatccgtcaccgtctatcgccatcgcgaattccgtcacgtcttctgacagctatgaataatggccgaaaaggatgatgggccggtaatgggatcgatatcggcatgacattatgtaccacctacttttggcaccacgaccgtgtggaggaacatggtcaacgacatgggcaaccacaacagaaactggaacatacccttgaacgactcctagaccctcatcgaacatctgatcaaaaaccaggtcaacatacaacctcatcaacaacctctttaataccaactttgatatcaacagtatgattagtaatacgtttattcatacctatattaagatggatatctagatggggatttctaaggccattgataagccaatgataaatccaaagatcaatggtgaggacaaacaggatgcaaaaacaagagatatcctacatagattttcatc

SEQ ID NO: 119028 - DNA, 565 bp, Zea mays
  Clone ID: MRT4577_40037C.1
gtggtggtgggggggggtttaaaaatttttttttggtttttttttttttttttttttttttttttttttttttttttttttttttttttttttttttttttggcccccaagccttttttaattaaaaaaaccggcaaacccccttggggggggggggggggggctaattcaactttttccctcccccacccataggccgggggggtttttttcaaaaaatgcccaacgcccccccaggggccccccgaccaaaaaacacacttatgttttttataaaaaggtaaacccccccccaaaccaaatgcccaaaaaaaacaccggttcactggccaaaaaacctttggttgggggtcaaaaaacccggcggggacaaaaccctcccgggggccccaggaacctggccattttttttgggaggaaggggccccccttaggattccctgggggcctaccaaagggggggggattggtcaccacatcttggaaagcccccctgcccccgggggcactgaaggccgccctcagggggggggcattcaggattttacccaaataaacaaaaccg

SEQ ID NO: 119029 - DNA, 4167 bp, Zea mays
  Clone ID: MRT4577_40038C.1
atgtcggagccctccatggccgacctcatggagatgatgaaatcctggcattcggagctcaagatggagatcaaggagatgaagatcgagatggcttccttgaaggacaaggcatcctcgtcatctggcgttggtggcggcaatcgcatggagcctcctcgtgaaccggatcggccccccaggttccagaagtgggattttccccgttttgacgggaagtctgacccgcgcctcttcctcaacagacgtgagtcatattttcggaagcagcgtaccatggccgaggagcgcgtcgggatggcgtcatacaacctcgaagacgtcgcccaggaatggttcatgcaacttcaggaggacgaaggcacgccgtcgtggggacgtttcaaagatctcattgatctgcgattcggaccagcgctgcgctcggcgcccctcttcgagctgacggagtgccgacgcactgggacggtggaggaatactccaaccgcttccagagcctcctcttccgcgctgggcggctcgacgaagcccagcgagtccagctcttcacaggaggtctgcttccacccctcagccacgccgtccggcttcacaacccggagacgctgaccgcggccatgagcctcgctcggcaagtggagctgatggagctcgacaagatggcggcagccccggccaagccggcgcatcgcgctctaccggccgccattaaacctcagcaggcgccccactccttgcgctaccagcaccaccggcggtactcccgcggccacaatcgcacctgtcgccgcctcttctacgttgaaggcattgaactggagatggcagtcgacgccgcgggcgatgctgtcccagcggaggagggccccatctactccctacatgccgtggccggagtgccaaccttcgacacgctacaggtccgagcgttcctcgggaccgccgtgctggtcgccctcctcgacacgggatccacgcacaacttcatcggcgagcgtgcagcgtaccgctccgggatgcacatccaaccgcgcccaaggctcaccgccaccgtggctaacggcgagcgcgtcacttgcccgggggtcatccgcgacgcgtcgatcagggtgcagggcgacacgttccacgtcgacctcttcgtcatgcccttggcaggtttcgacctcgtcctcggcacgcagtggttgggaaccctagggcccatcgtctgggacgtcgccgcgcggactatgcagttccagcgcgagggacacgctgtctgctggaccggcctcgcatcctcggacaagccggccgtccgcgcagtcacggcgccaccgacgccgacactacagctccagccagcccaggagcccctcctcgacgccctccttcactccctcagccacgtcttcaccgagccacgcggtcttccacccaagcgctcccgtgaccaccgcatcatcctcaaaccgggagcgctgcctgtggcggtccgcccgtaccgatacccggcggcacacaaagacgatctcgagcggcagtgcgccgccatgatcgagcaaggcattgtccgacgcagcgactcggcgttctcctcaccagtacttctcgtcaagaagccggacggctcctggcggttctgcgtcgactacagggcgctgaacgcgctcaccgtcaaggatgcgtttccgattccggtggtggacgagttgctggacgaactccacggcgcgaagttcttcaccaagctcgacctaccaccagcgacgttccaggctttgatgaatgacgtgctgcgaccgtttcttcgttggtttgttcttgtgttctttgacgacattttgatctacagtaagagctggggagaacaccttcgacacctacgcgccgtcctcgaggagctccaacgccaccagctgttcctaaaacgcaccaagtgtgcgttcggcgcgacgaaggtcggctaccttggccacgtcatctccgaggcgggcgtcgccatggatccggccaaagtccaggccatccgggactggcccacgccgcgatccgcacgggcggtacggggtttcctcggactgatgggctattaccggaagttcgtccaccactacggtaccgtggcagcgccattgacggccttgttgaagaaggatggattctcttggagcgcaggagccgcggaggcgtttgtcgccctcaaggacgcgatcacctcggcccccgtcctcaccatgccggacttctccaagccattcgtcgttgagtgcgacgcatcgtcccacggtttcggcgcggtgatggtccaggggggccaccccatcgcgttcttcagccaggctgtctcaccccgtcatcaagcgctggcggcttacgaacgtgagctcatcggcctcgtcctagcggttcgacactggaggccgtacctttggggacgccggttcctcgtcaaaaccaaccactacagcctcaagtacctgctggaccagcggctcgcgacgcttccgcagcatcattgggtcggcaagctcctgggcttcgatttctccgtcgaatataagccggggtcaaccaatgtggtggcggatgccctctcccgccgcgacacgccgaattatggggcgctgctggccctctcggcaccgcatttcgacgtcctggaccgtcttcgtcaggcacagctcaccgatccagcactcactgccattcgtggcgaagtgcaggccggcaccaagcgcgcgccgtgggaggtggttgacaggatggtccagtacgcgggccggctctacctacccccttcttcaccgctgctccgtgaactgctcgcagttgtgcatgccgagggccacgaaggggtccagcgcacgctacaccgccttcgacgtgacttccatttccctaacatgaagcaggtggtccaagattatgtccgggagtgccctacctgccagcgccacaagtcagagcacctacacccggccggactcctccttcccctaccaattccgcagggagtctggacagatgtggcgctggacttcgtcgaagccctgccccgagtgcgcggcaagtccgtcatcttgacggtggtggacagattcagcaagtactgccactttattccactggcacacccctactcagcagagtccgtggctcaggcattcttcgcagagattgtacgccttcatggggtgccgcagtccttggtgtcggaccgcgacgtcgtgttcacctccaagttctggaaggagatcatgcggttgatggggaccagtctccacatgacgtcggctttccaccctcagtcagacggtcagtccgagtcggcgaacagggtaatcatcatgtacctgcggtgcctaacgagcaatcggcctcgccagtggctccaatggctcccatgggcggagtacgtcttcaacaccgcctaccagagctctctccgcgacacgcctttcaagatcgtctacgggcgtgagcctccgtccatccggtcctatgaaccgggggacacacgtgttgcggcagtggctagaaccatggaggagcgtgaagagttcctcgctgatgtccgccatcggctggaacaggcacaggctgtccagaagaagtattatgaccagggacaccgcgttgtcacgtaccaggtgggtgaatgggtgctgctccatctccgacaccgctcccctgcctccctcgccactgactccaccggcaagctgaagccccggttctataggccctaccgtgtgctggaactcatcaacgaggtcgttgtccgcctcgagcttccagcccgcgctcgcatccacgacgtgtttcatgtgggcgtcctcaaaaagtatcacggcacaccaccgcaggttacaccgccactacccccacttcaccatggggcagtcaccttggagccagctagggccatccgaacccggctcaaccgcggtgtacgccaggtgctggtgcagtggaaagatcagtcgcctgcatctgcgacttgggaggacatggacactttcaccgacaaattcccaacctttcagctcgaggacgagctgcttcttgaggagcggagagatgtcatgtacggccacacatacgccaggcgtaggagagcccgcgatgtgcgccgagctaggcaggcagcaaaggcacatgcgcagcaggtgagtggctag

SEQ ID NO: 119030 - DNA, 1559 bp, Zea mays
  Clone ID: MRT4577_40039C.1
gggcctgggctcgcgccgctctgcgctctgccctctgcgcaccacgacgaggtcttcctgagatgcccgccgcccgggtacgcgcgacgccgacgcgaacacctccgcggtcgtcttccccggcgccccgcaccgaggcggtagtcccgccggactgggactccgctgtatcgaccgtctcctcccaccccacgcccccggtggtcgtcgtgtgcgggcccaagaacagcggcaagtccaccttctcccgtgtcctcctcaacgcgctgctccccaggcatggtaaggttgcttatctggacaccgacgtggggcagccggagttcgggccgccgggatgcctctcgttccatgtcctcgacgaagctatcgcagatttgatgaacccaagtctacgggaagctgaaaggtgctacttctttggtgacatttcatcgaaaagagatccagaagcatatctgaattgtctattccattcgtaagactactttgttggaaaatatcgatgcgatgagaatgaaatgcttgcagttaattgtcaatacacctggatgggtaaaaggtgctggctttgatatgctcgtagagatgctaaggtatatctgccccacaatagttgttcagatacgcatcacaatcaagaacaaaaatctccctgatggagggttttggttagatggtgggcaaacaggacctatgatgattaacatcgatgctgcatttcatgatgcctcaaatagatcgttgttaattcagaaagattcatgtggaatgcgtgaacgccgacttgtagagtacttgaaacaatgttttccaagcaacatctctctttcaactaataaggagcttgcttatgccctagcttcacttccaccttatcaagtaccattttcagatgttgcaattgtgcatcttcattgtaaggtacctgctggtgagatatggcatagtctgaatgcaaccatagttggtttggcagtttccaatgcatctgagggaaccagatcaatcccttactgtgttgggcttggcatcataaggggcgtcgatattcaaaaaggcctgttatatttaataactcctgttcctctccagcgcctgcaatgcgttgatcttttgcaacagggtctcattgagatacctactgctcttttgcaggtccgcggatgtgtgtcgccctacatgtcgacgaatgtgcttcacaagatatcagaaagggatttgtatgctgggtgatgttggcgcaggcagtgtcggagatagacctgtgtttgctggtttctgacccggagagcatgaaccggactgtagtttcaggctgccagcggttgcctccagctcctaagattagatatgtaacctgtgctgtgcaactcctctgtcaaattagtagtcacggagatctgaatgcaacttcctggattcattgaattgaaatactataattctgtggcaagttactccctttgcttttgcctttgaattgattagtatagagaaagatattgattaattggtatcttggtattatttaaagacaaaaaaaacacaaatacccg

SEQ ID NO: 119031 - DNA, 539 bp, Zea mays
  Clone ID: MRT4577_4003C.1
ccggccgggacccttccggtcgaggctgctctaaggattgtgcgaagccgacggcgtcgtcgctctgcccgcgtatcccctcccacgacacgcgctaacaccagagatgactgctgcagatcgtcttggagctcgccacgcggatcgagcttgagaagctcgatgagcatgagaccgacgctgatgaagctgtgtcgttggatgacgataaggaagatgtggacgacgtctacgatgacaaggatgctgatgaaatccatggagatgccagtgcctatgtctcatgagagtatgtctgggaacaggagccgttggggcatgctggagcttgctatagtagaccttcactggtgtggcctggttctgcatagaatgctataatatattctttgccatctccggaccatatgtgctcaaaaggccatgtttggactggaatgtcatattcggcgtggttacgattcaggacctcatctccctgctggagatccaccgtgcatagtatttcgaggctcctgacttgagccagatgatcttga

SEQ ID NO: 119032 - DNA, 212 bp, Zea mays
  unsure (1)..(212): unsure at all n locations
  Clone ID: MRT4577_40040C.1
ggatcctctaaagcggccatccttttttaccctttttttttatttaacggaaacccnccaccagggcatggggtaatatatatggcatgacacagcccaacctctaccaagggggcatagtttcaaagatatgcgcaacccccatctctcaccccaaccgatacttgcataaaacctccgacgaaagcttgaacaacctcctacaccaaacc

SEQ ID NO: 119033 - DNA, 413 bp, Zea mays
  Clone ID: MRT4577_40041C.1
tttctttttttatgattcttttatttttattacttatttcatttccatattttatccttttgtacgaaccaccacacccttatatatgggtgacgaaacccttcatattatttcgggtccaaaatatttccaaaaggggggggggcttgccgaggaacaactattaaaaaaaggtaaaacccggccccagaccacctgtttttagttcccgcacaaatttcccccgttgggctgtggccccaagctgacccaaaacacaaaaaccatgggtgaagggggggttccccaaggggtcccacaaaaaaaaacccctttcccccctaggtgtgaaatttacttgcacaactgaaacatcccatgaaaatttcccaacggaaacggaaaatgcttccacaaccatggaaacagagggg

SEQ ID NO: 119034 - DNA, 494 bp, Zea mays
  Clone ID: MRT4577_40042C.1
ggcccaagcagcatccgcacactcccaatccacctctttcgccgcagcgagcccaagaagccgaccgccgagcccccctctccagtccagtgcgcggactcggtttcttgcttgcccggcgcccaatcttcagagagctccttctcgtcgtctgtctccatggccgcctcgaccaagaccgtcgccgtcctcctcgccgcggtgctcctcgcgctggtcgcgtccgcggcagccagcaggaagctggaggaggacgcactcctgggaagcctggccccagcccccgcgccggccgttggcggtgccgcggggctgcctgccgccaagccgggggcgtgggccgtcgctgccctggtctctctcgtcgcctttctcgtgaactgagggtggtggagggacgaatcctgcgatctggattgctgggagaggagagggggatttttatggttcgttctgtttgttctagggatatttatgttcgttctgttttgcct

SEQ ID NO: 119035 - DNA, 372 bp, Zea mays
  unsure (1)..(372): unsure at all n locations
  Clone ID: MRT4577_40043C.1
cgaacaaacaaaaccccagaaacaaaaaccgacaacaacagancgggggcaccaccagaaaacaccggaggggggacaancaacacagaaacaacaagccgcagaaaagaggcgaaaccaggagaggaaacgcacgncgcaccggaggcacccagccaacaaccgaccagggccagaaccaagaagaccaggnggccaggggcgccaccacagcaccacggggggcgaccccaacagcaaacaaggcgacggggagagcaaagcngcagcccgcaacgcggaccacgccaccaacgcgcaccnccgaagacagggcaccaagaccagagcaaccgcagcggcggggcagggcgcccaagagcggcggcgcca

SEQ ID NO: 119036 - DNA, 746 bp, Zea mays
  unsure (1)..(746): unsure at all n locations
  Clone ID: MRT4577_40044C.1
ccccgcgtccgcccacgcgtccgcccacgcgtccgcccacgcgtccgcccacgcgtccgcccacgcgtccgcccacgcgtccgcccagtccgcggccggccgggaaagcagcatccgcacactcccaattcccctcgagcgccgcagcgagcccaagaagccgaccgccgagccccctctccagtccagtccgcggtctcggtttcttgcttgcccggcgcccaatcttcagagagagctccttctcgtcgtctgtctccatggccgcctcgaccaagaccgtcgccgtcctcctcgccgcggtgctcctcgcgctggtcgcgtccgcggcagccagcaggaagctggaggaggacgcacttctgggaagcctggccccagcccccgcgccggccgttggcggtgccgcggggctgcctggcggcaagccgggggcgtgggccgtcgccgctctggtctctctcgtcgccttcctcgtgatctgagggcgtggggatcgtgctgcgcatcgcgggagatggagggacgaatcctgcgatctggatcgcagagagagaggagagggggatatttatgttcgttctgtttgttctagggtgcctctcttttgcctgtataagagaggatcatgattttttttatataataataccgtttatttgtcattctttttataaaaaaaaaaaaaacctaaaaaaaaaaaaagccagtnnnnaaancnaaaaaaaaaaaaaaaaaggccccta

SEQ ID NO: 119037 - DNA, 372 bp, Zea mays
  Clone ID: MRT4577_40045C.1
caatccaaaaaataagccgttcctccatccgaaggggcttgttttatgtccagggtcacataacgcttcctgtttatagttccagttttttttttggatcttttacattcatggctactagggctactttctgaggatgtattccgcagggcttttgctgatatggcgacttttatagcatacggcccagcgggcagagtagcaaaccctggtttctgcattgcagggggtctaaaatggcattcggcattgggacaaacgccaacgccgcctttacaaacgacgaaaaatttcagttccccccgtttgggtttttaagcgacttggatttctgcttgctctgcgggaaggcccgcattttttggttttttc

SEQ ID NO: 119038 - DNA, 3693 bp, Zea mays
  Clone ID: MRT4577_40047C.1
atggtggtcaacgacaaggaggagtccctcttcaacgaggcaagagacggcaagcccaatgactcaggatcgagtcacaagaagagggacgggaagaagaagaggcgcatcaagaagatcatttactacgacagcgatgcctcctcttcttcaccaagagacgacaatgacgatgactcttcgtctaaaaagagaacggttaatcaaaactactcttttgactactctcgcatgccgtacaattcaaatgcacatctactttcaattccccttggaaaacctccacactttgatggagaggactattcgttttggagtcataaaatgcgtagtcatttattctctctccatcctagcatttgggaaattatagagaatgggatggatgaatataataaggtgagcggcttagacaacgccaagcaaatctgggacaccctcaagatatctcatgagggaaacgacgccaccatgatcaccaaaatggagctggtggaaggcgagatggggagattcacgatgattaggggagaggagccaactcagacttacaacaggctcaagactctgaatcctaggtacactaaaatgacgcccgaggagattcttggaaaatttgtgagcgggcgcatgatggtgaaggaggctcgatacgtggacaatgctctaaacggtccactacccgtctacgagcctaaacctgttgctcttaaggcaaccagtagcagggaggcgcttccaagcaaggatgagatgacgcttataatcaagcgcttcaagaccgcgcttaaaggacacagggagtaccccaacaagaacaaaacaaggggaaagcgctcctgctttaaatgcggtaagactggtcactttattgcaaattgtcccgataatgatagtgaccagggacaagaaaagagcaggaagaaggagaaaaagaagaactacaggaaggcaaagggtgaggcgcaccttggaaaggaatgggactcagactgctcctcttccgactctgacgacgaaggacttgctgcctcagccttcaacaaatcctcactcttccccaacgagcgtcatacatgccttatggccaaggagaaaaaggtacgtgttcgggacacacccaagtacacttcatctagtgatgaagaatcctccgataatgaagtagattactctagtttatttaaaggtttagatagagccaaagtagagaaaattaacgaattaattgatgctctaaatgaaaaagatacattgctagagaagcaagaagatattttgtatgaagagcatgacaaatttattagtgttcaaaaatctcttgctctagaaattaaaagaaatgaaatgctatcctctgagttgtctgcttgccatgaatctgtctctagtttaaggagtttaaatgatgatttaaatgctaagctagaggaagttaataaatctacttcatgtgtagagcatgttgttatttgtaatagatgtaaggattttgatgttgatgccagtaatgaacatattgtttctattacaaaattaagtaatgaggtttatgcatccgggggctcaagctggattatcgacagcggatgcacaaaccacatgacggaggagaagaagatgttcacctcctatgtcaaaaacaaggattcccaggatacgatcatctttggagatgggaaccaaggaaaggtcaaaggcttgggcaagatagccatcaccaacgagcactccatatcgaatgtatttctagtagagtcgcttggttacaaccttctgtctgtaagtcaattgtgtcacatgggttacaattgtctttttacaaacgttgatgtatctgtctttagaaggagtgatggttcattagcttttaagggtgtattagatggcaaactctacttagttgatttttcgaaagaggaggccgatctagatgcatgcttaatagctaagactagtatgggctggttgtggcatcgccgtctagcacatgttgggatgaagaaccttcataaacttctaaagggagaacatgtgttaggactaaccaatgtttgtttcgagaaagataggccttgtgcagcatgtcaggcagggaaacaggtgggaagcactcatcatagcaagaatgtgatgacaacatcaagaccactggagcttcttcacatggacctcttcggacccgttgcctaccttagcatcgggggaagtaagtatggtcttgtaattgttgatgatttttcctgcttcacttgggtgttctttttacaggataaatcagaaacccaagggaccctaaagcgcttcctaaggagggctcaaaacgaatttgagctgaaggtgaaaaagataaggagcgacaatgggtccgagttcaagaatctgcaagttgaggagtatcttgaggaggaaggagtcaagcacgagttctccgctccctacacaccacagcaaaacggtgtggtagagaggaagaacaggatgcttatcgacatggcgagaacgatgcttggagagttcaacacgcccgagcggttttggtcggaagttgtgaacacagcttgccacgctataaaccggctctatctgcatcgccttctcaagaagacctcctacaaactcctgaccggtaacaaacccaacgtctcctactttcgtgtatttgggagcaaatattacattctggtgaagaaaggtagacattctaaatttgctcccaaggtagtagaagggtttttactagggtatgacttaaatacaaaggcgtatagagtcttcaacaaatcatcgggtctggttgaagtttctagcgacgttgtatttgatgatactaatggctctccaagagagcaagttgatcttgatgacatagatgaagatgatgttccaacggctgcaatgcgcacaatggcgataggtgatgtgcgaccacaggaacaacaggagcaagatcaaccatcttcctctacaatggtgagtcccccaactcaagatgatggacaggttcctcaagaagaggctcgacttgtggcaaaaggttatgcccaagtcgcaggtttggatttcgaggagacctttgctcctgtggctaggctagagtctattcgaattctattggcctatgccgctcaccactctttcaggctatttcaaatggatgtgaagagcgctttcctcaatgggccaataaaggaggaggtatacgtggaacaaccccctggctttgaggatgtcagggtgatgacacaaaagttcgagatgtcgatgatgggcgagttgacctacttccttgggttccaatacacacaagatcttctcaagcggtttgggatgaaggacgccaagcccgcgaagactccaatgggaactgacgggcatgttgacctcaacaaaggagtttctacgccttgtttcgggatctggtatctaaaggggtctacctttgacttgattggatactcagactctgattatgccgggtgcatggttgataggaagagcacatcagggacgtgccaatttctaggaaggtccctggtgtcctggagttctaagaatcaaacatccgttgccctatccaccgctgaggccgagtatgttgccacaaggacagtgttgcgcgcaactactttggatgaggcaaaccctctaggactttggctacaatctgagcaaagtcccactcctatgtga

SEQ ID NO: 119039 - DNA, 4422 bp, Zea mays
  Clone ID: MRT4577_40048C.1
atggatcctaagggaaaggggatggtggtcaacgacaaggagaaggagtccctcttcaacgagccaagggacgacaagcccactaactcagccactactgttttgctagcatctctgtgcagggatgaatacaacaaggtgagcggcttggacaacgccaaacaaatcttggacaccctcaagatctctcatgagggaaatgatgccaccatgatcaccaagatggaactggtggaaggcgagctggggagattcactatgattaggggagaagagccaactcagacctacaacaggctcaagaccctggtcaacaagatccgaagctacggaagcacaagatggacggatcatgatgtcgtccgactcatgctaaagtcatttactgtaattgacccccatcttgtgaatcttattcgtgaaaaccctaggtacaccaaaatgacgcccgaggaaatcctcgaaaaattcatgagcgagcgcatgatggtgaaggaggctcgatacgtagacgatgcactaaacggtccactacccgtctacgagccacaactcgttgctctcaaagcaaccagcagcagggaggcgctaccaagcaaggtggcacaagtggaggctgccgggctcaatgaagatgaaatggcgcttatcatcaagcgcttcaagactgcgctcaaaggacgcaaggaatacccccaacaagaacaaaacaaggggaaagcgctcctgtttcaaatgcgggagaagaagaaggtctacaagaaggcgaaaggcgaggcgcaccttggaaaagaatgggattcggactgctcttcgtccgactccgacgatgaaggattggctgcctcggccttcgacaagtcttcgctcttccccaacgaacgtcacacttgcctcatggctaaggataagaaggtacgtattcaagattcccctaagtactcttctagtgatgaggaatccgatgatgtagattactctagtttatttaaaggtttagatatagccaaagtagagaaaattaatgaattaattgatgctctaaatgaaaaagatagactgctagaaaagcaagaggacattttgtatgaggaacatgacaaatttgttagtgtacaaaagtctcttgctttagaaactaagagaaatgaaatgctatcttctgagttatctgcttgccatgaatctgtctctagtttaaggaatttaaatgatgaattaaatgctaagctagaggaagttaataaatctagttcatgtgtagagcatgttgttatttgtaatagatgtaaggattttgatgttgatgcctgtgatgaacatcttggttctattactaaattaaataatgaggtggcaagtcttaatgctcaacttaagacttgcaaggatgattttgataaattgaaatttgctagggatgcctacactgttggtagacacccttcaattaaggatggacatggttttcgaagggaaaccaagaacttaacaagccaaagaacttctgttctcaacaaggagaaagggaaggccccgatgacaactctacttttgttcatggtagaagtaggcctaggagaaatcatgttgtgcctcatgtacctaggaaaatgtgcaatgaacccactactgtttttcatgcttgcaacacttcttttgtactttcatgtttatgcatccgggggctcaagctggattatcgacagcggttgcacaaaccacatgacgagggagaagaaaatgttcacttcctatgtcaagaacaaggattctcaggattcgatcatctttggagatgggaaccaaggcaaggtcaaaggattaggaaaaatagccattacatccgagcattctatctctaatgtgtttttagttgaatcgctcgggtataatctgttatatgtgactcaattgtgtaacatgggttataattgtctatttacaaatatagatgtatctgtctttagaaggagtgatggttcattagcgtttaagggtgtattagacgacaaactctatttagaagactttttgaaagagaatgtcgatctagatgcatgcttaatggctaagactaatatgggctggctttggcatcgccttctagcacatgttgggatgaagaaccttcataaacttctaaagggagatcatgtgttaggactaaccaatgtatgttttgagaaagacagaccttgtgcagcatgtcaggcagggaaacaggtgggaagcactcatcacgacaagaatgtgatgacaacatcaagaccactggagctccttcacatggacctctttggacccgttgcctacctcagcatcgggggaagtaagtatggtcttgtaattgttgatgatttttcccgcttcacttgggtattctttttgcaggataagtcagaaacccaagggactctaaagcgcttcttaaagagagctcaaaatgagtttgagcttaaggtgaagaagataagaagcaacaatgggtccgagttcaagaatctacaagttgaagagtttcttgaggagcaaggcatcaagcacgagttctccgctccctacacaccacaacaaaatggtgtggtagagaggaagaacaggacgctaatcgacatggcgagaacgatgcttggagagttcaagacacctgagcggttttggtcggaagctgtgaacacagcctgccacgccataaaccagctctatttgcatcgcctcctcaagaagacctcctacgaactccttaccggtaacaaaccaaatgtttcttactttcatgtatttgggagcaaatgctacattctagtgaagaaaggtagacattcaaattttgctcccaaggcagtagaaggttttttactaggttatgactcaaataaaaaggcgtatagggtcttcaacaaatcatcaggattagttgaagtctctagcgacgttgtatttgatgagactaatggctctccaagagagcaagttgatcttgatgacatagatgaggaagaagttccgacggccgcaatgcgcacgatggcgatagatgatgaagaggagcgtgatcaagggggagcacaagaggaacaggtcatggaggaagaagcaccacgggtccctccaactcaagtccgagcaacgatccaacgaaatcaccccatcgatcagattctgggtgacatcagcaagggagtaactactcgctcacgcttagctaatttttgtgagcattactcgtttgtctcttctattgagcctttcagggtagaagaggccttgcaggatctggactgggtgttggccatgcaggaagagctcaacaaattcaagagaaatgaagtttggagcttggtgccacgtccaaagcaaaacgttgtgggaaccaagtgggtgttccgcaacaagcaagacgagcacggagtggtgacaagaaacaaggctcgacttgtggcaaaaggctatgcccaagtcgcaggtttggattttaaggagacttttgcttctgtggctaggctagagtcaattcgaattttattagcctatgccgatcaccattcctttaggctattgcaaatggacgtgaagagcgctttcctcaacgggccaataaaggaggaggtgtacgtggaacaaccccctggctttgaggatgacaggtatcccgaccatgtgtacaaactctctaaggcgctctatggacttaagcaagccccaagagcatggtatgaatgccttagagattttttaattgctaatgctttcaaggttgggaaagttgatcccactctttttacaaagacttgtgatggtgatctttttgtgtgccaaatttatgtcgatgacataatatttgtttctactaaccaaaagtcttgtgaggagtttagcagggtgatgactcaaaagtttgagatgtctatgatgggcgagttgacctacttccttgggttccaagtgaagcaactcaaagacggcaccttcatctcccaaacgaagtacactcaagatcttctcaagaggtttgggatgaaggacgccaagcccgcgaagacaccgatgggaaccgacgggcatgtcgacctcaacaaaggaggccgagtatgttgccacaggacagtgttgcacgcaactactttggatgaggcaaacctccgggactttgactacaatctgagcaaagtcccactcctatgtgacaatgagagtgcaatccgcatggcggataatcctgttgagcacaaccgcactaagcacatagacatccgacatcacttcctgagggaccaccaacaaaagggagatatcgaggtgtaccatattagcaccgagaaccagctagccgatatcttcaccaagtcgttggatgagaaaaccttttgcaggttgcgtagtgagctaaatgtcttagattcacgtaacttggattga

SEQ ID NO: 119040 - DNA, 1497 bp, Zea mays
  Clone ID: MRT4577_40049C.1
atggatcctaagggtaaggggatggtggtcaacgataaggagaaggagtccctcttcaacgagccaagagacgacaagcccactgactcaggctcgagtcacaagaagagggacgagaagaagaagagacgcatcaagaagatcatctactacgacagtgatgcatcatcttcttcaccaagggacgacaacaacgacgacgactcttcatcaaagaaaaagatgcatatgggaattgtagaaaatgggatgcattttgataacactgataatcctgtgattattaatgagcaaatccataaaaatgcccaagctactactgtgttgttagcatctctttgcagggacgagtataataaacaactagctaccggactcaatgaagatgaaatgacgcttatcatcaagcgcttcaaaaccgcgcttggacgcaaagagtaccccaacaagaacaaaacaaggggaaagcgctcctgcttcaagtgcggtaagactggtcatttcattgcacaatgccctgataatgataatgaccagggagaagaaaagagcgggaagagggaaaagaagaagaactacaggaaggcgaagggcgaggcacaacttggaaaggggtgggattctgactgctcctcatctgactccgacgatgaaggattggctgcctcggccttcaacaagtcttcgctcttccccaacgaacaccacacttgcctcatggccaaggagaagaaggtacatattcgagattcccctaagtactcttcttctagtgatgaggaatcctccgatgatgaagtagattactctagtttatttaaaggtttagatagagtcaaagcagatgaaattaatgaattaattgatgctctaaatgaaaaagatagactgctagaaaagcaagaggacattttgtatgaggaacatgacaaatttgttagtgtacaaaaatatcttgctttagaaactaagaaaaatgaaatgctatcttctgagttatcttcttgccatgaatctatatctagtttaaagaatttaaatgatgaattaaatgctaagctagaggaagttagtaaaacaagttcatgtgtagagcatgttagtatttgtaatagatgtaaggactatgatgttgatgcctgtgatgaacatcttatttctattacaagattaaatgatgaggtgtcaagtcttaatgctcaacttaagacttgcaaaattgattttgataaattaaaatttgctagggatgcctacactattgctctacttttgtttatggtagaagtaggcctaggagaaatcatgttgtgcctcatgtgcctaggagaatgtgcaatgaacctactactgtttttcattcttgcaacacttcttttgtactttcatgtttatgcatccgtgggctctagctggataatcggcagcgtatgcacaaaccacatggcgggggagaagaagatgttcacctcctacgtcaagaacaaggattcctag

SEQ ID NO: 119041 - DNA, 648 bp, Zea mays
  Clone ID: MRT4577_4004C.1
agccagtgcagctgcagttttattatgttatatgttgaattcttatatttaatatatgtaaactattatttttaaaataaaaaatgtaaccgtgtcgtgcccgtgccagcactacgagtcgagatagtggctcagacactgacactatactagccggaccgggtcgtgcctgcaccgtactttttcgtgtcgtgccttggctaacccatggtgttatatctatacgccacaccatcgccaactccagctctcctttctgaatgccggtccaagtgtccaacagatgacgtcacacgaacgacgtctcctggccgtcttcaaagaaggcgccggtgaccccgcctcccggcagcagcgccaccttgaccacgttgcccgcgccttcctcgggcgtcaggagccccgagcgcaaggttatgtcggtcttgatgtagccaggatgcacgcagttgacgcgcagcgtcggctgctccgccgccaggatcctcgagtacgcgttcatggccgccttgcccaccttgtacgccgcaaacgccgccggccacccgcgcgcgtcggcctcgccggcctcgaagtccttcaggaacgcgtccagcagctcgtccagcctcccctcggtcagcttctcgacgttgtgcagctcttgct

SEQ ID NO: 119042 - DNA, 855 bp, Zea mays
  Clone ID: MRT4577_40050C.1
atggatcctaagggaaaggggatggtgatcaacgacaaggagaaggagtccttcatcaatgagccaaaagacgacaagcccactgactcgggctcaagtcacaagaagaaggatgggaagaagaagaggcacatcaagaagatagtctactacgacagcgacgaggaagagtatcataaggtgggcggcttggataatgccaagcaaatttgggacaccctcaagatctcacatgaggggaacgacgccaccatgatcaccaagatggagttggtggaaggcgaactaggaaggtacaccaagatgacgcccgaggaaatactcggaaagtttgtaagcgagcgaatgatgatcaaggaggcaagatatgttgatgaggcgttgaatgacccaatgcctatccacgagcctcaaaccgttgctctcaaagcaacaagcagcagggaggggctacctagcaaggtggcacaagttgaggctgccagactaaatgaggatgaaatggccctcatcatcaagcgcttcaagatggcgctcaaaggtcgcaaggagcatcccaacaagagcaagacgaagggaaagcgctcctgcttcaagtgtggtaagattggtcactttattgctaactgtcccgataatgatagtgaccaggaacaaggaaagaatgggaagagagagaacaagaaggtttacaagaaggctaagggcgaagcacatcttggaaaagaatgggactcggattgttcttcgtccgactccgacgacgaaggactcgccgccacggccttcaacaaatcgtctctcttccccaacgagcatcacacctgcctcatggcaaaggagaagaagatctga

SEQ ID NO: 119043 - DNA, 841 bp, Zea mays
  Clone ID: MRT4577_40051C.1
actcctaagggcgaatggtcccctcgaccccggccggggcgcaccccgaccaccgaaaggcccggctgtcaaggccatgacgacgtcctcgtcttggctctcccttcctattcagctcctgcgctacgcgccgtcgtcatcgtcgtccaaccgcctcgggctgggctcggtgcaccgaccttcgcctcactgcgcccgcatgcacatgcagccggcgaaaggcctgaaacccgtcacggccacagggcgcggcgacggcggcggcgtcgacgcggcgagtcctttgcgtcttctggcagacgaggttgcgcccgagctgcacgcagcggcgaagcggatggtaggcggcggtgctcttcactcacccaagggacgccccggctcgccaacggaaggcagcggcggtggtaagatccgcactacgcatgctgccgcaccgacgaccacgtttgccagagcgcgaggcccgacaccgcctggtctgcccgcggaaggatccggcggcaatggcgggaccaaacattaggatcgacattaagccaaggaattggttgagtggagattgtcggactacgctattaccggctgcacaactaatttatttctcttacctatctatataggaacagctcagactcaagtcgaatctgaaggcccttttgggaacgcaacattttcttagtctcgaggtataatgttgtggtatttaaacaaactactagtataatgcacgtagttgcgacggcacataaccatatgaatatatgactgatattaacttacattttagtcaaaaaggccaaaaaagtataggttcaaaaggagcctggccttttttttt

SEQ ID NO: 119044 - DNA, 876 bp, Zea mays
  Clone ID: MRT4577_40052C.1
atggatcctaagggaaaggggatggtggtcaacgacaaggaggagtccttcctcaatgagcctagagatgacaagcctaccgactcaggctcaagtcacaagaagagggatgtgaagaagaagaggcgcatcaagaaaatcgtctactacgacaacgattgtcttcatcttcaccaagagacgacgatgacgacgactcttcatcgaaaaagaaaacgggagacactactaaacaaggtggcacaagtggaggccgtgggcctcaacgaagatgagatggcgcttatcatcaagcgcttcaagaccgcactaaaaggacgcaaggagtaccccaacaagaataagacaaagggaaagcgctcctgtttcaaattcggactggcagcctcggccttcaacaagtcttcgctcttccccaacgaacgccacacttgcctcatggccaaggagaagaaggtttatgcatccgggggctcaagctggattatcgacagcggatgcacaaaccacatgacgggggagaagaagatgttcacctcctacgtcaagaacaaggattcccaggatatgattatttttggagatgggaaccaaggcaaggtcaaaggtttgggaaagatagccatcacaagcgagcactctatttcaaatgtatttttagtagagtcattaggatacaacctcttgtctgataaatcagaaacccaagggaccctaaagcgctttctaaggagggctcaaaatgaatttgagctcaaggtgaaaaagataagaagcaacaacgggtctgagttcaagaatcttctagtggaggagtatcttgaggaggaaggcgtcaagcacgaattctccgctccctacatgaaagtcgcctag

SEQ ID NO: 119045 - DNA, 171 bp, Zea mays
  Clone ID: MRT4577_40053C.1
tattcggcacgaggggcaatcgggatctccctcgttcccctgaaggagcactcagtgcgatcgagtgcgtatacggacaacgtagcctctcccctctctctgtctcacacacacacctgtaatgtccataaccctgctcggtggagggcgcgggccgtctgggcgatggcg

SEQ ID NO: 119046 - DNA, 886 bp, Zea mays
  Clone ID: MRT4577_40054C.1
acctacttgtttcgttccttgctgcgaccgcggcgacacgcgcgctccaccgcttgtccgtctgtctgttacctgccagggtgctgtccaacttcgccttctccttctccatcatctcggtgctgacggggatcacgacgctctacaacacggggctcaacttcggcgggcccgccaccatgaccttcggctggttcgtgggcggcgccttcaccatgtttttttgcgcctccatggccgagatctgctcctgcttccccacctccggcggtctctactactggagcgcgcgcctgtccgtcgagcgctgatctccacttttctactgcatgaccggatgtatctctgactggccgtacgatcactcccacatagacgcagcataagtagagtttcgagtacttcatttcttctccttagccatgagacacgtgtgacgctcgttggggaagagggccgatttgttgaaggcggtggcggcgagtccctcattgtcggagtcggaggaggagcaatccgaatcccactccttgcctatatgcgcctcgcccttggcctttttgtagtgcttcttcttctcccttttgttccccttttccttgcctccttgatcatcattcgcccgctgacgaattttcctaggacttcttcgggcgacattttggtgtaccgtcttttgtttgtcgtggtcgtcgtccttttgggaagaagaggactcatcgctgtcgtagtagacgatctccttgatgcgtcttgtcttcttcttcttcccatcttttcgcttgtggcccgagcccgagtcattggacttgtcatcccttggctcgttgacgaaggactccttctccttgtcgttgatcacaattcccttccccttaggatccat

SEQ ID NO: 119047 - DNA, 128 bp, Zea mays
  Clone ID: MRT4577_40055C.1
ccttgcaccctcgcccacgttaggcttcctgacagaggcgacttcataccaatgaacttccatatcgaaccttaccatcatgacgatgaattactcatttgccactaagactggttttcaaccatctc

SEQ ID NO: 119048 - DNA, 2874 bp, Zea mays
  Clone ID: MRT4577_40056C.1
tcaccccccctctaggcgactttcaacatgttctccctttagaagtttatgaatgttctttatcccaacatgtgctagacgacaatgccacagccagcccatgctagtcttagcaattaagcatgcatctagatcggcctcctccttcgaaaaatcaactaaatagagtttgtcgtctagtacacccttaaaagctaatgaaccataactccttctaaagacagacacatctacatttataaatagacaattataacccatattacatagttgactgacagacgataagttgtatctgagcgattcaactaagaacacattggatatggaatgctcggatgaaatagctatctttcctagtcctttaaccttgccttggttcccatctccgaagatgatcgaatcttgggaatccttgttcttgacgtaggaggtgaacatcttcttctcccccgtcatatggtttgtgcatccgctatcaataatccagcttgaacccccggatgcataaacccaactcatgttgggtcctacaaggttagcacaaatatccttagggacccaaatgcaagttttgtctcccttgcatcttgcccctaattttctagcaattatcttcctatcctttctacaaatagcaaaggaagcatttaaagcatgatattttgtggaaggttcattaactttcctaggaacattaatcatatttctcctaggcatattatgaacaacatttttcctactaacatttctatcatgcacataggaagaactagaagcaaccatggcatgagaatcaaaagcatcatatgcattataactccgataagcatttctagattgtctcctatcatgatacaaaaaggcatagttccttttagtactattagccataggggccttccctttctccttggcggagatgggagccttatggcttgttaagttcttgacttccctcttgaagccaagcccatcgttaattgaggggtgtctaccaaccgtgtaggcatccctagcaaattttagtttctcaaaatcacttttgctagtcttaagttgggcattaagactagctacctcttcatttaatttagaaatgcaagctaggtgttcactataagcatcaatgttaatatctttacacctagtgcacgctacaacattttctacacaagaggtggatttactagcaatctctaacttagcattcaaatcatcattaatgctccttaatttaaaaattgtctcatggcaagaagataattcacaagaaagcatttcatttcttttaacttctagagcataagatttttgtgcctctacaaatttgtcatgctcttcatacaaaaggtcctcttgtttttctaagagtctatctttttcattcaaggcatcaatcaattcattaattttatctactttagttctatccaatcccttgaacaaactagagtaatctatttcatcatcactagactcatcatcactggaggaatcataagtgacattgttttgattacataccttcttctcccttgccataaggcatgtgtgacgctcgttggggaagagggatgacttgttgaaggcagtggcggcgagtccttcattgtcggagtcggaggaggagcaatctgaatcccactcctttccgatatgtgcctcacccttggccttcttgtaatgcttcttcttttccctcttactcccgtgttcctggtcactatcattgtcgggacagttagcaataaaatgaccaatcttaccacatttgaagcatgagcgcttctcctttgtcttggtcttgcttggttgtcccttgcgacctttaagcgccgtcttgaagcgcttaatgatgagggccatctcctcattatttagcccggccgcctcaacttgcgccaccttgcttggtagcgcctccttgctccttgttgccttgagagcaatgggttgaggctcatgaataggaccgttcaacgcgtcgtccacgtatcttgcctccttgatcatcattcgcccgcttacgaacttcccaagaacttcttcgggcgacattttggtgtacctgggattctcacgaatattattcaccaaatgaggatcaagaacggtaaaggaccttagcattaggcggacgacgtcgtggtccgtccatcgcgtgcttccatagctccttatcttgttgacaagggtcttgagccggttgtacgtttgggttggctcctccccccttatcatcgcgaatctcccaagttcgccctccaccaactccatcttggtgagcatggtgacgtcgttgccctcgtgagagatcttgagggtgtcccatatctgcttggcattgtccaagccgctcaccttattgtattcttccctacacaaagatgctaagagaacagtagtagcttgtgcatttctatggatttgttcatttataagcatagggctatccgagctatcaaatttcattccattctctacaatttcccatatgcttggatggagagagaataagtgactacgcattttgtgactccaaaatccgtagtcctccccatcgaagtgtggaggtttgccaagaggaatggaaagcagatgcgaattcgaattatgtggaatacgagaataatcaaatgaaaagttcgaattgaccgtcttcctgtagtcgttgtcgtcgtccttttgggaagaggaagattcgtcgctgtcgtagtagacaatctccttgatgcgccttgtcttcttcttcttcccatcttttcgtctatggcccgggcccgagtcgttggacttgtcatccttaggttcgttgacgaaggactccttctccttgtcgttgatcacgattcccttccccttaggatccat

SEQ ID NO: 119049 - DNA, 526 bp, Zea mays
  Clone ID: MRT4577_40057C.1
ccggccgggaaaatagatcacaacaaaaaaaaatccatcattacatggcaattcaccatgtacttcgacgtcacatgggcgttgcacacagacacaccaagcgtcggtaccaatggcttactaccaggaggtggactactgctcgtaggaggtgaggctggtggccccggccggcttcggccgccacggaggtggtgtccagcagcacgtcgtctaggagaagttcgaggaggccgacactgactcacactgcggcgccaaccaccaccaccaccatggtcaccacggggtccacggtttcttggtgcgcgagaccacggtcgaaaaggacatcagcacctggactggcgagttccttgagcccagggatagcttcctgaacaggggtaactgagacgccgggaggccggcatccacgaccgttcaggcttgcctgcatgccttatgtatgtctgtggctgactggttgtggaacgtcatcctacttggctattgtacgtgcacgcactcagctcctgttctaatt

SEQ ID NO: 119050 - DNA, 4200 bp, Zea mays
  Clone ID: MRT4577_40058C.1
atggatcctaagagaaaggggatggtggtcaacgacaaggagaaggagtccctcttcaacgagccaagggacgacaagcccactgacttaggatcaagtcataagaagagggatgggaagaagaagaggcacatcaagaagatcatttactacgacagcgacgcctcctcttcttcaccaagagacgacgatgactcgtctaaaaagaaaccggttaatcaaaactattcatttgattattctcgtattccattcaattgtaatgctcatttgctatcaattccacttggtaaacctccacactttgatggagaagactactctttttggagtcacaaaatgcgtagtcacttattttctctccatcctagtatttggaagatagttgaaaatggaatgcatttcgatagtacgaataaccctgtgtttattaatgagcaaattcataagaatgcacaagctaccactgttttgctagcatctttgtgcagggatgaatacaacaaggtgagcggcttggacaacgcaaagcaaatctgggacaccctcaagatatctcatgagggaaacgacgccaccatgatcacaaaaatggagttggtggaaggcgagctggggagatttgcgatgatcaggggagaggagccaacgcagacctacaataggctcaagaccctcatcaacaagattagaagctatggaagcacaagatggacggaccacgacgtcgtccgacttatgctaaggtcattcacggtaatcgacccccatcttgtaaaccttattcgtgaaaatcccaggtacaccaaaatgacgcccgagaagatactcggaaaattcgtaagcggtcgtatgatggtaaaggaagcgcgatacgtggatgatgctcttaatggccctctacctgtctacgagcctcaacccgttgctcttaaagcaacaagcagcagggaggcgctattaagcaaggtggcacaagttgaggctgccgggctaaacgaagatgagatggccctaatcatcaagcgcttcaagaccgcactgaaaggacgcaaggagtaccccaacaagaacaaagcaaggggaaagcactcctgtttcaaatgcagaacaagaaaagcatgggaagagggagaagaagaaggtttacaagaaggactggcagcctcggccttcaacaaatctttgctcttccccaacgaatgccacacttgcctcatggccaaggagaagaaggatagattgttagaaaaacaagaggatattttatatgaggagcatgataaatttgttagtgtgcaaaaatctcttgctttagagactaagagaaatgaaatgttatcctctgaattatctgcttgccatgaatctatctctagtttaaagattttgaatgatgatttaaatgctaagctagaggaagctaataaatctagttcatgtgtagagcatgttagtatttgtaatagatgtaaggactttgatgttgatgcttgtaatgaacatcttattgctattacaaaattgaatgatgaagtggcaagtcttaatgctcaacttaagacttgcaaaattaattttgatcaattaaaatttgctagggatgcctacaccgttggtagacacccctcaattaaggacgggcttggctttcaaagggaagccaagaacttaacaagccatagggctcccgttctcaacaaagagaaaggaaaggcccctatgactagtagtcctcaaaggaaccatgcctttatctataatgaaaaagttgctagtcgttctcattataatagaaattatgctcatattccttataatgattcacatgctacgtttgcatcaagttctacttttgtgcatggtagaagtaggcctaggagaagtaatgttgtacctcatgtgcctaggagaatgtgcaatgaaccttataccatttaccatgcttgcaatacttcttttgcgcttttatgtaagaatgaaaaagttgttgctagaaagttgggatccaaatgcaagggagacaatacttgtatttgggttccaaaggctattgtgactaaccttgtaggacccaacaagagttgggtttatgcatccaggggctcaagctggattatcgacagcggatgcacaaaccacatgacgggggagaagaagatgttcacctcctacgtcaagaataaggattcccaggattcgatcatctttggagatgggaatcaaggcaaggttaaaggactgggaaagatagccattacatctgagcattctatctccaatgtgttcttagttgaatcgcttgggtacaacttattgtctaatatgcaagtggaggagtatcttgatgaagaaggcgtcaagcacgagttcttcgctccctacacaccacaacaaaacggtgtggtagagaggaagaacaggatgctcatcgacattgcgaggacgatgcttggagaattcaagacgcccgagcagttttggtcggaagctgtgaacatagcttgccatgccataaaccagctatatttgcatcgtctcctcaagaagacctcctatgaactccttaccggtaacaaactcaatgtctcttactttcgtgtatttgggagcaaatgctacaatttggtgaagaaaggtaggcattccaaatttgctcccaaagcagtagaagggtttttactagggtatgactcaaatacaaaggcgtatagggtcttcaacaaatcatcgggtttggttgaagtctctagcgacgttgtatttgatgagactaatggctctctaagagagcaagttgatcttgatgaaatagatgaagatgatgttctgacggccgtaatgcgcacgatggcgataggtgaggtgcgaccacaggaaaaacaggagcaagatcaaccatcttcctctacaatggtgcatcccccaactcaagatgatggacaggttcatcaagaagaggtgtgtgatcaagggggagcacaagaagaacaagctatggaggaagaagcaccactggcccctccaactcaagtccaaccgacgatccaaagaaatcatcccgttgaccagattctgggtgacataagcaagggagtaactactctctcaagattagctaacttttgtgagcattactcgtttgtctcttctattgagcctttcagggtagaagaggccttgcaagatccggactgggtgttggccatgcaggaagagctcaacaacttcaagaggaatgaagtttggagcctggtgccacgtccaaagcaaaacgttgtgggaaccaagttgtttcaaatggatgtgaagagcgctttcctcaacgggccaatcaaggaggaggtgtacgtggaacaaccccctggctttgaggatgacaggtaccccgaccatgtgttcaagctctctaaggtgctctatggacttaagcaagccccaagagcatggtatggatgccttagagatttcttaattgctaatgctttcaaggttgggaaagccgatcccacccttttcactaagacttgtgatggtgacctttttgtgtgccaaatttatgtcgatgacataatatttggttctactaaccaaaagtcttgtgaggagtttagtaggatgatgactcaaaagtttgagatgtcgatgatgggcgagttgaactacttccttgggttccaagtgaagcaactcaaggatggcaccttcatctcccaaacgaagtacacacaagaccttctcaagaggtttgggatgaaggacgcgaagcccgcgaagacactgatgggaactgatgggcatgtcgacctcaacaaaggaggtaagtccgttgatcaaaaggcataccggtctatgatagggtcattactttatttatgtgctagtagaccagatattatgcttagcgtatgcatgtgtgctagatatcaatccgacccgagggaatgtcaccttgtggccgttaagcgaattcttagatatttagtttctacgccttgctatgggatctggtatccaaaggggtctacctttgacttgattggatattcagacttcgattatgctggatgcaaggttgataggaagagcacatcggggacgtgccaatttctaggaaggtccctgttgtcttggagctcaaagaaacaaacatccgttgccctatccaccgctgaagccgagtatgttgccgcagcatag

SEQ ID NO: 119051 - DNA, 2597 bp, Zea mays
  Clone ID: MRT4577_40059C.1
ctaaaaacacattagatatagagtgctcggatgaaatagcaattttacctaacccttttaccttgccttgattcccatcaccgaatattattgaatcttgggaatccttgtttttgacgtaggaggtgaacatcttcttctcccccgtcatattgtttgtgcatccgctgtcgataatccagcttgaaccctcggatgcataaacctgcaaggcaaatttaggcttgggtcttaggtacccaactcatgttgggtcctacaaggttagtacaaatatccttagggaccgaaatgcaagttttgtctcccttgcattttgcccctaattttctagcaactatctttctatcctttctacaaatagcaaaggaagcatttaaagcatgatatattgtagaaggtccattcacaactttcctgggaacatgaacaatattctttctaggcacatggtgaatatttttcctaggcatatctctaccatgcatataggaagaaccagaagcaaacatggcatgagagtcaaaggcatcataagcattacaactcctataagactgtcttctatcatggtacataaaagcatggttcttttgcacactactagccataggggcctttcctttctccttggcggagatgggagccttatggcttgtcaagttcttggcttccctcttgtagccaagtccatccttaattgaggggtgtctaccaatcgtgtaggcatcccttgcaaattttagcttgtcaaattcattcttgctagtcttaagttgggcattaagactagctaattcctcatttaatttagaaattgaaactaaatgatcactacaagcatcaatgtcaaaatctttacacctattacaagtttcaacaatttctacacaagaattagatttactagctacttctagtttagcatttaaatcatcattaaaaccttttaacttagcaatagtttcatgacaagaagataattcactagagagcatttcattcctcttaatttctagagcaagagatttctgagcttctacaaatttatcatgttcttcatacaacaaatcctcttgcttttctaacagtatattcctatcattcaaggcatcaatcaattcattaattttgtctaccttagttctatctaatcccttgaataagcatgagtaatctatctcatcatcatcactagactcatcctcacttgaagaagcataagtactagtattaggagtgcttactttcttctcccttgccatgaggcaagtgtgacgctcgttggggaagagggatgacttgttgaaggcagtggcggcgagtccctcattgtcggagtcggacgaggagcagtctgaatcccactccttgccaagatgagcctcgccctttgccttcttatagttcttctttttctccctcttgttcccttgatcctgatcactatcattgtcgggacagttagcaataaaatgaccaagcttaccgcatttgaagcatgagcgcttccccttggctttggtcttgcttggctgtcccttgcgacctttaagcaccgtcttgaatcttttgatgatgagagccatctcttcatcattaagtccggccgcctcaatctgtgccaccttgctaggtagcgcctccttgcttcgtgttgccttgagagcaaggggttgcggctcgttgatcggaccattcaaggcgtcgtccacgtacctcgcctccttgatcatcattcgcccgctaacgaattccccaagaacttcttcgggcgacatcttggtgtacctgggattttcacgaatattgttcaccaaatgaggatcaagaacggtaaatgaccttagcattaggcggacgacgtcgtggtccgtccatcgcgtgctcccgtagctccttattttgttgataagggtcttgagccggttgtatgtttgtgtcggctcctcgccccttatcatcgcgaaccgtccaagctcgccttccaccaactccattttggtgagcaaggtgacatcgtttccctcatgagagatcttgagggtgtcccagatctgcttggcattgtccaagccgctcaccttgtgatactcgtccctgcacaaggaggctagcaacacagtagtagcttgtgcatttttatggatctgttcattaataaacacagggctatccgagctatcaaatttcattccactttccacaatctcccaaatgcttggatggagagaaaacaggtgagtacgcattttgtggctccaaaatccgtagtcctctccatcaaagtgagggggcttgccaagtggaatggggagcaattgagcatttgaactatgcgggatgcgcgaataatcgaaagaaaagtttgagttaaccgtctttcgtctatcgtggtcgtcgtcgtccttttgggaggaggaagattcgtcgctgtcgtagtagacaatttccttgatgcgccttgtcttcttcttcctcccgtcttttcttttgtggcccgagcctgagtcggtgggcttgtcatcattgggctcgttgacgaaggtctccttctccttgtcgttgatcaccatccccttgcccttaggatccat

SEQ ID NO: 119052 - DNA, 187 bp, Zea mays
  Clone ID: MRT4577_4005C.1
gctgtacgcctgcagtaccgtcccgattccaggtcgaccacgcgtccgtcggacgtgatgcgcttcggcagcgcgtgcgctgctgggagtacaggcagcagccgtccatcgtccgtctcaccaggcccacccgtaccgacaaggcccgtcgtctcggctacaaggccaagcaaggatatgttgtcta

SEQ ID NO: 119053 - DNA, 370 bp, Zea mays
  Clone ID: MRT4577_40060C.1
aaacctgggtttttttttatttttttttttatacttttttttttttttatttcccccacgggcaggaaaaagtttattttggggccaatttaagcggggggttttgcaacagatggtcccgggaggggaaccaaaattgcaaaaattttccaagctcaggatgaacctggcaacccaaaggcccccccaatcaaatttttttttggggataaacaagccggacccatccatgaaaggcggggggaaaaaaccccttttctgggatttaaaaatggggggaacaaaggaaacaacccgtttgttaaaccccaacttgttgtggcaccaaaaaacgagtttaaaaaaatggggattaaaagcaacccccgct

SEQ ID NO: 119054 - DNA, 444 bp, Zea mays
  Clone ID: MRT4577_40061C.1
atggatcctaaggggaagggtatcgtgatcaacgataaagagaaggaatctttcgtcaacgagccgaaggatgacaagcctactgactcgggctcgggccatagacgaaaagatgggaagaagaagaagacaaggcgcattaaggagatcgtctactacgacgacagtgatgagtccacttcttcccacaaggacaacgacgacaacgactacgacaaacgaaagacggatcaagggatcaagagggagaaaaagaagaactataagaaggcaaagggcgaggcacatcttggcaaggagtgggattcggattgctcttcgtccgactccgacaatgaaggactcgccgccaccgccttcaacaagtcatccctcttccccaacgagcgtcacacatgccttatggcaagggagaagaagaggcacaaaaatcctatgctttag

SEQ ID NO: 119055 - DNA, 255 bp, Zea mays
  Clone ID: MRT4577_40062C.1
cactccacagccgttctccgcgtcgcacgtccaaattatgctgcggccgagttcattcaggcggcggcgaactccagcgaggcccacgacggcttcacctctcgtctcaactgcaagcacgaccactcgcactgctgatcagattaatcgatcaacatggatatgattatcatgtatttagcttttggtggtggttgaacaatactaagcgaggccgagcagcatggcatacataggtattgagtggctttcact

SEQ ID NO: 119056 - DNA, 1970 bp, Zea mays
  Clone ID: MRT4577_40063C.1
ggaccctcgggctgccggctccgccctctcccctcgcctcgtcccatgtctctctcctccgccggccaccaccccctcccggcccgaccaaccccgaaccccacttccaattagatgcatcaccaccaccaccaccccgcggccgtgctggagtctgcggccccggcggcagaccctccgcccccgccggtcctcgacccgtcctccttacgcatccacatcccgtcaaggccgcaccatgcgctgccctccaccccgcacaagcgccccgttgtcatgacctcgtcctcctcgtcgtccacccccactcgcccctcgccgtcgcccttcaccccgccgcggaggcgcaaggtccccgcgccagctgctcccgcggggggcgcagcactttaagcacacagaacttcatccctggatcacctattgctgtgaaccattccaaggtcctcaatgcagtgcaggaagcgagaagagctgcagagaaggcctatgacatcccaagagttgatgataaggtgaacagggcggttgcagcagctaataaagcagccaatgcagccagggtggctgccgtgaaggctgcacaaaagcgcatccccagtaatggtgacgatctaccgctgtcagtagtgtgacaatgaagccaatatatgttggcatggagctgcttcgcgatgccatcgcatcaccaattgcccgacataaccttcaacttcccagtaggtgaagccactgctcgtctgcactggcagcggcgtctactactactacatgagcgggagatatgagggggattgggtcgacggcaagtacgacggcttcggcgtcgagacctgggccagaggtagccggtaccggggccagtaccggcatggactcaggcatggctacggcgtgtacaggttctacactggggatgtgtatgctggggagtggtcaaacggccagagccatggatatggcgttcacacctgtgaggacggtagccggtatgttggtgagttcaagaggggcgtcaagcatggtctcggccactaccatttcaggaatggtgacacctacgcgggagagtactttgctgataggatgcacggctttggaatctacagctttgccaatggtcatagatacgagggagcatggcatgagggtagaagacagggtttaggtatgtatagtttcaggaatggagagacacaagctgggcactggcaaaatggagttcttgatactttatgcacccagaactttatccctggatcacctattgctgtgaaccattccaaggtcctcaacgcagtgcaggaagcgagaagagctgcagagaaggcctatgacatcccaagagtagatgatagggtgaacagggccgttgcagcagctaataaagcagccaatgcagccagggttgctgccgtgaaggctgcacaaaagcgcaaccccaataatggtgatgatctaccactgtcagtagtgtgacaatgaaggaaatatatgttggcatgaagctgcttcgctatgccatcgcatcacccattgcccggcataaccttcagcttcccagtaggggaagccactgctcgtccatcaggccttggccagtggcgacacctgagtcattgccggcagcattcaagcttgcgggagaagaccaaattttcatacatatacatatttgtggtgtcttttgcgatgcagcagaactactgctctgaggactttccattgttcaaggtaactgggcgcgaggccagcagtaggtttctcctgcattttctgcagtgtaatactcacccaatgttagcgatacgacgaatgcacaccccaacatcaggagacaaaaacctactccctccgtttccgtttcaaactatgaatcattttaacttttactatgtacagaacctacaaatttaccggttgttgcccgtgctggttggaaaaacgacaggtgccttcgggttcggccc

SEQ ID NO: 119057 - DNA, 258 bp, Zea mays
  Clone ID: MRT4577_40064C.1
acgacgcgtccgcccacgcgtcccttcacgcgtccggcgtctccttcgacatcgaaggtagcctgggtgctcctgttccgcgtggagagaacgcgagtacccgacccgattgtgctctctcatttgcacccaaacgggccaacgttacatctcactcgcccgatctgaacactgtactccacgcagaacgattggaacatcctgatcgatattacttgactagacacctacactttcgaacgcgattccactatcagc

SEQ ID NO: 119058 - DNA, 1333 bp, Zea mays
  Clone ID: MRT4577_40065C.1
cctcgaggtcggccgggataccgcgctcctccgcccatctccacctcgccatcgtcccatgtctctctcctccgccggccaccaccccctcccggcccgaccaaccccgaaccccacttccaattagatgcatcaccaccaccaccaccccgcggccgtgctggagtctgcggccccggcggcagaccctccgcccccgccggtcctcgacccgtcctccttacgcatccacatcccgtcaagcccgcaccatgcgctgccctccaccccgcacaagcgccccgttgtcatgacctcgtcctcctcgtcgtccacccccactcgcccctcgccgtcgcccttcaccccgccgcggaggcgcaaggtccccgcgccagctgctcccgcggggggcgcagcggccaggaatggtgacacctacgcgggagagtactttgctgataggatgcacggctttggaatctacagctttgccaatggtcatagatacgagggagcatggcatgagggtagaagacagggtttaggtatgtatagtttcaggaatggagagacacaagctgggcactggcaaaatggagttcttgatactttaagcacccagaactttatccctggatcacctattgctgtgaaccattccaaggtcctcaacgcagtgcaggaagcgagaagagctgcagagaaggcctatgacatcccaagagttgatgataaggtgaacagggcggttgcagcagctaataaagcagccaatgcagccagggtggctgccgtgaaggctgcacaaaagcgcatccccagtaatggtgacgatctaccactgtcagtagtgtgacaatgaagccaatatggcaatatatgttggcatggagctgcttcgcgatgccatcgcatcaccaattgcccgacataaccttcaacttcccagtaggtgaagccactgctcgtccatcaggccatggcgtgttggcgacacctgagtcattgccagcagcattcaagcttgcgggagaagaccaagttttcagccatcccttccatacatctttgtgatgtcttttgcgatgcagcagaaccactgctctgaggactttccattgtccaaggcagccggtcgaggtcagcagtaggttttatcctgccttttctgcagtgtaatactcacccgatgttagtagagatatgatgaatgtacaccccaacatcagtcgataaaaaactgtgtttattttctctcttggactatgtacagaacctacaaatttagcggttgttggccgtgctggttggagaaaaaaaaaaaaaaaaaaaaaaaaaaaaaacctcgtgc

SEQ ID NO: 119059 - DNA, 869 bp, Zea mays
  unsure (1)..(869): unsure at all n locations
  Clone ID: MRT4577_40066C.1
cctcgaggccggccgggccgggattcaaagaggcgcccccaccatcaccacgttcctccgcccatctccacctcgccatcgtcccatgtctctctcctccgccggccaccaccccctcccggcccgaccaaccccgaaccccacttccaattagatgcatcaccaccaccaccaccccgcggccgtgctggagtctgcggccccggcggcagaccctccgcccccgccggtcctcgacccgtcctccttacgcatccacatcccgtcaagcccgcaccatgcgctgccctccaccccgcacaagcgccccgttgtcatgacctcgtcctcctcgtcgtccacccccactcgcccctcgccgtcgcccttcaccccgccgcggaggcgcaaggtccccgcgccagctgctcccgcggggggcgcagcggccaggtatctccttcgctgcctgcacctccgcctgcgcatcctcctcctcatctctctcccttccctctactttctctccccgacccccgccatcctcccgcactccctcctcgccgacttcctttccgctgcggccttctcctgcgcgctcctccttctcctctgcctctccctgccgcggcttcccttcgcgctgccgctgccgctccccctccgccgcgcgcgccgatcccctatcctttggtccatcggttcctcgccttccgcatccgcaaccacccccaccaccggccatttcgttcaggtttatagcaacggcgacgtctacgagggcaggttccaccgcggncgctgcactggcagcggcgtctactactactacatgagcgggagatatgagggggattgggtcgacggcaagtacgacggcttcggcgtcg

SEQ ID NO: 119060 - DNA, 379 bp, Zea mays
  unsure (1)..(379): unsure at all n locations
  Clone ID: MRT4577_40067C.1
agcagtggtaacaacgcagagtacttttttttttttttttttttttttttttttttgggtgtagagattcagatgtaattttgaataaatttcgttgagcagcactctgttttattattttctatactgtatgctctcctcactttacaaccaagtttgaacacacggttaaaaatacaagcaatagtaacaattcacctgtcctgaatatggagattccagggatatttttatctgtgtatcgcccatacactttaaaaacttatgttcttgtttgcaaacacacattatttttcttttgcattatatttactgggtgcatgtggtctcaataagattttattttctatcttgnttcatgtcaaaaggtngaaaacga

SEQ ID NO: 119061 - DNA, 261 bp, Zea mays
  Clone ID: MRT4577_40068C.1
gttgtttggactctgtgttcacagcccgctcctctagtagttttgtattagctattgtaacccctccaaggttgttgtttgcctaatcgaccgagattacttgtctattaatataatcagcagacatgcatctcgatcggtttgttttaaacaaaaggagttgaagcaatagaaaatacaagacaaccttcagactacatggaatgctaatgggcaatggcaatcattggaacttcttgcattggtacagtagtacttctt

SEQ ID NO: 119062 - DNA, 157 bp, Zea mays
  Clone ID: MRT4577_40069C.1
gaagaggaggagaagcgaagcaagccggcttagcgaacacgactgcagggggaacgggaggacccaggcaatgtggactagagcaagatgggcggcgcactgctgcttgcgatcctcctcgtctctactacgagcgcacctcaggtacttagagttg

SEQ ID NO: 119063 - DNA, 666 bp, Zea mays
  Clone ID: MRT4577_4006C.1
ccggccgggactcctgcagtccttctccacctagctcccccgcgccaagaacacgccagctagcaagcgcgctcgatcgaataccgttaccgtgtcgccatggccgccaccgcgtctctatcagccgtcgcggcgccgctgtcggtgcccgggctcaggaagccgctcggcgtgtcgtcgctccggcccctgcagccgagggcggcgaggatgacgacgacggccgtgcgggcgtcggcgtcgccctcgtccacgtccatcaaggagaaggctgcggccgggctgaccgcggcggccctggcggccgcgctggtgctgccggacgtcgcggaggccgcgcagtccggcgggctcacgccgtcgctcaagaacttcctcctcagcatcgtgtccggtggggtcgtgctcgttggtattgtcggcgccgttgtcgccgtctccaacttcgaccccgtcaagagggcctgatcggaatccatcgtatcgatcgtctcgcctgtgtcctgtcctgtgcctgtgctgtctgtatcgactggtggtgctatgtcccctgtgtgttaattgattttggagaatgttcagacgtatatctatgtctaagaaatggagttcgagttaaactttgctgagacttctcttatctatataatattattagtaggaatc

SEQ ID NO: 119064 - DNA, 571 bp, Zea mays
  Clone ID: MRT4577_40070C.1
ccctgcgaggcctgccgggtggctggtctggcatagcagttgacggtctgagtgcaccatatgaaagagcatcatgtattcatgaaagacatgtagtgaactggctgtgggctgcaggctgtcatccgtttggaccattctcgaactcctcccagatcagtcaaattctttaggatgtagcactggtaatgttatcaacaacattttttttatttctatgatatgtacaatgagtaggcagggagcgagggaggtcaatgctcctatgtcgaagtgcagcttaaagtagaaaatctgttcatgcttccaatggtttgcacagtgcataggtatgcaaaccaacaaaggaaaacgaggccaaactatgccccaattgtttctgtctgagtttgccagtttcaattttttggatcaacataacttgggtatgttggaaataatcccgtgtctagggtcatagcatttactttagctaaatttcagcatggaataatagggagtaatatgctgattagttgagtaatatcctgcatttattaggggctatcattgctttatttggagctcacat

SEQ ID NO: 119065 - DNA, 674 bp, Zea mays
  Clone ID: MRT4577_40071C.1
ccggccgggaccgccccgccgtgtcgctatcctgacccgcacctcgccgccgggcccctaccgccggattacatcgcccagtcgccccaccagccgaacctcgtcgcctctcccgccttgctccgaggttaggcagccagtacccccaaaccctagcatcctcggcgctgtcggtcgtagaagagcactgggggcgtgagagagggagtcaccagccctcgagacctcctcccgcttctaccactcagccgacgctcccaaaaggggcatctcaaatcccacctcactcccttcgtaagcactcgcctactcacttctcccatgtcatctgcgaaatccatgtaatatagattgttctgtggtgtcccacggtattgccacttgtttttttttggtatcagtcttagcaaaagttggcttcttacctcttcttattgtacaaagcataccaacacttatcttctcatttggtcctgtggcccattccacgttaatatacagttatgcatgtgcattggtgctgctcgtttcacctaccaagatccactatgataatgaaaaatatttctacatatgcgaccaaaacgatcaagaatatcccaatccgataaatcatcccaaacgggggttactaatagggatgcccctgagcccagtcaaataatgagcttttg

SEQ ID NO: 119066 - DNA, 272 bp, Zea mays
  Clone ID: MRT4577_40072C.1
agccagccctttttttaatttttggaagaaacatggcctaagatttgattattttaatgtaaatgggctgaacagactctcaatcatgaacatcatggggaccctctatcacttaatcacttgaatttgcaaaacaaaccattttaagaatgtccgggtccccctggaatctctggaggattgtccccttgacaaacccaagttttcaatctggggcccctcccattggtataccccaacattcaataacttcgggcctgaacctattggtt

SEQ ID NO: 119067 - DNA, 1157 bp, Zea mays
  Clone ID: MRT4577_40073C.1
gcggccgggcgtactacccatgcaagcgatcgtcggagcagacagagacttcctcgcctccatcccatcccgccgccgccgtctctacggtcgctaataagccgccgcatccagggatggagatgaagaagatcgcctgcgccgtcctcgtcgccgcctcggccaccgtggcgctggccgcggaggcgccggctccgtctcccaccagcgtgtcctccgcggaacttgcagggatcgcaggacaagatggagctggcggccatcgatctgcaggacaaaccggcttggtacaaggacaaggtttacgcacagggcacggtgccttccctggagcacgacagcgaggtcaggggcgagagcttggacctgatcaggtacatcgacagcaactttgacggccccgcgctgctcccagaggatgctgcgaagaggcagtttgctgacgaactgttcgcgtctgccaacgcgttcaccaaagccctctactcgccgttgctgtcccacgcggccgtgtcagacgaagttgttgcggctctggataaactcgaagctgacctatccaagttcgacgacgggcccttcttcctaggccaattcagcttggcggatgtagcgtacgttacgattctggaaagggttcagatatactattcccatcttaggaactacgacatcgcccaaggcaggtccaacctacaggaattcatcgacgagatgaacaagatcgaagcgtatgcgcagaccaagaacgatcctctgttcttgcttgatcttgccaagaaccatcttaagattgcctgaagatgtgacaaagcagccttagtccgttgatcggtggaagaccactcgtcagtgttgagttgagtgtttgatcaataaaatacggcatgctgtaagggttgttttacgctattgataatacactgtactgttcagctgttgaactctatttcttagccatgccaagtgcttttcttattttgaatcacattacagcaaaaggttgaaggacacccacaaaaaaaaaaaaaaaaatgcggcccgtccaagccaattttcctatttgggtcccaagcttatttagtctttgggccgaaaagatatctatagggcctgttcgatgcccatgatgtaaaaaaaaaaaaaaaaaagcggcc

SEQ ID NO: 119068 - DNA, 154 bp, Zea mays
  Clone ID: MRT4577_40074C.1
gcgggtcactcgctgcgatctctgcagacgcgaccacaccggcacatctcggcctcaatcctcggcgcacatccctccacactatgagagtatactatgctgatgagtctcgctcggcgatgcgcccctaatcgcagctatcactccacactcg

SEQ ID NO: 119069 - DNA, 263 bp, Zea mays
  Clone ID: MRT4577_40075C.1
gtgcagaaggagcaggccgataagttggctcgagagcatggaatccgatttttcgaaactagtgctaaatccagtatgaatgtggatgaggcttttagttccctggcccgggacatcttgctcaagtcaggatgccggagatcaggaaacggcaacatgcctcccagtactgagctgaaaacttgtgacaagaagaacaccaacaagtgctccctgggctgaggaccctttcttgcctcctcaccccggaagctgaacctgag

SEQ ID NO: 119070 - DNA, 1747 bp, Zea mays
  unsure (1)..(1747): unsure at all n locations
  Clone ID: MRT4577_40076C.1
cgacttgctctatttgctccctcgagtgtggccgggagtctgttagatgatgtcacgttgtaaggactcctcgtccatcggttccacacagttcgctgcgattttaattcacccgcttttgctttttctgcagttaaaacggctttaatccagcatcctaacagcctcaggattgttgaaaaaaaactaggtcttccactcttcctccactagtctactcggcagatttcactgactctcaccggcggtctttgtgcctccaccggccgccgccatgccgtacctcgtccgcgagcggctctacttcggcggcatcaaagacgccattgccgccctcacggagtcttcctccacgccggacttcacccacgtcctctccgtggtcagctccgcctccatctccttcatcaccgattgccgcccgggcctcgagatccccaccgaggaggtcctccgcgtagtcgccggcgaggagggcgcggcaccgactgccgcggttcccccggggacgctgatgcgggtggtggagcgcgccgggcacgggctgcgggtcacgcgcatggccgtgccgctgcgggacaccgaggaggaggacctgctcgaccgcctcgagccctgccttgagttcatcgatgagggcaggaaggtcgggaatgtcctcgtccattgctttgctggggtgtcgaggagcgcttccatcattgttgcttatcttatgagagcagaacagaaatctcttgaagaagcattagaagctctgaaggagatttctgagtcggcgtgcccaaacgatggttttcttgaccagctgaaattatttgaagaaatgggcttcaaagttgatacttcaagtcctttgtacaagagattccgcttgaaattattaggccaatcctacatatctggggagaaaataagcagctatatgtttgaagatgaccctggcctttctctagagtctggctcttgtcaagattcttcaaaggttgagcaacgtaaaacagcttaccgctgcaggaaatgcaggagagttattgctgtagagggcaatgttataagtcatgttcctggtgagggtgaatcttgctttgattggaaccgaagaaagagtggtcatccatacaacaacaaagaacatggttgctcatctttgtttgtcgaacctctgaaatggatgactccagtagaagacggcgctttggagggaaagctatcatgcatccactgtggagctcggttgggatacttcaactggtcaggaatacagtgcaactgtggtagctgggttactcctgccttccaaattgttaagagcaaagttgatatcagcaccatctagacctgtgagcaaacgactggcaagtttgagggacgaggagcgcgacagcagtgacgcctgacggtttaatgttttgtgtaccatatgaacgctacgtatacaggtgaagcaatagcgtattttatgtttttccattgccgatcagaagctgtgtgtggcaaataccgtataaaatttcgcatttgctgatgtaacaagtagccgtgatgtcggccatctgcccatctgtttagctggaacgggagcgaatgcagattgtgcagagaaatgaacacggttgtgtttctattctttctgtggattcaaatgtgcgcccaatatgaatactcgttcgtttctttttttcaaaaaaaaaaaaaaaacttaaggttccgcgcgccgctnntagaggcatcccaagccttacgt

SEQ ID NO: 119071 - DNA, 1080 bp, Zea mays
  unsure (1)..(1080): unsure at all n locations
  Clone ID: MRT4577_40077C.1
gtaactgcaatgatatttttacttcacatgtatggtataaagacaccaatgacgtacacacttatgctttgatcatagacacatagatgtattaaacagtttacatacctccaaataaaatgctcaatttacaagccaaccaccaagcttggcaagtaaaataagacatcggctgtctaaacaaacaccagtactacatgccttgaccttggagacgatcaatcctatgaaaggacatgaaactgtctagttcgtgtagttattgatcagataattaatgctttaaacgaaacctctttgtgatgacttttttcatcttctggccagtggttttgtcctcagcggagacattcaggataccattccagtcgacactgaagcaaacagtgatctgaggaacacccctaggtgcaggaataacggaaaactcaaactcacccaacaaggtggttgtcacgagtaatagacccctcaccctcgtacactcggattcggatacaaggctggttgtcggagtcagtcgataagaccatctcctttttggttggaatggtagtgttccttggaatcatcacggtcatgaggcccccatccgtctccaaaccaagagaaagaggggtagcatccaacaggagataattctggatctcattctcatagtcatcctctccgctcatgatagcagcctggatagtagctccgtagcaacagcttcatcggggttgatgctgttgcaaagctccttccccgtcaaagagctcctgaagaagctgctggatctttggaattctagaggaaccaccgacaaggacgacatcatgaactgaacgtacataacgcgcatcactgaggcagtcctccacaatcgccatacactttctgaagagatccatgttgagctcctcaaacctggcacgggtgatggctgagtagaagtcgatgtcctcatacaagcaatcaatctcaatgctcgcctctaaataggaggagagggtcctctttgctctctcgcaggctgtccttagcctcctgagagccctaggggtgccgctaatgtccttcttcttcnttctcttgaat

SEQ ID NO: 119072 - DNA, 1146 bp, Zea mays
  Clone ID: MRT4577_40078C.1
gcctgtaactgcaatgatatttttacttcacatgtatggtataaagacaccaatgacgtacacacttatgctttgatcatagacacgtagatgtattaaacagtttacatacctccaaataaaatgctcaatttacaagctgtccacttagcttggcaagtaaaataagatagcggccgtctaaacaaataccttgatcttggagacgatctatcctatgaaaggacatgaaattgtctagcctgtgtagtttgatcagacaattaatgctttaaatgaaacctcttcgtgatggttttgttcatcttctggccagtggttttgtcctcagcggagacattcaggatactgttaaggtcgacatcgaagcaaacagtgatctgaggaacgccgctaggtgcaggaagaagggaaaactcaaactcacccaacaggtggttgtcatgagtaatagccccctcaccctcgtacacccggatttggatacaaggctggttgtcggagtcagtcgataagaccatttcctttcttattggaagggtggtgttccttggaatcagcacagtcatgacacccccatccgtctccaaaccaagagaaagaggggtaacatccaacaggagataattctggatctcatagccatcctctccgctcaagatagcagcctggatagtagctccgtaggcaacagcttcatcagggttgatgctgttgcaaagctccttcccgtcaaagagctcctgaagaagctgctggatctttggaattctagaggaaccaccgacaaggacgacatcatgaactgaacgtacataacgcgcatcactgaggcagtcctccacaatcgccatacactttctgaagagatccatgttgagctcctcaaacctggcacgggtgatggctgagtagaagtcgatgtcctcatacaagcaatcaatctcaatgctcgcctctaaataggaggagagggtcctcttcgctctctcgcaggctgtccttagcctccttagagccctagggttgccgctaatgtccttcttcttctttctcttgaattcctcgacaaagtggtttaccatcctgttgtcgaagtcctcacctccaaggtgagcagcaccagctgtggccctgacctcaaag

SEQ ID NO: 119073 - DNA, 2112 bp, Zea mays
  Clone ID: MRT4577_40079C.1
agatgcctgtaactgcaatgatatttttacttcacatgtatggtataaagacaccaatgacgtacacacttatgctttgatcatagacacatagatgtattaaacagtttacaacctccaaataaaatgctcaatttacaaggcaaccaccaagcttggcaagtaaaataagacatcggctgtctaaacaaacaccagtactatatgccttgaccttggagacgatcaatcctatgaaaggacataaaactgtctagttcgtgtagttattgatcagataattaacgctttaaacgaaacctctttgtgatgacttttttcatcttctggccagtggttttgtcctcagcggagacattcaggataccgttaatgtcgacatcgaagcaaacagtgatctgaggaacgccgctaggtgcgggaagaagggaaaactcaaactcacccaacaggtggttgtcacgagtaatagacccctcaccctcgtacactcggattcggatacaaggctggttgtcggagtcagtcgataagaccctctcctttttggttggaatggtggtattccttggaatcatcaaggggcgtgttcggttggctgcaagccgacactgttgcagctgtttggactgctgcagctgcaatccatagagagaaaaatactgtagaagccgcagccgcagccggattgcagccgcagcaagccgcagcgaacaagctgaagaaggtcatgaggcccccatccgtctccaaaccaagagaaagaggggtagcatccaacaggagataattctggatctcatagccaccctctcggctcaagatagcagcctgcatagtagctccgtaggcaacagcttcatcggggttgatgctgttgcaaagctccttcccatcaaagagctcctgaagaagctgctggatctttggaattctagaggaaccaccaacaaggacgacatcatgaattgaacgtacataactcgcatcactgaggcagtcctccacaatcgccatacactttctgaagagatccatgttgagctcctcaaacctggcacgggtgatggctgagtagaagtcgatgtcctcatacaagcaatcaatctcaatgctcgcctctaaataggaggagagggtcctcttcgctctctcgcaggctgtccttagcctcctgagagccctagggttgccgctaatgtccttcttcttctttctcttgaattcctcgacaaagtggtttaccatcctgttgtcgaagtcctcacctccaaggtgagcagcaccagctgtggccctgacctcaaagataccctgttcaattgcgagaacagagacatcaaaggtaccacctccaagatcaaacacgagaacgtcatattcacccataatctgggcagccttcctattaagaccataagccaaagcagcagcagtgggctcagggatgatgcgtataacattaagatttgcaagcactcctgcattccatgtggcctgtctctgcaagtcggtagagcaggcaggaacagtgacaacagcatccttgactgtggtgccaagataggcttcagcaatctcccgcattttgacaaggaccatcgaggagatttcttcagctgcaaactgctgctccacacccctgtattgaacaactatcataggcttgtcatcaggtccaggaatgaccttgaagggccagtgcttaatgtcactctgtacagaagcatcgctatatcttctaccaatgagccgcttggaatcgaagattgtgttgctggggttcatttcggcctggttcttggcagcatcccccacgaggagcctggagccggtgaaggcaacgtacgatggggtggttcggttgccttggtcattggcgatgacctcgacgcccccgttctgccagaccccgacgcaggagtaagtcgtgcccagatcgatcccgatggcaagaccgcgccgctcgccggccatcttacttgacttgctcagcgcgctacaggagggggcggccggccggccggccggcgaagcagccgccgccgctgtagccttgtggcagaccagcagagaagtgaactgcccaagaggaaagcttagcgagcgaaa

SEQ ID NO: 119074 - DNA, 600 bp, Zea mays
  Clone ID: MRT4577_4007C.1
ccccgcgtccgcccacgcgttcgtccacgcgtacgctctggcgatctttttcgaccaccagcatggaggaaaggaggaagctgctgtggcggcgagggcatgatggcttcgtgcacctccctcacctcttcttagcggccctggcgctggccctcctagtcgtggacccggtcggcctcagtccgctgaacgacgaccactaccggccggggaagcacaagctcacgccgtacggagaggtcatgggcagcttgaccagagacaatgccaaccggctcaggcacgggaggctgcagttcgtcatcgaggtgtacctgccggagcccatccagttcgatctccagggccgcgggccgtacgcccgcctcatcgacggccacgtcgtgcggtggatgggcgacgaggccaattgtgatacgttcgacgacatgaatgctgactgagcaaactcagtctgtgccaatggagtgaactcagcgacgatgaagcagcacgagatggaggagttgtgccgccggccgatcggcctgatgtaccacggcgagaccggctagctctacatggtcgacgcgtactacggtctcatgggcgtcggccaca

SEQ ID NO: 119075 - DNA, 383 bp, Zea mays
  Clone ID: MRT4577_40080C.1
ataggaccactcacaataaggagtgttggaaaaggtaaaatgcattttacaacagtttaaagggctcaaaaacctatacagaccgggctgcattgtctaaaaacaaaacaaagtggaacacccaggccttgactgaaaacatatcatacaatgagcggggaaattttactgacgacagtcataacaagcataacactcaaaaaaccaggttccagatcacattgcataattacattctaaaacaggaaacactagctactagtttttaggaacagaaagccaattttactgcaacttactcaaatcgtgcttggatgctataataatttttttattagggacctatgagaaataataagtccataaggtcaagttaacactaa

SEQ ID NO: 119076 - DNA, 2018 bp, Zea mays
  Clone ID: MRT4577_40081C.1
gacagtatatagggtaagaaagcatcacggtgctgcatgcaaatgcaggccaagaaccatcaccgagaagcacttccatgtgcttttcctactaaacttctaaacgcaaggaatgttggtcgtgctgcaaaacagcaaaactgacaacatacctcaacaagacaagaacaaactcaaaatccatagcacccaaaagactccacccattggatattattggcgttgatcattaatgtctaccaaactaaaattagaaaattgctatgtttctaattgctgtcagaatttctagagttcatctctttttaattacatatggtgataaataataaataatttaatgctttaaacggaacctcttggtgatggttttcctcatcttctcgccggtagttttgtcctcagctgcgacatcgaggatgcagtcggcatcgatatgaaatgtaatagtgatctgtggaacacccttgggcgctggaggaatggagaactcaaactcacccaacaggttgttgtcgcgagccatggccccctcaccttcgtacacctggatacggatacaaggctggttgtcggagtcagttgacaagaccacctccttccttgtggggatggttgtgttcttcggaatcagcacggtcatcacacccccatctgtggccaacccaagagaaagaggcgtagcatcgttcatgaggtagtcctctatctcatcctctccactcatgattgcagcctggatagtagctccgtaagcaacagcctcgtcagggttgatgctcttgaaaagcttcttcccgttgaagagctcttggagaaactgctgaacctttggaattctagaggagccaccgacaaggacaacatcatgaaccgagcccacgtccattttagcatcgctgaggcagtcctccacaatgtcaatgcacttcctgaagagatccatgttgagctcctcaaacctggcgcgagtgatggttgagtagaagttgatgtcctcgtacaaacagtcaatctcaatggtggcctctaaagtggaggagagggtcctcttcgccctctcgcaggccgtccttagtctcctgagagccctggggttgccactgatgtcctccttcgtctttctcttgaattcctgaacaaagtggttcaccatccggttgtcgaagtcctcacctccaaggtgagcggcaccagctgtggctaagacctcaaagacaccctccactttgtcgagaacagagacatcaaaggtaccacctccaaggtcaaacacgagaacattgtatccacccgtaacctgggcagccttcctgtcaagaccataagccaaggcagcagcagtgggctcagggatgatgcgcataacattgagactagcaagcactccggcattccaggtggcctgcctctgcaagtccgtggagcaggcaggaacagtgacaacggcatccctgatggtggtgccaagataggcttcagcagtctcccgcatcttgacgagaaccatcgaggagatctcttcagctgcaaactgatgctccacacccctgtactgaacaacaatcagaggcttgtcatcaggtccagaaatgaccttgaagggccagtgcttaatgtcactctgtacagaagcatcgctaaatcttctaccaatgagccgcttggaatcgaagattgtgttgctggggttcatttcggcctggttcttggcagcatccccgatgaggcgcctggagccggtgaaggcgacgtaggatggggtggttcggttgccttggtcgttggcgatgatctccacgcggtcgttctgccacaccccaatgcaggagtaggtcgtgcccagatcgatcccgatggcaggatggcggcgcttgccggccatcttacttgcgttgctcagcgcgctggagaggaaggggagcttgtaactcgtggggtggggggacaagaaaggaagaaggcgagagaagattccggagacgcggcgccgatgactaccgttggatgctgggagg

SEQ ID NO: 119077 - DNA, 242 bp, Zea mays
  Clone ID: MRT4577_40082C.1
gcggcaggtaccccataccggagctgtggaacttcaaggaggaccggagagcaccgatgggcgaggcagtagcctacatagtgaagcagtggaaggtgagcaagaggaagcattaggcgggcctgatgcctgatggcccttgtgccattggttcctgggtcgatgtccctgacagtgagagctgagaccctgatcccctgactttttctgctgatggaagacctagtaccagtagcactact

SEQ ID NO: 119078 - DNA, 385 bp, Zea mays
  Clone ID: MRT4577_40083C.1
ggatcccggggtcgccccacgccccccgcgtcccgcgtggtctcccactaccaagtgccaactgccacctccctcgggcgacgtgcaaatctaactaccttaccctggatacggaagtaatgcgccttgcaatgacgaaggcagcacaactactattcgtacaactaaagaggccggcgaagcctaacgccgcgaacggcctagtcttactagatttccttctcgtcattagcgccgccgcggccaacgatgacgccgtgttttttgcgaaaatggagcattcaaaccgtctctcctgactgcgacgactgtgaggaccctctcagcaacgttcaggtttacttccttgggctaaagcgtcagattgatgtagtgagattccttt

SEQ ID NO: 119079 - DNA, 400 bp, Zea mays
  Clone ID: MRT4577_40084C.1
ttttttttgtttttttaccaattttttgtaattttttttagtaggtttgtatggggtttgcacatttggtttgcattctatatgtctctgtttgtagcgtttgcttcagtgctaaggtgggactggaggcggggcggtggcgaatgctacgggagattgagaagagagaggtgaaaataaataatagaatatctgataattagtatagggtagagatgtaagttaaatatgattgtggaagtttgtgagatagagtagaaaatctcgctgattatgatagaatattcggtaaagggtgatagcctaacatcattctcacgtcttttagcacttaattcgcacaccattgaatatttaacttcgtaggtgcgattataattttgattaaagggatgtcacc

SEQ ID NO: 119080 - DNA, 241 bp, Zea mays
  Clone ID: MRT4577_40085C.1
gtcagaatgcgaagactcgaggttctactccgtcctgttgatgagaagagaaaggctgtagcagatgttgacaaagacacgaggtatgcaattgatggatctattgtgcgcatcatgtcgagccgcaaagttatgggtcatctctagctgattgctgaatgtgttgagcagctgtgccgcatgttcaagcctgacttgcaaccatacagatgaggattgcggatctcattacaagggacta

SEQ ID NO: 119081 - DNA, 342 bp, Zea mays
  Clone ID: MRT4577_40086C.1
tcgggccgccctttttttttttttttgggacggtactttttttcttttgatgtcaaatggataaataggttattggctaaactgaccatgctacccatggggattctttacacatttaatattcctttgacccacaattgcagttgccagcttcatgtttccagggcttgcgacctggttcttaatttaatgaccttttgtaaggatctaggggtctttttggcgattcagcccataaataaagtgtgaaataaaagccgcaggttgaggcaggaaccttcttatttgagggaacagatttgcctgtgtttggttacattaaatatctgtttcacagatttt

SEQ ID NO: 119082 - DNA, 344 bp, Zea mays
  Clone ID: MRT4577_40087C.1
acggggtaacccctaacgcttctaatcgatcatatataattggggaagggggcccacacaactcgttcacggggggggggaagagcaagtgaatggggaagcccacacaactcggtcggtcgggtttttttgggggctcccacgcccgcccgtccgggtcggagaacctaataggccttacaaacctacaaatcggggggggggccggggggacaggccccgccccccggggtgggtcctgggctggaattggccccccagttggggttgttgttgcccccggcctgcggctcgggggccctggcggcgggcgggggctctccgggggggggggggggacccgg

SEQ ID NO: 119083 - DNA, 208 bp, Zea mays
  Clone ID: MRT4577_40088C.1
acgaagcagtatgatcaatcttgactaaccctgtgttagatagactagatatctcatcaatcaagtagcacatagatatatgcgatactcatgcagtcggcctctacatgtttatgcacaagatccatggaattgatacaataaagctgatcgccactcaagattacagatgttggcaatgggtttgagactgtaataatactagagt

SEQ ID NO: 119084 - DNA, 2190 bp, Zea mays
  Clone ID: MRT4577_40089C.1
atgggtataaaaattaacccaaacccgtaccctaatggggtaaaaacccatcgggtttcgggtttcggtgtacccattgccatctctacatccgagcattctatctccaatatgtttttagttgaatcgctcgggtacaacttactgtctgataaatcagaaacccaagggaccctaaagcgctttctaaggagggctcaaaatgaatttgagttgaaggtgaaaaagataagaagcgacaacgggtccgagttcaagaatctgcaagttgaggagtatcttgacgaggaaggcatcaaacacgagttctccgctccctacacaccacggcaaaacggtgtagtagagaggaagaacaggacacttatcgacatggcgagaacgatgcttggagagttcaagatgcccgcgcggttttggtcggaagctgtgaacacagcctgccacgccataaatcggctctatctgcatcgcctcctcaagaagaccccctacgaactccttaccggtaacaaacccaatgtttcttacttttgtgtatttgggagcaaatgctacattttggtgaagaaaggtagacattctaaatttgctcccaaagctgtagaagggtttttactagggtatgactcaaatacaaaggcgtataggatcttcaacaaatcatcaggattagttgaagtctctagcgacgttgtatttgatgagactaatggctcttcaagagagcaagttgatcttgatgatatagatgtagatgaagttccaacggccgcaatgcacactatggcgataggtgatgtgcgaccacaggaactacaggaacaagatcagccttcttcctcgatgctggtgcatcccccaacccaagatgatggacaggtacctcaagaagaggagcatgatcgagggggagcacaagaagaacaagttagggaggaagaagcaccacgaatctctccaacccaagtccgagcaacgatccaaagaaatcaccctgtcgatcggattctgggtgacatcagcaagggagtaactactcgctcacgtttagctatattttgtgagcattactcgtttgtctcttctattgagcctttcagggtagaagaggcattgcaggatccggactgggtgttggccatgcaggaagagctcaacaacttcaagaggaatgaagtttggagcctggtgccacgtccaaagcaaaacgttgtgggaaccaagtgggtgttccgcaacaagcaagacgagcacagagtggctattgcaaatggacgtggagagtgctttcctcaacggaccaataaaagaggaggtgtatgtggaacaacccctggctttgaggatgacaggtatcccgaccatgtgtacaaactcttcaaggcgctctatggacttaagcaagccccaagagcatggtatgaatgccttagagattttttaattgctaatgctttcaaggttgggaaagccgatcccactctttttacaaatacttgtgatggtgatctttttgtgtgccaaatttatgtcgatgacataatattttgttctactaaccaaaagtcttatgaggagtttagcagggtgatgacacaaaatttcgagatgtcgatgatgggcgagttgacctacttccttgggttccaagtgaagcaactcaaagacggcaccttcatctcccaaatgaagtacacacaagaacttctcaagcggtttgggatgaaggatgccaagcccgcgaagacaccgatgggaactgacggacatgttgacctcaacaaaggaggaaggtccctggtgtcctggagtttcaagaaacaaacatctgctgccctatccaccgctgaggccgagtatgttgtcgcaggacaatgttgcgcgcaactactttggatgaggcaaaccctccgggactttggctacaatctgagcaaagtcccactcctatgtgacaatgagagtgcaatccgcatggcggataatcctattgaacatagccgcactaagcacatagacatccgacatcacttcctgagggaccaccagcaaaagggagatatcgaggtgtatcatattagcaccgagaaccagctagccgatatcttcaccaagccgttggatgagaaaaccttttgcaggttgcgtagtgagctaaatgtcttagattcgcgtaacttggattga

SEQ ID NO: 119085 - DNA, 407 bp, Zea mays
  Clone ID: MRT4577_4008C.1
gtgggccaatacaacaaggcgggtgggtgctctcatctgttttagcaagaagtaaaaccaaaggttatatggcgcgttcaatgtaatgaagcaagagcggcatgaccttgccaaatgtaagccctaccaaagccaagcaccccactactcagaaagggcacactccgttaatctaagcgcgggggcaacctcaaacgacgaaaacacacattccaactgggcgtggttgttccgctccaggttcgtacttcttttttgcccaagtggtcaagccgaaaatgctatacggtacccgggtaggagccatgcaattttgttggcgctctgcacataggaatggaacttctagctggcatcatgaatgtcgtgagccagaaatttcaagcccgctgcttacccttgagaac

SEQ ID NO: 119086 - DNA, 388 bp, Zea mays
  Clone ID: MRT4577_40090C.1
tcttccatcctccgccgcgtcctttttgccaagcgcagcatccgccgcatcacggggctgtgttgatctcatccatggcggatgtgtatcatcaacaggacacgccgaagctcttcaaccgctggacctttgatgatgtccaggtgaacgacatctctctgaacgactaccttgctgtgaactcgtcttatcacgctatgtacctgccgaacaccgttgggcgctactccaagaagcggttccgctaggcgcagtgcccgatcgttgatcgccttacatactccctcatgatgcacgggcgcaacaacggcaagaaggtcatggctagtcgtatcatgaagcataccatggagatcattcacctgctcaccgattccatcaccatcca

SEQ ID NO: 119087 - DNA, 4257 bp, Zea mays
  Clone ID: MRT4577_40091C.1
atggatcctaagggaaaggggatggtggtcaacgacaaggagaaggagtccatcttcaacgagccaagagatgacaagcccactaactcaggctcgagtcacaagaagaaggacgggaaaagaagaggcgcatcaagaagatcatctactacgacagtgatgcatcttcttcttcaccaagagacgacgatgatgacgattcttcgtcaaagaaaaaaacgggatgaatacaataaaataagtggcttggacaacgccaagcaaatttgggacaccctcaagatctcacatgagggaaacgatgctacaatgatcaccaaaatggagttggtggaaggcgagttgggaaaatttgccatgatcaggggagaagagccaacacaaacctacaacaggttcaagaccctggtcaacaagattagaagctatggaagcacaagatggacggaccacgacgtcgtccgactcatgctcaggtcctttacagttattgaaccccatcttgtgaatcttatccgtgaaaatcccaggtacacaaagatgacgcctgaggagatactcggaaaattcgtgagcgggcgcatgatggtaaaggaggcacgatatgtggatgacaccttgaacggtccactacccgtctacgagccgcagcccgttgcgctcaaggcaacaagcagcaaggagacgctaccaagcaaggtagcacaagtggaggctatcggcctcaacgaagatgagatggcgcttatcatcaagcacttcaagaccgcacttaaaggacgcaaggagtaccccaacaagaataaaacaagaggaaagcgctcctgcttcaaatgcggtaagactggttattttattgctcaatgtcccaataatgaaaatgaccagggacaagaaagacatgggaagaaggagaagaagaaaagctacaggaaggcgaaaggcgaggctcatcttggaaaagaatgggattccgactgcttctcatccgactccgacgatgagggactggcggcatcggccttcgacaagtcatcgctcttccccaacgaacgccacacctgcctcatggccaaggagaaaaaggatagattattagaaaaacaagaggatattttatatgaggaacatgacaaatttgttagtgtacaaaaatccattgccttagaaattaagagaaatgaaatgttatcctctgaactgtctgtttgccatgaattggtctctagtttaaagagtttaaatgatgaactaaatgctaagctagaggaagttaataaatctagttcctgcgtaaaacatgttgtcatttgcaatagatgcaaggactttgatgttaattcttgcgatgaacaccttatttctattgctaaactaaatgatgaggtgggaagtcttaatgctcaacttaagacttgcaaaattgattttgataagttaaaatttgctagggatgcctacaccattggtagacacccctcaattaaggatgggcttggttttcaaaaggaagccaagaacttaacaagccaaagggctcccattcccaacaaggagaaagggaaggtctctatggctagtagtactcaaaggaatcatgctttcatttataataggaaaattgctagtcattccaattataataggagttatgatcatgatgcttttgattcacatgttatgtttgcctctagttctacttttgtccacggtagaagtaggcctaggagaaaccatgttgtgcatcatgtgcctaggaaagcgtgtaatgaatctactactgttttccatgcttgcaacacttcttttatactttcatgtaagaatgaaaaagtagttgctagaaagttgggatccaaatgcaagggagacaaaacttgtatttgggttccaaaggctattgtgactaaccttgtaggacccaacaagagtttgataattgacatcggatgcacaaaccacataacgggggagaagaagatgttcacctcctacgtcaagaacaaggattcccaggatacaattatttttggagatgggaaccaaggcaaggtcaaaggtttgggaaagatagccatctcaagcgagcactctatttcaaatgtatttttagtagagtcattagggtacaacctcctgtctgtaagtcaattgtgccacatgggctacaattgtttgtttacaaatgttgatgtatctgtctttagaaggagtgatggttcattagtgtttaagggtgtattagacggcaaactctacttagttgacttttcgaaagaggaggctgatctagatgcatgcttaatagctaagactagtatgggctggctgtggcatcgccgtctagcacatgttgggatgaagaaccttcataaacttctaaagggagaacatgtgttaggactaaccaatgtttgttttgagaaagatagaccttgtgcagcttgtcaggcagggaaacaggtgggaagcactcatcacagcaagaatgtgatgacaacatcaagaccactggagcttcttcacatggacctcttcggacccgttgcctaccttagcatcgggggaagtaagtatggtcttgtaattattgatgatttttcccgcttcacttgggtgttctttttgcaggacaaatcagaaacccaagggaccctaaagcactttctaaggagggctcaaaacgaatttgagctcaaggtgaaaaagataagaagcaacaacaggtccgagttcaagaatctgcaagttgaggagtatcttgaggaagaaggcgtcaagcacgagttctccgctccctacacaccacagcaaagcggtgtggtagagaggaagaacaagacgcttattgacatggcgagaatgatgcttggagaatttaagacgcccgagcggttttggtcgaaagctgtgaacacagcttgccacgccataaaccggctctacctacattgccttctcaagaagatctcgtatgaactccttaccggtaacaaacccaacgtttcttactttcgtgtatttggaagcaaatgttacattctagtgaagaaaggtagacattcaaaattttctcccaaggcagtagaagggtttttactagggtatgactcaaatacaaaggcgtatagagtcttcaacaaatcatcgggtttggttgaagtctctagcgacgttgtatttgatgagactaatggctctccaagagagcaagttgatcttgatgacatagatgaagatgatgttccgacaacctcaatgcgcacgatggcgataggtgatacggtgaataggtacctcaagaagagggaacagatcaaggggggagcacatgaagaacaaatgatggaggaagaagcaccacgggtccctccaactcaagtccgagcaacgatccaacgacatcaccctgttgaccagattctgggtgacataagcaagggagtaactactcactcaagattagctaacttctgtgagcattactcgtttgtctcttctattgagcctttcagggtagaagaggccttgcaagatccggattgggtgttggccatgcaggaagagctcaacaacttcaagaggaatgaagtttggagcctggtgccacgtccaaagcaaaatgttgtgggaaccaagtgggtgttccgcaacaagcaagacgagcacggggtgatgacaagaaacaaggctcgacttgtggcaaaaggttatgcccaagtcgcaggtttggatttcgaggagacttttgctcctgtggctaggctagagtctattcgaatattattagcctatgccactcaccactctttcaggttatttcaaatggatgtgaagagcgctttcctcaatgggccaatcaaggaggaggttgggaaagccgatcccactcttttcactaagacttgtgatggtgatctttttgtgtgccaaatttatgtcgatgacataatatttggttctactaatcaaaagtcttgtgaggagtttagcagggtaatgacacaaaagttcgagatgtcgatgatgggcgagttgacctacttccttgggttccaagtgaagcaactcaaggacagcaccttcctctcccaaacgaagtacactcaagatcttctccagaggtttgggatgaaggacgccaagcccgcgaagacaccgatgggaaccgacgggcatgaagacctcaacaaaggagggggagatgtgctacaacttgaccctttgagactaacctgtgtgtttgaatactcttga

SEQ ID NO: 119088 - DNA, 359 bp, Zea mays
  Clone ID: MRT4577_40092C.1
ccagaaccagagtcagaaccagttgttgaggctaccccagaaccagagccagaaccagttgttgaggctaccccagaaccagagccagaaccagttgttgaggctactccagagccagaaccagttgttgaagctaatccaaataaaattgctgagccaactaaagttgttccagttgttgttactaaaaccgaaactcaaattactagaccatcctccaaatttgacttatttacttggtttccttcactcaaaaattttcctttctttgtaaatttatggactaagcttactggtttcttctctaaataaatgtaaattctaaaaatagtcatctttttgtagttagataaagcatt

SEQ ID NO: 119089 - DNA, 3324 bp, Zea mays
  Clone ID: MRT4577_40093C.1
atggatcctaaaggcaaggggatggtgatcaacgacaaggagaaggagtccttcgtcaacgagccaaataatgacaagcccaccgactcaggctcgggccacaaaagaaaagacgggaggaagaagaagacaaggcgcatcaaggaaattgtctactacgacagcgacgaatcttcctcctcccaaaaggacgacgacgactacgatagacgaaagacgattcataaaaatgcacaagctactactgtgttgctagcttctttgtgcagggacgagtatcacaaggtgagcggcttggacaatgccaagcagatctgggacaccctcaagatctctcatgagggaaacgacgtcaccttgctcaccaaaatggagttggtggagggcgaacttggacggttcgcgatgataaggggcgaggagccgacacaaacatacaaccggctcaagacccttatcaacaaaataaggagctacgggagcacgcgatggacggaccacgacgtcgtctgcctaatgctaaggtcatttaccgttcttgatcctcatttggtgaacaatattcgtgaaaatcccaggtacaccaagatgtcgcccgaagaagttcttgggaaactcgttagcgggcgaatgatgatcaaggaggcaaggtacgtggacgacgccttgaatggtccgatcaacgagccgcaaccccttgctctcaaggcaacacgaagcatggaggcgctacctagcagggtggcacagtttgaggcggccggacttaatgatgaagagatggctctcatcatcaaaagattcaagacggtgcttaaaggtcgcaagggacaaccaagcaagaccaaagccaaggggaagcgctcatgcttcaaatgcggtaagcttggtcatttcattgctaactgtcccgataatgaaagtgaccaggaaaaggggaacaaaagggagaagaagaagcattacaagaaggccaagggcgaggcacatatcggaaaggagtgggattcggattgctcctcctccgactctgacaatgaaggactcgccgccacagccttcaacaagtcatccctcttcccaacgagcgtcacacttgcctcatggcaagagagaagaaagaatatacttttagaaaagcaagaggatttgttgtatgaagagcatgataaatttgtagaagctcagaaatctcttgctctagaaattaagaggaatgaaatgctctctagtgaattatcttcttgtcatgaaactattgctaagttaaaaagttttaatgacgatttaaatgctaaactagaagtagctagtaaatctaattcttgtgtagaaattgttgaaacttgtaataggtgtaaagattttgacattgatacttgtagtgatcatttagtttcaatttccaaattaaatgatgagttagctagtcttaatgcccaacttaagactagcaagaatgaatttgacaagctaaaatttgcaagggatgcctacacgattggtagacacccctcaattaaggatggacttggctacaagagggaagccaagaacttgacaagccataaggctcccatctccgccaaggaaaaagggaaggcccctatggctagtagtgtgcaaaagaaccatgcctttatgtaccatgatagaagacaatctagaaatgcttataggagttgtaatgcatataatgtctttgattctcatgccatgtttgcttctagttcttcttatatgcatgataagaatgttggtaggagaaatgttattcataatatgcctaggaaaaatgttgttaatattcctaggaaagtttatgcatccgggggttcaagctggattatcgacagcggatgcacaaaccatatgacgggggagaagaagatgttcacctcctacgtcaagaataaggattcccaagattcaataatattcggtgatgggaatcaaggcaaggtaaaagggttagttgagtctcttggttataacttgctatctgttagtcaattatgcaatatgggatataactgtctattcacaaatgtagatgtgtctgtctttagaaggtgtgatggttcactagcatttaagggtgtattagacggcaaactttatttagttgattttgcaaaaggggaggccggtctagatgcatgcttaattgctaagactagcatgggctggttgtggcatcgccgtttagcacatgtagggatgaagaaccttcacaagcttctaaagggagaacacgtgataggtttgactaacgtgcaattcgaaaaagatagaccttgtgcagcttgtcaagcaggtaaacaagtgggaggagcgcatcacagcaagaatgtgatgaccacttcaagacccctggagctactacatatggacctcttcggacccgtcgcctatctaagcataggaggaagtaagtacggtctagttattgttgatgacttttcccgcttcacttgggtattctttttgcaggataagtctgaaacccaagggaccctcaagcgcttcctaaggagagctcaaaatgagtttgagctcaaggtgaagaagataaggagcgacaacgggtccgagttcaagaaccttcaagtggaggagttccttgatgaggaagggatcaagcacgagttctccgctccctacacaccacaacaaaatggtgtggtagagaggaagaacaggacgctcatcgatatggcgaggacgatgcttggagagttcaagacccccgagtgcttttggtcggaagccgtgaacacggcttgtcacgccatcaacagggtctaccttcatcgcctcctcaagaagacttcgtatgagctactaaccggtaacaaacccaatgtatcttactttcgtgtatttgggagcaagtgctacattctagtgaagaagggtagaaattctaagtttgctcccaaagctgtagaagggtttttgttaggttatgactcaaatacaaaggcgtatagagtcttcaacaaatcatcgggtttggttgaagtctctagcgacgttgtatttgatgagactaatggctctccaagagagcaagttgttgatcttgatgatgtagatgaagaagacgttccaacggccgccatgcgcaccatggcgattggtgatgtgcgaccacaggaacaagtggagcaagatcaaccttcttcctcaacaatggtgcatcccccaactcaagacgatgaacaggttcatcaaaaggaggtgtgtgatcaagggggagcacaagatgatcacgtgatggaggaagaagcgcaaccggcacctccaactgagagcacctag

SEQ ID NO: 119090 - DNA, 621 bp, Zea mays
  Clone ID: MRT4577_40094C.1
ttaaatattaatagagctcctgcagagatctgggggggggggggggggggtgttgcatcgctgggcgggggcccggcccgacgtcacccacccccctccattctgcaccgcggggttcgcccgctgaatcgtagaggaggtgcttatgttggtgacgctctctatgggttgacgggcggatggagcagacgtaagccgggtccattccggtcgattgcgtagggatgggtagacgtagacgggacctcccaacagccgtctactgctccatacaacataggtgaccctttcaccctcattcaccgttatgatagcactgggtctacacttgactggcacaattactctgttaatcgaaggagactagactgtagactatacttagaacaggaggtctacttacatgtccttaaggttgtccaagaagttctaagtcaagtataccaatattaggaggtaataataagagattaggcagttaatattattaattatgccattaactataacgagaggaagaggaggaggaagaagaagaagtaatatattaataagttagataacaagatgtactagaacaaatattagtacgagaagaactagaaccagaaatagtaatag

SEQ ID NO: 119091 - DNA, 3720 bp, Zea mays
  Clone ID: MRT4577_40095C.1
atggatcctaagggcaaggggatggtggtcaatgataaggagaaggagtcattcgtcaatgatccaaaggatgacaagcccactgactcgggcatgagtcacaaaagaaaagacgggaagaagaagaaaacgaggcgcatcaaggagatcgtctactacgacgacagcgacgagtcctcttcttctcaaaaggacgacgacaacgactacgagaaaaagaagacggttaattcaaatttttcctttgattattctcgtattccgcaaagttccaatactcattttctttccattccccttggtaaaccccctcactttgatggagaggactacgaattttggagtcacaaaatgcgtagccacttgttctctctccatccaagtatatgcgagatagtagaaaatggaatgcattttgatagtacggatagtcccatgttcatcaatgaacaaaaccataaaaatgctcaagctactactgtccttttagcatctttgtgcagggaagaatacaataaggtgagtggcttggacaatgccaagcagatctgggacaccctcaagatatcacatgagggaaatgacgtcaccatgctcaccaagatggagttggtggagggagaacttgggagatttgcaatgatcaggggagaggagccaaaccaaacgtacaaccggctcaagaccctcatcaacaaaataaggagctatggaagcacacgatggacggaccacgacgtcgtccgcctactgctaaggtcttttactgtccttgatccacatcttgtaaacaatattcgtgagaatcccaggtacaccaagatgtcgcccgaagaagtacttgggaagtttgtaagcgggcggatgatgatcaaggaggcaagatacgtcgacgatgcattgaatggcccaatccacgagcctcaaaccgtggctctcaaagaaacaaggagcaaggaggcgctacctagcaaggtggcgcaagttgatgcgaccgggcttaatgaggaagaaatggccctcatcatcaagctgttcaaaacggcgctaaagggtcgcaaggagcaccccaacaagaacaagacgaaggggaagcgctcctgcttcaaatgtggtaagattggtcattttatcgctaattgtcccgataataatagtgaccaggaacaagataagaagagggaaaagaagaaggcttacaggaaggctaagggcgaggcacaccttggcaaggagtgggactcggattgctcttcgtccgactccgacaacgaaggactcgctgcatcggccttcaacaaatcatctctcttccccaacgagcactattctagtttattcaaaggtttagacagaaataaaattgataagatcaataaattgattgatgctttgaatgataagaatagattgttagaaaagcaagaggatcttttgtatgaagaacatgataaatttgtagaggcacaaaaatctcttgctttagaagttaaaaggaatgaaatgctttcttgtgaactatctacatgccatgagtctatttctaacttaaagagtattaatgatgacttgaatgctaagttagaagtagcaaatagatctaactcttgtgtagaacatgttgtgatttgcaataggtgtaaagattttaatgttgatgcgtgtagtgaacatctagtctccattgcaaaactaaacgatgaagtggctagtcttaatgcccaacttaagactagcaaggatgaatttgacaaactaaaatttgcaagggatgcctacactattggtagacacccctcaattaaggacgggcttggcttcaaaagggaagccaagaacttaactagtcataaggctcccattcccgctaaggagaaagggaaggcccctatgactaatagttgtcaaaagaaccatgctttcatgtaccatgataggaaattttctagaaatgctcattatgataggagttttaatgcttacaattcaaatgcaatgattgcctcaagttcttcgattatgcataatagaaatttgactagaaaaaatgttatgcctagaagaaatgttgttcatgttcctagcaaagtaaacaatgaaccttctacaatttatcatgcttgcaatgcttcctttgcaatttgtagaaaggatagaaaggtgattgctaggaaattaggggcaaaatgcaagggagataaaacttgcatttgggtccctaaggatattgtcactaaccttgtaggacccaacaagagttgggtttatgcatccgggggatcaagctggattatcgacagcggatgcacaaaccacatgacgggggagaagaagatgttcacctcctacatcaaaaacaaagattcccaagactcaatcatattcggtgacaggaatcaaggcaaggtgaaagggttaggaaaaatagctatttcatccgagcactccatttccaatgtgtttttagttgagtcgcttggatataacttgttgtctgtgagtcagctttgtaatatgggatataactgcttattcacaaatgtagatgtgtctgtctttagaaggagtgatggttcattagcttttaagggtgtattagacgacaaactctacttagttgattttgcaaaagaggaggccggtctagatgcatgcctaattgctaagactagcatgggctggctgtggcatcgccgcttagcacatgtggggatgaagaaccttcacaaacttctaaagggagaacacgtgataggtctaacaaatgttacttttgaaaaggatagacctcgtgcagcttgtcaagcaggtaaacaggtgggaagctctcatcataccaaaaatgtgatgaccacatcaagacctttggagttgcttcatatggacctcttcggacccgtcgcctatctaagtataggaggaagtaagtatggtcttgttatagttgatgatttttcctgcttcacttgggtattctttttgcaggataagtctgaaacccaagggaccctcaagcgcttcctaaggagagctcaaaatgagtttgagctcaaggtgaagaagataaggagcgacaatgggtccgagttcaagaaccttcaagtggaggagtaccttgaggaggaaggaatcaagcacgagttctccgctccctacacaccacagcaaaatggtgtggtagagaggaagaacaggacgcttatagacatggcaaggacaatgcttggagagttcaagacgcccgagcggttttggtcggaagccgtgaacacgacttgtcacgccatgaaccgggtctaccttcatcgcctcctcaagaagacgtcatacgagctactaaccggtaacaaacccaatgtttcgtattttcgagtttttgggagtaaatgctacattctagtgaagaagggtaggaattccaaatttgcccccaaagctgtagaagggtttttgttaggttatgactcaaatacaaaggcgtatagggtcttcaacaaatcattgggtttggttgaagtctctagcgacgttgtatttgatgagactaatggctctccaagagagcaagttgttgatcttgatgatgtagatgaagaagacgttccaacggccgcaatacgcaccatggcgattggagatgtgcggccacaggaacaaaaggagcaagatcaaccttcttcctcaacaatggtgcatcccccaactcaagacgataaatag

SEQ ID NO: 119092 - DNA, 1908 bp, Zea mays
  Clone ID: MRT4577_40096C.1
atggatcctaaggggaagggaatcgtgatcaacgataaggagaaggagtccttcgtcaacgagccgaaggatgacaagcctaccgactcgggctcgggccacaaacgcaaagatgggaagaagaagaagacgagacgcatcaaggagatcgtctactacgacgacaacgatgagtccacttcttcccaaaaggacaacgacgacaacgactacgacaaacgaaagacggttaactcaaacttttctttcgattattcgcgtatcccgcatagctcaaatgcacatttgctttccatccctcttggcaaacctccacactttgatggggaggactacggattttggagtcacaaaatgcgtagtcacttgttctctctccatccaagcatatggttgattgttgagaatggaatgaaatttgatagctcggatagtcctacatttattaatgaacagattcataaaaatgcacaagctactactgtgttgttagcctccttgtgcagggacgagtaccataagatggagttggtggagggcgagcttggaagattcgcgatgataaggggcgaggagccaacccaaacatacaaccggctcaagacccttatcaacaaaataaggagctacggaagcacgcgatggacggaccacgacgtcgtccacctaatgctaaggtcctttactgtacttgatccacatttggtgaacaatattcgtgaaaatcctaggtacaccaagatgtcgcccgaagaagtccttggaaagttcataagcgggcgaatgatgatcaaggaggcaaggtacgtggacgacgcgttgaacggtccaatccatgagcctcaacccattgctctcaaggcaacgaggagcaaggaggtgctacctagcaaggtggcgcaagttgaggcggccgggctcaatgatgaagagatggccctcatcatcaagcgcttcaagacggcgctaaagggtcgcaagggacagccaagcaagaccaagacaaaggggaagcgctcatgcttcaaatgtggtaagattggtcattttattgctaactgtctcgataatgatagtgaccaggaacaagggggaaagagggagaagaagaaggcatacaagaaggctaagggcgaggcacaccttggcaaggagtgggactcggattgttcatcatccgactccgaaaatgaaggactcgccgccaccgccttcaacaagtcatccctcttccccaacgagcgtcacacatgcctcatggcaaaggagaagaaggtatgtactcgagacagtactacttatgattcttctagtgatgatgaatctagtgatgaacaaatagattactctagtttattcaagggattggatagaactaaaatagataagattaacgaattgattgatgccttgaatgaaaaggatagacttttagaaaaacaagaggaccttttatatgaagagcatgataaatttgttagtgcacaaaattcacttgctctagaagttaaaaggaatgaaatgctttctagtgaagtgtctacatgtcatgactctatctctagtttaaagagaattaacaatgatttaaatgctaaactagaagtagcaaataaatctaactcttgtgtagaacatgttatgatttgcactaggtgtaaagattttgacattgatgcttgtagtgaacacctagtttgcatttctaaattaaatgatgaagtggctagtcttaatgcccaagttaagactagcaagagtgaatttgataagctaaaatttgcaagggatgcctacacgattggtagacacccctcaattaaggatggacttggcttcaagagggaagccaagaacttgacaagccataaggctcccatctcagccagggaaggcccctatggctag

SEQ ID NO: 119093 - DNA, 1956 bp, Zea mays
  Clone ID: MRT4577_40097C.1
atggatattaagggaaatgggatggtggtcaacgataaggagaaggagtccatcttcaacgagccaagagataacaagcccactgactctggcttgagtcacaagaagaaggatgggaagaagaagaggcgcatcaagaagatcgtctactacgacagcgacgaatcttcctcttcaccaagagacaacgacgagaaaaggaaaccgcaaattcataaaaatgcacaagctaccactgttttgctagcatccttgtgcagggacgagtacaacaaggtgagcggcttggacaatgccaagcaaatctgggacaccctcaaaatatcacatgagggaaacgacgccaccatgatcaccaaaatggagttggtggaaggtgagctgggaaggttcgctatgatcaggggagagaagccaacacagacgtacaacaggctcaagaccctggtcaacaagatcaggagctatgggagcacgagatggacggaccacaacgtcgtccgacttatgctcaggtcttttactgttattgaccctcatcttgtgaacctcatccatgaaaatcccaggtacacaaaaatgacgcccgaagagatactcggaaaatttgtgagcgggcgcatgatggtcaaggaggcgaggtatgttgatgatgcattaaacggccccatgcccatctacgagccgcaacccgttgcactcaaggcaacaagcagcaaggaggcgctaccaagcaaggtagcacaagtagaggctctcgggctcaatgagagtgaaatggtgcttatcatcaagtgtttcaagaccgctcttaaaggacgcaaggagtaccccaacaagaacaagacaaggggaaagcgctcctgcttcaaatgcggtaagactggtcactttattgcaaactgtcccgataatgatagtgaccagggacaagaaaatagcgggaagagggagaagaaggcctacaagaaggcaaagggcgaggcgcatcttgggaaagaatgggattcagactgctcttcctccgactccgatgacgaaggacttgctgcctcagccttcaacaagtcctctctcttccccaacgaacgccatacctgcctcatggcaaaggagaaaaaggataaatcagaaacccaagggaccctaaagcgctttctaaggagggctcaaaacgagtttgagctcaaggtgaaaaagataagaagcgacaacgggtccgagttcaagaatctgcaagtggaggagtaccttgaggaggaaggcatcaagcacgagttctccgctccctacacaccacaacaaaatggtgtagtagagaggaagaacatgacacttatcgacatggcaaggacgatgcttggagagttcaagacgcctgagcggttttggtcggaagctgtgaacacaacctgccacgccataaaccggctctaccttcatcgcctcctcaagaagacctcggtagaagaggccttgcaagatccggactgggtgttggccatgcaggagaagctcaacaacttcaagcgaaatgaagtttggagcctggtgccacgtccaaagcaaaacgttgtgggaaccaagtgggtgttccacaacaagcaagacgagcacggggtggtgacaagaaacaaggctcgacttgtggcaaaaggttatgcccaagtcgcaggtttggattttgaggagacttttgctcctgtggctaggctagagtcaattcgcattttgttagcctatgccgctcaccattcttttagcttgtttcaaatggatgtgaagagcgttttcctcaacgggccaatcaaggaggaggtgtacgtggaacaaccccctggctttgaggatgacaggtatcccgaccacgtttttaagctctctaaggcgctccatggacttaagcaagccccaagagcatggtatgaatgccttagagattttgagagcacctag

SEQ ID NO: 119094 - DNA, 223 bp, Zea mays
  Clone ID: MRT4577_40098C.1
aacaaatcccacaaatcaaggttcaaaaaccattatgcaactccaaaaaccccttttacaaattgcaacatctaaaactggcaataattttaaaaatacccatgttactacagcctaattggtttaatttttggttctcctctgacctaaagtttttaaaaattaatgaattaaccaattccccaggccccgccggatgaacaaaatgctttgatattttttt

SEQ ID NO: 119095 - DNA, 1074 bp, Zea mays
  Clone ID: MRT4577_40099C.1
atgacgcccgaggagatacttggaaagttcgtaagcgggcgaatgatgatcaaggaggcaagatacgttgatgatgcgttaaatggcccaatccatgagcctcaagccattgctctcaaggcaacaagtagcagggaggcgctacctagcaaggtggtgcaaattgaggcggctgggctaaatgaggatgaaatggccctcatcatcaagcgcttcaagacggcgctcaaaggtcgcaaggagcatcccaacaaaagcaagacgaagggaaagcgctcctgcttcaagtgtggtaagattggtcattttatcgctaattgtcccgataatgatagtgaccaggaacaagagaagaagagggaaaagaagaaggcttacaagaaggctaagggagaggcacaccttggcaaggaatgggactcggattgttcgtcgtccgactccggcaacgaaggactcgccacctcagcctttaacaaatcgtctctcttccccaacgagcatcacacctgcctcatggcaaaggagaagaaggtttatgcatccgggggatcaagctggattatcgaccgcggatgcacaaaccacatgacgggggagaagaagatgttctcttcctacatcaagaacaaagattcccaagactcaatcatattcggtgacgggaatcaagacaaggataaatctaaaacccaagggaccctcaagcgcttcctaaggagagctcaaaatgagtttgagctcaaggtgaagaagataaggagcgacaacgggtccgagttcaagaaccttcaagtggaggagtaccttgaggaggaaggaatcaagcatgagttctccgctccgtacacaccacaacaaaatggtgtgatgaagaagacattccaacggtcgcaatacgtaccacggcgattggcgatgtgcgaccacaggaacaaaaggagcaagatcaaccttcttcctcaacaatggtgcatcccccaactcaagatgatgaacaggttcatcaataagaggcgcgtgatcaagggggagcacaagatgatcatgttatggaggaagaagcacaactga

SEQ ID NO: 119096 - DNA, 754 bp, Zea mays
  unsure (1)..(754): unsure at all n locations
  Clone ID: MRT4577_4009C.1
gtgcggacgctcgaggccggccgggccgggactcctgcagtccttctccacctagctcccccgcgccaagaacacgccagctagcaagcgcgctcgatcgaataccgttaccgtgtcgccatggccgccaccgcgtctctatcagccgtcgcggcgccgctgtcggtgcccgggctcaggaagccgctcggcgcgtcgtcgctccggcccctgcagccgagggcggcgaggatgacgacgacggccgtgccggcgtcggcgtcgccctcgtccacgtccatcaaggagaaggctgcggccgggctgaccgcggcggccctggcagccgcgctggtgctgccggacgtcgcggaggccgcgcagtccggcgggctcacgccgtcgctcaagaacttcctcctcagcatcgtgtccggtggggtcgtgctcgttggtattgtcggcgccgttgtcgccgtctccaacttcgaccccgtcaagagggcctgatcggaatccatcgtatcgatcgtctcgcctgtgtcctgtcctgtgcctgtgctgtctgtatcgactggtggtgctatatcccctgtgtgttaattgattttggagaatgttcagacgtatatctatgtctaagaaatggagttcgagttaaactttgctgtgaaaaaaaaaaaaaaaaaaaaaaaaaaaaaaaaaaaaaaaaaaaaaaaaaaaaaaaaaaaaaaaaaaaaaaaaaaaaaanagggggcgggccgttttgaaagga

SEQ ID NO: 119097 - DNA, 898 bp, Zea mays
  unsure (1)..(898): unsure at all n locations
  Clone ID: MRT4577_400C.1
ancgttggnaccgtctttaactccttgtgatgagccagttgattcttcttggtacagcaatcaggttgagatgggatatgtatatgcccagcatgctcttcatattttatcgaggaattcccaaaaaaagatggtggttctgtcgatttgtcacaagagttgtttgccagtacagatgctggattcaggaatgattatggatctacggacatttcntcatatgaaaaatccaactacctgtatttttaaaagaagggagcggcatgttcatctttgtgaaaccctgtctccagtggttcctccaaagttgttgcagtcattgagaggccctgcttttgttgattatttgtcttcaatcagccagatttccaaattagaaaacttgcgactctctgaaaataaagtcataaacaagcgaagaaggtgaacaccaggatttgtacccctcgtgggtggagtgatgcacccacgactccaccaaggatgcatttcctgtatttgctttgtttatgcaagtttgtatttgcgcagatggattgcacatggtcccgtcaggcaagacattacttgagttctggcgcacttcaactttcacatgaggatgttgtattattagcagaaagcggctgtttcagtagcagacgcgagagggttgaggttgtagagcaagcaccagtcagtacataagttaatgaactggtgctgatcatgagcggcagcattttgatttttttcccccccccgcccatgtgactgggttggccgagccatttttatagttgcgtccgtgatcacggagcccggcggtggaggaaccggaacgtgtgcagttgattgctgtatctgttagataactagtcattttaaagtttaaaaaaaaaaaaaaaaacaccccccc

SEQ ID NO: 119098 - DNA, 3744 bp, Zea mays
  Clone ID: MRT4577_40100C.1
atgagcatttgggaaatagtggaaaatgggatgcattttgatagtacggataaccctgtgtttattaatgagcaaatccataagaatgcccaagctactattgtcttgttagcttcgctttgcagggatgaatacaataaagtaagtggcttggacaacgccaagcaaatttgggacaccctcaagatctcacatgagggaaacgatgctacaatgatcaccaaaatggagttggtggaaggcgaattgggaagatttgccatgatcaggggagaagagccaacacaaacctacaacaggctcaagaccctggtcaacaaaattagaagctatggaagcacaagatggacggatcacgatgtcgtccgactcatgctcaggtcctctaccgtcattgaccctcatcttgtgaatctcatccgtgaaaatcccaggtacacaaagatgacgcccgaggagatacttggaaaattcgtgaacgagcgcatgatggtaaaggaggcacgatatgtggatgatgccttgaacgggccactatccgtctacgagccgcagcccgttgcgctcaaggcaacaagcagcaaggaggcgctaccaagcaaggtagcacaagtagaggctgccggactcaacgagaatgaaatggcacttatcatcaagcgcttcaagaccgctcttaaaggactcaaggagtaccccaacaagaacaaaacaaggggaaagcgctccagcttcaaatgcgataagactggtcactttatagcaaattgtcccgataatgatagtgatgagggacaagaaaagagcgggaagaaggagaagaaaaagagctacaggaaggcaaagggcgaggcacaccacggaaaggaatgggactcggactgctcttcctccgactccgacgacgaaggactcgctgcctcggccttcaacaagtcttctcttttccccaacgaacgccacacttgcctcatggccaaggagaagaaggtttatgcatccgggggatctagctggataatcgacagcggatgcacaaaccacatgacaggggagaagaagatgttcacctcctatgtcaagaacaaggattcccaggatacgattatttttcgagatgggaaccaaggcaaggtcaaagatttgggaaagatagccatcacaagcgagtactctatttcaaatgtatttttagtagagtcattaggatacaacctcatgtctataagtcaattgtgccacatgggctacaattgtttgtttacaaatgttgatgtttctgtctttagaaggagtgatgtttcattagcgtttaagggtgtattagacggcaaactctacttagttgattttttgaaagaggaggccaatctagatgcatgcttaatagctaagactagcatgggctggctgtggcatcgtcgtctagcacatgttgggatgaagaacctacataaacttctaaagggagaacatgtgttaggactaaccaatgcagggaaacaggtgggaagcactcatcacagcaagaatgtgatgacaacatcaagaccactggagcttctccacaaggacctcttcggacccattgcctatcttagctttggaggaagtaagtatggtttagtaattgttgatgatttttcccgcttcacttgggtattctttttggaggataaatcagaaacccaagggaccctcaagcgctttctaaggagggctcaaaacaaatttgagatcaaggtgaaaaagataagaagcgacgacgggttcgagttcaagaacctacaagttgaggagtatcttgaggaggaaggcgtcaagcacgagttgtccactccctacacaccacagcaaaacggtgtggtagagaggaagaacaggacacttatcaacatggcaaggacgatgcttggagagttcaagacacccgagcggttttggtctgaagctgtgaacacagcttgccacgccataaaccggctatatctttatcgcctcctcaagaagacctcctacgaactccttaccggtaacaaacccaatgtttcttactttcgtgtatttgggagcaaatgctacattttggtgaagaaaggtagacattctaaatttgcttccaaagctgtagaagggtttttactaggatatgactcaaatacaaaggcgtatagggtcttcaacaaatcatcgggtttggttgaagtctctagcgacgttgtatttgatgagactaatggctctccaagagagcaagttgatcttgatgacatagatgaagatgatgttccaacggccgcaatacgcaccatggcgattggagatgtgcgaccacaagaacaaaaagagcaagatgaaccttcttcctcaacgatggggcatcccccaactcaagatgatggacaggttcctcaagaagagacgcgtgatcaagggggagcacaagaagaacaagttatggaggaagaagcaccactagcccctccaactcaagtccgagagacgattcaaagaaatcacctcgtcgatcagattctgggtgacataagcaagggagtaacaacttgctcacgtttagctaatttttgtgagcctttcagggtagaagatgccttacaggatccggactgggtgttggccatgcaggaagagctcaacaacttcaaaaggaatgaagtttggagcctggtgccacgtccaaagcaaaatgttgtgggaaccaagtgggtgttccacaacaagcaagacgagcacggggtggtgacaagaaacaaggctcgacttgtggcaaaaggttatgcccaagtcgcaggtttggatttcaaggagacttttgctcctgtggctaggctagagtccattagaatattattagcctatgccgctcaccactctttcaggctgtttcaaatggatgtgaagagcgctttcctcaacgggccaatcaaggaggaggtgtatgtggaacaaccccctggctttgaggatgacaggtatcttgaccatgtgttcaaactctctaaggcgctctatggacttaagcaagccccaagagcatggtatgaatgtcttagagatttattaattgctaatgctttcaaggttgggaaagccgatcccactcttttcactaagacttgtgatggtgatctttttgtgtgccaaatctatgtcgatgacataatatttggttctactaaccaaaagtcttgtgaggagtttagcagggtgatgactcaaaagtttgagatgtcgatgatgggcgagttgaattatttccttgggttccaagtgaagcaactcaaggacggcaccttcatctcccaaacgaagtacactcaagatcttctcaagcggtttgggatgaaggacgccaagcccgcaaagacaccgatgggaactgacgggcatgtcgacctcaacaaaggaggtaagtctgttgatcaaaaggtataccggtctatgataggttccttgctttatttatgtgctagtagaccggacattatgcttagtgtatgcatgtgtgctagatatcaatccgacccaagggaatgtcaccttgtggccgttaagcgaattcttagatatttagttgctacgccttgcttcgggatctggtatccaaaggggtctacctttgacttgattggatactcagactctgattatgctggatgcaaggttgataggaagagtacatcagggacgtgccaattcctaggaaggtccctggtgtcttag

SEQ ID NO: 119099 - DNA, 3840 bp, Zea mays
  Clone ID: MRT4577_40101C.1
atggatcctaagagaaaggggatggtggtcaacgacaaggagaaggagtccatcttcaacgagccaagagatgacaagcccacagactcaggctcgagtcacaagaagaaggacgggaagaagaagaggcgcatcaaaaagatcatctactacgacagcgatgcatcttcttcttcaccaagagacgatgacgattcctcgtcaaagaaaaagacgattaatcaaaactattcttttgattattctcgcatgtcatacaattcaaatgtacatctactttcaattccccttggaaaacccccacactttgatggagaggattgctcattttggagtcataaaatgtgtagtcatctattttcgctccatcctagcatttgggaaattgtggaaaatggaatgcatttcgatagtacggatacccctgtaatgataaatgaacaaattcataaaaatgcacaagctactgctgtcttgctagcttcactttgcagggatgagtacaacaaaatgacgcccgaggagatccttggaaaatttgtgagcgggcgcatgatggtgaagaaggcacgatacgtggatgacgctttgaacggtccactacccatctacgagttgcagctcgttgctctcaaagcaacaagtagcaaggaggcgctaccaagcagggatgaaaggagtacccccaacaagaacaaaacaaggggaaagcgctcctgctttaaatgcggtaagactggtcactttattgcaaattgtcccgataatgatagtgaccagggacaagaaaatagcgggaaggagaaaaagaagaactacaggaaggcaaagggcgaggcacaccttggaaaggaatgggactcggtctgctcctcttccgactctgacgacgaaggacttgctgcctcagccttcaacaaatcctcactcttccccaacgaacgccatacatgccttatggccaaggagaaaaaagatagagccaaagtagagaaaaataatgaattaattgatgctctaaatgaaaaagatagattgctagagaagcaagaagatattttgtatgaagagcatgacaaatttattagtatccaaaaatctcttgctctagaaattaagagaaacgaaatgttatcctctgagttgtctgcttgccatgaatctgtttctaatctaaagagtttaaatgatgatttaaatgctaagctagaggaagttaataaatctagttcatgtgtagagcatgttgttatttgtaatagatgtaaggattttgatgttgatgcttgtaatgaacatattgtttctattacaaaattaagtaatgaggtggcaagtcttaatgctcaacttaagacttgcaaggatgattttaataaattgaaatttgctagggatgcctacactattggtagacacccttcaattaaggatggacttggttttcgaaaggaaaccaagaacttaacaagccaaaaggctcctgttctcaacaaggagaaagggaaggcccctatggctagtagttctcaaaagtgtcatgcctacatttatgatagaaaattttctaggaatgcgtatagagactatgatcatgctatgattgcttccagttctacttatgattgtagtagaaataggcctaggcgcaatcatgccgtgtctcatgcacctagaagaaataatgttgtgtctcatgtgcctaggaaaatgtgcaatgaacccactactgtttttcatacttgcaacacttcttttattctttcatgtaagaatgcaaaagtagtggctaggaagttgggatccaaatgcaagggagacaaaacttgcatatgggttccaaaaactattgtgactaaccttgcaggacccaacaagagttgggtttatgcatccgggggctcaagctggattatcgacagcggatgcacaaaccacatgacgggggagaagaagatgttcacctcctatgtcaagaacaaggattcccaggatatgatcatctttggagatgggaaccaacgcaaggtcaaaggcttgggcaagatagccatcaccaacgagcactccatatcgaatgtatttctagtagagtcgcttggttacaaccttctgtctgcagggaaacaagtgggaagcactcatcatagcaagaatgtgatgacaacatcaagaccactggagcttcttcacatggacctcttcggacccgttgcctaccttagcatcgggggaaggaccctaaagcgcttcctaaggagggctcaaaacgaatttgagctaaaggtgaaaaagataaggagcgacaacgggtccgagttcaagaatctgcatgttgaggagtatcttgaggaggaaggcgtcaagcacgagttctccgctccctacacaccacagcaaaacggtgtggtagagaggaagaacaggacacttatcgacatggcgagaacgatgcttggagagttcaagacgcccgagcggttttggtcggaagctgtgaacacagcttgccacgccataaaccagctctatctgcatcgccttctcaaaaagacctcctacgaactccttaccggtaacaaacccaatgtctcctactttcgtgtatttgggagcaaatgttacattctggtgaagaaagtctctagcgacgttgtatttgatgagactaatggctctccaagagagcaagttgatcttgatgacatagatgaagatgatgttccaacggccccaatgcgcacgatggcgattggttatgtgcgaccacaggaacaacatgagcaagatcagccatcttgctcaacaatggtgcatcctccaactcaagacgatgaacatgtacctcaagaagagggaccggatcaagggggagcacaagaagaacaagtgatggaggaagaagcaccacaggtgcctccaactcaagtccgagcgacgatccaaagaaatcaccccatcgatcagattctgggtgatatcagcaagggagtaacgactcgctcacgtttagctattttttgtgagcattactcgtttgtatcttctattgagccgttcggggtagaagagaccttgcaggatccgtactgggtgttggccatgcaggaagagctcaacaacttcaagagaaacgaagtttggagcctggtgccacgtccaaagcaaaacgttgtggaaaccaagtgggtgttccacaacaagcaagacgagcacagagtggtgacaagaaacaaggctcgacttgtggcaaaagactatgctgctcaccattcttttaggctgtttcaaatggacgtgaagagcgctttcctcaacgggccgatcaaggaggaggtatacgtggaacaaccccctggctttgaggatgacaggtaccccgaccatgtgttcaagctctctaaggcgctctatggacttaagcaagctccaagagcatggtatgaatgccttagagatttcttaattgctaatgccttcaaggttgggaaagccgatcccactctttttacaaatacttgtgatggtgatctttttgtgtgccaaatttatgtcgatgacataatatttggttctactaaccaaaagtcttgtgaggagtttagcagggtgatgatacagaaatttgaaatgtcgatgatgggcgagttgacctacttccttggattccaagtgaagaaactcaaggacgacaccttcatctcccaaacgaagtacacacaagatcttatcaagcggtttgggatgaaggacgccaagcccacgaagacaccgatgggaaccgacgggcatgttgacctcaacaaaggaggtacgtccgttgatcaaaaggcatactga

SEQ ID NO: 119100 - DNA, 2496 bp, Zea mays
  Clone ID: MRT4577_40102C.1
gtttatgcatccaggggctcaagctggattatcgacagcggatgcacaaaccacatgacgggggagaagaagatgttcacctcctacgtcaagaacaaggattcccaggatacgatcatctttggagatgggaatcaaggcaaggtcaaaggcttgggcaagatagccatcaccaacgagcactccatttcaaatgtgtttctagtcgagtcgcttggttataatctcctgtctgtaagtcaattgtgccacatgggctacaattgtttgtttacaaatgttgatgtttctgtctttagaaggagtgatggttcattagcgtttaagggtgtattagagggcaaactctacttagttgatttttcgaaagaggaggccgatctagatgcatgcttaatagctaagactagcatgggctggttgtggcatcgccgtctagcacatgttgggatgaagaaccttcataaacttctaaagggagaacatgtgttaggactaaccaatgcctgcttcgaaaaagatagaccttgtgcagcttgtcaggcagggaaacaggataaatcagaaacccaagggacccttaagcgctttctaaggcgagctcaaaacgaatttgagctcaaggtgaaaaagataagaagcgacaacgggtccgatttcaagaatctgcaagtggaggagtaccttgaggaggaaggcatcaagcacgagttctccgctccctacacaccacggcaaaatggtgtggtagagaggaagaacaggacgcttatcgacatggcaaggacgatgcttggagagttcaagacgcccgagcggttttggtcggaagccgtgaacacagcttgccacgccataaaccggctctaccttcatcgcctcctcaagaagacctcgtatgaacttcttaccggtaacaaacccaacgtctcatactttcatgtgatgtgcgaccataggaacgacaagagcaagatcagccttcttcctcaacgatggtgcatcccccaactcaaaatgatgaacaggtccctcaagaagaggcgcatgatcaaggggagcaaaagaagaacaagttatggaggaagaagcaccactggccctccaactcaagtccgagcaacgattcaaaagaatcaccctgttgaccatattctaggtgacataagcaagggagtaactactcgctcaagattagctaacttttgtgagcattactcgtttgtctcttctattgagcctttcagggtagaagaagccttgcaagatccggactgggtgttggccatgcaggaagagctcaacaacttcaagcgaaatgaagtttggagcctggtgccacgtccaaagaaaaatgttgtgggaactaagtgggtgttccacaacaagcaacacgagcacggggtggtgacaagaaataaggctcgacttgtggcaaaaagttatgcccaagtcgcaggtttggatttcgaggagacttttgctcctgtggctaggctagagtctattcaaatattattagcctatgccgctcaccactctttcaggttgtttcaaatggatgtgaaaagcgctttcctcaatgggcctatgaaggaggaggtgtatgtggaacaaccccctggctttgaggatgaccggtaccccgaccatgtgtgtaagctctctaaggcgctctatggacttaagcaagccccaagagcatggtatgaatgccttagagatttcttaattgctaatgctttcaaggttgggaaagccgatcccactcttttcactaagacttgtgacggtgatctttttgtgtgccaaatttatgtcgatgacaaaatatttggttctactaaccaaaagtcttgtgaggagtttagcagggtgatgactcaaaagtttgagatgtcgatgatgggcgagttgaactacttccttgggttccaagtgaagcaactcaaggacgacaccttcatctcccaaacaaagtacactcaagatcttctcaagcggtttgggatgaaggacgccaagcccgcgaagacactaatgggaaccgacggatatgtcgacctctacaaaggaggtaagtccattgatcaaaaggcataccggtctatgatagggtcattactttatttatgtgttagtagaccaaatattatgcttagtgtatgcatgtgtgctacatttcaatccgacccaagggaatgtcaccttgtggccgttaagtggattcttagatatttagttgctacgccttgctttgggatctggtatccagaggggtctacctttgacttaattggatattcagactccgattatgctggatgcaaggttgataggaagagtacatcagggacgtgccaattcctaggaaggtccctggtgtcttggagttcaaagaaacaaacctccattgccctatccaccgctgaggttgagtatgttgccgcaggacagtgttgcgcgcaactaatttggatgaggcaaaccctctag

SEQ ID NO: 119101 - DNA, 291 bp, Zea mays
  Clone ID: MRT4577_40103C.1
ggaggaacactgaggtctcagctccagagtttcctgatttctgtcttggacaacagaacaacccacagggactgcctcaacatgaagctggtgtttctattcttgttggtcaccatccccatttgctgctatgccagtggttctggctgcagtattctagatgaagttattagaggtacaattaactcaactgtgactttacatgactatatgaaattagttaagccatatgtacaagatcattttactgaaaaggctgtgaagcaattcaagcagtgttttctagatcag

SEQ ID NO: 119102 - DNA, 247 bp, Zea mays
  Clone ID: MRT4577_40104C.1
gcgtcaagtctaggtgcaaaaaagcgggaaacaaagcgaagttggggcggcgagacgcgagacgcgagacgcgagaaatggcggagccgcctttggccgccggctgcacgacaaactggaggagggaggccgatgagcggctgcggtcccgccagtccctcctcttcggcgccgactccgcactcgaccatggggatcctacggtcgcacaggcgctcgctctcttcctccacggcatcctcctact

SEQ ID NO: 119103 - DNA, 784 bp, Zea mays
  unsure (1)..(784): unsure at all n locations
  Clone ID: MRT4577_40105C.1
gccggccgggtcgggatccttgttactgttcggtcgggccaggaggtccctggccgccgaactcgccgactccaaaacccaagccactctccatccccaatccgctatgcaaccggctcctcctcctcctactgctcgcttccttcctcctcccgccggcggcggccagcacggcaggctgctggcccaaggaatgcggaggggctcaacatcacgtaaccgttctggctggaggagcccgggcagccgccgtgcgggccgccgtccttccggctccggtgcagcagcagcggcggctcgttcctgagcatcttccccggcaaccgctccttccacgttgtggaccacaacctcccgctcgccaccggctgcccgccgccgacggtgaacgtctagctcctctcgccggccgggacgtttgccttcagccgagccaacagggagctgctcttcctcgggaagtgcatggcgttcccgccgccggactcggccggggtttcgcacctgccttgcgacaaccgctccttcgtcagggtaggcgacggccgggatttctcgatcccgcacggctgcctgactcttcacggtagtgccgaccctccgggttcccgagggaagtgaggaggacggctacgtcgcgagcatggagaacgggtttctcgtggagtggacagcggtgccggacgattgccccaggtgcatggcgcgcggcggngaatgcacgtacggctacggcgacgcgaagttcgcctgtgattgctccggcgacaagtgcggagcaaaa

SEQ ID NO: 119104 - DNA, 180 bp, Zea mays
  Clone ID: MRT4577_40106C.1
acgcacgcgtctcgcctccgccgacgccgcttcacccttcacctcgctccatttcatatctgcgatatgacgaaactcactaggaactcaggacttgctgacacatatagacccaggtatcatactcacttgcgtatacgaatcaagaacattgaagcatctcagcattccaagtacttt

SEQ ID NO: 119105 - DNA, 348 bp, Zea mays
  Clone ID: MRT4577_40107C.1
tctcattgaggaccacgatcccgatgcccccacatgcgcttaagctcaaatgcatattcccgcatggtagctggtcctaacatttgggtgacattccaggcgcttcaaatgaagaaggcatcccgatacgatatgttcttaatcggcgagatagccaaatcaggtggttgttgagaacacaggggcttcttctgagagctttgatgactatccggcctgtgtgcgatatgattgactgccgatatgcgctgtatgattttgatgttgacactgctgagaatgtgccttaaagcgggattccctttattggctgccccccatcgacatacctcatacgcgctctgatgc

SEQ ID NO: 119106 - DNA, 248 bp, Zea mays
  Clone ID: MRT4577_40108C.1
cgccatgcagattcatcaagctcaacacgatcgcaattcgagtcgagtacggccatcctacgcctcccttctgtacgtatagtaggaatgagtaaggaccgtcaccgtacgtcctcgccagtacagatagtggccctgctcaaagccgcgcgcggcgccgaggtgtccatcctggacggggtgtgggcccccggtctggttggcgggtgccaaatcgaggagcgcccgggcttggggcggccggttct

SEQ ID NO: 119107 - DNA, 872 bp, Zea mays
  unsure (1)..(872): unsure at all n locations
  Clone ID: MRT4577_40109C.1
cattgggacctcgagccggccgggaatacctattcccttacgtccccagcagcagtagccccagcccccagtgccgcagttgcgctcagctatctctgctgagccgattagataaatccggcggaggaagagggaagaattatcgtgcgatatttcccccctcccactccctctctctctcgatttgcccgagaaatttttttggttgtttcccgcatcactctccactaggccgccgtctcccccgctggtgctcgtcgcttcctgcccaattcggcgccattcgcccggcgcactccctattaattccctgcctcggtagtcactggccgattgccacgtgaaatttcctgttccgttgcctttcgggtgcgcctgaagtacccacacgctactagggttcaatcgtcgtcagccaatctatcaatctgaatagagtgccagcagttgctgtagaggcgatgagcacccagggaaactgtgagacgcacggtgcagcagtgccaggaactaaggatgcaggcacaggaaaggcagggcaatccagtggcgatcgacaggaggagaagttacccaagtgtgagcaggtcgactatggaagtgaagttgaaggctgcgcagatgatgagaaccctggcaagagggctgctttagttactttggttggaaatgaatactgcggcgacgaggatgagagagttcaagtgctcaccattgtcaagaaggacgagcatgcagatgacattgtcgaccgtattaatcctggcacagttgcagggtacagtgaagtgaagggtgctgtaggtgcttctgccgccacttctgcggtgcgacctgctggctcccgatcgtcagntttccatggtgtgact

SEQ ID NO: 119108 - DNA, 838 bp, Zea mays
  Clone ID: MRT4577_4010C.1
ttgtagcagaacgtaacgtggtcgatatgagatgtgtaaagaaagaaaaaaaaaagcacgcccagttgcaccatgcatgatagctgctggtgtggagtcagtacgtagtagcagcacccggtttgatcgatgcttatgtgtgtaatgtaatacccacctgcagttgcaagtaaatgtgtgcctgttattagtctagcggccggccggggtgtagtgtaccggatggtgagcgagcgtgacagttacctttccttttcagtactgcctagctagctagacctagatgtattattatatattgtgtactcccttcttacgtacgtgcgttccataataaatgtattctgtagttgtctttttctaaaaaaaaaaaaaaaaaaaaaaaaaaaaaaaaaaaaaaaaaaaaaaaaaaaaaaaaaaaaaaaaaaaaaaaatctttcttttgccgccgtaaccgccctttctttcgccgaacaagcgccagcccgggccggggtaaaaaggaggtccttaaccgggcgcccctttttccgaaaggccaccggaaccgccgccggggaaatggttgccagccccctgtttgccgggggggccatggccaaaaaggtgctgttggccccaggcaacggcggcctctttttcaaccccagccagttaaccgtaaaggccggggacaccataacattaaaaaacaacgccggtttcccgaacaacgtcgttttcaacaaaaacaaggggccaagcggcgtcaaccccaccaaaatctcgaaggaggagtacctaaacgcgccaggcgagacctattccgtaaccctcaccgggccgggaacctacggtt

SEQ ID NO: 119109 - DNA, 2006 bp, Zea mays
  Clone ID: MRT4577_40110C.1
gattgttgacctcgaggccggccgggacgtcccccgggagcagtagccccagcccccagtgccgcagttgcgctcagctatctctgctgagccgattagataaatccggcggaggaagagggaagaattatcgtgcgatatttcccccctcccactccctctctctctctctcgatttgcccgagaaatttttttggttgtttcccgcatcactctccactaggccgccgtctcccccgctggtgctcgtcgcttcctgcccaattcggcgccattcgcccggcgcactccctattaattccctgcctcggtagtcactggccgattgccacgtgaaatttcctgttccgttgcctttcgggtgcgcctgaagtacccacacgctactagggttcaatcgtcgtcagcaggcttacctctcaatcactgcggggcggcggctcgagagtttgtggacagttggcgaagagatagttaggtttttttttttgtctcccgtgtccgatggaggaatcggacttgggaggtaatctgggtaagcaaacggaagaggataaggctgcgggagaatcaggggatgagggtaagatcgagaggagccaatctatcaatctgaatagagtgccagcagttgctgtagaggcgatgagcacccagggaaactgtgagacgcacggtgcagcagtgccaggaactaaggatgcaggcacaggaaaggcagggcaatccagtggcgatcgacaggaggagaagttacccaagtgtgagcaggtcgactatggaagtgaagttgaaggctgcgcagatgatgagaaccctggcaagagggctgctttagttactttggttggaaatgaatactgcggcgacgaggatgagagagttcaagtgctcaccattgtcaagaaggacgagcatgcagatgacattgtcgaccgtattaatcctggcacagttgcagggtacagtgaagtgaagggtgctgtaggtgcttctgccgccacttctgcggtgcgacctgctggctcccgatcgtcaagtttccatggtgtgactaggcatagatggagtgggaaatatgaagctcatttgtgggacagttcttgcagagtagagggacgtagaaggaaagggaaacaagtttatctaggaagttatgataccgaggaaaaagcggccagggcttatgatgttgctgctattaaatactggggcgaaaataccagactgaactttccgatttcacaatacggcaaggagttggaggacataagggatttgtctcgagaggaatgtgtgacatacttgagaaggaggagcagctgcttttcaagaggagcttctatttatagaggagtgacaagaaggcagaaagacgggagatggcaagcacgcataggactggttgctggaactagagacatttacctgggaacattcaaaacagaggaagaagctgcagaggcttatgatattgctgccattgagatacgtggcaaaaacgctgtgaccaattttgaccgaagcaactatgtcgataagggtatgcactgtatagaaggcgaaggcttgaggctgcttgcatccaagccagaagaatgacttccaagttcaatgcagtgattgtcgatcgagcagatttggccagacgtatatgcagcttagttggtacatatacagataggagaaccggttgcagtttgtcaatattcctgctttacatgacttgggattacagttaaatcgacccgctagcaaaaaaaagtgtgcaaatgttagtagatttggccagacatatatgaagattttggggttgtatcataaggcctcgtaggatagatctttctgcaaatgttagcgaagccagtgtttatgttctgtttgctagattagcgttatcagtttgcacgttccccttttttttctgaataattgtccttgtatgatcttgagggaatgcgtttacctggtcgtttgccattcttttaaaaaaaaaaaaaaaaaac

SEQ ID NO: 119110 - DNA, 253 bp, Zea mays
  Clone ID: MRT4577_40111C.1
aaaaaaataagaatcccctggaacaaagttttttcccccaaaacgtttaggggaaaccccctggaacttttttttgcaaaggtgtgaggattactttaaaaaactgcccattattttttaaagaaattcctggtggaaatcctcagcaatcccccgaagggccatgcaatttcccctttgttggggccccggataattcacttgggcaggttttgcaactgcttgattgtaacagttggggctcaagggtttt

SEQ ID NO: 119111 - DNA, 404 bp, Zea mays
  Clone ID: MRT4577_40112C.1
tgccggccgggaaatatttctttccttcgtcgccgacgctacgaccgagcaatggcgctcaccgccgtcctaccttcatatacctagtcagtgtctcctgcatacgaaagataatttggcagcgagcgaggccgcacgtcgcgtgcgtgggcattactttagtgaccgagcatacttgccagctcatctactatatcatcatatatacggtatcacggatcagatacgacatgctcagatcgtatataatccatggatggatgcgcgtctccgactggatcaagaccggcgctctattcgcccctgcacttcgatctctcttctctcctgtgccgaaggcactggtcggagtgctcaatatcgggcgacttcagatgaatactggtcagcaacgcaagtctcat

SEQ ID NO: 119112 - DNA, 501 bp, Zea mays
  Clone ID: MRT4577_40113C.1
aaaaggggaaccatcgcttggaaaccaaaaaattggatccccttccatatttaaaaagcgggggttagttaaacactccattggcaagcggctttgaaaatttaattaccttcacaagcaaaaacgcccccttcgttacaagcttgaacccaggttttaaaagccacacaattagttgttgcaccaggggcatttccccaaggaggtccaaaagttcctcccccaaattgaaaaacggaatcattcccaaaaatttcggccaaagttggcatatgccaaaaatgaatccccccaaaagccaccggttaaacaccggggagggaaacccagccctgaggaaaaaaaataccggaaaaacaatttttttaaaaaaaatcatgggccaaaaaataaacaaaacctaaagttttttcgggtccccttttaaactaaccaaatacgggaccggaggggatataaaccccccccaaaaaacgcaaggttttaactaaaaaccggaaa

SEQ ID NO: 119113 - DNA, 435 bp, Zea mays
  Clone ID: MRT4577_40114C.1
tggatcggccgggcggtcgggttccttttgacctttctgcaatgaagaggttctagatcttttacccaataaccatttatttagctgcatacacttattgaaaattcactgttagcatactcctcttccacgaccactttatgtataattctacactccttctgctgggagctttgagatggttacggaacatgcttcatatacgccaataactacctaaaatgttctggctattgagtggtgaacttgagaggttgtaggtcatacacataacaccatgaagacagcacacacaaatctggacagtgccaacttaatggcagctgggagaggagctttagctcgtaatacacatgaatacctcacatcactgcaagcttttgctagaacactagtgccccttttacctgcactggcgggcgatcaaaagctcat

SEQ ID NO: 119114 - DNA, 270 bp, Zea mays
  Clone ID: MRT4577_40115C.1
cccacgcgtccgcccactcgtccggtggaccggacgtggacgaaggagagatagagatatagagaagaaagggcgccgcgggggccatggctggacacgctccggctagggacaagaccacgatcggcttcgccggtacgtgcagcctggtgagccagtttgtcaaggagaagaagggcggcgtgcaggggctcggcggggtcgcgatggcgccggcgccggcaggtggaccaggggctttcgggccgccgaccaccgtgaagttggtgt

SEQ ID NO: 119115 - DNA, 312 bp, Zea mays
  Clone ID: MRT4577_40116C.1
cccacacgtacgcggacgcatgctctaaaattggaaaaactatgcttaaggggaacggtaaaatactgtgggggctgaaataaacttaccaattataactattaatacataaaagttcaaagcactttaacattaccatgaccagatctaagttctaactctcttgtaagcaatcttattgataggactctcatacctttgttgaacttccttaaagatacttgcatctctaataccgagattgatcatgttctactggttgttggtatgactacattaccatatctccatttaagttgtttttttatatat

SEQ ID NO: 119116 - DNA, 205 bp, Zea mays
  Clone ID: MRT4577_40117C.1
gctggcgcggcctccgcggcctacctgtccgcctcccggagcttcaccgacgagaagcggggccttcacagtctggcgcgtggccacattctcaacatacactccgacatgctgtagtacccacaccgctttctactcgtcgtacagctggaccgctccattcttgcactcgttgccatctttcgggctttaaccgagcaaggat

SEQ ID NO: 119117 - DNA, 1288 bp, Zea mays
  Clone ID: MRT4577_40118C.1
cccacgcgtccggcggcctccccatggctaggtcgggattctgggcgccgccgcgtggggcattgccgatgactgccactctggctgctcctacggtcaggttgggtcgggcggtcgcggcctgggtcgtgcgctggtgggcactgggtgcgaaggcatcggccagatttggggaaattcctcaccgaagatcaacagtgccgccgatccgctgctcacgatgaccgtctctaccactacttcgaccgccattgagcgcgaggacacgtgtcatccgaaaagcaagttggtacctggaatctcaagtgccgcccagcaggctgaagagctcaggagaagatcaggtggttgaagaggagccgcctaacactgaggagttcgatctgatctaggtggcgtatcccagtcgacattggcgccgacgatccttagttcgttttatctttattatgttattttgtaataagtcttccgctatgtaataaattctctgatgttttatgacatttatctctatacactctgttattatatatgttgtcttcttggcgcatgtatgagatgcacccggctttgtcctttaaaaccgggtgttacaggatgttaagaatgcttttttacatggggatcttcaagaagaagtctacttggaggttccaccgggatttgctactgatcagaccaaaggaaaagtattgaagctgaaaaaatcgttatatggtttaaaacaatcacctagagcttggtttgatcgactacgacgggctatgtgtaatatgggatataaacagtgcaatagtgatcacactgtgttttattatcattctggaggcagtgtcactattctggcagtatatgtggatgacatgatcatcacagggaataaaaaaaaaaaaaaaaaagcggcctgaactacttccttgggttccaagtgaagcaactcaaggacggcaccttcatctctcaaacgaagtacacacaagacttgattaagcggtttgggatgaaggacgccaagcccgcaaagactccaatgggaaccgacggacatgtcgacctcaataaaggaggtaagtccgttgatcaaaaggcataccggtctatgataggctctttgctttatttatgtgctagtagaccggatactatgctaagcgtatgcatgtgtgctagatttcaatctgatccaagggaatgtcatcttgtggccgttaagcgaatacttagatatttagctgctacgccttgcttcgggatctgggatccaaaggggtcaacctttgactta

SEQ ID NO: 119118 - DNA, 5040 bp, Zea mays
  Clone ID: MRT4577_40119C.1
atggatcctaagggaaaggggatggtgatcaacgacaatgagaaggagtccatcttcaacgagccaagggacgacaaagtcaatgactccggctcgagtcaaaagaagaaagatggaaagaagaagaggcgcatcaggaaggttgtctactacgaaagtgacgaatcttcctcttctcaaaaggacgacgaatgcgaggagaaaaagaaaacagttaactcgaacttttcttttgattactctcgcattccgcataattctaatactcatttgctttctattccactcgctactactgtccttttagcatctttgtgcagggaagaatacaataaggacaccctcaagatctcacatgaggggaacgacgtcaccatgctcaccaagatggaattggtggaaggcgaactaggaaggttcgcgatgatcaggggagaggagccaacccaaacgtacaacaggctcaagaccctcatcaacaaaataaggagctatggaagcacgcgatggacggaccatgacgtcgtccgacttatgctaaggtctttcaccgtccttgatcctcatcttgttaactctattcgtgagaatcctaggtacaccaagatgacgcccgaagaaatacttggaaagtttgtaagcgggcggatgatgatcaaggaggcaagatacgttgatgatgcgttgaatggcccaatccacgagcctcaaaccgttgctctcaaagcaacaaggagcagggaggcgctacctagcaaggtggcgcaagttgaggcggtcgggcttaacgaagaagaaatggccctcatcatcaagcgattcaagacgacactcaaaggtcgcaaggagcatcccaacaaaagcaagacgaagggaaagcgctcctacttcaagtgtggtaagattggtcattttatcgttaattgtcccgataatgatagtgaccaggaacaagagaagaagagggaaaagaagaaggcttacaagaaggctaaaggcgaggcacaccttggcaaggagtgggactcggattgttcgtcgtccgactccgacaacgaaggactcgccgcctcggccttcaaaaaatcgtccctcttccccaacgagcatcacacctgcctcatggcaaaggagaagaaggtaaacactcaaaagtctacttatgcttcttctagtgatgatgaatctagcgatgatgaaatagactacgctagtttgttcaagggcttagatagaactaagattgataagattaatgaattaattgatgccttgaatgataagaatagattattagaaaagcaagaggatctgttgtatgaagaacatgataaatttgtagatgcacaaaattctcttgctttagaagttaaacggaatgaaatgctttcttgtgaattgtctacatgccatgactctatttctagcttaaagagcataaatgatgacttgaatgctaagttagaaatagctaataaatcaacatcttgtgtagaacatgttataatttgcaataggtgtaaagatttcaatattgatgcttgtagtgaacacctagtttcaatttctaaattaactgatgaagtggctagtcttaatgctcaacttaagactagcaaaaatgaacttgataaattaaaatttgcaagggatgcctacacgattggtagacacccctcaattaaggatgggcttggcttcaagagggaagccaagaacttaacaagtcataaggctcccatctccgccaaggagaaagggaaggcccctatggctaatagtgctcaaaagaaccattctttcatgtaccatgataggagatattctaggaatgttcattatgatagaagttacaatgaagttgtttcacatgccatgattgcttcatgttcttctattatgaatgatagaagtttggctaggaaaaatgtcattcatcatatgcctaggagaaatgttcatgtacctaggaaaacaaataatgaaccttctacaatttatcatgcttgcaatgcttcctttgctatttgtagaaaggacaagaaaattatcgacagcggatgcacaaatcacatgacgggggagaagaagatgttcacctcctacgtcaagaataaatattcccaagattcaatcatattcggtgacgggaatcaaggcaaggttaaaggattaggcaagattgccatctcaaatgagcactctatctccaatgtatttttagtagagtcgctagatgtgtctgtctttagaaggagtgatggttcattagcttttaagggtgcactagatggcaaactctatttagttgattttgcaaaggaggaggccggtctagatgcatgcttaatcgctaagactagcatgggctggctgtggcatcgccgtctagcacatgtggggatgaagaaccttcacaaacttctaaagggagaacatgtgttaggtctaacaaatgtgcatttcgaaaaagatagaccttgtgcagcttgtcaagcaggtaaacaagtgggaagtgctcatcacatcaagaacgtgatgactacttcaagacccctggagctgctgcatatggacctcttcggaccagtcgcctacctcagcatcgggggaagtaagtatggtttagtaattgttgatgatttttctcgcttcacttgggtattctttttgcaggataaatctgaaacccaagggaccctcaagcgcttcctaaggagagctcaaaatgagtttgagctcaagcaatatggtgtggtagagaggaagaacaggacacttatagacatggcgaggacgatgcttggagaattcaagacgcccgagcggttttggtcgggagctgtgaacacggcttgccacgccataaaccgggtctaccttcaccgcctcctcaagaagacttcatacgagcttctaaccggtaacaaacccaatgtttcgtattttcgagtttttgggagtaaatgctacattctggtgaagaaaggtagaaattcaaaatttgctcccaaagctgtagaagggtttttgttaggttatgactcaaatacaaaggcgtatagagtcttcaacaaatcatcgggtttggttgaagtctctagcgacgtcgtatttgatgagactaatggctctccaagagagcaagttgagcttgatgatgtagatgaggatgatgttccaacggacgcgattcgtaccatggcgattggagacgtgcgaccgcaggaactcaaggagcaagatcaaccttcttcctcaacaatggtgcaccccccaactcaagatgatgaacatgttcctcaagaagaggcgtgtgatcaagggggagcacaggatgtccaagttgaagaggaagaagcacaccaggcccctccaactcaagttcgagcgatgattcaaaggaaccatcccgtcgaccagattttgggggacattagcaagggagtaaccactcgctctagattagctaatttctgtaagcattactcttttgtctcttctattgagcctttcagggtagaagaggccttgctagatccaaactgggtgttggccatgcaggaagagctcaacaatttcaagagaaatgaagtttggacactggtgccacgtcccaagcaaaacgttgtgggaaccaagtgggtgttccgcaacaaacaagacgagcacggagtggtgacaaggaacaaggctagacttgtggcaaaaggttatgcccaagtcgcaggtttggactttgaggagacttttgctcctgtggctaggctagagtcaattcgcatattgttagcctatgccgctcaccattctttcaggttgttccaaatggacgtgaagagcgctttcctcaacgggccaatcaaggaggaggtgtacgtggagcaaccccctggctttgaggatgaacggtaccccgaccatgtgtgtaagctctttaaggcgctctatggacttaagcaagccccaagagcatggtatgaatgccttagagattttttaattgctaatgctttcaaggttgggaaagccgatccaactcttttcactaagacatgtgatggtgacttatttgtgtgccaaatttatgtcgatgacataatattaggttctactaaccaaaagtcttgtgaagagtttagcagggtgatgactcaaaagtttgagatgtcgatgatgggcgagttgaactacttccttgggttccaagtgaagcaactcaaggatggcactttcatttcccaatcgaagtatacacaagacttgctcaagcggtttgggatgaaggacgccaagcccgcaatgactccaatggaaactgacggacacgtcgacctcgacaaaggaggtaagtccgttgatcaaaaagcataccggtctatgatagggtctttactttatttatgtgctagtagaccggatattatgcttagtgtatgcatgtgtgctagatttcaatccgatccaagggagtgtcacttagtggccgtgaagcgaattcttagatatttagtcactacgccttgcttcgggatctggtatccaaaggggtctacctttgacttaattggatactcagattgtaattatgctggatgtaaggtcgataggaagagtacatcagggacgtgccaattcttaggaaggtccctggtgtcttggagttctaagaaacaaacttctgttgccctatccaccgctgaggccgagtatgttgccgcaggtcagtgttgcgcgcaactactttggatgaggcaaaccctccgggactttggctacaatctgagcaaagtcccactcctatgtgataatgagagtgctatccgcatggcggacaatcctgttgagcacagccgcacaaagcacattgacatccgacatcactttttgagagaccaccagcaaaagggagatatcaaagtgttctatattagcaccgagaaccagctagccgatatctttaccaagcctttagatgaaaagaccttttgcaggctgcgtagtgagctaaatgtcttagattcgcggaacttggattga

SEQ ID NO: 119119 - DNA, 195 bp, Zea mays
  Clone ID: MRT4577_4011C.1
ctaaaatgtaaacacgacattatcatagttgagtacagcaaaatataacaccataaaaacaaaacaacccaaagcacggctcccttagaataagtggacattaagcactcctcccttcaccgggccaccgcttatatcattccatatttacgaccccaagaagccctgccatttacacctctttctttgctacaa

SEQ ID NO: 119120 - DNA, 894 bp, Zea mays
  Clone ID: MRT4577_40120C.1
atgatgactcaaaagtttgagatgtcgatgatgggcgagttgaactacttccttgggttccaagtgaagcaactcaaggacgacactttcatctcccaaacgaagtacactcaagatcttcttaagcggtttgggatgaaggacgccaagcccgcgaagacaccaatgggaaccgacgggcatgtcgacctcaacaaagggggtaagtccgttgatcaaaaggcataccggtctatgatagggtcattactttatttatgtgctagtagaccggatattatgcttagcgtatgcatgtgtgctagatatcaatctgactccagggaatgtcaccttgtggccgttaagcgaattcttagatatttagtttctatgccttgcttcgagatctggtatccaaaggggtctacctttgacttgattggatattcagactccgattatgctcgatgcaatgttgataggaagagtacatcagggacgtgccaattcctaggaaggtccctggtgtcttggagttcaaagaaacaaacctctgttgctctatccaccgttgaggccgagtatgttgccgcaggacagtgttgcacgcacctactttggatgaggcaaaccctcatggactttggctacaatctgagcaaagtcccactcctatgtgacaatgagagtgcaatccgcatggcggataatcctgttgaacacaaccgcactaagcacatagacatccgacatcactttctgagagaccaccagcaaaagggagatatcgaggtgtaccatattagcaccaagaaccagctaactgatatcttcaccaagccgttggatgagaaaaccttttgcaggttgtgtggtaagctaaatgtcttagattcgcgtaacttggattga

SEQ ID NO: 119121 - DNA, 327 bp, Zea mays
  unsure (1)..(327): unsure at all n locations
  Clone ID: MRT4577_40121C.1
gggagaacatcagctatcagnatagattcttaactacccaagtgggctgattcaaccaagacgattcacccgtatatagaatatgaagaactatccaaagcagaaacttctgaacaatgtgcttacacatataacagaacactagaagaatacctttgacaaggacgtatacccagttgatgggtaaatttcagtgcttattgtttcanctngaaaagatgatctgtaacacatagtgtgattcaggtaaaacaacctgtgatgcatagcgaaagtgcacacgtcatacaacatatgattgaccaaaataatctacaacaaaatccc

SEQ ID NO: 119122 - DNA, 2117 bp, Zea mays
  Clone ID: MRT4577_40122C.1
atggatcctaaggggaagggaattgtgatcaacgacaaggagaaggagtccttcgtcaacgagccaagggatgacaagtcaaatgactcgggctcgggccacaagcgaagagatgggaagaagaagaagacaagacgcatcaaggagatcgtctactacgacagcgatgagtcctcttcttcccaaaaggacgacgactacgacaaacaaaggaaaccggttaattctaacttttcttttgactactctcgtattccgcatagttcaaattcacatttgctttccattccactcggcaagcccccacactttgatggggaggactacggattttggagccacaaaatgcgtagtcacctattctctctccatcctagcatatgggagattgtagagaatggaatgaaatttgatagctcggatagccctatgtttatcaatgaacaaattcataaaaatgcacaagctactactgttctcttagcatctttgtgcagggaagagtacaataaggtgagcggcttggacaatgccaagcagatatgggacaccctcaagatctctcacgagggaaacgacatcaccatgctcaccaagatggagttggtggagggcgagcttggacgattcgccatgataaggggagaagagccaactcaaacttacaaccggctcaagacccttatcaacaagataaggagctacggaagcacgcgttggacggatcacgacgtcgtccgcctaatgctcaggtcatttaccgttcttgatcctcatctcgtgaacaatattcgtgagaaccccaggtacacgatgatgacgcccgaagaagtacttggaaaattcgtgagcgggcggatgatgatcaaggaggcaaggtacgtcgatgacgcgttgaacggtccaatccacgagcctcaacccattgctctcaaggcatcgaggagcaaggaggcactaccaagcaaggtggcgcaaattgaggcggccgggcttaatgatgaagaaatggctctcatcattaagcgcttcaagacggtgctaaagggtcgcaatggacagccgagcaagactaagaccaaggggaagcgatcatgcttcaaatgcggtaagcttggtcattttattgctaactgtcctgataatgaaagtgaccaggaaaagggaaacaagagggaaaagaagaagcattataagaaggcaaagggtgaggcgcatctaggcaaggagtgggactcggattgctcctcatccgactccgacaatgaaggactcgccgccaccgccttcaacaaatcaaccctcttccccaacgagcgtcacacatgccttatggcaagggagaagaaggtaggtactcgcaactctacctatgcttcttcaagtgaggaagaatctagtgatgaggatgaagtagattattcatgtttgttcaagggcttagatagatctaagatagacaaaattaatgagttaattgatgccttgaatgaaaagaatatacttttagaaaagcaagaggatttgttgtatgaagagcatgataaatttgttgaggcacaaaaatcctatgctttagaagttaaaagaaatgaaatgctttcttttgaactatctacttgtcatgaaaccatttctactttgaaaggtgtcaacaatgatttaaatgctaaattagaagtagcaaataaatccaattcttgtgtagaacatgttgaaatttgtactaggtgtaaagattttgacattaatgcttgtagtgaacacctagtttcaatttccaagcttaatgatgaactggctagtcttaatgctcaacttaagactagcaagaatgatttcgataagctaaaatttgcaagggatgcctatacaattggtagacacccctcaattaaggatggacttggcttcaagagagaagctaaggacttaacaagccataaggctcccattcccgccaaggagaaagggaaggcccctatggctagtaatgtgcaaaagaaccatgcttttatgtattatgataggagacaaactagaaatgcttataggagttataatgcttttgatgattttgactctcatgccatgtttgctcctagttcctcttatgt

SEQ ID NO: 119123 - DNA, 376 bp, Zea mays
  Clone ID: MRT4577_40123C.1
aaaaaaaaaaaaaaaaaaaaaaaaaaaataaaaaaaaaaaaaaaaaaaaaaaaaaagaaaaaaaaaaaaatttaaaaaaaaaaaaaaaaaaaaaaaaaaaaaaaaaaaaaaaaaaaaaaaaaagggggggccgttttagaggatcaaagtttacttccccgtgattgcaacgttaaattttttttttggggcaacttaaattaaattaattggccgggttttaaaaacgttggaattggaaaaaccttggggttaccaaattaaatggctttgaaaaaaatcccttttttccaagttggggtaatagcaaaaaggcccgaaccatttgccttttcaaaaatttgctaaccttaaatggtaaatggaaccccccttt

SEQ ID NO: 119124 - DNA, 390 bp, Zea mays
  Clone ID: MRT4577_40124C.1
attgggaggagtaagttgcacagcgcaacaaatgttcatagtccatacataatagggagttaacagggagttacatgatagatccaaacctaaatggtgttatgggagccaagggaccttttttacacagcatcaaaccggcaaattatcaagccgtgtttgacagcagcaagtcatttatggtatacaaatccacagtaggagggcaagttcatgatgtatgatcatgataatgcctagctagccctatgcttgatctcatgaaggatggtttcactagcatcagtaggctgcagttatacctgcatgccattgagaccactcttgaatttttgtgtttggcttgcataaagcattttgctcttcaccttggcggatgatggtgaccat

SEQ ID NO: 119125 - DNA, 460 bp, Zea mays
  Clone ID: MRT4577_40125C.1
ccgacgcgtgcgcccgcgcctgggcctcacctatccctctcccacctccttcaaaccggtactttgctgcggaactacgatgcttaccctatcctcaagctcgatcacaggatcatgttcttgactacgaccctgtggcaggtgcgcatgcacggggccggaggggaccctcatgtatcgcactgctgtgcctgactggaagatcaccgatccagacctagagatgcttgggtctctgatgataccgccaccatacacgcactcaaggctgattctgctggaaaagctcaccaagtggccggggcaacatccatgggtgcctggggagatcaacccgaaagcactggcccagaaacaacatcaaagatgaaaactgctggctcagatcaagcattctacaggcaagaatagaactgctattgtgtcaccaaaatctcttgagaacatgcctaacttgaat

SEQ ID NO: 119126 - DNA, 459 bp, Zea mays
  Clone ID: MRT4577_40126C.1
ttcttcctatatgcatgatagagatatgtctagaagaaatgttgttcatcatatgcctaggagaaatggtgttaatgtttctaggaaaattaatgaaccttctacaatatatcatgcttgcaatgcttcatttgccatttgtaggaagaataagaaggtttatgcatccgggggttcaagctggattatcgacagcggatgcacaaaccacatgacaggggagaagaagatgttcacctcctacgtcaagaacaaggattcccaagactcaatcatattcggcgatgagaaccaaggcaaggtgaaaggcttaggcaagattgcaatctcaaatgagcactctatctctaatgtgtttttagttgagtctcttggatataatttgctatctgttagtcaattatgtaatatgggatataattgtttattcacaaatgtagatgtgtctgtctttagaag

SEQ ID NO: 119127 - DNA, 158 bp, Zea mays
  Clone ID: MRT4577_40127C.1
tacccttttcactctttcacactctccatatctacagcgtcagcattcgcaacctttctcaacccttccctactccaaatccaccttatctcccacactccctactaacccttcattaccctccaactcctaactaccaaacaatttatcctttaaat

SEQ ID NO: 119128 - DNA, 494 bp, Zea mays
  Clone ID: MRT4577_40128C.1
cgaggggaacgacatcaccatgctcaccaaaatggagttggtggagggcgagctcggaaagtttgcaatgataagaggagaggatccaacccaaacatacaaccggctcaggacccttatcaacaaaataaggagctacggaagcacgcgatggacggatcacgacgtcgtccgcctaatgctaaggtcatttaccgtttttgatcctcatctcgtgaacaatattcgtgagaatcccaggtacacgaatatgacgcccgaggaggtactcagaaaattcataagcagccggatgatgatcaaggaggcaagatacgtggactacgccttgaatggaccgatcaactagcctcaaccccttgctgtcaaggcaacaagaagcaaggaggcgctacctagcatggtggcacaaattgaggcggccggacttaatgatgaagagatggccctcatcatcaaaagattcaagactgcgcttaaaggtcgcaagggac

SEQ ID NO: 119129 - DNA, 1024 bp, Zea mays
  Clone ID: MRT4577_40129C.1
gtccaaactccagctctcttccatggtggtgcccagctcctctcttccctctgcctcccgcgctcggatctcgcccttgctcgccttctcagctcgtccagcgagtcgtgcctaggccacgtcgagctccttccctggtcgccgtctccgagcccgaccccaagctgctgtgcgtcctgctctatccccagttcgcgctccctccctgctccagattttttcatggccgccgctgtccccagccatctccctggtggccgacctcgcccctgccccagccacagctcccccttcggccctgctgctgcaagcactcagcctctcccatggcacacggtgctcgcccagcccctttctgctggtggctgagccatctccctggtgctcgacgaaatgaccatgaggagatttgtgttgtgtgcagccccatctgcgacactgtcgacctccgaaatcccatgatttgggggaagacgaatccaagcacaacccccgccaatcgctcgatgaaaaatctaaaccaaaaccctcagcgttttcaagggttccggagggattttatgttgcaagagaagaaggaagactagtcagacaaaatagaagacgagaagaactgatgtagccatgttcatgcttccatgtaatagttcattattccatacatatttctgtctatccagaatctactattgaaatacatatctagcatagcttgctcagctcctatatgttgtttcaacgttgatttaaaaaaaaagctggtagttgtgggcttttgaacaatagctggagtgatatgaaacattagtgatgtagttgtgggcttttgaactgcttcaagctggagtgatgtcgttgtggtgcttttgtgactgatcatctctggagcttttgtgaatgatctagctagctatttgtaaatgatctagttatgaatgatattataattatgatgcttttgtgaataaataattgtggtgcttttgtgtttatgtgatggatctatgactgtggccccctgttt

SEQ ID NO: 119130 - DNA, 632 bp, Zea mays
  Clone ID: MRT4577_4012C.1
ctcgattgctgatgctaaacagatcacagttggagggagtgagaacgaagatgaaaaggattacactattctgagcccaacaaaacccagccacattgaattttgtaaatctactgtgacggcagacgacatggttatgatgaagaaattgggctactttggggaggctgagagaaaactcgtccgatttgctggggaagaggtgattccagatccaaaagacgatgaagttgtagtttttaaaagcttctttagggcaggacttcgtttaccactacatgagatgattggagaagttttgaaaattttttgagatatactttcatcagctgacacccaatgcagtcgttagacttagtgctacatatgggtcgtccgaagccaggctatgagtcctaatgtcgaagctttctgccgggtgcatgagctgcactaccaaacgaaggccagagcagatggccttcatgaaaacttcagctgctacaactttgctatcagaaggatacggaggccccgattctcagctatcgtaccaagtggtcgaccgattggaaaagtgaatggttttacataaaggtggacgagaaaagaaggagaaactgatgactatggctatgagtccattggaattg

SEQ ID NO: 119131 - DNA, 237 bp, Zea mays
  Clone ID: MRT4577_40130C.1
aaggggccccacaacgggggaaaaaagcaaaaccgtgggaacgaatccactccattagagtgaccaatacccatgggtggagcccctaatcaccaatgagggccacctctccccgccccaggaccataaagggccatgcccccgtgggtcgtaccccgagggaaagcgcccccgaagccggctgaataaacgcgcaccccaacctaccggggtgctgtccacccaattccgggcttc

SEQ ID NO: 119132 - DNA, 1302 bp, Zea mays
  Clone ID: MRT4577_40131C.1
atggatcctaagggaaaggggatggtggtcaacaacaacgagaaggagtctatcttcaacgagccgaaggatgacaagcctaccgactcggtctcgagccacaagcacaaagacgggaagaagaagaagacaaggcgcatcaaggagatcgtgtactatgacagcgacgaatcttcctcttcccaaaaggacgacgactacgagaaaaagaaaacggtcaattcgaacttttcttttgattactctcgtattcctcaaagtacaaatgctcatttattatctattccacttggtaaacctcctcattttgatggagaagactacggattttggagtcacaaaatgcgtagtcacttgttctctctccatcctagtatatgggagattgtagagagtggagtgcactttgatagtacggatagtcccatgttcattaatgagcaaattcataaaaatgcacaagctactactgttcttctagcttcattgtgcagggatgaataccacaaagtgagcggcttggataacgccaaacaaatttgggacaccctcaagatctctcatgaggggaatgacgtcacaatgctcaccaagatggagttggtggagggcgaactcgggagattcgctatgataaggggagaagagccaacccaaacgtacaaccggctcaagacccttgtcaacaagataagaagctatggaagcacgcgatggacggaccacgacgtcgtccgcctaatgctaaggtcttttactgtccttgatcctcatcttgtaaacaatattcgtgagagtcctagtgggcgaatgatgatcaaggaagcaagatacgtggacgacgcattgaatggtccaatcaatgagcctcaacctcttgctctcaaggcaacaagaagcaaggagacgctacctagcaaggtagcacaaattgaggcggtcggacttaatgatgaagagatggctctcatcatcaagagattcaagacggcgctaaaaggtcgcaaggggcagccaagcaagaccaagacaaaggggaagcgctcatgcttcaaatgtggtaagcttggtcattttattgctaactgtcccgataatgatagtgatcaggatcaagggaacaagagggagaagaagaagaactataagaaggcaaagggcgaggcgcatctaggcaaggagtgggattcggattgctcctcttctgactccgacaatgaaggactcgccgccaccgccttcaacaagtcatccctcttccccaacgagcgtcacacatgccttatggcaagggagaagaag

SEQ ID NO: 119133 - DNA, 831 bp, Zea mays
  unsure (1)..(831): unsure at all n locations
  Clone ID: MRT4577_40132C.1
attgggtacctcgaggccggccgggattctcttccagagtacgaactacgaagacccgacaggccgacacccgctcgtctcccctcgcacgtaggcggcgcaaccggaccccctccccctccagatcggtgctccgctgggagatctcctcgtgcaggcgccgaatctcttcgtcgtctcttccaagcacggttggcagcacaatagatctgtttgcaagcattctttggtactacttcaaggctttgatgattgctttacagcgccgatatggcctcccgcccaaagctgtctggtattcagaagcaggttttggcgctgtacaggggattccttcgaacagcacgtcttaaggcccctgaagagcgccacaggatcgagtccgttgtcttggcagagttccgtgacaaggcaaagagtgttgaccgtaggaactttatacatatcgagtacttgttgaggagtgggaagaagcagcttgagcagctcaagaatcctgatattactggacttgctacccttgtagtaaagaaatgagaaacagttgttgaaatttacaggtccattcattgccagaacaaagcatcatcatggtaccggtgtttctagtatgaacatttgggacctgccactgatggtgtccaaataaaacaaatatgaccatacattacagattttgatatccagggactttctggggttttctaattagcctattgggatcttaagataaatcttgtagcccctgtccagtgactcagagtaatattgttttactgtnctttgtgtaagcagaggttagcattaacaaaacatgtgattggtctgaac
